United States Patent Application Publication US 2005/0255487 A1 - sequence listing, part 21

SEQ ID NO: 559340 - RNA, 19 nt, Homo sapiens
  misc_RNA (1)...(19): siRNA sense strand
ucauggacuuggccacgua

SEQ ID NO: 559341 - RNA, 19 nt, Homo sapiens
  misc_RNA (1)...(19): siRNA sense strand
gaaggaaugcgccaagacu

SEQ ID NO: 559342 - RNA, 19 nt, Homo sapiens
  misc_RNA (1)...(19): siRNA sense strand
cagggaucaugcucacuuu

SEQ ID NO: 559343 - RNA, 19 nt, Homo sapiens
  misc_RNA (1)...(19): siRNA sense strand
ccaguacucggaugaagaa

SEQ ID NO: 559344 - RNA, 19 nt, Homo sapiens
  misc_RNA (1)...(19): siRNA sense strand
ggucaagcuuuccguguac

SEQ ID NO: 559345 - RNA, 19 nt, Homo sapiens
  misc_RNA (1)...(19): siRNA sense strand
uaaagaacuggaagaagga

SEQ ID NO: 559346 - RNA, 19 nt, Homo sapiens
  misc_RNA (1)...(19): siRNA sense strand
cucagugucuuacucauug

SEQ ID NO: 559347 - RNA, 19 nt, Homo sapiens
  misc_RNA (1)...(19): siRNA sense strand
ucaagcugaugaacgaaau

SEQ ID NO: 559348 - RNA, 19 nt, Homo sapiens
  misc_RNA (1)...(19): siRNA sense strand
ggaucaugcucacuuucug

SEQ ID NO: 559349 - RNA, 19 nt, Homo sapiens
  misc_RNA (1)...(19): siRNA sense strand
cagcagcuccuccuccuau

SEQ ID NO: 559350 - RNA, 19 nt, Homo sapiens
  misc_RNA (1)...(19): siRNA sense strand
gcacagcaugagcuacuug

SEQ ID NO: 559351 - RNA, 19 nt, Homo sapiens
  misc_RNA (1)...(19): siRNA sense strand
ggaucaaagugcuaaagcu

SEQ ID NO: 559352 - RNA, 19 nt, Homo sapiens
  misc_RNA (1)...(19): siRNA sense strand
gaugaacgaaauucucaau

SEQ ID NO: 559353 - RNA, 19 nt, Homo sapiens
  misc_RNA (1)...(19): siRNA sense strand
gcccgucaaugcugugaug

SEQ ID NO: 559354 - RNA, 19 nt, Homo sapiens
  misc_RNA (1)...(19): siRNA sense strand
augaggagguggaggcuuu

SEQ ID NO: 559355 - RNA, 19 nt, Homo sapiens
  misc_RNA (1)...(19): siRNA sense strand
ccaagguggaugcgaauga

SEQ ID NO: 559356 - RNA, 19 nt, Homo sapiens
  misc_RNA (1)...(19): siRNA sense strand
ucaaacgccugaggaucuu

SEQ ID NO: 559357 - RNA, 19 nt, Homo sapiens
  misc_RNA (1)...(19): siRNA sense strand
ggucagcccaacucucuug

SEQ ID NO: 559358 - RNA, 19 nt, Homo sapiens
  misc_RNA (1)...(19): siRNA sense strand
gaccaugaaugugcagaag

SEQ ID NO: 559359 - RNA, 19 nt, Homo sapiens
  misc_RNA (1)...(19): siRNA sense strand
auuggugccugcaucguua

SEQ ID NO: 559360 - RNA, 19 nt, Homo sapiens
  misc_RNA (1)...(19): siRNA sense strand
gggaaggaagcaaagcaaa

SEQ ID NO: 559361 - RNA, 19 nt, Homo sapiens
  misc_RNA (1)...(19): siRNA sense strand
gggcccuacuuccucauga

SEQ ID NO: 559362 - RNA, 19 nt, Homo sapiens
  misc_RNA (1)...(19): siRNA sense strand
guucaugggcucccuguuc

SEQ ID NO: 559363 - RNA, 19 nt, Homo sapiens
  misc_RNA (1)...(19): siRNA sense strand
cagggcaggucaagcuuuc

SEQ ID NO: 559364 - RNA, 19 nt, Homo sapiens
  misc_RNA (1)...(19): siRNA sense strand
ugauggcgaugaagaccaa

SEQ ID NO: 559365 - RNA, 19 nt, Homo sapiens
  misc_RNA (1)...(19): siRNA sense strand
gagauugucaaccucaugu

SEQ ID NO: 559366 - RNA, 19 nt, Homo sapiens
  misc_RNA (1)...(19): siRNA sense strand
acaccgugcugcuguuugu

SEQ ID NO: 559367 - RNA, 19 nt, Homo sapiens
  misc_RNA (1)...(19): siRNA sense strand
ucuuaaaguugcucaucaa

SEQ ID NO: 559368 - RNA, 19 nt, Homo sapiens
  misc_RNA (1)...(19): siRNA sense strand
ucccggaggucaucaagau

SEQ ID NO: 559369 - RNA, 19 nt, Homo sapiens
  misc_RNA (1)...(19): siRNA sense strand
ggacagugcagggaagcaa

SEQ ID NO: 559370 - RNA, 19 nt, Homo sapiens
  misc_RNA (1)...(19): siRNA sense strand
ggagguggaggcuuugauc

SEQ ID NO: 559371 - RNA, 19 nt, Homo sapiens
  misc_RNA (1)...(19): siRNA sense strand
gcaggucaccacguacuug

SEQ ID NO: 559372 - RNA, 19 nt, Homo sapiens
  misc_RNA (1)...(19): siRNA sense strand
agaaggaggagaccuggaa

SEQ ID NO: 559373 - RNA, 19 nt, Homo sapiens
  misc_RNA (1)...(19): siRNA sense strand
ucgugugggugccuuguuu

SEQ ID NO: 559374 - RNA, 19 nt, Homo sapiens
  misc_RNA (1)...(19): siRNA sense strand
ccacaucugcuucgucagu

SEQ ID NO: 559375 - RNA, 19 nt, Homo sapiens
  misc_RNA (1)...(19): siRNA sense strand
gcaccaguacuuccacauc

SEQ ID NO: 559376 - RNA, 19 nt, Homo sapiens
  misc_RNA (1)...(19): siRNA sense strand
gaugacaccucucaacaaa

SEQ ID NO: 559377 - RNA, 19 nt, Homo sapiens
  misc_RNA (1)...(19): siRNA sense strand
uaaaguugcucaucaaguu

SEQ ID NO: 559378 - RNA, 19 nt, Homo sapiens
  misc_RNA (1)...(19): siRNA sense strand
ggaagcaacugcagagaca

SEQ ID NO: 559379 - RNA, 19 nt, Homo sapiens
  misc_RNA (1)...(19): siRNA sense strand
ccaaggagcuggacacagu

SEQ ID NO: 559380 - RNA, 19 nt, Homo sapiens
  misc_RNA (1)...(19): siRNA sense strand
caacgagucugccgaagga

SEQ ID NO: 559381 - RNA, 19 nt, Homo sapiens
  misc_RNA (1)...(19): siRNA sense strand
gaucaagaccgcugucauu

SEQ ID NO: 559382 - RNA, 19 nt, Homo sapiens
  misc_RNA (1)...(19): siRNA sense strand
caaagcaaauggagaaugg

SEQ ID NO: 559383 - RNA, 19 nt, Homo sapiens
  misc_RNA (1)...(19): siRNA sense strand
gggcagaccucuucuacuc

SEQ ID NO: 559384 - RNA, 19 nt, Homo sapiens
  misc_RNA (1)...(19): siRNA sense strand
ccacguacauuaacaugau

SEQ ID NO: 559385 - RNA, 19 nt, Homo sapiens
  misc_RNA (1)...(19): siRNA sense strand
gaccgaggcuacauucaga

SEQ ID NO: 559386 - RNA, 19 nt, Homo sapiens
  misc_RNA (1)...(19): siRNA sense strand
uggagaggcucaaggagua

SEQ ID NO: 559387 - RNA, 19 nt, Homo sapiens
  misc_RNA (1)...(19): siRNA sense strand
gcagaccucuucuacucuu

SEQ ID NO: 559388 - RNA, 19 nt, Homo sapiens
  misc_RNA (1)...(19): siRNA sense strand
gaaggaagcaaagcaaaug

SEQ ID NO: 559389 - RNA, 19 nt, Homo sapiens
  misc_RNA (1)...(19): siRNA sense strand
ggccgcagaucuuaaaguu

SEQ ID NO: 559390 - RNA, 19 nt, Homo sapiens
  misc_RNA (1)...(19): siRNA sense strand
gaccuccgcuucaagauca

SEQ ID NO: 559391 - RNA, 19 nt, Homo sapiens
  misc_RNA (1)...(19): siRNA sense strand
aaggagaaauccaggagua

SEQ ID NO: 559392 - RNA, 19 nt, Homo sapiens
  misc_RNA (1)...(19): siRNA sense strand
caucugaaauggaaaccaa

SEQ ID NO: 559393 - RNA, 19 nt, Homo sapiens
  misc_RNA (1)...(19): siRNA sense strand
gcaacugcaucguucuguu

SEQ ID NO: 559394 - RNA, 19 nt, Homo sapiens
  misc_RNA (1)...(19): siRNA sense strand
ggaaagaagucggggcaua

SEQ ID NO: 559395 - RNA, 19 nt, Homo sapiens
  misc_RNA (1)...(19): siRNA sense strand
ugaacgaaauucucaaugg

SEQ ID NO: 559396 - RNA, 19 nt, Homo sapiens
  misc_RNA (1)...(19): siRNA sense strand
caagcuagaccaugaaugu

SEQ ID NO: 559397 - RNA, 19 nt, Homo sapiens
  misc_RNA (1)...(19): siRNA sense strand
guacucggaugaagaaguc

SEQ ID NO: 559398 - RNA, 19 nt, Homo sapiens
  misc_RNA (1)...(19): siRNA sense strand
gagaggaccuggacuucgu

SEQ ID NO: 559399 - RNA, 19 nt, Homo sapiens
  misc_RNA (1)...(19): siRNA sense strand
caacugcaucguucuguuu

SEQ ID NO: 559400 - RNA, 19 nt, Homo sapiens
  misc_RNA (1)...(19): siRNA sense strand
ggacuuggccacguacauu

SEQ ID NO: 559401 - RNA, 19 nt, Homo sapiens
  misc_RNA (1)...(19): siRNA sense strand
caacagcaccgcagaacug

SEQ ID NO: 559402 - RNA, 19 nt, Homo sapiens
  misc_RNA (1)...(19): siRNA sense strand
ggaaggaagcaaagcaaau

SEQ ID NO: 559403 - RNA, 19 nt, Homo sapiens
  misc_RNA (1)...(19): siRNA sense strand
gaucaaagugcuaaagcuu

SEQ ID NO: 559404 - RNA, 19 nt, Homo sapiens
  misc_RNA (1)...(19): siRNA sense strand
ugaaggugcugaagaaguc

SEQ ID NO: 559405 - RNA, 19 nt, Homo sapiens
  misc_RNA (1)...(19): siRNA sense strand
gcagagaggucuuuucuac

SEQ ID NO: 559406 - RNA, 19 nt, Homo sapiens
  misc_RNA (1)...(19): siRNA sense strand
ggaucuuucucucccauga

SEQ ID NO: 559407 - RNA, 19 nt, Homo sapiens
  misc_RNA (1)...(19): siRNA sense strand
cgaugaagaccaagacgua

SEQ ID NO: 559408 - RNA, 19 nt, Homo sapiens
  misc_RNA (1)...(19): siRNA sense strand
gcaucaacaucgccaagau

SEQ ID NO: 559409 - RNA, 19 nt, Homo sapiens
  misc_RNA (1)...(19): siRNA sense strand
gcugguagcccuagugugu

SEQ ID NO: 559410 - RNA, 19 nt, Homo sapiens
  misc_RNA (1)...(19): siRNA sense strand
agaaccagaaggccuauua

SEQ ID NO: 559411 - RNA, 19 nt, Homo sapiens
  misc_RNA (1)...(19): siRNA sense strand
ggacucaggagcacacgaa

SEQ ID NO: 559412 - RNA, 19 nt, Homo sapiens
  misc_RNA (1)...(19): siRNA sense strand
ccugggagcuggcauucaa

SEQ ID NO: 559413 - RNA, 19 nt, Homo sapiens
  misc_RNA (1)...(19): siRNA sense strand
cgaaagagaguuccaaggu

SEQ ID NO: 559414 - RNA, 19 nt, Homo sapiens
  misc_RNA (1)...(19): siRNA sense strand
uggcugagauggacaaagu

SEQ ID NO: 559415 - RNA, 19 nt, Homo sapiens
  misc_RNA (1)...(19): siRNA sense strand
gaagucugccuaccuguca

SEQ ID NO: 559416 - RNA, 19 nt, Homo sapiens
  misc_RNA (1)...(19): siRNA sense strand
cauugcaggucaccacgua

SEQ ID NO: 559417 - RNA, 19 nt, Homo sapiens
  misc_RNA (1)...(19): siRNA sense strand
cugacaagcuagaccauga

SEQ ID NO: 559418 - RNA, 19 nt, Homo sapiens
  misc_RNA (1)...(19): siRNA sense strand
ucuguuugcugcccuguuu

SEQ ID NO: 559419 - RNA, 19 nt, Homo sapiens
  misc_RNA (1)...(19): siRNA sense strand
gaccuggacuucguucuca

SEQ ID NO: 559420 - RNA, 19 nt, Homo sapiens
  misc_RNA (1)...(19): siRNA sense strand
gcaaagacaaucggaucaa

SEQ ID NO: 559421 - RNA, 19 nt, Homo sapiens
  misc_RNA (1)...(19): siRNA sense strand
gaaauucucaaugggauca

SEQ ID NO: 559422 - RNA, 19 nt, Homo sapiens
  misc_RNA (1)...(19): siRNA sense strand
caaagacaaucggaucaag

SEQ ID NO: 559423 - RNA, 19 nt, Homo sapiens
  misc_RNA (1)...(19): siRNA sense strand
cucaugagcuucuucuuca

SEQ ID NO: 559424 - RNA, 19 nt, Homo sapiens
  misc_RNA (1)...(19): siRNA sense strand
aaggagagaucaucaucga

SEQ ID NO: 559425 - RNA, 19 nt, Homo sapiens
  misc_RNA (1)...(19): siRNA sense strand
gagcugaaggugcugaaga

SEQ ID NO: 559426 - RNA, 19 nt, Homo sapiens
  misc_RNA (1)...(19): siRNA sense strand
uggaaugucacguggaaua

SEQ ID NO: 559427 - RNA, 19 nt, Homo sapiens
  misc_RNA (1)...(19): siRNA sense strand
ggaaggcccuggugaucac

SEQ ID NO: 559428 - RNA, 19 nt, Homo sapiens
  misc_RNA (1)...(19): siRNA sense strand
ccacgcugcuugcuaccuu

SEQ ID NO: 559429 - RNA, 19 nt, Homo sapiens
  misc_RNA (1)...(19): siRNA sense strand
gcgagugucucccucaaac

SEQ ID NO: 559430 - RNA, 19 nt, Homo sapiens
  misc_RNA (1)...(19): siRNA sense strand
ggacacgucggaacaaguc

SEQ ID NO: 559431 - RNA, 19 nt, Homo sapiens
  misc_RNA (1)...(19): siRNA sense strand
gaguggaauuccggaacua

SEQ ID NO: 559432 - RNA, 19 nt, Homo sapiens
  misc_RNA (1)...(19): siRNA sense strand
caaggaguauucagagacu

SEQ ID NO: 559433 - RNA, 19 nt, Homo sapiens
  misc_RNA (1)...(19): siRNA sense strand
cacaagggaucgccguguu

SEQ ID NO: 559434 - RNA, 19 nt, Homo sapiens
  misc_RNA (1)...(19): siRNA sense strand
gcgcuggcuuccaacuauu

SEQ ID NO: 559435 - RNA, 19 nt, Homo sapiens
  misc_RNA (1)...(19): siRNA sense strand
guacugggacuacaugaag

SEQ ID NO: 559436 - RNA, 19 nt, Homo sapiens
  misc_RNA (1)...(19): siRNA sense strand
gcaaagcaaauggagaaug

SEQ ID NO: 559437 - RNA, 19 nt, Homo sapiens
  misc_RNA (1)...(19): siRNA sense strand
aagcaaagcaaauggagaa

SEQ ID NO: 559438 - RNA, 19 nt, Homo sapiens
  misc_RNA (1)...(19): siRNA sense strand
gcagguggacgucaucauc

SEQ ID NO: 559439 - RNA, 19 nt, Homo sapiens
  misc_RNA (1)...(19): siRNA sense strand
gacuuggccacguacauua

SEQ ID NO: 559440 - RNA, 19 nt, Homo sapiens
  misc_RNA (1)...(19): siRNA sense strand
ucauggacuuggccacgua

SEQ ID NO: 559441 - RNA, 19 nt, Homo sapiens
  misc_RNA (1)...(19): siRNA sense strand
gaaggaaugcgccaagacu

SEQ ID NO: 559442 - RNA, 19 nt, Homo sapiens
  misc_RNA (1)...(19): siRNA sense strand
cagggaucaugcucacuuu

SEQ ID NO: 559443 - RNA, 19 nt, Homo sapiens
  misc_RNA (1)...(19): siRNA sense strand
ccaguacucggaugaagaa

SEQ ID NO: 559444 - RNA, 19 nt, Homo sapiens
  misc_RNA (1)...(19): siRNA sense strand
ggucaagcuuuccguguac

SEQ ID NO: 559445 - RNA, 19 nt, Homo sapiens
  misc_RNA (1)...(19): siRNA sense strand
uaaagaacuggaagaagga

SEQ ID NO: 559446 - RNA, 19 nt, Homo sapiens
  misc_RNA (1)...(19): siRNA sense strand
cucagugucuuacucauug

SEQ ID NO: 559447 - RNA, 19 nt, Homo sapiens
  misc_RNA (1)...(19): siRNA sense strand
ucaagcugaugaacgaaau

SEQ ID NO: 559448 - RNA, 19 nt, Homo sapiens
  misc_RNA (1)...(19): siRNA sense strand
ggaucaugcucacuuucug

SEQ ID NO: 559449 - RNA, 19 nt, Homo sapiens
  misc_RNA (1)...(19): siRNA sense strand
cagcagcuccuccuccuau

SEQ ID NO: 559450 - RNA, 19 nt, Homo sapiens
  misc_RNA (1)...(19): siRNA sense strand
gcacagcaugagcuacuug

SEQ ID NO: 559451 - RNA, 19 nt, Homo sapiens
  misc_RNA (1)...(19): siRNA sense strand
ggaucaaagugcuaaagcu

SEQ ID NO: 559452 - RNA, 19 nt, Homo sapiens
  misc_RNA (1)...(19): siRNA sense strand
gaugaacgaaauucucaau

SEQ ID NO: 559453 - RNA, 19 nt, Homo sapiens
  misc_RNA (1)...(19): siRNA sense strand
gcccgucaaugcugugaug

SEQ ID NO: 559454 - RNA, 19 nt, Homo sapiens
  misc_RNA (1)...(19): siRNA sense strand
augaggagguggaggcuuu

SEQ ID NO: 559455 - RNA, 19 nt, Homo sapiens
  misc_RNA (1)...(19): siRNA sense strand
ccaagguggaugcgaauga

SEQ ID NO: 559456 - RNA, 19 nt, Homo sapiens
  misc_RNA (1)...(19): siRNA sense strand
ucaaacgccugaggaucuu

SEQ ID NO: 559457 - RNA, 19 nt, Homo sapiens
  misc_RNA (1)...(19): siRNA sense strand
ggucagcccaacucucuug

SEQ ID NO: 559458 - RNA, 19 nt, Homo sapiens
  misc_RNA (1)...(19): siRNA sense strand
gaccaugaaugugcagaag

SEQ ID NO: 559459 - RNA, 19 nt, Homo sapiens
  misc_RNA (1)...(19): siRNA sense strand
auuggugccugcaucguua

SEQ ID NO: 559460 - RNA, 19 nt, Homo sapiens
  misc_RNA (1)...(19): siRNA sense strand
gggaaggaagcaaagcaaa

SEQ ID NO: 559461 - RNA, 19 nt, Homo sapiens
  misc_RNA (1)...(19): siRNA sense strand
gggcccuacuuccucauga

SEQ ID NO: 559462 - RNA, 19 nt, Homo sapiens
  misc_RNA (1)...(19): siRNA sense strand
guucaugggcucccuguuc

SEQ ID NO: 559463 - RNA, 19 nt, Homo sapiens
  misc_RNA (1)...(19): siRNA sense strand
cagggcaggucaagcuuuc

SEQ ID NO: 559464 - RNA, 19 nt, Homo sapiens
  misc_RNA (1)...(19): siRNA sense strand
ugauggcgaugaagaccaa

SEQ ID NO: 559465 - RNA, 19 nt, Homo sapiens
  misc_RNA (1)...(19): siRNA sense strand
gagauugucaaccucaugu

SEQ ID NO: 559466 - RNA, 19 nt, Homo sapiens
  misc_RNA (1)...(19): siRNA sense strand
acaccgugcugcuguuugu

SEQ ID NO: 559467 - RNA, 19 nt, Homo sapiens
  misc_RNA (1)...(19): siRNA sense strand
ucuuaaaguugcucaucaa

SEQ ID NO: 559468 - RNA, 19 nt, Homo sapiens
  misc_RNA (1)...(19): siRNA sense strand
ucccggaggucaucaagau

SEQ ID NO: 559469 - RNA, 19 nt, Homo sapiens
  misc_RNA (1)...(19): siRNA sense strand
ggacagugcagggaagcaa

SEQ ID NO: 559470 - RNA, 19 nt, Homo sapiens
  misc_RNA (1)...(19): siRNA sense strand
ggagguggaggcuuugauc

SEQ ID NO: 559471 - RNA, 19 nt, Homo sapiens
  misc_RNA (1)...(19): siRNA sense strand
gcaggucaccacguacuug

SEQ ID NO: 559472 - RNA, 19 nt, Homo sapiens
  misc_RNA (1)...(19): siRNA sense strand
agaaggaggagaccuggaa

SEQ ID NO: 559473 - RNA, 19 nt, Homo sapiens
  misc_RNA (1)...(19): siRNA sense strand
ucgugugggugccuuguuu

SEQ ID NO: 559474 - RNA, 19 nt, Homo sapiens
  misc_RNA (1)...(19): siRNA sense strand
ccacaucugcuucgucagu

SEQ ID NO: 559475 - RNA, 19 nt, Homo sapiens
  misc_RNA (1)...(19): siRNA sense strand
gcaccaguacuuccacauc

SEQ ID NO: 559476 - RNA, 19 nt, Homo sapiens
  misc_RNA (1)...(19): siRNA sense strand
gaugacaccucucaacaaa

SEQ ID NO: 559477 - RNA, 19 nt, Homo sapiens
  misc_RNA (1)...(19): siRNA sense strand
uaaaguugcucaucaaguu

SEQ ID NO: 559478 - RNA, 19 nt, Homo sapiens
  misc_RNA (1)...(19): siRNA sense strand
ggaagcaacugcagagaca

SEQ ID NO: 559479 - RNA, 19 nt, Homo sapiens
  misc_RNA (1)...(19): siRNA sense strand
ccaaggagcuggacacagu

SEQ ID NO: 559480 - RNA, 19 nt, Homo sapiens
  misc_RNA (1)...(19): siRNA sense strand
caacgagucugccgaagga

SEQ ID NO: 559481 - RNA, 19 nt, Homo sapiens
  misc_RNA (1)...(19): siRNA sense strand
gaucaagaccgcugucauu

SEQ ID NO: 559482 - RNA, 19 nt, Homo sapiens
  misc_RNA (1)...(19): siRNA sense strand
caaagcaaauggagaaugg

SEQ ID NO: 559483 - RNA, 19 nt, Homo sapiens
  misc_RNA (1)...(19): siRNA sense strand
gggcagaccucuucuacuc

SEQ ID NO: 559484 - RNA, 19 nt, Homo sapiens
  misc_RNA (1)...(19): siRNA sense strand
ccacguacauuaacaugau

SEQ ID NO: 559485 - RNA, 19 nt, Homo sapiens
  misc_RNA (1)...(19): siRNA sense strand
gaccgaggcuacauucaga

SEQ ID NO: 559486 - RNA, 19 nt, Homo sapiens
  misc_RNA (1)...(19): siRNA sense strand
uggagaggcucaaggagua

SEQ ID NO: 559487 - RNA, 19 nt, Homo sapiens
  misc_RNA (1)...(19): siRNA sense strand
gcagaccucuucuacucuu

SEQ ID NO: 559488 - RNA, 19 nt, Homo sapiens
  misc_RNA (1)...(19): siRNA sense strand
gaaggaagcaaagcaaaug

SEQ ID NO: 559489 - RNA, 19 nt, Homo sapiens
  misc_RNA (1)...(19): siRNA sense strand
ggccgcagaucuuaaaguu

SEQ ID NO: 559490 - RNA, 19 nt, Homo sapiens
  misc_RNA (1)...(19): siRNA sense strand
gaccuccgcuucaagauca

SEQ ID NO: 559491 - RNA, 19 nt, Homo sapiens
  misc_RNA (1)...(19): siRNA sense strand
aaggagaaauccaggagua

SEQ ID NO: 559492 - RNA, 19 nt, Homo sapiens
  misc_RNA (1)...(19): siRNA sense strand
caucugaaauggaaaccaa

SEQ ID NO: 559493 - RNA, 19 nt, Homo sapiens
  misc_RNA (1)...(19): siRNA sense strand
gcaacugcaucguucuguu

SEQ ID NO: 559494 - RNA, 19 nt, Homo sapiens
  misc_RNA (1)...(19): siRNA sense strand
ggaaagaagucggggcaua

SEQ ID NO: 559495 - RNA, 19 nt, Homo sapiens
  misc_RNA (1)...(19): siRNA sense strand
ugaacgaaauucucaaugg

SEQ ID NO: 559496 - RNA, 19 nt, Homo sapiens
  misc_RNA (1)...(19): siRNA sense strand
caagcuagaccaugaaugu

SEQ ID NO: 559497 - RNA, 19 nt, Homo sapiens
  misc_RNA (1)...(19): siRNA sense strand
guacucggaugaagaaguc

SEQ ID NO: 559498 - RNA, 19 nt, Homo sapiens
  misc_RNA (1)...(19): siRNA sense strand
gagaggaccuggacuucgu

SEQ ID NO: 559499 - RNA, 19 nt, Homo sapiens
  misc_RNA (1)...(19): siRNA sense strand
caacugcaucguucuguuu

SEQ ID NO: 559500 - RNA, 19 nt, Homo sapiens
  misc_RNA (1)...(19): siRNA sense strand
ggacuuggccacguacauu

SEQ ID NO: 559501 - RNA, 19 nt, Homo sapiens
  misc_RNA (1)...(19): siRNA sense strand
caacagcaccgcagaacug

SEQ ID NO: 559502 - RNA, 19 nt, Homo sapiens
  misc_RNA (1)...(19): siRNA sense strand
ggaaggaagcaaagcaaau

SEQ ID NO: 559503 - RNA, 19 nt, Homo sapiens
  misc_RNA (1)...(19): siRNA sense strand
gaucaaagugcuaaagcuu

SEQ ID NO: 559504 - RNA, 19 nt, Homo sapiens
  misc_RNA (1)...(19): siRNA sense strand
ugaaggugcugaagaaguc

SEQ ID NO: 559505 - RNA, 19 nt, Homo sapiens
  misc_RNA (1)...(19): siRNA sense strand
gcagagaggucuuuucuac

SEQ ID NO: 559506 - RNA, 19 nt, Homo sapiens
  misc_RNA (1)...(19): siRNA sense strand
ggaucuuucucucccauga

SEQ ID NO: 559507 - RNA, 19 nt, Homo sapiens
  misc_RNA (1)...(19): siRNA sense strand
cgaugaagaccaagacgua

SEQ ID NO: 559508 - RNA, 19 nt, Homo sapiens
  misc_RNA (1)...(19): siRNA sense strand
gcaucaacaucgccaagau

SEQ ID NO: 559509 - RNA, 19 nt, Homo sapiens
  misc_RNA (1)...(19): siRNA sense strand
gcugguagcccuagugugu

SEQ ID NO: 559510 - RNA, 19 nt, Homo sapiens
  misc_RNA (1)...(19): siRNA sense strand
agaaccagaaggccuauua

SEQ ID NO: 559511 - RNA, 19 nt, Homo sapiens
  misc_RNA (1)...(19): siRNA sense strand
ggacucaggagcacacgaa

SEQ ID NO: 559512 - RNA, 19 nt, Homo sapiens
  misc_RNA (1)...(19): siRNA sense strand
ccugggagcuggcauucaa

SEQ ID NO: 559513 - RNA, 19 nt, Homo sapiens
  misc_RNA (1)...(19): siRNA sense strand
cgaaagagaguuccaaggu

SEQ ID NO: 559514 - RNA, 19 nt, Homo sapiens
  misc_RNA (1)...(19): siRNA sense strand
uggcugagauggacaaagu

SEQ ID NO: 559515 - RNA, 19 nt, Homo sapiens
  misc_RNA (1)...(19): siRNA sense strand
gaagucugccuaccuguca

SEQ ID NO: 559516 - RNA, 19 nt, Homo sapiens
  misc_RNA (1)...(19): siRNA sense strand
cauugcaggucaccacgua

SEQ ID NO: 559517 - RNA, 19 nt, Homo sapiens
  misc_RNA (1)...(19): siRNA sense strand
cugacaagcuagaccauga

SEQ ID NO: 559518 - RNA, 19 nt, Homo sapiens
  misc_RNA (1)...(19): siRNA sense strand
ucuguuugcugcccuguuu

SEQ ID NO: 559519 - RNA, 19 nt, Homo sapiens
  misc_RNA (1)...(19): siRNA sense strand
gaccuggacuucguucuca

SEQ ID NO: 559520 - RNA, 19 nt, Homo sapiens
  misc_RNA (1)...(19): siRNA sense strand
gcaaagacaaucggaucaa

SEQ ID NO: 559521 - RNA, 19 nt, Homo sapiens
  misc_RNA (1)...(19): siRNA sense strand
gaaauucucaaugggauca

SEQ ID NO: 559522 - RNA, 19 nt, Homo sapiens
  misc_RNA (1)...(19): siRNA sense strand
caaagacaaucggaucaag

SEQ ID NO: 559523 - RNA, 19 nt, Homo sapiens
  misc_RNA (1)...(19): siRNA sense strand
cucaugagcuucuucuuca

SEQ ID NO: 559524 - RNA, 19 nt, Homo sapiens
  misc_RNA (1)...(19): siRNA sense strand
aaggagagaucaucaucga

SEQ ID NO: 559525 - RNA, 19 nt, Homo sapiens
  misc_RNA (1)...(19): siRNA sense strand
gagcugaaggugcugaaga

SEQ ID NO: 559526 - RNA, 19 nt, Homo sapiens
  misc_RNA (1)...(19): siRNA sense strand
uggaaugucacguggaaua

SEQ ID NO: 559527 - RNA, 19 nt, Homo sapiens
  misc_RNA (1)...(19): siRNA sense strand
ggaaggcccuggugaucac

SEQ ID NO: 559528 - RNA, 19 nt, Homo sapiens
  misc_RNA (1)...(19): siRNA sense strand
ccacgcugcuugcuaccuu

SEQ ID NO: 559529 - RNA, 19 nt, Homo sapiens
  misc_RNA (1)...(19): siRNA sense strand
gcgagugucucccucaaac

SEQ ID NO: 559530 - RNA, 19 nt, Homo sapiens
  misc_RNA (1)...(19): siRNA sense strand
ggacacgucggaacaaguc

SEQ ID NO: 559531 - RNA, 19 nt, Homo sapiens
  misc_RNA (1)...(19): siRNA sense strand
gaguggaauuccggaacua

SEQ ID NO: 559532 - RNA, 19 nt, Homo sapiens
  misc_RNA (1)...(19): siRNA sense strand
caaggaguauucagagacu

SEQ ID NO: 559533 - RNA, 19 nt, Homo sapiens
  misc_RNA (1)...(19): siRNA sense strand
cacaagggaucgccguguu

SEQ ID NO: 559534 - RNA, 19 nt, Homo sapiens
  misc_RNA (1)...(19): siRNA sense strand
gcgcuggcuuccaacuauu

SEQ ID NO: 559535 - RNA, 19 nt, Homo sapiens
  misc_RNA (1)...(19): siRNA sense strand
guacugggacuacaugaag

SEQ ID NO: 559536 - RNA, 19 nt, Homo sapiens
  misc_RNA (1)...(19): siRNA sense strand
gcaaagcaaauggagaaug

SEQ ID NO: 559537 - RNA, 19 nt, Homo sapiens
  misc_RNA (1)...(19): siRNA sense strand
aagcaaagcaaauggagaa

SEQ ID NO: 559538 - RNA, 19 nt, Homo sapiens
  misc_RNA (1)...(19): siRNA sense strand
gcagguggacgucaucauc

SEQ ID NO: 559539 - RNA, 19 nt, Homo sapiens
  misc_RNA (1)...(19): siRNA sense strand
gacuuggccacguacauua

SEQ ID NO: 559540 - RNA, 19 nt, Homo sapiens
  misc_RNA (1)...(19): siRNA sense strand
ucauggacuuggccacgua

SEQ ID NO: 559541 - RNA, 19 nt, Homo sapiens
  misc_RNA (1)...(19): siRNA sense strand
gaaggaaugcgccaagacu

SEQ ID NO: 559542 - RNA, 19 nt, Homo sapiens
  misc_RNA (1)...(19): siRNA sense strand
cagggaucaugcucacuuu

SEQ ID NO: 559543 - RNA, 19 nt, Homo sapiens
  misc_RNA (1)...(19): siRNA sense strand
ccaguacucggaugaagaa

SEQ ID NO: 559544 - RNA, 19 nt, Homo sapiens
  misc_RNA (1)...(19): siRNA sense strand
ggucaagcuuuccguguac

SEQ ID NO: 559545 - RNA, 19 nt, Homo sapiens
  misc_RNA (1)...(19): siRNA sense strand
uaaagaacuggaagaagga

SEQ ID NO: 559546 - RNA, 19 nt, Homo sapiens
  misc_RNA (1)...(19): siRNA sense strand
cucagugucuuacucauug

SEQ ID NO: 559547 - RNA, 19 nt, Homo sapiens
  misc_RNA (1)...(19): siRNA sense strand
ucaagcugaugaacgaaau

SEQ ID NO: 559548 - RNA, 19 nt, Homo sapiens
  misc_RNA (1)...(19): siRNA sense strand
ggaucaugcucacuuucug

SEQ ID NO: 559549 - RNA, 19 nt, Homo sapiens
  misc_RNA (1)...(19): siRNA sense strand
cagcagcuccuccuccuau

SEQ ID NO: 559550 - RNA, 19 nt, Homo sapiens
  misc_RNA (1)...(19): siRNA sense strand
gcacagcaugagcuacuug

SEQ ID NO: 559551 - RNA, 19 nt, Homo sapiens
  misc_RNA (1)...(19): siRNA sense strand
ggaucaaagugcuaaagcu

SEQ ID NO: 559552 - RNA, 19 nt, Homo sapiens
  misc_RNA (1)...(19): siRNA sense strand
gaugaacgaaauucucaau

SEQ ID NO: 559553 - RNA, 19 nt, Homo sapiens
  misc_RNA (1)...(19): siRNA sense strand
gcccgucaaugcugugaug

SEQ ID NO: 559554 - RNA, 19 nt, Homo sapiens
  misc_RNA (1)...(19): siRNA sense strand
augaggagguggaggcuuu

SEQ ID NO: 559555 - RNA, 19 nt, Homo sapiens
  misc_RNA (1)...(19): siRNA sense strand
ccaagguggaugcgaauga

SEQ ID NO: 559556 - RNA, 19 nt, Homo sapiens
  misc_RNA (1)...(19): siRNA sense strand
ucaaacgccugaggaucuu

SEQ ID NO: 559557 - RNA, 19 nt, Homo sapiens
  misc_RNA (1)...(19): siRNA sense strand
ggucagcccaacucucuug

SEQ ID NO: 559558 - RNA, 19 nt, Homo sapiens
  misc_RNA (1)...(19): siRNA sense strand
gaccaugaaugugcagaag

SEQ ID NO: 559559 - RNA, 19 nt, Homo sapiens
  misc_RNA (1)...(19): siRNA sense strand
auuggugccugcaucguua

SEQ ID NO: 559560 - RNA, 19 nt, Homo sapiens
  misc_RNA (1)...(19): siRNA sense strand
gggaaggaagcaaagcaaa

SEQ ID NO: 559561 - RNA, 19 nt, Homo sapiens
  misc_RNA (1)...(19): siRNA sense strand
gggcccuacuuccucauga

SEQ ID NO: 559562 - RNA, 19 nt, Homo sapiens
  misc_RNA (1)...(19): siRNA sense strand
guucaugggcucccuguuc

SEQ ID NO: 559563 - RNA, 19 nt, Homo sapiens
  misc_RNA (1)...(19): siRNA sense strand
cagggcaggucaagcuuuc

SEQ ID NO: 559564 - RNA, 19 nt, Homo sapiens
  misc_RNA (1)...(19): siRNA sense strand
ugauggcgaugaagaccaa

SEQ ID NO: 559565 - RNA, 19 nt, Homo sapiens
  misc_RNA (1)...(19): siRNA sense strand
gagauugucaaccucaugu

SEQ ID NO: 559566 - RNA, 19 nt, Homo sapiens
  misc_RNA (1)...(19): siRNA sense strand
acaccgugcugcuguuugu

SEQ ID NO: 559567 - RNA, 19 nt, Homo sapiens
  misc_RNA (1)...(19): siRNA sense strand
ucuuaaaguugcucaucaa

SEQ ID NO: 559568 - RNA, 19 nt, Homo sapiens
  misc_RNA (1)...(19): siRNA sense strand
ucccggaggucaucaagau

SEQ ID NO: 559569 - RNA, 19 nt, Homo sapiens
  misc_RNA (1)...(19): siRNA sense strand
ggacagugcagggaagcaa

SEQ ID NO: 559570 - RNA, 19 nt, Homo sapiens
  misc_RNA (1)...(19): siRNA sense strand
ggagguggaggcuuugauc

SEQ ID NO: 559571 - RNA, 19 nt, Homo sapiens
  misc_RNA (1)...(19): siRNA sense strand
gcaggucaccacguacuug

SEQ ID NO: 559572 - RNA, 19 nt, Homo sapiens
  misc_RNA (1)...(19): siRNA sense strand
agaaggaggagaccuggaa

SEQ ID NO: 559573 - RNA, 19 nt, Homo sapiens
  misc_RNA (1)...(19): siRNA sense strand
ucgugugggugccuuguuu

SEQ ID NO: 559574 - RNA, 19 nt, Homo sapiens
  misc_RNA (1)...(19): siRNA sense strand
ccacaucugcuucgucagu

SEQ ID NO: 559575 - RNA, 19 nt, Homo sapiens
  misc_RNA (1)...(19): siRNA sense strand
gcaccaguacuuccacauc

SEQ ID NO: 559576 - RNA, 19 nt, Homo sapiens
  misc_RNA (1)...(19): siRNA sense strand
gaugacaccucucaacaaa

SEQ ID NO: 559577 - RNA, 19 nt, Homo sapiens
  misc_RNA (1)...(19): siRNA sense strand
uaaaguugcucaucaaguu

SEQ ID NO: 559578 - RNA, 19 nt, Homo sapiens
  misc_RNA (1)...(19): siRNA sense strand
ggaagcaacugcagagaca

SEQ ID NO: 559579 - RNA, 19 nt, Homo sapiens
  misc_RNA (1)...(19): siRNA sense strand
ccaaggagcuggacacagu

SEQ ID NO: 559580 - RNA, 19 nt, Homo sapiens
  misc_RNA (1)...(19): siRNA sense strand
caacgagucugccgaagga

SEQ ID NO: 559581 - RNA, 19 nt, Homo sapiens
  misc_RNA (1)...(19): siRNA sense strand
gaucaagaccgcugucauu

SEQ ID NO: 559582 - RNA, 19 nt, Homo sapiens
  misc_RNA (1)...(19): siRNA sense strand
caaagcaaauggagaaugg

SEQ ID NO: 559583 - RNA, 19 nt, Homo sapiens
  misc_RNA (1)...(19): siRNA sense strand
gggcagaccucuucuacuc

SEQ ID NO: 559584 - RNA, 19 nt, Homo sapiens
  misc_RNA (1)...(19): siRNA sense strand
ccacguacauuaacaugau

SEQ ID NO: 559585 - RNA, 19 nt, Homo sapiens
  misc_RNA (1)...(19): siRNA sense strand
gaccgaggcuacauucaga

SEQ ID NO: 559586 - RNA, 19 nt, Homo sapiens
  misc_RNA (1)...(19): siRNA sense strand
uggagaggcucaaggagua

SEQ ID NO: 559587 - RNA, 19 nt, Homo sapiens
  misc_RNA (1)...(19): siRNA sense strand
gcagaccucuucuacucuu

SEQ ID NO: 559588 - RNA, 19 nt, Homo sapiens
  misc_RNA (1)...(19): siRNA sense strand
gaaggaagcaaagcaaaug

SEQ ID NO: 559589 - RNA, 19 nt, Homo sapiens
  misc_RNA (1)...(19): siRNA sense strand
ggccgcagaucuuaaaguu

SEQ ID NO: 559590 - RNA, 19 nt, Homo sapiens
  misc_RNA (1)...(19): siRNA sense strand
gaccuccgcuucaagauca

SEQ ID NO: 559591 - RNA, 19 nt, Homo sapiens
  misc_RNA (1)...(19): siRNA sense strand
aaggagaaauccaggagua

SEQ ID NO: 559592 - RNA, 19 nt, Homo sapiens
  misc_RNA (1)...(19): siRNA sense strand
caucugaaauggaaaccaa

SEQ ID NO: 559593 - RNA, 19 nt, Homo sapiens
  misc_RNA (1)...(19): siRNA sense strand
gcaacugcaucguucuguu

SEQ ID NO: 559594 - RNA, 19 nt, Homo sapiens
  misc_RNA (1)...(19): siRNA sense strand
ggaaagaagucggggcaua

SEQ ID NO: 559595 - RNA, 19 nt, Homo sapiens
  misc_RNA (1)...(19): siRNA sense strand
ugaacgaaauucucaaugg

SEQ ID NO: 559596 - RNA, 19 nt, Homo sapiens
  misc_RNA (1)...(19): siRNA sense strand
caagcuagaccaugaaugu

SEQ ID NO: 559597 - RNA, 19 nt, Homo sapiens
  misc_RNA (1)...(19): siRNA sense strand
guacucggaugaagaaguc

SEQ ID NO: 559598 - RNA, 19 nt, Homo sapiens
  misc_RNA (1)...(19): siRNA sense strand
gagaggaccuggacuucgu

SEQ ID NO: 559599 - RNA, 19 nt, Homo sapiens
  misc_RNA (1)...(19): siRNA sense strand
caacugcaucguucuguuu

SEQ ID NO: 559600 - RNA, 19 nt, Homo sapiens
  misc_RNA (1)...(19): siRNA sense strand
ggacuuggccacguacauu

SEQ ID NO: 559601 - RNA, 19 nt, Homo sapiens
  misc_RNA (1)...(19): siRNA sense strand
caacagcaccgcagaacug

SEQ ID NO: 559602 - RNA, 19 nt, Homo sapiens
  misc_RNA (1)...(19): siRNA sense strand
ggaaggaagcaaagcaaau

SEQ ID NO: 559603 - RNA, 19 nt, Homo sapiens
  misc_RNA (1)...(19): siRNA sense strand
gaucaaagugcuaaagcuu

SEQ ID NO: 559604 - RNA, 19 nt, Homo sapiens
  misc_RNA (1)...(19): siRNA sense strand
ugaaggugcugaagaaguc

SEQ ID NO: 559605 - RNA, 19 nt, Homo sapiens
  misc_RNA (1)...(19): siRNA sense strand
gcagagaggucuuuucuac

SEQ ID NO: 559606 - RNA, 19 nt, Homo sapiens
  misc_RNA (1)...(19): siRNA sense strand
ggaucuuucucucccauga

SEQ ID NO: 559607 - RNA, 19 nt, Homo sapiens
  misc_RNA (1)...(19): siRNA sense strand
cgaugaagaccaagacgua

SEQ ID NO: 559608 - RNA, 19 nt, Homo sapiens
  misc_RNA (1)...(19): siRNA sense strand
gcaucaacaucgccaagau

SEQ ID NO: 559609 - RNA, 19 nt, Homo sapiens
  misc_RNA (1)...(19): siRNA sense strand
gcugguagcccuagugugu

SEQ ID NO: 559610 - RNA, 19 nt, Homo sapiens
  misc_RNA (1)...(19): siRNA sense strand
agaaccagaaggccuauua

SEQ ID NO: 559611 - RNA, 19 nt, Homo sapiens
  misc_RNA (1)...(19): siRNA sense strand
ggacucaggagcacacgaa

SEQ ID NO: 559612 - RNA, 19 nt, Homo sapiens
  misc_RNA (1)...(19): siRNA sense strand
ccugggagcuggcauucaa

SEQ ID NO: 559613 - RNA, 19 nt, Homo sapiens
  misc_RNA (1)...(19): siRNA sense strand
cgaaagagaguuccaaggu

SEQ ID NO: 559614 - RNA, 19 nt, Homo sapiens
  misc_RNA (1)...(19): siRNA sense strand
uggcugagauggacaaagu

SEQ ID NO: 559615 - RNA, 19 nt, Homo sapiens
  misc_RNA (1)...(19): siRNA sense strand
gaagucugccuaccuguca

SEQ ID NO: 559616 - RNA, 19 nt, Homo sapiens
  misc_RNA (1)...(19): siRNA sense strand
cauugcaggucaccacgua

SEQ ID NO: 559617 - RNA, 19 nt, Homo sapiens
  misc_RNA (1)...(19): siRNA sense strand
cugacaagcuagaccauga

SEQ ID NO: 559618 - RNA, 19 nt, Homo sapiens
  misc_RNA (1)...(19): siRNA sense strand
ucuguuugcugcccuguuu

SEQ ID NO: 559619 - RNA, 19 nt, Homo sapiens
  misc_RNA (1)...(19): siRNA sense strand
gaccuggacuucguucuca

SEQ ID NO: 559620 - RNA, 19 nt, Homo sapiens
  misc_RNA (1)...(19): siRNA sense strand
gcaaagacaaucggaucaa

SEQ ID NO: 559621 - RNA, 19 nt, Homo sapiens
  misc_RNA (1)...(19): siRNA sense strand
gaaauucucaaugggauca

SEQ ID NO: 559622 - RNA, 19 nt, Homo sapiens
  misc_RNA (1)...(19): siRNA sense strand
caaagacaaucggaucaag

SEQ ID NO: 559623 - RNA, 19 nt, Homo sapiens
  misc_RNA (1)...(19): siRNA sense strand
cucaugagcuucuucuuca

SEQ ID NO: 559624 - RNA, 19 nt, Homo sapiens
  misc_RNA (1)...(19): siRNA sense strand
aaggagagaucaucaucga

SEQ ID NO: 559625 - RNA, 19 nt, Homo sapiens
  misc_RNA (1)...(19): siRNA sense strand
gagcugaaggugcugaaga

SEQ ID NO: 559626 - RNA, 19 nt, Homo sapiens
  misc_RNA (1)...(19): siRNA sense strand
uggaaugucacguggaaua

SEQ ID NO: 559627 - RNA, 19 nt, Homo sapiens
  misc_RNA (1)...(19): siRNA sense strand
ggaaggcccuggugaucac

SEQ ID NO: 559628 - RNA, 19 nt, Homo sapiens
  misc_RNA (1)...(19): siRNA sense strand
ccacgcugcuugcuaccuu

SEQ ID NO: 559629 - RNA, 19 nt, Homo sapiens
  misc_RNA (1)...(19): siRNA sense strand
gcgagugucucccucaaac

SEQ ID NO: 559630 - RNA, 19 nt, Homo sapiens
  misc_RNA (1)...(19): siRNA sense strand
ggacacgucggaacaaguc

SEQ ID NO: 559631 - RNA, 19 nt, Homo sapiens
  misc_RNA (1)...(19): siRNA sense strand
gaguggaauuccggaacua

SEQ ID NO: 559632 - RNA, 19 nt, Homo sapiens
  misc_RNA (1)...(19): siRNA sense strand
caaggaguauucagagacu

SEQ ID NO: 559633 - RNA, 19 nt, Homo sapiens
  misc_RNA (1)...(19): siRNA sense strand
cacaagggaucgccguguu

SEQ ID NO: 559634 - RNA, 19 nt, Homo sapiens
  misc_RNA (1)...(19): siRNA sense strand
gcgcuggcuuccaacuauu

SEQ ID NO: 559635 - RNA, 19 nt, Homo sapiens
  misc_RNA (1)...(19): siRNA sense strand
guacugggacuacaugaag

SEQ ID NO: 559636 - RNA, 19 nt, Homo sapiens
  misc_RNA (1)...(19): siRNA sense strand
gcaaagcaaauggagaaug

SEQ ID NO: 559637 - RNA, 19 nt, Homo sapiens
  misc_RNA (1)...(19): siRNA sense strand
aagcaaagcaaauggagaa

SEQ ID NO: 559638 - RNA, 19 nt, Homo sapiens
  misc_RNA (1)...(19): siRNA sense strand
gcagguggacgucaucauc

SEQ ID NO: 559639 - RNA, 19 nt, Homo sapiens
  misc_RNA (1)...(19): siRNA sense strand
gacuuggccacguacauua

SEQ ID NO: 559640 - RNA, 19 nt, Homo sapiens
  misc_RNA (1)...(19): siRNA sense strand
ucauggacuuggccacgua

SEQ ID NO: 559641 - RNA, 19 nt, Homo sapiens
  misc_RNA (1)...(19): siRNA sense strand
gaaggaaugcgccaagacu

SEQ ID NO: 559642 - RNA, 19 nt, Homo sapiens
  misc_RNA (1)...(19): siRNA sense strand
cagggaucaugcucacuuu

SEQ ID NO: 559643 - RNA, 19 nt, Homo sapiens
  misc_RNA (1)...(19): siRNA sense strand
ccaguacucggaugaagaa

SEQ ID NO: 559644 - RNA, 19 nt, Homo sapiens
  misc_RNA (1)...(19): siRNA sense strand
ggucaagcuuuccguguac

SEQ ID NO: 559645 - RNA, 19 nt, Homo sapiens
  misc_RNA (1)...(19): siRNA sense strand
uaaagaacuggaagaagga

SEQ ID NO: 559646 - RNA, 19 nt, Homo sapiens
  misc_RNA (1)...(19): siRNA sense strand
cucagugucuuacucauug

SEQ ID NO: 559647 - RNA, 19 nt, Homo sapiens
  misc_RNA (1)...(19): siRNA sense strand
ucaagcugaugaacgaaau

SEQ ID NO: 559648 - RNA, 19 nt, Homo sapiens
  misc_RNA (1)...(19): siRNA sense strand
ggaucaugcucacuuucug

SEQ ID NO: 559649 - RNA, 19 nt, Homo sapiens
  misc_RNA (1)...(19): siRNA sense strand
cagcagcuccuccuccuau

SEQ ID NO: 559650 - RNA, 19 nt, Homo sapiens
  misc_RNA (1)...(19): siRNA sense strand
gcacagcaugagcuacuug

SEQ ID NO: 559651 - RNA, 19 nt, Homo sapiens
  misc_RNA (1)...(19): siRNA sense strand
ggaucaaagugcuaaagcu

SEQ ID NO: 559652 - RNA, 19 nt, Homo sapiens
  misc_RNA (1)...(19): siRNA sense strand
gaugaacgaaauucucaau

SEQ ID NO: 559653 - RNA, 19 nt, Homo sapiens
  misc_RNA (1)...(19): siRNA sense strand
gcccgucaaugcugugaug

SEQ ID NO: 559654 - RNA, 19 nt, Homo sapiens
  misc_RNA (1)...(19): siRNA sense strand
augaggagguggaggcuuu

SEQ ID NO: 559655 - RNA, 19 nt, Homo sapiens
  misc_RNA (1)...(19): siRNA sense strand
ccaagguggaugcgaauga

SEQ ID NO: 559656 - RNA, 19 nt, Homo sapiens
  misc_RNA (1)...(19): siRNA sense strand
ucaaacgccugaggaucuu

SEQ ID NO: 559657 - RNA, 19 nt, Homo sapiens
  misc_RNA (1)...(19): siRNA sense strand
ggucagcccaacucucuug

SEQ ID NO: 559658 - RNA, 19 nt, Homo sapiens
  misc_RNA (1)...(19): siRNA sense strand
gaccaugaaugugcagaag

SEQ ID NO: 559659 - RNA, 19 nt, Homo sapiens
  misc_RNA (1)...(19): siRNA sense strand
auuggugccugcaucguua

SEQ ID NO: 559660 - RNA, 19 nt, Homo sapiens
  misc_RNA (1)...(19): siRNA sense strand
gggaaggaagcaaagcaaa

SEQ ID NO: 559661 - RNA, 19 nt, Homo sapiens
  misc_RNA (1)...(19): siRNA sense strand
gggcccuacuuccucauga

SEQ ID NO: 559662 - RNA, 19 nt, Homo sapiens
  misc_RNA (1)...(19): siRNA sense strand
guucaugggcucccuguuc

SEQ ID NO: 559663 - RNA, 19 nt, Homo sapiens
  misc_RNA (1)...(19): siRNA sense strand
cagggcaggucaagcuuuc

SEQ ID NO: 559664 - RNA, 19 nt, Homo sapiens
  misc_RNA (1)...(19): siRNA sense strand
ugauggcgaugaagaccaa

SEQ ID NO: 559665 - RNA, 19 nt, Homo sapiens
  misc_RNA (1)...(19): siRNA sense strand
gagauugucaaccucaugu

SEQ ID NO: 559666 - RNA, 19 nt, Homo sapiens
  misc_RNA (1)...(19): siRNA sense strand
acaccgugcugcuguuugu

SEQ ID NO: 559667 - RNA, 19 nt, Homo sapiens
  misc_RNA (1)...(19): siRNA sense strand
ucuuaaaguugcucaucaa

SEQ ID NO: 559668 - RNA, 19 nt, Homo sapiens
  misc_RNA (1)...(19): siRNA sense strand
ucccggaggucaucaagau

SEQ ID NO: 559669 - RNA, 19 nt, Homo sapiens
  misc_RNA (1)...(19): siRNA sense strand
ggacagugcagggaagcaa

SEQ ID NO: 559670 - RNA, 19 nt, Homo sapiens
  misc_RNA (1)...(19): siRNA sense strand
ggagguggaggcuuugauc

SEQ ID NO: 559671 - RNA, 19 nt, Homo sapiens
  misc_RNA (1)...(19): siRNA sense strand
gcaggucaccacguacuug

SEQ ID NO: 559672 - RNA, 19 nt, Homo sapiens
  misc_RNA (1)...(19): siRNA sense strand
agaaggaggagaccuggaa

SEQ ID NO: 559673 - RNA, 19 nt, Homo sapiens
  misc_RNA (1)...(19): siRNA sense strand
ucgugugggugccuuguuu

SEQ ID NO: 559674 - RNA, 19 nt, Homo sapiens
  misc_RNA (1)...(19): siRNA sense strand
ccacaucugcuucgucagu

SEQ ID NO: 559675 - RNA, 19 nt, Homo sapiens
  misc_RNA (1)...(19): siRNA sense strand
gcaccaguacuuccacauc

SEQ ID NO: 559676 - RNA, 19 nt, Homo sapiens
  misc_RNA (1)...(19): siRNA sense strand
gaugacaccucucaacaaa

SEQ ID NO: 559677 - RNA, 19 nt, Homo sapiens
  misc_RNA (1)...(19): siRNA sense strand
uaaaguugcucaucaaguu

SEQ ID NO: 559678 - RNA, 19 nt, Homo sapiens
  misc_RNA (1)...(19): siRNA sense strand
ggaagcaacugcagagaca

SEQ ID NO: 559679 - RNA, 19 nt, Homo sapiens
  misc_RNA (1)...(19): siRNA sense strand
ccaaggagcuggacacagu

SEQ ID NO: 559680 - RNA, 19 nt, Homo sapiens
  misc_RNA (1)...(19): siRNA sense strand
caacgagucugccgaagga

SEQ ID NO: 559681 - RNA, 19 nt, Homo sapiens
  misc_RNA (1)...(19): siRNA sense strand
gaucaagaccgcugucauu

SEQ ID NO: 559682 - RNA, 19 nt, Homo sapiens
  misc_RNA (1)...(19): siRNA sense strand
caaagcaaauggagaaugg

SEQ ID NO: 559683 - RNA, 19 nt, Homo sapiens
  misc_RNA (1)...(19): siRNA sense strand
gggcagaccucuucuacuc

SEQ ID NO: 559684 - RNA, 19 nt, Homo sapiens
  misc_RNA (1)...(19): siRNA sense strand
ccacguacauuaacaugau

SEQ ID NO: 559685 - RNA, 19 nt, Homo sapiens
  misc_RNA (1)...(19): siRNA sense strand
gaccgaggcuacauucaga

SEQ ID NO: 559686 - RNA, 19 nt, Homo sapiens
  misc_RNA (1)...(19): siRNA sense strand
uggagaggcucaaggagua

SEQ ID NO: 559687 - RNA, 19 nt, Homo sapiens
  misc_RNA (1)...(19): siRNA sense strand
gcagaccucuucuacucuu

SEQ ID NO: 559688 - RNA, 19 nt, Homo sapiens
  misc_RNA (1)...(19): siRNA sense strand
gaaggaagcaaagcaaaug

SEQ ID NO: 559689 - RNA, 19 nt, Homo sapiens
  misc_RNA (1)...(19): siRNA sense strand
ggccgcagaucuuaaaguu

SEQ ID NO: 559690 - RNA, 19 nt, Homo sapiens
  misc_RNA (1)...(19): siRNA sense strand
gaccuccgcuucaagauca

SEQ ID NO: 559691 - RNA, 19 nt, Homo sapiens
  misc_RNA (1)...(19): siRNA sense strand
aaggagaaauccaggagua

SEQ ID NO: 559692 - RNA, 19 nt, Homo sapiens
  misc_RNA (1)...(19): siRNA sense strand
caucugaaauggaaaccaa

SEQ ID NO: 559693 - RNA, 19 nt, Homo sapiens
  misc_RNA (1)...(19): siRNA sense strand
gcaacugcaucguucuguu

SEQ ID NO: 559694 - RNA, 19 nt, Homo sapiens
  misc_RNA (1)...(19): siRNA sense strand
ggaaagaagucggggcaua

SEQ ID NO: 559695 - RNA, 19 nt, Homo sapiens
  misc_RNA (1)...(19): siRNA sense strand
ugaacgaaauucucaaugg

SEQ ID NO: 559696 - RNA, 19 nt, Homo sapiens
  misc_RNA (1)...(19): siRNA sense strand
caagcuagaccaugaaugu

SEQ ID NO: 559697 - RNA, 19 nt, Homo sapiens
  misc_RNA (1)...(19): siRNA sense strand
guacucggaugaagaaguc

SEQ ID NO: 559698 - RNA, 19 nt, Homo sapiens
  misc_RNA (1)...(19): siRNA sense strand
gagaggaccuggacuucgu

SEQ ID NO: 559699 - RNA, 19 nt, Homo sapiens
  misc_RNA (1)...(19): siRNA sense strand
caacugcaucguucuguuu

SEQ ID NO: 559700 - RNA, 19 nt, Homo sapiens
  misc_RNA (1)...(19): siRNA sense strand
ggacuuggccacguacauu

SEQ ID NO: 559701 - RNA, 19 nt, Homo sapiens
  misc_RNA (1)...(19): siRNA sense strand
caacagcaccgcagaacug

SEQ ID NO: 559702 - RNA, 19 nt, Homo sapiens
  misc_RNA (1)...(19): siRNA sense strand
ggaaggaagcaaagcaaau

SEQ ID NO: 559703 - RNA, 19 nt, Homo sapiens
  misc_RNA (1)...(19): siRNA sense strand
gaucaaagugcuaaagcuu

SEQ ID NO: 559704 - RNA, 19 nt, Homo sapiens
  misc_RNA (1)...(19): siRNA sense strand
ugaaggugcugaagaaguc

SEQ ID NO: 559705 - RNA, 19 nt, Homo sapiens
  misc_RNA (1)...(19): siRNA sense strand
gcagagaggucuuuucuac

SEQ ID NO: 559706 - RNA, 19 nt, Homo sapiens
  misc_RNA (1)...(19): siRNA sense strand
ggaucuuucucucccauga

SEQ ID NO: 559707 - RNA, 19 nt, Homo sapiens
  misc_RNA (1)...(19): siRNA sense strand
cgaugaagaccaagacgua

SEQ ID NO: 559708 - RNA, 19 nt, Homo sapiens
  misc_RNA (1)...(19): siRNA sense strand
gcaucaacaucgccaagau

SEQ ID NO: 559709 - RNA, 19 nt, Homo sapiens
  misc_RNA (1)...(19): siRNA sense strand
gcugguagcccuagugugu

SEQ ID NO: 559710 - RNA, 19 nt, Homo sapiens
  misc_RNA (1)...(19): siRNA sense strand
agaaccagaaggccuauua

SEQ ID NO: 559711 - RNA, 19 nt, Homo sapiens
  misc_RNA (1)...(19): siRNA sense strand
ggacucaggagcacacgaa

SEQ ID NO: 559712 - RNA, 19 nt, Homo sapiens
  misc_RNA (1)...(19): siRNA sense strand
ccugggagcuggcauucaa

SEQ ID NO: 559713 - RNA, 19 nt, Homo sapiens
  misc_RNA (1)...(19): siRNA sense strand
cgaaagagaguuccaaggu

SEQ ID NO: 559714 - RNA, 19 nt, Homo sapiens
  misc_RNA (1)...(19): siRNA sense strand
uggcugagauggacaaagu

SEQ ID NO: 559715 - RNA, 19 nt, Homo sapiens
  misc_RNA (1)...(19): siRNA sense strand
gaagucugccuaccuguca

SEQ ID NO: 559716 - RNA, 19 nt, Homo sapiens
  misc_RNA (1)...(19): siRNA sense strand
cauugcaggucaccacgua

SEQ ID NO: 559717 - RNA, 19 nt, Homo sapiens
  misc_RNA (1)...(19): siRNA sense strand
cugacaagcuagaccauga

SEQ ID NO: 559718 - RNA, 19 nt, Homo sapiens
  misc_RNA (1)...(19): siRNA sense strand
ucuguuugcugcccuguuu

SEQ ID NO: 559719 - RNA, 19 nt, Homo sapiens
  misc_RNA (1)...(19): siRNA sense strand
gaccuggacuucguucuca

SEQ ID NO: 559720 - RNA, 19 nt, Homo sapiens
  misc_RNA (1)...(19): siRNA sense strand
gcaaagacaaucggaucaa

SEQ ID NO: 559721 - RNA, 19 nt, Homo sapiens
  misc_RNA (1)...(19): siRNA sense strand
gaaauucucaaugggauca

SEQ ID NO: 559722 - RNA, 19 nt, Homo sapiens
  misc_RNA (1)...(19): siRNA sense strand
caaagacaaucggaucaag

SEQ ID NO: 559723 - RNA, 19 nt, Homo sapiens
  misc_RNA (1)...(19): siRNA sense strand
cucaugagcuucuucuuca

SEQ ID NO: 559724 - RNA, 19 nt, Homo sapiens
  misc_RNA (1)...(19): siRNA sense strand
aaggagagaucaucaucga

SEQ ID NO: 559725 - RNA, 19 nt, Homo sapiens
  misc_RNA (1)...(19): siRNA sense strand
gagcugaaggugcugaaga

SEQ ID NO: 559726 - RNA, 19 nt, Homo sapiens
  misc_RNA (1)...(19): siRNA sense strand
uggaaugucacguggaaua

SEQ ID NO: 559727 - RNA, 19 nt, Homo sapiens
  misc_RNA (1)...(19): siRNA sense strand
ggaaggcccuggugaucac

SEQ ID NO: 559728 - RNA, 19 nt, Homo sapiens
  misc_RNA (1)...(19): siRNA sense strand
ccacgcugcuugcuaccuu

SEQ ID NO: 559729 - RNA, 19 nt, Homo sapiens
  misc_RNA (1)...(19): siRNA sense strand
gcgagugucucccucaaac

SEQ ID NO: 559730 - RNA, 19 nt, Homo sapiens
  misc_RNA (1)...(19): siRNA sense strand
ggacacgucggaacaaguc

SEQ ID NO: 559731 - RNA, 19 nt, Homo sapiens
  misc_RNA (1)...(19): siRNA sense strand
gaguggaauuccggaacua

SEQ ID NO: 559732 - RNA, 19 nt, Homo sapiens
  misc_RNA (1)...(19): siRNA sense strand
caaggaguauucagagacu

SEQ ID NO: 559733 - RNA, 19 nt, Homo sapiens
  misc_RNA (1)...(19): siRNA sense strand
cacaagggaucgccguguu

SEQ ID NO: 559734 - RNA, 19 nt, Homo sapiens
  misc_RNA (1)...(19): siRNA sense strand
gcgcuggcuuccaacuauu

SEQ ID NO: 559735 - RNA, 19 nt, Homo sapiens
  misc_RNA (1)...(19): siRNA sense strand
guacugggacuacaugaag

SEQ ID NO: 559736 - RNA, 19 nt, Homo sapiens
  misc_RNA (1)...(19): siRNA sense strand
gcaaagcaaauggagaaug

SEQ ID NO: 559737 - RNA, 19 nt, Homo sapiens
  misc_RNA (1)...(19): siRNA sense strand
aagcaaagcaaauggagaa

SEQ ID NO: 559738 - RNA, 19 nt, Homo sapiens
  misc_RNA (1)...(19): siRNA sense strand
gcagguggacgucaucauc

SEQ ID NO: 559739 - RNA, 19 nt, Homo sapiens
  misc_RNA (1)...(19): siRNA sense strand
gacuuggccacguacauua

SEQ ID NO: 559740 - RNA, 19 nt, Homo sapiens
  misc_RNA (1)...(19): siRNA sense strand
ucauggacuuggccacgua

SEQ ID NO: 559741 - RNA, 19 nt, Homo sapiens
  misc_RNA (1)...(19): siRNA sense strand
gaaggaaugcgccaagacu

SEQ ID NO: 559742 - RNA, 19 nt, Homo sapiens
  misc_RNA (1)...(19): siRNA sense strand
cagggaucaugcucacuuu

SEQ ID NO: 559743 - RNA, 19 nt, Homo sapiens
  misc_RNA (1)...(19): siRNA sense strand
ccaguacucggaugaagaa

SEQ ID NO: 559744 - RNA, 19 nt, Homo sapiens
  misc_RNA (1)...(19): siRNA sense strand
ggucaagcuuuccguguac

SEQ ID NO: 559745 - RNA, 19 nt, Homo sapiens
  misc_RNA (1)...(19): siRNA sense strand
uaaagaacuggaagaagga

SEQ ID NO: 559746 - RNA, 19 nt, Homo sapiens
  misc_RNA (1)...(19): siRNA sense strand
cucagugucuuacucauug

SEQ ID NO: 559747 - RNA, 19 nt, Homo sapiens
  misc_RNA (1)...(19): siRNA sense strand
ucaagcugaugaacgaaau

SEQ ID NO: 559748 - RNA, 19 nt, Homo sapiens
  misc_RNA (1)...(19): siRNA sense strand
ggaucaugcucacuuucug

SEQ ID NO: 559749 - RNA, 19 nt, Homo sapiens
  misc_RNA (1)...(19): siRNA sense strand
cagcagcuccuccuccuau

SEQ ID NO: 559750 - RNA, 19 nt, Homo sapiens
  misc_RNA (1)...(19): siRNA sense strand
gcacagcaugagcuacuug

SEQ ID NO: 559751 - RNA, 19 nt, Homo sapiens
  misc_RNA (1)...(19): siRNA sense strand
ggaucaaagugcuaaagcu

SEQ ID NO: 559752 - RNA, 19 nt, Homo sapiens
  misc_RNA (1)...(19): siRNA sense strand
gaugaacgaaauucucaau

SEQ ID NO: 559753 - RNA, 19 nt, Homo sapiens
  misc_RNA (1)...(19): siRNA sense strand
gcccgucaaugcugugaug

SEQ ID NO: 559754 - RNA, 19 nt, Homo sapiens
  misc_RNA (1)...(19): siRNA sense strand
augaggagguggaggcuuu

SEQ ID NO: 559755 - RNA, 19 nt, Homo sapiens
  misc_RNA (1)...(19): siRNA sense strand
ccaagguggaugcgaauga

SEQ ID NO: 559756 - RNA, 19 nt, Homo sapiens
  misc_RNA (1)...(19): siRNA sense strand
ucaaacgccugaggaucuu

SEQ ID NO: 559757 - RNA, 19 nt, Homo sapiens
  misc_RNA (1)...(19): siRNA sense strand
ggucagcccaacucucuug

SEQ ID NO: 559758 - RNA, 19 nt, Homo sapiens
  misc_RNA (1)...(19): siRNA sense strand
gaccaugaaugugcagaag

SEQ ID NO: 559759 - RNA, 19 nt, Homo sapiens
  misc_RNA (1)...(19): siRNA sense strand
auuggugccugcaucguua

SEQ ID NO: 559760 - RNA, 19 nt, Homo sapiens
  misc_RNA (1)...(19): siRNA sense strand
gggaaggaagcaaagcaaa

SEQ ID NO: 559761 - RNA, 19 nt, Homo sapiens
  misc_RNA (1)...(19): siRNA sense strand
gggcccuacuuccucauga

SEQ ID NO: 559762 - RNA, 19 nt, Homo sapiens
  misc_RNA (1)...(19): siRNA sense strand
guucaugggcucccuguuc

SEQ ID NO: 559763 - RNA, 19 nt, Homo sapiens
  misc_RNA (1)...(19): siRNA sense strand
cagggcaggucaagcuuuc

SEQ ID NO: 559764 - RNA, 19 nt, Homo sapiens
  misc_RNA (1)...(19): siRNA sense strand
ugauggcgaugaagaccaa

SEQ ID NO: 559765 - RNA, 19 nt, Homo sapiens
  misc_RNA (1)...(19): siRNA sense strand
gagauugucaaccucaugu

SEQ ID NO: 559766 - RNA, 19 nt, Homo sapiens
  misc_RNA (1)...(19): siRNA sense strand
acaccgugcugcuguuugu

SEQ ID NO: 559767 - RNA, 19 nt, Homo sapiens
  misc_RNA (1)...(19): siRNA sense strand
ucuuaaaguugcucaucaa

SEQ ID NO: 559768 - RNA, 19 nt, Homo sapiens
  misc_RNA (1)...(19): siRNA sense strand
ucccggaggucaucaagau

SEQ ID NO: 559769 - RNA, 19 nt, Homo sapiens
  misc_RNA (1)...(19): siRNA sense strand
ggacagugcagggaagcaa

SEQ ID NO: 559770 - RNA, 19 nt, Homo sapiens
  misc_RNA (1)...(19): siRNA sense strand
ggagguggaggcuuugauc

SEQ ID NO: 559771 - RNA, 19 nt, Homo sapiens
  misc_RNA (1)...(19): siRNA sense strand
gcaggucaccacguacuug

SEQ ID NO: 559772 - RNA, 19 nt, Homo sapiens
  misc_RNA (1)...(19): siRNA sense strand
agaaggaggagaccuggaa

SEQ ID NO: 559773 - RNA, 19 nt, Homo sapiens
  misc_RNA (1)...(19): siRNA sense strand
ucgugugggugccuuguuu

SEQ ID NO: 559774 - RNA, 19 nt, Homo sapiens
  misc_RNA (1)...(19): siRNA sense strand
ccacaucugcuucgucagu

SEQ ID NO: 559775 - RNA, 19 nt, Homo sapiens
  misc_RNA (1)...(19): siRNA sense strand
gcaccaguacuuccacauc

SEQ ID NO: 559776 - RNA, 19 nt, Homo sapiens
  misc_RNA (1)...(19): siRNA sense strand
gaugacaccucucaacaaa

SEQ ID NO: 559777 - RNA, 19 nt, Homo sapiens
  misc_RNA (1)...(19): siRNA sense strand
uaaaguugcucaucaaguu

SEQ ID NO: 559778 - RNA, 19 nt, Homo sapiens
  misc_RNA (1)...(19): siRNA sense strand
ggaagcaacugcagagaca

SEQ ID NO: 559779 - RNA, 19 nt, Homo sapiens
  misc_RNA (1)...(19): siRNA sense strand
ccaaggagcuggacacagu

SEQ ID NO: 559780 - RNA, 19 nt, Homo sapiens
  misc_RNA (1)...(19): siRNA sense strand
caacgagucugccgaagga

SEQ ID NO: 559781 - RNA, 19 nt, Homo sapiens
  misc_RNA (1)...(19): siRNA sense strand
gaucaagaccgcugucauu

SEQ ID NO: 559782 - RNA, 19 nt, Homo sapiens
  misc_RNA (1)...(19): siRNA sense strand
caaagcaaauggagaaugg

SEQ ID NO: 559783 - RNA, 19 nt, Homo sapiens
  misc_RNA (1)...(19): siRNA sense strand
gggcagaccucuucuacuc

SEQ ID NO: 559784 - RNA, 19 nt, Homo sapiens
  misc_RNA (1)...(19): siRNA sense strand
ccacguacauuaacaugau

SEQ ID NO: 559785 - RNA, 19 nt, Homo sapiens
  misc_RNA (1)...(19): siRNA sense strand
gaccgaggcuacauucaga

SEQ ID NO: 559786 - RNA, 19 nt, Homo sapiens
  misc_RNA (1)...(19): siRNA sense strand
uggagaggcucaaggagua

SEQ ID NO: 559787 - RNA, 19 nt, Homo sapiens
  misc_RNA (1)...(19): siRNA sense strand
gcagaccucuucuacucuu

SEQ ID NO: 559788 - RNA, 19 nt, Homo sapiens
  misc_RNA (1)...(19): siRNA sense strand
gaaggaagcaaagcaaaug

SEQ ID NO: 559789 - RNA, 19 nt, Homo sapiens
  misc_RNA (1)...(19): siRNA sense strand
ggccgcagaucuuaaaguu

SEQ ID NO: 559790 - RNA, 19 nt, Homo sapiens
  misc_RNA (1)...(19): siRNA sense strand
gaccuccgcuucaagauca

SEQ ID NO: 559791 - RNA, 19 nt, Homo sapiens
  misc_RNA (1)...(19): siRNA sense strand
aaggagaaauccaggagua

SEQ ID NO: 559792 - RNA, 19 nt, Homo sapiens
  misc_RNA (1)...(19): siRNA sense strand
caucugaaauggaaaccaa

SEQ ID NO: 559793 - RNA, 19 nt, Homo sapiens
  misc_RNA (1)...(19): siRNA sense strand
gcaacugcaucguucuguu

SEQ ID NO: 559794 - RNA, 19 nt, Homo sapiens
  misc_RNA (1)...(19): siRNA sense strand
ggaaagaagucggggcaua

SEQ ID NO: 559795 - RNA, 19 nt, Homo sapiens
  misc_RNA (1)...(19): siRNA sense strand
ugaacgaaauucucaaugg

SEQ ID NO: 559796 - RNA, 19 nt, Homo sapiens
  misc_RNA (1)...(19): siRNA sense strand
caagcuagaccaugaaugu

SEQ ID NO: 559797 - RNA, 19 nt, Homo sapiens
  misc_RNA (1)...(19): siRNA sense strand
guacucggaugaagaaguc

SEQ ID NO: 559798 - RNA, 19 nt, Homo sapiens
  misc_RNA (1)...(19): siRNA sense strand
gagaggaccuggacuucgu

SEQ ID NO: 559799 - RNA, 19 nt, Homo sapiens
  misc_RNA (1)...(19): siRNA sense strand
caacugcaucguucuguuu

SEQ ID NO: 559800 - RNA, 19 nt, Homo sapiens
  misc_RNA (1)...(19): siRNA sense strand
ggacuuggccacguacauu

SEQ ID NO: 559801 - RNA, 19 nt, Homo sapiens
  misc_RNA (1)...(19): siRNA sense strand
caacagcaccgcagaacug

SEQ ID NO: 559802 - RNA, 19 nt, Homo sapiens
  misc_RNA (1)...(19): siRNA sense strand
ggaaggaagcaaagcaaau

SEQ ID NO: 559803 - RNA, 19 nt, Homo sapiens
  misc_RNA (1)...(19): siRNA sense strand
gaucaaagugcuaaagcuu

SEQ ID NO: 559804 - RNA, 19 nt, Homo sapiens
  misc_RNA (1)...(19): siRNA sense strand
ugaaggugcugaagaaguc

SEQ ID NO: 559805 - RNA, 19 nt, Homo sapiens
  misc_RNA (1)...(19): siRNA sense strand
gcagagaggucuuuucuac

SEQ ID NO: 559806 - RNA, 19 nt, Homo sapiens
  misc_RNA (1)...(19): siRNA sense strand
ggaucuuucucucccauga

SEQ ID NO: 559807 - RNA, 19 nt, Homo sapiens
  misc_RNA (1)...(19): siRNA sense strand
cgaugaagaccaagacgua

SEQ ID NO: 559808 - RNA, 19 nt, Homo sapiens
  misc_RNA (1)...(19): siRNA sense strand
gcaucaacaucgccaagau

SEQ ID NO: 559809 - RNA, 19 nt, Homo sapiens
  misc_RNA (1)...(19): siRNA sense strand
gcugguagcccuagugugu

SEQ ID NO: 559810 - RNA, 19 nt, Homo sapiens
  misc_RNA (1)...(19): siRNA sense strand
agaaccagaaggccuauua

SEQ ID NO: 559811 - RNA, 19 nt, Homo sapiens
  misc_RNA (1)...(19): siRNA sense strand
ggacucaggagcacacgaa

SEQ ID NO: 559812 - RNA, 19 nt, Homo sapiens
  misc_RNA (1)...(19): siRNA sense strand
ccugggagcuggcauucaa

SEQ ID NO: 559813 - RNA, 19 nt, Homo sapiens
  misc_RNA (1)...(19): siRNA sense strand
cgaaagagaguuccaaggu

SEQ ID NO: 559814 - RNA, 19 nt, Homo sapiens
  misc_RNA (1)...(19): siRNA sense strand
uggcugagauggacaaagu

SEQ ID NO: 559815 - RNA, 19 nt, Homo sapiens
  misc_RNA (1)...(19): siRNA sense strand
gaagucugccuaccuguca

SEQ ID NO: 559816 - RNA, 19 nt, Homo sapiens
  misc_RNA (1)...(19): siRNA sense strand
cauugcaggucaccacgua

SEQ ID NO: 559817 - RNA, 19 nt, Homo sapiens
  misc_RNA (1)...(19): siRNA sense strand
cugacaagcuagaccauga

SEQ ID NO: 559818 - RNA, 19 nt, Homo sapiens
  misc_RNA (1)...(19): siRNA sense strand
ucuguuugcugcccuguuu

SEQ ID NO: 559819 - RNA, 19 nt, Homo sapiens
  misc_RNA (1)...(19): siRNA sense strand
gaccuggacuucguucuca

SEQ ID NO: 559820 - RNA, 19 nt, Homo sapiens
  misc_RNA (1)...(19): siRNA sense strand
gcaaagacaaucggaucaa

SEQ ID NO: 559821 - RNA, 19 nt, Homo sapiens
  misc_RNA (1)...(19): siRNA sense strand
gaaauucucaaugggauca

SEQ ID NO: 559822 - RNA, 19 nt, Homo sapiens
  misc_RNA (1)...(19): siRNA sense strand
caaagacaaucggaucaag

SEQ ID NO: 559823 - RNA, 19 nt, Homo sapiens
  misc_RNA (1)...(19): siRNA sense strand
cucaugagcuucuucuuca

SEQ ID NO: 559824 - RNA, 19 nt, Homo sapiens
  misc_RNA (1)...(19): siRNA sense strand
aaggagagaucaucaucga

SEQ ID NO: 559825 - RNA, 19 nt, Homo sapiens
  misc_RNA (1)...(19): siRNA sense strand
gagcugaaggugcugaaga

SEQ ID NO: 559826 - RNA, 19 nt, Homo sapiens
  misc_RNA (1)...(19): siRNA sense strand
uggaaugucacguggaaua

SEQ ID NO: 559827 - RNA, 19 nt, Homo sapiens
  misc_RNA (1)...(19): siRNA sense strand
ggaaggcccuggugaucac

SEQ ID NO: 559828 - RNA, 19 nt, Homo sapiens
  misc_RNA (1)...(19): siRNA sense strand
ccacgcugcuugcuaccuu

SEQ ID NO: 559829 - RNA, 19 nt, Homo sapiens
  misc_RNA (1)...(19): siRNA sense strand
gcgagugucucccucaaac

SEQ ID NO: 559830 - RNA, 19 nt, Homo sapiens
  misc_RNA (1)...(19): siRNA sense strand
ggacacgucggaacaaguc

SEQ ID NO: 559831 - RNA, 19 nt, Homo sapiens
  misc_RNA (1)...(19): siRNA sense strand
gaguggaauuccggaacua

SEQ ID NO: 559832 - RNA, 19 nt, Homo sapiens
  misc_RNA (1)...(19): siRNA sense strand
caaggaguauucagagacu

SEQ ID NO: 559833 - RNA, 19 nt, Homo sapiens
  misc_RNA (1)...(19): siRNA sense strand
cacaagggaucgccguguu

SEQ ID NO: 559834 - RNA, 19 nt, Homo sapiens
  misc_RNA (1)...(19): siRNA sense strand
gcgcuggcuuccaacuauu

SEQ ID NO: 559835 - RNA, 19 nt, Homo sapiens
  misc_RNA (1)...(19): siRNA sense strand
guacugggacuacaugaag

SEQ ID NO: 559836 - RNA, 19 nt, Homo sapiens
  misc_RNA (1)...(19): siRNA sense strand
gcaaagcaaauggagaaug

SEQ ID NO: 559837 - RNA, 19 nt, Homo sapiens
  misc_RNA (1)...(19): siRNA sense strand
aagcaaagcaaauggagaa

SEQ ID NO: 559838 - RNA, 19 nt, Homo sapiens
  misc_RNA (1)...(19): siRNA sense strand
gcagguggacgucaucauc

SEQ ID NO: 559839 - RNA, 19 nt, Homo sapiens
  misc_RNA (1)...(19): siRNA sense strand
gacuuggccacguacauua

SEQ ID NO: 559840 - RNA, 19 nt, Homo sapiens
  misc_RNA (1)...(19): siRNA sense strand
ucauggacuuggccacgua

SEQ ID NO: 559841 - RNA, 19 nt, Homo sapiens
  misc_RNA (1)...(19): siRNA sense strand
gaaggaaugcgccaagacu

SEQ ID NO: 559842 - RNA, 19 nt, Homo sapiens
  misc_RNA (1)...(19): siRNA sense strand
cagggaucaugcucacuuu

SEQ ID NO: 559843 - RNA, 19 nt, Homo sapiens
  misc_RNA (1)...(19): siRNA sense strand
ccaguacucggaugaagaa

SEQ ID NO: 559844 - RNA, 19 nt, Homo sapiens
  misc_RNA (1)...(19): siRNA sense strand
ggucaagcuuuccguguac

SEQ ID NO: 559845 - RNA, 19 nt, Homo sapiens
  misc_RNA (1)...(19): siRNA sense strand
uaaagaacuggaagaagga

SEQ ID NO: 559846 - RNA, 19 nt, Homo sapiens
  misc_RNA (1)...(19): siRNA sense strand
cucagugucuuacucauug

SEQ ID NO: 559847 - RNA, 19 nt, Homo sapiens
  misc_RNA (1)...(19): siRNA sense strand
ucaagcugaugaacgaaau

SEQ ID NO: 559848 - RNA, 19 nt, Homo sapiens
  misc_RNA (1)...(19): siRNA sense strand
ggaucaugcucacuuucug

SEQ ID NO: 559849 - RNA, 19 nt, Homo sapiens
  misc_RNA (1)...(19): siRNA sense strand
cagcagcuccuccuccuau

SEQ ID NO: 559850 - RNA, 19 nt, Homo sapiens
  misc_RNA (1)...(19): siRNA sense strand
gcacagcaugagcuacuug

SEQ ID NO: 559851 - RNA, 19 nt, Homo sapiens
  misc_RNA (1)...(19): siRNA sense strand
ggaucaaagugcuaaagcu

SEQ ID NO: 559852 - RNA, 19 nt, Homo sapiens
  misc_RNA (1)...(19): siRNA sense strand
gaugaacgaaauucucaau

SEQ ID NO: 559853 - RNA, 19 nt, Homo sapiens
  misc_RNA (1)...(19): siRNA sense strand
gcccgucaaugcugugaug

SEQ ID NO: 559854 - RNA, 19 nt, Homo sapiens
  misc_RNA (1)...(19): siRNA sense strand
augaggagguggaggcuuu

SEQ ID NO: 559855 - RNA, 19 nt, Homo sapiens
  misc_RNA (1)...(19): siRNA sense strand
ccaagguggaugcgaauga

SEQ ID NO: 559856 - RNA, 19 nt, Homo sapiens
  misc_RNA (1)...(19): siRNA sense strand
ucaaacgccugaggaucuu

SEQ ID NO: 559857 - RNA, 19 nt, Homo sapiens
  misc_RNA (1)...(19): siRNA sense strand
ggucagcccaacucucuug

SEQ ID NO: 559858 - RNA, 19 nt, Homo sapiens
  misc_RNA (1)...(19): siRNA sense strand
gaccaugaaugugcagaag

SEQ ID NO: 559859 - RNA, 19 nt, Homo sapiens
  misc_RNA (1)...(19): siRNA sense strand
auuggugccugcaucguua

SEQ ID NO: 559860 - RNA, 19 nt, Homo sapiens
  misc_RNA (1)...(19): siRNA sense strand
gggaaggaagcaaagcaaa

SEQ ID NO: 559861 - RNA, 19 nt, Homo sapiens
  misc_RNA (1)...(19): siRNA sense strand
gggcccuacuuccucauga

SEQ ID NO: 559862 - RNA, 19 nt, Homo sapiens
  misc_RNA (1)...(19): siRNA sense strand
guucaugggcucccuguuc

SEQ ID NO: 559863 - RNA, 19 nt, Homo sapiens
  misc_RNA (1)...(19): siRNA sense strand
cagggcaggucaagcuuuc

SEQ ID NO: 559864 - RNA, 19 nt, Homo sapiens
  misc_RNA (1)...(19): siRNA sense strand
ugauggcgaugaagaccaa

SEQ ID NO: 559865 - RNA, 19 nt, Homo sapiens
  misc_RNA (1)...(19): siRNA sense strand
gagauugucaaccucaugu

SEQ ID NO: 559866 - RNA, 19 nt, Homo sapiens
  misc_RNA (1)...(19): siRNA sense strand
acaccgugcugcuguuugu

SEQ ID NO: 559867 - RNA, 19 nt, Homo sapiens
  misc_RNA (1)...(19): siRNA sense strand
ucuuaaaguugcucaucaa

SEQ ID NO: 559868 - RNA, 19 nt, Homo sapiens
  misc_RNA (1)...(19): siRNA sense strand
ucccggaggucaucaagau

SEQ ID NO: 559869 - RNA, 19 nt, Homo sapiens
  misc_RNA (1)...(19): siRNA sense strand
ggacagugcagggaagcaa

SEQ ID NO: 559870 - RNA, 19 nt, Homo sapiens
  misc_RNA (1)...(19): siRNA sense strand
ggagguggaggcuuugauc

SEQ ID NO: 559871 - RNA, 19 nt, Homo sapiens
  misc_RNA (1)...(19): siRNA sense strand
gcaggucaccacguacuug

SEQ ID NO: 559872 - RNA, 19 nt, Homo sapiens
  misc_RNA (1)...(19): siRNA sense strand
agaaggaggagaccuggaa

SEQ ID NO: 559873 - RNA, 19 nt, Homo sapiens
  misc_RNA (1)...(19): siRNA sense strand
ucgugugggugccuuguuu

SEQ ID NO: 559874 - RNA, 19 nt, Homo sapiens
  misc_RNA (1)...(19): siRNA sense strand
ccacaucugcuucgucagu

SEQ ID NO: 559875 - RNA, 19 nt, Homo sapiens
  misc_RNA (1)...(19): siRNA sense strand
gcaccaguacuuccacauc

SEQ ID NO: 559876 - RNA, 19 nt, Homo sapiens
  misc_RNA (1)...(19): siRNA sense strand
gaugacaccucucaacaaa

SEQ ID NO: 559877 - RNA, 19 nt, Homo sapiens
  misc_RNA (1)...(19): siRNA sense strand
uaaaguugcucaucaaguu

SEQ ID NO: 559878 - RNA, 19 nt, Homo sapiens
  misc_RNA (1)...(19): siRNA sense strand
ggaagcaacugcagagaca

SEQ ID NO: 559879 - RNA, 19 nt, Homo sapiens
  misc_RNA (1)...(19): siRNA sense strand
ccaaggagcuggacacagu

SEQ ID NO: 559880 - RNA, 19 nt, Homo sapiens
  misc_RNA (1)...(19): siRNA sense strand
caacgagucugccgaagga

SEQ ID NO: 559881 - RNA, 19 nt, Homo sapiens
  misc_RNA (1)...(19): siRNA sense strand
gaucaagaccgcugucauu

SEQ ID NO: 559882 - RNA, 19 nt, Homo sapiens
  misc_RNA (1)...(19): siRNA sense strand
caaagcaaauggagaaugg

SEQ ID NO: 559883 - RNA, 19 nt, Homo sapiens
  misc_RNA (1)...(19): siRNA sense strand
gggcagaccucuucuacuc

SEQ ID NO: 559884 - RNA, 19 nt, Homo sapiens
  misc_RNA (1)...(19): siRNA sense strand
ccacguacauuaacaugau

SEQ ID NO: 559885 - RNA, 19 nt, Homo sapiens
  misc_RNA (1)...(19): siRNA sense strand
gaccgaggcuacauucaga

SEQ ID NO: 559886 - RNA, 19 nt, Homo sapiens
  misc_RNA (1)...(19): siRNA sense strand
uggagaggcucaaggagua

SEQ ID NO: 559887 - RNA, 19 nt, Homo sapiens
  misc_RNA (1)...(19): siRNA sense strand
gcagaccucuucuacucuu

SEQ ID NO: 559888 - RNA, 19 nt, Homo sapiens
  misc_RNA (1)...(19): siRNA sense strand
gaaggaagcaaagcaaaug

SEQ ID NO: 559889 - RNA, 19 nt, Homo sapiens
  misc_RNA (1)...(19): siRNA sense strand
ggccgcagaucuuaaaguu

SEQ ID NO: 559890 - RNA, 19 nt, Homo sapiens
  misc_RNA (1)...(19): siRNA sense strand
gaccuccgcuucaagauca

SEQ ID NO: 559891 - RNA, 19 nt, Homo sapiens
  misc_RNA (1)...(19): siRNA sense strand
aaggagaaauccaggagua

SEQ ID NO: 559892 - RNA, 19 nt, Homo sapiens
  misc_RNA (1)...(19): siRNA sense strand
caucugaaauggaaaccaa

SEQ ID NO: 559893 - RNA, 19 nt, Homo sapiens
  misc_RNA (1)...(19): siRNA sense strand
gcaacugcaucguucuguu

SEQ ID NO: 559894 - RNA, 19 nt, Homo sapiens
  misc_RNA (1)...(19): siRNA sense strand
ggaaagaagucggggcaua

SEQ ID NO: 559895 - RNA, 19 nt, Homo sapiens
  misc_RNA (1)...(19): siRNA sense strand
ugaacgaaauucucaaugg

SEQ ID NO: 559896 - RNA, 19 nt, Homo sapiens
  misc_RNA (1)...(19): siRNA sense strand
caagcuagaccaugaaugu

SEQ ID NO: 559897 - RNA, 19 nt, Homo sapiens
  misc_RNA (1)...(19): siRNA sense strand
guacucggaugaagaaguc

SEQ ID NO: 559898 - RNA, 19 nt, Homo sapiens
  misc_RNA (1)...(19): siRNA sense strand
gagaggaccuggacuucgu

SEQ ID NO: 559899 - RNA, 19 nt, Homo sapiens
  misc_RNA (1)...(19): siRNA sense strand
caacugcaucguucuguuu

SEQ ID NO: 559900 - RNA, 19 nt, Homo sapiens
  misc_RNA (1)...(19): siRNA sense strand
ggacuuggccacguacauu

SEQ ID NO: 559901 - RNA, 19 nt, Homo sapiens
  misc_RNA (1)...(19): siRNA sense strand
caacagcaccgcagaacug

SEQ ID NO: 559902 - RNA, 19 nt, Homo sapiens
  misc_RNA (1)...(19): siRNA sense strand
ggaaggaagcaaagcaaau

SEQ ID NO: 559903 - RNA, 19 nt, Homo sapiens
  misc_RNA (1)...(19): siRNA sense strand
gaucaaagugcuaaagcuu

SEQ ID NO: 559904 - RNA, 19 nt, Homo sapiens
  misc_RNA (1)...(19): siRNA sense strand
ugaaggugcugaagaaguc

SEQ ID NO: 559905 - RNA, 19 nt, Homo sapiens
  misc_RNA (1)...(19): siRNA sense strand
gcagagaggucuuuucuac

SEQ ID NO: 559906 - RNA, 19 nt, Homo sapiens
  misc_RNA (1)...(19): siRNA sense strand
ggaucuuucucucccauga

SEQ ID NO: 559907 - RNA, 19 nt, Homo sapiens
  misc_RNA (1)...(19): siRNA sense strand
cgaugaagaccaagacgua

SEQ ID NO: 559908 - RNA, 19 nt, Homo sapiens
  misc_RNA (1)...(19): siRNA sense strand
gcaucaacaucgccaagau

SEQ ID NO: 559909 - RNA, 19 nt, Homo sapiens
  misc_RNA (1)...(19): siRNA sense strand
gcugguagcccuagugugu

SEQ ID NO: 559910 - RNA, 19 nt, Homo sapiens
  misc_RNA (1)...(19): siRNA sense strand
agaaccagaaggccuauua

SEQ ID NO: 559911 - RNA, 19 nt, Homo sapiens
  misc_RNA (1)...(19): siRNA sense strand
ggacucaggagcacacgaa

SEQ ID NO: 559912 - RNA, 19 nt, Homo sapiens
  misc_RNA (1)...(19): siRNA sense strand
ccugggagcuggcauucaa

SEQ ID NO: 559913 - RNA, 19 nt, Homo sapiens
  misc_RNA (1)...(19): siRNA sense strand
cgaaagagaguuccaaggu

SEQ ID NO: 559914 - RNA, 19 nt, Homo sapiens
  misc_RNA (1)...(19): siRNA sense strand
uggcugagauggacaaagu

SEQ ID NO: 559915 - RNA, 19 nt, Homo sapiens
  misc_RNA (1)...(19): siRNA sense strand
gaagucugccuaccuguca

SEQ ID NO: 559916 - RNA, 19 nt, Homo sapiens
  misc_RNA (1)...(19): siRNA sense strand
cauugcaggucaccacgua

SEQ ID NO: 559917 - RNA, 19 nt, Homo sapiens
  misc_RNA (1)...(19): siRNA sense strand
cugacaagcuagaccauga

SEQ ID NO: 559918 - RNA, 19 nt, Homo sapiens
  misc_RNA (1)...(19): siRNA sense strand
ucuguuugcugcccuguuu

SEQ ID NO: 559919 - RNA, 19 nt, Homo sapiens
  misc_RNA (1)...(19): siRNA sense strand
gaccuggacuucguucuca

SEQ ID NO: 559920 - RNA, 19 nt, Homo sapiens
  misc_RNA (1)...(19): siRNA sense strand
gcaaagacaaucggaucaa

SEQ ID NO: 559921 - RNA, 19 nt, Homo sapiens
  misc_RNA (1)...(19): siRNA sense strand
gaaauucucaaugggauca

SEQ ID NO: 559922 - RNA, 19 nt, Homo sapiens
  misc_RNA (1)...(19): siRNA sense strand
caaagacaaucggaucaag

SEQ ID NO: 559923 - RNA, 19 nt, Homo sapiens
  misc_RNA (1)...(19): siRNA sense strand
cucaugagcuucuucuuca

SEQ ID NO: 559924 - RNA, 19 nt, Homo sapiens
  misc_RNA (1)...(19): siRNA sense strand
aaggagagaucaucaucga

SEQ ID NO: 559925 - RNA, 19 nt, Homo sapiens
  misc_RNA (1)...(19): siRNA sense strand
gagcugaaggugcugaaga

SEQ ID NO: 559926 - RNA, 19 nt, Homo sapiens
  misc_RNA (1)...(19): siRNA sense strand
uggaaugucacguggaaua

SEQ ID NO: 559927 - RNA, 19 nt, Homo sapiens
  misc_RNA (1)...(19): siRNA sense strand
ggaaggcccuggugaucac

SEQ ID NO: 559928 - RNA, 19 nt, Homo sapiens
  misc_RNA (1)...(19): siRNA sense strand
ccacgcugcuugcuaccuu

SEQ ID NO: 559929 - RNA, 19 nt, Homo sapiens
  misc_RNA (1)...(19): siRNA sense strand
gcgagugucucccucaaac

SEQ ID NO: 559930 - RNA, 19 nt, Homo sapiens
  misc_RNA (1)...(19): siRNA sense strand
ggacacgucggaacaaguc

SEQ ID NO: 559931 - RNA, 19 nt, Homo sapiens
  misc_RNA (1)...(19): siRNA sense strand
gaguggaauuccggaacua

SEQ ID NO: 559932 - RNA, 19 nt, Homo sapiens
  misc_RNA (1)...(19): siRNA sense strand
caaggaguauucagagacu

SEQ ID NO: 559933 - RNA, 19 nt, Homo sapiens
  misc_RNA (1)...(19): siRNA sense strand
cacaagggaucgccguguu

SEQ ID NO: 559934 - RNA, 19 nt, Homo sapiens
  misc_RNA (1)...(19): siRNA sense strand
gcgcuggcuuccaacuauu

SEQ ID NO: 559935 - RNA, 19 nt, Homo sapiens
  misc_RNA (1)...(19): siRNA sense strand
guacugggacuacaugaag

SEQ ID NO: 559936 - RNA, 19 nt, Homo sapiens
  misc_RNA (1)...(19): siRNA sense strand
gcaaagcaaauggagaaug

SEQ ID NO: 559937 - RNA, 19 nt, Homo sapiens
  misc_RNA (1)...(19): siRNA sense strand
aagcaaagcaaauggagaa

SEQ ID NO: 559938 - RNA, 19 nt, Homo sapiens
  misc_RNA (1)...(19): siRNA sense strand
gcagguggacgucaucauc

SEQ ID NO: 559939 - RNA, 19 nt, Homo sapiens
  misc_RNA (1)...(19): siRNA sense strand
gacuuggccacguacauua

SEQ ID NO: 559940 - RNA, 19 nt, Homo sapiens
  misc_RNA (1)...(19): siRNA sense strand
ucauggacuuggccacgua

SEQ ID NO: 559941 - RNA, 19 nt, Homo sapiens
  misc_RNA (1)...(19): siRNA sense strand
gaaggaaugcgccaagacu

SEQ ID NO: 559942 - RNA, 19 nt, Homo sapiens
  misc_RNA (1)...(19): siRNA sense strand
cagggaucaugcucacuuu

SEQ ID NO: 559943 - RNA, 19 nt, Homo sapiens
  misc_RNA (1)...(19): siRNA sense strand
ccaguacucggaugaagaa

SEQ ID NO: 559944 - RNA, 19 nt, Homo sapiens
  misc_RNA (1)...(19): siRNA sense strand
ggucaagcuuuccguguac

SEQ ID NO: 559945 - RNA, 19 nt, Homo sapiens
  misc_RNA (1)...(19): siRNA sense strand
uaaagaacuggaagaagga

SEQ ID NO: 559946 - RNA, 19 nt, Homo sapiens
  misc_RNA (1)...(19): siRNA sense strand
cucagugucuuacucauug

SEQ ID NO: 559947 - RNA, 19 nt, Homo sapiens
  misc_RNA (1)...(19): siRNA sense strand
ucaagcugaugaacgaaau

SEQ ID NO: 559948 - RNA, 19 nt, Homo sapiens
  misc_RNA (1)...(19): siRNA sense strand
ggaucaugcucacuuucug

SEQ ID NO: 559949 - RNA, 19 nt, Homo sapiens
  misc_RNA (1)...(19): siRNA sense strand
cagcagcuccuccuccuau

SEQ ID NO: 559950 - RNA, 19 nt, Homo sapiens
  misc_RNA (1)...(19): siRNA sense strand
gcacagcaugagcuacuug

SEQ ID NO: 559951 - RNA, 19 nt, Homo sapiens
  misc_RNA (1)...(19): siRNA sense strand
ggaucaaagugcuaaagcu

SEQ ID NO: 559952 - RNA, 19 nt, Homo sapiens
  misc_RNA (1)...(19): siRNA sense strand
gaugaacgaaauucucaau

SEQ ID NO: 559953 - RNA, 19 nt, Homo sapiens
  misc_RNA (1)...(19): siRNA sense strand
gcccgucaaugcugugaug

SEQ ID NO: 559954 - RNA, 19 nt, Homo sapiens
  misc_RNA (1)...(19): siRNA sense strand
augaggagguggaggcuuu

SEQ ID NO: 559955 - RNA, 19 nt, Homo sapiens
  misc_RNA (1)...(19): siRNA sense strand
ccaagguggaugcgaauga

SEQ ID NO: 559956 - RNA, 19 nt, Homo sapiens
  misc_RNA (1)...(19): siRNA sense strand
ucaaacgccugaggaucuu

SEQ ID NO: 559957 - RNA, 19 nt, Homo sapiens
  misc_RNA (1)...(19): siRNA sense strand
ggucagcccaacucucuug

SEQ ID NO: 559958 - RNA, 19 nt, Homo sapiens
  misc_RNA (1)...(19): siRNA sense strand
gaccaugaaugugcagaag

SEQ ID NO: 559959 - RNA, 19 nt, Homo sapiens
  misc_RNA (1)...(19): siRNA sense strand
auuggugccugcaucguua

SEQ ID NO: 559960 - RNA, 19 nt, Homo sapiens
  misc_RNA (1)...(19): siRNA sense strand
gggaaggaagcaaagcaaa

SEQ ID NO: 559961 - RNA, 19 nt, Homo sapiens
  misc_RNA (1)...(19): siRNA sense strand
gggcccuacuuccucauga

SEQ ID NO: 559962 - RNA, 19 nt, Homo sapiens
  misc_RNA (1)...(19): siRNA sense strand
guucaugggcucccuguuc

SEQ ID NO: 559963 - RNA, 19 nt, Homo sapiens
  misc_RNA (1)...(19): siRNA sense strand
cagggcaggucaagcuuuc

SEQ ID NO: 559964 - RNA, 19 nt, Homo sapiens
  misc_RNA (1)...(19): siRNA sense strand
ugauggcgaugaagaccaa

SEQ ID NO: 559965 - RNA, 19 nt, Homo sapiens
  misc_RNA (1)...(19): siRNA sense strand
gagauugucaaccucaugu

SEQ ID NO: 559966 - RNA, 19 nt, Homo sapiens
  misc_RNA (1)...(19): siRNA sense strand
acaccgugcugcuguuugu

SEQ ID NO: 559967 - RNA, 19 nt, Homo sapiens
  misc_RNA (1)...(19): siRNA sense strand
ucuuaaaguugcucaucaa

SEQ ID NO: 559968 - RNA, 19 nt, Homo sapiens
  misc_RNA (1)...(19): siRNA sense strand
ucccggaggucaucaagau

SEQ ID NO: 559969 - RNA, 19 nt, Homo sapiens
  misc_RNA (1)...(19): siRNA sense strand
ggacagugcagggaagcaa

SEQ ID NO: 559970 - RNA, 19 nt, Homo sapiens
  misc_RNA (1)...(19): siRNA sense strand
ggagguggaggcuuugauc

SEQ ID NO: 559971 - RNA, 19 nt, Homo sapiens
  misc_RNA (1)...(19): siRNA sense strand
gcaggucaccacguacuug

SEQ ID NO: 559972 - RNA, 19 nt, Homo sapiens
  misc_RNA (1)...(19): siRNA sense strand
agaaggaggagaccuggaa

SEQ ID NO: 559973 - RNA, 19 nt, Homo sapiens
  misc_RNA (1)...(19): siRNA sense strand
ucgugugggugccuuguuu

SEQ ID NO: 559974 - RNA, 19 nt, Homo sapiens
  misc_RNA (1)...(19): siRNA sense strand
ccacaucugcuucgucagu

SEQ ID NO: 559975 - RNA, 19 nt, Homo sapiens
  misc_RNA (1)...(19): siRNA sense strand
gcaccaguacuuccacauc

SEQ ID NO: 559976 - RNA, 19 nt, Homo sapiens
  misc_RNA (1)...(19): siRNA sense strand
gaugacaccucucaacaaa

SEQ ID NO: 559977 - RNA, 19 nt, Homo sapiens
  misc_RNA (1)...(19): siRNA sense strand
uaaaguugcucaucaaguu

SEQ ID NO: 559978 - RNA, 19 nt, Homo sapiens
  misc_RNA (1)...(19): siRNA sense strand
ggaagcaacugcagagaca

SEQ ID NO: 559979 - RNA, 19 nt, Homo sapiens
  misc_RNA (1)...(19): siRNA sense strand
ccaaggagcuggacacagu

SEQ ID NO: 559980 - RNA, 19 nt, Homo sapiens
  misc_RNA (1)...(19): siRNA sense strand
caacgagucugccgaagga

SEQ ID NO: 559981 - RNA, 19 nt, Homo sapiens
  misc_RNA (1)...(19): siRNA sense strand
gaucaagaccgcugucauu

SEQ ID NO: 559982 - RNA, 19 nt, Homo sapiens
  misc_RNA (1)...(19): siRNA sense strand
caaagcaaauggagaaugg

SEQ ID NO: 559983 - RNA, 19 nt, Homo sapiens
  misc_RNA (1)...(19): siRNA sense strand
gggcagaccucuucuacuc

SEQ ID NO: 559984 - RNA, 19 nt, Homo sapiens
  misc_RNA (1)...(19): siRNA sense strand
ccacguacauuaacaugau

SEQ ID NO: 559985 - RNA, 19 nt, Homo sapiens
  misc_RNA (1)...(19): siRNA sense strand
gaccgaggcuacauucaga

SEQ ID NO: 559986 - RNA, 19 nt, Homo sapiens
  misc_RNA (1)...(19): siRNA sense strand
uggagaggcucaaggagua

SEQ ID NO: 559987 - RNA, 19 nt, Homo sapiens
  misc_RNA (1)...(19): siRNA sense strand
gcagaccucuucuacucuu

SEQ ID NO: 559988 - RNA, 19 nt, Homo sapiens
  misc_RNA (1)...(19): siRNA sense strand
gaaggaagcaaagcaaaug

SEQ ID NO: 559989 - RNA, 19 nt, Homo sapiens
  misc_RNA (1)...(19): siRNA sense strand
ggccgcagaucuuaaaguu

SEQ ID NO: 559990 - RNA, 19 nt, Homo sapiens
  misc_RNA (1)...(19): siRNA sense strand
gaccuccgcuucaagauca

SEQ ID NO: 559991 - RNA, 19 nt, Homo sapiens
  misc_RNA (1)...(19): siRNA sense strand
aaggagaaauccaggagua

SEQ ID NO: 559992 - RNA, 19 nt, Homo sapiens
  misc_RNA (1)...(19): siRNA sense strand
caucugaaauggaaaccaa

SEQ ID NO: 559993 - RNA, 19 nt, Homo sapiens
  misc_RNA (1)...(19): siRNA sense strand
gcaacugcaucguucuguu

SEQ ID NO: 559994 - RNA, 19 nt, Homo sapiens
  misc_RNA (1)...(19): siRNA sense strand
ggaaagaagucggggcaua

SEQ ID NO: 559995 - RNA, 19 nt, Homo sapiens
  misc_RNA (1)...(19): siRNA sense strand
ugaacgaaauucucaaugg

SEQ ID NO: 559996 - RNA, 19 nt, Homo sapiens
  misc_RNA (1)...(19): siRNA sense strand
caagcuagaccaugaaugu

SEQ ID NO: 559997 - RNA, 19 nt, Homo sapiens
  misc_RNA (1)...(19): siRNA sense strand
guacucggaugaagaaguc

SEQ ID NO: 559998 - RNA, 19 nt, Homo sapiens
  misc_RNA (1)...(19): siRNA sense strand
gagaggaccuggacuucgu

SEQ ID NO: 559999 - RNA, 19 nt, Homo sapiens
  misc_RNA (1)...(19): siRNA sense strand
caacugcaucguucuguuu

SEQ ID NO: 560000 - RNA, 19 nt, Homo sapiens
  misc_RNA (1)...(19): siRNA sense strand
ggacuuggccacguacauu

SEQ ID NO: 560001 - RNA, 19 nt, Homo sapiens
  misc_RNA (1)...(19): siRNA sense strand
caacagcaccgcagaacug

SEQ ID NO: 560002 - RNA, 19 nt, Homo sapiens
  misc_RNA (1)...(19): siRNA sense strand
ggaaggaagcaaagcaaau

SEQ ID NO: 560003 - RNA, 19 nt, Homo sapiens
  misc_RNA (1)...(19): siRNA sense strand
gaucaaagugcuaaagcuu

SEQ ID NO: 560004 - RNA, 19 nt, Homo sapiens
  misc_RNA (1)...(19): siRNA sense strand
ugaaggugcugaagaaguc

SEQ ID NO: 560005 - RNA, 19 nt, Homo sapiens
  misc_RNA (1)...(19): siRNA sense strand
gcagagaggucuuuucuac

SEQ ID NO: 560006 - RNA, 19 nt, Homo sapiens
  misc_RNA (1)...(19): siRNA sense strand
ggaucuuucucucccauga

SEQ ID NO: 560007 - RNA, 19 nt, Homo sapiens
  misc_RNA (1)...(19): siRNA sense strand
cgaugaagaccaagacgua

SEQ ID NO: 560008 - RNA, 19 nt, Homo sapiens
  misc_RNA (1)...(19): siRNA sense strand
gcaucaacaucgccaagau

SEQ ID NO: 560009 - RNA, 19 nt, Homo sapiens
  misc_RNA (1)...(19): siRNA sense strand
gcugguagcccuagugugu

SEQ ID NO: 560010 - RNA, 19 nt, Homo sapiens
  misc_RNA (1)...(19): siRNA sense strand
agaaccagaaggccuauua

SEQ ID NO: 560011 - RNA, 19 nt, Homo sapiens
  misc_RNA (1)...(19): siRNA sense strand
ggacucaggagcacacgaa

SEQ ID NO: 560012 - RNA, 19 nt, Homo sapiens
  misc_RNA (1)...(19): siRNA sense strand
ccugggagcuggcauucaa

SEQ ID NO: 560013 - RNA, 19 nt, Homo sapiens
  misc_RNA (1)...(19): siRNA sense strand
cgaaagagaguuccaaggu

SEQ ID NO: 560014 - RNA, 19 nt, Homo sapiens
  misc_RNA (1)...(19): siRNA sense strand
uggcugagauggacaaagu

SEQ ID NO: 560015 - RNA, 19 nt, Homo sapiens
  misc_RNA (1)...(19): siRNA sense strand
gaagucugccuaccuguca

SEQ ID NO: 560016 - RNA, 19 nt, Homo sapiens
  misc_RNA (1)...(19): siRNA sense strand
cauugcaggucaccacgua

SEQ ID NO: 560017 - RNA, 19 nt, Homo sapiens
  misc_RNA (1)...(19): siRNA sense strand
cugacaagcuagaccauga

SEQ ID NO: 560018 - RNA, 19 nt, Homo sapiens
  misc_RNA (1)...(19): siRNA sense strand
ucuguuugcugcccuguuu

SEQ ID NO: 560019 - RNA, 19 nt, Homo sapiens
  misc_RNA (1)...(19): siRNA sense strand
gaccuggacuucguucuca

SEQ ID NO: 560020 - RNA, 19 nt, Homo sapiens
  misc_RNA (1)...(19): siRNA sense strand
gcaaagacaaucggaucaa

SEQ ID NO: 560021 - RNA, 19 nt, Homo sapiens
  misc_RNA (1)...(19): siRNA sense strand
gaaauucucaaugggauca

SEQ ID NO: 560022 - RNA, 19 nt, Homo sapiens
  misc_RNA (1)...(19): siRNA sense strand
caaagacaaucggaucaag

SEQ ID NO: 560023 - RNA, 19 nt, Homo sapiens
  misc_RNA (1)...(19): siRNA sense strand
cucaugagcuucuucuuca

SEQ ID NO: 560024 - RNA, 19 nt, Homo sapiens
  misc_RNA (1)...(19): siRNA sense strand
aaggagagaucaucaucga

SEQ ID NO: 560025 - RNA, 19 nt, Homo sapiens
  misc_RNA (1)...(19): siRNA sense strand
gagcugaaggugcugaaga

SEQ ID NO: 560026 - RNA, 19 nt, Homo sapiens
  misc_RNA (1)...(19): siRNA sense strand
uggaaugucacguggaaua

SEQ ID NO: 560027 - RNA, 19 nt, Homo sapiens
  misc_RNA (1)...(19): siRNA sense strand
ggaaggcccuggugaucac

SEQ ID NO: 560028 - RNA, 19 nt, Homo sapiens
  misc_RNA (1)...(19): siRNA sense strand
ccacgcugcuugcuaccuu

SEQ ID NO: 560029 - RNA, 19 nt, Homo sapiens
  misc_RNA (1)...(19): siRNA sense strand
gcgagugucucccucaaac

SEQ ID NO: 560030 - RNA, 19 nt, Homo sapiens
  misc_RNA (1)...(19): siRNA sense strand
ggacacgucggaacaaguc

SEQ ID NO: 560031 - RNA, 19 nt, Homo sapiens
  misc_RNA (1)...(19): siRNA sense strand
gaguggaauuccggaacua

SEQ ID NO: 560032 - RNA, 19 nt, Homo sapiens
  misc_RNA (1)...(19): siRNA sense strand
caaggaguauucagagacu

SEQ ID NO: 560033 - RNA, 19 nt, Homo sapiens
  misc_RNA (1)...(19): siRNA sense strand
cacaagggaucgccguguu

SEQ ID NO: 560034 - RNA, 19 nt, Homo sapiens
  misc_RNA (1)...(19): siRNA sense strand
gcgcuggcuuccaacuauu

SEQ ID NO: 560035 - RNA, 19 nt, Homo sapiens
  misc_RNA (1)...(19): siRNA sense strand
guacugggacuacaugaag

SEQ ID NO: 560036 - RNA, 19 nt, Homo sapiens
  misc_RNA (1)...(19): siRNA sense strand
gcaaagcaaauggagaaug

SEQ ID NO: 560037 - RNA, 19 nt, Homo sapiens
  misc_RNA (1)...(19): siRNA sense strand
aagcaaagcaaauggagaa

SEQ ID NO: 560038 - RNA, 19 nt, Homo sapiens
  misc_RNA (1)...(19): siRNA sense strand
gcagguggacgucaucauc

SEQ ID NO: 560039 - RNA, 19 nt, Homo sapiens
  misc_RNA (1)...(19): siRNA sense strand
gacuuggccacguacauua

SEQ ID NO: 560040 - RNA, 19 nt, Homo sapiens
  misc_RNA (1)...(19): siRNA sense strand
ucauggacuuggccacgua

SEQ ID NO: 560041 - RNA, 19 nt, Homo sapiens
  misc_RNA (1)...(19): siRNA sense strand
gaaggaaugcgccaagacu

SEQ ID NO: 560042 - RNA, 19 nt, Homo sapiens
  misc_RNA (1)...(19): siRNA sense strand
cagggaucaugcucacuuu

SEQ ID NO: 560043 - RNA, 19 nt, Homo sapiens
  misc_RNA (1)...(19): siRNA sense strand
ccaguacucggaugaagaa

SEQ ID NO: 560044 - RNA, 19 nt, Homo sapiens
  misc_RNA (1)...(19): siRNA sense strand
ggucaagcuuuccguguac

SEQ ID NO: 560045 - RNA, 19 nt, Homo sapiens
  misc_RNA (1)...(19): siRNA sense strand
uaaagaacuggaagaagga

SEQ ID NO: 560046 - RNA, 19 nt, Homo sapiens
  misc_RNA (1)...(19): siRNA sense strand
cucagugucuuacucauug

SEQ ID NO: 560047 - RNA, 19 nt, Homo sapiens
  misc_RNA (1)...(19): siRNA sense strand
ucaagcugaugaacgaaau

SEQ ID NO: 560048 - RNA, 19 nt, Homo sapiens
  misc_RNA (1)...(19): siRNA sense strand
ggaucaugcucacuuucug

SEQ ID NO: 560049 - RNA, 19 nt, Homo sapiens
  misc_RNA (1)...(19): siRNA sense strand
cagcagcuccuccuccuau

SEQ ID NO: 560050 - RNA, 19 nt, Homo sapiens
  misc_RNA (1)...(19): siRNA sense strand
gcacagcaugagcuacuug

SEQ ID NO: 560051 - RNA, 19 nt, Homo sapiens
  misc_RNA (1)...(19): siRNA sense strand
ggaucaaagugcuaaagcu

SEQ ID NO: 560052 - RNA, 19 nt, Homo sapiens
  misc_RNA (1)...(19): siRNA sense strand
gaugaacgaaauucucaau

SEQ ID NO: 560053 - RNA, 19 nt, Homo sapiens
  misc_RNA (1)...(19): siRNA sense strand
gcccgucaaugcugugaug

SEQ ID NO: 560054 - RNA, 19 nt, Homo sapiens
  misc_RNA (1)...(19): siRNA sense strand
augaggagguggaggcuuu

SEQ ID NO: 560055 - RNA, 19 nt, Homo sapiens
  misc_RNA (1)...(19): siRNA sense strand
ccaagguggaugcgaauga

SEQ ID NO: 560056 - RNA, 19 nt, Homo sapiens
  misc_RNA (1)...(19): siRNA sense strand
ucaaacgccugaggaucuu

SEQ ID NO: 560057 - RNA, 19 nt, Homo sapiens
  misc_RNA (1)...(19): siRNA sense strand
ggucagcccaacucucuug

SEQ ID NO: 560058 - RNA, 19 nt, Homo sapiens
  misc_RNA (1)...(19): siRNA sense strand
gaccaugaaugugcagaag

SEQ ID NO: 560059 - RNA, 19 nt, Homo sapiens
  misc_RNA (1)...(19): siRNA sense strand
auuggugccugcaucguua

SEQ ID NO: 560060 - RNA, 19 nt, Homo sapiens
  misc_RNA (1)...(19): siRNA sense strand
gggaaggaagcaaagcaaa

SEQ ID NO: 560061 - RNA, 19 nt, Homo sapiens
  misc_RNA (1)...(19): siRNA sense strand
gggcccuacuuccucauga

SEQ ID NO: 560062 - RNA, 19 nt, Homo sapiens
  misc_RNA (1)...(19): siRNA sense strand
guucaugggcucccuguuc

SEQ ID NO: 560063 - RNA, 19 nt, Homo sapiens
  misc_RNA (1)...(19): siRNA sense strand
cagggcaggucaagcuuuc

SEQ ID NO: 560064 - RNA, 19 nt, Homo sapiens
  misc_RNA (1)...(19): siRNA sense strand
ugauggcgaugaagaccaa

SEQ ID NO: 560065 - RNA, 19 nt, Homo sapiens
  misc_RNA (1)...(19): siRNA sense strand
gagauugucaaccucaugu

SEQ ID NO: 560066 - RNA, 19 nt, Homo sapiens
  misc_RNA (1)...(19): siRNA sense strand
acaccgugcugcuguuugu

SEQ ID NO: 560067 - RNA, 19 nt, Homo sapiens
  misc_RNA (1)...(19): siRNA sense strand
ucuuaaaguugcucaucaa

SEQ ID NO: 560068 - RNA, 19 nt, Homo sapiens
  misc_RNA (1)...(19): siRNA sense strand
ucccggaggucaucaagau

SEQ ID NO: 560069 - RNA, 19 nt, Homo sapiens
  misc_RNA (1)...(19): siRNA sense strand
ggacagugcagggaagcaa

SEQ ID NO: 560070 - RNA, 19 nt, Homo sapiens
  misc_RNA (1)...(19): siRNA sense strand
ggagguggaggcuuugauc

SEQ ID NO: 560071 - RNA, 19 nt, Homo sapiens
  misc_RNA (1)...(19): siRNA sense strand
gcaggucaccacguacuug

SEQ ID NO: 560072 - RNA, 19 nt, Homo sapiens
  misc_RNA (1)...(19): siRNA sense strand
agaaggaggagaccuggaa

SEQ ID NO: 560073 - RNA, 19 nt, Homo sapiens
  misc_RNA (1)...(19): siRNA sense strand
ucgugugggugccuuguuu

SEQ ID NO: 560074 - RNA, 19 nt, Homo sapiens
  misc_RNA (1)...(19): siRNA sense strand
ccacaucugcuucgucagu

SEQ ID NO: 560075 - RNA, 19 nt, Homo sapiens
  misc_RNA (1)...(19): siRNA sense strand
gcaccaguacuuccacauc

SEQ ID NO: 560076 - RNA, 19 nt, Homo sapiens
  misc_RNA (1)...(19): siRNA sense strand
gaugacaccucucaacaaa

SEQ ID NO: 560077 - RNA, 19 nt, Homo sapiens
  misc_RNA (1)...(19): siRNA sense strand
uaaaguugcucaucaaguu

SEQ ID NO: 560078 - RNA, 19 nt, Homo sapiens
  misc_RNA (1)...(19): siRNA sense strand
ggaagcaacugcagagaca

SEQ ID NO: 560079 - RNA, 19 nt, Homo sapiens
  misc_RNA (1)...(19): siRNA sense strand
ccaaggagcuggacacagu

SEQ ID NO: 560080 - RNA, 19 nt, Homo sapiens
  misc_RNA (1)...(19): siRNA sense strand
caacgagucugccgaagga

SEQ ID NO: 560081 - RNA, 19 nt, Homo sapiens
  misc_RNA (1)...(19): siRNA sense strand
gaucaagaccgcugucauu

SEQ ID NO: 560082 - RNA, 19 nt, Homo sapiens
  misc_RNA (1)...(19): siRNA sense strand
caaagcaaauggagaaugg

SEQ ID NO: 560083 - RNA, 19 nt, Homo sapiens
  misc_RNA (1)...(19): siRNA sense strand
gggcagaccucuucuacuc

SEQ ID NO: 560084 - RNA, 19 nt, Homo sapiens
  misc_RNA (1)...(19): siRNA sense strand
ccacguacauuaacaugau

SEQ ID NO: 560085 - RNA, 19 nt, Homo sapiens
  misc_RNA (1)...(19): siRNA sense strand
gaccgaggcuacauucaga

SEQ ID NO: 560086 - RNA, 19 nt, Homo sapiens
  misc_RNA (1)...(19): siRNA sense strand
uggagaggcucaaggagua

SEQ ID NO: 560087 - RNA, 19 nt, Homo sapiens
  misc_RNA (1)...(19): siRNA sense strand
gcagaccucuucuacucuu

SEQ ID NO: 560088 - RNA, 19 nt, Homo sapiens
  misc_RNA (1)...(19): siRNA sense strand
gaaggaagcaaagcaaaug

SEQ ID NO: 560089 - RNA, 19 nt, Homo sapiens
  misc_RNA (1)...(19): siRNA sense strand
ggccgcagaucuuaaaguu

SEQ ID NO: 560090 - RNA, 19 nt, Homo sapiens
  misc_RNA (1)...(19): siRNA sense strand
gaccuccgcuucaagauca

SEQ ID NO: 560091 - RNA, 19 nt, Homo sapiens
  misc_RNA (1)...(19): siRNA sense strand
aaggagaaauccaggagua

SEQ ID NO: 560092 - RNA, 19 nt, Homo sapiens
  misc_RNA (1)...(19): siRNA sense strand
caucugaaauggaaaccaa

SEQ ID NO: 560093 - RNA, 19 nt, Homo sapiens
  misc_RNA (1)...(19): siRNA sense strand
gcaacugcaucguucuguu

SEQ ID NO: 560094 - RNA, 19 nt, Homo sapiens
  misc_RNA (1)...(19): siRNA sense strand
ggaaagaagucggggcaua

SEQ ID NO: 560095 - RNA, 19 nt, Homo sapiens
  misc_RNA (1)...(19): siRNA sense strand
ugaacgaaauucucaaugg

SEQ ID NO: 560096 - RNA, 19 nt, Homo sapiens
  misc_RNA (1)...(19): siRNA sense strand
caagcuagaccaugaaugu

SEQ ID NO: 560097 - RNA, 19 nt, Homo sapiens
  misc_RNA (1)...(19): siRNA sense strand
guacucggaugaagaaguc

SEQ ID NO: 560098 - RNA, 19 nt, Homo sapiens
  misc_RNA (1)...(19): siRNA sense strand
gagaggaccuggacuucgu

SEQ ID NO: 560099 - RNA, 19 nt, Homo sapiens
  misc_RNA (1)...(19): siRNA sense strand
caacugcaucguucuguuu

SEQ ID NO: 560100 - RNA, 19 nt, Homo sapiens
  misc_RNA (1)...(19): siRNA sense strand
ggacuuggccacguacauu

SEQ ID NO: 560101 - RNA, 19 nt, Homo sapiens
  misc_RNA (1)...(19): siRNA sense strand
caacagcaccgcagaacug

SEQ ID NO: 560102 - RNA, 19 nt, Homo sapiens
  misc_RNA (1)...(19): siRNA sense strand
ggaaggaagcaaagcaaau

SEQ ID NO: 560103 - RNA, 19 nt, Homo sapiens
  misc_RNA (1)...(19): siRNA sense strand
gaucaaagugcuaaagcuu

SEQ ID NO: 560104 - RNA, 19 nt, Homo sapiens
  misc_RNA (1)...(19): siRNA sense strand
ugaaggugcugaagaaguc

SEQ ID NO: 560105 - RNA, 19 nt, Homo sapiens
  misc_RNA (1)...(19): siRNA sense strand
gcagagaggucuuuucuac

SEQ ID NO: 560106 - RNA, 19 nt, Homo sapiens
  misc_RNA (1)...(19): siRNA sense strand
ggaucuuucucucccauga

SEQ ID NO: 560107 - RNA, 19 nt, Homo sapiens
  misc_RNA (1)...(19): siRNA sense strand
cgaugaagaccaagacgua

SEQ ID NO: 560108 - RNA, 19 nt, Homo sapiens
  misc_RNA (1)...(19): siRNA sense strand
gcaucaacaucgccaagau

SEQ ID NO: 560109 - RNA, 19 nt, Homo sapiens
  misc_RNA (1)...(19): siRNA sense strand
gcugguagcccuagugugu

SEQ ID NO: 560110 - RNA, 19 nt, Homo sapiens
  misc_RNA (1)...(19): siRNA sense strand
agaaccagaaggccuauua

SEQ ID NO: 560111 - RNA, 19 nt, Homo sapiens
  misc_RNA (1)...(19): siRNA sense strand
ggacucaggagcacacgaa

SEQ ID NO: 560112 - RNA, 19 nt, Homo sapiens
  misc_RNA (1)...(19): siRNA sense strand
ccugggagcuggcauucaa

SEQ ID NO: 560113 - RNA, 19 nt, Homo sapiens
  misc_RNA (1)...(19): siRNA sense strand
cgaaagagaguuccaaggu

SEQ ID NO: 560114 - RNA, 19 nt, Homo sapiens
  misc_RNA (1)...(19): siRNA sense strand
uggcugagauggacaaagu

SEQ ID NO: 560115 - RNA, 19 nt, Homo sapiens
  misc_RNA (1)...(19): siRNA sense strand
gaagucugccuaccuguca

SEQ ID NO: 560116 - RNA, 19 nt, Homo sapiens
  misc_RNA (1)...(19): siRNA sense strand
cauugcaggucaccacgua

SEQ ID NO: 560117 - RNA, 19 nt, Homo sapiens
  misc_RNA (1)...(19): siRNA sense strand
cugacaagcuagaccauga

SEQ ID NO: 560118 - RNA, 19 nt, Homo sapiens
  misc_RNA (1)...(19): siRNA sense strand
ucuguuugcugcccuguuu

SEQ ID NO: 560119 - RNA, 19 nt, Homo sapiens
  misc_RNA (1)...(19): siRNA sense strand
gaccuggacuucguucuca

SEQ ID NO: 560120 - RNA, 19 nt, Homo sapiens
  misc_RNA (1)...(19): siRNA sense strand
gcaaagacaaucggaucaa

SEQ ID NO: 560121 - RNA, 19 nt, Homo sapiens
  misc_RNA (1)...(19): siRNA sense strand
gaaauucucaaugggauca

SEQ ID NO: 560122 - RNA, 19 nt, Homo sapiens
  misc_RNA (1)...(19): siRNA sense strand
caaagacaaucggaucaag

SEQ ID NO: 560123 - RNA, 19 nt, Homo sapiens
  misc_RNA (1)...(19): siRNA sense strand
cucaugagcuucuucuuca

SEQ ID NO: 560124 - RNA, 19 nt, Homo sapiens
  misc_RNA (1)...(19): siRNA sense strand
aaggagagaucaucaucga

SEQ ID NO: 560125 - RNA, 19 nt, Homo sapiens
  misc_RNA (1)...(19): siRNA sense strand
gagcugaaggugcugaaga

SEQ ID NO: 560126 - RNA, 19 nt, Homo sapiens
  misc_RNA (1)...(19): siRNA sense strand
uggaaugucacguggaaua

SEQ ID NO: 560127 - RNA, 19 nt, Homo sapiens
  misc_RNA (1)...(19): siRNA sense strand
ggaaggcccuggugaucac

SEQ ID NO: 560128 - RNA, 19 nt, Homo sapiens
  misc_RNA (1)...(19): siRNA sense strand
ccacgcugcuugcuaccuu

SEQ ID NO: 560129 - RNA, 19 nt, Homo sapiens
  misc_RNA (1)...(19): siRNA sense strand
gcgagugucucccucaaac

SEQ ID NO: 560130 - RNA, 19 nt, Homo sapiens
  misc_RNA (1)...(19): siRNA sense strand
ggacacgucggaacaaguc

SEQ ID NO: 560131 - RNA, 19 nt, Homo sapiens
  misc_RNA (1)...(19): siRNA sense strand
gaguggaauuccggaacua

SEQ ID NO: 560132 - RNA, 19 nt, Homo sapiens
  misc_RNA (1)...(19): siRNA sense strand
caaggaguauucagagacu

SEQ ID NO: 560133 - RNA, 19 nt, Homo sapiens
  misc_RNA (1)...(19): siRNA sense strand
cacaagggaucgccguguu

SEQ ID NO: 560134 - RNA, 19 nt, Homo sapiens
  misc_RNA (1)...(19): siRNA sense strand
gcgcuggcuuccaacuauu

SEQ ID NO: 560135 - RNA, 19 nt, Homo sapiens
  misc_RNA (1)...(19): siRNA sense strand
guacugggacuacaugaag

SEQ ID NO: 560136 - RNA, 19 nt, Homo sapiens
  misc_RNA (1)...(19): siRNA sense strand
gcaaagcaaauggagaaug

SEQ ID NO: 560137 - RNA, 19 nt, Homo sapiens
  misc_RNA (1)...(19): siRNA sense strand
aagcaaagcaaauggagaa

SEQ ID NO: 560138 - RNA, 19 nt, Homo sapiens
  misc_RNA (1)...(19): siRNA sense strand
gcagguggacgucaucauc

SEQ ID NO: 560139 - RNA, 19 nt, Homo sapiens
  misc_RNA (1)...(19): siRNA sense strand
gacuuggccacguacauua

SEQ ID NO: 560140 - RNA, 19 nt, Homo sapiens
  misc_RNA (1)...(19): siRNA sense strand
ucauggacuuggccacgua

SEQ ID NO: 560141 - RNA, 19 nt, Homo sapiens
  misc_RNA (1)...(19): siRNA sense strand
gaaggaaugcgccaagacu

SEQ ID NO: 560142 - RNA, 19 nt, Homo sapiens
  misc_RNA (1)...(19): siRNA sense strand
cagggaucaugcucacuuu

SEQ ID NO: 560143 - RNA, 19 nt, Homo sapiens
  misc_RNA (1)...(19): siRNA sense strand
ccaguacucggaugaagaa

SEQ ID NO: 560144 - RNA, 19 nt, Homo sapiens
  misc_RNA (1)...(19): siRNA sense strand
ggucaagcuuuccguguac

SEQ ID NO: 560145 - RNA, 19 nt, Homo sapiens
  misc_RNA (1)...(19): siRNA sense strand
uaaagaacuggaagaagga

SEQ ID NO: 560146 - RNA, 19 nt, Homo sapiens
  misc_RNA (1)...(19): siRNA sense strand
cucagugucuuacucauug

SEQ ID NO: 560147 - RNA, 19 nt, Homo sapiens
  misc_RNA (1)...(19): siRNA sense strand
ucaagcugaugaacgaaau

SEQ ID NO: 560148 - RNA, 19 nt, Homo sapiens
  misc_RNA (1)...(19): siRNA sense strand
ggaucaugcucacuuucug

SEQ ID NO: 560149 - RNA, 19 nt, Homo sapiens
  misc_RNA (1)...(19): siRNA sense strand
cagcagcuccuccuccuau

SEQ ID NO: 560150 - RNA, 19 nt, Homo sapiens
  misc_RNA (1)...(19): siRNA sense strand
gcacagcaugagcuacuug

SEQ ID NO: 560151 - RNA, 19 nt, Homo sapiens
  misc_RNA (1)...(19): siRNA sense strand
ggaucaaagugcuaaagcu

SEQ ID NO: 560152 - RNA, 19 nt, Homo sapiens
  misc_RNA (1)...(19): siRNA sense strand
gaugaacgaaauucucaau

SEQ ID NO: 560153 - RNA, 19 nt, Homo sapiens
  misc_RNA (1)...(19): siRNA sense strand
gcccgucaaugcugugaug

SEQ ID NO: 560154 - RNA, 19 nt, Homo sapiens
  misc_RNA (1)...(19): siRNA sense strand
augaggagguggaggcuuu

SEQ ID NO: 560155 - RNA, 19 nt, Homo sapiens
  misc_RNA (1)...(19): siRNA sense strand
ccaagguggaugcgaauga

SEQ ID NO: 560156 - RNA, 19 nt, Homo sapiens
  misc_RNA (1)...(19): siRNA sense strand
ucaaacgccugaggaucuu

SEQ ID NO: 560157 - RNA, 19 nt, Homo sapiens
  misc_RNA (1)...(19): siRNA sense strand
ggucagcccaacucucuug

SEQ ID NO: 560158 - RNA, 19 nt, Homo sapiens
  misc_RNA (1)...(19): siRNA sense strand
gaccaugaaugugcagaag

SEQ ID NO: 560159 - RNA, 19 nt, Homo sapiens
  misc_RNA (1)...(19): siRNA sense strand
auuggugccugcaucguua

SEQ ID NO: 560160 - RNA, 19 nt, Homo sapiens
  misc_RNA (1)...(19): siRNA sense strand
gggaaggaagcaaagcaaa

SEQ ID NO: 560161 - RNA, 19 nt, Homo sapiens
  misc_RNA (1)...(19): siRNA sense strand
gggcccuacuuccucauga

SEQ ID NO: 560162 - RNA, 19 nt, Homo sapiens
  misc_RNA (1)...(19): siRNA sense strand
guucaugggcucccuguuc

SEQ ID NO: 560163 - RNA, 19 nt, Homo sapiens
  misc_RNA (1)...(19): siRNA sense strand
cagggcaggucaagcuuuc

SEQ ID NO: 560164 - RNA, 19 nt, Homo sapiens
  misc_RNA (1)...(19): siRNA sense strand
ugauggcgaugaagaccaa

SEQ ID NO: 560165 - RNA, 19 nt, Homo sapiens
  misc_RNA (1)...(19): siRNA sense strand
gagauugucaaccucaugu

SEQ ID NO: 560166 - RNA, 19 nt, Homo sapiens
  misc_RNA (1)...(19): siRNA sense strand
acaccgugcugcuguuugu

SEQ ID NO: 560167 - RNA, 19 nt, Homo sapiens
  misc_RNA (1)...(19): siRNA sense strand
ucuuaaaguugcucaucaa

SEQ ID NO: 560168 - RNA, 19 nt, Homo sapiens
  misc_RNA (1)...(19): siRNA sense strand
ucccggaggucaucaagau

SEQ ID NO: 560169 - RNA, 19 nt, Homo sapiens
  misc_RNA (1)...(19): siRNA sense strand
ggacagugcagggaagcaa

SEQ ID NO: 560170 - RNA, 19 nt, Homo sapiens
  misc_RNA (1)...(19): siRNA sense strand
ggagguggaggcuuugauc

SEQ ID NO: 560171 - RNA, 19 nt, Homo sapiens
  misc_RNA (1)...(19): siRNA sense strand
gcaggucaccacguacuug

SEQ ID NO: 560172 - RNA, 19 nt, Homo sapiens
  misc_RNA (1)...(19): siRNA sense strand
agaaggaggagaccuggaa

SEQ ID NO: 560173 - RNA, 19 nt, Homo sapiens
  misc_RNA (1)...(19): siRNA sense strand
ucgugugggugccuuguuu

SEQ ID NO: 560174 - RNA, 19 nt, Homo sapiens
  misc_RNA (1)...(19): siRNA sense strand
ccacaucugcuucgucagu

SEQ ID NO: 560175 - RNA, 19 nt, Homo sapiens
  misc_RNA (1)...(19): siRNA sense strand
gcaccaguacuuccacauc

SEQ ID NO: 560176 - RNA, 19 nt, Homo sapiens
  misc_RNA (1)...(19): siRNA sense strand
gaugacaccucucaacaaa

SEQ ID NO: 560177 - RNA, 19 nt, Homo sapiens
  misc_RNA (1)...(19): siRNA sense strand
uaaaguugcucaucaaguu

SEQ ID NO: 560178 - RNA, 19 nt, Homo sapiens
  misc_RNA (1)...(19): siRNA sense strand
ggaagcaacugcagagaca

SEQ ID NO: 560179 - RNA, 19 nt, Homo sapiens
  misc_RNA (1)...(19): siRNA sense strand
ccaaggagcuggacacagu

SEQ ID NO: 560180 - RNA, 19 nt, Homo sapiens
  misc_RNA (1)...(19): siRNA sense strand
caacgagucugccgaagga

SEQ ID NO: 560181 - RNA, 19 nt, Homo sapiens
  misc_RNA (1)...(19): siRNA sense strand
gaucaagaccgcugucauu

SEQ ID NO: 560182 - RNA, 19 nt, Homo sapiens
  misc_RNA (1)...(19): siRNA sense strand
caaagcaaauggagaaugg

SEQ ID NO: 560183 - RNA, 19 nt, Homo sapiens
  misc_RNA (1)...(19): siRNA sense strand
gggcagaccucuucuacuc

SEQ ID NO: 560184 - RNA, 19 nt, Homo sapiens
  misc_RNA (1)...(19): siRNA sense strand
ccacguacauuaacaugau

SEQ ID NO: 560185 - RNA, 19 nt, Homo sapiens
  misc_RNA (1)...(19): siRNA sense strand
gaccgaggcuacauucaga

SEQ ID NO: 560186 - RNA, 19 nt, Homo sapiens
  misc_RNA (1)...(19): siRNA sense strand
uggagaggcucaaggagua

SEQ ID NO: 560187 - RNA, 19 nt, Homo sapiens
  misc_RNA (1)...(19): siRNA sense strand
gcagaccucuucuacucuu

SEQ ID NO: 560188 - RNA, 19 nt, Homo sapiens
  misc_RNA (1)...(19): siRNA sense strand
gaaggaagcaaagcaaaug

SEQ ID NO: 560189 - RNA, 19 nt, Homo sapiens
  misc_RNA (1)...(19): siRNA sense strand
ggccgcagaucuuaaaguu

SEQ ID NO: 560190 - RNA, 19 nt, Homo sapiens
  misc_RNA (1)...(19): siRNA sense strand
gaccuccgcuucaagauca

SEQ ID NO: 560191 - RNA, 19 nt, Homo sapiens
  misc_RNA (1)...(19): siRNA sense strand
aaggagaaauccaggagua

SEQ ID NO: 560192 - RNA, 19 nt, Homo sapiens
  misc_RNA (1)...(19): siRNA sense strand
caucugaaauggaaaccaa

SEQ ID NO: 560193 - RNA, 19 nt, Homo sapiens
  misc_RNA (1)...(19): siRNA sense strand
gcaacugcaucguucuguu

SEQ ID NO: 560194 - RNA, 19 nt, Homo sapiens
  misc_RNA (1)...(19): siRNA sense strand
ggaaagaagucggggcaua

SEQ ID NO: 560195 - RNA, 19 nt, Homo sapiens
  misc_RNA (1)...(19): siRNA sense strand
ugaacgaaauucucaaugg

SEQ ID NO: 560196 - RNA, 19 nt, Homo sapiens
  misc_RNA (1)...(19): siRNA sense strand
caagcuagaccaugaaugu

SEQ ID NO: 560197 - RNA, 19 nt, Homo sapiens
  misc_RNA (1)...(19): siRNA sense strand
guacucggaugaagaaguc

SEQ ID NO: 560198 - RNA, 19 nt, Homo sapiens
  misc_RNA (1)...(19): siRNA sense strand
gagaggaccuggacuucgu

SEQ ID NO: 560199 - RNA, 19 nt, Homo sapiens
  misc_RNA (1)...(19): siRNA sense strand
caacugcaucguucuguuu

SEQ ID NO: 560200 - RNA, 19 nt, Homo sapiens
  misc_RNA (1)...(19): siRNA sense strand
ggacuuggccacguacauu

SEQ ID NO: 560201 - RNA, 19 nt, Homo sapiens
  misc_RNA (1)...(19): siRNA sense strand
caacagcaccgcagaacug

SEQ ID NO: 560202 - RNA, 19 nt, Homo sapiens
  misc_RNA (1)...(19): siRNA sense strand
ggaaggaagcaaagcaaau

SEQ ID NO: 560203 - RNA, 19 nt, Homo sapiens
  misc_RNA (1)...(19): siRNA sense strand
gaucaaagugcuaaagcuu

SEQ ID NO: 560204 - RNA, 19 nt, Homo sapiens
  misc_RNA (1)...(19): siRNA sense strand
ugaaggugcugaagaaguc

SEQ ID NO: 560205 - RNA, 19 nt, Homo sapiens
  misc_RNA (1)...(19): siRNA sense strand
gcagagaggucuuuucuac

SEQ ID NO: 560206 - RNA, 19 nt, Homo sapiens
  misc_RNA (1)...(19): siRNA sense strand
ggaucuuucucucccauga

SEQ ID NO: 560207 - RNA, 19 nt, Homo sapiens
  misc_RNA (1)...(19): siRNA sense strand
cgaugaagaccaagacgua

SEQ ID NO: 560208 - RNA, 19 nt, Homo sapiens
  misc_RNA (1)...(19): siRNA sense strand
gcaucaacaucgccaagau

SEQ ID NO: 560209 - RNA, 19 nt, Homo sapiens
  misc_RNA (1)...(19): siRNA sense strand
gcugguagcccuagugugu

SEQ ID NO: 560210 - RNA, 19 nt, Homo sapiens
  misc_RNA (1)...(19): siRNA sense strand
agaaccagaaggccuauua

SEQ ID NO: 560211 - RNA, 19 nt, Homo sapiens
  misc_RNA (1)...(19): siRNA sense strand
ggacucaggagcacacgaa

SEQ ID NO: 560212 - RNA, 19 nt, Homo sapiens
  misc_RNA (1)...(19): siRNA sense strand
ccugggagcuggcauucaa

SEQ ID NO: 560213 - RNA, 19 nt, Homo sapiens
  misc_RNA (1)...(19): siRNA sense strand
cgaaagagaguuccaaggu

SEQ ID NO: 560214 - RNA, 19 nt, Homo sapiens
  misc_RNA (1)...(19): siRNA sense strand
uggcugagauggacaaagu

SEQ ID NO: 560215 - RNA, 19 nt, Homo sapiens
  misc_RNA (1)...(19): siRNA sense strand
gaagucugccuaccuguca

SEQ ID NO: 560216 - RNA, 19 nt, Homo sapiens
  misc_RNA (1)...(19): siRNA sense strand
cauugcaggucaccacgua

SEQ ID NO: 560217 - RNA, 19 nt, Homo sapiens
  misc_RNA (1)...(19): siRNA sense strand
cugacaagcuagaccauga

SEQ ID NO: 560218 - RNA, 19 nt, Homo sapiens
  misc_RNA (1)...(19): siRNA sense strand
ucuguuugcugcccuguuu

SEQ ID NO: 560219 - RNA, 19 nt, Homo sapiens
  misc_RNA (1)...(19): siRNA sense strand
gaccuggacuucguucuca

SEQ ID NO: 560220 - RNA, 19 nt, Homo sapiens
  misc_RNA (1)...(19): siRNA sense strand
gcaaagacaaucggaucaa

SEQ ID NO: 560221 - RNA, 19 nt, Homo sapiens
  misc_RNA (1)...(19): siRNA sense strand
gaaauucucaaugggauca

SEQ ID NO: 560222 - RNA, 19 nt, Homo sapiens
  misc_RNA (1)...(19): siRNA sense strand
caaagacaaucggaucaag

SEQ ID NO: 560223 - RNA, 19 nt, Homo sapiens
  misc_RNA (1)...(19): siRNA sense strand
cucaugagcuucuucuuca

SEQ ID NO: 560224 - RNA, 19 nt, Homo sapiens
  misc_RNA (1)...(19): siRNA sense strand
aaggagagaucaucaucga

SEQ ID NO: 560225 - RNA, 19 nt, Homo sapiens
  misc_RNA (1)...(19): siRNA sense strand
gagcugaaggugcugaaga

SEQ ID NO: 560226 - RNA, 19 nt, Homo sapiens
  misc_RNA (1)...(19): siRNA sense strand
uggaaugucacguggaaua

SEQ ID NO: 560227 - RNA, 19 nt, Homo sapiens
  misc_RNA (1)...(19): siRNA sense strand
ggaaggcccuggugaucac

SEQ ID NO: 560228 - RNA, 19 nt, Homo sapiens
  misc_RNA (1)...(19): siRNA sense strand
ccacgcugcuugcuaccuu

SEQ ID NO: 560229 - RNA, 19 nt, Homo sapiens
  misc_RNA (1)...(19): siRNA sense strand
gcgagugucucccucaaac

SEQ ID NO: 560230 - RNA, 19 nt, Homo sapiens
  misc_RNA (1)...(19): siRNA sense strand
ggacacgucggaacaaguc

SEQ ID NO: 560231 - RNA, 19 nt, Homo sapiens
  misc_RNA (1)...(19): siRNA sense strand
gaguggaauuccggaacua

SEQ ID NO: 560232 - RNA, 19 nt, Homo sapiens
  misc_RNA (1)...(19): siRNA sense strand
caaggaguauucagagacu

SEQ ID NO: 560233 - RNA, 19 nt, Homo sapiens
  misc_RNA (1)...(19): siRNA sense strand
cacaagggaucgccguguu

SEQ ID NO: 560234 - RNA, 19 nt, Homo sapiens
  misc_RNA (1)...(19): siRNA sense strand
gcgcuggcuuccaacuauu

SEQ ID NO: 560235 - RNA, 19 nt, Homo sapiens
  misc_RNA (1)...(19): siRNA sense strand
guacugggacuacaugaag

SEQ ID NO: 560236 - RNA, 19 nt, Homo sapiens
  misc_RNA (1)...(19): siRNA sense strand
gcaaagcaaauggagaaug

SEQ ID NO: 560237 - RNA, 19 nt, Homo sapiens
  misc_RNA (1)...(19): siRNA sense strand
aagcaaagcaaauggagaa

SEQ ID NO: 560238 - RNA, 19 nt, Homo sapiens
  misc_RNA (1)...(19): siRNA sense strand
gcagguggacgucaucauc

SEQ ID NO: 560239 - RNA, 19 nt, Homo sapiens
  misc_RNA (1)...(19): siRNA sense strand
gacuuggccacguacauua

SEQ ID NO: 560240 - RNA, 19 nt, Homo sapiens
  misc_RNA (1)...(19): siRNA sense strand
ucauggacuuggccacgua

SEQ ID NO: 560241 - RNA, 19 nt, Homo sapiens
  misc_RNA (1)...(19): siRNA sense strand
gaaggaaugcgccaagacu

SEQ ID NO: 560242 - RNA, 19 nt, Homo sapiens
  misc_RNA (1)...(19): siRNA sense strand
cagggaucaugcucacuuu

SEQ ID NO: 560243 - RNA, 19 nt, Homo sapiens
  misc_RNA (1)...(19): siRNA sense strand
ccaguacucggaugaagaa

SEQ ID NO: 560244 - RNA, 19 nt, Homo sapiens
  misc_RNA (1)...(19): siRNA sense strand
ggucaagcuuuccguguac

SEQ ID NO: 560245 - RNA, 19 nt, Homo sapiens
  misc_RNA (1)...(19): siRNA sense strand
uaaagaacuggaagaagga

SEQ ID NO: 560246 - RNA, 19 nt, Homo sapiens
  misc_RNA (1)...(19): siRNA sense strand
cucagugucuuacucauug

SEQ ID NO: 560247 - RNA, 19 nt, Homo sapiens
  misc_RNA (1)...(19): siRNA sense strand
ucaagcugaugaacgaaau

SEQ ID NO: 560248 - RNA, 19 nt, Homo sapiens
  misc_RNA (1)...(19): siRNA sense strand
ggaucaugcucacuuucug

SEQ ID NO: 560249 - RNA, 19 nt, Homo sapiens
  misc_RNA (1)...(19): siRNA sense strand
cagcagcuccuccuccuau

SEQ ID NO: 560250 - RNA, 19 nt, Homo sapiens
  misc_RNA (1)...(19): siRNA sense strand
gcacagcaugagcuacuug

SEQ ID NO: 560251 - RNA, 19 nt, Homo sapiens
  misc_RNA (1)...(19): siRNA sense strand
ggaucaaagugcuaaagcu

SEQ ID NO: 560252 - RNA, 19 nt, Homo sapiens
  misc_RNA (1)...(19): siRNA sense strand
gaugaacgaaauucucaau

SEQ ID NO: 560253 - RNA, 19 nt, Homo sapiens
  misc_RNA (1)...(19): siRNA sense strand
gcccgucaaugcugugaug

SEQ ID NO: 560254 - RNA, 19 nt, Homo sapiens
  misc_RNA (1)...(19): siRNA sense strand
augaggagguggaggcuuu

SEQ ID NO: 560255 - RNA, 19 nt, Homo sapiens
  misc_RNA (1)...(19): siRNA sense strand
ccaagguggaugcgaauga

SEQ ID NO: 560256 - RNA, 19 nt, Homo sapiens
  misc_RNA (1)...(19): siRNA sense strand
ucaaacgccugaggaucuu

SEQ ID NO: 560257 - RNA, 19 nt, Homo sapiens
  misc_RNA (1)...(19): siRNA sense strand
ggucagcccaacucucuug

SEQ ID NO: 560258 - RNA, 19 nt, Homo sapiens
  misc_RNA (1)...(19): siRNA sense strand
gaccaugaaugugcagaag

SEQ ID NO: 560259 - RNA, 19 nt, Homo sapiens
  misc_RNA (1)...(19): siRNA sense strand
auuggugccugcaucguua

SEQ ID NO: 560260 - RNA, 19 nt, Homo sapiens
  misc_RNA (1)...(19): siRNA sense strand
gggaaggaagcaaagcaaa

SEQ ID NO: 560261 - RNA, 19 nt, Homo sapiens
  misc_RNA (1)...(19): siRNA sense strand
gggcccuacuuccucauga

SEQ ID NO: 560262 - RNA, 19 nt, Homo sapiens
  misc_RNA (1)...(19): siRNA sense strand
guucaugggcucccuguuc

SEQ ID NO: 560263 - RNA, 19 nt, Homo sapiens
  misc_RNA (1)...(19): siRNA sense strand
cagggcaggucaagcuuuc

SEQ ID NO: 560264 - RNA, 19 nt, Homo sapiens
  misc_RNA (1)...(19): siRNA sense strand
ugauggcgaugaagaccaa

SEQ ID NO: 560265 - RNA, 19 nt, Homo sapiens
  misc_RNA (1)...(19): siRNA sense strand
gagauugucaaccucaugu

SEQ ID NO: 560266 - RNA, 19 nt, Homo sapiens
  misc_RNA (1)...(19): siRNA sense strand
acaccgugcugcuguuugu

SEQ ID NO: 560267 - RNA, 19 nt, Homo sapiens
  misc_RNA (1)...(19): siRNA sense strand
ucuuaaaguugcucaucaa

SEQ ID NO: 560268 - RNA, 19 nt, Homo sapiens
  misc_RNA (1)...(19): siRNA sense strand
ucccggaggucaucaagau

SEQ ID NO: 560269 - RNA, 19 nt, Homo sapiens
  misc_RNA (1)...(19): siRNA sense strand
ggacagugcagggaagcaa

SEQ ID NO: 560270 - RNA, 19 nt, Homo sapiens
  misc_RNA (1)...(19): siRNA sense strand
ggagguggaggcuuugauc

SEQ ID NO: 560271 - RNA, 19 nt, Homo sapiens
  misc_RNA (1)...(19): siRNA sense strand
gcaggucaccacguacuug

SEQ ID NO: 560272 - RNA, 19 nt, Homo sapiens
  misc_RNA (1)...(19): siRNA sense strand
agaaggaggagaccuggaa

SEQ ID NO: 560273 - RNA, 19 nt, Homo sapiens
  misc_RNA (1)...(19): siRNA sense strand
ucgugugggugccuuguuu

SEQ ID NO: 560274 - RNA, 19 nt, Homo sapiens
  misc_RNA (1)...(19): siRNA sense strand
ccacaucugcuucgucagu

SEQ ID NO: 560275 - RNA, 19 nt, Homo sapiens
  misc_RNA (1)...(19): siRNA sense strand
gcaccaguacuuccacauc

SEQ ID NO: 560276 - RNA, 19 nt, Homo sapiens
  misc_RNA (1)...(19): siRNA sense strand
gaugacaccucucaacaaa

SEQ ID NO: 560277 - RNA, 19 nt, Homo sapiens
  misc_RNA (1)...(19): siRNA sense strand
uaaaguugcucaucaaguu

SEQ ID NO: 560278 - RNA, 19 nt, Homo sapiens
  misc_RNA (1)...(19): siRNA sense strand
ggaagcaacugcagagaca

SEQ ID NO: 560279 - RNA, 19 nt, Homo sapiens
  misc_RNA (1)...(19): siRNA sense strand
ccaaggagcuggacacagu

SEQ ID NO: 560280 - RNA, 19 nt, Homo sapiens
  misc_RNA (1)...(19): siRNA sense strand
caacgagucugccgaagga

SEQ ID NO: 560281 - RNA, 19 nt, Homo sapiens
  misc_RNA (1)...(19): siRNA sense strand
gaucaagaccgcugucauu

SEQ ID NO: 560282 - RNA, 19 nt, Homo sapiens
  misc_RNA (1)...(19): siRNA sense strand
caaagcaaauggagaaugg

SEQ ID NO: 560283 - RNA, 19 nt, Homo sapiens
  misc_RNA (1)...(19): siRNA sense strand
gggcagaccucuucuacuc

SEQ ID NO: 560284 - RNA, 19 nt, Homo sapiens
  misc_RNA (1)...(19): siRNA sense strand
ccacguacauuaacaugau

SEQ ID NO: 560285 - RNA, 19 nt, Homo sapiens
  misc_RNA (1)...(19): siRNA sense strand
gaccgaggcuacauucaga

SEQ ID NO: 560286 - RNA, 19 nt, Homo sapiens
  misc_RNA (1)...(19): siRNA sense strand
uggagaggcucaaggagua

SEQ ID NO: 560287 - RNA, 19 nt, Homo sapiens
  misc_RNA (1)...(19): siRNA sense strand
gcagaccucuucuacucuu

SEQ ID NO: 560288 - RNA, 19 nt, Homo sapiens
  misc_RNA (1)...(19): siRNA sense strand
gaaggaagcaaagcaaaug

SEQ ID NO: 560289 - RNA, 19 nt, Homo sapiens
  misc_RNA (1)...(19): siRNA sense strand
ggccgcagaucuuaaaguu

SEQ ID NO: 560290 - RNA, 19 nt, Homo sapiens
  misc_RNA (1)...(19): siRNA sense strand
gaccuccgcuucaagauca

SEQ ID NO: 560291 - RNA, 19 nt, Homo sapiens
  misc_RNA (1)...(19): siRNA sense strand
aaggagaaauccaggagua

SEQ ID NO: 560292 - RNA, 19 nt, Homo sapiens
  misc_RNA (1)...(19): siRNA sense strand
caucugaaauggaaaccaa

SEQ ID NO: 560293 - RNA, 19 nt, Homo sapiens
  misc_RNA (1)...(19): siRNA sense strand
gcaacugcaucguucuguu

SEQ ID NO: 560294 - RNA, 19 nt, Homo sapiens
  misc_RNA (1)...(19): siRNA sense strand
ggaaagaagucggggcaua

SEQ ID NO: 560295 - RNA, 19 nt, Homo sapiens
  misc_RNA (1)...(19): siRNA sense strand
ugaacgaaauucucaaugg

SEQ ID NO: 560296 - RNA, 19 nt, Homo sapiens
  misc_RNA (1)...(19): siRNA sense strand
caagcuagaccaugaaugu

SEQ ID NO: 560297 - RNA, 19 nt, Homo sapiens
  misc_RNA (1)...(19): siRNA sense strand
guacucggaugaagaaguc

SEQ ID NO: 560298 - RNA, 19 nt, Homo sapiens
  misc_RNA (1)...(19): siRNA sense strand
gagaggaccuggacuucgu

SEQ ID NO: 560299 - RNA, 19 nt, Homo sapiens
  misc_RNA (1)...(19): siRNA sense strand
caacugcaucguucuguuu

SEQ ID NO: 560300 - RNA, 19 nt, Homo sapiens
  misc_RNA (1)...(19): siRNA sense strand
ggacuuggccacguacauu

SEQ ID NO: 560301 - RNA, 19 nt, Homo sapiens
  misc_RNA (1)...(19): siRNA sense strand
caacagcaccgcagaacug

SEQ ID NO: 560302 - RNA, 19 nt, Homo sapiens
  misc_RNA (1)...(19): siRNA sense strand
ggaaggaagcaaagcaaau

SEQ ID NO: 560303 - RNA, 19 nt, Homo sapiens
  misc_RNA (1)...(19): siRNA sense strand
gaucaaagugcuaaagcuu

SEQ ID NO: 560304 - RNA, 19 nt, Homo sapiens
  misc_RNA (1)...(19): siRNA sense strand
ugaaggugcugaagaaguc

SEQ ID NO: 560305 - RNA, 19 nt, Homo sapiens
  misc_RNA (1)...(19): siRNA sense strand
gcagagaggucuuuucuac

SEQ ID NO: 560306 - RNA, 19 nt, Homo sapiens
  misc_RNA (1)...(19): siRNA sense strand
ggaucuuucucucccauga

SEQ ID NO: 560307 - RNA, 19 nt, Homo sapiens
  misc_RNA (1)...(19): siRNA sense strand
cgaugaagaccaagacgua

SEQ ID NO: 560308 - RNA, 19 nt, Homo sapiens
  misc_RNA (1)...(19): siRNA sense strand
gcaucaacaucgccaagau

SEQ ID NO: 560309 - RNA, 19 nt, Homo sapiens
  misc_RNA (1)...(19): siRNA sense strand
gcugguagcccuagugugu

SEQ ID NO: 560310 - RNA, 19 nt, Homo sapiens
  misc_RNA (1)...(19): siRNA sense strand
agaaccagaaggccuauua

SEQ ID NO: 560311 - RNA, 19 nt, Homo sapiens
  misc_RNA (1)...(19): siRNA sense strand
ggacucaggagcacacgaa

SEQ ID NO: 560312 - RNA, 19 nt, Homo sapiens
  misc_RNA (1)...(19): siRNA sense strand
ccugggagcuggcauucaa

SEQ ID NO: 560313 - RNA, 19 nt, Homo sapiens
  misc_RNA (1)...(19): siRNA sense strand
cgaaagagaguuccaaggu

SEQ ID NO: 560314 - RNA, 19 nt, Homo sapiens
  misc_RNA (1)...(19): siRNA sense strand
uggcugagauggacaaagu

SEQ ID NO: 560315 - RNA, 19 nt, Homo sapiens
  misc_RNA (1)...(19): siRNA sense strand
gaagucugccuaccuguca

SEQ ID NO: 560316 - RNA, 19 nt, Homo sapiens
  misc_RNA (1)...(19): siRNA sense strand
cauugcaggucaccacgua

SEQ ID NO: 560317 - RNA, 19 nt, Homo sapiens
  misc_RNA (1)...(19): siRNA sense strand
cugacaagcuagaccauga

SEQ ID NO: 560318 - RNA, 19 nt, Homo sapiens
  misc_RNA (1)...(19): siRNA sense strand
ucuguuugcugcccuguuu

SEQ ID NO: 560319 - RNA, 19 nt, Homo sapiens
  misc_RNA (1)...(19): siRNA sense strand
gaccuggacuucguucuca

SEQ ID NO: 560320 - RNA, 19 nt, Homo sapiens
  misc_RNA (1)...(19): siRNA sense strand
gcaaagacaaucggaucaa

SEQ ID NO: 560321 - RNA, 19 nt, Homo sapiens
  misc_RNA (1)...(19): siRNA sense strand
gaaauucucaaugggauca

SEQ ID NO: 560322 - RNA, 19 nt, Homo sapiens
  misc_RNA (1)...(19): siRNA sense strand
caaagacaaucggaucaag

SEQ ID NO: 560323 - RNA, 19 nt, Homo sapiens
  misc_RNA (1)...(19): siRNA sense strand
cucaugagcuucuucuuca

SEQ ID NO: 560324 - RNA, 19 nt, Homo sapiens
  misc_RNA (1)...(19): siRNA sense strand
aaggagagaucaucaucga

SEQ ID NO: 560325 - RNA, 19 nt, Homo sapiens
  misc_RNA (1)...(19): siRNA sense strand
gagcugaaggugcugaaga

SEQ ID NO: 560326 - RNA, 19 nt, Homo sapiens
  misc_RNA (1)...(19): siRNA sense strand
uggaaugucacguggaaua

SEQ ID NO: 560327 - RNA, 19 nt, Homo sapiens
  misc_RNA (1)...(19): siRNA sense strand
ggaaggcccuggugaucac

SEQ ID NO: 560328 - RNA, 19 nt, Homo sapiens
  misc_RNA (1)...(19): siRNA sense strand
ccacgcugcuugcuaccuu

SEQ ID NO: 560329 - RNA, 19 nt, Homo sapiens
  misc_RNA (1)...(19): siRNA sense strand
gcgagugucucccucaaac

SEQ ID NO: 560330 - RNA, 19 nt, Homo sapiens
  misc_RNA (1)...(19): siRNA sense strand
ggacacgucggaacaaguc

SEQ ID NO: 560331 - RNA, 19 nt, Homo sapiens
  misc_RNA (1)...(19): siRNA sense strand
gaguggaauuccggaacua

SEQ ID NO: 560332 - RNA, 19 nt, Homo sapiens
  misc_RNA (1)...(19): siRNA sense strand
caaggaguauucagagacu

SEQ ID NO: 560333 - RNA, 19 nt, Homo sapiens
  misc_RNA (1)...(19): siRNA sense strand
cacaagggaucgccguguu

SEQ ID NO: 560334 - RNA, 19 nt, Homo sapiens
  misc_RNA (1)...(19): siRNA sense strand
gcgcuggcuuccaacuauu

SEQ ID NO: 560335 - RNA, 19 nt, Homo sapiens
  misc_RNA (1)...(19): siRNA sense strand
guacugggacuacaugaag

SEQ ID NO: 560336 - RNA, 19 nt, Homo sapiens
  misc_RNA (1)...(19): siRNA sense strand
gcaaagcaaauggagaaug

SEQ ID NO: 560337 - RNA, 19 nt, Homo sapiens
  misc_RNA (1)...(19): siRNA sense strand
aagcaaagcaaauggagaa

SEQ ID NO: 560338 - RNA, 19 nt, Homo sapiens
  misc_RNA (1)...(19): siRNA sense strand
gcagguggacgucaucauc

SEQ ID NO: 560339 - RNA, 19 nt, Homo sapiens
  misc_RNA (1)...(19): siRNA sense strand
gacuuggccacguacauua

SEQ ID NO: 560340 - RNA, 19 nt, Homo sapiens
  misc_RNA (1)...(19): siRNA sense strand
ucauggacuuggccacgua

SEQ ID NO: 560341 - RNA, 19 nt, Homo sapiens
  misc_RNA (1)...(19): siRNA sense strand
gaaggaaugcgccaagacu

SEQ ID NO: 560342 - RNA, 19 nt, Homo sapiens
  misc_RNA (1)...(19): siRNA sense strand
cagggaucaugcucacuuu

SEQ ID NO: 560343 - RNA, 19 nt, Homo sapiens
  misc_RNA (1)...(19): siRNA sense strand
ccaguacucggaugaagaa

SEQ ID NO: 560344 - RNA, 19 nt, Homo sapiens
  misc_RNA (1)...(19): siRNA sense strand
ggucaagcuuuccguguac

SEQ ID NO: 560345 - RNA, 19 nt, Homo sapiens
  misc_RNA (1)...(19): siRNA sense strand
uaaagaacuggaagaagga

SEQ ID NO: 560346 - RNA, 19 nt, Homo sapiens
  misc_RNA (1)...(19): siRNA sense strand
cucagugucuuacucauug

SEQ ID NO: 560347 - RNA, 19 nt, Homo sapiens
  misc_RNA (1)...(19): siRNA sense strand
ucaagcugaugaacgaaau

SEQ ID NO: 560348 - RNA, 19 nt, Homo sapiens
  misc_RNA (1)...(19): siRNA sense strand
ggaucaugcucacuuucug

SEQ ID NO: 560349 - RNA, 19 nt, Homo sapiens
  misc_RNA (1)...(19): siRNA sense strand
cagcagcuccuccuccuau

SEQ ID NO: 560350 - RNA, 19 nt, Homo sapiens
  misc_RNA (1)...(19): siRNA sense strand
gcacagcaugagcuacuug

SEQ ID NO: 560351 - RNA, 19 nt, Homo sapiens
  misc_RNA (1)...(19): siRNA sense strand
ggaucaaagugcuaaagcu

SEQ ID NO: 560352 - RNA, 19 nt, Homo sapiens
  misc_RNA (1)...(19): siRNA sense strand
gaugaacgaaauucucaau

SEQ ID NO: 560353 - RNA, 19 nt, Homo sapiens
  misc_RNA (1)...(19): siRNA sense strand
gcccgucaaugcugugaug

SEQ ID NO: 560354 - RNA, 19 nt, Homo sapiens
  misc_RNA (1)...(19): siRNA sense strand
augaggagguggaggcuuu

SEQ ID NO: 560355 - RNA, 19 nt, Homo sapiens
  misc_RNA (1)...(19): siRNA sense strand
ccaagguggaugcgaauga

SEQ ID NO: 560356 - RNA, 19 nt, Homo sapiens
  misc_RNA (1)...(19): siRNA sense strand
ucaaacgccugaggaucuu

SEQ ID NO: 560357 - RNA, 19 nt, Homo sapiens
  misc_RNA (1)...(19): siRNA sense strand
ggucagcccaacucucuug

SEQ ID NO: 560358 - RNA, 19 nt, Homo sapiens
  misc_RNA (1)...(19): siRNA sense strand
gaccaugaaugugcagaag

SEQ ID NO: 560359 - RNA, 19 nt, Homo sapiens
  misc_RNA (1)...(19): siRNA sense strand
auuggugccugcaucguua

SEQ ID NO: 560360 - RNA, 19 nt, Homo sapiens
  misc_RNA (1)...(19): siRNA sense strand
gggaaggaagcaaagcaaa

SEQ ID NO: 560361 - RNA, 19 nt, Homo sapiens
  misc_RNA (1)...(19): siRNA sense strand
gggcccuacuuccucauga

SEQ ID NO: 560362 - RNA, 19 nt, Homo sapiens
  misc_RNA (1)...(19): siRNA sense strand
guucaugggcucccuguuc

SEQ ID NO: 560363 - RNA, 19 nt, Homo sapiens
  misc_RNA (1)...(19): siRNA sense strand
cagggcaggucaagcuuuc

SEQ ID NO: 560364 - RNA, 19 nt, Homo sapiens
  misc_RNA (1)...(19): siRNA sense strand
ugauggcgaugaagaccaa

SEQ ID NO: 560365 - RNA, 19 nt, Homo sapiens
  misc_RNA (1)...(19): siRNA sense strand
gagauugucaaccucaugu

SEQ ID NO: 560366 - RNA, 19 nt, Homo sapiens
  misc_RNA (1)...(19): siRNA sense strand
acaccgugcugcuguuugu

SEQ ID NO: 560367 - RNA, 19 nt, Homo sapiens
  misc_RNA (1)...(19): siRNA sense strand
ucuuaaaguugcucaucaa

SEQ ID NO: 560368 - RNA, 19 nt, Homo sapiens
  misc_RNA (1)...(19): siRNA sense strand
ucccggaggucaucaagau

SEQ ID NO: 560369 - RNA, 19 nt, Homo sapiens
  misc_RNA (1)...(19): siRNA sense strand
ggacagugcagggaagcaa

SEQ ID NO: 560370 - RNA, 19 nt, Homo sapiens
  misc_RNA (1)...(19): siRNA sense strand
ggagguggaggcuuugauc

SEQ ID NO: 560371 - RNA, 19 nt, Homo sapiens
  misc_RNA (1)...(19): siRNA sense strand
gcaggucaccacguacuug

SEQ ID NO: 560372 - RNA, 19 nt, Homo sapiens
  misc_RNA (1)...(19): siRNA sense strand
agaaggaggagaccuggaa

SEQ ID NO: 560373 - RNA, 19 nt, Homo sapiens
  misc_RNA (1)...(19): siRNA sense strand
ucgugugggugccuuguuu

SEQ ID NO: 560374 - RNA, 19 nt, Homo sapiens
  misc_RNA (1)...(19): siRNA sense strand
ccacaucugcuucgucagu

SEQ ID NO: 560375 - RNA, 19 nt, Homo sapiens
  misc_RNA (1)...(19): siRNA sense strand
gcaccaguacuuccacauc

SEQ ID NO: 560376 - RNA, 19 nt, Homo sapiens
  misc_RNA (1)...(19): siRNA sense strand
gaugacaccucucaacaaa

SEQ ID NO: 560377 - RNA, 19 nt, Homo sapiens
  misc_RNA (1)...(19): siRNA sense strand
uaaaguugcucaucaaguu

SEQ ID NO: 560378 - RNA, 19 nt, Homo sapiens
  misc_RNA (1)...(19): siRNA sense strand
ggaagcaacugcagagaca

SEQ ID NO: 560379 - RNA, 19 nt, Homo sapiens
  misc_RNA (1)...(19): siRNA sense strand
ccaaggagcuggacacagu

SEQ ID NO: 560380 - RNA, 19 nt, Homo sapiens
  misc_RNA (1)...(19): siRNA sense strand
caacgagucugccgaagga

SEQ ID NO: 560381 - RNA, 19 nt, Homo sapiens
  misc_RNA (1)...(19): siRNA sense strand
gaucaagaccgcugucauu

SEQ ID NO: 560382 - RNA, 19 nt, Homo sapiens
  misc_RNA (1)...(19): siRNA sense strand
caaagcaaauggagaaugg

SEQ ID NO: 560383 - RNA, 19 nt, Homo sapiens
  misc_RNA (1)...(19): siRNA sense strand
gggcagaccucuucuacuc

SEQ ID NO: 560384 - RNA, 19 nt, Homo sapiens
  misc_RNA (1)...(19): siRNA sense strand
ccacguacauuaacaugau

SEQ ID NO: 560385 - RNA, 19 nt, Homo sapiens
  misc_RNA (1)...(19): siRNA sense strand
gaccgaggcuacauucaga

SEQ ID NO: 560386 - RNA, 19 nt, Homo sapiens
  misc_RNA (1)...(19): siRNA sense strand
uggagaggcucaaggagua

SEQ ID NO: 560387 - RNA, 19 nt, Homo sapiens
  misc_RNA (1)...(19): siRNA sense strand
gcagaccucuucuacucuu

SEQ ID NO: 560388 - RNA, 19 nt, Homo sapiens
  misc_RNA (1)...(19): siRNA sense strand
gaaggaagcaaagcaaaug

SEQ ID NO: 560389 - RNA, 19 nt, Homo sapiens
  misc_RNA (1)...(19): siRNA sense strand
ggccgcagaucuuaaaguu

SEQ ID NO: 560390 - RNA, 19 nt, Homo sapiens
  misc_RNA (1)...(19): siRNA sense strand
gaccuccgcuucaagauca

SEQ ID NO: 560391 - RNA, 19 nt, Homo sapiens
  misc_RNA (1)...(19): siRNA sense strand
aaggagaaauccaggagua

SEQ ID NO: 560392 - RNA, 19 nt, Homo sapiens
  misc_RNA (1)...(19): siRNA sense strand
caucugaaauggaaaccaa

SEQ ID NO: 560393 - RNA, 19 nt, Homo sapiens
  misc_RNA (1)...(19): siRNA sense strand
gcaacugcaucguucuguu

SEQ ID NO: 560394 - RNA, 19 nt, Homo sapiens
  misc_RNA (1)...(19): siRNA sense strand
ggaaagaagucggggcaua

SEQ ID NO: 560395 - RNA, 19 nt, Homo sapiens
  misc_RNA (1)...(19): siRNA sense strand
ugaacgaaauucucaaugg

SEQ ID NO: 560396 - RNA, 19 nt, Homo sapiens
  misc_RNA (1)...(19): siRNA sense strand
caagcuagaccaugaaugu

SEQ ID NO: 560397 - RNA, 19 nt, Homo sapiens
  misc_RNA (1)...(19): siRNA sense strand
guacucggaugaagaaguc

SEQ ID NO: 560398 - RNA, 19 nt, Homo sapiens
  misc_RNA (1)...(19): siRNA sense strand
gagaggaccuggacuucgu

SEQ ID NO: 560399 - RNA, 19 nt, Homo sapiens
  misc_RNA (1)...(19): siRNA sense strand
caacugcaucguucuguuu

SEQ ID NO: 560400 - RNA, 19 nt, Homo sapiens
  misc_RNA (1)...(19): siRNA sense strand
ggacuuggccacguacauu

SEQ ID NO: 560401 - RNA, 19 nt, Homo sapiens
  misc_RNA (1)...(19): siRNA sense strand
caacagcaccgcagaacug

SEQ ID NO: 560402 - RNA, 19 nt, Homo sapiens
  misc_RNA (1)...(19): siRNA sense strand
ggaaggaagcaaagcaaau

SEQ ID NO: 560403 - RNA, 19 nt, Homo sapiens
  misc_RNA (1)...(19): siRNA sense strand
gaucaaagugcuaaagcuu

SEQ ID NO: 560404 - RNA, 19 nt, Homo sapiens
  misc_RNA (1)...(19): siRNA sense strand
ugaaggugcugaagaaguc

SEQ ID NO: 560405 - RNA, 19 nt, Homo sapiens
  misc_RNA (1)...(19): siRNA sense strand
gcagagaggucuuuucuac

SEQ ID NO: 560406 - RNA, 19 nt, Homo sapiens
  misc_RNA (1)...(19): siRNA sense strand
ggaucuuucucucccauga

SEQ ID NO: 560407 - RNA, 19 nt, Homo sapiens
  misc_RNA (1)...(19): siRNA sense strand
cgaugaagaccaagacgua

SEQ ID NO: 560408 - RNA, 19 nt, Homo sapiens
  misc_RNA (1)...(19): siRNA sense strand
gcaucaacaucgccaagau

SEQ ID NO: 560409 - RNA, 19 nt, Homo sapiens
  misc_RNA (1)...(19): siRNA sense strand
gcugguagcccuagugugu

SEQ ID NO: 560410 - RNA, 19 nt, Homo sapiens
  misc_RNA (1)...(19): siRNA sense strand
agaaccagaaggccuauua

SEQ ID NO: 560411 - RNA, 19 nt, Homo sapiens
  misc_RNA (1)...(19): siRNA sense strand
ggacucaggagcacacgaa

SEQ ID NO: 560412 - RNA, 19 nt, Homo sapiens
  misc_RNA (1)...(19): siRNA sense strand
ccugggagcuggcauucaa

SEQ ID NO: 560413 - RNA, 19 nt, Homo sapiens
  misc_RNA (1)...(19): siRNA sense strand
cgaaagagaguuccaaggu

SEQ ID NO: 560414 - RNA, 19 nt, Homo sapiens
  misc_RNA (1)...(19): siRNA sense strand
uggcugagauggacaaagu

SEQ ID NO: 560415 - RNA, 19 nt, Homo sapiens
  misc_RNA (1)...(19): siRNA sense strand
gaagucugccuaccuguca

SEQ ID NO: 560416 - RNA, 19 nt, Homo sapiens
  misc_RNA (1)...(19): siRNA sense strand
cauugcaggucaccacgua

SEQ ID NO: 560417 - RNA, 19 nt, Homo sapiens
  misc_RNA (1)...(19): siRNA sense strand
cugacaagcuagaccauga

SEQ ID NO: 560418 - RNA, 19 nt, Homo sapiens
  misc_RNA (1)...(19): siRNA sense strand
ucuguuugcugcccuguuu

SEQ ID NO: 560419 - RNA, 19 nt, Homo sapiens
  misc_RNA (1)...(19): siRNA sense strand
gaccuggacuucguucuca

SEQ ID NO: 560420 - RNA, 19 nt, Homo sapiens
  misc_RNA (1)...(19): siRNA sense strand
gcaaagacaaucggaucaa

SEQ ID NO: 560421 - RNA, 19 nt, Homo sapiens
  misc_RNA (1)...(19): siRNA sense strand
gaaauucucaaugggauca

SEQ ID NO: 560422 - RNA, 19 nt, Homo sapiens
  misc_RNA (1)...(19): siRNA sense strand
caaagacaaucggaucaag

SEQ ID NO: 560423 - RNA, 19 nt, Homo sapiens
  misc_RNA (1)...(19): siRNA sense strand
cucaugagcuucuucuuca

SEQ ID NO: 560424 - RNA, 19 nt, Homo sapiens
  misc_RNA (1)...(19): siRNA sense strand
aaggagagaucaucaucga

SEQ ID NO: 560425 - RNA, 19 nt, Homo sapiens
  misc_RNA (1)...(19): siRNA sense strand
gagcugaaggugcugaaga

SEQ ID NO: 560426 - RNA, 19 nt, Homo sapiens
  misc_RNA (1)...(19): siRNA sense strand
uggaaugucacguggaaua

SEQ ID NO: 560427 - RNA, 19 nt, Homo sapiens
  misc_RNA (1)...(19): siRNA sense strand
ggaaggcccuggugaucac

SEQ ID NO: 560428 - RNA, 19 nt, Homo sapiens
  misc_RNA (1)...(19): siRNA sense strand
ccacgcugcuugcuaccuu

SEQ ID NO: 560429 - RNA, 19 nt, Homo sapiens
  misc_RNA (1)...(19): siRNA sense strand
gcgagugucucccucaaac

SEQ ID NO: 560430 - RNA, 19 nt, Homo sapiens
  misc_RNA (1)...(19): siRNA sense strand
ggacacgucggaacaaguc

SEQ ID NO: 560431 - RNA, 19 nt, Homo sapiens
  misc_RNA (1)...(19): siRNA sense strand
gaguggaauuccggaacua

SEQ ID NO: 560432 - RNA, 19 nt, Homo sapiens
  misc_RNA (1)...(19): siRNA sense strand
caaggaguauucagagacu

SEQ ID NO: 560433 - RNA, 19 nt, Homo sapiens
  misc_RNA (1)...(19): siRNA sense strand
cacaagggaucgccguguu

SEQ ID NO: 560434 - RNA, 19 nt, Homo sapiens
  misc_RNA (1)...(19): siRNA sense strand
gcgcuggcuuccaacuauu

SEQ ID NO: 560435 - RNA, 19 nt, Homo sapiens
  misc_RNA (1)...(19): siRNA sense strand
guacugggacuacaugaag

SEQ ID NO: 560436 - RNA, 19 nt, Homo sapiens
  misc_RNA (1)...(19): siRNA sense strand
gcaaagcaaauggagaaug

SEQ ID NO: 560437 - RNA, 19 nt, Homo sapiens
  misc_RNA (1)...(19): siRNA sense strand
aagcaaagcaaauggagaa

SEQ ID NO: 560438 - RNA, 19 nt, Homo sapiens
  misc_RNA (1)...(19): siRNA sense strand
gcagguggacgucaucauc

SEQ ID NO: 560439 - RNA, 19 nt, Homo sapiens
  misc_RNA (1)...(19): siRNA sense strand
gacuuggccacguacauua

SEQ ID NO: 560440 - RNA, 19 nt, Homo sapiens
  misc_RNA (1)...(19): siRNA sense strand
ucauggacuuggccacgua

SEQ ID NO: 560441 - RNA, 19 nt, Homo sapiens
  misc_RNA (1)...(19): siRNA sense strand
gaaggaaugcgccaagacu

SEQ ID NO: 560442 - RNA, 19 nt, Homo sapiens
  misc_RNA (1)...(19): siRNA sense strand
cagggaucaugcucacuuu

SEQ ID NO: 560443 - RNA, 19 nt, Homo sapiens
  misc_RNA (1)...(19): siRNA sense strand
ccaguacucggaugaagaa

SEQ ID NO: 560444 - RNA, 19 nt, Homo sapiens
  misc_RNA (1)...(19): siRNA sense strand
ggucaagcuuuccguguac

SEQ ID NO: 560445 - RNA, 19 nt, Homo sapiens
  misc_RNA (1)...(19): siRNA sense strand
uaaagaacuggaagaagga

SEQ ID NO: 560446 - RNA, 19 nt, Homo sapiens
  misc_RNA (1)...(19): siRNA sense strand
cucagugucuuacucauug

SEQ ID NO: 560447 - RNA, 19 nt, Homo sapiens
  misc_RNA (1)...(19): siRNA sense strand
ucaagcugaugaacgaaau

SEQ ID NO: 560448 - RNA, 19 nt, Homo sapiens
  misc_RNA (1)...(19): siRNA sense strand
ggaucaugcucacuuucug

SEQ ID NO: 560449 - RNA, 19 nt, Homo sapiens
  misc_RNA (1)...(19): siRNA sense strand
cagcagcuccuccuccuau

SEQ ID NO: 560450 - RNA, 19 nt, Homo sapiens
  misc_RNA (1)...(19): siRNA sense strand
gcacagcaugagcuacuug

SEQ ID NO: 560451 - RNA, 19 nt, Homo sapiens
  misc_RNA (1)...(19): siRNA sense strand
ggaucaaagugcuaaagcu

SEQ ID NO: 560452 - RNA, 19 nt, Homo sapiens
  misc_RNA (1)...(19): siRNA sense strand
gaugaacgaaauucucaau

SEQ ID NO: 560453 - RNA, 19 nt, Homo sapiens
  misc_RNA (1)...(19): siRNA sense strand
gcccgucaaugcugugaug

SEQ ID NO: 560454 - RNA, 19 nt, Homo sapiens
  misc_RNA (1)...(19): siRNA sense strand
augaggagguggaggcuuu

SEQ ID NO: 560455 - RNA, 19 nt, Homo sapiens
  misc_RNA (1)...(19): siRNA sense strand
ccaagguggaugcgaauga

SEQ ID NO: 560456 - RNA, 19 nt, Homo sapiens
  misc_RNA (1)...(19): siRNA sense strand
ucaaacgccugaggaucuu

SEQ ID NO: 560457 - RNA, 19 nt, Homo sapiens
  misc_RNA (1)...(19): siRNA sense strand
ggucagcccaacucucuug

SEQ ID NO: 560458 - RNA, 19 nt, Homo sapiens
  misc_RNA (1)...(19): siRNA sense strand
gaccaugaaugugcagaag

SEQ ID NO: 560459 - RNA, 19 nt, Homo sapiens
  misc_RNA (1)...(19): siRNA sense strand
auuggugccugcaucguua

SEQ ID NO: 560460 - RNA, 19 nt, Homo sapiens
  misc_RNA (1)...(19): siRNA sense strand
gggaaggaagcaaagcaaa

SEQ ID NO: 560461 - RNA, 19 nt, Homo sapiens
  misc_RNA (1)...(19): siRNA sense strand
gggcccuacuuccucauga

SEQ ID NO: 560462 - RNA, 19 nt, Homo sapiens
  misc_RNA (1)...(19): siRNA sense strand
guucaugggcucccuguuc

SEQ ID NO: 560463 - RNA, 19 nt, Homo sapiens
  misc_RNA (1)...(19): siRNA sense strand
cagggcaggucaagcuuuc

SEQ ID NO: 560464 - RNA, 19 nt, Homo sapiens
  misc_RNA (1)...(19): siRNA sense strand
ugauggcgaugaagaccaa

SEQ ID NO: 560465 - RNA, 19 nt, Homo sapiens
  misc_RNA (1)...(19): siRNA sense strand
gagauugucaaccucaugu

SEQ ID NO: 560466 - RNA, 19 nt, Homo sapiens
  misc_RNA (1)...(19): siRNA sense strand
acaccgugcugcuguuugu

SEQ ID NO: 560467 - RNA, 19 nt, Homo sapiens
  misc_RNA (1)...(19): siRNA sense strand
ucuuaaaguugcucaucaa

SEQ ID NO: 560468 - RNA, 19 nt, Homo sapiens
  misc_RNA (1)...(19): siRNA sense strand
ucccggaggucaucaagau

SEQ ID NO: 560469 - RNA, 19 nt, Homo sapiens
  misc_RNA (1)...(19): siRNA sense strand
ggacagugcagggaagcaa

SEQ ID NO: 560470 - RNA, 19 nt, Homo sapiens
  misc_RNA (1)...(19): siRNA sense strand
ggagguggaggcuuugauc

SEQ ID NO: 560471 - RNA, 19 nt, Homo sapiens
  misc_RNA (1)...(19): siRNA sense strand
gcaggucaccacguacuug

SEQ ID NO: 560472 - RNA, 19 nt, Homo sapiens
  misc_RNA (1)...(19): siRNA sense strand
agaaggaggagaccuggaa

SEQ ID NO: 560473 - RNA, 19 nt, Homo sapiens
  misc_RNA (1)...(19): siRNA sense strand
ucgugugggugccuuguuu

SEQ ID NO: 560474 - RNA, 19 nt, Homo sapiens
  misc_RNA (1)...(19): siRNA sense strand
ccacaucugcuucgucagu

SEQ ID NO: 560475 - RNA, 19 nt, Homo sapiens
  misc_RNA (1)...(19): siRNA sense strand
gcaccaguacuuccacauc

SEQ ID NO: 560476 - RNA, 19 nt, Homo sapiens
  misc_RNA (1)...(19): siRNA sense strand
gaugacaccucucaacaaa

SEQ ID NO: 560477 - RNA, 19 nt, Homo sapiens
  misc_RNA (1)...(19): siRNA sense strand
uaaaguugcucaucaaguu

SEQ ID NO: 560478 - RNA, 19 nt, Homo sapiens
  misc_RNA (1)...(19): siRNA sense strand
ggaagcaacugcagagaca

SEQ ID NO: 560479 - RNA, 19 nt, Homo sapiens
  misc_RNA (1)...(19): siRNA sense strand
ccaaggagcuggacacagu

SEQ ID NO: 560480 - RNA, 19 nt, Homo sapiens
  misc_RNA (1)...(19): siRNA sense strand
caacgagucugccgaagga

SEQ ID NO: 560481 - RNA, 19 nt, Homo sapiens
  misc_RNA (1)...(19): siRNA sense strand
gaucaagaccgcugucauu

SEQ ID NO: 560482 - RNA, 19 nt, Homo sapiens
  misc_RNA (1)...(19): siRNA sense strand
caaagcaaauggagaaugg

SEQ ID NO: 560483 - RNA, 19 nt, Homo sapiens
  misc_RNA (1)...(19): siRNA sense strand
gggcagaccucuucuacuc

SEQ ID NO: 560484 - RNA, 19 nt, Homo sapiens
  misc_RNA (1)...(19): siRNA sense strand
ccacguacauuaacaugau

SEQ ID NO: 560485 - RNA, 19 nt, Homo sapiens
  misc_RNA (1)...(19): siRNA sense strand
gaccgaggcuacauucaga

SEQ ID NO: 560486 - RNA, 19 nt, Homo sapiens
  misc_RNA (1)...(19): siRNA sense strand
uggagaggcucaaggagua

SEQ ID NO: 560487 - RNA, 19 nt, Homo sapiens
  misc_RNA (1)...(19): siRNA sense strand
gcagaccucuucuacucuu

SEQ ID NO: 560488 - RNA, 19 nt, Homo sapiens
  misc_RNA (1)...(19): siRNA sense strand
gaaggaagcaaagcaaaug

SEQ ID NO: 560489 - RNA, 19 nt, Homo sapiens
  misc_RNA (1)...(19): siRNA sense strand
ggccgcagaucuuaaaguu

SEQ ID NO: 560490 - RNA, 19 nt, Homo sapiens
  misc_RNA (1)...(19): siRNA sense strand
gaccuccgcuucaagauca

SEQ ID NO: 560491 - RNA, 19 nt, Homo sapiens
  misc_RNA (1)...(19): siRNA sense strand
aaggagaaauccaggagua

SEQ ID NO: 560492 - RNA, 19 nt, Homo sapiens
  misc_RNA (1)...(19): siRNA sense strand
caucugaaauggaaaccaa

SEQ ID NO: 560493 - RNA, 19 nt, Homo sapiens
  misc_RNA (1)...(19): siRNA sense strand
gcaacugcaucguucuguu

SEQ ID NO: 560494 - RNA, 19 nt, Homo sapiens
  misc_RNA (1)...(19): siRNA sense strand
ggaaagaagucggggcaua

SEQ ID NO: 560495 - RNA, 19 nt, Homo sapiens
  misc_RNA (1)...(19): siRNA sense strand
ugaacgaaauucucaaugg

SEQ ID NO: 560496 - RNA, 19 nt, Homo sapiens
  misc_RNA (1)...(19): siRNA sense strand
caagcuagaccaugaaugu

SEQ ID NO: 560497 - RNA, 19 nt, Homo sapiens
  misc_RNA (1)...(19): siRNA sense strand
guacucggaugaagaaguc

SEQ ID NO: 560498 - RNA, 19 nt, Homo sapiens
  misc_RNA (1)...(19): siRNA sense strand
gagaggaccuggacuucgu

SEQ ID NO: 560499 - RNA, 19 nt, Homo sapiens
  misc_RNA (1)...(19): siRNA sense strand
caacugcaucguucuguuu

SEQ ID NO: 560500 - RNA, 19 nt, Homo sapiens
  misc_RNA (1)...(19): siRNA sense strand
ggacuuggccacguacauu

SEQ ID NO: 560501 - RNA, 19 nt, Homo sapiens
  misc_RNA (1)...(19): siRNA sense strand
caacagcaccgcagaacug

SEQ ID NO: 560502 - RNA, 19 nt, Homo sapiens
  misc_RNA (1)...(19): siRNA sense strand
ggaaggaagcaaagcaaau

SEQ ID NO: 560503 - RNA, 19 nt, Homo sapiens
  misc_RNA (1)...(19): siRNA sense strand
gaucaaagugcuaaagcuu

SEQ ID NO: 560504 - RNA, 19 nt, Homo sapiens
  misc_RNA (1)...(19): siRNA sense strand
ugaaggugcugaagaaguc

SEQ ID NO: 560505 - RNA, 19 nt, Homo sapiens
  misc_RNA (1)...(19): siRNA sense strand
gcagagaggucuuuucuac

SEQ ID NO: 560506 - RNA, 19 nt, Homo sapiens
  misc_RNA (1)...(19): siRNA sense strand
ggaucuuucucucccauga

SEQ ID NO: 560507 - RNA, 19 nt, Homo sapiens
  misc_RNA (1)...(19): siRNA sense strand
cgaugaagaccaagacgua

SEQ ID NO: 560508 - RNA, 19 nt, Homo sapiens
  misc_RNA (1)...(19): siRNA sense strand
gcaucaacaucgccaagau

SEQ ID NO: 560509 - RNA, 19 nt, Homo sapiens
  misc_RNA (1)...(19): siRNA sense strand
gcugguagcccuagugugu

SEQ ID NO: 560510 - RNA, 19 nt, Homo sapiens
  misc_RNA (1)...(19): siRNA sense strand
agaaccagaaggccuauua

SEQ ID NO: 560511 - RNA, 19 nt, Homo sapiens
  misc_RNA (1)...(19): siRNA sense strand
ggacucaggagcacacgaa

SEQ ID NO: 560512 - RNA, 19 nt, Homo sapiens
  misc_RNA (1)...(19): siRNA sense strand
ccugggagcuggcauucaa

SEQ ID NO: 560513 - RNA, 19 nt, Homo sapiens
  misc_RNA (1)...(19): siRNA sense strand
cgaaagagaguuccaaggu

SEQ ID NO: 560514 - RNA, 19 nt, Homo sapiens
  misc_RNA (1)...(19): siRNA sense strand
uggcugagauggacaaagu

SEQ ID NO: 560515 - RNA, 19 nt, Homo sapiens
  misc_RNA (1)...(19): siRNA sense strand
gaagucugccuaccuguca

SEQ ID NO: 560516 - RNA, 19 nt, Homo sapiens
  misc_RNA (1)...(19): siRNA sense strand
cauugcaggucaccacgua

SEQ ID NO: 560517 - RNA, 19 nt, Homo sapiens
  misc_RNA (1)...(19): siRNA sense strand
cugacaagcuagaccauga

SEQ ID NO: 560518 - RNA, 19 nt, Homo sapiens
  misc_RNA (1)...(19): siRNA sense strand
ucuguuugcugcccuguuu

SEQ ID NO: 560519 - RNA, 19 nt, Homo sapiens
  misc_RNA (1)...(19): siRNA sense strand
gaccuggacuucguucuca

SEQ ID NO: 560520 - RNA, 19 nt, Homo sapiens
  misc_RNA (1)...(19): siRNA sense strand
gcaaagacaaucggaucaa

SEQ ID NO: 560521 - RNA, 19 nt, Homo sapiens
  misc_RNA (1)...(19): siRNA sense strand
gaaauucucaaugggauca

SEQ ID NO: 560522 - RNA, 19 nt, Homo sapiens
  misc_RNA (1)...(19): siRNA sense strand
caaagacaaucggaucaag

SEQ ID NO: 560523 - RNA, 19 nt, Homo sapiens
  misc_RNA (1)...(19): siRNA sense strand
cucaugagcuucuucuuca

SEQ ID NO: 560524 - RNA, 19 nt, Homo sapiens
  misc_RNA (1)...(19): siRNA sense strand
aaggagagaucaucaucga

SEQ ID NO: 560525 - RNA, 19 nt, Homo sapiens
  misc_RNA (1)...(19): siRNA sense strand
gagcugaaggugcugaaga

SEQ ID NO: 560526 - RNA, 19 nt, Homo sapiens
  misc_RNA (1)...(19): siRNA sense strand
uggaaugucacguggaaua

SEQ ID NO: 560527 - RNA, 19 nt, Homo sapiens
  misc_RNA (1)...(19): siRNA sense strand
ggaaggcccuggugaucac

SEQ ID NO: 560528 - RNA, 19 nt, Homo sapiens
  misc_RNA (1)...(19): siRNA sense strand
ccacgcugcuugcuaccuu

SEQ ID NO: 560529 - RNA, 19 nt, Homo sapiens
  misc_RNA (1)...(19): siRNA sense strand
gcgagugucucccucaaac

SEQ ID NO: 560530 - RNA, 19 nt, Homo sapiens
  misc_RNA (1)...(19): siRNA sense strand
ggacacgucggaacaaguc

SEQ ID NO: 560531 - RNA, 19 nt, Homo sapiens
  misc_RNA (1)...(19): siRNA sense strand
gaguggaauuccggaacua

SEQ ID NO: 560532 - RNA, 19 nt, Homo sapiens
  misc_RNA (1)...(19): siRNA sense strand
caaggaguauucagagacu

SEQ ID NO: 560533 - RNA, 19 nt, Homo sapiens
  misc_RNA (1)...(19): siRNA sense strand
cacaagggaucgccguguu

SEQ ID NO: 560534 - RNA, 19 nt, Homo sapiens
  misc_RNA (1)...(19): siRNA sense strand
gcgcuggcuuccaacuauu

SEQ ID NO: 560535 - RNA, 19 nt, Homo sapiens
  misc_RNA (1)...(19): siRNA sense strand
guacugggacuacaugaag

SEQ ID NO: 560536 - RNA, 19 nt, Homo sapiens
  misc_RNA (1)...(19): siRNA sense strand
gcaaagcaaauggagaaug

SEQ ID NO: 560537 - RNA, 19 nt, Homo sapiens
  misc_RNA (1)...(19): siRNA sense strand
aagcaaagcaaauggagaa

SEQ ID NO: 560538 - RNA, 19 nt, Homo sapiens
  misc_RNA (1)...(19): siRNA sense strand
gcagguggacgucaucauc

SEQ ID NO: 560539 - RNA, 19 nt, Homo sapiens
  misc_RNA (1)...(19): siRNA sense strand
gacuuggccacguacauua

SEQ ID NO: 560540 - RNA, 19 nt, Homo sapiens
  misc_RNA (1)...(19): siRNA sense strand
ucauggacuuggccacgua

SEQ ID NO: 560541 - RNA, 19 nt, Homo sapiens
  misc_RNA (1)...(19): siRNA sense strand
gaaggaaugcgccaagacu

SEQ ID NO: 560542 - RNA, 19 nt, Homo sapiens
  misc_RNA (1)...(19): siRNA sense strand
cagggaucaugcucacuuu

SEQ ID NO: 560543 - RNA, 19 nt, Homo sapiens
  misc_RNA (1)...(19): siRNA sense strand
ccaguacucggaugaagaa

SEQ ID NO: 560544 - RNA, 19 nt, Homo sapiens
  misc_RNA (1)...(19): siRNA sense strand
ggucaagcuuuccguguac

SEQ ID NO: 560545 - RNA, 19 nt, Homo sapiens
  misc_RNA (1)...(19): siRNA sense strand
uaaagaacuggaagaagga

SEQ ID NO: 560546 - RNA, 19 nt, Homo sapiens
  misc_RNA (1)...(19): siRNA sense strand
cucagugucuuacucauug

SEQ ID NO: 560547 - RNA, 19 nt, Homo sapiens
  misc_RNA (1)...(19): siRNA sense strand
ucaagcugaugaacgaaau

SEQ ID NO: 560548 - RNA, 19 nt, Homo sapiens
  misc_RNA (1)...(19): siRNA sense strand
ggaucaugcucacuuucug

SEQ ID NO: 560549 - RNA, 19 nt, Homo sapiens
  misc_RNA (1)...(19): siRNA sense strand
cagcagcuccuccuccuau

SEQ ID NO: 560550 - RNA, 19 nt, Homo sapiens
  misc_RNA (1)...(19): siRNA sense strand
gcacagcaugagcuacuug

SEQ ID NO: 560551 - RNA, 19 nt, Homo sapiens
  misc_RNA (1)...(19): siRNA sense strand
ggaucaaagugcuaaagcu

SEQ ID NO: 560552 - RNA, 19 nt, Homo sapiens
  misc_RNA (1)...(19): siRNA sense strand
gaugaacgaaauucucaau

SEQ ID NO: 560553 - RNA, 19 nt, Homo sapiens
  misc_RNA (1)...(19): siRNA sense strand
gcccgucaaugcugugaug

SEQ ID NO: 560554 - RNA, 19 nt, Homo sapiens
  misc_RNA (1)...(19): siRNA sense strand
augaggagguggaggcuuu

SEQ ID NO: 560555 - RNA, 19 nt, Homo sapiens
  misc_RNA (1)...(19): siRNA sense strand
ccaagguggaugcgaauga

SEQ ID NO: 560556 - RNA, 19 nt, Homo sapiens
  misc_RNA (1)...(19): siRNA sense strand
ucaaacgccugaggaucuu

SEQ ID NO: 560557 - RNA, 19 nt, Homo sapiens
  misc_RNA (1)...(19): siRNA sense strand
ggucagcccaacucucuug

SEQ ID NO: 560558 - RNA, 19 nt, Homo sapiens
  misc_RNA (1)...(19): siRNA sense strand
gaccaugaaugugcagaag

SEQ ID NO: 560559 - RNA, 19 nt, Homo sapiens
  misc_RNA (1)...(19): siRNA sense strand
auuggugccugcaucguua

SEQ ID NO: 560560 - RNA, 19 nt, Homo sapiens
  misc_RNA (1)...(19): siRNA sense strand
gggaaggaagcaaagcaaa

SEQ ID NO: 560561 - RNA, 19 nt, Homo sapiens
  misc_RNA (1)...(19): siRNA sense strand
gggcccuacuuccucauga

SEQ ID NO: 560562 - RNA, 19 nt, Homo sapiens
  misc_RNA (1)...(19): siRNA sense strand
guucaugggcucccuguuc

SEQ ID NO: 560563 - RNA, 19 nt, Homo sapiens
  misc_RNA (1)...(19): siRNA sense strand
cagggcaggucaagcuuuc

SEQ ID NO: 560564 - RNA, 19 nt, Homo sapiens
  misc_RNA (1)...(19): siRNA sense strand
ugauggcgaugaagaccaa

SEQ ID NO: 560565 - RNA, 19 nt, Homo sapiens
  misc_RNA (1)...(19): siRNA sense strand
gagauugucaaccucaugu

SEQ ID NO: 560566 - RNA, 19 nt, Homo sapiens
  misc_RNA (1)...(19): siRNA sense strand
acaccgugcugcuguuugu

SEQ ID NO: 560567 - RNA, 19 nt, Homo sapiens
  misc_RNA (1)...(19): siRNA sense strand
ucuuaaaguugcucaucaa

SEQ ID NO: 560568 - RNA, 19 nt, Homo sapiens
  misc_RNA (1)...(19): siRNA sense strand
ucccggaggucaucaagau

SEQ ID NO: 560569 - RNA, 19 nt, Homo sapiens
  misc_RNA (1)...(19): siRNA sense strand
ggacagugcagggaagcaa

SEQ ID NO: 560570 - RNA, 19 nt, Homo sapiens
  misc_RNA (1)...(19): siRNA sense strand
ggagguggaggcuuugauc

SEQ ID NO: 560571 - RNA, 19 nt, Homo sapiens
  misc_RNA (1)...(19): siRNA sense strand
gcaggucaccacguacuug

SEQ ID NO: 560572 - RNA, 19 nt, Homo sapiens
  misc_RNA (1)...(19): siRNA sense strand
agaaggaggagaccuggaa

SEQ ID NO: 560573 - RNA, 19 nt, Homo sapiens
  misc_RNA (1)...(19): siRNA sense strand
ucgugugggugccuuguuu

SEQ ID NO: 560574 - RNA, 19 nt, Homo sapiens
  misc_RNA (1)...(19): siRNA sense strand
ccacaucugcuucgucagu

SEQ ID NO: 560575 - RNA, 19 nt, Homo sapiens
  misc_RNA (1)...(19): siRNA sense strand
gcaccaguacuuccacauc

SEQ ID NO: 560576 - RNA, 19 nt, Homo sapiens
  misc_RNA (1)...(19): siRNA sense strand
gaugacaccucucaacaaa

SEQ ID NO: 560577 - RNA, 19 nt, Homo sapiens
  misc_RNA (1)...(19): siRNA sense strand
uaaaguugcucaucaaguu

SEQ ID NO: 560578 - RNA, 19 nt, Homo sapiens
  misc_RNA (1)...(19): siRNA sense strand
ggaagcaacugcagagaca

SEQ ID NO: 560579 - RNA, 19 nt, Homo sapiens
  misc_RNA (1)...(19): siRNA sense strand
ccaaggagcuggacacagu

SEQ ID NO: 560580 - RNA, 19 nt, Homo sapiens
  misc_RNA (1)...(19): siRNA sense strand
caacgagucugccgaagga

SEQ ID NO: 560581 - RNA, 19 nt, Homo sapiens
  misc_RNA (1)...(19): siRNA sense strand
gaucaagaccgcugucauu

SEQ ID NO: 560582 - RNA, 19 nt, Homo sapiens
  misc_RNA (1)...(19): siRNA sense strand
caaagcaaauggagaaugg

SEQ ID NO: 560583 - RNA, 19 nt, Homo sapiens
  misc_RNA (1)...(19): siRNA sense strand
gggcagaccucuucuacuc

SEQ ID NO: 560584 - RNA, 19 nt, Homo sapiens
  misc_RNA (1)...(19): siRNA sense strand
ccacguacauuaacaugau

SEQ ID NO: 560585 - RNA, 19 nt, Homo sapiens
  misc_RNA (1)...(19): siRNA sense strand
gaccgaggcuacauucaga

SEQ ID NO: 560586 - RNA, 19 nt, Homo sapiens
  misc_RNA (1)...(19): siRNA sense strand
uggagaggcucaaggagua

SEQ ID NO: 560587 - RNA, 19 nt, Homo sapiens
  misc_RNA (1)...(19): siRNA sense strand
gcagaccucuucuacucuu

SEQ ID NO: 560588 - RNA, 19 nt, Homo sapiens
  misc_RNA (1)...(19): siRNA sense strand
gaaggaagcaaagcaaaug

SEQ ID NO: 560589 - RNA, 19 nt, Homo sapiens
  misc_RNA (1)...(19): siRNA sense strand
ggccgcagaucuuaaaguu

SEQ ID NO: 560590 - RNA, 19 nt, Homo sapiens
  misc_RNA (1)...(19): siRNA sense strand
gaccuccgcuucaagauca

SEQ ID NO: 560591 - RNA, 19 nt, Homo sapiens
  misc_RNA (1)...(19): siRNA sense strand
aaggagaaauccaggagua

SEQ ID NO: 560592 - RNA, 19 nt, Homo sapiens
  misc_RNA (1)...(19): siRNA sense strand
caucugaaauggaaaccaa

SEQ ID NO: 560593 - RNA, 19 nt, Homo sapiens
  misc_RNA (1)...(19): siRNA sense strand
gcaacugcaucguucuguu

SEQ ID NO: 560594 - RNA, 19 nt, Homo sapiens
  misc_RNA (1)...(19): siRNA sense strand
ggaaagaagucggggcaua

SEQ ID NO: 560595 - RNA, 19 nt, Homo sapiens
  misc_RNA (1)...(19): siRNA sense strand
ugaacgaaauucucaaugg

SEQ ID NO: 560596 - RNA, 19 nt, Homo sapiens
  misc_RNA (1)...(19): siRNA sense strand
caagcuagaccaugaaugu

SEQ ID NO: 560597 - RNA, 19 nt, Homo sapiens
  misc_RNA (1)...(19): siRNA sense strand
guacucggaugaagaaguc

SEQ ID NO: 560598 - RNA, 19 nt, Homo sapiens
  misc_RNA (1)...(19): siRNA sense strand
gagaggaccuggacuucgu

SEQ ID NO: 560599 - RNA, 19 nt, Homo sapiens
  misc_RNA (1)...(19): siRNA sense strand
caacugcaucguucuguuu

SEQ ID NO: 560600 - RNA, 19 nt, Homo sapiens
  misc_RNA (1)...(19): siRNA sense strand
ggacuuggccacguacauu

SEQ ID NO: 560601 - RNA, 19 nt, Homo sapiens
  misc_RNA (1)...(19): siRNA sense strand
caacagcaccgcagaacug

SEQ ID NO: 560602 - RNA, 19 nt, Homo sapiens
  misc_RNA (1)...(19): siRNA sense strand
ggaaggaagcaaagcaaau

SEQ ID NO: 560603 - RNA, 19 nt, Homo sapiens
  misc_RNA (1)...(19): siRNA sense strand
gaucaaagugcuaaagcuu

SEQ ID NO: 560604 - RNA, 19 nt, Homo sapiens
  misc_RNA (1)...(19): siRNA sense strand
ugaaggugcugaagaaguc

SEQ ID NO: 560605 - RNA, 19 nt, Homo sapiens
  misc_RNA (1)...(19): siRNA sense strand
gcagagaggucuuuucuac

SEQ ID NO: 560606 - RNA, 19 nt, Homo sapiens
  misc_RNA (1)...(19): siRNA sense strand
ggaucuuucucucccauga

SEQ ID NO: 560607 - RNA, 19 nt, Homo sapiens
  misc_RNA (1)...(19): siRNA sense strand
cgaugaagaccaagacgua

SEQ ID NO: 560608 - RNA, 19 nt, Homo sapiens
  misc_RNA (1)...(19): siRNA sense strand
gcaucaacaucgccaagau

SEQ ID NO: 560609 - RNA, 19 nt, Homo sapiens
  misc_RNA (1)...(19): siRNA sense strand
gcugguagcccuagugugu

SEQ ID NO: 560610 - RNA, 19 nt, Homo sapiens
  misc_RNA (1)...(19): siRNA sense strand
agaaccagaaggccuauua

SEQ ID NO: 560611 - RNA, 19 nt, Homo sapiens
  misc_RNA (1)...(19): siRNA sense strand
ggacucaggagcacacgaa

SEQ ID NO: 560612 - RNA, 19 nt, Homo sapiens
  misc_RNA (1)...(19): siRNA sense strand
ccugggagcuggcauucaa

SEQ ID NO: 560613 - RNA, 19 nt, Homo sapiens
  misc_RNA (1)...(19): siRNA sense strand
cgaaagagaguuccaaggu

SEQ ID NO: 560614 - RNA, 19 nt, Homo sapiens
  misc_RNA (1)...(19): siRNA sense strand
uggcugagauggacaaagu

SEQ ID NO: 560615 - RNA, 19 nt, Homo sapiens
  misc_RNA (1)...(19): siRNA sense strand
gaagucugccuaccuguca

SEQ ID NO: 560616 - RNA, 19 nt, Homo sapiens
  misc_RNA (1)...(19): siRNA sense strand
cauugcaggucaccacgua

SEQ ID NO: 560617 - RNA, 19 nt, Homo sapiens
  misc_RNA (1)...(19): siRNA sense strand
cugacaagcuagaccauga

SEQ ID NO: 560618 - RNA, 19 nt, Homo sapiens
  misc_RNA (1)...(19): siRNA sense strand
ucuguuugcugcccuguuu

SEQ ID NO: 560619 - RNA, 19 nt, Homo sapiens
  misc_RNA (1)...(19): siRNA sense strand
gaccuggacuucguucuca

SEQ ID NO: 560620 - RNA, 19 nt, Homo sapiens
  misc_RNA (1)...(19): siRNA sense strand
gcaaagacaaucggaucaa

SEQ ID NO: 560621 - RNA, 19 nt, Homo sapiens
  misc_RNA (1)...(19): siRNA sense strand
gaaauucucaaugggauca

SEQ ID NO: 560622 - RNA, 19 nt, Homo sapiens
  misc_RNA (1)...(19): siRNA sense strand
caaagacaaucggaucaag

SEQ ID NO: 560623 - RNA, 19 nt, Homo sapiens
  misc_RNA (1)...(19): siRNA sense strand
cucaugagcuucuucuuca

SEQ ID NO: 560624 - RNA, 19 nt, Homo sapiens
  misc_RNA (1)...(19): siRNA sense strand
aaggagagaucaucaucga

SEQ ID NO: 560625 - RNA, 19 nt, Homo sapiens
  misc_RNA (1)...(19): siRNA sense strand
gagcugaaggugcugaaga

SEQ ID NO: 560626 - RNA, 19 nt, Homo sapiens
  misc_RNA (1)...(19): siRNA sense strand
uggaaugucacguggaaua

SEQ ID NO: 560627 - RNA, 19 nt, Homo sapiens
  misc_RNA (1)...(19): siRNA sense strand
ggaaggcccuggugaucac

SEQ ID NO: 560628 - RNA, 19 nt, Homo sapiens
  misc_RNA (1)...(19): siRNA sense strand
ccacgcugcuugcuaccuu

SEQ ID NO: 560629 - RNA, 19 nt, Homo sapiens
  misc_RNA (1)...(19): siRNA sense strand
gcgagugucucccucaaac

SEQ ID NO: 560630 - RNA, 19 nt, Homo sapiens
  misc_RNA (1)...(19): siRNA sense strand
ggacacgucggaacaaguc

SEQ ID NO: 560631 - RNA, 19 nt, Homo sapiens
  misc_RNA (1)...(19): siRNA sense strand
gaguggaauuccggaacua

SEQ ID NO: 560632 - RNA, 19 nt, Homo sapiens
  misc_RNA (1)...(19): siRNA sense strand
caaggaguauucagagacu

SEQ ID NO: 560633 - RNA, 19 nt, Homo sapiens
  misc_RNA (1)...(19): siRNA sense strand
cacaagggaucgccguguu

SEQ ID NO: 560634 - RNA, 19 nt, Homo sapiens
  misc_RNA (1)...(19): siRNA sense strand
gcgcuggcuuccaacuauu

SEQ ID NO: 560635 - RNA, 19 nt, Homo sapiens
  misc_RNA (1)...(19): siRNA sense strand
guacugggacuacaugaag

SEQ ID NO: 560636 - RNA, 19 nt, Homo sapiens
  misc_RNA (1)...(19): siRNA sense strand
gcaaagcaaauggagaaug

SEQ ID NO: 560637 - RNA, 19 nt, Homo sapiens
  misc_RNA (1)...(19): siRNA sense strand
aagcaaagcaaauggagaa

SEQ ID NO: 560638 - RNA, 19 nt, Homo sapiens
  misc_RNA (1)...(19): siRNA sense strand
gcagguggacgucaucauc

SEQ ID NO: 560639 - RNA, 19 nt, Homo sapiens
  misc_RNA (1)...(19): siRNA sense strand
gacuuggccacguacauua

SEQ ID NO: 560640 - RNA, 19 nt, Homo sapiens
  misc_RNA (1)...(19): siRNA sense strand
ucauggacuuggccacgua

SEQ ID NO: 560641 - RNA, 19 nt, Homo sapiens
  misc_RNA (1)...(19): siRNA sense strand
gaaggaaugcgccaagacu

SEQ ID NO: 560642 - RNA, 19 nt, Homo sapiens
  misc_RNA (1)...(19): siRNA sense strand
cagggaucaugcucacuuu

SEQ ID NO: 560643 - RNA, 19 nt, Homo sapiens
  misc_RNA (1)...(19): siRNA sense strand
ccaguacucggaugaagaa

SEQ ID NO: 560644 - RNA, 19 nt, Homo sapiens
  misc_RNA (1)...(19): siRNA sense strand
ggucaagcuuuccguguac

SEQ ID NO: 560645 - RNA, 19 nt, Homo sapiens
  misc_RNA (1)...(19): siRNA sense strand
uaaagaacuggaagaagga

SEQ ID NO: 560646 - RNA, 19 nt, Homo sapiens
  misc_RNA (1)...(19): siRNA sense strand
cucagugucuuacucauug

SEQ ID NO: 560647 - RNA, 19 nt, Homo sapiens
  misc_RNA (1)...(19): siRNA sense strand
ucaagcugaugaacgaaau

SEQ ID NO: 560648 - RNA, 19 nt, Homo sapiens
  misc_RNA (1)...(19): siRNA sense strand
ggaucaugcucacuuucug

SEQ ID NO: 560649 - RNA, 19 nt, Homo sapiens
  misc_RNA (1)...(19): siRNA sense strand
cagcagcuccuccuccuau

SEQ ID NO: 560650 - RNA, 19 nt, Homo sapiens
  misc_RNA (1)...(19): siRNA sense strand
gcacagcaugagcuacuug

SEQ ID NO: 560651 - RNA, 19 nt, Homo sapiens
  misc_RNA (1)...(19): siRNA sense strand
ggaucaaagugcuaaagcu

SEQ ID NO: 560652 - RNA, 19 nt, Homo sapiens
  misc_RNA (1)...(19): siRNA sense strand
gaugaacgaaauucucaau

SEQ ID NO: 560653 - RNA, 19 nt, Homo sapiens
  misc_RNA (1)...(19): siRNA sense strand
gcccgucaaugcugugaug

SEQ ID NO: 560654 - RNA, 19 nt, Homo sapiens
  misc_RNA (1)...(19): siRNA sense strand
augaggagguggaggcuuu

SEQ ID NO: 560655 - RNA, 19 nt, Homo sapiens
  misc_RNA (1)...(19): siRNA sense strand
ccaagguggaugcgaauga

SEQ ID NO: 560656 - RNA, 19 nt, Homo sapiens
  misc_RNA (1)...(19): siRNA sense strand
ucaaacgccugaggaucuu

SEQ ID NO: 560657 - RNA, 19 nt, Homo sapiens
  misc_RNA (1)...(19): siRNA sense strand
ggucagcccaacucucuug

SEQ ID NO: 560658 - RNA, 19 nt, Homo sapiens
  misc_RNA (1)...(19): siRNA sense strand
gaccaugaaugugcagaag

SEQ ID NO: 560659 - RNA, 19 nt, Homo sapiens
  misc_RNA (1)...(19): siRNA sense strand
auuggugccugcaucguua

SEQ ID NO: 560660 - RNA, 19 nt, Homo sapiens
  misc_RNA (1)...(19): siRNA sense strand
gggaaggaagcaaagcaaa

SEQ ID NO: 560661 - RNA, 19 nt, Homo sapiens
  misc_RNA (1)...(19): siRNA sense strand
gggcccuacuuccucauga

SEQ ID NO: 560662 - RNA, 19 nt, Homo sapiens
  misc_RNA (1)...(19): siRNA sense strand
guucaugggcucccuguuc

SEQ ID NO: 560663 - RNA, 19 nt, Homo sapiens
  misc_RNA (1)...(19): siRNA sense strand
cagggcaggucaagcuuuc

SEQ ID NO: 560664 - RNA, 19 nt, Homo sapiens
  misc_RNA (1)...(19): siRNA sense strand
ugauggcgaugaagaccaa

SEQ ID NO: 560665 - RNA, 19 nt, Homo sapiens
  misc_RNA (1)...(19): siRNA sense strand
gagauugucaaccucaugu

SEQ ID NO: 560666 - RNA, 19 nt, Homo sapiens
  misc_RNA (1)...(19): siRNA sense strand
acaccgugcugcuguuugu

SEQ ID NO: 560667 - RNA, 19 nt, Homo sapiens
  misc_RNA (1)...(19): siRNA sense strand
ucuuaaaguugcucaucaa

SEQ ID NO: 560668 - RNA, 19 nt, Homo sapiens
  misc_RNA (1)...(19): siRNA sense strand
ucccggaggucaucaagau

SEQ ID NO: 560669 - RNA, 19 nt, Homo sapiens
  misc_RNA (1)...(19): siRNA sense strand
ggacagugcagggaagcaa

SEQ ID NO: 560670 - RNA, 19 nt, Homo sapiens
  misc_RNA (1)...(19): siRNA sense strand
ggagguggaggcuuugauc

SEQ ID NO: 560671 - RNA, 19 nt, Homo sapiens
  misc_RNA (1)...(19): siRNA sense strand
gcaggucaccacguacuug

SEQ ID NO: 560672 - RNA, 19 nt, Homo sapiens
  misc_RNA (1)...(19): siRNA sense strand
agaaggaggagaccuggaa

SEQ ID NO: 560673 - RNA, 19 nt, Homo sapiens
  misc_RNA (1)...(19): siRNA sense strand
ucgugugggugccuuguuu

SEQ ID NO: 560674 - RNA, 19 nt, Homo sapiens
  misc_RNA (1)...(19): siRNA sense strand
ccacaucugcuucgucagu

SEQ ID NO: 560675 - RNA, 19 nt, Homo sapiens
  misc_RNA (1)...(19): siRNA sense strand
gcaccaguacuuccacauc

SEQ ID NO: 560676 - RNA, 19 nt, Homo sapiens
  misc_RNA (1)...(19): siRNA sense strand
gaugacaccucucaacaaa

SEQ ID NO: 560677 - RNA, 19 nt, Homo sapiens
  misc_RNA (1)...(19): siRNA sense strand
uaaaguugcucaucaaguu

SEQ ID NO: 560678 - RNA, 19 nt, Homo sapiens
  misc_RNA (1)...(19): siRNA sense strand
ggaagcaacugcagagaca

SEQ ID NO: 560679 - RNA, 19 nt, Homo sapiens
  misc_RNA (1)...(19): siRNA sense strand
ccaaggagcuggacacagu

SEQ ID NO: 560680 - RNA, 19 nt, Homo sapiens
  misc_RNA (1)...(19): siRNA sense strand
caacgagucugccgaagga

SEQ ID NO: 560681 - RNA, 19 nt, Homo sapiens
  misc_RNA (1)...(19): siRNA sense strand
gaucaagaccgcugucauu

SEQ ID NO: 560682 - RNA, 19 nt, Homo sapiens
  misc_RNA (1)...(19): siRNA sense strand
caaagcaaauggagaaugg

SEQ ID NO: 560683 - RNA, 19 nt, Homo sapiens
  misc_RNA (1)...(19): siRNA sense strand
gggcagaccucuucuacuc

SEQ ID NO: 560684 - RNA, 19 nt, Homo sapiens
  misc_RNA (1)...(19): siRNA sense strand
ccacguacauuaacaugau

SEQ ID NO: 560685 - RNA, 19 nt, Homo sapiens
  misc_RNA (1)...(19): siRNA sense strand
gaccgaggcuacauucaga

SEQ ID NO: 560686 - RNA, 19 nt, Homo sapiens
  misc_RNA (1)...(19): siRNA sense strand
uggagaggcucaaggagua

SEQ ID NO: 560687 - RNA, 19 nt, Homo sapiens
  misc_RNA (1)...(19): siRNA sense strand
gcagaccucuucuacucuu

SEQ ID NO: 560688 - RNA, 19 nt, Homo sapiens
  misc_RNA (1)...(19): siRNA sense strand
gaaggaagcaaagcaaaug

SEQ ID NO: 560689 - RNA, 19 nt, Homo sapiens
  misc_RNA (1)...(19): siRNA sense strand
ggccgcagaucuuaaaguu

SEQ ID NO: 560690 - RNA, 19 nt, Homo sapiens
  misc_RNA (1)...(19): siRNA sense strand
gaccuccgcuucaagauca

SEQ ID NO: 560691 - RNA, 19 nt, Homo sapiens
  misc_RNA (1)...(19): siRNA sense strand
aaggagaaauccaggagua

SEQ ID NO: 560692 - RNA, 19 nt, Homo sapiens
  misc_RNA (1)...(19): siRNA sense strand
caucugaaauggaaaccaa

SEQ ID NO: 560693 - RNA, 19 nt, Homo sapiens
  misc_RNA (1)...(19): siRNA sense strand
gcaacugcaucguucuguu

SEQ ID NO: 560694 - RNA, 19 nt, Homo sapiens
  misc_RNA (1)...(19): siRNA sense strand
ggaaagaagucggggcaua

SEQ ID NO: 560695 - RNA, 19 nt, Homo sapiens
  misc_RNA (1)...(19): siRNA sense strand
ugaacgaaauucucaaugg

SEQ ID NO: 560696 - RNA, 19 nt, Homo sapiens
  misc_RNA (1)...(19): siRNA sense strand
caagcuagaccaugaaugu

SEQ ID NO: 560697 - RNA, 19 nt, Homo sapiens
  misc_RNA (1)...(19): siRNA sense strand
guacucggaugaagaaguc

SEQ ID NO: 560698 - RNA, 19 nt, Homo sapiens
  misc_RNA (1)...(19): siRNA sense strand
gagaggaccuggacuucgu

SEQ ID NO: 560699 - RNA, 19 nt, Homo sapiens
  misc_RNA (1)...(19): siRNA sense strand
caacugcaucguucuguuu

SEQ ID NO: 560700 - RNA, 19 nt, Homo sapiens
  misc_RNA (1)...(19): siRNA sense strand
ggacuuggccacguacauu

SEQ ID NO: 560701 - RNA, 19 nt, Homo sapiens
  misc_RNA (1)...(19): siRNA sense strand
caacagcaccgcagaacug

SEQ ID NO: 560702 - RNA, 19 nt, Homo sapiens
  misc_RNA (1)...(19): siRNA sense strand
ggaaggaagcaaagcaaau

SEQ ID NO: 560703 - RNA, 19 nt, Homo sapiens
  misc_RNA (1)...(19): siRNA sense strand
gaucaaagugcuaaagcuu

SEQ ID NO: 560704 - RNA, 19 nt, Homo sapiens
  misc_RNA (1)...(19): siRNA sense strand
ugaaggugcugaagaaguc

SEQ ID NO: 560705 - RNA, 19 nt, Homo sapiens
  misc_RNA (1)...(19): siRNA sense strand
gcagagaggucuuuucuac

SEQ ID NO: 560706 - RNA, 19 nt, Homo sapiens
  misc_RNA (1)...(19): siRNA sense strand
ggaucuuucucucccauga

SEQ ID NO: 560707 - RNA, 19 nt, Homo sapiens
  misc_RNA (1)...(19): siRNA sense strand
cgaugaagaccaagacgua

SEQ ID NO: 560708 - RNA, 19 nt, Homo sapiens
  misc_RNA (1)...(19): siRNA sense strand
gcaucaacaucgccaagau

SEQ ID NO: 560709 - RNA, 19 nt, Homo sapiens
  misc_RNA (1)...(19): siRNA sense strand
gcugguagcccuagugugu

SEQ ID NO: 560710 - RNA, 19 nt, Homo sapiens
  misc_RNA (1)...(19): siRNA sense strand
agaaccagaaggccuauua

SEQ ID NO: 560711 - RNA, 19 nt, Homo sapiens
  misc_RNA (1)...(19): siRNA sense strand
ggacucaggagcacacgaa

SEQ ID NO: 560712 - RNA, 19 nt, Homo sapiens
  misc_RNA (1)...(19): siRNA sense strand
ccugggagcuggcauucaa

SEQ ID NO: 560713 - RNA, 19 nt, Homo sapiens
  misc_RNA (1)...(19): siRNA sense strand
cgaaagagaguuccaaggu

SEQ ID NO: 560714 - RNA, 19 nt, Homo sapiens
  misc_RNA (1)...(19): siRNA sense strand
uggcugagauggacaaagu

SEQ ID NO: 560715 - RNA, 19 nt, Homo sapiens
  misc_RNA (1)...(19): siRNA sense strand
gaagucugccuaccuguca

SEQ ID NO: 560716 - RNA, 19 nt, Homo sapiens
  misc_RNA (1)...(19): siRNA sense strand
cauugcaggucaccacgua

SEQ ID NO: 560717 - RNA, 19 nt, Homo sapiens
  misc_RNA (1)...(19): siRNA sense strand
cugacaagcuagaccauga

SEQ ID NO: 560718 - RNA, 19 nt, Homo sapiens
  misc_RNA (1)...(19): siRNA sense strand
ucuguuugcugcccuguuu

SEQ ID NO: 560719 - RNA, 19 nt, Homo sapiens
  misc_RNA (1)...(19): siRNA sense strand
gaccuggacuucguucuca

SEQ ID NO: 560720 - RNA, 19 nt, Homo sapiens
  misc_RNA (1)...(19): siRNA sense strand
gcaaagacaaucggaucaa

SEQ ID NO: 560721 - RNA, 19 nt, Homo sapiens
  misc_RNA (1)...(19): siRNA sense strand
gaaauucucaaugggauca

SEQ ID NO: 560722 - RNA, 19 nt, Homo sapiens
  misc_RNA (1)...(19): siRNA sense strand
caaagacaaucggaucaag

SEQ ID NO: 560723 - RNA, 19 nt, Homo sapiens
  misc_RNA (1)...(19): siRNA sense strand
cucaugagcuucuucuuca

SEQ ID NO: 560724 - RNA, 19 nt, Homo sapiens
  misc_RNA (1)...(19): siRNA sense strand
aaggagagaucaucaucga

SEQ ID NO: 560725 - RNA, 19 nt, Homo sapiens
  misc_RNA (1)...(19): siRNA sense strand
gagcugaaggugcugaaga

SEQ ID NO: 560726 - RNA, 19 nt, Homo sapiens
  misc_RNA (1)...(19): siRNA sense strand
uggaaugucacguggaaua

SEQ ID NO: 560727 - RNA, 19 nt, Homo sapiens
  misc_RNA (1)...(19): siRNA sense strand
ggaaggcccuggugaucac

SEQ ID NO: 560728 - RNA, 19 nt, Homo sapiens
  misc_RNA (1)...(19): siRNA sense strand
ccacgcugcuugcuaccuu

SEQ ID NO: 560729 - RNA, 19 nt, Homo sapiens
  misc_RNA (1)...(19): siRNA sense strand
gcgagugucucccucaaac

SEQ ID NO: 560730 - RNA, 19 nt, Homo sapiens
  misc_RNA (1)...(19): siRNA sense strand
ggacacgucggaacaaguc

SEQ ID NO: 560731 - RNA, 19 nt, Homo sapiens
  misc_RNA (1)...(19): siRNA sense strand
gaguggaauuccggaacua

SEQ ID NO: 560732 - RNA, 19 nt, Homo sapiens
  misc_RNA (1)...(19): siRNA sense strand
caaggaguauucagagacu

SEQ ID NO: 560733 - RNA, 19 nt, Homo sapiens
  misc_RNA (1)...(19): siRNA sense strand
cacaagggaucgccguguu

SEQ ID NO: 560734 - RNA, 19 nt, Homo sapiens
  misc_RNA (1)...(19): siRNA sense strand
gcgcuggcuuccaacuauu

SEQ ID NO: 560735 - RNA, 19 nt, Homo sapiens
  misc_RNA (1)...(19): siRNA sense strand
guacugggacuacaugaag

SEQ ID NO: 560736 - RNA, 19 nt, Homo sapiens
  misc_RNA (1)...(19): siRNA sense strand
gcaaagcaaauggagaaug

SEQ ID NO: 560737 - RNA, 19 nt, Homo sapiens
  misc_RNA (1)...(19): siRNA sense strand
aagcaaagcaaauggagaa

SEQ ID NO: 560738 - RNA, 19 nt, Homo sapiens
  misc_RNA (1)...(19): siRNA sense strand
gcagguggacgucaucauc

SEQ ID NO: 560739 - RNA, 19 nt, Homo sapiens
  misc_RNA (1)...(19): siRNA sense strand
gacuuggccacguacauua

SEQ ID NO: 560740 - RNA, 19 nt, Homo sapiens
  misc_RNA (1)...(19): siRNA sense strand
ucauggacuuggccacgua

SEQ ID NO: 560741 - RNA, 19 nt, Homo sapiens
  misc_RNA (1)...(19): siRNA sense strand
gaaggaaugcgccaagacu

SEQ ID NO: 560742 - RNA, 19 nt, Homo sapiens
  misc_RNA (1)...(19): siRNA sense strand
cagggaucaugcucacuuu

SEQ ID NO: 560743 - RNA, 19 nt, Homo sapiens
  misc_RNA (1)...(19): siRNA sense strand
ccaguacucggaugaagaa

SEQ ID NO: 560744 - RNA, 19 nt, Homo sapiens
  misc_RNA (1)...(19): siRNA sense strand
ggucaagcuuuccguguac

SEQ ID NO: 560745 - RNA, 19 nt, Homo sapiens
  misc_RNA (1)...(19): siRNA sense strand
uaaagaacuggaagaagga

SEQ ID NO: 560746 - RNA, 19 nt, Homo sapiens
  misc_RNA (1)...(19): siRNA sense strand
cucagugucuuacucauug

SEQ ID NO: 560747 - RNA, 19 nt, Homo sapiens
  misc_RNA (1)...(19): siRNA sense strand
ucaagcugaugaacgaaau

SEQ ID NO: 560748 - RNA, 19 nt, Homo sapiens
  misc_RNA (1)...(19): siRNA sense strand
ggaucaugcucacuuucug

SEQ ID NO: 560749 - RNA, 19 nt, Homo sapiens
  misc_RNA (1)...(19): siRNA sense strand
cagcagcuccuccuccuau

SEQ ID NO: 560750 - RNA, 19 nt, Homo sapiens
  misc_RNA (1)...(19): siRNA sense strand
gcacagcaugagcuacuug

SEQ ID NO: 560751 - RNA, 19 nt, Homo sapiens
  misc_RNA (1)...(19): siRNA sense strand
ggaucaaagugcuaaagcu

SEQ ID NO: 560752 - RNA, 19 nt, Homo sapiens
  misc_RNA (1)...(19): siRNA sense strand
gaugaacgaaauucucaau

SEQ ID NO: 560753 - RNA, 19 nt, Homo sapiens
  misc_RNA (1)...(19): siRNA sense strand
gcccgucaaugcugugaug

SEQ ID NO: 560754 - RNA, 19 nt, Homo sapiens
  misc_RNA (1)...(19): siRNA sense strand
augaggagguggaggcuuu

SEQ ID NO: 560755 - RNA, 19 nt, Homo sapiens
  misc_RNA (1)...(19): siRNA sense strand
ccaagguggaugcgaauga

SEQ ID NO: 560756 - RNA, 19 nt, Homo sapiens
  misc_RNA (1)...(19): siRNA sense strand
ucaaacgccugaggaucuu

SEQ ID NO: 560757 - RNA, 19 nt, Homo sapiens
  misc_RNA (1)...(19): siRNA sense strand
ggucagcccaacucucuug

SEQ ID NO: 560758 - RNA, 19 nt, Homo sapiens
  misc_RNA (1)...(19): siRNA sense strand
gaccaugaaugugcagaag

SEQ ID NO: 560759 - RNA, 19 nt, Homo sapiens
  misc_RNA (1)...(19): siRNA sense strand
auuggugccugcaucguua

SEQ ID NO: 560760 - RNA, 19 nt, Homo sapiens
  misc_RNA (1)...(19): siRNA sense strand
gggaaggaagcaaagcaaa

SEQ ID NO: 560761 - RNA, 19 nt, Homo sapiens
  misc_RNA (1)...(19): siRNA sense strand
gggcccuacuuccucauga

SEQ ID NO: 560762 - RNA, 19 nt, Homo sapiens
  misc_RNA (1)...(19): siRNA sense strand
guucaugggcucccuguuc

SEQ ID NO: 560763 - RNA, 19 nt, Homo sapiens
  misc_RNA (1)...(19): siRNA sense strand
cagggcaggucaagcuuuc

SEQ ID NO: 560764 - RNA, 19 nt, Homo sapiens
  misc_RNA (1)...(19): siRNA sense strand
ugauggcgaugaagaccaa

SEQ ID NO: 560765 - RNA, 19 nt, Homo sapiens
  misc_RNA (1)...(19): siRNA sense strand
gagauugucaaccucaugu

SEQ ID NO: 560766 - RNA, 19 nt, Homo sapiens
  misc_RNA (1)...(19): siRNA sense strand
acaccgugcugcuguuugu

SEQ ID NO: 560767 - RNA, 19 nt, Homo sapiens
  misc_RNA (1)...(19): siRNA sense strand
ucuuaaaguugcucaucaa

SEQ ID NO: 560768 - RNA, 19 nt, Homo sapiens
  misc_RNA (1)...(19): siRNA sense strand
ucccggaggucaucaagau

SEQ ID NO: 560769 - RNA, 19 nt, Homo sapiens
  misc_RNA (1)...(19): siRNA sense strand
ggacagugcagggaagcaa

SEQ ID NO: 560770 - RNA, 19 nt, Homo sapiens
  misc_RNA (1)...(19): siRNA sense strand
ggagguggaggcuuugauc

SEQ ID NO: 560771 - RNA, 19 nt, Homo sapiens
  misc_RNA (1)...(19): siRNA sense strand
gcaggucaccacguacuug

SEQ ID NO: 560772 - RNA, 19 nt, Homo sapiens
  misc_RNA (1)...(19): siRNA sense strand
agaaggaggagaccuggaa

SEQ ID NO: 560773 - RNA, 19 nt, Homo sapiens
  misc_RNA (1)...(19): siRNA sense strand
ucgugugggugccuuguuu

SEQ ID NO: 560774 - RNA, 19 nt, Homo sapiens
  misc_RNA (1)...(19): siRNA sense strand
ccacaucugcuucgucagu

SEQ ID NO: 560775 - RNA, 19 nt, Homo sapiens
  misc_RNA (1)...(19): siRNA sense strand
gcaccaguacuuccacauc

SEQ ID NO: 560776 - RNA, 19 nt, Homo sapiens
  misc_RNA (1)...(19): siRNA sense strand
gaugacaccucucaacaaa

SEQ ID NO: 560777 - RNA, 19 nt, Homo sapiens
  misc_RNA (1)...(19): siRNA sense strand
uaaaguugcucaucaaguu

SEQ ID NO: 560778 - RNA, 19 nt, Homo sapiens
  misc_RNA (1)...(19): siRNA sense strand
ggaagcaacugcagagaca

SEQ ID NO: 560779 - RNA, 19 nt, Homo sapiens
  misc_RNA (1)...(19): siRNA sense strand
ccaaggagcuggacacagu

SEQ ID NO: 560780 - RNA, 19 nt, Homo sapiens
  misc_RNA (1)...(19): siRNA sense strand
caacgagucugccgaagga

SEQ ID NO: 560781 - RNA, 19 nt, Homo sapiens
  misc_RNA (1)...(19): siRNA sense strand
gaucaagaccgcugucauu

SEQ ID NO: 560782 - RNA, 19 nt, Homo sapiens
  misc_RNA (1)...(19): siRNA sense strand
caaagcaaauggagaaugg

SEQ ID NO: 560783 - RNA, 19 nt, Homo sapiens
  misc_RNA (1)...(19): siRNA sense strand
gggcagaccucuucuacuc

SEQ ID NO: 560784 - RNA, 19 nt, Homo sapiens
  misc_RNA (1)...(19): siRNA sense strand
ccacguacauuaacaugau

SEQ ID NO: 560785 - RNA, 19 nt, Homo sapiens
  misc_RNA (1)...(19): siRNA sense strand
gaccgaggcuacauucaga

SEQ ID NO: 560786 - RNA, 19 nt, Homo sapiens
  misc_RNA (1)...(19): siRNA sense strand
uggagaggcucaaggagua

SEQ ID NO: 560787 - RNA, 19 nt, Homo sapiens
  misc_RNA (1)...(19): siRNA sense strand
gcagaccucuucuacucuu

SEQ ID NO: 560788 - RNA, 19 nt, Homo sapiens
  misc_RNA (1)...(19): siRNA sense strand
gaaggaagcaaagcaaaug

SEQ ID NO: 560789 - RNA, 19 nt, Homo sapiens
  misc_RNA (1)...(19): siRNA sense strand
ggccgcagaucuuaaaguu

SEQ ID NO: 560790 - RNA, 19 nt, Homo sapiens
  misc_RNA (1)...(19): siRNA sense strand
gaccuccgcuucaagauca

SEQ ID NO: 560791 - RNA, 19 nt, Homo sapiens
  misc_RNA (1)...(19): siRNA sense strand
aaggagaaauccaggagua

SEQ ID NO: 560792 - RNA, 19 nt, Homo sapiens
  misc_RNA (1)...(19): siRNA sense strand
caucugaaauggaaaccaa

SEQ ID NO: 560793 - RNA, 19 nt, Homo sapiens
  misc_RNA (1)...(19): siRNA sense strand
gcaacugcaucguucuguu

SEQ ID NO: 560794 - RNA, 19 nt, Homo sapiens
  misc_RNA (1)...(19): siRNA sense strand
ggaaagaagucggggcaua

SEQ ID NO: 560795 - RNA, 19 nt, Homo sapiens
  misc_RNA (1)...(19): siRNA sense strand
ugaacgaaauucucaaugg

SEQ ID NO: 560796 - RNA, 19 nt, Homo sapiens
  misc_RNA (1)...(19): siRNA sense strand
caagcuagaccaugaaugu

SEQ ID NO: 560797 - RNA, 19 nt, Homo sapiens
  misc_RNA (1)...(19): siRNA sense strand
guacucggaugaagaaguc

SEQ ID NO: 560798 - RNA, 19 nt, Homo sapiens
  misc_RNA (1)...(19): siRNA sense strand
gagaggaccuggacuucgu

SEQ ID NO: 560799 - RNA, 19 nt, Homo sapiens
  misc_RNA (1)...(19): siRNA sense strand
caacugcaucguucuguuu

SEQ ID NO: 560800 - RNA, 19 nt, Homo sapiens
  misc_RNA (1)...(19): siRNA sense strand
ggacuuggccacguacauu

SEQ ID NO: 560801 - RNA, 19 nt, Homo sapiens
  misc_RNA (1)...(19): siRNA sense strand
caacagcaccgcagaacug

SEQ ID NO: 560802 - RNA, 19 nt, Homo sapiens
  misc_RNA (1)...(19): siRNA sense strand
ggaaggaagcaaagcaaau

SEQ ID NO: 560803 - RNA, 19 nt, Homo sapiens
  misc_RNA (1)...(19): siRNA sense strand
gaucaaagugcuaaagcuu

SEQ ID NO: 560804 - RNA, 19 nt, Homo sapiens
  misc_RNA (1)...(19): siRNA sense strand
ugaaggugcugaagaaguc

SEQ ID NO: 560805 - RNA, 19 nt, Homo sapiens
  misc_RNA (1)...(19): siRNA sense strand
gcagagaggucuuuucuac

SEQ ID NO: 560806 - RNA, 19 nt, Homo sapiens
  misc_RNA (1)...(19): siRNA sense strand
ggaucuuucucucccauga

SEQ ID NO: 560807 - RNA, 19 nt, Homo sapiens
  misc_RNA (1)...(19): siRNA sense strand
cgaugaagaccaagacgua

SEQ ID NO: 560808 - RNA, 19 nt, Homo sapiens
  misc_RNA (1)...(19): siRNA sense strand
gcaucaacaucgccaagau

SEQ ID NO: 560809 - RNA, 19 nt, Homo sapiens
  misc_RNA (1)...(19): siRNA sense strand
gcugguagcccuagugugu

SEQ ID NO: 560810 - RNA, 19 nt, Homo sapiens
  misc_RNA (1)...(19): siRNA sense strand
agaaccagaaggccuauua

SEQ ID NO: 560811 - RNA, 19 nt, Homo sapiens
  misc_RNA (1)...(19): siRNA sense strand
ggacucaggagcacacgaa

SEQ ID NO: 560812 - RNA, 19 nt, Homo sapiens
  misc_RNA (1)...(19): siRNA sense strand
ccugggagcuggcauucaa

SEQ ID NO: 560813 - RNA, 19 nt, Homo sapiens
  misc_RNA (1)...(19): siRNA sense strand
cgaaagagaguuccaaggu

SEQ ID NO: 560814 - RNA, 19 nt, Homo sapiens
  misc_RNA (1)...(19): siRNA sense strand
uggcugagauggacaaagu

SEQ ID NO: 560815 - RNA, 19 nt, Homo sapiens
  misc_RNA (1)...(19): siRNA sense strand
gaagucugccuaccuguca

SEQ ID NO: 560816 - RNA, 19 nt, Homo sapiens
  misc_RNA (1)...(19): siRNA sense strand
cauugcaggucaccacgua

SEQ ID NO: 560817 - RNA, 19 nt, Homo sapiens
  misc_RNA (1)...(19): siRNA sense strand
cugacaagcuagaccauga

SEQ ID NO: 560818 - RNA, 19 nt, Homo sapiens
  misc_RNA (1)...(19): siRNA sense strand
ucuguuugcugcccuguuu

SEQ ID NO: 560819 - RNA, 19 nt, Homo sapiens
  misc_RNA (1)...(19): siRNA sense strand
gaccuggacuucguucuca

SEQ ID NO: 560820 - RNA, 19 nt, Homo sapiens
  misc_RNA (1)...(19): siRNA sense strand
gcaaagacaaucggaucaa

SEQ ID NO: 560821 - RNA, 19 nt, Homo sapiens
  misc_RNA (1)...(19): siRNA sense strand
gaaauucucaaugggauca

SEQ ID NO: 560822 - RNA, 19 nt, Homo sapiens
  misc_RNA (1)...(19): siRNA sense strand
caaagacaaucggaucaag

SEQ ID NO: 560823 - RNA, 19 nt, Homo sapiens
  misc_RNA (1)...(19): siRNA sense strand
cucaugagcuucuucuuca

SEQ ID NO: 560824 - RNA, 19 nt, Homo sapiens
  misc_RNA (1)...(19): siRNA sense strand
aaggagagaucaucaucga

SEQ ID NO: 560825 - RNA, 19 nt, Homo sapiens
  misc_RNA (1)...(19): siRNA sense strand
gagcugaaggugcugaaga

SEQ ID NO: 560826 - RNA, 19 nt, Homo sapiens
  misc_RNA (1)...(19): siRNA sense strand
uggaaugucacguggaaua

SEQ ID NO: 560827 - RNA, 19 nt, Homo sapiens
  misc_RNA (1)...(19): siRNA sense strand
ggaaggcccuggugaucac

SEQ ID NO: 560828 - RNA, 19 nt, Homo sapiens
  misc_RNA (1)...(19): siRNA sense strand
ccacgcugcuugcuaccuu

SEQ ID NO: 560829 - RNA, 19 nt, Homo sapiens
  misc_RNA (1)...(19): siRNA sense strand
gcgagugucucccucaaac

SEQ ID NO: 560830 - RNA, 19 nt, Homo sapiens
  misc_RNA (1)...(19): siRNA sense strand
ggacacgucggaacaaguc

SEQ ID NO: 560831 - RNA, 19 nt, Homo sapiens
  misc_RNA (1)...(19): siRNA sense strand
gaguggaauuccggaacua

SEQ ID NO: 560832 - RNA, 19 nt, Homo sapiens
  misc_RNA (1)...(19): siRNA sense strand
caaggaguauucagagacu

SEQ ID NO: 560833 - RNA, 19 nt, Homo sapiens
  misc_RNA (1)...(19): siRNA sense strand
cacaagggaucgccguguu

SEQ ID NO: 560834 - RNA, 19 nt, Homo sapiens
  misc_RNA (1)...(19): siRNA sense strand
gcgcuggcuuccaacuauu

SEQ ID NO: 560835 - RNA, 19 nt, Homo sapiens
  misc_RNA (1)...(19): siRNA sense strand
guacugggacuacaugaag

SEQ ID NO: 560836 - RNA, 19 nt, Homo sapiens
  misc_RNA (1)...(19): siRNA sense strand
gcaaagcaaauggagaaug

SEQ ID NO: 560837 - RNA, 19 nt, Homo sapiens
  misc_RNA (1)...(19): siRNA sense strand
aagcaaagcaaauggagaa

SEQ ID NO: 560838 - RNA, 19 nt, Homo sapiens
  misc_RNA (1)...(19): siRNA sense strand
gcagguggacgucaucauc

SEQ ID NO: 560839 - RNA, 19 nt, Homo sapiens
  misc_RNA (1)...(19): siRNA sense strand
gacuuggccacguacauua

SEQ ID NO: 560840 - RNA, 19 nt, Homo sapiens
  misc_RNA (1)...(19): siRNA sense strand
ucauggacuuggccacgua

SEQ ID NO: 560841 - RNA, 19 nt, Homo sapiens
  misc_RNA (1)...(19): siRNA sense strand
gaaggaaugcgccaagacu

SEQ ID NO: 560842 - RNA, 19 nt, Homo sapiens
  misc_RNA (1)...(19): siRNA sense strand
cagggaucaugcucacuuu

SEQ ID NO: 560843 - RNA, 19 nt, Homo sapiens
  misc_RNA (1)...(19): siRNA sense strand
ccaguacucggaugaagaa

SEQ ID NO: 560844 - RNA, 19 nt, Homo sapiens
  misc_RNA (1)...(19): siRNA sense strand
ggucaagcuuuccguguac

SEQ ID NO: 560845 - RNA, 19 nt, Homo sapiens
  misc_RNA (1)...(19): siRNA sense strand
uaaagaacuggaagaagga

SEQ ID NO: 560846 - RNA, 19 nt, Homo sapiens
  misc_RNA (1)...(19): siRNA sense strand
cucagugucuuacucauug

SEQ ID NO: 560847 - RNA, 19 nt, Homo sapiens
  misc_RNA (1)...(19): siRNA sense strand
ucaagcugaugaacgaaau

SEQ ID NO: 560848 - RNA, 19 nt, Homo sapiens
  misc_RNA (1)...(19): siRNA sense strand
ggaucaugcucacuuucug

SEQ ID NO: 560849 - RNA, 19 nt, Homo sapiens
  misc_RNA (1)...(19): siRNA sense strand
cagcagcuccuccuccuau

SEQ ID NO: 560850 - RNA, 19 nt, Homo sapiens
  misc_RNA (1)...(19): siRNA sense strand
gcacagcaugagcuacuug

SEQ ID NO: 560851 - RNA, 19 nt, Homo sapiens
  misc_RNA (1)...(19): siRNA sense strand
ggaucaaagugcuaaagcu

SEQ ID NO: 560852 - RNA, 19 nt, Homo sapiens
  misc_RNA (1)...(19): siRNA sense strand
gaugaacgaaauucucaau

SEQ ID NO: 560853 - RNA, 19 nt, Homo sapiens
  misc_RNA (1)...(19): siRNA sense strand
gcccgucaaugcugugaug

SEQ ID NO: 560854 - RNA, 19 nt, Homo sapiens
  misc_RNA (1)...(19): siRNA sense strand
augaggagguggaggcuuu

SEQ ID NO: 560855 - RNA, 19 nt, Homo sapiens
  misc_RNA (1)...(19): siRNA sense strand
ccaagguggaugcgaauga

SEQ ID NO: 560856 - RNA, 19 nt, Homo sapiens
  misc_RNA (1)...(19): siRNA sense strand
ucaaacgccugaggaucuu

SEQ ID NO: 560857 - RNA, 19 nt, Homo sapiens
  misc_RNA (1)...(19): siRNA sense strand
ggucagcccaacucucuug

SEQ ID NO: 560858 - RNA, 19 nt, Homo sapiens
  misc_RNA (1)...(19): siRNA sense strand
gaccaugaaugugcagaag

SEQ ID NO: 560859 - RNA, 19 nt, Homo sapiens
  misc_RNA (1)...(19): siRNA sense strand
auuggugccugcaucguua

SEQ ID NO: 560860 - RNA, 19 nt, Homo sapiens
  misc_RNA (1)...(19): siRNA sense strand
gggaaggaagcaaagcaaa

SEQ ID NO: 560861 - RNA, 19 nt, Homo sapiens
  misc_RNA (1)...(19): siRNA sense strand
gggcccuacuuccucauga

SEQ ID NO: 560862 - RNA, 19 nt, Homo sapiens
  misc_RNA (1)...(19): siRNA sense strand
guucaugggcucccuguuc

SEQ ID NO: 560863 - RNA, 19 nt, Homo sapiens
  misc_RNA (1)...(19): siRNA sense strand
cagggcaggucaagcuuuc

SEQ ID NO: 560864 - RNA, 19 nt, Homo sapiens
  misc_RNA (1)...(19): siRNA sense strand
ugauggcgaugaagaccaa

SEQ ID NO: 560865 - RNA, 19 nt, Homo sapiens
  misc_RNA (1)...(19): siRNA sense strand
gagauugucaaccucaugu

SEQ ID NO: 560866 - RNA, 19 nt, Homo sapiens
  misc_RNA (1)...(19): siRNA sense strand
acaccgugcugcuguuugu

SEQ ID NO: 560867 - RNA, 19 nt, Homo sapiens
  misc_RNA (1)...(19): siRNA sense strand
ucuuaaaguugcucaucaa

SEQ ID NO: 560868 - RNA, 19 nt, Homo sapiens
  misc_RNA (1)...(19): siRNA sense strand
ucccggaggucaucaagau

SEQ ID NO: 560869 - RNA, 19 nt, Homo sapiens
  misc_RNA (1)...(19): siRNA sense strand
ggacagugcagggaagcaa

SEQ ID NO: 560870 - RNA, 19 nt, Homo sapiens
  misc_RNA (1)...(19): siRNA sense strand
ggagguggaggcuuugauc

SEQ ID NO: 560871 - RNA, 19 nt, Homo sapiens
  misc_RNA (1)...(19): siRNA sense strand
gcaggucaccacguacuug

SEQ ID NO: 560872 - RNA, 19 nt, Homo sapiens
  misc_RNA (1)...(19): siRNA sense strand
agaaggaggagaccuggaa

SEQ ID NO: 560873 - RNA, 19 nt, Homo sapiens
  misc_RNA (1)...(19): siRNA sense strand
ucgugugggugccuuguuu

SEQ ID NO: 560874 - RNA, 19 nt, Homo sapiens
  misc_RNA (1)...(19): siRNA sense strand
ccacaucugcuucgucagu

SEQ ID NO: 560875 - RNA, 19 nt, Homo sapiens
  misc_RNA (1)...(19): siRNA sense strand
gcaccaguacuuccacauc

SEQ ID NO: 560876 - RNA, 19 nt, Homo sapiens
  misc_RNA (1)...(19): siRNA sense strand
gaugacaccucucaacaaa

SEQ ID NO: 560877 - RNA, 19 nt, Homo sapiens
  misc_RNA (1)...(19): siRNA sense strand
uaaaguugcucaucaaguu

SEQ ID NO: 560878 - RNA, 19 nt, Homo sapiens
  misc_RNA (1)...(19): siRNA sense strand
ggaagcaacugcagagaca

SEQ ID NO: 560879 - RNA, 19 nt, Homo sapiens
  misc_RNA (1)...(19): siRNA sense strand
ccaaggagcuggacacagu

SEQ ID NO: 560880 - RNA, 19 nt, Homo sapiens
  misc_RNA (1)...(19): siRNA sense strand
caacgagucugccgaagga

SEQ ID NO: 560881 - RNA, 19 nt, Homo sapiens
  misc_RNA (1)...(19): siRNA sense strand
gaucaagaccgcugucauu

SEQ ID NO: 560882 - RNA, 19 nt, Homo sapiens
  misc_RNA (1)...(19): siRNA sense strand
caaagcaaauggagaaugg

SEQ ID NO: 560883 - RNA, 19 nt, Homo sapiens
  misc_RNA (1)...(19): siRNA sense strand
gggcagaccucuucuacuc

SEQ ID NO: 560884 - RNA, 19 nt, Homo sapiens
  misc_RNA (1)...(19): siRNA sense strand
ccacguacauuaacaugau

SEQ ID NO: 560885 - RNA, 19 nt, Homo sapiens
  misc_RNA (1)...(19): siRNA sense strand
gaccgaggcuacauucaga

SEQ ID NO: 560886 - RNA, 19 nt, Homo sapiens
  misc_RNA (1)...(19): siRNA sense strand
uggagaggcucaaggagua

SEQ ID NO: 560887 - RNA, 19 nt, Homo sapiens
  misc_RNA (1)...(19): siRNA sense strand
gcagaccucuucuacucuu

SEQ ID NO: 560888 - RNA, 19 nt, Homo sapiens
  misc_RNA (1)...(19): siRNA sense strand
gaaggaagcaaagcaaaug

SEQ ID NO: 560889 - RNA, 19 nt, Homo sapiens
  misc_RNA (1)...(19): siRNA sense strand
ggccgcagaucuuaaaguu

SEQ ID NO: 560890 - RNA, 19 nt, Homo sapiens
  misc_RNA (1)...(19): siRNA sense strand
gaccuccgcuucaagauca

SEQ ID NO: 560891 - RNA, 19 nt, Homo sapiens
  misc_RNA (1)...(19): siRNA sense strand
aaggagaaauccaggagua

SEQ ID NO: 560892 - RNA, 19 nt, Homo sapiens
  misc_RNA (1)...(19): siRNA sense strand
caucugaaauggaaaccaa

SEQ ID NO: 560893 - RNA, 19 nt, Homo sapiens
  misc_RNA (1)...(19): siRNA sense strand
gcaacugcaucguucuguu

SEQ ID NO: 560894 - RNA, 19 nt, Homo sapiens
  misc_RNA (1)...(19): siRNA sense strand
ggaaagaagucggggcaua

SEQ ID NO: 560895 - RNA, 19 nt, Homo sapiens
  misc_RNA (1)...(19): siRNA sense strand
ugaacgaaauucucaaugg

SEQ ID NO: 560896 - RNA, 19 nt, Homo sapiens
  misc_RNA (1)...(19): siRNA sense strand
caagcuagaccaugaaugu

SEQ ID NO: 560897 - RNA, 19 nt, Homo sapiens
  misc_RNA (1)...(19): siRNA sense strand
guacucggaugaagaaguc

SEQ ID NO: 560898 - RNA, 19 nt, Homo sapiens
  misc_RNA (1)...(19): siRNA sense strand
gagaggaccuggacuucgu

SEQ ID NO: 560899 - RNA, 19 nt, Homo sapiens
  misc_RNA (1)...(19): siRNA sense strand
caacugcaucguucuguuu

SEQ ID NO: 560900 - RNA, 19 nt, Homo sapiens
  misc_RNA (1)...(19): siRNA sense strand
ggacuuggccacguacauu

SEQ ID NO: 560901 - RNA, 19 nt, Homo sapiens
  misc_RNA (1)...(19): siRNA sense strand
caacagcaccgcagaacug

SEQ ID NO: 560902 - RNA, 19 nt, Homo sapiens
  misc_RNA (1)...(19): siRNA sense strand
ggaaggaagcaaagcaaau

SEQ ID NO: 560903 - RNA, 19 nt, Homo sapiens
  misc_RNA (1)...(19): siRNA sense strand
gaucaaagugcuaaagcuu

SEQ ID NO: 560904 - RNA, 19 nt, Homo sapiens
  misc_RNA (1)...(19): siRNA sense strand
ugaaggugcugaagaaguc

SEQ ID NO: 560905 - RNA, 19 nt, Homo sapiens
  misc_RNA (1)...(19): siRNA sense strand
gcagagaggucuuuucuac

SEQ ID NO: 560906 - RNA, 19 nt, Homo sapiens
  misc_RNA (1)...(19): siRNA sense strand
ggaucuuucucucccauga

SEQ ID NO: 560907 - RNA, 19 nt, Homo sapiens
  misc_RNA (1)...(19): siRNA sense strand
cgaugaagaccaagacgua

SEQ ID NO: 560908 - RNA, 19 nt, Homo sapiens
  misc_RNA (1)...(19): siRNA sense strand
gcaucaacaucgccaagau

SEQ ID NO: 560909 - RNA, 19 nt, Homo sapiens
  misc_RNA (1)...(19): siRNA sense strand
gcugguagcccuagugugu

SEQ ID NO: 560910 - RNA, 19 nt, Homo sapiens
  misc_RNA (1)...(19): siRNA sense strand
agaaccagaaggccuauua

SEQ ID NO: 560911 - RNA, 19 nt, Homo sapiens
  misc_RNA (1)...(19): siRNA sense strand
ggacucaggagcacacgaa

SEQ ID NO: 560912 - RNA, 19 nt, Homo sapiens
  misc_RNA (1)...(19): siRNA sense strand
ccugggagcuggcauucaa

SEQ ID NO: 560913 - RNA, 19 nt, Homo sapiens
  misc_RNA (1)...(19): siRNA sense strand
cgaaagagaguuccaaggu

SEQ ID NO: 560914 - RNA, 19 nt, Homo sapiens
  misc_RNA (1)...(19): siRNA sense strand
uggcugagauggacaaagu

SEQ ID NO: 560915 - RNA, 19 nt, Homo sapiens
  misc_RNA (1)...(19): siRNA sense strand
gaagucugccuaccuguca

SEQ ID NO: 560916 - RNA, 19 nt, Homo sapiens
  misc_RNA (1)...(19): siRNA sense strand
cauugcaggucaccacgua

SEQ ID NO: 560917 - RNA, 19 nt, Homo sapiens
  misc_RNA (1)...(19): siRNA sense strand
cugacaagcuagaccauga

SEQ ID NO: 560918 - RNA, 19 nt, Homo sapiens
  misc_RNA (1)...(19): siRNA sense strand
ucuguuugcugcccuguuu

SEQ ID NO: 560919 - RNA, 19 nt, Homo sapiens
  misc_RNA (1)...(19): siRNA sense strand
gaccuggacuucguucuca

SEQ ID NO: 560920 - RNA, 19 nt, Homo sapiens
  misc_RNA (1)...(19): siRNA sense strand
gcaaagacaaucggaucaa

SEQ ID NO: 560921 - RNA, 19 nt, Homo sapiens
  misc_RNA (1)...(19): siRNA sense strand
gaaauucucaaugggauca

SEQ ID NO: 560922 - RNA, 19 nt, Homo sapiens
  misc_RNA (1)...(19): siRNA sense strand
caaagacaaucggaucaag

SEQ ID NO: 560923 - RNA, 19 nt, Homo sapiens
  misc_RNA (1)...(19): siRNA sense strand
cucaugagcuucuucuuca

SEQ ID NO: 560924 - RNA, 19 nt, Homo sapiens
  misc_RNA (1)...(19): siRNA sense strand
aaggagagaucaucaucga

SEQ ID NO: 560925 - RNA, 19 nt, Homo sapiens
  misc_RNA (1)...(19): siRNA sense strand
gagcugaaggugcugaaga

SEQ ID NO: 560926 - RNA, 19 nt, Homo sapiens
  misc_RNA (1)...(19): siRNA sense strand
uggaaugucacguggaaua

SEQ ID NO: 560927 - RNA, 19 nt, Homo sapiens
  misc_RNA (1)...(19): siRNA sense strand
ggaaggcccuggugaucac

SEQ ID NO: 560928 - RNA, 19 nt, Homo sapiens
  misc_RNA (1)...(19): siRNA sense strand
ccacgcugcuugcuaccuu

SEQ ID NO: 560929 - RNA, 19 nt, Homo sapiens
  misc_RNA (1)...(19): siRNA sense strand
gcgagugucucccucaaac

SEQ ID NO: 560930 - RNA, 19 nt, Homo sapiens
  misc_RNA (1)...(19): siRNA sense strand
ggacacgucggaacaaguc

SEQ ID NO: 560931 - RNA, 19 nt, Homo sapiens
  misc_RNA (1)...(19): siRNA sense strand
gaguggaauuccggaacua

SEQ ID NO: 560932 - RNA, 19 nt, Homo sapiens
  misc_RNA (1)...(19): siRNA sense strand
caaggaguauucagagacu

SEQ ID NO: 560933 - RNA, 19 nt, Homo sapiens
  misc_RNA (1)...(19): siRNA sense strand
cacaagggaucgccguguu

SEQ ID NO: 560934 - RNA, 19 nt, Homo sapiens
  misc_RNA (1)...(19): siRNA sense strand
gcgcuggcuuccaacuauu

SEQ ID NO: 560935 - RNA, 19 nt, Homo sapiens
  misc_RNA (1)...(19): siRNA sense strand
guacugggacuacaugaag

SEQ ID NO: 560936 - RNA, 19 nt, Homo sapiens
  misc_RNA (1)...(19): siRNA sense strand
gcaaagcaaauggagaaug

SEQ ID NO: 560937 - RNA, 19 nt, Homo sapiens
  misc_RNA (1)...(19): siRNA sense strand
aagcaaagcaaauggagaa

SEQ ID NO: 560938 - RNA, 19 nt, Homo sapiens
  misc_RNA (1)...(19): siRNA sense strand
gcagguggacgucaucauc

SEQ ID NO: 560939 - RNA, 19 nt, Homo sapiens
  misc_RNA (1)...(19): siRNA sense strand
gacuuggccacguacauua

SEQ ID NO: 560940 - RNA, 19 nt, Homo sapiens
  misc_RNA (1)...(19): siRNA sense strand
ucauggacuuggccacgua

SEQ ID NO: 560941 - RNA, 19 nt, Homo sapiens
  misc_RNA (1)...(19): siRNA sense strand
gaaggaaugcgccaagacu

SEQ ID NO: 560942 - RNA, 19 nt, Homo sapiens
  misc_RNA (1)...(19): siRNA sense strand
cagggaucaugcucacuuu

SEQ ID NO: 560943 - RNA, 19 nt, Homo sapiens
  misc_RNA (1)...(19): siRNA sense strand
ccaguacucggaugaagaa

SEQ ID NO: 560944 - RNA, 19 nt, Homo sapiens
  misc_RNA (1)...(19): siRNA sense strand
ggucaagcuuuccguguac

SEQ ID NO: 560945 - RNA, 19 nt, Homo sapiens
  misc_RNA (1)...(19): siRNA sense strand
uaaagaacuggaagaagga

SEQ ID NO: 560946 - RNA, 19 nt, Homo sapiens
  misc_RNA (1)...(19): siRNA sense strand
cucagugucuuacucauug

SEQ ID NO: 560947 - RNA, 19 nt, Homo sapiens
  misc_RNA (1)...(19): siRNA sense strand
ucaagcugaugaacgaaau

SEQ ID NO: 560948 - RNA, 19 nt, Homo sapiens
  misc_RNA (1)...(19): siRNA sense strand
ggaucaugcucacuuucug

SEQ ID NO: 560949 - RNA, 19 nt, Homo sapiens
  misc_RNA (1)...(19): siRNA sense strand
cagcagcuccuccuccuau

SEQ ID NO: 560950 - RNA, 19 nt, Homo sapiens
  misc_RNA (1)...(19): siRNA sense strand
gcacagcaugagcuacuug

SEQ ID NO: 560951 - RNA, 19 nt, Homo sapiens
  misc_RNA (1)...(19): siRNA sense strand
ggaucaaagugcuaaagcu

SEQ ID NO: 560952 - RNA, 19 nt, Homo sapiens
  misc_RNA (1)...(19): siRNA sense strand
gaugaacgaaauucucaau

SEQ ID NO: 560953 - RNA, 19 nt, Homo sapiens
  misc_RNA (1)...(19): siRNA sense strand
gcccgucaaugcugugaug

SEQ ID NO: 560954 - RNA, 19 nt, Homo sapiens
  misc_RNA (1)...(19): siRNA sense strand
augaggagguggaggcuuu

SEQ ID NO: 560955 - RNA, 19 nt, Homo sapiens
  misc_RNA (1)...(19): siRNA sense strand
ccaagguggaugcgaauga

SEQ ID NO: 560956 - RNA, 19 nt, Homo sapiens
  misc_RNA (1)...(19): siRNA sense strand
ucaaacgccugaggaucuu

SEQ ID NO: 560957 - RNA, 19 nt, Homo sapiens
  misc_RNA (1)...(19): siRNA sense strand
ggucagcccaacucucuug

SEQ ID NO: 560958 - RNA, 19 nt, Homo sapiens
  misc_RNA (1)...(19): siRNA sense strand
gaccaugaaugugcagaag

SEQ ID NO: 560959 - RNA, 19 nt, Homo sapiens
  misc_RNA (1)...(19): siRNA sense strand
auuggugccugcaucguua

SEQ ID NO: 560960 - RNA, 19 nt, Homo sapiens
  misc_RNA (1)...(19): siRNA sense strand
gggaaggaagcaaagcaaa

SEQ ID NO: 560961 - RNA, 19 nt, Homo sapiens
  misc_RNA (1)...(19): siRNA sense strand
gggcccuacuuccucauga

SEQ ID NO: 560962 - RNA, 19 nt, Homo sapiens
  misc_RNA (1)...(19): siRNA sense strand
guucaugggcucccuguuc

SEQ ID NO: 560963 - RNA, 19 nt, Homo sapiens
  misc_RNA (1)...(19): siRNA sense strand
cagggcaggucaagcuuuc

SEQ ID NO: 560964 - RNA, 19 nt, Homo sapiens
  misc_RNA (1)...(19): siRNA sense strand
ugauggcgaugaagaccaa

SEQ ID NO: 560965 - RNA, 19 nt, Homo sapiens
  misc_RNA (1)...(19): siRNA sense strand
gagauugucaaccucaugu

SEQ ID NO: 560966 - RNA, 19 nt, Homo sapiens
  misc_RNA (1)...(19): siRNA sense strand
acaccgugcugcuguuugu

SEQ ID NO: 560967 - RNA, 19 nt, Homo sapiens
  misc_RNA (1)...(19): siRNA sense strand
ucuuaaaguugcucaucaa

SEQ ID NO: 560968 - RNA, 19 nt, Homo sapiens
  misc_RNA (1)...(19): siRNA sense strand
ucccggaggucaucaagau

SEQ ID NO: 560969 - RNA, 19 nt, Homo sapiens
  misc_RNA (1)...(19): siRNA sense strand
ggacagugcagggaagcaa

SEQ ID NO: 560970 - RNA, 19 nt, Homo sapiens
  misc_RNA (1)...(19): siRNA sense strand
ggagguggaggcuuugauc

SEQ ID NO: 560971 - RNA, 19 nt, Homo sapiens
  misc_RNA (1)...(19): siRNA sense strand
gcaggucaccacguacuug

SEQ ID NO: 560972 - RNA, 19 nt, Homo sapiens
  misc_RNA (1)...(19): siRNA sense strand
agaaggaggagaccuggaa

SEQ ID NO: 560973 - RNA, 19 nt, Homo sapiens
  misc_RNA (1)...(19): siRNA sense strand
ucgugugggugccuuguuu

SEQ ID NO: 560974 - RNA, 19 nt, Homo sapiens
  misc_RNA (1)...(19): siRNA sense strand
ccacaucugcuucgucagu

SEQ ID NO: 560975 - RNA, 19 nt, Homo sapiens
  misc_RNA (1)...(19): siRNA sense strand
gcaccaguacuuccacauc

SEQ ID NO: 560976 - RNA, 19 nt, Homo sapiens
  misc_RNA (1)...(19): siRNA sense strand
gaugacaccucucaacaaa

SEQ ID NO: 560977 - RNA, 19 nt, Homo sapiens
  misc_RNA (1)...(19): siRNA sense strand
uaaaguugcucaucaaguu

SEQ ID NO: 560978 - RNA, 19 nt, Homo sapiens
  misc_RNA (1)...(19): siRNA sense strand
ggaagcaacugcagagaca

SEQ ID NO: 560979 - RNA, 19 nt, Homo sapiens
  misc_RNA (1)...(19): siRNA sense strand
ccaaggagcuggacacagu

SEQ ID NO: 560980 - RNA, 19 nt, Homo sapiens
  misc_RNA (1)...(19): siRNA sense strand
caacgagucugccgaagga

SEQ ID NO: 560981 - RNA, 19 nt, Homo sapiens
  misc_RNA (1)...(19): siRNA sense strand
gaucaagaccgcugucauu

SEQ ID NO: 560982 - RNA, 19 nt, Homo sapiens
  misc_RNA (1)...(19): siRNA sense strand
caaagcaaauggagaaugg

SEQ ID NO: 560983 - RNA, 19 nt, Homo sapiens
  misc_RNA (1)...(19): siRNA sense strand
gggcagaccucuucuacuc

SEQ ID NO: 560984 - RNA, 19 nt, Homo sapiens
  misc_RNA (1)...(19): siRNA sense strand
ccacguacauuaacaugau

SEQ ID NO: 560985 - RNA, 19 nt, Homo sapiens
  misc_RNA (1)...(19): siRNA sense strand
gaccgaggcuacauucaga

SEQ ID NO: 560986 - RNA, 19 nt, Homo sapiens
  misc_RNA (1)...(19): siRNA sense strand
uggagaggcucaaggagua

SEQ ID NO: 560987 - RNA, 19 nt, Homo sapiens
  misc_RNA (1)...(19): siRNA sense strand
gcagaccucuucuacucuu

SEQ ID NO: 560988 - RNA, 19 nt, Homo sapiens
  misc_RNA (1)...(19): siRNA sense strand
gaaggaagcaaagcaaaug

SEQ ID NO: 560989 - RNA, 19 nt, Homo sapiens
  misc_RNA (1)...(19): siRNA sense strand
ggccgcagaucuuaaaguu

SEQ ID NO: 560990 - RNA, 19 nt, Homo sapiens
  misc_RNA (1)...(19): siRNA sense strand
gaccuccgcuucaagauca

SEQ ID NO: 560991 - RNA, 19 nt, Homo sapiens
  misc_RNA (1)...(19): siRNA sense strand
aaggagaaauccaggagua

SEQ ID NO: 560992 - RNA, 19 nt, Homo sapiens
  misc_RNA (1)...(19): siRNA sense strand
caucugaaauggaaaccaa

SEQ ID NO: 560993 - RNA, 19 nt, Homo sapiens
  misc_RNA (1)...(19): siRNA sense strand
gcaacugcaucguucuguu

SEQ ID NO: 560994 - RNA, 19 nt, Homo sapiens
  misc_RNA (1)...(19): siRNA sense strand
ggaaagaagucggggcaua

SEQ ID NO: 560995 - RNA, 19 nt, Homo sapiens
  misc_RNA (1)...(19): siRNA sense strand
ugaacgaaauucucaaugg

SEQ ID NO: 560996 - RNA, 19 nt, Homo sapiens
  misc_RNA (1)...(19): siRNA sense strand
caagcuagaccaugaaugu

SEQ ID NO: 560997 - RNA, 19 nt, Homo sapiens
  misc_RNA (1)...(19): siRNA sense strand
guacucggaugaagaaguc

SEQ ID NO: 560998 - RNA, 19 nt, Homo sapiens
  misc_RNA (1)...(19): siRNA sense strand
gagaggaccuggacuucgu

SEQ ID NO: 560999 - RNA, 19 nt, Homo sapiens
  misc_RNA (1)...(19): siRNA sense strand
caacugcaucguucuguuu

SEQ ID NO: 561000 - RNA, 19 nt, Homo sapiens
  misc_RNA (1)...(19): siRNA sense strand
ggacuuggccacguacauu

SEQ ID NO: 561001 - RNA, 19 nt, Homo sapiens
  misc_RNA (1)...(19): siRNA sense strand
caacagcaccgcagaacug

SEQ ID NO: 561002 - RNA, 19 nt, Homo sapiens
  misc_RNA (1)...(19): siRNA sense strand
ggaaggaagcaaagcaaau

SEQ ID NO: 561003 - RNA, 19 nt, Homo sapiens
  misc_RNA (1)...(19): siRNA sense strand
gaucaaagugcuaaagcuu

SEQ ID NO: 561004 - RNA, 19 nt, Homo sapiens
  misc_RNA (1)...(19): siRNA sense strand
ugaaggugcugaagaaguc

SEQ ID NO: 561005 - RNA, 19 nt, Homo sapiens
  misc_RNA (1)...(19): siRNA sense strand
gcagagaggucuuuucuac

SEQ ID NO: 561006 - RNA, 19 nt, Homo sapiens
  misc_RNA (1)...(19): siRNA sense strand
ggaucuuucucucccauga

SEQ ID NO: 561007 - RNA, 19 nt, Homo sapiens
  misc_RNA (1)...(19): siRNA sense strand
cgaugaagaccaagacgua

SEQ ID NO: 561008 - RNA, 19 nt, Homo sapiens
  misc_RNA (1)...(19): siRNA sense strand
gcaucaacaucgccaagau

SEQ ID NO: 561009 - RNA, 19 nt, Homo sapiens
  misc_RNA (1)...(19): siRNA sense strand
gcugguagcccuagugugu

SEQ ID NO: 561010 - RNA, 19 nt, Homo sapiens
  misc_RNA (1)...(19): siRNA sense strand
agaaccagaaggccuauua

SEQ ID NO: 561011 - RNA, 19 nt, Homo sapiens
  misc_RNA (1)...(19): siRNA sense strand
ggacucaggagcacacgaa

SEQ ID NO: 561012 - RNA, 19 nt, Homo sapiens
  misc_RNA (1)...(19): siRNA sense strand
ccugggagcuggcauucaa

SEQ ID NO: 561013 - RNA, 19 nt, Homo sapiens
  misc_RNA (1)...(19): siRNA sense strand
cgaaagagaguuccaaggu

SEQ ID NO: 561014 - RNA, 19 nt, Homo sapiens
  misc_RNA (1)...(19): siRNA sense strand
uggcugagauggacaaagu

SEQ ID NO: 561015 - RNA, 19 nt, Homo sapiens
  misc_RNA (1)...(19): siRNA sense strand
gaagucugccuaccuguca

SEQ ID NO: 561016 - RNA, 19 nt, Homo sapiens
  misc_RNA (1)...(19): siRNA sense strand
cauugcaggucaccacgua

SEQ ID NO: 561017 - RNA, 19 nt, Homo sapiens
  misc_RNA (1)...(19): siRNA sense strand
cugacaagcuagaccauga

SEQ ID NO: 561018 - RNA, 19 nt, Homo sapiens
  misc_RNA (1)...(19): siRNA sense strand
ucuguuugcugcccuguuu

SEQ ID NO: 561019 - RNA, 19 nt, Homo sapiens
  misc_RNA (1)...(19): siRNA sense strand
gaccuggacuucguucuca

SEQ ID NO: 561020 - RNA, 19 nt, Homo sapiens
  misc_RNA (1)...(19): siRNA sense strand
gcaaagacaaucggaucaa

SEQ ID NO: 561021 - RNA, 19 nt, Homo sapiens
  misc_RNA (1)...(19): siRNA sense strand
gaaauucucaaugggauca

SEQ ID NO: 561022 - RNA, 19 nt, Homo sapiens
  misc_RNA (1)...(19): siRNA sense strand
caaagacaaucggaucaag

SEQ ID NO: 561023 - RNA, 19 nt, Homo sapiens
  misc_RNA (1)...(19): siRNA sense strand
cucaugagcuucuucuuca

SEQ ID NO: 561024 - RNA, 19 nt, Homo sapiens
  misc_RNA (1)...(19): siRNA sense strand
aaggagagaucaucaucga

SEQ ID NO: 561025 - RNA, 19 nt, Homo sapiens
  misc_RNA (1)...(19): siRNA sense strand
gagcugaaggugcugaaga

SEQ ID NO: 561026 - RNA, 19 nt, Homo sapiens
  misc_RNA (1)...(19): siRNA sense strand
uggaaugucacguggaaua

SEQ ID NO: 561027 - RNA, 19 nt, Homo sapiens
  misc_RNA (1)...(19): siRNA sense strand
ggaaggcccuggugaucac

SEQ ID NO: 561028 - RNA, 19 nt, Homo sapiens
  misc_RNA (1)...(19): siRNA sense strand
ccacgcugcuugcuaccuu

SEQ ID NO: 561029 - RNA, 19 nt, Homo sapiens
  misc_RNA (1)...(19): siRNA sense strand
gcgagugucucccucaaac

SEQ ID NO: 561030 - RNA, 19 nt, Homo sapiens
  misc_RNA (1)...(19): siRNA sense strand
ggacacgucggaacaaguc

SEQ ID NO: 561031 - RNA, 19 nt, Homo sapiens
  misc_RNA (1)...(19): siRNA sense strand
gaguggaauuccggaacua

SEQ ID NO: 561032 - RNA, 19 nt, Homo sapiens
  misc_RNA (1)...(19): siRNA sense strand
caaggaguauucagagacu

SEQ ID NO: 561033 - RNA, 19 nt, Homo sapiens
  misc_RNA (1)...(19): siRNA sense strand
cacaagggaucgccguguu

SEQ ID NO: 561034 - RNA, 19 nt, Homo sapiens
  misc_RNA (1)...(19): siRNA sense strand
gcgcuggcuuccaacuauu

SEQ ID NO: 561035 - RNA, 19 nt, Homo sapiens
  misc_RNA (1)...(19): siRNA sense strand
guacugggacuacaugaag

SEQ ID NO: 561036 - RNA, 19 nt, Homo sapiens
  misc_RNA (1)...(19): siRNA sense strand
gcaaagcaaauggagaaug

SEQ ID NO: 561037 - RNA, 19 nt, Homo sapiens
  misc_RNA (1)...(19): siRNA sense strand
aagcaaagcaaauggagaa

SEQ ID NO: 561038 - RNA, 19 nt, Homo sapiens
  misc_RNA (1)...(19): siRNA sense strand
gcagguggacgucaucauc

SEQ ID NO: 561039 - RNA, 19 nt, Homo sapiens
  misc_RNA (1)...(19): siRNA sense strand
gacuuggccacguacauua

SEQ ID NO: 561040 - RNA, 19 nt, Homo sapiens
  misc_RNA (1)...(19): siRNA sense strand
ucauggacuuggccacgua

SEQ ID NO: 561041 - RNA, 19 nt, Homo sapiens
  misc_RNA (1)...(19): siRNA sense strand
gaaggaaugcgccaagacu

SEQ ID NO: 561042 - RNA, 19 nt, Homo sapiens
  misc_RNA (1)...(19): siRNA sense strand
cagggaucaugcucacuuu

SEQ ID NO: 561043 - RNA, 19 nt, Homo sapiens
  misc_RNA (1)...(19): siRNA sense strand
ccaguacucggaugaagaa

SEQ ID NO: 561044 - RNA, 19 nt, Homo sapiens
  misc_RNA (1)...(19): siRNA sense strand
ggucaagcuuuccguguac

SEQ ID NO: 561045 - RNA, 19 nt, Homo sapiens
  misc_RNA (1)...(19): siRNA sense strand
uaaagaacuggaagaagga

SEQ ID NO: 561046 - RNA, 19 nt, Homo sapiens
  misc_RNA (1)...(19): siRNA sense strand
cucagugucuuacucauug

SEQ ID NO: 561047 - RNA, 19 nt, Homo sapiens
  misc_RNA (1)...(19): siRNA sense strand
ucaagcugaugaacgaaau

SEQ ID NO: 561048 - RNA, 19 nt, Homo sapiens
  misc_RNA (1)...(19): siRNA sense strand
ggaucaugcucacuuucug

SEQ ID NO: 561049 - RNA, 19 nt, Homo sapiens
  misc_RNA (1)...(19): siRNA sense strand
cagcagcuccuccuccuau

SEQ ID NO: 561050 - RNA, 19 nt, Homo sapiens
  misc_RNA (1)...(19): siRNA sense strand
gcacagcaugagcuacuug

SEQ ID NO: 561051 - RNA, 19 nt, Homo sapiens
  misc_RNA (1)...(19): siRNA sense strand
ggaucaaagugcuaaagcu

SEQ ID NO: 561052 - RNA, 19 nt, Homo sapiens
  misc_RNA (1)...(19): siRNA sense strand
gaugaacgaaauucucaau

SEQ ID NO: 561053 - RNA, 19 nt, Homo sapiens
  misc_RNA (1)...(19): siRNA sense strand
gcccgucaaugcugugaug

SEQ ID NO: 561054 - RNA, 19 nt, Homo sapiens
  misc_RNA (1)...(19): siRNA sense strand
augaggagguggaggcuuu

SEQ ID NO: 561055 - RNA, 19 nt, Homo sapiens
  misc_RNA (1)...(19): siRNA sense strand
ccaagguggaugcgaauga

SEQ ID NO: 561056 - RNA, 19 nt, Homo sapiens
  misc_RNA (1)...(19): siRNA sense strand
ucaaacgccugaggaucuu

SEQ ID NO: 561057 - RNA, 19 nt, Homo sapiens
  misc_RNA (1)...(19): siRNA sense strand
ggucagcccaacucucuug

SEQ ID NO: 561058 - RNA, 19 nt, Homo sapiens
  misc_RNA (1)...(19): siRNA sense strand
gaccaugaaugugcagaag

SEQ ID NO: 561059 - RNA, 19 nt, Homo sapiens
  misc_RNA (1)...(19): siRNA sense strand
auuggugccugcaucguua

SEQ ID NO: 561060 - RNA, 19 nt, Homo sapiens
  misc_RNA (1)...(19): siRNA sense strand
gggaaggaagcaaagcaaa

SEQ ID NO: 561061 - RNA, 19 nt, Homo sapiens
  misc_RNA (1)...(19): siRNA sense strand
gggcccuacuuccucauga

SEQ ID NO: 561062 - RNA, 19 nt, Homo sapiens
  misc_RNA (1)...(19): siRNA sense strand
guucaugggcucccuguuc

SEQ ID NO: 561063 - RNA, 19 nt, Homo sapiens
  misc_RNA (1)...(19): siRNA sense strand
cagggcaggucaagcuuuc

SEQ ID NO: 561064 - RNA, 19 nt, Homo sapiens
  misc_RNA (1)...(19): siRNA sense strand
ugauggcgaugaagaccaa

SEQ ID NO: 561065 - RNA, 19 nt, Homo sapiens
  misc_RNA (1)...(19): siRNA sense strand
gagauugucaaccucaugu

SEQ ID NO: 561066 - RNA, 19 nt, Homo sapiens
  misc_RNA (1)...(19): siRNA sense strand
acaccgugcugcuguuugu

SEQ ID NO: 561067 - RNA, 19 nt, Homo sapiens
  misc_RNA (1)...(19): siRNA sense strand
ucuuaaaguugcucaucaa

SEQ ID NO: 561068 - RNA, 19 nt, Homo sapiens
  misc_RNA (1)...(19): siRNA sense strand
ucccggaggucaucaagau

SEQ ID NO: 561069 - RNA, 19 nt, Homo sapiens
  misc_RNA (1)...(19): siRNA sense strand
ggacagugcagggaagcaa

SEQ ID NO: 561070 - RNA, 19 nt, Homo sapiens
  misc_RNA (1)...(19): siRNA sense strand
ggagguggaggcuuugauc

SEQ ID NO: 561071 - RNA, 19 nt, Homo sapiens
  misc_RNA (1)...(19): siRNA sense strand
gcaggucaccacguacuug

SEQ ID NO: 561072 - RNA, 19 nt, Homo sapiens
  misc_RNA (1)...(19): siRNA sense strand
agaaggaggagaccuggaa

SEQ ID NO: 561073 - RNA, 19 nt, Homo sapiens
  misc_RNA (1)...(19): siRNA sense strand
ucgugugggugccuuguuu

SEQ ID NO: 561074 - RNA, 19 nt, Homo sapiens
  misc_RNA (1)...(19): siRNA sense strand
ccacaucugcuucgucagu

SEQ ID NO: 561075 - RNA, 19 nt, Homo sapiens
  misc_RNA (1)...(19): siRNA sense strand
gcaccaguacuuccacauc

SEQ ID NO: 561076 - RNA, 19 nt, Homo sapiens
  misc_RNA (1)...(19): siRNA sense strand
gaugacaccucucaacaaa

SEQ ID NO: 561077 - RNA, 19 nt, Homo sapiens
  misc_RNA (1)...(19): siRNA sense strand
uaaaguugcucaucaaguu

SEQ ID NO: 561078 - RNA, 19 nt, Homo sapiens
  misc_RNA (1)...(19): siRNA sense strand
ggaagcaacugcagagaca

SEQ ID NO: 561079 - RNA, 19 nt, Homo sapiens
  misc_RNA (1)...(19): siRNA sense strand
ccaaggagcuggacacagu

SEQ ID NO: 561080 - RNA, 19 nt, Homo sapiens
  misc_RNA (1)...(19): siRNA sense strand
caacgagucugccgaagga

SEQ ID NO: 561081 - RNA, 19 nt, Homo sapiens
  misc_RNA (1)...(19): siRNA sense strand
gaucaagaccgcugucauu

SEQ ID NO: 561082 - RNA, 19 nt, Homo sapiens
  misc_RNA (1)...(19): siRNA sense strand
caaagcaaauggagaaugg

SEQ ID NO: 561083 - RNA, 19 nt, Homo sapiens
  misc_RNA (1)...(19): siRNA sense strand
gggcagaccucuucuacuc

SEQ ID NO: 561084 - RNA, 19 nt, Homo sapiens
  misc_RNA (1)...(19): siRNA sense strand
ccacguacauuaacaugau

SEQ ID NO: 561085 - RNA, 19 nt, Homo sapiens
  misc_RNA (1)...(19): siRNA sense strand
gaccgaggcuacauucaga

SEQ ID NO: 561086 - RNA, 19 nt, Homo sapiens
  misc_RNA (1)...(19): siRNA sense strand
uggagaggcucaaggagua

SEQ ID NO: 561087 - RNA, 19 nt, Homo sapiens
  misc_RNA (1)...(19): siRNA sense strand
gcagaccucuucuacucuu

SEQ ID NO: 561088 - RNA, 19 nt, Homo sapiens
  misc_RNA (1)...(19): siRNA sense strand
gaaggaagcaaagcaaaug

SEQ ID NO: 561089 - RNA, 19 nt, Homo sapiens
  misc_RNA (1)...(19): siRNA sense strand
ggccgcagaucuuaaaguu

SEQ ID NO: 561090 - RNA, 19 nt, Homo sapiens
  misc_RNA (1)...(19): siRNA sense strand
gaccuccgcuucaagauca

SEQ ID NO: 561091 - RNA, 19 nt, Homo sapiens
  misc_RNA (1)...(19): siRNA sense strand
aaggagaaauccaggagua

SEQ ID NO: 561092 - RNA, 19 nt, Homo sapiens
  misc_RNA (1)...(19): siRNA sense strand
caucugaaauggaaaccaa

SEQ ID NO: 561093 - RNA, 19 nt, Homo sapiens
  misc_RNA (1)...(19): siRNA sense strand
gcaacugcaucguucuguu

SEQ ID NO: 561094 - RNA, 19 nt, Homo sapiens
  misc_RNA (1)...(19): siRNA sense strand
ggaaagaagucggggcaua

SEQ ID NO: 561095 - RNA, 19 nt, Homo sapiens
  misc_RNA (1)...(19): siRNA sense strand
ugaacgaaauucucaaugg

SEQ ID NO: 561096 - RNA, 19 nt, Homo sapiens
  misc_RNA (1)...(19): siRNA sense strand
caagcuagaccaugaaugu

SEQ ID NO: 561097 - RNA, 19 nt, Homo sapiens
  misc_RNA (1)...(19): siRNA sense strand
guacucggaugaagaaguc

SEQ ID NO: 561098 - RNA, 19 nt, Homo sapiens
  misc_RNA (1)...(19): siRNA sense strand
gagaggaccuggacuucgu

SEQ ID NO: 561099 - RNA, 19 nt, Homo sapiens
  misc_RNA (1)...(19): siRNA sense strand
caacugcaucguucuguuu

SEQ ID NO: 561100 - RNA, 19 nt, Homo sapiens
  misc_RNA (1)...(19): siRNA sense strand
ggacuuggccacguacauu

SEQ ID NO: 561101 - RNA, 19 nt, Homo sapiens
  misc_RNA (1)...(19): siRNA sense strand
caacagcaccgcagaacug

SEQ ID NO: 561102 - RNA, 19 nt, Homo sapiens
  misc_RNA (1)...(19): siRNA sense strand
ggaaggaagcaaagcaaau

SEQ ID NO: 561103 - RNA, 19 nt, Homo sapiens
  misc_RNA (1)...(19): siRNA sense strand
gaucaaagugcuaaagcuu

SEQ ID NO: 561104 - RNA, 19 nt, Homo sapiens
  misc_RNA (1)...(19): siRNA sense strand
ugaaggugcugaagaaguc

SEQ ID NO: 561105 - RNA, 19 nt, Homo sapiens
  misc_RNA (1)...(19): siRNA sense strand
gcagagaggucuuuucuac

SEQ ID NO: 561106 - RNA, 19 nt, Homo sapiens
  misc_RNA (1)...(19): siRNA sense strand
ggaucuuucucucccauga

SEQ ID NO: 561107 - RNA, 19 nt, Homo sapiens
  misc_RNA (1)...(19): siRNA sense strand
cgaugaagaccaagacgua

SEQ ID NO: 561108 - RNA, 19 nt, Homo sapiens
  misc_RNA (1)...(19): siRNA sense strand
gcaucaacaucgccaagau

SEQ ID NO: 561109 - RNA, 19 nt, Homo sapiens
  misc_RNA (1)...(19): siRNA sense strand
gcugguagcccuagugugu

SEQ ID NO: 561110 - RNA, 19 nt, Homo sapiens
  misc_RNA (1)...(19): siRNA sense strand
agaaccagaaggccuauua

SEQ ID NO: 561111 - RNA, 19 nt, Homo sapiens
  misc_RNA (1)...(19): siRNA sense strand
ggacucaggagcacacgaa

SEQ ID NO: 561112 - RNA, 19 nt, Homo sapiens
  misc_RNA (1)...(19): siRNA sense strand
ccugggagcuggcauucaa

SEQ ID NO: 561113 - RNA, 19 nt, Homo sapiens
  misc_RNA (1)...(19): siRNA sense strand
cgaaagagaguuccaaggu

SEQ ID NO: 561114 - RNA, 19 nt, Homo sapiens
  misc_RNA (1)...(19): siRNA sense strand
uggcugagauggacaaagu

SEQ ID NO: 561115 - RNA, 19 nt, Homo sapiens
  misc_RNA (1)...(19): siRNA sense strand
gaagucugccuaccuguca

SEQ ID NO: 561116 - RNA, 19 nt, Homo sapiens
  misc_RNA (1)...(19): siRNA sense strand
cauugcaggucaccacgua

SEQ ID NO: 561117 - RNA, 19 nt, Homo sapiens
  misc_RNA (1)...(19): siRNA sense strand
cugacaagcuagaccauga

SEQ ID NO: 561118 - RNA, 19 nt, Homo sapiens
  misc_RNA (1)...(19): siRNA sense strand
ucuguuugcugcccuguuu

SEQ ID NO: 561119 - RNA, 19 nt, Homo sapiens
  misc_RNA (1)...(19): siRNA sense strand
gaccuggacuucguucuca

SEQ ID NO: 561120 - RNA, 19 nt, Homo sapiens
  misc_RNA (1)...(19): siRNA sense strand
gcaaagacaaucggaucaa

SEQ ID NO: 561121 - RNA, 19 nt, Homo sapiens
  misc_RNA (1)...(19): siRNA sense strand
gaaauucucaaugggauca

SEQ ID NO: 561122 - RNA, 19 nt, Homo sapiens
  misc_RNA (1)...(19): siRNA sense strand
caaagacaaucggaucaag

SEQ ID NO: 561123 - RNA, 19 nt, Homo sapiens
  misc_RNA (1)...(19): siRNA sense strand
cucaugagcuucuucuuca

SEQ ID NO: 561124 - RNA, 19 nt, Homo sapiens
  misc_RNA (1)...(19): siRNA sense strand
aaggagagaucaucaucga

SEQ ID NO: 561125 - RNA, 19 nt, Homo sapiens
  misc_RNA (1)...(19): siRNA sense strand
gagcugaaggugcugaaga

SEQ ID NO: 561126 - RNA, 19 nt, Homo sapiens
  misc_RNA (1)...(19): siRNA sense strand
uggaaugucacguggaaua

SEQ ID NO: 561127 - RNA, 19 nt, Homo sapiens
  misc_RNA (1)...(19): siRNA sense strand
ggaaggcccuggugaucac

SEQ ID NO: 561128 - RNA, 19 nt, Homo sapiens
  misc_RNA (1)...(19): siRNA sense strand
ccacgcugcuugcuaccuu

SEQ ID NO: 561129 - RNA, 19 nt, Homo sapiens
  misc_RNA (1)...(19): siRNA sense strand
gcgagugucucccucaaac

SEQ ID NO: 561130 - RNA, 19 nt, Homo sapiens
  misc_RNA (1)...(19): siRNA sense strand
ggacacgucggaacaaguc

SEQ ID NO: 561131 - RNA, 19 nt, Homo sapiens
  misc_RNA (1)...(19): siRNA sense strand
gaguggaauuccggaacua

SEQ ID NO: 561132 - RNA, 19 nt, Homo sapiens
  misc_RNA (1)...(19): siRNA sense strand
caaggaguauucagagacu

SEQ ID NO: 561133 - RNA, 19 nt, Homo sapiens
  misc_RNA (1)...(19): siRNA sense strand
cacaagggaucgccguguu

SEQ ID NO: 561134 - RNA, 19 nt, Homo sapiens
  misc_RNA (1)...(19): siRNA sense strand
gcgcuggcuuccaacuauu

SEQ ID NO: 561135 - RNA, 19 nt, Homo sapiens
  misc_RNA (1)...(19): siRNA sense strand
guacugggacuacaugaag

SEQ ID NO: 561136 - RNA, 19 nt, Homo sapiens
  misc_RNA (1)...(19): siRNA sense strand
gcaaagcaaauggagaaug

SEQ ID NO: 561137 - RNA, 19 nt, Homo sapiens
  misc_RNA (1)...(19): siRNA sense strand
aagcaaagcaaauggagaa

SEQ ID NO: 561138 - RNA, 19 nt, Homo sapiens
  misc_RNA (1)...(19): siRNA sense strand
gcagguggacgucaucauc

SEQ ID NO: 561139 - RNA, 19 nt, Homo sapiens
  misc_RNA (1)...(19): siRNA sense strand
gacuuggccacguacauua

SEQ ID NO: 561140 - RNA, 19 nt, Homo sapiens
  misc_RNA (1)...(19): siRNA sense strand
ucauggacuuggccacgua

SEQ ID NO: 561141 - RNA, 19 nt, Homo sapiens
  misc_RNA (1)...(19): siRNA sense strand
gaaggaaugcgccaagacu

SEQ ID NO: 561142 - RNA, 19 nt, Homo sapiens
  misc_RNA (1)...(19): siRNA sense strand
cagggaucaugcucacuuu

SEQ ID NO: 561143 - RNA, 19 nt, Homo sapiens
  misc_RNA (1)...(19): siRNA sense strand
ccaguacucggaugaagaa

SEQ ID NO: 561144 - RNA, 19 nt, Homo sapiens
  misc_RNA (1)...(19): siRNA sense strand
ggucaagcuuuccguguac

SEQ ID NO: 561145 - RNA, 19 nt, Homo sapiens
  misc_RNA (1)...(19): siRNA sense strand
uaaagaacuggaagaagga

SEQ ID NO: 561146 - RNA, 19 nt, Homo sapiens
  misc_RNA (1)...(19): siRNA sense strand
cucagugucuuacucauug

SEQ ID NO: 561147 - RNA, 19 nt, Homo sapiens
  misc_RNA (1)...(19): siRNA sense strand
ucaagcugaugaacgaaau

SEQ ID NO: 561148 - RNA, 19 nt, Homo sapiens
  misc_RNA (1)...(19): siRNA sense strand
ggaucaugcucacuuucug

SEQ ID NO: 561149 - RNA, 19 nt, Homo sapiens
  misc_RNA (1)...(19): siRNA sense strand
cagcagcuccuccuccuau

SEQ ID NO: 561150 - RNA, 19 nt, Homo sapiens
  misc_RNA (1)...(19): siRNA sense strand
gcacagcaugagcuacuug

SEQ ID NO: 561151 - RNA, 19 nt, Homo sapiens
  misc_RNA (1)...(19): siRNA sense strand
ggaucaaagugcuaaagcu

SEQ ID NO: 561152 - RNA, 19 nt, Homo sapiens
  misc_RNA (1)...(19): siRNA sense strand
gaugaacgaaauucucaau

SEQ ID NO: 561153 - RNA, 19 nt, Homo sapiens
  misc_RNA (1)...(19): siRNA sense strand
gcccgucaaugcugugaug

SEQ ID NO: 561154 - RNA, 19 nt, Homo sapiens
  misc_RNA (1)...(19): siRNA sense strand
augaggagguggaggcuuu

SEQ ID NO: 561155 - RNA, 19 nt, Homo sapiens
  misc_RNA (1)...(19): siRNA sense strand
ccaagguggaugcgaauga

SEQ ID NO: 561156 - RNA, 19 nt, Homo sapiens
  misc_RNA (1)...(19): siRNA sense strand
ucaaacgccugaggaucuu

SEQ ID NO: 561157 - RNA, 19 nt, Homo sapiens
  misc_RNA (1)...(19): siRNA sense strand
ggucagcccaacucucuug

SEQ ID NO: 561158 - RNA, 19 nt, Homo sapiens
  misc_RNA (1)...(19): siRNA sense strand
gaccaugaaugugcagaag

SEQ ID NO: 561159 - RNA, 19 nt, Homo sapiens
  misc_RNA (1)...(19): siRNA sense strand
auuggugccugcaucguua

SEQ ID NO: 561160 - RNA, 19 nt, Homo sapiens
  misc_RNA (1)...(19): siRNA sense strand
gggaaggaagcaaagcaaa

SEQ ID NO: 561161 - RNA, 19 nt, Homo sapiens
  misc_RNA (1)...(19): siRNA sense strand
gggcccuacuuccucauga

SEQ ID NO: 561162 - RNA, 19 nt, Homo sapiens
  misc_RNA (1)...(19): siRNA sense strand
guucaugggcucccuguuc

SEQ ID NO: 561163 - RNA, 19 nt, Homo sapiens
  misc_RNA (1)...(19): siRNA sense strand
cagggcaggucaagcuuuc

SEQ ID NO: 561164 - RNA, 19 nt, Homo sapiens
  misc_RNA (1)...(19): siRNA sense strand
ugauggcgaugaagaccaa

SEQ ID NO: 561165 - RNA, 19 nt, Homo sapiens
  misc_RNA (1)...(19): siRNA sense strand
gagauugucaaccucaugu

SEQ ID NO: 561166 - RNA, 19 nt, Homo sapiens
  misc_RNA (1)...(19): siRNA sense strand
acaccgugcugcuguuugu

SEQ ID NO: 561167 - RNA, 19 nt, Homo sapiens
  misc_RNA (1)...(19): siRNA sense strand
ucuuaaaguugcucaucaa

SEQ ID NO: 561168 - RNA, 19 nt, Homo sapiens
  misc_RNA (1)...(19): siRNA sense strand
ucccggaggucaucaagau

SEQ ID NO: 561169 - RNA, 19 nt, Homo sapiens
  misc_RNA (1)...(19): siRNA sense strand
ggacagugcagggaagcaa

SEQ ID NO: 561170 - RNA, 19 nt, Homo sapiens
  misc_RNA (1)...(19): siRNA sense strand
ggagguggaggcuuugauc

SEQ ID NO: 561171 - RNA, 19 nt, Homo sapiens
  misc_RNA (1)...(19): siRNA sense strand
gcaggucaccacguacuug

SEQ ID NO: 561172 - RNA, 19 nt, Homo sapiens
  misc_RNA (1)...(19): siRNA sense strand
agaaggaggagaccuggaa

SEQ ID NO: 561173 - RNA, 19 nt, Homo sapiens
  misc_RNA (1)...(19): siRNA sense strand
ucgugugggugccuuguuu

SEQ ID NO: 561174 - RNA, 19 nt, Homo sapiens
  misc_RNA (1)...(19): siRNA sense strand
ccacaucugcuucgucagu

SEQ ID NO: 561175 - RNA, 19 nt, Homo sapiens
  misc_RNA (1)...(19): siRNA sense strand
gcaccaguacuuccacauc

SEQ ID NO: 561176 - RNA, 19 nt, Homo sapiens
  misc_RNA (1)...(19): siRNA sense strand
gaugacaccucucaacaaa

SEQ ID NO: 561177 - RNA, 19 nt, Homo sapiens
  misc_RNA (1)...(19): siRNA sense strand
uaaaguugcucaucaaguu

SEQ ID NO: 561178 - RNA, 19 nt, Homo sapiens
  misc_RNA (1)...(19): siRNA sense strand
ggaagcaacugcagagaca

SEQ ID NO: 561179 - RNA, 19 nt, Homo sapiens
  misc_RNA (1)...(19): siRNA sense strand
ccaaggagcuggacacagu

SEQ ID NO: 561180 - RNA, 19 nt, Homo sapiens
  misc_RNA (1)...(19): siRNA sense strand
caacgagucugccgaagga

SEQ ID NO: 561181 - RNA, 19 nt, Homo sapiens
  misc_RNA (1)...(19): siRNA sense strand
gaucaagaccgcugucauu

SEQ ID NO: 561182 - RNA, 19 nt, Homo sapiens
  misc_RNA (1)...(19): siRNA sense strand
caaagcaaauggagaaugg

SEQ ID NO: 561183 - RNA, 19 nt, Homo sapiens
  misc_RNA (1)...(19): siRNA sense strand
gggcagaccucuucuacuc

SEQ ID NO: 561184 - RNA, 19 nt, Homo sapiens
  misc_RNA (1)...(19): siRNA sense strand
ccacguacauuaacaugau

SEQ ID NO: 561185 - RNA, 19 nt, Homo sapiens
  misc_RNA (1)...(19): siRNA sense strand
gaccgaggcuacauucaga

SEQ ID NO: 561186 - RNA, 19 nt, Homo sapiens
  misc_RNA (1)...(19): siRNA sense strand
uggagaggcucaaggagua

SEQ ID NO: 561187 - RNA, 19 nt, Homo sapiens
  misc_RNA (1)...(19): siRNA sense strand
gcagaccucuucuacucuu

SEQ ID NO: 561188 - RNA, 19 nt, Homo sapiens
  misc_RNA (1)...(19): siRNA sense strand
gaaggaagcaaagcaaaug

SEQ ID NO: 561189 - RNA, 19 nt, Homo sapiens
  misc_RNA (1)...(19): siRNA sense strand
ggccgcagaucuuaaaguu

SEQ ID NO: 561190 - RNA, 19 nt, Homo sapiens
  misc_RNA (1)...(19): siRNA sense strand
gaccuccgcuucaagauca

SEQ ID NO: 561191 - RNA, 19 nt, Homo sapiens
  misc_RNA (1)...(19): siRNA sense strand
aaggagaaauccaggagua

SEQ ID NO: 561192 - RNA, 19 nt, Homo sapiens
  misc_RNA (1)...(19): siRNA sense strand
caucugaaauggaaaccaa

SEQ ID NO: 561193 - RNA, 19 nt, Homo sapiens
  misc_RNA (1)...(19): siRNA sense strand
gcaacugcaucguucuguu

SEQ ID NO: 561194 - RNA, 19 nt, Homo sapiens
  misc_RNA (1)...(19): siRNA sense strand
ggaaagaagucggggcaua

SEQ ID NO: 561195 - RNA, 19 nt, Homo sapiens
  misc_RNA (1)...(19): siRNA sense strand
ugaacgaaauucucaaugg

SEQ ID NO: 561196 - RNA, 19 nt, Homo sapiens
  misc_RNA (1)...(19): siRNA sense strand
caagcuagaccaugaaugu

SEQ ID NO: 561197 - RNA, 19 nt, Homo sapiens
  misc_RNA (1)...(19): siRNA sense strand
guacucggaugaagaaguc

SEQ ID NO: 561198 - RNA, 19 nt, Homo sapiens
  misc_RNA (1)...(19): siRNA sense strand
gagaggaccuggacuucgu

SEQ ID NO: 561199 - RNA, 19 nt, Homo sapiens
  misc_RNA (1)...(19): siRNA sense strand
caacugcaucguucuguuu

SEQ ID NO: 561200 - RNA, 19 nt, Homo sapiens
  misc_RNA (1)...(19): siRNA sense strand
ggacuuggccacguacauu

SEQ ID NO: 561201 - RNA, 19 nt, Homo sapiens
  misc_RNA (1)...(19): siRNA sense strand
caacagcaccgcagaacug

SEQ ID NO: 561202 - RNA, 19 nt, Homo sapiens
  misc_RNA (1)...(19): siRNA sense strand
ggaaggaagcaaagcaaau

SEQ ID NO: 561203 - RNA, 19 nt, Homo sapiens
  misc_RNA (1)...(19): siRNA sense strand
gaucaaagugcuaaagcuu

SEQ ID NO: 561204 - RNA, 19 nt, Homo sapiens
  misc_RNA (1)...(19): siRNA sense strand
ugaaggugcugaagaaguc

SEQ ID NO: 561205 - RNA, 19 nt, Homo sapiens
  misc_RNA (1)...(19): siRNA sense strand
gcagagaggucuuuucuac

SEQ ID NO: 561206 - RNA, 19 nt, Homo sapiens
  misc_RNA (1)...(19): siRNA sense strand
ggaucuuucucucccauga

SEQ ID NO: 561207 - RNA, 19 nt, Homo sapiens
  misc_RNA (1)...(19): siRNA sense strand
cgaugaagaccaagacgua

SEQ ID NO: 561208 - RNA, 19 nt, Homo sapiens
  misc_RNA (1)...(19): siRNA sense strand
gcaucaacaucgccaagau

SEQ ID NO: 561209 - RNA, 19 nt, Homo sapiens
  misc_RNA (1)...(19): siRNA sense strand
gcugguagcccuagugugu

SEQ ID NO: 561210 - RNA, 19 nt, Homo sapiens
  misc_RNA (1)...(19): siRNA sense strand
agaaccagaaggccuauua

SEQ ID NO: 561211 - RNA, 19 nt, Homo sapiens
  misc_RNA (1)...(19): siRNA sense strand
ggacucaggagcacacgaa

SEQ ID NO: 561212 - RNA, 19 nt, Homo sapiens
  misc_RNA (1)...(19): siRNA sense strand
ccugggagcuggcauucaa

SEQ ID NO: 561213 - RNA, 19 nt, Homo sapiens
  misc_RNA (1)...(19): siRNA sense strand
cgaaagagaguuccaaggu

SEQ ID NO: 561214 - RNA, 19 nt, Homo sapiens
  misc_RNA (1)...(19): siRNA sense strand
uggcugagauggacaaagu

SEQ ID NO: 561215 - RNA, 19 nt, Homo sapiens
  misc_RNA (1)...(19): siRNA sense strand
gaagucugccuaccuguca

SEQ ID NO: 561216 - RNA, 19 nt, Homo sapiens
  misc_RNA (1)...(19): siRNA sense strand
cauugcaggucaccacgua

SEQ ID NO: 561217 - RNA, 19 nt, Homo sapiens
  misc_RNA (1)...(19): siRNA sense strand
cugacaagcuagaccauga

SEQ ID NO: 561218 - RNA, 19 nt, Homo sapiens
  misc_RNA (1)...(19): siRNA sense strand
ucuguuugcugcccuguuu

SEQ ID NO: 561219 - RNA, 19 nt, Homo sapiens
  misc_RNA (1)...(19): siRNA sense strand
gaccuggacuucguucuca

SEQ ID NO: 561220 - RNA, 19 nt, Homo sapiens
  misc_RNA (1)...(19): siRNA sense strand
gcaaagacaaucggaucaa

SEQ ID NO: 561221 - RNA, 19 nt, Homo sapiens
  misc_RNA (1)...(19): siRNA sense strand
gaaauucucaaugggauca

SEQ ID NO: 561222 - RNA, 19 nt, Homo sapiens
  misc_RNA (1)...(19): siRNA sense strand
caaagacaaucggaucaag

SEQ ID NO: 561223 - RNA, 19 nt, Homo sapiens
  misc_RNA (1)...(19): siRNA sense strand
cucaugagcuucuucuuca

SEQ ID NO: 561224 - RNA, 19 nt, Homo sapiens
  misc_RNA (1)...(19): siRNA sense strand
aaggagagaucaucaucga

SEQ ID NO: 561225 - RNA, 19 nt, Homo sapiens
  misc_RNA (1)...(19): siRNA sense strand
gagcugaaggugcugaaga

SEQ ID NO: 561226 - RNA, 19 nt, Homo sapiens
  misc_RNA (1)...(19): siRNA sense strand
uggaaugucacguggaaua

SEQ ID NO: 561227 - RNA, 19 nt, Homo sapiens
  misc_RNA (1)...(19): siRNA sense strand
ggaaggcccuggugaucac

SEQ ID NO: 561228 - RNA, 19 nt, Homo sapiens
  misc_RNA (1)...(19): siRNA sense strand
ccacgcugcuugcuaccuu

SEQ ID NO: 561229 - RNA, 19 nt, Homo sapiens
  misc_RNA (1)...(19): siRNA sense strand
gcgagugucucccucaaac

SEQ ID NO: 561230 - RNA, 19 nt, Homo sapiens
  misc_RNA (1)...(19): siRNA sense strand
ggacacgucggaacaaguc

SEQ ID NO: 561231 - RNA, 19 nt, Homo sapiens
  misc_RNA (1)...(19): siRNA sense strand
gaguggaauuccggaacua

SEQ ID NO: 561232 - RNA, 19 nt, Homo sapiens
  misc_RNA (1)...(19): siRNA sense strand
caaggaguauucagagacu

SEQ ID NO: 561233 - RNA, 19 nt, Homo sapiens
  misc_RNA (1)...(19): siRNA sense strand
cacaagggaucgccguguu

SEQ ID NO: 561234 - RNA, 19 nt, Homo sapiens
  misc_RNA (1)...(19): siRNA sense strand
gcgcuggcuuccaacuauu

SEQ ID NO: 561235 - RNA, 19 nt, Homo sapiens
  misc_RNA (1)...(19): siRNA sense strand
guacugggacuacaugaag

SEQ ID NO: 561236 - RNA, 19 nt, Homo sapiens
  misc_RNA (1)...(19): siRNA sense strand
gcaaagcaaauggagaaug

SEQ ID NO: 561237 - RNA, 19 nt, Homo sapiens
  misc_RNA (1)...(19): siRNA sense strand
aagcaaagcaaauggagaa

SEQ ID NO: 561238 - RNA, 19 nt, Homo sapiens
  misc_RNA (1)...(19): siRNA sense strand
gcagguggacgucaucauc

SEQ ID NO: 561239 - RNA, 19 nt, Homo sapiens
  misc_RNA (1)...(19): siRNA sense strand
gacuuggccacguacauua

SEQ ID NO: 561240 - RNA, 19 nt, Homo sapiens
  misc_RNA (1)...(19): siRNA sense strand
ucauggacuuggccacgua

SEQ ID NO: 561241 - RNA, 19 nt, Homo sapiens
  misc_RNA (1)...(19): siRNA sense strand
gaaggaaugcgccaagacu

SEQ ID NO: 561242 - RNA, 19 nt, Homo sapiens
  misc_RNA (1)...(19): siRNA sense strand
cagggaucaugcucacuuu

SEQ ID NO: 561243 - RNA, 19 nt, Homo sapiens
  misc_RNA (1)...(19): siRNA sense strand
ccaguacucggaugaagaa

SEQ ID NO: 561244 - RNA, 19 nt, Homo sapiens
  misc_RNA (1)...(19): siRNA sense strand
ggucaagcuuuccguguac

SEQ ID NO: 561245 - RNA, 19 nt, Homo sapiens
  misc_RNA (1)...(19): siRNA sense strand
uaaagaacuggaagaagga

SEQ ID NO: 561246 - RNA, 19 nt, Homo sapiens
  misc_RNA (1)...(19): siRNA sense strand
cucagugucuuacucauug

SEQ ID NO: 561247 - RNA, 19 nt, Homo sapiens
  misc_RNA (1)...(19): siRNA sense strand
ucaagcugaugaacgaaau

SEQ ID NO: 561248 - RNA, 19 nt, Homo sapiens
  misc_RNA (1)...(19): siRNA sense strand
ggaucaugcucacuuucug

SEQ ID NO: 561249 - RNA, 19 nt, Homo sapiens
  misc_RNA (1)...(19): siRNA sense strand
cagcagcuccuccuccuau

SEQ ID NO: 561250 - RNA, 19 nt, Homo sapiens
  misc_RNA (1)...(19): siRNA sense strand
gcacagcaugagcuacuug

SEQ ID NO: 561251 - RNA, 19 nt, Homo sapiens
  misc_RNA (1)...(19): siRNA sense strand
ggaucaaagugcuaaagcu

SEQ ID NO: 561252 - RNA, 19 nt, Homo sapiens
  misc_RNA (1)...(19): siRNA sense strand
gaugaacgaaauucucaau

SEQ ID NO: 561253 - RNA, 19 nt, Homo sapiens
  misc_RNA (1)...(19): siRNA sense strand
gcccgucaaugcugugaug

SEQ ID NO: 561254 - RNA, 19 nt, Homo sapiens
  misc_RNA (1)...(19): siRNA sense strand
augaggagguggaggcuuu

SEQ ID NO: 561255 - RNA, 19 nt, Homo sapiens
  misc_RNA (1)...(19): siRNA sense strand
ccaagguggaugcgaauga

SEQ ID NO: 561256 - RNA, 19 nt, Homo sapiens
  misc_RNA (1)...(19): siRNA sense strand
ucaaacgccugaggaucuu

SEQ ID NO: 561257 - RNA, 19 nt, Homo sapiens
  misc_RNA (1)...(19): siRNA sense strand
ggucagcccaacucucuug

SEQ ID NO: 561258 - RNA, 19 nt, Homo sapiens
  misc_RNA (1)...(19): siRNA sense strand
gaccaugaaugugcagaag

SEQ ID NO: 561259 - RNA, 19 nt, Homo sapiens
  misc_RNA (1)...(19): siRNA sense strand
auuggugccugcaucguua

SEQ ID NO: 561260 - RNA, 19 nt, Homo sapiens
  misc_RNA (1)...(19): siRNA sense strand
gggaaggaagcaaagcaaa

SEQ ID NO: 561261 - RNA, 19 nt, Homo sapiens
  misc_RNA (1)...(19): siRNA sense strand
gggcccuacuuccucauga

SEQ ID NO: 561262 - RNA, 19 nt, Homo sapiens
  misc_RNA (1)...(19): siRNA sense strand
guucaugggcucccuguuc

SEQ ID NO: 561263 - RNA, 19 nt, Homo sapiens
  misc_RNA (1)...(19): siRNA sense strand
cagggcaggucaagcuuuc

SEQ ID NO: 561264 - RNA, 19 nt, Homo sapiens
  misc_RNA (1)...(19): siRNA sense strand
ugauggcgaugaagaccaa

SEQ ID NO: 561265 - RNA, 19 nt, Homo sapiens
  misc_RNA (1)...(19): siRNA sense strand
gagauugucaaccucaugu

SEQ ID NO: 561266 - RNA, 19 nt, Homo sapiens
  misc_RNA (1)...(19): siRNA sense strand
acaccgugcugcuguuugu

SEQ ID NO: 561267 - RNA, 19 nt, Homo sapiens
  misc_RNA (1)...(19): siRNA sense strand
ucuuaaaguugcucaucaa

SEQ ID NO: 561268 - RNA, 19 nt, Homo sapiens
  misc_RNA (1)...(19): siRNA sense strand
ucccggaggucaucaagau

SEQ ID NO: 561269 - RNA, 19 nt, Homo sapiens
  misc_RNA (1)...(19): siRNA sense strand
ggacagugcagggaagcaa

SEQ ID NO: 561270 - RNA, 19 nt, Homo sapiens
  misc_RNA (1)...(19): siRNA sense strand
ggagguggaggcuuugauc

SEQ ID NO: 561271 - RNA, 19 nt, Homo sapiens
  misc_RNA (1)...(19): siRNA sense strand
gcaggucaccacguacuug

SEQ ID NO: 561272 - RNA, 19 nt, Homo sapiens
  misc_RNA (1)...(19): siRNA sense strand
agaaggaggagaccuggaa

SEQ ID NO: 561273 - RNA, 19 nt, Homo sapiens
  misc_RNA (1)...(19): siRNA sense strand
ucgugugggugccuuguuu

SEQ ID NO: 561274 - RNA, 19 nt, Homo sapiens
  misc_RNA (1)...(19): siRNA sense strand
ccacaucugcuucgucagu

SEQ ID NO: 561275 - RNA, 19 nt, Homo sapiens
  misc_RNA (1)...(19): siRNA sense strand
gcaccaguacuuccacauc

SEQ ID NO: 561276 - RNA, 19 nt, Homo sapiens
  misc_RNA (1)...(19): siRNA sense strand
gaugacaccucucaacaaa

SEQ ID NO: 561277 - RNA, 19 nt, Homo sapiens
  misc_RNA (1)...(19): siRNA sense strand
uaaaguugcucaucaaguu

SEQ ID NO: 561278 - RNA, 19 nt, Homo sapiens
  misc_RNA (1)...(19): siRNA sense strand
ggaagcaacugcagagaca

SEQ ID NO: 561279 - RNA, 19 nt, Homo sapiens
  misc_RNA (1)...(19): siRNA sense strand
ccaaggagcuggacacagu

SEQ ID NO: 561280 - RNA, 19 nt, Homo sapiens
  misc_RNA (1)...(19): siRNA sense strand
caacgagucugccgaagga

SEQ ID NO: 561281 - RNA, 19 nt, Homo sapiens
  misc_RNA (1)...(19): siRNA sense strand
gaucaagaccgcugucauu

SEQ ID NO: 561282 - RNA, 19 nt, Homo sapiens
  misc_RNA (1)...(19): siRNA sense strand
caaagcaaauggagaaugg

SEQ ID NO: 561283 - RNA, 19 nt, Homo sapiens
  misc_RNA (1)...(19): siRNA sense strand
gggcagaccucuucuacuc

SEQ ID NO: 561284 - RNA, 19 nt, Homo sapiens
  misc_RNA (1)...(19): siRNA sense strand
ccacguacauuaacaugau

SEQ ID NO: 561285 - RNA, 19 nt, Homo sapiens
  misc_RNA (1)...(19): siRNA sense strand
gaccgaggcuacauucaga

SEQ ID NO: 561286 - RNA, 19 nt, Homo sapiens
  misc_RNA (1)...(19): siRNA sense strand
uggagaggcucaaggagua

SEQ ID NO: 561287 - RNA, 19 nt, Homo sapiens
  misc_RNA (1)...(19): siRNA sense strand
gcagaccucuucuacucuu

SEQ ID NO: 561288 - RNA, 19 nt, Homo sapiens
  misc_RNA (1)...(19): siRNA sense strand
gaaggaagcaaagcaaaug

SEQ ID NO: 561289 - RNA, 19 nt, Homo sapiens
  misc_RNA (1)...(19): siRNA sense strand
ggccgcagaucuuaaaguu

SEQ ID NO: 561290 - RNA, 19 nt, Homo sapiens
  misc_RNA (1)...(19): siRNA sense strand
gaccuccgcuucaagauca

SEQ ID NO: 561291 - RNA, 19 nt, Homo sapiens
  misc_RNA (1)...(19): siRNA sense strand
aaggagaaauccaggagua

SEQ ID NO: 561292 - RNA, 19 nt, Homo sapiens
  misc_RNA (1)...(19): siRNA sense strand
caucugaaauggaaaccaa

SEQ ID NO: 561293 - RNA, 19 nt, Homo sapiens
  misc_RNA (1)...(19): siRNA sense strand
gcaacugcaucguucuguu

SEQ ID NO: 561294 - RNA, 19 nt, Homo sapiens
  misc_RNA (1)...(19): siRNA sense strand
ggaaagaagucggggcaua

SEQ ID NO: 561295 - RNA, 19 nt, Homo sapiens
  misc_RNA (1)...(19): siRNA sense strand
ugaacgaaauucucaaugg

SEQ ID NO: 561296 - RNA, 19 nt, Homo sapiens
  misc_RNA (1)...(19): siRNA sense strand
caagcuagaccaugaaugu

SEQ ID NO: 561297 - RNA, 19 nt, Homo sapiens
  misc_RNA (1)...(19): siRNA sense strand
guacucggaugaagaaguc

SEQ ID NO: 561298 - RNA, 19 nt, Homo sapiens
  misc_RNA (1)...(19): siRNA sense strand
gagaggaccuggacuucgu

SEQ ID NO: 561299 - RNA, 19 nt, Homo sapiens
  misc_RNA (1)...(19): siRNA sense strand
caacugcaucguucuguuu

SEQ ID NO: 561300 - RNA, 19 nt, Homo sapiens
  misc_RNA (1)...(19): siRNA sense strand
ggacuuggccacguacauu

SEQ ID NO: 561301 - RNA, 19 nt, Homo sapiens
  misc_RNA (1)...(19): siRNA sense strand
caacagcaccgcagaacug

SEQ ID NO: 561302 - RNA, 19 nt, Homo sapiens
  misc_RNA (1)...(19): siRNA sense strand
ggaaggaagcaaagcaaau

SEQ ID NO: 561303 - RNA, 19 nt, Homo sapiens
  misc_RNA (1)...(19): siRNA sense strand
gaucaaagugcuaaagcuu

SEQ ID NO: 561304 - RNA, 19 nt, Homo sapiens
  misc_RNA (1)...(19): siRNA sense strand
ugaaggugcugaagaaguc

SEQ ID NO: 561305 - RNA, 19 nt, Homo sapiens
  misc_RNA (1)...(19): siRNA sense strand
gcagagaggucuuuucuac

SEQ ID NO: 561306 - RNA, 19 nt, Homo sapiens
  misc_RNA (1)...(19): siRNA sense strand
ggaucuuucucucccauga

SEQ ID NO: 561307 - RNA, 19 nt, Homo sapiens
  misc_RNA (1)...(19): siRNA sense strand
cgaugaagaccaagacgua

SEQ ID NO: 561308 - RNA, 19 nt, Homo sapiens
  misc_RNA (1)...(19): siRNA sense strand
gcaucaacaucgccaagau

SEQ ID NO: 561309 - RNA, 19 nt, Homo sapiens
  misc_RNA (1)...(19): siRNA sense strand
gcugguagcccuagugugu

SEQ ID NO: 561310 - RNA, 19 nt, Homo sapiens
  misc_RNA (1)...(19): siRNA sense strand
agaaccagaaggccuauua

SEQ ID NO: 561311 - RNA, 19 nt, Homo sapiens
  misc_RNA (1)...(19): siRNA sense strand
ggacucaggagcacacgaa

SEQ ID NO: 561312 - RNA, 19 nt, Homo sapiens
  misc_RNA (1)...(19): siRNA sense strand
ccugggagcuggcauucaa

SEQ ID NO: 561313 - RNA, 19 nt, Homo sapiens
  misc_RNA (1)...(19): siRNA sense strand
cgaaagagaguuccaaggu

SEQ ID NO: 561314 - RNA, 19 nt, Homo sapiens
  misc_RNA (1)...(19): siRNA sense strand
uggcugagauggacaaagu

SEQ ID NO: 561315 - RNA, 19 nt, Homo sapiens
  misc_RNA (1)...(19): siRNA sense strand
gaagucugccuaccuguca

SEQ ID NO: 561316 - RNA, 19 nt, Homo sapiens
  misc_RNA (1)...(19): siRNA sense strand
cauugcaggucaccacgua

SEQ ID NO: 561317 - RNA, 19 nt, Homo sapiens
  misc_RNA (1)...(19): siRNA sense strand
cugacaagcuagaccauga

SEQ ID NO: 561318 - RNA, 19 nt, Homo sapiens
  misc_RNA (1)...(19): siRNA sense strand
ucuguuugcugcccuguuu

SEQ ID NO: 561319 - RNA, 19 nt, Homo sapiens
  misc_RNA (1)...(19): siRNA sense strand
gaccuggacuucguucuca

SEQ ID NO: 561320 - RNA, 19 nt, Homo sapiens
  misc_RNA (1)...(19): siRNA sense strand
gcaaagacaaucggaucaa

SEQ ID NO: 561321 - RNA, 19 nt, Homo sapiens
  misc_RNA (1)...(19): siRNA sense strand
gaaauucucaaugggauca

SEQ ID NO: 561322 - RNA, 19 nt, Homo sapiens
  misc_RNA (1)...(19): siRNA sense strand
caaagacaaucggaucaag

SEQ ID NO: 561323 - RNA, 19 nt, Homo sapiens
  misc_RNA (1)...(19): siRNA sense strand
cucaugagcuucuucuuca

SEQ ID NO: 561324 - RNA, 19 nt, Homo sapiens
  misc_RNA (1)...(19): siRNA sense strand
aaggagagaucaucaucga

SEQ ID NO: 561325 - RNA, 19 nt, Homo sapiens
  misc_RNA (1)...(19): siRNA sense strand
gagcugaaggugcugaaga

SEQ ID NO: 561326 - RNA, 19 nt, Homo sapiens
  misc_RNA (1)...(19): siRNA sense strand
uggaaugucacguggaaua

SEQ ID NO: 561327 - RNA, 19 nt, Homo sapiens
  misc_RNA (1)...(19): siRNA sense strand
ggaaggcccuggugaucac

SEQ ID NO: 561328 - RNA, 19 nt, Homo sapiens
  misc_RNA (1)...(19): siRNA sense strand
ccacgcugcuugcuaccuu

SEQ ID NO: 561329 - RNA, 19 nt, Homo sapiens
  misc_RNA (1)...(19): siRNA sense strand
gcgagugucucccucaaac

SEQ ID NO: 561330 - RNA, 19 nt, Homo sapiens
  misc_RNA (1)...(19): siRNA sense strand
ggacacgucggaacaaguc

SEQ ID NO: 561331 - RNA, 19 nt, Homo sapiens
  misc_RNA (1)...(19): siRNA sense strand
gaguggaauuccggaacua

SEQ ID NO: 561332 - RNA, 19 nt, Homo sapiens
  misc_RNA (1)...(19): siRNA sense strand
caaggaguauucagagacu

SEQ ID NO: 561333 - RNA, 19 nt, Homo sapiens
  misc_RNA (1)...(19): siRNA sense strand
cacaagggaucgccguguu

SEQ ID NO: 561334 - RNA, 19 nt, Homo sapiens
  misc_RNA (1)...(19): siRNA sense strand
gcgcuggcuuccaacuauu

SEQ ID NO: 561335 - RNA, 19 nt, Homo sapiens
  misc_RNA (1)...(19): siRNA sense strand
guacugggacuacaugaag

SEQ ID NO: 561336 - RNA, 19 nt, Homo sapiens
  misc_RNA (1)...(19): siRNA sense strand
gcaaagcaaauggagaaug

SEQ ID NO: 561337 - RNA, 19 nt, Homo sapiens
  misc_RNA (1)...(19): siRNA sense strand
aagcaaagcaaauggagaa

SEQ ID NO: 561338 - RNA, 19 nt, Homo sapiens
  misc_RNA (1)...(19): siRNA sense strand
gcagguggacgucaucauc

SEQ ID NO: 561339 - RNA, 19 nt, Homo sapiens
  misc_RNA (1)...(19): siRNA sense strand
gacuuggccacguacauua

SEQ ID NO: 561340 - RNA, 19 nt, Homo sapiens
  misc_RNA (1)...(19): siRNA sense strand
ucauggacuuggccacgua

SEQ ID NO: 561341 - RNA, 19 nt, Homo sapiens
  misc_RNA (1)...(19): siRNA sense strand
gaaggaaugcgccaagacu

SEQ ID NO: 561342 - RNA, 19 nt, Homo sapiens
  misc_RNA (1)...(19): siRNA sense strand
cagggaucaugcucacuuu

SEQ ID NO: 561343 - RNA, 19 nt, Homo sapiens
  misc_RNA (1)...(19): siRNA sense strand
ccaguacucggaugaagaa

SEQ ID NO: 561344 - RNA, 19 nt, Homo sapiens
  misc_RNA (1)...(19): siRNA sense strand
ggucaagcuuuccguguac

SEQ ID NO: 561345 - RNA, 19 nt, Homo sapiens
  misc_RNA (1)...(19): siRNA sense strand
uaaagaacuggaagaagga

SEQ ID NO: 561346 - RNA, 19 nt, Homo sapiens
  misc_RNA (1)...(19): siRNA sense strand
cucagugucuuacucauug

SEQ ID NO: 561347 - RNA, 19 nt, Homo sapiens
  misc_RNA (1)...(19): siRNA sense strand
ucaagcugaugaacgaaau

SEQ ID NO: 561348 - RNA, 19 nt, Homo sapiens
  misc_RNA (1)...(19): siRNA sense strand
ggaucaugcucacuuucug

SEQ ID NO: 561349 - RNA, 19 nt, Homo sapiens
  misc_RNA (1)...(19): siRNA sense strand
cagcagcuccuccuccuau

SEQ ID NO: 561350 - RNA, 19 nt, Homo sapiens
  misc_RNA (1)...(19): siRNA sense strand
gcacagcaugagcuacuug

SEQ ID NO: 561351 - RNA, 19 nt, Homo sapiens
  misc_RNA (1)...(19): siRNA sense strand
ggaucaaagugcuaaagcu

SEQ ID NO: 561352 - RNA, 19 nt, Homo sapiens
  misc_RNA (1)...(19): siRNA sense strand
gaugaacgaaauucucaau

SEQ ID NO: 561353 - RNA, 19 nt, Homo sapiens
  misc_RNA (1)...(19): siRNA sense strand
gcccgucaaugcugugaug

SEQ ID NO: 561354 - RNA, 19 nt, Homo sapiens
  misc_RNA (1)...(19): siRNA sense strand
augaggagguggaggcuuu

SEQ ID NO: 561355 - RNA, 19 nt, Homo sapiens
  misc_RNA (1)...(19): siRNA sense strand
ccaagguggaugcgaauga

SEQ ID NO: 561356 - RNA, 19 nt, Homo sapiens
  misc_RNA (1)...(19): siRNA sense strand
ucaaacgccugaggaucuu

SEQ ID NO: 561357 - RNA, 19 nt, Homo sapiens
  misc_RNA (1)...(19): siRNA sense strand
ggucagcccaacucucuug

SEQ ID NO: 561358 - RNA, 19 nt, Homo sapiens
  misc_RNA (1)...(19): siRNA sense strand
gaccaugaaugugcagaag

SEQ ID NO: 561359 - RNA, 19 nt, Homo sapiens
  misc_RNA (1)...(19): siRNA sense strand
auuggugccugcaucguua

SEQ ID NO: 561360 - RNA, 19 nt, Homo sapiens
  misc_RNA (1)...(19): siRNA sense strand
gggaaggaagcaaagcaaa

SEQ ID NO: 561361 - RNA, 19 nt, Homo sapiens
  misc_RNA (1)...(19): siRNA sense strand
gggcccuacuuccucauga

SEQ ID NO: 561362 - RNA, 19 nt, Homo sapiens
  misc_RNA (1)...(19): siRNA sense strand
guucaugggcucccuguuc

SEQ ID NO: 561363 - RNA, 19 nt, Homo sapiens
  misc_RNA (1)...(19): siRNA sense strand
cagggcaggucaagcuuuc

SEQ ID NO: 561364 - RNA, 19 nt, Homo sapiens
  misc_RNA (1)...(19): siRNA sense strand
ugauggcgaugaagaccaa

SEQ ID NO: 561365 - RNA, 19 nt, Homo sapiens
  misc_RNA (1)...(19): siRNA sense strand
gagauugucaaccucaugu

SEQ ID NO: 561366 - RNA, 19 nt, Homo sapiens
  misc_RNA (1)...(19): siRNA sense strand
acaccgugcugcuguuugu

SEQ ID NO: 561367 - RNA, 19 nt, Homo sapiens
  misc_RNA (1)...(19): siRNA sense strand
ucuuaaaguugcucaucaa

SEQ ID NO: 561368 - RNA, 19 nt, Homo sapiens
  misc_RNA (1)...(19): siRNA sense strand
ucccggaggucaucaagau

SEQ ID NO: 561369 - RNA, 19 nt, Homo sapiens
  misc_RNA (1)...(19): siRNA sense strand
ggacagugcagggaagcaa

SEQ ID NO: 561370 - RNA, 19 nt, Homo sapiens
  misc_RNA (1)...(19): siRNA sense strand
ggagguggaggcuuugauc

SEQ ID NO: 561371 - RNA, 19 nt, Homo sapiens
  misc_RNA (1)...(19): siRNA sense strand
gcaggucaccacguacuug

SEQ ID NO: 561372 - RNA, 19 nt, Homo sapiens
  misc_RNA (1)...(19): siRNA sense strand
agaaggaggagaccuggaa

SEQ ID NO: 561373 - RNA, 19 nt, Homo sapiens
  misc_RNA (1)...(19): siRNA sense strand
ucgugugggugccuuguuu

SEQ ID NO: 561374 - RNA, 19 nt, Homo sapiens
  misc_RNA (1)...(19): siRNA sense strand
ccacaucugcuucgucagu

SEQ ID NO: 561375 - RNA, 19 nt, Homo sapiens
  misc_RNA (1)...(19): siRNA sense strand
gcaccaguacuuccacauc

SEQ ID NO: 561376 - RNA, 19 nt, Homo sapiens
  misc_RNA (1)...(19): siRNA sense strand
gaugacaccucucaacaaa

SEQ ID NO: 561377 - RNA, 19 nt, Homo sapiens
  misc_RNA (1)...(19): siRNA sense strand
uaaaguugcucaucaaguu

SEQ ID NO: 561378 - RNA, 19 nt, Homo sapiens
  misc_RNA (1)...(19): siRNA sense strand
ggaagcaacugcagagaca

SEQ ID NO: 561379 - RNA, 19 nt, Homo sapiens
  misc_RNA (1)...(19): siRNA sense strand
ccaaggagcuggacacagu

SEQ ID NO: 561380 - RNA, 19 nt, Homo sapiens
  misc_RNA (1)...(19): siRNA sense strand
caacgagucugccgaagga

SEQ ID NO: 561381 - RNA, 19 nt, Homo sapiens
  misc_RNA (1)...(19): siRNA sense strand
gaucaagaccgcugucauu

SEQ ID NO: 561382 - RNA, 19 nt, Homo sapiens
  misc_RNA (1)...(19): siRNA sense strand
caaagcaaauggagaaugg

SEQ ID NO: 561383 - RNA, 19 nt, Homo sapiens
  misc_RNA (1)...(19): siRNA sense strand
gggcagaccucuucuacuc

SEQ ID NO: 561384 - RNA, 19 nt, Homo sapiens
  misc_RNA (1)...(19): siRNA sense strand
ccacguacauuaacaugau

SEQ ID NO: 561385 - RNA, 19 nt, Homo sapiens
  misc_RNA (1)...(19): siRNA sense strand
gaccgaggcuacauucaga

SEQ ID NO: 561386 - RNA, 19 nt, Homo sapiens
  misc_RNA (1)...(19): siRNA sense strand
uggagaggcucaaggagua

SEQ ID NO: 561387 - RNA, 19 nt, Homo sapiens
  misc_RNA (1)...(19): siRNA sense strand
gcagaccucuucuacucuu

SEQ ID NO: 561388 - RNA, 19 nt, Homo sapiens
  misc_RNA (1)...(19): siRNA sense strand
gaaggaagcaaagcaaaug

SEQ ID NO: 561389 - RNA, 19 nt, Homo sapiens
  misc_RNA (1)...(19): siRNA sense strand
ggccgcagaucuuaaaguu

SEQ ID NO: 561390 - RNA, 19 nt, Homo sapiens
  misc_RNA (1)...(19): siRNA sense strand
gaccuccgcuucaagauca

SEQ ID NO: 561391 - RNA, 19 nt, Homo sapiens
  misc_RNA (1)...(19): siRNA sense strand
aaggagaaauccaggagua

SEQ ID NO: 561392 - RNA, 19 nt, Homo sapiens
  misc_RNA (1)...(19): siRNA sense strand
caucugaaauggaaaccaa

SEQ ID NO: 561393 - RNA, 19 nt, Homo sapiens
  misc_RNA (1)...(19): siRNA sense strand
gcaacugcaucguucuguu

SEQ ID NO: 561394 - RNA, 19 nt, Homo sapiens
  misc_RNA (1)...(19): siRNA sense strand
ggaaagaagucggggcaua

SEQ ID NO: 561395 - RNA, 19 nt, Homo sapiens
  misc_RNA (1)...(19): siRNA sense strand
ugaacgaaauucucaaugg

SEQ ID NO: 561396 - RNA, 19 nt, Homo sapiens
  misc_RNA (1)...(19): siRNA sense strand
caagcuagaccaugaaugu

SEQ ID NO: 561397 - RNA, 19 nt, Homo sapiens
  misc_RNA (1)...(19): siRNA sense strand
guacucggaugaagaaguc

SEQ ID NO: 561398 - RNA, 19 nt, Homo sapiens
  misc_RNA (1)...(19): siRNA sense strand
gagaggaccuggacuucgu

SEQ ID NO: 561399 - RNA, 19 nt, Homo sapiens
  misc_RNA (1)...(19): siRNA sense strand
caacugcaucguucuguuu

SEQ ID NO: 561400 - RNA, 19 nt, Homo sapiens
  misc_RNA (1)...(19): siRNA sense strand
ggacuuggccacguacauu

SEQ ID NO: 561401 - RNA, 19 nt, Homo sapiens
  misc_RNA (1)...(19): siRNA sense strand
caacagcaccgcagaacug

SEQ ID NO: 561402 - RNA, 19 nt, Homo sapiens
  misc_RNA (1)...(19): siRNA sense strand
ggaaggaagcaaagcaaau

SEQ ID NO: 561403 - RNA, 19 nt, Homo sapiens
  misc_RNA (1)...(19): siRNA sense strand
gaucaaagugcuaaagcuu

SEQ ID NO: 561404 - RNA, 19 nt, Homo sapiens
  misc_RNA (1)...(19): siRNA sense strand
ugaaggugcugaagaaguc

SEQ ID NO: 561405 - RNA, 19 nt, Homo sapiens
  misc_RNA (1)...(19): siRNA sense strand
gcagagaggucuuuucuac

SEQ ID NO: 561406 - RNA, 19 nt, Homo sapiens
  misc_RNA (1)...(19): siRNA sense strand
ggaucuuucucucccauga

SEQ ID NO: 561407 - RNA, 19 nt, Homo sapiens
  misc_RNA (1)...(19): siRNA sense strand
cgaugaagaccaagacgua

SEQ ID NO: 561408 - RNA, 19 nt, Homo sapiens
  misc_RNA (1)...(19): siRNA sense strand
gcaucaacaucgccaagau

SEQ ID NO: 561409 - RNA, 19 nt, Homo sapiens
  misc_RNA (1)...(19): siRNA sense strand
gcugguagcccuagugugu

SEQ ID NO: 561410 - RNA, 19 nt, Homo sapiens
  misc_RNA (1)...(19): siRNA sense strand
agaaccagaaggccuauua

SEQ ID NO: 561411 - RNA, 19 nt, Homo sapiens
  misc_RNA (1)...(19): siRNA sense strand
ggacucaggagcacacgaa

SEQ ID NO: 561412 - RNA, 19 nt, Homo sapiens
  misc_RNA (1)...(19): siRNA sense strand
ccugggagcuggcauucaa

SEQ ID NO: 561413 - RNA, 19 nt, Homo sapiens
  misc_RNA (1)...(19): siRNA sense strand
cgaaagagaguuccaaggu

SEQ ID NO: 561414 - RNA, 19 nt, Homo sapiens
  misc_RNA (1)...(19): siRNA sense strand
uggcugagauggacaaagu

SEQ ID NO: 561415 - RNA, 19 nt, Homo sapiens
  misc_RNA (1)...(19): siRNA sense strand
gaagucugccuaccuguca

SEQ ID NO: 561416 - RNA, 19 nt, Homo sapiens
  misc_RNA (1)...(19): siRNA sense strand
cauugcaggucaccacgua

SEQ ID NO: 561417 - RNA, 19 nt, Homo sapiens
  misc_RNA (1)...(19): siRNA sense strand
cugacaagcuagaccauga

SEQ ID NO: 561418 - RNA, 19 nt, Homo sapiens
  misc_RNA (1)...(19): siRNA sense strand
ucuguuugcugcccuguuu

SEQ ID NO: 561419 - RNA, 19 nt, Homo sapiens
  misc_RNA (1)...(19): siRNA sense strand
gaccuggacuucguucuca

SEQ ID NO: 561420 - RNA, 19 nt, Homo sapiens
  misc_RNA (1)...(19): siRNA sense strand
gcaaagacaaucggaucaa

SEQ ID NO: 561421 - RNA, 19 nt, Homo sapiens
  misc_RNA (1)...(19): siRNA sense strand
gaaauucucaaugggauca

SEQ ID NO: 561422 - RNA, 19 nt, Homo sapiens
  misc_RNA (1)...(19): siRNA sense strand
caaagacaaucggaucaag

SEQ ID NO: 561423 - RNA, 19 nt, Homo sapiens
  misc_RNA (1)...(19): siRNA sense strand
cucaugagcuucuucuuca

SEQ ID NO: 561424 - RNA, 19 nt, Homo sapiens
  misc_RNA (1)...(19): siRNA sense strand
aaggagagaucaucaucga

SEQ ID NO: 561425 - RNA, 19 nt, Homo sapiens
  misc_RNA (1)...(19): siRNA sense strand
gagcugaaggugcugaaga

SEQ ID NO: 561426 - RNA, 19 nt, Homo sapiens
  misc_RNA (1)...(19): siRNA sense strand
uggaaugucacguggaaua

SEQ ID NO: 561427 - RNA, 19 nt, Homo sapiens
  misc_RNA (1)...(19): siRNA sense strand
ggaaggcccuggugaucac

SEQ ID NO: 561428 - RNA, 19 nt, Homo sapiens
  misc_RNA (1)...(19): siRNA sense strand
ccacgcugcuugcuaccuu

SEQ ID NO: 561429 - RNA, 19 nt, Homo sapiens
  misc_RNA (1)...(19): siRNA sense strand
gcgagugucucccucaaac

SEQ ID NO: 561430 - RNA, 19 nt, Homo sapiens
  misc_RNA (1)...(19): siRNA sense strand
ggacacgucggaacaaguc

SEQ ID NO: 561431 - RNA, 19 nt, Homo sapiens
  misc_RNA (1)...(19): siRNA sense strand
gaguggaauuccggaacua

SEQ ID NO: 561432 - RNA, 19 nt, Homo sapiens
  misc_RNA (1)...(19): siRNA sense strand
caaggaguauucagagacu

SEQ ID NO: 561433 - RNA, 19 nt, Homo sapiens
  misc_RNA (1)...(19): siRNA sense strand
cacaagggaucgccguguu

SEQ ID NO: 561434 - RNA, 19 nt, Homo sapiens
  misc_RNA (1)...(19): siRNA sense strand
gcgcuggcuuccaacuauu

SEQ ID NO: 561435 - RNA, 19 nt, Homo sapiens
  misc_RNA (1)...(19): siRNA sense strand
guacugggacuacaugaag

SEQ ID NO: 561436 - RNA, 19 nt, Homo sapiens
  misc_RNA (1)...(19): siRNA sense strand
gcaaagcaaauggagaaug

SEQ ID NO: 561437 - RNA, 19 nt, Homo sapiens
  misc_RNA (1)...(19): siRNA sense strand
aagcaaagcaaauggagaa

SEQ ID NO: 561438 - RNA, 19 nt, Homo sapiens
  misc_RNA (1)...(19): siRNA sense strand
gcagguggacgucaucauc

SEQ ID NO: 561439 - RNA, 19 nt, Homo sapiens
  misc_RNA (1)...(19): siRNA sense strand
gacuuggccacguacauua

SEQ ID NO: 561440 - RNA, 19 nt, Homo sapiens
  misc_RNA (1)...(19): siRNA sense strand
ucauggacuuggccacgua

SEQ ID NO: 561441 - RNA, 19 nt, Homo sapiens
  misc_RNA (1)...(19): siRNA sense strand
gaaggaaugcgccaagacu

SEQ ID NO: 561442 - RNA, 19 nt, Homo sapiens
  misc_RNA (1)...(19): siRNA sense strand
cagggaucaugcucacuuu

SEQ ID NO: 561443 - RNA, 19 nt, Homo sapiens
  misc_RNA (1)...(19): siRNA sense strand
ccaguacucggaugaagaa

SEQ ID NO: 561444 - RNA, 19 nt, Homo sapiens
  misc_RNA (1)...(19): siRNA sense strand
ggucaagcuuuccguguac

SEQ ID NO: 561445 - RNA, 19 nt, Homo sapiens
  misc_RNA (1)...(19): siRNA sense strand
uaaagaacuggaagaagga

SEQ ID NO: 561446 - RNA, 19 nt, Homo sapiens
  misc_RNA (1)...(19): siRNA sense strand
cucagugucuuacucauug

SEQ ID NO: 561447 - RNA, 19 nt, Homo sapiens
  misc_RNA (1)...(19): siRNA sense strand
ucaagcugaugaacgaaau

SEQ ID NO: 561448 - RNA, 19 nt, Homo sapiens
  misc_RNA (1)...(19): siRNA sense strand
ggaucaugcucacuuucug

SEQ ID NO: 561449 - RNA, 19 nt, Homo sapiens
  misc_RNA (1)...(19): siRNA sense strand
cagcagcuccuccuccuau

SEQ ID NO: 561450 - RNA, 19 nt, Homo sapiens
  misc_RNA (1)...(19): siRNA sense strand
gcacagcaugagcuacuug

SEQ ID NO: 561451 - RNA, 19 nt, Homo sapiens
  misc_RNA (1)...(19): siRNA sense strand
ggaucaaagugcuaaagcu

SEQ ID NO: 561452 - RNA, 19 nt, Homo sapiens
  misc_RNA (1)...(19): siRNA sense strand
gaugaacgaaauucucaau

SEQ ID NO: 561453 - RNA, 19 nt, Homo sapiens
  misc_RNA (1)...(19): siRNA sense strand
gcccgucaaugcugugaug

SEQ ID NO: 561454 - RNA, 19 nt, Homo sapiens
  misc_RNA (1)...(19): siRNA sense strand
augaggagguggaggcuuu

SEQ ID NO: 561455 - RNA, 19 nt, Homo sapiens
  misc_RNA (1)...(19): siRNA sense strand
ccaagguggaugcgaauga

SEQ ID NO: 561456 - RNA, 19 nt, Homo sapiens
  misc_RNA (1)...(19): siRNA sense strand
ucaaacgccugaggaucuu

SEQ ID NO: 561457 - RNA, 19 nt, Homo sapiens
  misc_RNA (1)...(19): siRNA sense strand
ggucagcccaacucucuug

SEQ ID NO: 561458 - RNA, 19 nt, Homo sapiens
  misc_RNA (1)...(19): siRNA sense strand
gaccaugaaugugcagaag

SEQ ID NO: 561459 - RNA, 19 nt, Homo sapiens
  misc_RNA (1)...(19): siRNA sense strand
auuggugccugcaucguua

SEQ ID NO: 561460 - RNA, 19 nt, Homo sapiens
  misc_RNA (1)...(19): siRNA sense strand
gggaaggaagcaaagcaaa

SEQ ID NO: 561461 - RNA, 19 nt, Homo sapiens
  misc_RNA (1)...(19): siRNA sense strand
gggcccuacuuccucauga

SEQ ID NO: 561462 - RNA, 19 nt, Homo sapiens
  misc_RNA (1)...(19): siRNA sense strand
guucaugggcucccuguuc

SEQ ID NO: 561463 - RNA, 19 nt, Homo sapiens
  misc_RNA (1)...(19): siRNA sense strand
cagggcaggucaagcuuuc

SEQ ID NO: 561464 - RNA, 19 nt, Homo sapiens
  misc_RNA (1)...(19): siRNA sense strand
ugauggcgaugaagaccaa

SEQ ID NO: 561465 - RNA, 19 nt, Homo sapiens
  misc_RNA (1)...(19): siRNA sense strand
gagauugucaaccucaugu

SEQ ID NO: 561466 - RNA, 19 nt, Homo sapiens
  misc_RNA (1)...(19): siRNA sense strand
acaccgugcugcuguuugu

SEQ ID NO: 561467 - RNA, 19 nt, Homo sapiens
  misc_RNA (1)...(19): siRNA sense strand
ucuuaaaguugcucaucaa

SEQ ID NO: 561468 - RNA, 19 nt, Homo sapiens
  misc_RNA (1)...(19): siRNA sense strand
ucccggaggucaucaagau

SEQ ID NO: 561469 - RNA, 19 nt, Homo sapiens
  misc_RNA (1)...(19): siRNA sense strand
ggacagugcagggaagcaa

SEQ ID NO: 561470 - RNA, 19 nt, Homo sapiens
  misc_RNA (1)...(19): siRNA sense strand
ggagguggaggcuuugauc

SEQ ID NO: 561471 - RNA, 19 nt, Homo sapiens
  misc_RNA (1)...(19): siRNA sense strand
gcaggucaccacguacuug

SEQ ID NO: 561472 - RNA, 19 nt, Homo sapiens
  misc_RNA (1)...(19): siRNA sense strand
agaaggaggagaccuggaa

SEQ ID NO: 561473 - RNA, 19 nt, Homo sapiens
  misc_RNA (1)...(19): siRNA sense strand
ucgugugggugccuuguuu

SEQ ID NO: 561474 - RNA, 19 nt, Homo sapiens
  misc_RNA (1)...(19): siRNA sense strand
ccacaucugcuucgucagu

SEQ ID NO: 561475 - RNA, 19 nt, Homo sapiens
  misc_RNA (1)...(19): siRNA sense strand
gcaccaguacuuccacauc

SEQ ID NO: 561476 - RNA, 19 nt, Homo sapiens
  misc_RNA (1)...(19): siRNA sense strand
gaugacaccucucaacaaa

SEQ ID NO: 561477 - RNA, 19 nt, Homo sapiens
  misc_RNA (1)...(19): siRNA sense strand
uaaaguugcucaucaaguu

SEQ ID NO: 561478 - RNA, 19 nt, Homo sapiens
  misc_RNA (1)...(19): siRNA sense strand
ggaagcaacugcagagaca

SEQ ID NO: 561479 - RNA, 19 nt, Homo sapiens
  misc_RNA (1)...(19): siRNA sense strand
ccaaggagcuggacacagu

SEQ ID NO: 561480 - RNA, 19 nt, Homo sapiens
  misc_RNA (1)...(19): siRNA sense strand
caacgagucugccgaagga

SEQ ID NO: 561481 - RNA, 19 nt, Homo sapiens
  misc_RNA (1)...(19): siRNA sense strand
gaucaagaccgcugucauu

SEQ ID NO: 561482 - RNA, 19 nt, Homo sapiens
  misc_RNA (1)...(19): siRNA sense strand
caaagcaaauggagaaugg

SEQ ID NO: 561483 - RNA, 19 nt, Homo sapiens
  misc_RNA (1)...(19): siRNA sense strand
gggcagaccucuucuacuc

SEQ ID NO: 561484 - RNA, 19 nt, Homo sapiens
  misc_RNA (1)...(19): siRNA sense strand
ccacguacauuaacaugau

SEQ ID NO: 561485 - RNA, 19 nt, Homo sapiens
  misc_RNA (1)...(19): siRNA sense strand
gaccgaggcuacauucaga

SEQ ID NO: 561486 - RNA, 19 nt, Homo sapiens
  misc_RNA (1)...(19): siRNA sense strand
uggagaggcucaaggagua

SEQ ID NO: 561487 - RNA, 19 nt, Homo sapiens
  misc_RNA (1)...(19): siRNA sense strand
gcagaccucuucuacucuu

SEQ ID NO: 561488 - RNA, 19 nt, Homo sapiens
  misc_RNA (1)...(19): siRNA sense strand
gaaggaagcaaagcaaaug

SEQ ID NO: 561489 - RNA, 19 nt, Homo sapiens
  misc_RNA (1)...(19): siRNA sense strand
ggccgcagaucuuaaaguu

SEQ ID NO: 561490 - RNA, 19 nt, Homo sapiens
  misc_RNA (1)...(19): siRNA sense strand
gaccuccgcuucaagauca

SEQ ID NO: 561491 - RNA, 19 nt, Homo sapiens
  misc_RNA (1)...(19): siRNA sense strand
aaggagaaauccaggagua

SEQ ID NO: 561492 - RNA, 19 nt, Homo sapiens
  misc_RNA (1)...(19): siRNA sense strand
caucugaaauggaaaccaa

SEQ ID NO: 561493 - RNA, 19 nt, Homo sapiens
  misc_RNA (1)...(19): siRNA sense strand
gcaacugcaucguucuguu

SEQ ID NO: 561494 - RNA, 19 nt, Homo sapiens
  misc_RNA (1)...(19): siRNA sense strand
ggaaagaagucggggcaua

SEQ ID NO: 561495 - RNA, 19 nt, Homo sapiens
  misc_RNA (1)...(19): siRNA sense strand
ugaacgaaauucucaaugg

SEQ ID NO: 561496 - RNA, 19 nt, Homo sapiens
  misc_RNA (1)...(19): siRNA sense strand
caagcuagaccaugaaugu

SEQ ID NO: 561497 - RNA, 19 nt, Homo sapiens
  misc_RNA (1)...(19): siRNA sense strand
guacucggaugaagaaguc

SEQ ID NO: 561498 - RNA, 19 nt, Homo sapiens
  misc_RNA (1)...(19): siRNA sense strand
gagaggaccuggacuucgu

SEQ ID NO: 561499 - RNA, 19 nt, Homo sapiens
  misc_RNA (1)...(19): siRNA sense strand
caacugcaucguucuguuu

SEQ ID NO: 561500 - RNA, 19 nt, Homo sapiens
  misc_RNA (1)...(19): siRNA sense strand
ggacuuggccacguacauu

SEQ ID NO: 561501 - RNA, 19 nt, Homo sapiens
  misc_RNA (1)...(19): siRNA sense strand
caacagcaccgcagaacug

SEQ ID NO: 561502 - RNA, 19 nt, Homo sapiens
  misc_RNA (1)...(19): siRNA sense strand
ggaaggaagcaaagcaaau

SEQ ID NO: 561503 - RNA, 19 nt, Homo sapiens
  misc_RNA (1)...(19): siRNA sense strand
gaucaaagugcuaaagcuu

SEQ ID NO: 561504 - RNA, 19 nt, Homo sapiens
  misc_RNA (1)...(19): siRNA sense strand
ugaaggugcugaagaaguc

SEQ ID NO: 561505 - RNA, 19 nt, Homo sapiens
  misc_RNA (1)...(19): siRNA sense strand
gcagagaggucuuuucuac

SEQ ID NO: 561506 - RNA, 19 nt, Homo sapiens
  misc_RNA (1)...(19): siRNA sense strand
ggaucuuucucucccauga

SEQ ID NO: 561507 - RNA, 19 nt, Homo sapiens
  misc_RNA (1)...(19): siRNA sense strand
cgaugaagaccaagacgua

SEQ ID NO: 561508 - RNA, 19 nt, Homo sapiens
  misc_RNA (1)...(19): siRNA sense strand
gcaucaacaucgccaagau

SEQ ID NO: 561509 - RNA, 19 nt, Homo sapiens
  misc_RNA (1)...(19): siRNA sense strand
gcugguagcccuagugugu

SEQ ID NO: 561510 - RNA, 19 nt, Homo sapiens
  misc_RNA (1)...(19): siRNA sense strand
agaaccagaaggccuauua

SEQ ID NO: 561511 - RNA, 19 nt, Homo sapiens
  misc_RNA (1)...(19): siRNA sense strand
ggacucaggagcacacgaa

SEQ ID NO: 561512 - RNA, 19 nt, Homo sapiens
  misc_RNA (1)...(19): siRNA sense strand
ccugggagcuggcauucaa

SEQ ID NO: 561513 - RNA, 19 nt, Homo sapiens
  misc_RNA (1)...(19): siRNA sense strand
cgaaagagaguuccaaggu

SEQ ID NO: 561514 - RNA, 19 nt, Homo sapiens
  misc_RNA (1)...(19): siRNA sense strand
uggcugagauggacaaagu

SEQ ID NO: 561515 - RNA, 19 nt, Homo sapiens
  misc_RNA (1)...(19): siRNA sense strand
gaagucugccuaccuguca

SEQ ID NO: 561516 - RNA, 19 nt, Homo sapiens
  misc_RNA (1)...(19): siRNA sense strand
cauugcaggucaccacgua

SEQ ID NO: 561517 - RNA, 19 nt, Homo sapiens
  misc_RNA (1)...(19): siRNA sense strand
cugacaagcuagaccauga

SEQ ID NO: 561518 - RNA, 19 nt, Homo sapiens
  misc_RNA (1)...(19): siRNA sense strand
ucuguuugcugcccuguuu

SEQ ID NO: 561519 - RNA, 19 nt, Homo sapiens
  misc_RNA (1)...(19): siRNA sense strand
gaccuggacuucguucuca

SEQ ID NO: 561520 - RNA, 19 nt, Homo sapiens
  misc_RNA (1)...(19): siRNA sense strand
gcaaagacaaucggaucaa

SEQ ID NO: 561521 - RNA, 19 nt, Homo sapiens
  misc_RNA (1)...(19): siRNA sense strand
gaaauucucaaugggauca

SEQ ID NO: 561522 - RNA, 19 nt, Homo sapiens
  misc_RNA (1)...(19): siRNA sense strand
caaagacaaucggaucaag

SEQ ID NO: 561523 - RNA, 19 nt, Homo sapiens
  misc_RNA (1)...(19): siRNA sense strand
cucaugagcuucuucuuca

SEQ ID NO: 561524 - RNA, 19 nt, Homo sapiens
  misc_RNA (1)...(19): siRNA sense strand
aaggagagaucaucaucga

SEQ ID NO: 561525 - RNA, 19 nt, Homo sapiens
  misc_RNA (1)...(19): siRNA sense strand
gagcugaaggugcugaaga

SEQ ID NO: 561526 - RNA, 19 nt, Homo sapiens
  misc_RNA (1)...(19): siRNA sense strand
uggaaugucacguggaaua

SEQ ID NO: 561527 - RNA, 19 nt, Homo sapiens
  misc_RNA (1)...(19): siRNA sense strand
ggaaggcccuggugaucac

SEQ ID NO: 561528 - RNA, 19 nt, Homo sapiens
  misc_RNA (1)...(19): siRNA sense strand
ccacgcugcuugcuaccuu

SEQ ID NO: 561529 - RNA, 19 nt, Homo sapiens
  misc_RNA (1)...(19): siRNA sense strand
gcgagugucucccucaaac

SEQ ID NO: 561530 - RNA, 19 nt, Homo sapiens
  misc_RNA (1)...(19): siRNA sense strand
ggacacgucggaacaaguc

SEQ ID NO: 561531 - RNA, 19 nt, Homo sapiens
  misc_RNA (1)...(19): siRNA sense strand
gaguggaauuccggaacua

SEQ ID NO: 561532 - RNA, 19 nt, Homo sapiens
  misc_RNA (1)...(19): siRNA sense strand
caaggaguauucagagacu

SEQ ID NO: 561533 - RNA, 19 nt, Homo sapiens
  misc_RNA (1)...(19): siRNA sense strand
cacaagggaucgccguguu

SEQ ID NO: 561534 - RNA, 19 nt, Homo sapiens
  misc_RNA (1)...(19): siRNA sense strand
gcgcuggcuuccaacuauu

SEQ ID NO: 561535 - RNA, 19 nt, Homo sapiens
  misc_RNA (1)...(19): siRNA sense strand
guacugggacuacaugaag

SEQ ID NO: 561536 - RNA, 19 nt, Homo sapiens
  misc_RNA (1)...(19): siRNA sense strand
gcaaagcaaauggagaaug

SEQ ID NO: 561537 - RNA, 19 nt, Homo sapiens
  misc_RNA (1)...(19): siRNA sense strand
aagcaaagcaaauggagaa

SEQ ID NO: 561538 - RNA, 19 nt, Homo sapiens
  misc_RNA (1)...(19): siRNA sense strand
gcagguggacgucaucauc

SEQ ID NO: 561539 - RNA, 19 nt, Homo sapiens
  misc_RNA (1)...(19): siRNA sense strand
gacuuggccacguacauua

SEQ ID NO: 561540 - RNA, 19 nt, Homo sapiens
  misc_RNA (1)...(19): siRNA sense strand
ucauggacuuggccacgua

SEQ ID NO: 561541 - RNA, 19 nt, Homo sapiens
  misc_RNA (1)...(19): siRNA sense strand
gaaggaaugcgccaagacu

SEQ ID NO: 561542 - RNA, 19 nt, Homo sapiens
  misc_RNA (1)...(19): siRNA sense strand
cagggaucaugcucacuuu

SEQ ID NO: 561543 - RNA, 19 nt, Homo sapiens
  misc_RNA (1)...(19): siRNA sense strand
ccaguacucggaugaagaa

SEQ ID NO: 561544 - RNA, 19 nt, Homo sapiens
  misc_RNA (1)...(19): siRNA sense strand
ggucaagcuuuccguguac

SEQ ID NO: 561545 - RNA, 19 nt, Homo sapiens
  misc_RNA (1)...(19): siRNA sense strand
uaaagaacuggaagaagga

SEQ ID NO: 561546 - RNA, 19 nt, Homo sapiens
  misc_RNA (1)...(19): siRNA sense strand
cucagugucuuacucauug

SEQ ID NO: 561547 - RNA, 19 nt, Homo sapiens
  misc_RNA (1)...(19): siRNA sense strand
ucaagcugaugaacgaaau

SEQ ID NO: 561548 - RNA, 19 nt, Homo sapiens
  misc_RNA (1)...(19): siRNA sense strand
ggaucaugcucacuuucug

SEQ ID NO: 561549 - RNA, 19 nt, Homo sapiens
  misc_RNA (1)...(19): siRNA sense strand
cagcagcuccuccuccuau

SEQ ID NO: 561550 - RNA, 19 nt, Homo sapiens
  misc_RNA (1)...(19): siRNA sense strand
gcacagcaugagcuacuug

SEQ ID NO: 561551 - RNA, 19 nt, Homo sapiens
  misc_RNA (1)...(19): siRNA sense strand
ggaucaaagugcuaaagcu

SEQ ID NO: 561552 - RNA, 19 nt, Homo sapiens
  misc_RNA (1)...(19): siRNA sense strand
gaugaacgaaauucucaau

SEQ ID NO: 561553 - RNA, 19 nt, Homo sapiens
  misc_RNA (1)...(19): siRNA sense strand
gcccgucaaugcugugaug

SEQ ID NO: 561554 - RNA, 19 nt, Homo sapiens
  misc_RNA (1)...(19): siRNA sense strand
augaggagguggaggcuuu

SEQ ID NO: 561555 - RNA, 19 nt, Homo sapiens
  misc_RNA (1)...(19): siRNA sense strand
ccaagguggaugcgaauga

SEQ ID NO: 561556 - RNA, 19 nt, Homo sapiens
  misc_RNA (1)...(19): siRNA sense strand
ucaaacgccugaggaucuu

SEQ ID NO: 561557 - RNA, 19 nt, Homo sapiens
  misc_RNA (1)...(19): siRNA sense strand
ggucagcccaacucucuug

SEQ ID NO: 561558 - RNA, 19 nt, Homo sapiens
  misc_RNA (1)...(19): siRNA sense strand
gaccaugaaugugcagaag

SEQ ID NO: 561559 - RNA, 19 nt, Homo sapiens
  misc_RNA (1)...(19): siRNA sense strand
auuggugccugcaucguua

SEQ ID NO: 561560 - RNA, 19 nt, Homo sapiens
  misc_RNA (1)...(19): siRNA sense strand
gggaaggaagcaaagcaaa

SEQ ID NO: 561561 - RNA, 19 nt, Homo sapiens
  misc_RNA (1)...(19): siRNA sense strand
gggcccuacuuccucauga

SEQ ID NO: 561562 - RNA, 19 nt, Homo sapiens
  misc_RNA (1)...(19): siRNA sense strand
guucaugggcucccuguuc

SEQ ID NO: 561563 - RNA, 19 nt, Homo sapiens
  misc_RNA (1)...(19): siRNA sense strand
cagggcaggucaagcuuuc

SEQ ID NO: 561564 - RNA, 19 nt, Homo sapiens
  misc_RNA (1)...(19): siRNA sense strand
ugauggcgaugaagaccaa

SEQ ID NO: 561565 - RNA, 19 nt, Homo sapiens
  misc_RNA (1)...(19): siRNA sense strand
gagauugucaaccucaugu

SEQ ID NO: 561566 - RNA, 19 nt, Homo sapiens
  misc_RNA (1)...(19): siRNA sense strand
acaccgugcugcuguuugu

SEQ ID NO: 561567 - RNA, 19 nt, Homo sapiens
  misc_RNA (1)...(19): siRNA sense strand
ucuuaaaguugcucaucaa

SEQ ID NO: 561568 - RNA, 19 nt, Homo sapiens
  misc_RNA (1)...(19): siRNA sense strand
ucccggaggucaucaagau

SEQ ID NO: 561569 - RNA, 19 nt, Homo sapiens
  misc_RNA (1)...(19): siRNA sense strand
ggacagugcagggaagcaa

SEQ ID NO: 561570 - RNA, 19 nt, Homo sapiens
  misc_RNA (1)...(19): siRNA sense strand
ggagguggaggcuuugauc

SEQ ID NO: 561571 - RNA, 19 nt, Homo sapiens
  misc_RNA (1)...(19): siRNA sense strand
gcaggucaccacguacuug

SEQ ID NO: 561572 - RNA, 19 nt, Homo sapiens
  misc_RNA (1)...(19): siRNA sense strand
agaaggaggagaccuggaa

SEQ ID NO: 561573 - RNA, 19 nt, Homo sapiens
  misc_RNA (1)...(19): siRNA sense strand
ucgugugggugccuuguuu

SEQ ID NO: 561574 - RNA, 19 nt, Homo sapiens
  misc_RNA (1)...(19): siRNA sense strand
ccacaucugcuucgucagu

SEQ ID NO: 561575 - RNA, 19 nt, Homo sapiens
  misc_RNA (1)...(19): siRNA sense strand
gcaccaguacuuccacauc

SEQ ID NO: 561576 - RNA, 19 nt, Homo sapiens
  misc_RNA (1)...(19): siRNA sense strand
gaugacaccucucaacaaa

SEQ ID NO: 561577 - RNA, 19 nt, Homo sapiens
  misc_RNA (1)...(19): siRNA sense strand
uaaaguugcucaucaaguu

SEQ ID NO: 561578 - RNA, 19 nt, Homo sapiens
  misc_RNA (1)...(19): siRNA sense strand
ggaagcaacugcagagaca

SEQ ID NO: 561579 - RNA, 19 nt, Homo sapiens
  misc_RNA (1)...(19): siRNA sense strand
ccaaggagcuggacacagu

SEQ ID NO: 561580 - RNA, 19 nt, Homo sapiens
  misc_RNA (1)...(19): siRNA sense strand
caacgagucugccgaagga

SEQ ID NO: 561581 - RNA, 19 nt, Homo sapiens
  misc_RNA (1)...(19): siRNA sense strand
gaucaagaccgcugucauu

SEQ ID NO: 561582 - RNA, 19 nt, Homo sapiens
  misc_RNA (1)...(19): siRNA sense strand
caaagcaaauggagaaugg

SEQ ID NO: 561583 - RNA, 19 nt, Homo sapiens
  misc_RNA (1)...(19): siRNA sense strand
gggcagaccucuucuacuc

SEQ ID NO: 561584 - RNA, 19 nt, Homo sapiens
  misc_RNA (1)...(19): siRNA sense strand
ccacguacauuaacaugau

SEQ ID NO: 561585 - RNA, 19 nt, Homo sapiens
  misc_RNA (1)...(19): siRNA sense strand
gaccgaggcuacauucaga

SEQ ID NO: 561586 - RNA, 19 nt, Homo sapiens
  misc_RNA (1)...(19): siRNA sense strand
uggagaggcucaaggagua

SEQ ID NO: 561587 - RNA, 19 nt, Homo sapiens
  misc_RNA (1)...(19): siRNA sense strand
gcagaccucuucuacucuu

SEQ ID NO: 561588 - RNA, 19 nt, Homo sapiens
  misc_RNA (1)...(19): siRNA sense strand
gaaggaagcaaagcaaaug

SEQ ID NO: 561589 - RNA, 19 nt, Homo sapiens
  misc_RNA (1)...(19): siRNA sense strand
ggccgcagaucuuaaaguu

SEQ ID NO: 561590 - RNA, 19 nt, Homo sapiens
  misc_RNA (1)...(19): siRNA sense strand
gaccuccgcuucaagauca

SEQ ID NO: 561591 - RNA, 19 nt, Homo sapiens
  misc_RNA (1)...(19): siRNA sense strand
aaggagaaauccaggagua

SEQ ID NO: 561592 - RNA, 19 nt, Homo sapiens
  misc_RNA (1)...(19): siRNA sense strand
caucugaaauggaaaccaa

SEQ ID NO: 561593 - RNA, 19 nt, Homo sapiens
  misc_RNA (1)...(19): siRNA sense strand
gcaacugcaucguucuguu

SEQ ID NO: 561594 - RNA, 19 nt, Homo sapiens
  misc_RNA (1)...(19): siRNA sense strand
ggaaagaagucggggcaua

SEQ ID NO: 561595 - RNA, 19 nt, Homo sapiens
  misc_RNA (1)...(19): siRNA sense strand
ugaacgaaauucucaaugg

SEQ ID NO: 561596 - RNA, 19 nt, Homo sapiens
  misc_RNA (1)...(19): siRNA sense strand
caagcuagaccaugaaugu

SEQ ID NO: 561597 - RNA, 19 nt, Homo sapiens
  misc_RNA (1)...(19): siRNA sense strand
guacucggaugaagaaguc

SEQ ID NO: 561598 - RNA, 19 nt, Homo sapiens
  misc_RNA (1)...(19): siRNA sense strand
gagaggaccuggacuucgu

SEQ ID NO: 561599 - RNA, 19 nt, Homo sapiens
  misc_RNA (1)...(19): siRNA sense strand
caacugcaucguucuguuu

SEQ ID NO: 561600 - RNA, 19 nt, Homo sapiens
  misc_RNA (1)...(19): siRNA sense strand
ggacuuggccacguacauu

SEQ ID NO: 561601 - RNA, 19 nt, Homo sapiens
  misc_RNA (1)...(19): siRNA sense strand
caacagcaccgcagaacug

SEQ ID NO: 561602 - RNA, 19 nt, Homo sapiens
  misc_RNA (1)...(19): siRNA sense strand
ggaaggaagcaaagcaaau

SEQ ID NO: 561603 - RNA, 19 nt, Homo sapiens
  misc_RNA (1)...(19): siRNA sense strand
gaucaaagugcuaaagcuu

SEQ ID NO: 561604 - RNA, 19 nt, Homo sapiens
  misc_RNA (1)...(19): siRNA sense strand
ugaaggugcugaagaaguc

SEQ ID NO: 561605 - RNA, 19 nt, Homo sapiens
  misc_RNA (1)...(19): siRNA sense strand
gcagagaggucuuuucuac

SEQ ID NO: 561606 - RNA, 19 nt, Homo sapiens
  misc_RNA (1)...(19): siRNA sense strand
ggaucuuucucucccauga

SEQ ID NO: 561607 - RNA, 19 nt, Homo sapiens
  misc_RNA (1)...(19): siRNA sense strand
cgaugaagaccaagacgua

SEQ ID NO: 561608 - RNA, 19 nt, Homo sapiens
  misc_RNA (1)...(19): siRNA sense strand
gcaucaacaucgccaagau

SEQ ID NO: 561609 - RNA, 19 nt, Homo sapiens
  misc_RNA (1)...(19): siRNA sense strand
gcugguagcccuagugugu

SEQ ID NO: 561610 - RNA, 19 nt, Homo sapiens
  misc_RNA (1)...(19): siRNA sense strand
agaaccagaaggccuauua

SEQ ID NO: 561611 - RNA, 19 nt, Homo sapiens
  misc_RNA (1)...(19): siRNA sense strand
ggacucaggagcacacgaa

SEQ ID NO: 561612 - RNA, 19 nt, Homo sapiens
  misc_RNA (1)...(19): siRNA sense strand
ccugggagcuggcauucaa

SEQ ID NO: 561613 - RNA, 19 nt, Homo sapiens
  misc_RNA (1)...(19): siRNA sense strand
cgaaagagaguuccaaggu

SEQ ID NO: 561614 - RNA, 19 nt, Homo sapiens
  misc_RNA (1)...(19): siRNA sense strand
uggcugagauggacaaagu

SEQ ID NO: 561615 - RNA, 19 nt, Homo sapiens
  misc_RNA (1)...(19): siRNA sense strand
gaagucugccuaccuguca

SEQ ID NO: 561616 - RNA, 19 nt, Homo sapiens
  misc_RNA (1)...(19): siRNA sense strand
cauugcaggucaccacgua

SEQ ID NO: 561617 - RNA, 19 nt, Homo sapiens
  misc_RNA (1)...(19): siRNA sense strand
cugacaagcuagaccauga

SEQ ID NO: 561618 - RNA, 19 nt, Homo sapiens
  misc_RNA (1)...(19): siRNA sense strand
ucuguuugcugcccuguuu

SEQ ID NO: 561619 - RNA, 19 nt, Homo sapiens
  misc_RNA (1)...(19): siRNA sense strand
gaccuggacuucguucuca

SEQ ID NO: 561620 - RNA, 19 nt, Homo sapiens
  misc_RNA (1)...(19): siRNA sense strand
gcaaagacaaucggaucaa

SEQ ID NO: 561621 - RNA, 19 nt, Homo sapiens
  misc_RNA (1)...(19): siRNA sense strand
gaaauucucaaugggauca

SEQ ID NO: 561622 - RNA, 19 nt, Homo sapiens
  misc_RNA (1)...(19): siRNA sense strand
caaagacaaucggaucaag

SEQ ID NO: 561623 - RNA, 19 nt, Homo sapiens
  misc_RNA (1)...(19): siRNA sense strand
cucaugagcuucuucuuca

SEQ ID NO: 561624 - RNA, 19 nt, Homo sapiens
  misc_RNA (1)...(19): siRNA sense strand
aaggagagaucaucaucga

SEQ ID NO: 561625 - RNA, 19 nt, Homo sapiens
  misc_RNA (1)...(19): siRNA sense strand
gagcugaaggugcugaaga

SEQ ID NO: 561626 - RNA, 19 nt, Homo sapiens
  misc_RNA (1)...(19): siRNA sense strand
uggaaugucacguggaaua

SEQ ID NO: 561627 - RNA, 19 nt, Homo sapiens
  misc_RNA (1)...(19): siRNA sense strand
ggaaggcccuggugaucac

SEQ ID NO: 561628 - RNA, 19 nt, Homo sapiens
  misc_RNA (1)...(19): siRNA sense strand
ccacgcugcuugcuaccuu

SEQ ID NO: 561629 - RNA, 19 nt, Homo sapiens
  misc_RNA (1)...(19): siRNA sense strand
gcgagugucucccucaaac

SEQ ID NO: 561630 - RNA, 19 nt, Homo sapiens
  misc_RNA (1)...(19): siRNA sense strand
ggacacgucggaacaaguc

SEQ ID NO: 561631 - RNA, 19 nt, Homo sapiens
  misc_RNA (1)...(19): siRNA sense strand
gaguggaauuccggaacua

SEQ ID NO: 561632 - RNA, 19 nt, Homo sapiens
  misc_RNA (1)...(19): siRNA sense strand
caaggaguauucagagacu

SEQ ID NO: 561633 - RNA, 19 nt, Homo sapiens
  misc_RNA (1)...(19): siRNA sense strand
cacaagggaucgccguguu

SEQ ID NO: 561634 - RNA, 19 nt, Homo sapiens
  misc_RNA (1)...(19): siRNA sense strand
gcgcuggcuuccaacuauu

SEQ ID NO: 561635 - RNA, 19 nt, Homo sapiens
  misc_RNA (1)...(19): siRNA sense strand
guacugggacuacaugaag

SEQ ID NO: 561636 - RNA, 19 nt, Homo sapiens
  misc_RNA (1)...(19): siRNA sense strand
gcaaagcaaauggagaaug

SEQ ID NO: 561637 - RNA, 19 nt, Homo sapiens
  misc_RNA (1)...(19): siRNA sense strand
aagcaaagcaaauggagaa

SEQ ID NO: 561638 - RNA, 19 nt, Homo sapiens
  misc_RNA (1)...(19): siRNA sense strand
gcagguggacgucaucauc

SEQ ID NO: 561639 - RNA, 19 nt, Homo sapiens
  misc_RNA (1)...(19): siRNA sense strand
gacuuggccacguacauua

SEQ ID NO: 561640 - RNA, 19 nt, Homo sapiens
  misc_RNA (1)...(19): siRNA sense strand
ucauggacuuggccacgua

SEQ ID NO: 561641 - RNA, 19 nt, Homo sapiens
  misc_RNA (1)...(19): siRNA sense strand
gaaggaaugcgccaagacu

SEQ ID NO: 561642 - RNA, 19 nt, Homo sapiens
  misc_RNA (1)...(19): siRNA sense strand
cagggaucaugcucacuuu

SEQ ID NO: 561643 - RNA, 19 nt, Homo sapiens
  misc_RNA (1)...(19): siRNA sense strand
ccaguacucggaugaagaa

SEQ ID NO: 561644 - RNA, 19 nt, Homo sapiens
  misc_RNA (1)...(19): siRNA sense strand
ggucaagcuuuccguguac

SEQ ID NO: 561645 - RNA, 19 nt, Homo sapiens
  misc_RNA (1)...(19): siRNA sense strand
uaaagaacuggaagaagga

SEQ ID NO: 561646 - RNA, 19 nt, Homo sapiens
  misc_RNA (1)...(19): siRNA sense strand
cucagugucuuacucauug

SEQ ID NO: 561647 - RNA, 19 nt, Homo sapiens
  misc_RNA (1)...(19): siRNA sense strand
ucaagcugaugaacgaaau

SEQ ID NO: 561648 - RNA, 19 nt, Homo sapiens
  misc_RNA (1)...(19): siRNA sense strand
ggaucaugcucacuuucug

SEQ ID NO: 561649 - RNA, 19 nt, Homo sapiens
  misc_RNA (1)...(19): siRNA sense strand
cagcagcuccuccuccuau

SEQ ID NO: 561650 - RNA, 19 nt, Homo sapiens
  misc_RNA (1)...(19): siRNA sense strand
gcacagcaugagcuacuug

SEQ ID NO: 561651 - RNA, 19 nt, Homo sapiens
  misc_RNA (1)...(19): siRNA sense strand
ggaucaaagugcuaaagcu

SEQ ID NO: 561652 - RNA, 19 nt, Homo sapiens
  misc_RNA (1)...(19): siRNA sense strand
gaugaacgaaauucucaau

SEQ ID NO: 561653 - RNA, 19 nt, Homo sapiens
  misc_RNA (1)...(19): siRNA sense strand
gcccgucaaugcugugaug

SEQ ID NO: 561654 - RNA, 19 nt, Homo sapiens
  misc_RNA (1)...(19): siRNA sense strand
augaggagguggaggcuuu

SEQ ID NO: 561655 - RNA, 19 nt, Homo sapiens
  misc_RNA (1)...(19): siRNA sense strand
ccaagguggaugcgaauga

SEQ ID NO: 561656 - RNA, 19 nt, Homo sapiens
  misc_RNA (1)...(19): siRNA sense strand
ucaaacgccugaggaucuu

SEQ ID NO: 561657 - RNA, 19 nt, Homo sapiens
  misc_RNA (1)...(19): siRNA sense strand
ggucagcccaacucucuug

SEQ ID NO: 561658 - RNA, 19 nt, Homo sapiens
  misc_RNA (1)...(19): siRNA sense strand
gaccaugaaugugcagaag

SEQ ID NO: 561659 - RNA, 19 nt, Homo sapiens
  misc_RNA (1)...(19): siRNA sense strand
auuggugccugcaucguua

SEQ ID NO: 561660 - RNA, 19 nt, Homo sapiens
  misc_RNA (1)...(19): siRNA sense strand
gggaaggaagcaaagcaaa

SEQ ID NO: 561661 - RNA, 19 nt, Homo sapiens
  misc_RNA (1)...(19): siRNA sense strand
gggcccuacuuccucauga

SEQ ID NO: 561662 - RNA, 19 nt, Homo sapiens
  misc_RNA (1)...(19): siRNA sense strand
guucaugggcucccuguuc

SEQ ID NO: 561663 - RNA, 19 nt, Homo sapiens
  misc_RNA (1)...(19): siRNA sense strand
cagggcaggucaagcuuuc

SEQ ID NO: 561664 - RNA, 19 nt, Homo sapiens
  misc_RNA (1)...(19): siRNA sense strand
ugauggcgaugaagaccaa

SEQ ID NO: 561665 - RNA, 19 nt, Homo sapiens
  misc_RNA (1)...(19): siRNA sense strand
gagauugucaaccucaugu

SEQ ID NO: 561666 - RNA, 19 nt, Homo sapiens
  misc_RNA (1)...(19): siRNA sense strand
acaccgugcugcuguuugu

SEQ ID NO: 561667 - RNA, 19 nt, Homo sapiens
  misc_RNA (1)...(19): siRNA sense strand
ucuuaaaguugcucaucaa

SEQ ID NO: 561668 - RNA, 19 nt, Homo sapiens
  misc_RNA (1)...(19): siRNA sense strand
ucccggaggucaucaagau

SEQ ID NO: 561669 - RNA, 19 nt, Homo sapiens
  misc_RNA (1)...(19): siRNA sense strand
ggacagugcagggaagcaa

SEQ ID NO: 561670 - RNA, 19 nt, Homo sapiens
  misc_RNA (1)...(19): siRNA sense strand
ggagguggaggcuuugauc

SEQ ID NO: 561671 - RNA, 19 nt, Homo sapiens
  misc_RNA (1)...(19): siRNA sense strand
gcaggucaccacguacuug

SEQ ID NO: 561672 - RNA, 19 nt, Homo sapiens
  misc_RNA (1)...(19): siRNA sense strand
agaaggaggagaccuggaa

SEQ ID NO: 561673 - RNA, 19 nt, Homo sapiens
  misc_RNA (1)...(19): siRNA sense strand
ucgugugggugccuuguuu

SEQ ID NO: 561674 - RNA, 19 nt, Homo sapiens
  misc_RNA (1)...(19): siRNA sense strand
ccacaucugcuucgucagu

SEQ ID NO: 561675 - RNA, 19 nt, Homo sapiens
  misc_RNA (1)...(19): siRNA sense strand
gcaccaguacuuccacauc

SEQ ID NO: 561676 - RNA, 19 nt, Homo sapiens
  misc_RNA (1)...(19): siRNA sense strand
gaugacaccucucaacaaa

SEQ ID NO: 561677 - RNA, 19 nt, Homo sapiens
  misc_RNA (1)...(19): siRNA sense strand
uaaaguugcucaucaaguu

SEQ ID NO: 561678 - RNA, 19 nt, Homo sapiens
  misc_RNA (1)...(19): siRNA sense strand
ggaagcaacugcagagaca

SEQ ID NO: 561679 - RNA, 19 nt, Homo sapiens
  misc_RNA (1)...(19): siRNA sense strand
ccaaggagcuggacacagu

SEQ ID NO: 561680 - RNA, 19 nt, Homo sapiens
  misc_RNA (1)...(19): siRNA sense strand
caacgagucugccgaagga

SEQ ID NO: 561681 - RNA, 19 nt, Homo sapiens
  misc_RNA (1)...(19): siRNA sense strand
gaucaagaccgcugucauu

SEQ ID NO: 561682 - RNA, 19 nt, Homo sapiens
  misc_RNA (1)...(19): siRNA sense strand
caaagcaaauggagaaugg

SEQ ID NO: 561683 - RNA, 19 nt, Homo sapiens
  misc_RNA (1)...(19): siRNA sense strand
gggcagaccucuucuacuc

SEQ ID NO: 561684 - RNA, 19 nt, Homo sapiens
  misc_RNA (1)...(19): siRNA sense strand
ccacguacauuaacaugau

SEQ ID NO: 561685 - RNA, 19 nt, Homo sapiens
  misc_RNA (1)...(19): siRNA sense strand
gaccgaggcuacauucaga

SEQ ID NO: 561686 - RNA, 19 nt, Homo sapiens
  misc_RNA (1)...(19): siRNA sense strand
uggagaggcucaaggagua

SEQ ID NO: 561687 - RNA, 19 nt, Homo sapiens
  misc_RNA (1)...(19): siRNA sense strand
gcagaccucuucuacucuu

SEQ ID NO: 561688 - RNA, 19 nt, Homo sapiens
  misc_RNA (1)...(19): siRNA sense strand
gaaggaagcaaagcaaaug

SEQ ID NO: 561689 - RNA, 19 nt, Homo sapiens
  misc_RNA (1)...(19): siRNA sense strand
ggccgcagaucuuaaaguu

SEQ ID NO: 561690 - RNA, 19 nt, Homo sapiens
  misc_RNA (1)...(19): siRNA sense strand
gaccuccgcuucaagauca

SEQ ID NO: 561691 - RNA, 19 nt, Homo sapiens
  misc_RNA (1)...(19): siRNA sense strand
aaggagaaauccaggagua

SEQ ID NO: 561692 - RNA, 19 nt, Homo sapiens
  misc_RNA (1)...(19): siRNA sense strand
caucugaaauggaaaccaa

SEQ ID NO: 561693 - RNA, 19 nt, Homo sapiens
  misc_RNA (1)...(19): siRNA sense strand
gcaacugcaucguucuguu

SEQ ID NO: 561694 - RNA, 19 nt, Homo sapiens
  misc_RNA (1)...(19): siRNA sense strand
ggaaagaagucggggcaua

SEQ ID NO: 561695 - RNA, 19 nt, Homo sapiens
  misc_RNA (1)...(19): siRNA sense strand
ugaacgaaauucucaaugg

SEQ ID NO: 561696 - RNA, 19 nt, Homo sapiens
  misc_RNA (1)...(19): siRNA sense strand
caagcuagaccaugaaugu

SEQ ID NO: 561697 - RNA, 19 nt, Homo sapiens
  misc_RNA (1)...(19): siRNA sense strand
guacucggaugaagaaguc

SEQ ID NO: 561698 - RNA, 19 nt, Homo sapiens
  misc_RNA (1)...(19): siRNA sense strand
gagaggaccuggacuucgu

SEQ ID NO: 561699 - RNA, 19 nt, Homo sapiens
  misc_RNA (1)...(19): siRNA sense strand
caacugcaucguucuguuu

SEQ ID NO: 561700 - RNA, 19 nt, Homo sapiens
  misc_RNA (1)...(19): siRNA sense strand
ggacuuggccacguacauu

SEQ ID NO: 561701 - RNA, 19 nt, Homo sapiens
  misc_RNA (1)...(19): siRNA sense strand
caacagcaccgcagaacug

SEQ ID NO: 561702 - RNA, 19 nt, Homo sapiens
  misc_RNA (1)...(19): siRNA sense strand
ggaaggaagcaaagcaaau

SEQ ID NO: 561703 - RNA, 19 nt, Homo sapiens
  misc_RNA (1)...(19): siRNA sense strand
gaucaaagugcuaaagcuu

SEQ ID NO: 561704 - RNA, 19 nt, Homo sapiens
  misc_RNA (1)...(19): siRNA sense strand
ugaaggugcugaagaaguc

SEQ ID NO: 561705 - RNA, 19 nt, Homo sapiens
  misc_RNA (1)...(19): siRNA sense strand
gcagagaggucuuuucuac

SEQ ID NO: 561706 - RNA, 19 nt, Homo sapiens
  misc_RNA (1)...(19): siRNA sense strand
ggaucuuucucucccauga

SEQ ID NO: 561707 - RNA, 19 nt, Homo sapiens
  misc_RNA (1)...(19): siRNA sense strand
cgaugaagaccaagacgua

SEQ ID NO: 561708 - RNA, 19 nt, Homo sapiens
  misc_RNA (1)...(19): siRNA sense strand
gcaucaacaucgccaagau

SEQ ID NO: 561709 - RNA, 19 nt, Homo sapiens
  misc_RNA (1)...(19): siRNA sense strand
gcugguagcccuagugugu

SEQ ID NO: 561710 - RNA, 19 nt, Homo sapiens
  misc_RNA (1)...(19): siRNA sense strand
agaaccagaaggccuauua

SEQ ID NO: 561711 - RNA, 19 nt, Homo sapiens
  misc_RNA (1)...(19): siRNA sense strand
ggacucaggagcacacgaa

SEQ ID NO: 561712 - RNA, 19 nt, Homo sapiens
  misc_RNA (1)...(19): siRNA sense strand
ccugggagcuggcauucaa

SEQ ID NO: 561713 - RNA, 19 nt, Homo sapiens
  misc_RNA (1)...(19): siRNA sense strand
cgaaagagaguuccaaggu

SEQ ID NO: 561714 - RNA, 19 nt, Homo sapiens
  misc_RNA (1)...(19): siRNA sense strand
uggcugagauggacaaagu

SEQ ID NO: 561715 - RNA, 19 nt, Homo sapiens
  misc_RNA (1)...(19): siRNA sense strand
gaagucugccuaccuguca

SEQ ID NO: 561716 - RNA, 19 nt, Homo sapiens
  misc_RNA (1)...(19): siRNA sense strand
cauugcaggucaccacgua

SEQ ID NO: 561717 - RNA, 19 nt, Homo sapiens
  misc_RNA (1)...(19): siRNA sense strand
cugacaagcuagaccauga

SEQ ID NO: 561718 - RNA, 19 nt, Homo sapiens
  misc_RNA (1)...(19): siRNA sense strand
ucuguuugcugcccuguuu

SEQ ID NO: 561719 - RNA, 19 nt, Homo sapiens
  misc_RNA (1)...(19): siRNA sense strand
gaccuggacuucguucuca

SEQ ID NO: 561720 - RNA, 19 nt, Homo sapiens
  misc_RNA (1)...(19): siRNA sense strand
gcaaagacaaucggaucaa

SEQ ID NO: 561721 - RNA, 19 nt, Homo sapiens
  misc_RNA (1)...(19): siRNA sense strand
gaaauucucaaugggauca

SEQ ID NO: 561722 - RNA, 19 nt, Homo sapiens
  misc_RNA (1)...(19): siRNA sense strand
caaagacaaucggaucaag

SEQ ID NO: 561723 - RNA, 19 nt, Homo sapiens
  misc_RNA (1)...(19): siRNA sense strand
cucaugagcuucuucuuca

SEQ ID NO: 561724 - RNA, 19 nt, Homo sapiens
  misc_RNA (1)...(19): siRNA sense strand
aaggagagaucaucaucga

SEQ ID NO: 561725 - RNA, 19 nt, Homo sapiens
  misc_RNA (1)...(19): siRNA sense strand
gagcugaaggugcugaaga

SEQ ID NO: 561726 - RNA, 19 nt, Homo sapiens
  misc_RNA (1)...(19): siRNA sense strand
uggaaugucacguggaaua

SEQ ID NO: 561727 - RNA, 19 nt, Homo sapiens
  misc_RNA (1)...(19): siRNA sense strand
ggaaggcccuggugaucac

SEQ ID NO: 561728 - RNA, 19 nt, Homo sapiens
  misc_RNA (1)...(19): siRNA sense strand
ccacgcugcuugcuaccuu

SEQ ID NO: 561729 - RNA, 19 nt, Homo sapiens
  misc_RNA (1)...(19): siRNA sense strand
gcgagugucucccucaaac

SEQ ID NO: 561730 - RNA, 19 nt, Homo sapiens
  misc_RNA (1)...(19): siRNA sense strand
ggacacgucggaacaaguc

SEQ ID NO: 561731 - RNA, 19 nt, Homo sapiens
  misc_RNA (1)...(19): siRNA sense strand
gaguggaauuccggaacua

SEQ ID NO: 561732 - RNA, 19 nt, Homo sapiens
  misc_RNA (1)...(19): siRNA sense strand
caaggaguauucagagacu

SEQ ID NO: 561733 - RNA, 19 nt, Homo sapiens
  misc_RNA (1)...(19): siRNA sense strand
cacaagggaucgccguguu

SEQ ID NO: 561734 - RNA, 19 nt, Homo sapiens
  misc_RNA (1)...(19): siRNA sense strand
gcgcuggcuuccaacuauu

SEQ ID NO: 561735 - RNA, 19 nt, Homo sapiens
  misc_RNA (1)...(19): siRNA sense strand
guacugggacuacaugaag

SEQ ID NO: 561736 - RNA, 19 nt, Homo sapiens
  misc_RNA (1)...(19): siRNA sense strand
gcaaagcaaauggagaaug

SEQ ID NO: 561737 - RNA, 19 nt, Homo sapiens
  misc_RNA (1)...(19): siRNA sense strand
aagcaaagcaaauggagaa

SEQ ID NO: 561738 - RNA, 19 nt, Homo sapiens
  misc_RNA (1)...(19): siRNA sense strand
gcagguggacgucaucauc

SEQ ID NO: 561739 - RNA, 19 nt, Homo sapiens
  misc_RNA (1)...(19): siRNA sense strand
gacuuggccacguacauua

SEQ ID NO: 561740 - RNA, 19 nt, Homo sapiens
  misc_RNA (1)...(19): siRNA sense strand
ucauggacuuggccacgua

SEQ ID NO: 561741 - RNA, 19 nt, Homo sapiens
  misc_RNA (1)...(19): siRNA sense strand
gaaggaaugcgccaagacu

SEQ ID NO: 561742 - RNA, 19 nt, Homo sapiens
  misc_RNA (1)...(19): siRNA sense strand
cagggaucaugcucacuuu

SEQ ID NO: 561743 - RNA, 19 nt, Homo sapiens
  misc_RNA (1)...(19): siRNA sense strand
ccaguacucggaugaagaa

SEQ ID NO: 561744 - RNA, 19 nt, Homo sapiens
  misc_RNA (1)...(19): siRNA sense strand
ggucaagcuuuccguguac

SEQ ID NO: 561745 - RNA, 19 nt, Homo sapiens
  misc_RNA (1)...(19): siRNA sense strand
uaaagaacuggaagaagga

SEQ ID NO: 561746 - RNA, 19 nt, Homo sapiens
  misc_RNA (1)...(19): siRNA sense strand
cucagugucuuacucauug

SEQ ID NO: 561747 - RNA, 19 nt, Homo sapiens
  misc_RNA (1)...(19): siRNA sense strand
ucaagcugaugaacgaaau

SEQ ID NO: 561748 - RNA, 19 nt, Homo sapiens
  misc_RNA (1)...(19): siRNA sense strand
ggaucaugcucacuuucug

SEQ ID NO: 561749 - RNA, 19 nt, Homo sapiens
  misc_RNA (1)...(19): siRNA sense strand
cagcagcuccuccuccuau

SEQ ID NO: 561750 - RNA, 19 nt, Homo sapiens
  misc_RNA (1)...(19): siRNA sense strand
gcacagcaugagcuacuug

SEQ ID NO: 561751 - RNA, 19 nt, Homo sapiens
  misc_RNA (1)...(19): siRNA sense strand
ggaucaaagugcuaaagcu

SEQ ID NO: 561752 - RNA, 19 nt, Homo sapiens
  misc_RNA (1)...(19): siRNA sense strand
gaugaacgaaauucucaau

SEQ ID NO: 561753 - RNA, 19 nt, Homo sapiens
  misc_RNA (1)...(19): siRNA sense strand
gcccgucaaugcugugaug

SEQ ID NO: 561754 - RNA, 19 nt, Homo sapiens
  misc_RNA (1)...(19): siRNA sense strand
augaggagguggaggcuuu

SEQ ID NO: 561755 - RNA, 19 nt, Homo sapiens
  misc_RNA (1)...(19): siRNA sense strand
ccaagguggaugcgaauga

SEQ ID NO: 561756 - RNA, 19 nt, Homo sapiens
  misc_RNA (1)...(19): siRNA sense strand
ucaaacgccugaggaucuu

SEQ ID NO: 561757 - RNA, 19 nt, Homo sapiens
  misc_RNA (1)...(19): siRNA sense strand
ggucagcccaacucucuug

SEQ ID NO: 561758 - RNA, 19 nt, Homo sapiens
  misc_RNA (1)...(19): siRNA sense strand
gaccaugaaugugcagaag

SEQ ID NO: 561759 - RNA, 19 nt, Homo sapiens
  misc_RNA (1)...(19): siRNA sense strand
auuggugccugcaucguua

SEQ ID NO: 561760 - RNA, 19 nt, Homo sapiens
  misc_RNA (1)...(19): siRNA sense strand
gggaaggaagcaaagcaaa

SEQ ID NO: 561761 - RNA, 19 nt, Homo sapiens
  misc_RNA (1)...(19): siRNA sense strand
gggcccuacuuccucauga

SEQ ID NO: 561762 - RNA, 19 nt, Homo sapiens
  misc_RNA (1)...(19): siRNA sense strand
guucaugggcucccuguuc

SEQ ID NO: 561763 - RNA, 19 nt, Homo sapiens
  misc_RNA (1)...(19): siRNA sense strand
cagggcaggucaagcuuuc

SEQ ID NO: 561764 - RNA, 19 nt, Homo sapiens
  misc_RNA (1)...(19): siRNA sense strand
ugauggcgaugaagaccaa

SEQ ID NO: 561765 - RNA, 19 nt, Homo sapiens
  misc_RNA (1)...(19): siRNA sense strand
gagauugucaaccucaugu

SEQ ID NO: 561766 - RNA, 19 nt, Homo sapiens
  misc_RNA (1)...(19): siRNA sense strand
acaccgugcugcuguuugu

SEQ ID NO: 561767 - RNA, 19 nt, Homo sapiens
  misc_RNA (1)...(19): siRNA sense strand
ucuuaaaguugcucaucaa

SEQ ID NO: 561768 - RNA, 19 nt, Homo sapiens
  misc_RNA (1)...(19): siRNA sense strand
ucccggaggucaucaagau

SEQ ID NO: 561769 - RNA, 19 nt, Homo sapiens
  misc_RNA (1)...(19): siRNA sense strand
ggacagugcagggaagcaa

SEQ ID NO: 561770 - RNA, 19 nt, Homo sapiens
  misc_RNA (1)...(19): siRNA sense strand
ggagguggaggcuuugauc

SEQ ID NO: 561771 - RNA, 19 nt, Homo sapiens
  misc_RNA (1)...(19): siRNA sense strand
gcaggucaccacguacuug

SEQ ID NO: 561772 - RNA, 19 nt, Homo sapiens
  misc_RNA (1)...(19): siRNA sense strand
agaaggaggagaccuggaa

SEQ ID NO: 561773 - RNA, 19 nt, Homo sapiens
  misc_RNA (1)...(19): siRNA sense strand
ucgugugggugccuuguuu

SEQ ID NO: 561774 - RNA, 19 nt, Homo sapiens
  misc_RNA (1)...(19): siRNA sense strand
ccacaucugcuucgucagu

SEQ ID NO: 561775 - RNA, 19 nt, Homo sapiens
  misc_RNA (1)...(19): siRNA sense strand
gcaccaguacuuccacauc

SEQ ID NO: 561776 - RNA, 19 nt, Homo sapiens
  misc_RNA (1)...(19): siRNA sense strand
gaugacaccucucaacaaa

SEQ ID NO: 561777 - RNA, 19 nt, Homo sapiens
  misc_RNA (1)...(19): siRNA sense strand
uaaaguugcucaucaaguu

SEQ ID NO: 561778 - RNA, 19 nt, Homo sapiens
  misc_RNA (1)...(19): siRNA sense strand
ggaagcaacugcagagaca

SEQ ID NO: 561779 - RNA, 19 nt, Homo sapiens
  misc_RNA (1)...(19): siRNA sense strand
ccaaggagcuggacacagu

SEQ ID NO: 561780 - RNA, 19 nt, Homo sapiens
  misc_RNA (1)...(19): siRNA sense strand
caacgagucugccgaagga

SEQ ID NO: 561781 - RNA, 19 nt, Homo sapiens
  misc_RNA (1)...(19): siRNA sense strand
gaucaagaccgcugucauu

SEQ ID NO: 561782 - RNA, 19 nt, Homo sapiens
  misc_RNA (1)...(19): siRNA sense strand
caaagcaaauggagaaugg

SEQ ID NO: 561783 - RNA, 19 nt, Homo sapiens
  misc_RNA (1)...(19): siRNA sense strand
gggcagaccucuucuacuc

SEQ ID NO: 561784 - RNA, 19 nt, Homo sapiens
  misc_RNA (1)...(19): siRNA sense strand
ccacguacauuaacaugau

SEQ ID NO: 561785 - RNA, 19 nt, Homo sapiens
  misc_RNA (1)...(19): siRNA sense strand
gaccgaggcuacauucaga

SEQ ID NO: 561786 - RNA, 19 nt, Homo sapiens
  misc_RNA (1)...(19): siRNA sense strand
uggagaggcucaaggagua

SEQ ID NO: 561787 - RNA, 19 nt, Homo sapiens
  misc_RNA (1)...(19): siRNA sense strand
gcagaccucuucuacucuu

SEQ ID NO: 561788 - RNA, 19 nt, Homo sapiens
  misc_RNA (1)...(19): siRNA sense strand
gaaggaagcaaagcaaaug

SEQ ID NO: 561789 - RNA, 19 nt, Homo sapiens
  misc_RNA (1)...(19): siRNA sense strand
ggccgcagaucuuaaaguu

SEQ ID NO: 561790 - RNA, 19 nt, Homo sapiens
  misc_RNA (1)...(19): siRNA sense strand
gaccuccgcuucaagauca

SEQ ID NO: 561791 - RNA, 19 nt, Homo sapiens
  misc_RNA (1)...(19): siRNA sense strand
aaggagaaauccaggagua

SEQ ID NO: 561792 - RNA, 19 nt, Homo sapiens
  misc_RNA (1)...(19): siRNA sense strand
caucugaaauggaaaccaa

SEQ ID NO: 561793 - RNA, 19 nt, Homo sapiens
  misc_RNA (1)...(19): siRNA sense strand
gcaacugcaucguucuguu

SEQ ID NO: 561794 - RNA, 19 nt, Homo sapiens
  misc_RNA (1)...(19): siRNA sense strand
ggaaagaagucggggcaua

SEQ ID NO: 561795 - RNA, 19 nt, Homo sapiens
  misc_RNA (1)...(19): siRNA sense strand
ugaacgaaauucucaaugg

SEQ ID NO: 561796 - RNA, 19 nt, Homo sapiens
  misc_RNA (1)...(19): siRNA sense strand
caagcuagaccaugaaugu

SEQ ID NO: 561797 - RNA, 19 nt, Homo sapiens
  misc_RNA (1)...(19): siRNA sense strand
guacucggaugaagaaguc

SEQ ID NO: 561798 - RNA, 19 nt, Homo sapiens
  misc_RNA (1)...(19): siRNA sense strand
gagaggaccuggacuucgu

SEQ ID NO: 561799 - RNA, 19 nt, Homo sapiens
  misc_RNA (1)...(19): siRNA sense strand
caacugcaucguucuguuu

SEQ ID NO: 561800 - RNA, 19 nt, Homo sapiens
  misc_RNA (1)...(19): siRNA sense strand
ggacuuggccacguacauu

SEQ ID NO: 561801 - RNA, 19 nt, Homo sapiens
  misc_RNA (1)...(19): siRNA sense strand
caacagcaccgcagaacug

SEQ ID NO: 561802 - RNA, 19 nt, Homo sapiens
  misc_RNA (1)...(19): siRNA sense strand
ggaaggaagcaaagcaaau

SEQ ID NO: 561803 - RNA, 19 nt, Homo sapiens
  misc_RNA (1)...(19): siRNA sense strand
gaucaaagugcuaaagcuu

SEQ ID NO: 561804 - RNA, 19 nt, Homo sapiens
  misc_RNA (1)...(19): siRNA sense strand
ugaaggugcugaagaaguc

SEQ ID NO: 561805 - RNA, 19 nt, Homo sapiens
  misc_RNA (1)...(19): siRNA sense strand
gcagagaggucuuuucuac

SEQ ID NO: 561806 - RNA, 19 nt, Homo sapiens
  misc_RNA (1)...(19): siRNA sense strand
ggaucuuucucucccauga

SEQ ID NO: 561807 - RNA, 19 nt, Homo sapiens
  misc_RNA (1)...(19): siRNA sense strand
cgaugaagaccaagacgua

SEQ ID NO: 561808 - RNA, 19 nt, Homo sapiens
  misc_RNA (1)...(19): siRNA sense strand
gcaucaacaucgccaagau

SEQ ID NO: 561809 - RNA, 19 nt, Homo sapiens
  misc_RNA (1)...(19): siRNA sense strand
gcugguagcccuagugugu

SEQ ID NO: 561810 - RNA, 19 nt, Homo sapiens
  misc_RNA (1)...(19): siRNA sense strand
agaaccagaaggccuauua

SEQ ID NO: 561811 - RNA, 19 nt, Homo sapiens
  misc_RNA (1)...(19): siRNA sense strand
ggacucaggagcacacgaa

SEQ ID NO: 561812 - RNA, 19 nt, Homo sapiens
  misc_RNA (1)...(19): siRNA sense strand
ccugggagcuggcauucaa

SEQ ID NO: 561813 - RNA, 19 nt, Homo sapiens
  misc_RNA (1)...(19): siRNA sense strand
cgaaagagaguuccaaggu

SEQ ID NO: 561814 - RNA, 19 nt, Homo sapiens
  misc_RNA (1)...(19): siRNA sense strand
uggcugagauggacaaagu

SEQ ID NO: 561815 - RNA, 19 nt, Homo sapiens
  misc_RNA (1)...(19): siRNA sense strand
gaagucugccuaccuguca

SEQ ID NO: 561816 - RNA, 19 nt, Homo sapiens
  misc_RNA (1)...(19): siRNA sense strand
cauugcaggucaccacgua

SEQ ID NO: 561817 - RNA, 19 nt, Homo sapiens
  misc_RNA (1)...(19): siRNA sense strand
cugacaagcuagaccauga

SEQ ID NO: 561818 - RNA, 19 nt, Homo sapiens
  misc_RNA (1)...(19): siRNA sense strand
ucuguuugcugcccuguuu

SEQ ID NO: 561819 - RNA, 19 nt, Homo sapiens
  misc_RNA (1)...(19): siRNA sense strand
gaccuggacuucguucuca

SEQ ID NO: 561820 - RNA, 19 nt, Homo sapiens
  misc_RNA (1)...(19): siRNA sense strand
gcaaagacaaucggaucaa

SEQ ID NO: 561821 - RNA, 19 nt, Homo sapiens
  misc_RNA (1)...(19): siRNA sense strand
gaaauucucaaugggauca

SEQ ID NO: 561822 - RNA, 19 nt, Homo sapiens
  misc_RNA (1)...(19): siRNA sense strand
caaagacaaucggaucaag

SEQ ID NO: 561823 - RNA, 19 nt, Homo sapiens
  misc_RNA (1)...(19): siRNA sense strand
cucaugagcuucuucuuca

SEQ ID NO: 561824 - RNA, 19 nt, Homo sapiens
  misc_RNA (1)...(19): siRNA sense strand
aaggagagaucaucaucga

SEQ ID NO: 561825 - RNA, 19 nt, Homo sapiens
  misc_RNA (1)...(19): siRNA sense strand
gagcugaaggugcugaaga

SEQ ID NO: 561826 - RNA, 19 nt, Homo sapiens
  misc_RNA (1)...(19): siRNA sense strand
uggaaugucacguggaaua

SEQ ID NO: 561827 - RNA, 19 nt, Homo sapiens
  misc_RNA (1)...(19): siRNA sense strand
ggaaggcccuggugaucac

SEQ ID NO: 561828 - RNA, 19 nt, Homo sapiens
  misc_RNA (1)...(19): siRNA sense strand
ccacgcugcuugcuaccuu

SEQ ID NO: 561829 - RNA, 19 nt, Homo sapiens
  misc_RNA (1)...(19): siRNA sense strand
gcgagugucucccucaaac

SEQ ID NO: 561830 - RNA, 19 nt, Homo sapiens
  misc_RNA (1)...(19): siRNA sense strand
ggacacgucggaacaaguc

SEQ ID NO: 561831 - RNA, 19 nt, Homo sapiens
  misc_RNA (1)...(19): siRNA sense strand
gaguggaauuccggaacua

SEQ ID NO: 561832 - RNA, 19 nt, Homo sapiens
  misc_RNA (1)...(19): siRNA sense strand
caaggaguauucagagacu

SEQ ID NO: 561833 - RNA, 19 nt, Homo sapiens
  misc_RNA (1)...(19): siRNA sense strand
cacaagggaucgccguguu

SEQ ID NO: 561834 - RNA, 19 nt, Homo sapiens
  misc_RNA (1)...(19): siRNA sense strand
gcgcuggcuuccaacuauu

SEQ ID NO: 561835 - RNA, 19 nt, Homo sapiens
  misc_RNA (1)...(19): siRNA sense strand
guacugggacuacaugaag

SEQ ID NO: 561836 - RNA, 19 nt, Homo sapiens
  misc_RNA (1)...(19): siRNA sense strand
gcaaagcaaauggagaaug

SEQ ID NO: 561837 - RNA, 19 nt, Homo sapiens
  misc_RNA (1)...(19): siRNA sense strand
aagcaaagcaaauggagaa

SEQ ID NO: 561838 - RNA, 19 nt, Homo sapiens
  misc_RNA (1)...(19): siRNA sense strand
gcagguggacgucaucauc

SEQ ID NO: 561839 - RNA, 19 nt, Homo sapiens
  misc_RNA (1)...(19): siRNA sense strand
gacuuggccacguacauua

SEQ ID NO: 561840 - RNA, 19 nt, Homo sapiens
  misc_RNA (1)...(19): siRNA sense strand
ucauggacuuggccacgua

SEQ ID NO: 561841 - RNA, 19 nt, Homo sapiens
  misc_RNA (1)...(19): siRNA sense strand
gaaggaaugcgccaagacu

SEQ ID NO: 561842 - RNA, 19 nt, Homo sapiens
  misc_RNA (1)...(19): siRNA sense strand
cagggaucaugcucacuuu

SEQ ID NO: 561843 - RNA, 19 nt, Homo sapiens
  misc_RNA (1)...(19): siRNA sense strand
ccaguacucggaugaagaa

SEQ ID NO: 561844 - RNA, 19 nt, Homo sapiens
  misc_RNA (1)...(19): siRNA sense strand
ggucaagcuuuccguguac

SEQ ID NO: 561845 - RNA, 19 nt, Homo sapiens
  misc_RNA (1)...(19): siRNA sense strand
uaaagaacuggaagaagga

SEQ ID NO: 561846 - RNA, 19 nt, Homo sapiens
  misc_RNA (1)...(19): siRNA sense strand
cucagugucuuacucauug

SEQ ID NO: 561847 - RNA, 19 nt, Homo sapiens
  misc_RNA (1)...(19): siRNA sense strand
ucaagcugaugaacgaaau

SEQ ID NO: 561848 - RNA, 19 nt, Homo sapiens
  misc_RNA (1)...(19): siRNA sense strand
ggaucaugcucacuuucug

SEQ ID NO: 561849 - RNA, 19 nt, Homo sapiens
  misc_RNA (1)...(19): siRNA sense strand
cagcagcuccuccuccuau

SEQ ID NO: 561850 - RNA, 19 nt, Homo sapiens
  misc_RNA (1)...(19): siRNA sense strand
gcacagcaugagcuacuug

SEQ ID NO: 561851 - RNA, 19 nt, Homo sapiens
  misc_RNA (1)...(19): siRNA sense strand
ggaucaaagugcuaaagcu

SEQ ID NO: 561852 - RNA, 19 nt, Homo sapiens
  misc_RNA (1)...(19): siRNA sense strand
gaugaacgaaauucucaau

SEQ ID NO: 561853 - RNA, 19 nt, Homo sapiens
  misc_RNA (1)...(19): siRNA sense strand
gcccgucaaugcugugaug

SEQ ID NO: 561854 - RNA, 19 nt, Homo sapiens
  misc_RNA (1)...(19): siRNA sense strand
augaggagguggaggcuuu

SEQ ID NO: 561855 - RNA, 19 nt, Homo sapiens
  misc_RNA (1)...(19): siRNA sense strand
ccaagguggaugcgaauga

SEQ ID NO: 561856 - RNA, 19 nt, Homo sapiens
  misc_RNA (1)...(19): siRNA sense strand
ucaaacgccugaggaucuu

SEQ ID NO: 561857 - RNA, 19 nt, Homo sapiens
  misc_RNA (1)...(19): siRNA sense strand
ggucagcccaacucucuug

SEQ ID NO: 561858 - RNA, 19 nt, Homo sapiens
  misc_RNA (1)...(19): siRNA sense strand
gaccaugaaugugcagaag

SEQ ID NO: 561859 - RNA, 19 nt, Homo sapiens
  misc_RNA (1)...(19): siRNA sense strand
auuggugccugcaucguua

SEQ ID NO: 561860 - RNA, 19 nt, Homo sapiens
  misc_RNA (1)...(19): siRNA sense strand
gggaaggaagcaaagcaaa

SEQ ID NO: 561861 - RNA, 19 nt, Homo sapiens
  misc_RNA (1)...(19): siRNA sense strand
gggcccuacuuccucauga

SEQ ID NO: 561862 - RNA, 19 nt, Homo sapiens
  misc_RNA (1)...(19): siRNA sense strand
guucaugggcucccuguuc

SEQ ID NO: 561863 - RNA, 19 nt, Homo sapiens
  misc_RNA (1)...(19): siRNA sense strand
cagggcaggucaagcuuuc

SEQ ID NO: 561864 - RNA, 19 nt, Homo sapiens
  misc_RNA (1)...(19): siRNA sense strand
ugauggcgaugaagaccaa

SEQ ID NO: 561865 - RNA, 19 nt, Homo sapiens
  misc_RNA (1)...(19): siRNA sense strand
gagauugucaaccucaugu

SEQ ID NO: 561866 - RNA, 19 nt, Homo sapiens
  misc_RNA (1)...(19): siRNA sense strand
acaccgugcugcuguuugu

SEQ ID NO: 561867 - RNA, 19 nt, Homo sapiens
  misc_RNA (1)...(19): siRNA sense strand
ucuuaaaguugcucaucaa

SEQ ID NO: 561868 - RNA, 19 nt, Homo sapiens
  misc_RNA (1)...(19): siRNA sense strand
ucccggaggucaucaagau

SEQ ID NO: 561869 - RNA, 19 nt, Homo sapiens
  misc_RNA (1)...(19): siRNA sense strand
ggacagugcagggaagcaa

SEQ ID NO: 561870 - RNA, 19 nt, Homo sapiens
  misc_RNA (1)...(19): siRNA sense strand
ggagguggaggcuuugauc

SEQ ID NO: 561871 - RNA, 19 nt, Homo sapiens
  misc_RNA (1)...(19): siRNA sense strand
gcaggucaccacguacuug

SEQ ID NO: 561872 - RNA, 19 nt, Homo sapiens
  misc_RNA (1)...(19): siRNA sense strand
agaaggaggagaccuggaa

SEQ ID NO: 561873 - RNA, 19 nt, Homo sapiens
  misc_RNA (1)...(19): siRNA sense strand
ucgugugggugccuuguuu

SEQ ID NO: 561874 - RNA, 19 nt, Homo sapiens
  misc_RNA (1)...(19): siRNA sense strand
ccacaucugcuucgucagu

SEQ ID NO: 561875 - RNA, 19 nt, Homo sapiens
  misc_RNA (1)...(19): siRNA sense strand
gcaccaguacuuccacauc

SEQ ID NO: 561876 - RNA, 19 nt, Homo sapiens
  misc_RNA (1)...(19): siRNA sense strand
gaugacaccucucaacaaa

SEQ ID NO: 561877 - RNA, 19 nt, Homo sapiens
  misc_RNA (1)...(19): siRNA sense strand
uaaaguugcucaucaaguu

SEQ ID NO: 561878 - RNA, 19 nt, Homo sapiens
  misc_RNA (1)...(19): siRNA sense strand
ggaagcaacugcagagaca

SEQ ID NO: 561879 - RNA, 19 nt, Homo sapiens
  misc_RNA (1)...(19): siRNA sense strand
ccaaggagcuggacacagu

SEQ ID NO: 561880 - RNA, 19 nt, Homo sapiens
  misc_RNA (1)...(19): siRNA sense strand
caacgagucugccgaagga

SEQ ID NO: 561881 - RNA, 19 nt, Homo sapiens
  misc_RNA (1)...(19): siRNA sense strand
gaucaagaccgcugucauu

SEQ ID NO: 561882 - RNA, 19 nt, Homo sapiens
  misc_RNA (1)...(19): siRNA sense strand
caaagcaaauggagaaugg

SEQ ID NO: 561883 - RNA, 19 nt, Homo sapiens
  misc_RNA (1)...(19): siRNA sense strand
gggcagaccucuucuacuc

SEQ ID NO: 561884 - RNA, 19 nt, Homo sapiens
  misc_RNA (1)...(19): siRNA sense strand
ccacguacauuaacaugau

SEQ ID NO: 561885 - RNA, 19 nt, Homo sapiens
  misc_RNA (1)...(19): siRNA sense strand
gaccgaggcuacauucaga

SEQ ID NO: 561886 - RNA, 19 nt, Homo sapiens
  misc_RNA (1)...(19): siRNA sense strand
uggagaggcucaaggagua

SEQ ID NO: 561887 - RNA, 19 nt, Homo sapiens
  misc_RNA (1)...(19): siRNA sense strand
gcagaccucuucuacucuu

SEQ ID NO: 561888 - RNA, 19 nt, Homo sapiens
  misc_RNA (1)...(19): siRNA sense strand
gaaggaagcaaagcaaaug

SEQ ID NO: 561889 - RNA, 19 nt, Homo sapiens
  misc_RNA (1)...(19): siRNA sense strand
ggccgcagaucuuaaaguu

SEQ ID NO: 561890 - RNA, 19 nt, Homo sapiens
  misc_RNA (1)...(19): siRNA sense strand
gaccuccgcuucaagauca

SEQ ID NO: 561891 - RNA, 19 nt, Homo sapiens
  misc_RNA (1)...(19): siRNA sense strand
aaggagaaauccaggagua

SEQ ID NO: 561892 - RNA, 19 nt, Homo sapiens
  misc_RNA (1)...(19): siRNA sense strand
caucugaaauggaaaccaa

SEQ ID NO: 561893 - RNA, 19 nt, Homo sapiens
  misc_RNA (1)...(19): siRNA sense strand
gcaacugcaucguucuguu

SEQ ID NO: 561894 - RNA, 19 nt, Homo sapiens
  misc_RNA (1)...(19): siRNA sense strand
ggaaagaagucggggcaua

SEQ ID NO: 561895 - RNA, 19 nt, Homo sapiens
  misc_RNA (1)...(19): siRNA sense strand
ugaacgaaauucucaaugg

SEQ ID NO: 561896 - RNA, 19 nt, Homo sapiens
  misc_RNA (1)...(19): siRNA sense strand
caagcuagaccaugaaugu

SEQ ID NO: 561897 - RNA, 19 nt, Homo sapiens
  misc_RNA (1)...(19): siRNA sense strand
guacucggaugaagaaguc

SEQ ID NO: 561898 - RNA, 19 nt, Homo sapiens
  misc_RNA (1)...(19): siRNA sense strand
gagaggaccuggacuucgu

SEQ ID NO: 561899 - RNA, 19 nt, Homo sapiens
  misc_RNA (1)...(19): siRNA sense strand
caacugcaucguucuguuu

SEQ ID NO: 561900 - RNA, 19 nt, Homo sapiens
  misc_RNA (1)...(19): siRNA sense strand
ggacuuggccacguacauu

SEQ ID NO: 561901 - RNA, 19 nt, Homo sapiens
  misc_RNA (1)...(19): siRNA sense strand
caacagcaccgcagaacug

SEQ ID NO: 561902 - RNA, 19 nt, Homo sapiens
  misc_RNA (1)...(19): siRNA sense strand
ggaaggaagcaaagcaaau

SEQ ID NO: 561903 - RNA, 19 nt, Homo sapiens
  misc_RNA (1)...(19): siRNA sense strand
gaucaaagugcuaaagcuu

SEQ ID NO: 561904 - RNA, 19 nt, Homo sapiens
  misc_RNA (1)...(19): siRNA sense strand
ugaaggugcugaagaaguc

SEQ ID NO: 561905 - RNA, 19 nt, Homo sapiens
  misc_RNA (1)...(19): siRNA sense strand
gcagagaggucuuuucuac

SEQ ID NO: 561906 - RNA, 19 nt, Homo sapiens
  misc_RNA (1)...(19): siRNA sense strand
ggaucuuucucucccauga

SEQ ID NO: 561907 - RNA, 19 nt, Homo sapiens
  misc_RNA (1)...(19): siRNA sense strand
cgaugaagaccaagacgua

SEQ ID NO: 561908 - RNA, 19 nt, Homo sapiens
  misc_RNA (1)...(19): siRNA sense strand
gcaucaacaucgccaagau

SEQ ID NO: 561909 - RNA, 19 nt, Homo sapiens
  misc_RNA (1)...(19): siRNA sense strand
gcugguagcccuagugugu

SEQ ID NO: 561910 - RNA, 19 nt, Homo sapiens
  misc_RNA (1)...(19): siRNA sense strand
agaaccagaaggccuauua

SEQ ID NO: 561911 - RNA, 19 nt, Homo sapiens
  misc_RNA (1)...(19): siRNA sense strand
ggacucaggagcacacgaa

SEQ ID NO: 561912 - RNA, 19 nt, Homo sapiens
  misc_RNA (1)...(19): siRNA sense strand
ccugggagcuggcauucaa

SEQ ID NO: 561913 - RNA, 19 nt, Homo sapiens
  misc_RNA (1)...(19): siRNA sense strand
cgaaagagaguuccaaggu

SEQ ID NO: 561914 - RNA, 19 nt, Homo sapiens
  misc_RNA (1)...(19): siRNA sense strand
uggcugagauggacaaagu

SEQ ID NO: 561915 - RNA, 19 nt, Homo sapiens
  misc_RNA (1)...(19): siRNA sense strand
gaagucugccuaccuguca

SEQ ID NO: 561916 - RNA, 19 nt, Homo sapiens
  misc_RNA (1)...(19): siRNA sense strand
cauugcaggucaccacgua

SEQ ID NO: 561917 - RNA, 19 nt, Homo sapiens
  misc_RNA (1)...(19): siRNA sense strand
cugacaagcuagaccauga

SEQ ID NO: 561918 - RNA, 19 nt, Homo sapiens
  misc_RNA (1)...(19): siRNA sense strand
ucuguuugcugcccuguuu

SEQ ID NO: 561919 - RNA, 19 nt, Homo sapiens
  misc_RNA (1)...(19): siRNA sense strand
gaccuggacuucguucuca

SEQ ID NO: 561920 - RNA, 19 nt, Homo sapiens
  misc_RNA (1)...(19): siRNA sense strand
gcaaagacaaucggaucaa

SEQ ID NO: 561921 - RNA, 19 nt, Homo sapiens
  misc_RNA (1)...(19): siRNA sense strand
gaaauucucaaugggauca

SEQ ID NO: 561922 - RNA, 19 nt, Homo sapiens
  misc_RNA (1)...(19): siRNA sense strand
caaagacaaucggaucaag

SEQ ID NO: 561923 - RNA, 19 nt, Homo sapiens
  misc_RNA (1)...(19): siRNA sense strand
cucaugagcuucuucuuca

SEQ ID NO: 561924 - RNA, 19 nt, Homo sapiens
  misc_RNA (1)...(19): siRNA sense strand
aaggagagaucaucaucga

SEQ ID NO: 561925 - RNA, 19 nt, Homo sapiens
  misc_RNA (1)...(19): siRNA sense strand
gagcugaaggugcugaaga

SEQ ID NO: 561926 - RNA, 19 nt, Homo sapiens
  misc_RNA (1)...(19): siRNA sense strand
uggaaugucacguggaaua

SEQ ID NO: 561927 - RNA, 19 nt, Homo sapiens
  misc_RNA (1)...(19): siRNA sense strand
ggaaggcccuggugaucac

SEQ ID NO: 561928 - RNA, 19 nt, Homo sapiens
  misc_RNA (1)...(19): siRNA sense strand
ccacgcugcuugcuaccuu

SEQ ID NO: 561929 - RNA, 19 nt, Homo sapiens
  misc_RNA (1)...(19): siRNA sense strand
gcgagugucucccucaaac

SEQ ID NO: 561930 - RNA, 19 nt, Homo sapiens
  misc_RNA (1)...(19): siRNA sense strand
ggacacgucggaacaaguc

SEQ ID NO: 561931 - RNA, 19 nt, Homo sapiens
  misc_RNA (1)...(19): siRNA sense strand
gaguggaauuccggaacua

SEQ ID NO: 561932 - RNA, 19 nt, Homo sapiens
  misc_RNA (1)...(19): siRNA sense strand
caaggaguauucagagacu

SEQ ID NO: 561933 - RNA, 19 nt, Homo sapiens
  misc_RNA (1)...(19): siRNA sense strand
cacaagggaucgccguguu

SEQ ID NO: 561934 - RNA, 19 nt, Homo sapiens
  misc_RNA (1)...(19): siRNA sense strand
gcgcuggcuuccaacuauu

SEQ ID NO: 561935 - RNA, 19 nt, Homo sapiens
  misc_RNA (1)...(19): siRNA sense strand
guacugggacuacaugaag

SEQ ID NO: 561936 - RNA, 19 nt, Homo sapiens
  misc_RNA (1)...(19): siRNA sense strand
gcaaagcaaauggagaaug

SEQ ID NO: 561937 - RNA, 19 nt, Homo sapiens
  misc_RNA (1)...(19): siRNA sense strand
aagcaaagcaaauggagaa

SEQ ID NO: 561938 - RNA, 19 nt, Homo sapiens
  misc_RNA (1)...(19): siRNA sense strand
gcagguggacgucaucauc

SEQ ID NO: 561939 - RNA, 19 nt, Homo sapiens
  misc_RNA (1)...(19): siRNA sense strand
gacuuggccacguacauua

SEQ ID NO: 561940 - RNA, 19 nt, Homo sapiens
  misc_RNA (1)...(19): siRNA sense strand
ucauggacuuggccacgua

SEQ ID NO: 561941 - RNA, 19 nt, Homo sapiens
  misc_RNA (1)...(19): siRNA sense strand
gaaggaaugcgccaagacu

SEQ ID NO: 561942 - RNA, 19 nt, Homo sapiens
  misc_RNA (1)...(19): siRNA sense strand
cagggaucaugcucacuuu

SEQ ID NO: 561943 - RNA, 19 nt, Homo sapiens
  misc_RNA (1)...(19): siRNA sense strand
ccaguacucggaugaagaa

SEQ ID NO: 561944 - RNA, 19 nt, Homo sapiens
  misc_RNA (1)...(19): siRNA sense strand
ggucaagcuuuccguguac

SEQ ID NO: 561945 - RNA, 19 nt, Homo sapiens
  misc_RNA (1)...(19): siRNA sense strand
uaaagaacuggaagaagga

SEQ ID NO: 561946 - RNA, 19 nt, Homo sapiens
  misc_RNA (1)...(19): siRNA sense strand
cucagugucuuacucauug

SEQ ID NO: 561947 - RNA, 19 nt, Homo sapiens
  misc_RNA (1)...(19): siRNA sense strand
ucaagcugaugaacgaaau

SEQ ID NO: 561948 - RNA, 19 nt, Homo sapiens
  misc_RNA (1)...(19): siRNA sense strand
ggaucaugcucacuuucug

SEQ ID NO: 561949 - RNA, 19 nt, Homo sapiens
  misc_RNA (1)...(19): siRNA sense strand
cagcagcuccuccuccuau

SEQ ID NO: 561950 - RNA, 19 nt, Homo sapiens
  misc_RNA (1)...(19): siRNA sense strand
gcacagcaugagcuacuug

SEQ ID NO: 561951 - RNA, 19 nt, Homo sapiens
  misc_RNA (1)...(19): siRNA sense strand
ggaucaaagugcuaaagcu

SEQ ID NO: 561952 - RNA, 19 nt, Homo sapiens
  misc_RNA (1)...(19): siRNA sense strand
gaugaacgaaauucucaau

SEQ ID NO: 561953 - RNA, 19 nt, Homo sapiens
  misc_RNA (1)...(19): siRNA sense strand
gcccgucaaugcugugaug

SEQ ID NO: 561954 - RNA, 19 nt, Homo sapiens
  misc_RNA (1)...(19): siRNA sense strand
augaggagguggaggcuuu

SEQ ID NO: 561955 - RNA, 19 nt, Homo sapiens
  misc_RNA (1)...(19): siRNA sense strand
ccaagguggaugcgaauga

SEQ ID NO: 561956 - RNA, 19 nt, Homo sapiens
  misc_RNA (1)...(19): siRNA sense strand
ucaaacgccugaggaucuu

SEQ ID NO: 561957 - RNA, 19 nt, Homo sapiens
  misc_RNA (1)...(19): siRNA sense strand
ggucagcccaacucucuug

SEQ ID NO: 561958 - RNA, 19 nt, Homo sapiens
  misc_RNA (1)...(19): siRNA sense strand
gaccaugaaugugcagaag

SEQ ID NO: 561959 - RNA, 19 nt, Homo sapiens
  misc_RNA (1)...(19): siRNA sense strand
auuggugccugcaucguua

SEQ ID NO: 561960 - RNA, 19 nt, Homo sapiens
  misc_RNA (1)...(19): siRNA sense strand
gggaaggaagcaaagcaaa

SEQ ID NO: 561961 - RNA, 19 nt, Homo sapiens
  misc_RNA (1)...(19): siRNA sense strand
gggcccuacuuccucauga

SEQ ID NO: 561962 - RNA, 19 nt, Homo sapiens
  misc_RNA (1)...(19): siRNA sense strand
guucaugggcucccuguuc

SEQ ID NO: 561963 - RNA, 19 nt, Homo sapiens
  misc_RNA (1)...(19): siRNA sense strand
cagggcaggucaagcuuuc

SEQ ID NO: 561964 - RNA, 19 nt, Homo sapiens
  misc_RNA (1)...(19): siRNA sense strand
ugauggcgaugaagaccaa

SEQ ID NO: 561965 - RNA, 19 nt, Homo sapiens
  misc_RNA (1)...(19): siRNA sense strand
gagauugucaaccucaugu

SEQ ID NO: 561966 - RNA, 19 nt, Homo sapiens
  misc_RNA (1)...(19): siRNA sense strand
acaccgugcugcuguuugu

SEQ ID NO: 561967 - RNA, 19 nt, Homo sapiens
  misc_RNA (1)...(19): siRNA sense strand
ucuuaaaguugcucaucaa

SEQ ID NO: 561968 - RNA, 19 nt, Homo sapiens
  misc_RNA (1)...(19): siRNA sense strand
ucccggaggucaucaagau

SEQ ID NO: 561969 - RNA, 19 nt, Homo sapiens
  misc_RNA (1)...(19): siRNA sense strand
ggacagugcagggaagcaa

SEQ ID NO: 561970 - RNA, 19 nt, Homo sapiens
  misc_RNA (1)...(19): siRNA sense strand
ggagguggaggcuuugauc

SEQ ID NO: 561971 - RNA, 19 nt, Homo sapiens
  misc_RNA (1)...(19): siRNA sense strand
gcaggucaccacguacuug

SEQ ID NO: 561972 - RNA, 19 nt, Homo sapiens
  misc_RNA (1)...(19): siRNA sense strand
agaaggaggagaccuggaa

SEQ ID NO: 561973 - RNA, 19 nt, Homo sapiens
  misc_RNA (1)...(19): siRNA sense strand
ucgugugggugccuuguuu

SEQ ID NO: 561974 - RNA, 19 nt, Homo sapiens
  misc_RNA (1)...(19): siRNA sense strand
ccacaucugcuucgucagu

SEQ ID NO: 561975 - RNA, 19 nt, Homo sapiens
  misc_RNA (1)...(19): siRNA sense strand
gcaccaguacuuccacauc

SEQ ID NO: 561976 - RNA, 19 nt, Homo sapiens
  misc_RNA (1)...(19): siRNA sense strand
gaugacaccucucaacaaa

SEQ ID NO: 561977 - RNA, 19 nt, Homo sapiens
  misc_RNA (1)...(19): siRNA sense strand
uaaaguugcucaucaaguu

SEQ ID NO: 561978 - RNA, 19 nt, Homo sapiens
  misc_RNA (1)...(19): siRNA sense strand
ggaagcaacugcagagaca

SEQ ID NO: 561979 - RNA, 19 nt, Homo sapiens
  misc_RNA (1)...(19): siRNA sense strand
ccaaggagcuggacacagu

SEQ ID NO: 561980 - RNA, 19 nt, Homo sapiens
  misc_RNA (1)...(19): siRNA sense strand
caacgagucugccgaagga

SEQ ID NO: 561981 - RNA, 19 nt, Homo sapiens
  misc_RNA (1)...(19): siRNA sense strand
gaucaagaccgcugucauu

SEQ ID NO: 561982 - RNA, 19 nt, Homo sapiens
  misc_RNA (1)...(19): siRNA sense strand
caaagcaaauggagaaugg

SEQ ID NO: 561983 - RNA, 19 nt, Homo sapiens
  misc_RNA (1)...(19): siRNA sense strand
gggcagaccucuucuacuc

SEQ ID NO: 561984 - RNA, 19 nt, Homo sapiens
  misc_RNA (1)...(19): siRNA sense strand
ccacguacauuaacaugau

SEQ ID NO: 561985 - RNA, 19 nt, Homo sapiens
  misc_RNA (1)...(19): siRNA sense strand
gaccgaggcuacauucaga

SEQ ID NO: 561986 - RNA, 19 nt, Homo sapiens
  misc_RNA (1)...(19): siRNA sense strand
uggagaggcucaaggagua

SEQ ID NO: 561987 - RNA, 19 nt, Homo sapiens
  misc_RNA (1)...(19): siRNA sense strand
gcagaccucuucuacucuu

SEQ ID NO: 561988 - RNA, 19 nt, Homo sapiens
  misc_RNA (1)...(19): siRNA sense strand
gaaggaagcaaagcaaaug

SEQ ID NO: 561989 - RNA, 19 nt, Homo sapiens
  misc_RNA (1)...(19): siRNA sense strand
ggccgcagaucuuaaaguu

SEQ ID NO: 561990 - RNA, 19 nt, Homo sapiens
  misc_RNA (1)...(19): siRNA sense strand
gaccuccgcuucaagauca

SEQ ID NO: 561991 - RNA, 19 nt, Homo sapiens
  misc_RNA (1)...(19): siRNA sense strand
aaggagaaauccaggagua

SEQ ID NO: 561992 - RNA, 19 nt, Homo sapiens
  misc_RNA (1)...(19): siRNA sense strand
caucugaaauggaaaccaa

SEQ ID NO: 561993 - RNA, 19 nt, Homo sapiens
  misc_RNA (1)...(19): siRNA sense strand
gcaacugcaucguucuguu

SEQ ID NO: 561994 - RNA, 19 nt, Homo sapiens
  misc_RNA (1)...(19): siRNA sense strand
ggaaagaagucggggcaua

SEQ ID NO: 561995 - RNA, 19 nt, Homo sapiens
  misc_RNA (1)...(19): siRNA sense strand
ugaacgaaauucucaaugg

SEQ ID NO: 561996 - RNA, 19 nt, Homo sapiens
  misc_RNA (1)...(19): siRNA sense strand
caagcuagaccaugaaugu

SEQ ID NO: 561997 - RNA, 19 nt, Homo sapiens
  misc_RNA (1)...(19): siRNA sense strand
guacucggaugaagaaguc

SEQ ID NO: 561998 - RNA, 19 nt, Homo sapiens
  misc_RNA (1)...(19): siRNA sense strand
gagaggaccuggacuucgu

SEQ ID NO: 561999 - RNA, 19 nt, Homo sapiens
  misc_RNA (1)...(19): siRNA sense strand
caacugcaucguucuguuu

SEQ ID NO: 562000 - RNA, 19 nt, Homo sapiens
  misc_RNA (1)...(19): siRNA sense strand
ggacuuggccacguacauu

SEQ ID NO: 562001 - RNA, 19 nt, Homo sapiens
  misc_RNA (1)...(19): siRNA sense strand
caacagcaccgcagaacug

SEQ ID NO: 562002 - RNA, 19 nt, Homo sapiens
  misc_RNA (1)...(19): siRNA sense strand
ggaaggaagcaaagcaaau

SEQ ID NO: 562003 - RNA, 19 nt, Homo sapiens
  misc_RNA (1)...(19): siRNA sense strand
gaucaaagugcuaaagcuu

SEQ ID NO: 562004 - RNA, 19 nt, Homo sapiens
  misc_RNA (1)...(19): siRNA sense strand
ugaaggugcugaagaaguc

SEQ ID NO: 562005 - RNA, 19 nt, Homo sapiens
  misc_RNA (1)...(19): siRNA sense strand
gcagagaggucuuuucuac

SEQ ID NO: 562006 - RNA, 19 nt, Homo sapiens
  misc_RNA (1)...(19): siRNA sense strand
ggaucuuucucucccauga

SEQ ID NO: 562007 - RNA, 19 nt, Homo sapiens
  misc_RNA (1)...(19): siRNA sense strand
cgaugaagaccaagacgua

SEQ ID NO: 562008 - RNA, 19 nt, Homo sapiens
  misc_RNA (1)...(19): siRNA sense strand
gcaucaacaucgccaagau

SEQ ID NO: 562009 - RNA, 19 nt, Homo sapiens
  misc_RNA (1)...(19): siRNA sense strand
gcugguagcccuagugugu

SEQ ID NO: 562010 - RNA, 19 nt, Homo sapiens
  misc_RNA (1)...(19): siRNA sense strand
agaaccagaaggccuauua

SEQ ID NO: 562011 - RNA, 19 nt, Homo sapiens
  misc_RNA (1)...(19): siRNA sense strand
ggacucaggagcacacgaa

SEQ ID NO: 562012 - RNA, 19 nt, Homo sapiens
  misc_RNA (1)...(19): siRNA sense strand
ccugggagcuggcauucaa

SEQ ID NO: 562013 - RNA, 19 nt, Homo sapiens
  misc_RNA (1)...(19): siRNA sense strand
cgaaagagaguuccaaggu

SEQ ID NO: 562014 - RNA, 19 nt, Homo sapiens
  misc_RNA (1)...(19): siRNA sense strand
uggcugagauggacaaagu

SEQ ID NO: 562015 - RNA, 19 nt, Homo sapiens
  misc_RNA (1)...(19): siRNA sense strand
gaagucugccuaccuguca

SEQ ID NO: 562016 - RNA, 19 nt, Homo sapiens
  misc_RNA (1)...(19): siRNA sense strand
cauugcaggucaccacgua

SEQ ID NO: 562017 - RNA, 19 nt, Homo sapiens
  misc_RNA (1)...(19): siRNA sense strand
cugacaagcuagaccauga

SEQ ID NO: 562018 - RNA, 19 nt, Homo sapiens
  misc_RNA (1)...(19): siRNA sense strand
ucuguuugcugcccuguuu

SEQ ID NO: 562019 - RNA, 19 nt, Homo sapiens
  misc_RNA (1)...(19): siRNA sense strand
gaccuggacuucguucuca

SEQ ID NO: 562020 - RNA, 19 nt, Homo sapiens
  misc_RNA (1)...(19): siRNA sense strand
gcaaagacaaucggaucaa

SEQ ID NO: 562021 - RNA, 19 nt, Homo sapiens
  misc_RNA (1)...(19): siRNA sense strand
gaaauucucaaugggauca

SEQ ID NO: 562022 - RNA, 19 nt, Homo sapiens
  misc_RNA (1)...(19): siRNA sense strand
caaagacaaucggaucaag

SEQ ID NO: 562023 - RNA, 19 nt, Homo sapiens
  misc_RNA (1)...(19): siRNA sense strand
cucaugagcuucuucuuca

SEQ ID NO: 562024 - RNA, 19 nt, Homo sapiens
  misc_RNA (1)...(19): siRNA sense strand
aaggagagaucaucaucga

SEQ ID NO: 562025 - RNA, 19 nt, Homo sapiens
  misc_RNA (1)...(19): siRNA sense strand
gagcugaaggugcugaaga

SEQ ID NO: 562026 - RNA, 19 nt, Homo sapiens
  misc_RNA (1)...(19): siRNA sense strand
uggaaugucacguggaaua

SEQ ID NO: 562027 - RNA, 19 nt, Homo sapiens
  misc_RNA (1)...(19): siRNA sense strand
ggaaggcccuggugaucac

SEQ ID NO: 562028 - RNA, 19 nt, Homo sapiens
  misc_RNA (1)...(19): siRNA sense strand
ccacgcugcuugcuaccuu

SEQ ID NO: 562029 - RNA, 19 nt, Homo sapiens
  misc_RNA (1)...(19): siRNA sense strand
gcgagugucucccucaaac

SEQ ID NO: 562030 - RNA, 19 nt, Homo sapiens
  misc_RNA (1)...(19): siRNA sense strand
ggacacgucggaacaaguc

SEQ ID NO: 562031 - RNA, 19 nt, Homo sapiens
  misc_RNA (1)...(19): siRNA sense strand
gaguggaauuccggaacua

SEQ ID NO: 562032 - RNA, 19 nt, Homo sapiens
  misc_RNA (1)...(19): siRNA sense strand
caaggaguauucagagacu

SEQ ID NO: 562033 - RNA, 19 nt, Homo sapiens
  misc_RNA (1)...(19): siRNA sense strand
cacaagggaucgccguguu

SEQ ID NO: 562034 - RNA, 19 nt, Homo sapiens
  misc_RNA (1)...(19): siRNA sense strand
gcgcuggcuuccaacuauu

SEQ ID NO: 562035 - RNA, 19 nt, Homo sapiens
  misc_RNA (1)...(19): siRNA sense strand
guacugggacuacaugaag

SEQ ID NO: 562036 - RNA, 19 nt, Homo sapiens
  misc_RNA (1)...(19): siRNA sense strand
gcaaagcaaauggagaaug

SEQ ID NO: 562037 - RNA, 19 nt, Homo sapiens
  misc_RNA (1)...(19): siRNA sense strand
aagcaaagcaaauggagaa

SEQ ID NO: 562038 - RNA, 19 nt, Homo sapiens
  misc_RNA (1)...(19): siRNA sense strand
gcagguggacgucaucauc

SEQ ID NO: 562039 - RNA, 19 nt, Homo sapiens
  misc_RNA (1)...(19): siRNA sense strand
gacuuggccacguacauua

SEQ ID NO: 562040 - RNA, 19 nt, Homo sapiens
  misc_RNA (1)...(19): siRNA sense strand
ucauggacuuggccacgua

SEQ ID NO: 562041 - RNA, 19 nt, Homo sapiens
  misc_RNA (1)...(19): siRNA sense strand
gaaggaaugcgccaagacu

SEQ ID NO: 562042 - RNA, 19 nt, Homo sapiens
  misc_RNA (1)...(19): siRNA sense strand
cagggaucaugcucacuuu

SEQ ID NO: 562043 - RNA, 19 nt, Homo sapiens
  misc_RNA (1)...(19): siRNA sense strand
ccaguacucggaugaagaa

SEQ ID NO: 562044 - RNA, 19 nt, Homo sapiens
  misc_RNA (1)...(19): siRNA sense strand
ggucaagcuuuccguguac

SEQ ID NO: 562045 - RNA, 19 nt, Homo sapiens
  misc_RNA (1)...(19): siRNA sense strand
uaaagaacuggaagaagga

SEQ ID NO: 562046 - RNA, 19 nt, Homo sapiens
  misc_RNA (1)...(19): siRNA sense strand
cucagugucuuacucauug

SEQ ID NO: 562047 - RNA, 19 nt, Homo sapiens
  misc_RNA (1)...(19): siRNA sense strand
ucaagcugaugaacgaaau

SEQ ID NO: 562048 - RNA, 19 nt, Homo sapiens
  misc_RNA (1)...(19): siRNA sense strand
ggaucaugcucacuuucug

SEQ ID NO: 562049 - RNA, 19 nt, Homo sapiens
  misc_RNA (1)...(19): siRNA sense strand
cagcagcuccuccuccuau

SEQ ID NO: 562050 - RNA, 19 nt, Homo sapiens
  misc_RNA (1)...(19): siRNA sense strand
gcacagcaugagcuacuug

SEQ ID NO: 562051 - RNA, 19 nt, Homo sapiens
  misc_RNA (1)...(19): siRNA sense strand
ggaucaaagugcuaaagcu

SEQ ID NO: 562052 - RNA, 19 nt, Homo sapiens
  misc_RNA (1)...(19): siRNA sense strand
gaugaacgaaauucucaau

SEQ ID NO: 562053 - RNA, 19 nt, Homo sapiens
  misc_RNA (1)...(19): siRNA sense strand
gcccgucaaugcugugaug

SEQ ID NO: 562054 - RNA, 19 nt, Homo sapiens
  misc_RNA (1)...(19): siRNA sense strand
augaggagguggaggcuuu

SEQ ID NO: 562055 - RNA, 19 nt, Homo sapiens
  misc_RNA (1)...(19): siRNA sense strand
ccaagguggaugcgaauga

SEQ ID NO: 562056 - RNA, 19 nt, Homo sapiens
  misc_RNA (1)...(19): siRNA sense strand
ucaaacgccugaggaucuu

SEQ ID NO: 562057 - RNA, 19 nt, Homo sapiens
  misc_RNA (1)...(19): siRNA sense strand
ggucagcccaacucucuug

SEQ ID NO: 562058 - RNA, 19 nt, Homo sapiens
  misc_RNA (1)...(19): siRNA sense strand
gaccaugaaugugcagaag

SEQ ID NO: 562059 - RNA, 19 nt, Homo sapiens
  misc_RNA (1)...(19): siRNA sense strand
auuggugccugcaucguua

SEQ ID NO: 562060 - RNA, 19 nt, Homo sapiens
  misc_RNA (1)...(19): siRNA sense strand
gggaaggaagcaaagcaaa

SEQ ID NO: 562061 - RNA, 19 nt, Homo sapiens
  misc_RNA (1)...(19): siRNA sense strand
gggcccuacuuccucauga

SEQ ID NO: 562062 - RNA, 19 nt, Homo sapiens
  misc_RNA (1)...(19): siRNA sense strand
guucaugggcucccuguuc

SEQ ID NO: 562063 - RNA, 19 nt, Homo sapiens
  misc_RNA (1)...(19): siRNA sense strand
cagggcaggucaagcuuuc

SEQ ID NO: 562064 - RNA, 19 nt, Homo sapiens
  misc_RNA (1)...(19): siRNA sense strand
ugauggcgaugaagaccaa

SEQ ID NO: 562065 - RNA, 19 nt, Homo sapiens
  misc_RNA (1)...(19): siRNA sense strand
gagauugucaaccucaugu

SEQ ID NO: 562066 - RNA, 19 nt, Homo sapiens
  misc_RNA (1)...(19): siRNA sense strand
acaccgugcugcuguuugu

SEQ ID NO: 562067 - RNA, 19 nt, Homo sapiens
  misc_RNA (1)...(19): siRNA sense strand
ucuuaaaguugcucaucaa

SEQ ID NO: 562068 - RNA, 19 nt, Homo sapiens
  misc_RNA (1)...(19): siRNA sense strand
ucccggaggucaucaagau

SEQ ID NO: 562069 - RNA, 19 nt, Homo sapiens
  misc_RNA (1)...(19): siRNA sense strand
ggacagugcagggaagcaa

SEQ ID NO: 562070 - RNA, 19 nt, Homo sapiens
  misc_RNA (1)...(19): siRNA sense strand
ggagguggaggcuuugauc

SEQ ID NO: 562071 - RNA, 19 nt, Homo sapiens
  misc_RNA (1)...(19): siRNA sense strand
gcaggucaccacguacuug

SEQ ID NO: 562072 - RNA, 19 nt, Homo sapiens
  misc_RNA (1)...(19): siRNA sense strand
agaaggaggagaccuggaa

SEQ ID NO: 562073 - RNA, 19 nt, Homo sapiens
  misc_RNA (1)...(19): siRNA sense strand
ucgugugggugccuuguuu

SEQ ID NO: 562074 - RNA, 19 nt, Homo sapiens
  misc_RNA (1)...(19): siRNA sense strand
ccacaucugcuucgucagu

SEQ ID NO: 562075 - RNA, 19 nt, Homo sapiens
  misc_RNA (1)...(19): siRNA sense strand
gcaccaguacuuccacauc

SEQ ID NO: 562076 - RNA, 19 nt, Homo sapiens
  misc_RNA (1)...(19): siRNA sense strand
gaugacaccucucaacaaa

SEQ ID NO: 562077 - RNA, 19 nt, Homo sapiens
  misc_RNA (1)...(19): siRNA sense strand
uaaaguugcucaucaaguu

SEQ ID NO: 562078 - RNA, 19 nt, Homo sapiens
  misc_RNA (1)...(19): siRNA sense strand
ggaagcaacugcagagaca

SEQ ID NO: 562079 - RNA, 19 nt, Homo sapiens
  misc_RNA (1)...(19): siRNA sense strand
ccaaggagcuggacacagu

SEQ ID NO: 562080 - RNA, 19 nt, Homo sapiens
  misc_RNA (1)...(19): siRNA sense strand
caacgagucugccgaagga

SEQ ID NO: 562081 - RNA, 19 nt, Homo sapiens
  misc_RNA (1)...(19): siRNA sense strand
gaucaagaccgcugucauu

SEQ ID NO: 562082 - RNA, 19 nt, Homo sapiens
  misc_RNA (1)...(19): siRNA sense strand
caaagcaaauggagaaugg

SEQ ID NO: 562083 - RNA, 19 nt, Homo sapiens
  misc_RNA (1)...(19): siRNA sense strand
gggcagaccucuucuacuc

SEQ ID NO: 562084 - RNA, 19 nt, Homo sapiens
  misc_RNA (1)...(19): siRNA sense strand
ccacguacauuaacaugau

SEQ ID NO: 562085 - RNA, 19 nt, Homo sapiens
  misc_RNA (1)...(19): siRNA sense strand
gaccgaggcuacauucaga

SEQ ID NO: 562086 - RNA, 19 nt, Homo sapiens
  misc_RNA (1)...(19): siRNA sense strand
uggagaggcucaaggagua

SEQ ID NO: 562087 - RNA, 19 nt, Homo sapiens
  misc_RNA (1)...(19): siRNA sense strand
gcagaccucuucuacucuu

SEQ ID NO: 562088 - RNA, 19 nt, Homo sapiens
  misc_RNA (1)...(19): siRNA sense strand
gaaggaagcaaagcaaaug

SEQ ID NO: 562089 - RNA, 19 nt, Homo sapiens
  misc_RNA (1)...(19): siRNA sense strand
ggccgcagaucuuaaaguu

SEQ ID NO: 562090 - RNA, 19 nt, Homo sapiens
  misc_RNA (1)...(19): siRNA sense strand
gaccuccgcuucaagauca

SEQ ID NO: 562091 - RNA, 19 nt, Homo sapiens
  misc_RNA (1)...(19): siRNA sense strand
aaggagaaauccaggagua

SEQ ID NO: 562092 - RNA, 19 nt, Homo sapiens
  misc_RNA (1)...(19): siRNA sense strand
caucugaaauggaaaccaa

SEQ ID NO: 562093 - RNA, 19 nt, Homo sapiens
  misc_RNA (1)...(19): siRNA sense strand
gcaacugcaucguucuguu

SEQ ID NO: 562094 - RNA, 19 nt, Homo sapiens
  misc_RNA (1)...(19): siRNA sense strand
ggaaagaagucggggcaua

SEQ ID NO: 562095 - RNA, 19 nt, Homo sapiens
  misc_RNA (1)...(19): siRNA sense strand
ugaacgaaauucucaaugg

SEQ ID NO: 562096 - RNA, 19 nt, Homo sapiens
  misc_RNA (1)...(19): siRNA sense strand
caagcuagaccaugaaugu

SEQ ID NO: 562097 - RNA, 19 nt, Homo sapiens
  misc_RNA (1)...(19): siRNA sense strand
guacucggaugaagaaguc

SEQ ID NO: 562098 - RNA, 19 nt, Homo sapiens
  misc_RNA (1)...(19): siRNA sense strand
gagaggaccuggacuucgu

SEQ ID NO: 562099 - RNA, 19 nt, Homo sapiens
  misc_RNA (1)...(19): siRNA sense strand
caacugcaucguucuguuu

SEQ ID NO: 562100 - RNA, 19 nt, Homo sapiens
  misc_RNA (1)...(19): siRNA sense strand
ggacuuggccacguacauu

SEQ ID NO: 562101 - RNA, 19 nt, Homo sapiens
  misc_RNA (1)...(19): siRNA sense strand
caacagcaccgcagaacug

SEQ ID NO: 562102 - RNA, 19 nt, Homo sapiens
  misc_RNA (1)...(19): siRNA sense strand
ggaaggaagcaaagcaaau

SEQ ID NO: 562103 - RNA, 19 nt, Homo sapiens
  misc_RNA (1)...(19): siRNA sense strand
gaucaaagugcuaaagcuu

SEQ ID NO: 562104 - RNA, 19 nt, Homo sapiens
  misc_RNA (1)...(19): siRNA sense strand
ugaaggugcugaagaaguc

SEQ ID NO: 562105 - RNA, 19 nt, Homo sapiens
  misc_RNA (1)...(19): siRNA sense strand
gcagagaggucuuuucuac

SEQ ID NO: 562106 - RNA, 19 nt, Homo sapiens
  misc_RNA (1)...(19): siRNA sense strand
ggaucuuucucucccauga

SEQ ID NO: 562107 - RNA, 19 nt, Homo sapiens
  misc_RNA (1)...(19): siRNA sense strand
cgaugaagaccaagacgua

SEQ ID NO: 562108 - RNA, 19 nt, Homo sapiens
  misc_RNA (1)...(19): siRNA sense strand
gcaucaacaucgccaagau

SEQ ID NO: 562109 - RNA, 19 nt, Homo sapiens
  misc_RNA (1)...(19): siRNA sense strand
gcugguagcccuagugugu

SEQ ID NO: 562110 - RNA, 19 nt, Homo sapiens
  misc_RNA (1)...(19): siRNA sense strand
agaaccagaaggccuauua

SEQ ID NO: 562111 - RNA, 19 nt, Homo sapiens
  misc_RNA (1)...(19): siRNA sense strand
ggacucaggagcacacgaa

SEQ ID NO: 562112 - RNA, 19 nt, Homo sapiens
  misc_RNA (1)...(19): siRNA sense strand
ccugggagcuggcauucaa

SEQ ID NO: 562113 - RNA, 19 nt, Homo sapiens
  misc_RNA (1)...(19): siRNA sense strand
cgaaagagaguuccaaggu

SEQ ID NO: 562114 - RNA, 19 nt, Homo sapiens
  misc_RNA (1)...(19): siRNA sense strand
uggcugagauggacaaagu

SEQ ID NO: 562115 - RNA, 19 nt, Homo sapiens
  misc_RNA (1)...(19): siRNA sense strand
gaagucugccuaccuguca

SEQ ID NO: 562116 - RNA, 19 nt, Homo sapiens
  misc_RNA (1)...(19): siRNA sense strand
cauugcaggucaccacgua

SEQ ID NO: 562117 - RNA, 19 nt, Homo sapiens
  misc_RNA (1)...(19): siRNA sense strand
cugacaagcuagaccauga

SEQ ID NO: 562118 - RNA, 19 nt, Homo sapiens
  misc_RNA (1)...(19): siRNA sense strand
ucuguuugcugcccuguuu

SEQ ID NO: 562119 - RNA, 19 nt, Homo sapiens
  misc_RNA (1)...(19): siRNA sense strand
gaccuggacuucguucuca

SEQ ID NO: 562120 - RNA, 19 nt, Homo sapiens
  misc_RNA (1)...(19): siRNA sense strand
gcaaagacaaucggaucaa

SEQ ID NO: 562121 - RNA, 19 nt, Homo sapiens
  misc_RNA (1)...(19): siRNA sense strand
gaaauucucaaugggauca

SEQ ID NO: 562122 - RNA, 19 nt, Homo sapiens
  misc_RNA (1)...(19): siRNA sense strand
caaagacaaucggaucaag

SEQ ID NO: 562123 - RNA, 19 nt, Homo sapiens
  misc_RNA (1)...(19): siRNA sense strand
cucaugagcuucuucuuca

SEQ ID NO: 562124 - RNA, 19 nt, Homo sapiens
  misc_RNA (1)...(19): siRNA sense strand
aaggagagaucaucaucga

SEQ ID NO: 562125 - RNA, 19 nt, Homo sapiens
  misc_RNA (1)...(19): siRNA sense strand
gagcugaaggugcugaaga

SEQ ID NO: 562126 - RNA, 19 nt, Homo sapiens
  misc_RNA (1)...(19): siRNA sense strand
uggaaugucacguggaaua

SEQ ID NO: 562127 - RNA, 19 nt, Homo sapiens
  misc_RNA (1)...(19): siRNA sense strand
ggaaggcccuggugaucac

SEQ ID NO: 562128 - RNA, 19 nt, Homo sapiens
  misc_RNA (1)...(19): siRNA sense strand
ccacgcugcuugcuaccuu

SEQ ID NO: 562129 - RNA, 19 nt, Homo sapiens
  misc_RNA (1)...(19): siRNA sense strand
gcgagugucucccucaaac

SEQ ID NO: 562130 - RNA, 19 nt, Homo sapiens
  misc_RNA (1)...(19): siRNA sense strand
ggacacgucggaacaaguc

SEQ ID NO: 562131 - RNA, 19 nt, Homo sapiens
  misc_RNA (1)...(19): siRNA sense strand
gaguggaauuccggaacua

SEQ ID NO: 562132 - RNA, 19 nt, Homo sapiens
  misc_RNA (1)...(19): siRNA sense strand
caaggaguauucagagacu

SEQ ID NO: 562133 - RNA, 19 nt, Homo sapiens
  misc_RNA (1)...(19): siRNA sense strand
cacaagggaucgccguguu

SEQ ID NO: 562134 - RNA, 19 nt, Homo sapiens
  misc_RNA (1)...(19): siRNA sense strand
gcgcuggcuuccaacuauu

SEQ ID NO: 562135 - RNA, 19 nt, Homo sapiens
  misc_RNA (1)...(19): siRNA sense strand
guacugggacuacaugaag

SEQ ID NO: 562136 - RNA, 19 nt, Homo sapiens
  misc_RNA (1)...(19): siRNA sense strand
gcaaagcaaauggagaaug

SEQ ID NO: 562137 - RNA, 19 nt, Homo sapiens
  misc_RNA (1)...(19): siRNA sense strand
aagcaaagcaaauggagaa

SEQ ID NO: 562138 - RNA, 19 nt, Homo sapiens
  misc_RNA (1)...(19): siRNA sense strand
gcagguggacgucaucauc

SEQ ID NO: 562139 - RNA, 19 nt, Homo sapiens
  misc_RNA (1)...(19): siRNA sense strand
gacuuggccacguacauua

SEQ ID NO: 562140 - RNA, 19 nt, Homo sapiens
  misc_RNA (1)...(19): siRNA sense strand
ucauggacuuggccacgua

SEQ ID NO: 562141 - RNA, 19 nt, Homo sapiens
  misc_RNA (1)...(19): siRNA sense strand
gaaggaaugcgccaagacu

SEQ ID NO: 562142 - RNA, 19 nt, Homo sapiens
  misc_RNA (1)...(19): siRNA sense strand
cagggaucaugcucacuuu

SEQ ID NO: 562143 - RNA, 19 nt, Homo sapiens
  misc_RNA (1)...(19): siRNA sense strand
ccaguacucggaugaagaa

SEQ ID NO: 562144 - RNA, 19 nt, Homo sapiens
  misc_RNA (1)...(19): siRNA sense strand
ggucaagcuuuccguguac

SEQ ID NO: 562145 - RNA, 19 nt, Homo sapiens
  misc_RNA (1)...(19): siRNA sense strand
uaaagaacuggaagaagga

SEQ ID NO: 562146 - RNA, 19 nt, Homo sapiens
  misc_RNA (1)...(19): siRNA sense strand
cucagugucuuacucauug

SEQ ID NO: 562147 - RNA, 19 nt, Homo sapiens
  misc_RNA (1)...(19): siRNA sense strand
ucaagcugaugaacgaaau

SEQ ID NO: 562148 - RNA, 19 nt, Homo sapiens
  misc_RNA (1)...(19): siRNA sense strand
ggaucaugcucacuuucug

SEQ ID NO: 562149 - RNA, 19 nt, Homo sapiens
  misc_RNA (1)...(19): siRNA sense strand
cagcagcuccuccuccuau

SEQ ID NO: 562150 - RNA, 19 nt, Homo sapiens
  misc_RNA (1)...(19): siRNA sense strand
gcacagcaugagcuacuug

SEQ ID NO: 562151 - RNA, 19 nt, Homo sapiens
  misc_RNA (1)...(19): siRNA sense strand
ggaucaaagugcuaaagcu

SEQ ID NO: 562152 - RNA, 19 nt, Homo sapiens
  misc_RNA (1)...(19): siRNA sense strand
gaugaacgaaauucucaau

SEQ ID NO: 562153 - RNA, 19 nt, Homo sapiens
  misc_RNA (1)...(19): siRNA sense strand
gcccgucaaugcugugaug

SEQ ID NO: 562154 - RNA, 19 nt, Homo sapiens
  misc_RNA (1)...(19): siRNA sense strand
augaggagguggaggcuuu

SEQ ID NO: 562155 - RNA, 19 nt, Homo sapiens
  misc_RNA (1)...(19): siRNA sense strand
ccaagguggaugcgaauga

SEQ ID NO: 562156 - RNA, 19 nt, Homo sapiens
  misc_RNA (1)...(19): siRNA sense strand
ucaaacgccugaggaucuu

SEQ ID NO: 562157 - RNA, 19 nt, Homo sapiens
  misc_RNA (1)...(19): siRNA sense strand
ggucagcccaacucucuug

SEQ ID NO: 562158 - RNA, 19 nt, Homo sapiens
  misc_RNA (1)...(19): siRNA sense strand
gaccaugaaugugcagaag

SEQ ID NO: 562159 - RNA, 19 nt, Homo sapiens
  misc_RNA (1)...(19): siRNA sense strand
auuggugccugcaucguua

SEQ ID NO: 562160 - RNA, 19 nt, Homo sapiens
  misc_RNA (1)...(19): siRNA sense strand
gggaaggaagcaaagcaaa

SEQ ID NO: 562161 - RNA, 19 nt, Homo sapiens
  misc_RNA (1)...(19): siRNA sense strand
gggcccuacuuccucauga

SEQ ID NO: 562162 - RNA, 19 nt, Homo sapiens
  misc_RNA (1)...(19): siRNA sense strand
guucaugggcucccuguuc

SEQ ID NO: 562163 - RNA, 19 nt, Homo sapiens
  misc_RNA (1)...(19): siRNA sense strand
cagggcaggucaagcuuuc

SEQ ID NO: 562164 - RNA, 19 nt, Homo sapiens
  misc_RNA (1)...(19): siRNA sense strand
ugauggcgaugaagaccaa

SEQ ID NO: 562165 - RNA, 19 nt, Homo sapiens
  misc_RNA (1)...(19): siRNA sense strand
gagauugucaaccucaugu

SEQ ID NO: 562166 - RNA, 19 nt, Homo sapiens
  misc_RNA (1)...(19): siRNA sense strand
acaccgugcugcuguuugu

SEQ ID NO: 562167 - RNA, 19 nt, Homo sapiens
  misc_RNA (1)...(19): siRNA sense strand
ucuuaaaguugcucaucaa

SEQ ID NO: 562168 - RNA, 19 nt, Homo sapiens
  misc_RNA (1)...(19): siRNA sense strand
ucccggaggucaucaagau

SEQ ID NO: 562169 - RNA, 19 nt, Homo sapiens
  misc_RNA (1)...(19): siRNA sense strand
ggacagugcagggaagcaa

SEQ ID NO: 562170 - RNA, 19 nt, Homo sapiens
  misc_RNA (1)...(19): siRNA sense strand
ggagguggaggcuuugauc

SEQ ID NO: 562171 - RNA, 19 nt, Homo sapiens
  misc_RNA (1)...(19): siRNA sense strand
gcaggucaccacguacuug

SEQ ID NO: 562172 - RNA, 19 nt, Homo sapiens
  misc_RNA (1)...(19): siRNA sense strand
agaaggaggagaccuggaa

SEQ ID NO: 562173 - RNA, 19 nt, Homo sapiens
  misc_RNA (1)...(19): siRNA sense strand
ucgugugggugccuuguuu

SEQ ID NO: 562174 - RNA, 19 nt, Homo sapiens
  misc_RNA (1)...(19): siRNA sense strand
ccacaucugcuucgucagu

SEQ ID NO: 562175 - RNA, 19 nt, Homo sapiens
  misc_RNA (1)...(19): siRNA sense strand
gcaccaguacuuccacauc

SEQ ID NO: 562176 - RNA, 19 nt, Homo sapiens
  misc_RNA (1)...(19): siRNA sense strand
gaugacaccucucaacaaa

SEQ ID NO: 562177 - RNA, 19 nt, Homo sapiens
  misc_RNA (1)...(19): siRNA sense strand
uaaaguugcucaucaaguu

SEQ ID NO: 562178 - RNA, 19 nt, Homo sapiens
  misc_RNA (1)...(19): siRNA sense strand
ggaagcaacugcagagaca

SEQ ID NO: 562179 - RNA, 19 nt, Homo sapiens
  misc_RNA (1)...(19): siRNA sense strand
ccaaggagcuggacacagu

SEQ ID NO: 562180 - RNA, 19 nt, Homo sapiens
  misc_RNA (1)...(19): siRNA sense strand
caacgagucugccgaagga

SEQ ID NO: 562181 - RNA, 19 nt, Homo sapiens
  misc_RNA (1)...(19): siRNA sense strand
gaucaagaccgcugucauu

SEQ ID NO: 562182 - RNA, 19 nt, Homo sapiens
  misc_RNA (1)...(19): siRNA sense strand
caaagcaaauggagaaugg

SEQ ID NO: 562183 - RNA, 19 nt, Homo sapiens
  misc_RNA (1)...(19): siRNA sense strand
gggcagaccucuucuacuc

SEQ ID NO: 562184 - RNA, 19 nt, Homo sapiens
  misc_RNA (1)...(19): siRNA sense strand
ccacguacauuaacaugau

SEQ ID NO: 562185 - RNA, 19 nt, Homo sapiens
  misc_RNA (1)...(19): siRNA sense strand
gaccgaggcuacauucaga

SEQ ID NO: 562186 - RNA, 19 nt, Homo sapiens
  misc_RNA (1)...(19): siRNA sense strand
uggagaggcucaaggagua

SEQ ID NO: 562187 - RNA, 19 nt, Homo sapiens
  misc_RNA (1)...(19): siRNA sense strand
gcagaccucuucuacucuu

SEQ ID NO: 562188 - RNA, 19 nt, Homo sapiens
  misc_RNA (1)...(19): siRNA sense strand
gaaggaagcaaagcaaaug

SEQ ID NO: 562189 - RNA, 19 nt, Homo sapiens
  misc_RNA (1)...(19): siRNA sense strand
ggccgcagaucuuaaaguu

SEQ ID NO: 562190 - RNA, 19 nt, Homo sapiens
  misc_RNA (1)...(19): siRNA sense strand
gaccuccgcuucaagauca

SEQ ID NO: 562191 - RNA, 19 nt, Homo sapiens
  misc_RNA (1)...(19): siRNA sense strand
aaggagaaauccaggagua

SEQ ID NO: 562192 - RNA, 19 nt, Homo sapiens
  misc_RNA (1)...(19): siRNA sense strand
caucugaaauggaaaccaa

SEQ ID NO: 562193 - RNA, 19 nt, Homo sapiens
  misc_RNA (1)...(19): siRNA sense strand
gcaacugcaucguucuguu

SEQ ID NO: 562194 - RNA, 19 nt, Homo sapiens
  misc_RNA (1)...(19): siRNA sense strand
ggaaagaagucggggcaua

SEQ ID NO: 562195 - RNA, 19 nt, Homo sapiens
  misc_RNA (1)...(19): siRNA sense strand
ugaacgaaauucucaaugg

SEQ ID NO: 562196 - RNA, 19 nt, Homo sapiens
  misc_RNA (1)...(19): siRNA sense strand
caagcuagaccaugaaugu

SEQ ID NO: 562197 - RNA, 19 nt, Homo sapiens
  misc_RNA (1)...(19): siRNA sense strand
guacucggaugaagaaguc

SEQ ID NO: 562198 - RNA, 19 nt, Homo sapiens
  misc_RNA (1)...(19): siRNA sense strand
gagaggaccuggacuucgu

SEQ ID NO: 562199 - RNA, 19 nt, Homo sapiens
  misc_RNA (1)...(19): siRNA sense strand
caacugcaucguucuguuu

SEQ ID NO: 562200 - RNA, 19 nt, Homo sapiens
  misc_RNA (1)...(19): siRNA sense strand
ggacuuggccacguacauu

SEQ ID NO: 562201 - RNA, 19 nt, Homo sapiens
  misc_RNA (1)...(19): siRNA sense strand
caacagcaccgcagaacug

SEQ ID NO: 562202 - RNA, 19 nt, Homo sapiens
  misc_RNA (1)...(19): siRNA sense strand
ggaaggaagcaaagcaaau

SEQ ID NO: 562203 - RNA, 19 nt, Homo sapiens
  misc_RNA (1)...(19): siRNA sense strand
gaucaaagugcuaaagcuu

SEQ ID NO: 562204 - RNA, 19 nt, Homo sapiens
  misc_RNA (1)...(19): siRNA sense strand
ugaaggugcugaagaaguc

SEQ ID NO: 562205 - RNA, 19 nt, Homo sapiens
  misc_RNA (1)...(19): siRNA sense strand
gcagagaggucuuuucuac

SEQ ID NO: 562206 - RNA, 19 nt, Homo sapiens
  misc_RNA (1)...(19): siRNA sense strand
ggaucuuucucucccauga

SEQ ID NO: 562207 - RNA, 19 nt, Homo sapiens
  misc_RNA (1)...(19): siRNA sense strand
cgaugaagaccaagacgua

SEQ ID NO: 562208 - RNA, 19 nt, Homo sapiens
  misc_RNA (1)...(19): siRNA sense strand
gcaucaacaucgccaagau

SEQ ID NO: 562209 - RNA, 19 nt, Homo sapiens
  misc_RNA (1)...(19): siRNA sense strand
gcugguagcccuagugugu

SEQ ID NO: 562210 - RNA, 19 nt, Homo sapiens
  misc_RNA (1)...(19): siRNA sense strand
agaaccagaaggccuauua

SEQ ID NO: 562211 - RNA, 19 nt, Homo sapiens
  misc_RNA (1)...(19): siRNA sense strand
ggacucaggagcacacgaa

SEQ ID NO: 562212 - RNA, 19 nt, Homo sapiens
  misc_RNA (1)...(19): siRNA sense strand
ccugggagcuggcauucaa

SEQ ID NO: 562213 - RNA, 19 nt, Homo sapiens
  misc_RNA (1)...(19): siRNA sense strand
cgaaagagaguuccaaggu

SEQ ID NO: 562214 - RNA, 19 nt, Homo sapiens
  misc_RNA (1)...(19): siRNA sense strand
uggcugagauggacaaagu

SEQ ID NO: 562215 - RNA, 19 nt, Homo sapiens
  misc_RNA (1)...(19): siRNA sense strand
gaagucugccuaccuguca

SEQ ID NO: 562216 - RNA, 19 nt, Homo sapiens
  misc_RNA (1)...(19): siRNA sense strand
cauugcaggucaccacgua

SEQ ID NO: 562217 - RNA, 19 nt, Homo sapiens
  misc_RNA (1)...(19): siRNA sense strand
cugacaagcuagaccauga

SEQ ID NO: 562218 - RNA, 19 nt, Homo sapiens
  misc_RNA (1)...(19): siRNA sense strand
ucuguuugcugcccuguuu

SEQ ID NO: 562219 - RNA, 19 nt, Homo sapiens
  misc_RNA (1)...(19): siRNA sense strand
gaccuggacuucguucuca

SEQ ID NO: 562220 - RNA, 19 nt, Homo sapiens
  misc_RNA (1)...(19): siRNA sense strand
gcaaagacaaucggaucaa

SEQ ID NO: 562221 - RNA, 19 nt, Homo sapiens
  misc_RNA (1)...(19): siRNA sense strand
gaaauucucaaugggauca

SEQ ID NO: 562222 - RNA, 19 nt, Homo sapiens
  misc_RNA (1)...(19): siRNA sense strand
caaagacaaucggaucaag

SEQ ID NO: 562223 - RNA, 19 nt, Homo sapiens
  misc_RNA (1)...(19): siRNA sense strand
cucaugagcuucuucuuca

SEQ ID NO: 562224 - RNA, 19 nt, Homo sapiens
  misc_RNA (1)...(19): siRNA sense strand
aaggagagaucaucaucga

SEQ ID NO: 562225 - RNA, 19 nt, Homo sapiens
  misc_RNA (1)...(19): siRNA sense strand
gagcugaaggugcugaaga

SEQ ID NO: 562226 - RNA, 19 nt, Homo sapiens
  misc_RNA (1)...(19): siRNA sense strand
uggaaugucacguggaaua

SEQ ID NO: 562227 - RNA, 19 nt, Homo sapiens
  misc_RNA (1)...(19): siRNA sense strand
ggaaggcccuggugaucac

SEQ ID NO: 562228 - RNA, 19 nt, Homo sapiens
  misc_RNA (1)...(19): siRNA sense strand
ccacgcugcuugcuaccuu

SEQ ID NO: 562229 - RNA, 19 nt, Homo sapiens
  misc_RNA (1)...(19): siRNA sense strand
gcgagugucucccucaaac

SEQ ID NO: 562230 - RNA, 19 nt, Homo sapiens
  misc_RNA (1)...(19): siRNA sense strand
ggacacgucggaacaaguc

SEQ ID NO: 562231 - RNA, 19 nt, Homo sapiens
  misc_RNA (1)...(19): siRNA sense strand
gaguggaauuccggaacua

SEQ ID NO: 562232 - RNA, 19 nt, Homo sapiens
  misc_RNA (1)...(19): siRNA sense strand
caaggaguauucagagacu

SEQ ID NO: 562233 - RNA, 19 nt, Homo sapiens
  misc_RNA (1)...(19): siRNA sense strand
cacaagggaucgccguguu

SEQ ID NO: 562234 - RNA, 19 nt, Homo sapiens
  misc_RNA (1)...(19): siRNA sense strand
gcgcuggcuuccaacuauu

SEQ ID NO: 562235 - RNA, 19 nt, Homo sapiens
  misc_RNA (1)...(19): siRNA sense strand
guacugggacuacaugaag

SEQ ID NO: 562236 - RNA, 19 nt, Homo sapiens
  misc_RNA (1)...(19): siRNA sense strand
gcaaagcaaauggagaaug

SEQ ID NO: 562237 - RNA, 19 nt, Homo sapiens
  misc_RNA (1)...(19): siRNA sense strand
aagcaaagcaaauggagaa

SEQ ID NO: 562238 - RNA, 19 nt, Homo sapiens
  misc_RNA (1)...(19): siRNA sense strand
gcagguggacgucaucauc

SEQ ID NO: 562239 - RNA, 19 nt, Homo sapiens
  misc_RNA (1)...(19): siRNA sense strand
gacuuggccacguacauua

SEQ ID NO: 562240 - RNA, 19 nt, Homo sapiens
  misc_RNA (1)...(19): siRNA sense strand
ucauggacuuggccacgua

SEQ ID NO: 562241 - RNA, 19 nt, Homo sapiens
  misc_RNA (1)...(19): siRNA sense strand
gaaggaaugcgccaagacu

SEQ ID NO: 562242 - RNA, 19 nt, Homo sapiens
  misc_RNA (1)...(19): siRNA sense strand
cagggaucaugcucacuuu

SEQ ID NO: 562243 - RNA, 19 nt, Homo sapiens
  misc_RNA (1)...(19): siRNA sense strand
ccaguacucggaugaagaa

SEQ ID NO: 562244 - RNA, 19 nt, Homo sapiens
  misc_RNA (1)...(19): siRNA sense strand
ggucaagcuuuccguguac

SEQ ID NO: 562245 - RNA, 19 nt, Homo sapiens
  misc_RNA (1)...(19): siRNA sense strand
uaaagaacuggaagaagga

SEQ ID NO: 562246 - RNA, 19 nt, Homo sapiens
  misc_RNA (1)...(19): siRNA sense strand
cucagugucuuacucauug

SEQ ID NO: 562247 - RNA, 19 nt, Homo sapiens
  misc_RNA (1)...(19): siRNA sense strand
ucaagcugaugaacgaaau

SEQ ID NO: 562248 - RNA, 19 nt, Homo sapiens
  misc_RNA (1)...(19): siRNA sense strand
ggaucaugcucacuuucug

SEQ ID NO: 562249 - RNA, 19 nt, Homo sapiens
  misc_RNA (1)...(19): siRNA sense strand
cagcagcuccuccuccuau

SEQ ID NO: 562250 - RNA, 19 nt, Homo sapiens
  misc_RNA (1)...(19): siRNA sense strand
gcacagcaugagcuacuug

SEQ ID NO: 562251 - RNA, 19 nt, Homo sapiens
  misc_RNA (1)...(19): siRNA sense strand
ggaucaaagugcuaaagcu

SEQ ID NO: 562252 - RNA, 19 nt, Homo sapiens
  misc_RNA (1)...(19): siRNA sense strand
gaugaacgaaauucucaau

SEQ ID NO: 562253 - RNA, 19 nt, Homo sapiens
  misc_RNA (1)...(19): siRNA sense strand
gcccgucaaugcugugaug

SEQ ID NO: 562254 - RNA, 19 nt, Homo sapiens
  misc_RNA (1)...(19): siRNA sense strand
augaggagguggaggcuuu

SEQ ID NO: 562255 - RNA, 19 nt, Homo sapiens
  misc_RNA (1)...(19): siRNA sense strand
ccaagguggaugcgaauga

SEQ ID NO: 562256 - RNA, 19 nt, Homo sapiens
  misc_RNA (1)...(19): siRNA sense strand
ucaaacgccugaggaucuu

SEQ ID NO: 562257 - RNA, 19 nt, Homo sapiens
  misc_RNA (1)...(19): siRNA sense strand
ggucagcccaacucucuug

SEQ ID NO: 562258 - RNA, 19 nt, Homo sapiens
  misc_RNA (1)...(19): siRNA sense strand
gaccaugaaugugcagaag

SEQ ID NO: 562259 - RNA, 19 nt, Homo sapiens
  misc_RNA (1)...(19): siRNA sense strand
auuggugccugcaucguua

SEQ ID NO: 562260 - RNA, 19 nt, Homo sapiens
  misc_RNA (1)...(19): siRNA sense strand
gggaaggaagcaaagcaaa

SEQ ID NO: 562261 - RNA, 19 nt, Homo sapiens
  misc_RNA (1)...(19): siRNA sense strand
gggcccuacuuccucauga

SEQ ID NO: 562262 - RNA, 19 nt, Homo sapiens
  misc_RNA (1)...(19): siRNA sense strand
guucaugggcucccuguuc

SEQ ID NO: 562263 - RNA, 19 nt, Homo sapiens
  misc_RNA (1)...(19): siRNA sense strand
cagggcaggucaagcuuuc

SEQ ID NO: 562264 - RNA, 19 nt, Homo sapiens
  misc_RNA (1)...(19): siRNA sense strand
ugauggcgaugaagaccaa

SEQ ID NO: 562265 - RNA, 19 nt, Homo sapiens
  misc_RNA (1)...(19): siRNA sense strand
gagauugucaaccucaugu

SEQ ID NO: 562266 - RNA, 19 nt, Homo sapiens
  misc_RNA (1)...(19): siRNA sense strand
acaccgugcugcuguuugu

SEQ ID NO: 562267 - RNA, 19 nt, Homo sapiens
  misc_RNA (1)...(19): siRNA sense strand
ucuuaaaguugcucaucaa

SEQ ID NO: 562268 - RNA, 19 nt, Homo sapiens
  misc_RNA (1)...(19): siRNA sense strand
ucccggaggucaucaagau

SEQ ID NO: 562269 - RNA, 19 nt, Homo sapiens
  misc_RNA (1)...(19): siRNA sense strand
ggacagugcagggaagcaa

SEQ ID NO: 562270 - RNA, 19 nt, Homo sapiens
  misc_RNA (1)...(19): siRNA sense strand
ggagguggaggcuuugauc

SEQ ID NO: 562271 - RNA, 19 nt, Homo sapiens
  misc_RNA (1)...(19): siRNA sense strand
gcaggucaccacguacuug

SEQ ID NO: 562272 - RNA, 19 nt, Homo sapiens
  misc_RNA (1)...(19): siRNA sense strand
agaaggaggagaccuggaa

SEQ ID NO: 562273 - RNA, 19 nt, Homo sapiens
  misc_RNA (1)...(19): siRNA sense strand
ucgugugggugccuuguuu

SEQ ID NO: 562274 - RNA, 19 nt, Homo sapiens
  misc_RNA (1)...(19): siRNA sense strand
ccacaucugcuucgucagu

SEQ ID NO: 562275 - RNA, 19 nt, Homo sapiens
  misc_RNA (1)...(19): siRNA sense strand
gcaccaguacuuccacauc

SEQ ID NO: 562276 - RNA, 19 nt, Homo sapiens
  misc_RNA (1)...(19): siRNA sense strand
gaugacaccucucaacaaa

SEQ ID NO: 562277 - RNA, 19 nt, Homo sapiens
  misc_RNA (1)...(19): siRNA sense strand
uaaaguugcucaucaaguu

SEQ ID NO: 562278 - RNA, 19 nt, Homo sapiens
  misc_RNA (1)...(19): siRNA sense strand
ggaagcaacugcagagaca

SEQ ID NO: 562279 - RNA, 19 nt, Homo sapiens
  misc_RNA (1)...(19): siRNA sense strand
ccaaggagcuggacacagu

SEQ ID NO: 562280 - RNA, 19 nt, Homo sapiens
  misc_RNA (1)...(19): siRNA sense strand
caacgagucugccgaagga

SEQ ID NO: 562281 - RNA, 19 nt, Homo sapiens
  misc_RNA (1)...(19): siRNA sense strand
gaucaagaccgcugucauu

SEQ ID NO: 562282 - RNA, 19 nt, Homo sapiens
  misc_RNA (1)...(19): siRNA sense strand
caaagcaaauggagaaugg

SEQ ID NO: 562283 - RNA, 19 nt, Homo sapiens
  misc_RNA (1)...(19): siRNA sense strand
gggcagaccucuucuacuc

SEQ ID NO: 562284 - RNA, 19 nt, Homo sapiens
  misc_RNA (1)...(19): siRNA sense strand
ccacguacauuaacaugau

SEQ ID NO: 562285 - RNA, 19 nt, Homo sapiens
  misc_RNA (1)...(19): siRNA sense strand
gaccgaggcuacauucaga

SEQ ID NO: 562286 - RNA, 19 nt, Homo sapiens
  misc_RNA (1)...(19): siRNA sense strand
uggagaggcucaaggagua

SEQ ID NO: 562287 - RNA, 19 nt, Homo sapiens
  misc_RNA (1)...(19): siRNA sense strand
gcagaccucuucuacucuu

SEQ ID NO: 562288 - RNA, 19 nt, Homo sapiens
  misc_RNA (1)...(19): siRNA sense strand
gaaggaagcaaagcaaaug

SEQ ID NO: 562289 - RNA, 19 nt, Homo sapiens
  misc_RNA (1)...(19): siRNA sense strand
ggccgcagaucuuaaaguu

SEQ ID NO: 562290 - RNA, 19 nt, Homo sapiens
  misc_RNA (1)...(19): siRNA sense strand
gaccuccgcuucaagauca

SEQ ID NO: 562291 - RNA, 19 nt, Homo sapiens
  misc_RNA (1)...(19): siRNA sense strand
aaggagaaauccaggagua

SEQ ID NO: 562292 - RNA, 19 nt, Homo sapiens
  misc_RNA (1)...(19): siRNA sense strand
caucugaaauggaaaccaa

SEQ ID NO: 562293 - RNA, 19 nt, Homo sapiens
  misc_RNA (1)...(19): siRNA sense strand
gcaacugcaucguucuguu

SEQ ID NO: 562294 - RNA, 19 nt, Homo sapiens
  misc_RNA (1)...(19): siRNA sense strand
ggaaagaagucggggcaua

SEQ ID NO: 562295 - RNA, 19 nt, Homo sapiens
  misc_RNA (1)...(19): siRNA sense strand
ugaacgaaauucucaaugg

SEQ ID NO: 562296 - RNA, 19 nt, Homo sapiens
  misc_RNA (1)...(19): siRNA sense strand
caagcuagaccaugaaugu

SEQ ID NO: 562297 - RNA, 19 nt, Homo sapiens
  misc_RNA (1)...(19): siRNA sense strand
guacucggaugaagaaguc

SEQ ID NO: 562298 - RNA, 19 nt, Homo sapiens
  misc_RNA (1)...(19): siRNA sense strand
gagaggaccuggacuucgu

SEQ ID NO: 562299 - RNA, 19 nt, Homo sapiens
  misc_RNA (1)...(19): siRNA sense strand
caacugcaucguucuguuu

SEQ ID NO: 562300 - RNA, 19 nt, Homo sapiens
  misc_RNA (1)...(19): siRNA sense strand
ggacuuggccacguacauu

SEQ ID NO: 562301 - RNA, 19 nt, Homo sapiens
  misc_RNA (1)...(19): siRNA sense strand
caacagcaccgcagaacug

SEQ ID NO: 562302 - RNA, 19 nt, Homo sapiens
  misc_RNA (1)...(19): siRNA sense strand
ggaaggaagcaaagcaaau

SEQ ID NO: 562303 - RNA, 19 nt, Homo sapiens
  misc_RNA (1)...(19): siRNA sense strand
gaucaaagugcuaaagcuu

SEQ ID NO: 562304 - RNA, 19 nt, Homo sapiens
  misc_RNA (1)...(19): siRNA sense strand
ugaaggugcugaagaaguc

SEQ ID NO: 562305 - RNA, 19 nt, Homo sapiens
  misc_RNA (1)...(19): siRNA sense strand
gcagagaggucuuuucuac

SEQ ID NO: 562306 - RNA, 19 nt, Homo sapiens
  misc_RNA (1)...(19): siRNA sense strand
ggaucuuucucucccauga

SEQ ID NO: 562307 - RNA, 19 nt, Homo sapiens
  misc_RNA (1)...(19): siRNA sense strand
cgaugaagaccaagacgua

SEQ ID NO: 562308 - RNA, 19 nt, Homo sapiens
  misc_RNA (1)...(19): siRNA sense strand
gcaucaacaucgccaagau

SEQ ID NO: 562309 - RNA, 19 nt, Homo sapiens
  misc_RNA (1)...(19): siRNA sense strand
gcugguagcccuagugugu

SEQ ID NO: 562310 - RNA, 19 nt, Homo sapiens
  misc_RNA (1)...(19): siRNA sense strand
agaaccagaaggccuauua

SEQ ID NO: 562311 - RNA, 19 nt, Homo sapiens
  misc_RNA (1)...(19): siRNA sense strand
ggacucaggagcacacgaa

SEQ ID NO: 562312 - RNA, 19 nt, Homo sapiens
  misc_RNA (1)...(19): siRNA sense strand
ccugggagcuggcauucaa

SEQ ID NO: 562313 - RNA, 19 nt, Homo sapiens
  misc_RNA (1)...(19): siRNA sense strand
cgaaagagaguuccaaggu

SEQ ID NO: 562314 - RNA, 19 nt, Homo sapiens
  misc_RNA (1)...(19): siRNA sense strand
uggcugagauggacaaagu

SEQ ID NO: 562315 - RNA, 19 nt, Homo sapiens
  misc_RNA (1)...(19): siRNA sense strand
gaagucugccuaccuguca

SEQ ID NO: 562316 - RNA, 19 nt, Homo sapiens
  misc_RNA (1)...(19): siRNA sense strand
cauugcaggucaccacgua

SEQ ID NO: 562317 - RNA, 19 nt, Homo sapiens
  misc_RNA (1)...(19): siRNA sense strand
cugacaagcuagaccauga

SEQ ID NO: 562318 - RNA, 19 nt, Homo sapiens
  misc_RNA (1)...(19): siRNA sense strand
ucuguuugcugcccuguuu

SEQ ID NO: 562319 - RNA, 19 nt, Homo sapiens
  misc_RNA (1)...(19): siRNA sense strand
gaccuggacuucguucuca

SEQ ID NO: 562320 - RNA, 19 nt, Homo sapiens
  misc_RNA (1)...(19): siRNA sense strand
gcaaagacaaucggaucaa

SEQ ID NO: 562321 - RNA, 19 nt, Homo sapiens
  misc_RNA (1)...(19): siRNA sense strand
gaaauucucaaugggauca

SEQ ID NO: 562322 - RNA, 19 nt, Homo sapiens
  misc_RNA (1)...(19): siRNA sense strand
caaagacaaucggaucaag

SEQ ID NO: 562323 - RNA, 19 nt, Homo sapiens
  misc_RNA (1)...(19): siRNA sense strand
cucaugagcuucuucuuca

SEQ ID NO: 562324 - RNA, 19 nt, Homo sapiens
  misc_RNA (1)...(19): siRNA sense strand
aaggagagaucaucaucga

SEQ ID NO: 562325 - RNA, 19 nt, Homo sapiens
  misc_RNA (1)...(19): siRNA sense strand
gagcugaaggugcugaaga

SEQ ID NO: 562326 - RNA, 19 nt, Homo sapiens
  misc_RNA (1)...(19): siRNA sense strand
uggaaugucacguggaaua

SEQ ID NO: 562327 - RNA, 19 nt, Homo sapiens
  misc_RNA (1)...(19): siRNA sense strand
ggaaggcccuggugaucac

SEQ ID NO: 562328 - RNA, 19 nt, Homo sapiens
  misc_RNA (1)...(19): siRNA sense strand
ccacgcugcuugcuaccuu

SEQ ID NO: 562329 - RNA, 19 nt, Homo sapiens
  misc_RNA (1)...(19): siRNA sense strand
gcgagugucucccucaaac

SEQ ID NO: 562330 - RNA, 19 nt, Homo sapiens
  misc_RNA (1)...(19): siRNA sense strand
ggacacgucggaacaaguc

SEQ ID NO: 562331 - RNA, 19 nt, Homo sapiens
  misc_RNA (1)...(19): siRNA sense strand
gaguggaauuccggaacua

SEQ ID NO: 562332 - RNA, 19 nt, Homo sapiens
  misc_RNA (1)...(19): siRNA sense strand
caaggaguauucagagacu

SEQ ID NO: 562333 - RNA, 19 nt, Homo sapiens
  misc_RNA (1)...(19): siRNA sense strand
cacaagggaucgccguguu

SEQ ID NO: 562334 - RNA, 19 nt, Homo sapiens
  misc_RNA (1)...(19): siRNA sense strand
gcgcuggcuuccaacuauu

SEQ ID NO: 562335 - RNA, 19 nt, Homo sapiens
  misc_RNA (1)...(19): siRNA sense strand
guacugggacuacaugaag

SEQ ID NO: 562336 - RNA, 19 nt, Homo sapiens
  misc_RNA (1)...(19): siRNA sense strand
gcaaagcaaauggagaaug

SEQ ID NO: 562337 - RNA, 19 nt, Homo sapiens
  misc_RNA (1)...(19): siRNA sense strand
aagcaaagcaaauggagaa

SEQ ID NO: 562338 - RNA, 19 nt, Homo sapiens
  misc_RNA (1)...(19): siRNA sense strand
gcagguggacgucaucauc

SEQ ID NO: 562339 - RNA, 19 nt, Homo sapiens
  misc_RNA (1)...(19): siRNA sense strand
gacuuggccacguacauua

SEQ ID NO: 562340 - RNA, 19 nt, Homo sapiens
  misc_RNA (1)...(19): siRNA sense strand
ucauggacuuggccacgua

SEQ ID NO: 562341 - RNA, 19 nt, Homo sapiens
  misc_RNA (1)...(19): siRNA sense strand
gaaggaaugcgccaagacu

SEQ ID NO: 562342 - RNA, 19 nt, Homo sapiens
  misc_RNA (1)...(19): siRNA sense strand
cagggaucaugcucacuuu

SEQ ID NO: 562343 - RNA, 19 nt, Homo sapiens
  misc_RNA (1)...(19): siRNA sense strand
ccaguacucggaugaagaa

SEQ ID NO: 562344 - RNA, 19 nt, Homo sapiens
  misc_RNA (1)...(19): siRNA sense strand
ggucaagcuuuccguguac

SEQ ID NO: 562345 - RNA, 19 nt, Homo sapiens
  misc_RNA (1)...(19): siRNA sense strand
uaaagaacuggaagaagga

SEQ ID NO: 562346 - RNA, 19 nt, Homo sapiens
  misc_RNA (1)...(19): siRNA sense strand
cucagugucuuacucauug

SEQ ID NO: 562347 - RNA, 19 nt, Homo sapiens
  misc_RNA (1)...(19): siRNA sense strand
ucaagcugaugaacgaaau

SEQ ID NO: 562348 - RNA, 19 nt, Homo sapiens
  misc_RNA (1)...(19): siRNA sense strand
ggaucaugcucacuuucug

SEQ ID NO: 562349 - RNA, 19 nt, Homo sapiens
  misc_RNA (1)...(19): siRNA sense strand
cagcagcuccuccuccuau

SEQ ID NO: 562350 - RNA, 19 nt, Homo sapiens
  misc_RNA (1)...(19): siRNA sense strand
gcacagcaugagcuacuug

SEQ ID NO: 562351 - RNA, 19 nt, Homo sapiens
  misc_RNA (1)...(19): siRNA sense strand
ggaucaaagugcuaaagcu

SEQ ID NO: 562352 - RNA, 19 nt, Homo sapiens
  misc_RNA (1)...(19): siRNA sense strand
gaugaacgaaauucucaau

SEQ ID NO: 562353 - RNA, 19 nt, Homo sapiens
  misc_RNA (1)...(19): siRNA sense strand
gcccgucaaugcugugaug

SEQ ID NO: 562354 - RNA, 19 nt, Homo sapiens
  misc_RNA (1)...(19): siRNA sense strand
augaggagguggaggcuuu

SEQ ID NO: 562355 - RNA, 19 nt, Homo sapiens
  misc_RNA (1)...(19): siRNA sense strand
ccaagguggaugcgaauga

SEQ ID NO: 562356 - RNA, 19 nt, Homo sapiens
  misc_RNA (1)...(19): siRNA sense strand
ucaaacgccugaggaucuu

SEQ ID NO: 562357 - RNA, 19 nt, Homo sapiens
  misc_RNA (1)...(19): siRNA sense strand
ggucagcccaacucucuug

SEQ ID NO: 562358 - RNA, 19 nt, Homo sapiens
  misc_RNA (1)...(19): siRNA sense strand
gaccaugaaugugcagaag

SEQ ID NO: 562359 - RNA, 19 nt, Homo sapiens
  misc_RNA (1)...(19): siRNA sense strand
auuggugccugcaucguua

SEQ ID NO: 562360 - RNA, 19 nt, Homo sapiens
  misc_RNA (1)...(19): siRNA sense strand
gggaaggaagcaaagcaaa

SEQ ID NO: 562361 - RNA, 19 nt, Homo sapiens
  misc_RNA (1)...(19): siRNA sense strand
gggcccuacuuccucauga

SEQ ID NO: 562362 - RNA, 19 nt, Homo sapiens
  misc_RNA (1)...(19): siRNA sense strand
guucaugggcucccuguuc

SEQ ID NO: 562363 - RNA, 19 nt, Homo sapiens
  misc_RNA (1)...(19): siRNA sense strand
cagggcaggucaagcuuuc

SEQ ID NO: 562364 - RNA, 19 nt, Homo sapiens
  misc_RNA (1)...(19): siRNA sense strand
ugauggcgaugaagaccaa

SEQ ID NO: 562365 - RNA, 19 nt, Homo sapiens
  misc_RNA (1)...(19): siRNA sense strand
gagauugucaaccucaugu

SEQ ID NO: 562366 - RNA, 19 nt, Homo sapiens
  misc_RNA (1)...(19): siRNA sense strand
acaccgugcugcuguuugu

SEQ ID NO: 562367 - RNA, 19 nt, Homo sapiens
  misc_RNA (1)...(19): siRNA sense strand
ucuuaaaguugcucaucaa

SEQ ID NO: 562368 - RNA, 19 nt, Homo sapiens
  misc_RNA (1)...(19): siRNA sense strand
ucccggaggucaucaagau

SEQ ID NO: 562369 - RNA, 19 nt, Homo sapiens
  misc_RNA (1)...(19): siRNA sense strand
ggacagugcagggaagcaa

SEQ ID NO: 562370 - RNA, 19 nt, Homo sapiens
  misc_RNA (1)...(19): siRNA sense strand
ggagguggaggcuuugauc

SEQ ID NO: 562371 - RNA, 19 nt, Homo sapiens
  misc_RNA (1)...(19): siRNA sense strand
gcaggucaccacguacuug

SEQ ID NO: 562372 - RNA, 19 nt, Homo sapiens
  misc_RNA (1)...(19): siRNA sense strand
agaaggaggagaccuggaa

SEQ ID NO: 562373 - RNA, 19 nt, Homo sapiens
  misc_RNA (1)...(19): siRNA sense strand
ucgugugggugccuuguuu

SEQ ID NO: 562374 - RNA, 19 nt, Homo sapiens
  misc_RNA (1)...(19): siRNA sense strand
ccacaucugcuucgucagu

SEQ ID NO: 562375 - RNA, 19 nt, Homo sapiens
  misc_RNA (1)...(19): siRNA sense strand
gcaccaguacuuccacauc

SEQ ID NO: 562376 - RNA, 19 nt, Homo sapiens
  misc_RNA (1)...(19): siRNA sense strand
gaugacaccucucaacaaa

SEQ ID NO: 562377 - RNA, 19 nt, Homo sapiens
  misc_RNA (1)...(19): siRNA sense strand
uaaaguugcucaucaaguu

SEQ ID NO: 562378 - RNA, 19 nt, Homo sapiens
  misc_RNA (1)...(19): siRNA sense strand
ggaagcaacugcagagaca

SEQ ID NO: 562379 - RNA, 19 nt, Homo sapiens
  misc_RNA (1)...(19): siRNA sense strand
ccaaggagcuggacacagu

SEQ ID NO: 562380 - RNA, 19 nt, Homo sapiens
  misc_RNA (1)...(19): siRNA sense strand
caacgagucugccgaagga

SEQ ID NO: 562381 - RNA, 19 nt, Homo sapiens
  misc_RNA (1)...(19): siRNA sense strand
gaucaagaccgcugucauu

SEQ ID NO: 562382 - RNA, 19 nt, Homo sapiens
  misc_RNA (1)...(19): siRNA sense strand
caaagcaaauggagaaugg

SEQ ID NO: 562383 - RNA, 19 nt, Homo sapiens
  misc_RNA (1)...(19): siRNA sense strand
gggcagaccucuucuacuc

SEQ ID NO: 562384 - RNA, 19 nt, Homo sapiens
  misc_RNA (1)...(19): siRNA sense strand
ccacguacauuaacaugau

SEQ ID NO: 562385 - RNA, 19 nt, Homo sapiens
  misc_RNA (1)...(19): siRNA sense strand
gaccgaggcuacauucaga

SEQ ID NO: 562386 - RNA, 19 nt, Homo sapiens
  misc_RNA (1)...(19): siRNA sense strand
uggagaggcucaaggagua

SEQ ID NO: 562387 - RNA, 19 nt, Homo sapiens
  misc_RNA (1)...(19): siRNA sense strand
gcagaccucuucuacucuu

SEQ ID NO: 562388 - RNA, 19 nt, Homo sapiens
  misc_RNA (1)...(19): siRNA sense strand
gaaggaagcaaagcaaaug

SEQ ID NO: 562389 - RNA, 19 nt, Homo sapiens
  misc_RNA (1)...(19): siRNA sense strand
ggccgcagaucuuaaaguu

SEQ ID NO: 562390 - RNA, 19 nt, Homo sapiens
  misc_RNA (1)...(19): siRNA sense strand
gaccuccgcuucaagauca

SEQ ID NO: 562391 - RNA, 19 nt, Homo sapiens
  misc_RNA (1)...(19): siRNA sense strand
aaggagaaauccaggagua

SEQ ID NO: 562392 - RNA, 19 nt, Homo sapiens
  misc_RNA (1)...(19): siRNA sense strand
caucugaaauggaaaccaa

SEQ ID NO: 562393 - RNA, 19 nt, Homo sapiens
  misc_RNA (1)...(19): siRNA sense strand
gcaacugcaucguucuguu

SEQ ID NO: 562394 - RNA, 19 nt, Homo sapiens
  misc_RNA (1)...(19): siRNA sense strand
ggaaagaagucggggcaua

SEQ ID NO: 562395 - RNA, 19 nt, Homo sapiens
  misc_RNA (1)...(19): siRNA sense strand
ugaacgaaauucucaaugg

SEQ ID NO: 562396 - RNA, 19 nt, Homo sapiens
  misc_RNA (1)...(19): siRNA sense strand
caagcuagaccaugaaugu

SEQ ID NO: 562397 - RNA, 19 nt, Homo sapiens
  misc_RNA (1)...(19): siRNA sense strand
guacucggaugaagaaguc

SEQ ID NO: 562398 - RNA, 19 nt, Homo sapiens
  misc_RNA (1)...(19): siRNA sense strand
gagaggaccuggacuucgu

SEQ ID NO: 562399 - RNA, 19 nt, Homo sapiens
  misc_RNA (1)...(19): siRNA sense strand
caacugcaucguucuguuu

SEQ ID NO: 562400 - RNA, 19 nt, Homo sapiens
  misc_RNA (1)...(19): siRNA sense strand
ggacuuggccacguacauu

SEQ ID NO: 562401 - RNA, 19 nt, Homo sapiens
  misc_RNA (1)...(19): siRNA sense strand
caacagcaccgcagaacug

SEQ ID NO: 562402 - RNA, 19 nt, Homo sapiens
  misc_RNA (1)...(19): siRNA sense strand
ggaaggaagcaaagcaaau

SEQ ID NO: 562403 - RNA, 19 nt, Homo sapiens
  misc_RNA (1)...(19): siRNA sense strand
gaucaaagugcuaaagcuu

SEQ ID NO: 562404 - RNA, 19 nt, Homo sapiens
  misc_RNA (1)...(19): siRNA sense strand
ugaaggugcugaagaaguc

SEQ ID NO: 562405 - RNA, 19 nt, Homo sapiens
  misc_RNA (1)...(19): siRNA sense strand
gcagagaggucuuuucuac

SEQ ID NO: 562406 - RNA, 19 nt, Homo sapiens
  misc_RNA (1)...(19): siRNA sense strand
ggaucuuucucucccauga

SEQ ID NO: 562407 - RNA, 19 nt, Homo sapiens
  misc_RNA (1)...(19): siRNA sense strand
cgaugaagaccaagacgua

SEQ ID NO: 562408 - RNA, 19 nt, Homo sapiens
  misc_RNA (1)...(19): siRNA sense strand
gcaucaacaucgccaagau

SEQ ID NO: 562409 - RNA, 19 nt, Homo sapiens
  misc_RNA (1)...(19): siRNA sense strand
gcugguagcccuagugugu

SEQ ID NO: 562410 - RNA, 19 nt, Homo sapiens
  misc_RNA (1)...(19): siRNA sense strand
agaaccagaaggccuauua

SEQ ID NO: 562411 - RNA, 19 nt, Homo sapiens
  misc_RNA (1)...(19): siRNA sense strand
ggacucaggagcacacgaa

SEQ ID NO: 562412 - RNA, 19 nt, Homo sapiens
  misc_RNA (1)...(19): siRNA sense strand
ccugggagcuggcauucaa

SEQ ID NO: 562413 - RNA, 19 nt, Homo sapiens
  misc_RNA (1)...(19): siRNA sense strand
cgaaagagaguuccaaggu

SEQ ID NO: 562414 - RNA, 19 nt, Homo sapiens
  misc_RNA (1)...(19): siRNA sense strand
uggcugagauggacaaagu

SEQ ID NO: 562415 - RNA, 19 nt, Homo sapiens
  misc_RNA (1)...(19): siRNA sense strand
gaagucugccuaccuguca

SEQ ID NO: 562416 - RNA, 19 nt, Homo sapiens
  misc_RNA (1)...(19): siRNA sense strand
cauugcaggucaccacgua

SEQ ID NO: 562417 - RNA, 19 nt, Homo sapiens
  misc_RNA (1)...(19): siRNA sense strand
cugacaagcuagaccauga

SEQ ID NO: 562418 - RNA, 19 nt, Homo sapiens
  misc_RNA (1)...(19): siRNA sense strand
ucuguuugcugcccuguuu

SEQ ID NO: 562419 - RNA, 19 nt, Homo sapiens
  misc_RNA (1)...(19): siRNA sense strand
gaccuggacuucguucuca

SEQ ID NO: 562420 - RNA, 19 nt, Homo sapiens
  misc_RNA (1)...(19): siRNA sense strand
gcaaagacaaucggaucaa

SEQ ID NO: 562421 - RNA, 19 nt, Homo sapiens
  misc_RNA (1)...(19): siRNA sense strand
gaaauucucaaugggauca

SEQ ID NO: 562422 - RNA, 19 nt, Homo sapiens
  misc_RNA (1)...(19): siRNA sense strand
caaagacaaucggaucaag

SEQ ID NO: 562423 - RNA, 19 nt, Homo sapiens
  misc_RNA (1)...(19): siRNA sense strand
cucaugagcuucuucuuca

SEQ ID NO: 562424 - RNA, 19 nt, Homo sapiens
  misc_RNA (1)...(19): siRNA sense strand
aaggagagaucaucaucga

SEQ ID NO: 562425 - RNA, 19 nt, Homo sapiens
  misc_RNA (1)...(19): siRNA sense strand
gagcugaaggugcugaaga

SEQ ID NO: 562426 - RNA, 19 nt, Homo sapiens
  misc_RNA (1)...(19): siRNA sense strand
uggaaugucacguggaaua

SEQ ID NO: 562427 - RNA, 19 nt, Homo sapiens
  misc_RNA (1)...(19): siRNA sense strand
ggaaggcccuggugaucac

SEQ ID NO: 562428 - RNA, 19 nt, Homo sapiens
  misc_RNA (1)...(19): siRNA sense strand
ccacgcugcuugcuaccuu

SEQ ID NO: 562429 - RNA, 19 nt, Homo sapiens
  misc_RNA (1)...(19): siRNA sense strand
gcgagugucucccucaaac

SEQ ID NO: 562430 - RNA, 19 nt, Homo sapiens
  misc_RNA (1)...(19): siRNA sense strand
ggacacgucggaacaaguc

SEQ ID NO: 562431 - RNA, 19 nt, Homo sapiens
  misc_RNA (1)...(19): siRNA sense strand
gaguggaauuccggaacua

SEQ ID NO: 562432 - RNA, 19 nt, Homo sapiens
  misc_RNA (1)...(19): siRNA sense strand
caaggaguauucagagacu

SEQ ID NO: 562433 - RNA, 19 nt, Homo sapiens
  misc_RNA (1)...(19): siRNA sense strand
cacaagggaucgccguguu

SEQ ID NO: 562434 - RNA, 19 nt, Homo sapiens
  misc_RNA (1)...(19): siRNA sense strand
gcgcuggcuuccaacuauu

SEQ ID NO: 562435 - RNA, 19 nt, Homo sapiens
  misc_RNA (1)...(19): siRNA sense strand
guacugggacuacaugaag

SEQ ID NO: 562436 - RNA, 19 nt, Homo sapiens
  misc_RNA (1)...(19): siRNA sense strand
gcaaagcaaauggagaaug

SEQ ID NO: 562437 - RNA, 19 nt, Homo sapiens
  misc_RNA (1)...(19): siRNA sense strand
aagcaaagcaaauggagaa

SEQ ID NO: 562438 - RNA, 19 nt, Homo sapiens
  misc_RNA (1)...(19): siRNA sense strand
gcagguggacgucaucauc

SEQ ID NO: 562439 - RNA, 19 nt, Homo sapiens
  misc_RNA (1)...(19): siRNA sense strand
gacuuggccacguacauua

SEQ ID NO: 562440 - RNA, 19 nt, Homo sapiens
  misc_RNA (1)...(19): siRNA sense strand
ucauggacuuggccacgua

SEQ ID NO: 562441 - RNA, 19 nt, Homo sapiens
  misc_RNA (1)...(19): siRNA sense strand
gaaggaaugcgccaagacu

SEQ ID NO: 562442 - RNA, 19 nt, Homo sapiens
  misc_RNA (1)...(19): siRNA sense strand
cagggaucaugcucacuuu

SEQ ID NO: 562443 - RNA, 19 nt, Homo sapiens
  misc_RNA (1)...(19): siRNA sense strand
ccaguacucggaugaagaa

SEQ ID NO: 562444 - RNA, 19 nt, Homo sapiens
  misc_RNA (1)...(19): siRNA sense strand
ggucaagcuuuccguguac

SEQ ID NO: 562445 - RNA, 19 nt, Homo sapiens
  misc_RNA (1)...(19): siRNA sense strand
uaaagaacuggaagaagga

SEQ ID NO: 562446 - RNA, 19 nt, Homo sapiens
  misc_RNA (1)...(19): siRNA sense strand
cucagugucuuacucauug

SEQ ID NO: 562447 - RNA, 19 nt, Homo sapiens
  misc_RNA (1)...(19): siRNA sense strand
ucaagcugaugaacgaaau

SEQ ID NO: 562448 - RNA, 19 nt, Homo sapiens
  misc_RNA (1)...(19): siRNA sense strand
ggaucaugcucacuuucug

SEQ ID NO: 562449 - RNA, 19 nt, Homo sapiens
  misc_RNA (1)...(19): siRNA sense strand
cagcagcuccuccuccuau

SEQ ID NO: 562450 - RNA, 19 nt, Homo sapiens
  misc_RNA (1)...(19): siRNA sense strand
gcacagcaugagcuacuug

SEQ ID NO: 562451 - RNA, 19 nt, Homo sapiens
  misc_RNA (1)...(19): siRNA sense strand
ggaucaaagugcuaaagcu

SEQ ID NO: 562452 - RNA, 19 nt, Homo sapiens
  misc_RNA (1)...(19): siRNA sense strand
gaugaacgaaauucucaau

SEQ ID NO: 562453 - RNA, 19 nt, Homo sapiens
  misc_RNA (1)...(19): siRNA sense strand
gcccgucaaugcugugaug

SEQ ID NO: 562454 - RNA, 19 nt, Homo sapiens
  misc_RNA (1)...(19): siRNA sense strand
augaggagguggaggcuuu

SEQ ID NO: 562455 - RNA, 19 nt, Homo sapiens
  misc_RNA (1)...(19): siRNA sense strand
ccaagguggaugcgaauga

SEQ ID NO: 562456 - RNA, 19 nt, Homo sapiens
  misc_RNA (1)...(19): siRNA sense strand
ucaaacgccugaggaucuu

SEQ ID NO: 562457 - RNA, 19 nt, Homo sapiens
  misc_RNA (1)...(19): siRNA sense strand
ggucagcccaacucucuug

SEQ ID NO: 562458 - RNA, 19 nt, Homo sapiens
  misc_RNA (1)...(19): siRNA sense strand
gaccaugaaugugcagaag

SEQ ID NO: 562459 - RNA, 19 nt, Homo sapiens
  misc_RNA (1)...(19): siRNA sense strand
auuggugccugcaucguua

SEQ ID NO: 562460 - RNA, 19 nt, Homo sapiens
  misc_RNA (1)...(19): siRNA sense strand
gggaaggaagcaaagcaaa

SEQ ID NO: 562461 - RNA, 19 nt, Homo sapiens
  misc_RNA (1)...(19): siRNA sense strand
gggcccuacuuccucauga

SEQ ID NO: 562462 - RNA, 19 nt, Homo sapiens
  misc_RNA (1)...(19): siRNA sense strand
guucaugggcucccuguuc

SEQ ID NO: 562463 - RNA, 19 nt, Homo sapiens
  misc_RNA (1)...(19): siRNA sense strand
cagggcaggucaagcuuuc

SEQ ID NO: 562464 - RNA, 19 nt, Homo sapiens
  misc_RNA (1)...(19): siRNA sense strand
ugauggcgaugaagaccaa

SEQ ID NO: 562465 - RNA, 19 nt, Homo sapiens
  misc_RNA (1)...(19): siRNA sense strand
gagauugucaaccucaugu

SEQ ID NO: 562466 - RNA, 19 nt, Homo sapiens
  misc_RNA (1)...(19): siRNA sense strand
acaccgugcugcuguuugu

SEQ ID NO: 562467 - RNA, 19 nt, Homo sapiens
  misc_RNA (1)...(19): siRNA sense strand
ucuuaaaguugcucaucaa

SEQ ID NO: 562468 - RNA, 19 nt, Homo sapiens
  misc_RNA (1)...(19): siRNA sense strand
ucccggaggucaucaagau

SEQ ID NO: 562469 - RNA, 19 nt, Homo sapiens
  misc_RNA (1)...(19): siRNA sense strand
ggacagugcagggaagcaa

SEQ ID NO: 562470 - RNA, 19 nt, Homo sapiens
  misc_RNA (1)...(19): siRNA sense strand
ggagguggaggcuuugauc

SEQ ID NO: 562471 - RNA, 19 nt, Homo sapiens
  misc_RNA (1)...(19): siRNA sense strand
gcaggucaccacguacuug

SEQ ID NO: 562472 - RNA, 19 nt, Homo sapiens
  misc_RNA (1)...(19): siRNA sense strand
agaaggaggagaccuggaa

SEQ ID NO: 562473 - RNA, 19 nt, Homo sapiens
  misc_RNA (1)...(19): siRNA sense strand
ucgugugggugccuuguuu

SEQ ID NO: 562474 - RNA, 19 nt, Homo sapiens
  misc_RNA (1)...(19): siRNA sense strand
ccacaucugcuucgucagu

SEQ ID NO: 562475 - RNA, 19 nt, Homo sapiens
  misc_RNA (1)...(19): siRNA sense strand
gcaccaguacuuccacauc

SEQ ID NO: 562476 - RNA, 19 nt, Homo sapiens
  misc_RNA (1)...(19): siRNA sense strand
gaugacaccucucaacaaa

SEQ ID NO: 562477 - RNA, 19 nt, Homo sapiens
  misc_RNA (1)...(19): siRNA sense strand
uaaaguugcucaucaaguu

SEQ ID NO: 562478 - RNA, 19 nt, Homo sapiens
  misc_RNA (1)...(19): siRNA sense strand
ggaagcaacugcagagaca

SEQ ID NO: 562479 - RNA, 19 nt, Homo sapiens
  misc_RNA (1)...(19): siRNA sense strand
ccaaggagcuggacacagu

SEQ ID NO: 562480 - RNA, 19 nt, Homo sapiens
  misc_RNA (1)...(19): siRNA sense strand
caacgagucugccgaagga

SEQ ID NO: 562481 - RNA, 19 nt, Homo sapiens
  misc_RNA (1)...(19): siRNA sense strand
gaucaagaccgcugucauu

SEQ ID NO: 562482 - RNA, 19 nt, Homo sapiens
  misc_RNA (1)...(19): siRNA sense strand
caaagcaaauggagaaugg

SEQ ID NO: 562483 - RNA, 19 nt, Homo sapiens
  misc_RNA (1)...(19): siRNA sense strand
gggcagaccucuucuacuc

SEQ ID NO: 562484 - RNA, 19 nt, Homo sapiens
  misc_RNA (1)...(19): siRNA sense strand
ccacguacauuaacaugau

SEQ ID NO: 562485 - RNA, 19 nt, Homo sapiens
  misc_RNA (1)...(19): siRNA sense strand
gaccgaggcuacauucaga

SEQ ID NO: 562486 - RNA, 19 nt, Homo sapiens
  misc_RNA (1)...(19): siRNA sense strand
uggagaggcucaaggagua

SEQ ID NO: 562487 - RNA, 19 nt, Homo sapiens
  misc_RNA (1)...(19): siRNA sense strand
gcagaccucuucuacucuu

SEQ ID NO: 562488 - RNA, 19 nt, Homo sapiens
  misc_RNA (1)...(19): siRNA sense strand
gaaggaagcaaagcaaaug

SEQ ID NO: 562489 - RNA, 19 nt, Homo sapiens
  misc_RNA (1)...(19): siRNA sense strand
ggccgcagaucuuaaaguu

SEQ ID NO: 562490 - RNA, 19 nt, Homo sapiens
  misc_RNA (1)...(19): siRNA sense strand
gaccuccgcuucaagauca

SEQ ID NO: 562491 - RNA, 19 nt, Homo sapiens
  misc_RNA (1)...(19): siRNA sense strand
aaggagaaauccaggagua

SEQ ID NO: 562492 - RNA, 19 nt, Homo sapiens
  misc_RNA (1)...(19): siRNA sense strand
caucugaaauggaaaccaa

SEQ ID NO: 562493 - RNA, 19 nt, Homo sapiens
  misc_RNA (1)...(19): siRNA sense strand
gcaacugcaucguucuguu

SEQ ID NO: 562494 - RNA, 19 nt, Homo sapiens
  misc_RNA (1)...(19): siRNA sense strand
ggaaagaagucggggcaua

SEQ ID NO: 562495 - RNA, 19 nt, Homo sapiens
  misc_RNA (1)...(19): siRNA sense strand
ugaacgaaauucucaaugg

SEQ ID NO: 562496 - RNA, 19 nt, Homo sapiens
  misc_RNA (1)...(19): siRNA sense strand
caagcuagaccaugaaugu

SEQ ID NO: 562497 - RNA, 19 nt, Homo sapiens
  misc_RNA (1)...(19): siRNA sense strand
guacucggaugaagaaguc

SEQ ID NO: 562498 - RNA, 19 nt, Homo sapiens
  misc_RNA (1)...(19): siRNA sense strand
gagaggaccuggacuucgu

SEQ ID NO: 562499 - RNA, 19 nt, Homo sapiens
  misc_RNA (1)...(19): siRNA sense strand
caacugcaucguucuguuu

SEQ ID NO: 562500 - RNA, 19 nt, Homo sapiens
  misc_RNA (1)...(19): siRNA sense strand
ggacuuggccacguacauu

SEQ ID NO: 562501 - RNA, 19 nt, Homo sapiens
  misc_RNA (1)...(19): siRNA sense strand
caacagcaccgcagaacug

SEQ ID NO: 562502 - RNA, 19 nt, Homo sapiens
  misc_RNA (1)...(19): siRNA sense strand
ggaaggaagcaaagcaaau

SEQ ID NO: 562503 - RNA, 19 nt, Homo sapiens
  misc_RNA (1)...(19): siRNA sense strand
gaucaaagugcuaaagcuu

SEQ ID NO: 562504 - RNA, 19 nt, Homo sapiens
  misc_RNA (1)...(19): siRNA sense strand
ugaaggugcugaagaaguc

SEQ ID NO: 562505 - RNA, 19 nt, Homo sapiens
  misc_RNA (1)...(19): siRNA sense strand
gcagagaggucuuuucuac

SEQ ID NO: 562506 - RNA, 19 nt, Homo sapiens
  misc_RNA (1)...(19): siRNA sense strand
ggaucuuucucucccauga

SEQ ID NO: 562507 - RNA, 19 nt, Homo sapiens
  misc_RNA (1)...(19): siRNA sense strand
cgaugaagaccaagacgua

SEQ ID NO: 562508 - RNA, 19 nt, Homo sapiens
  misc_RNA (1)...(19): siRNA sense strand
gcaucaacaucgccaagau

SEQ ID NO: 562509 - RNA, 19 nt, Homo sapiens
  misc_RNA (1)...(19): siRNA sense strand
gcugguagcccuagugugu

SEQ ID NO: 562510 - RNA, 19 nt, Homo sapiens
  misc_RNA (1)...(19): siRNA sense strand
agaaccagaaggccuauua

SEQ ID NO: 562511 - RNA, 19 nt, Homo sapiens
  misc_RNA (1)...(19): siRNA sense strand
ggacucaggagcacacgaa

SEQ ID NO: 562512 - RNA, 19 nt, Homo sapiens
  misc_RNA (1)...(19): siRNA sense strand
ccugggagcuggcauucaa

SEQ ID NO: 562513 - RNA, 19 nt, Homo sapiens
  misc_RNA (1)...(19): siRNA sense strand
cgaaagagaguuccaaggu

SEQ ID NO: 562514 - RNA, 19 nt, Homo sapiens
  misc_RNA (1)...(19): siRNA sense strand
uggcugagauggacaaagu

SEQ ID NO: 562515 - RNA, 19 nt, Homo sapiens
  misc_RNA (1)...(19): siRNA sense strand
gaagucugccuaccuguca

SEQ ID NO: 562516 - RNA, 19 nt, Homo sapiens
  misc_RNA (1)...(19): siRNA sense strand
cauugcaggucaccacgua

SEQ ID NO: 562517 - RNA, 19 nt, Homo sapiens
  misc_RNA (1)...(19): siRNA sense strand
cugacaagcuagaccauga

SEQ ID NO: 562518 - RNA, 19 nt, Homo sapiens
  misc_RNA (1)...(19): siRNA sense strand
ucuguuugcugcccuguuu

SEQ ID NO: 562519 - RNA, 19 nt, Homo sapiens
  misc_RNA (1)...(19): siRNA sense strand
gaccuggacuucguucuca

SEQ ID NO: 562520 - RNA, 19 nt, Homo sapiens
  misc_RNA (1)...(19): siRNA sense strand
gcaaagacaaucggaucaa

SEQ ID NO: 562521 - RNA, 19 nt, Homo sapiens
  misc_RNA (1)...(19): siRNA sense strand
gaaauucucaaugggauca

SEQ ID NO: 562522 - RNA, 19 nt, Homo sapiens
  misc_RNA (1)...(19): siRNA sense strand
caaagacaaucggaucaag

SEQ ID NO: 562523 - RNA, 19 nt, Homo sapiens
  misc_RNA (1)...(19): siRNA sense strand
cucaugagcuucuucuuca

SEQ ID NO: 562524 - RNA, 19 nt, Homo sapiens
  misc_RNA (1)...(19): siRNA sense strand
aaggagagaucaucaucga

SEQ ID NO: 562525 - RNA, 19 nt, Homo sapiens
  misc_RNA (1)...(19): siRNA sense strand
gagcugaaggugcugaaga

SEQ ID NO: 562526 - RNA, 19 nt, Homo sapiens
  misc_RNA (1)...(19): siRNA sense strand
uggaaugucacguggaaua

SEQ ID NO: 562527 - RNA, 19 nt, Homo sapiens
  misc_RNA (1)...(19): siRNA sense strand
ggaaggcccuggugaucac

SEQ ID NO: 562528 - RNA, 19 nt, Homo sapiens
  misc_RNA (1)...(19): siRNA sense strand
ccacgcugcuugcuaccuu

SEQ ID NO: 562529 - RNA, 19 nt, Homo sapiens
  misc_RNA (1)...(19): siRNA sense strand
gcgagugucucccucaaac

SEQ ID NO: 562530 - RNA, 19 nt, Homo sapiens
  misc_RNA (1)...(19): siRNA sense strand
ggacacgucggaacaaguc

SEQ ID NO: 562531 - RNA, 19 nt, Homo sapiens
  misc_RNA (1)...(19): siRNA sense strand
gaguggaauuccggaacua

SEQ ID NO: 562532 - RNA, 19 nt, Homo sapiens
  misc_RNA (1)...(19): siRNA sense strand
caaggaguauucagagacu

SEQ ID NO: 562533 - RNA, 19 nt, Homo sapiens
  misc_RNA (1)...(19): siRNA sense strand
cacaagggaucgccguguu

SEQ ID NO: 562534 - RNA, 19 nt, Homo sapiens
  misc_RNA (1)...(19): siRNA sense strand
gcgcuggcuuccaacuauu

SEQ ID NO: 562535 - RNA, 19 nt, Homo sapiens
  misc_RNA (1)...(19): siRNA sense strand
guacugggacuacaugaag

SEQ ID NO: 562536 - RNA, 19 nt, Homo sapiens
  misc_RNA (1)...(19): siRNA sense strand
gcaaagcaaauggagaaug

SEQ ID NO: 562537 - RNA, 19 nt, Homo sapiens
  misc_RNA (1)...(19): siRNA sense strand
aagcaaagcaaauggagaa

SEQ ID NO: 562538 - RNA, 19 nt, Homo sapiens
  misc_RNA (1)...(19): siRNA sense strand
gcagguggacgucaucauc

SEQ ID NO: 562539 - RNA, 19 nt, Homo sapiens
  misc_RNA (1)...(19): siRNA sense strand
gacuuggccacguacauua

SEQ ID NO: 562540 - RNA, 19 nt, Homo sapiens
  misc_RNA (1)...(19): siRNA sense strand
ucauggacuuggccacgua

SEQ ID NO: 562541 - RNA, 19 nt, Homo sapiens
  misc_RNA (1)...(19): siRNA sense strand
gaaggaaugcgccaagacu

SEQ ID NO: 562542 - RNA, 19 nt, Homo sapiens
  misc_RNA (1)...(19): siRNA sense strand
cagggaucaugcucacuuu

SEQ ID NO: 562543 - RNA, 19 nt, Homo sapiens
  misc_RNA (1)...(19): siRNA sense strand
ccaguacucggaugaagaa

SEQ ID NO: 562544 - RNA, 19 nt, Homo sapiens
  misc_RNA (1)...(19): siRNA sense strand
ggucaagcuuuccguguac

SEQ ID NO: 562545 - RNA, 19 nt, Homo sapiens
  misc_RNA (1)...(19): siRNA sense strand
uaaagaacuggaagaagga

SEQ ID NO: 562546 - RNA, 19 nt, Homo sapiens
  misc_RNA (1)...(19): siRNA sense strand
cucagugucuuacucauug

SEQ ID NO: 562547 - RNA, 19 nt, Homo sapiens
  misc_RNA (1)...(19): siRNA sense strand
ucaagcugaugaacgaaau

SEQ ID NO: 562548 - RNA, 19 nt, Homo sapiens
  misc_RNA (1)...(19): siRNA sense strand
ggaucaugcucacuuucug

SEQ ID NO: 562549 - RNA, 19 nt, Homo sapiens
  misc_RNA (1)...(19): siRNA sense strand
cagcagcuccuccuccuau

SEQ ID NO: 562550 - RNA, 19 nt, Homo sapiens
  misc_RNA (1)...(19): siRNA sense strand
gcacagcaugagcuacuug

SEQ ID NO: 562551 - RNA, 19 nt, Homo sapiens
  misc_RNA (1)...(19): siRNA sense strand
ggaucaaagugcuaaagcu

SEQ ID NO: 562552 - RNA, 19 nt, Homo sapiens
  misc_RNA (1)...(19): siRNA sense strand
gaugaacgaaauucucaau

SEQ ID NO: 562553 - RNA, 19 nt, Homo sapiens
  misc_RNA (1)...(19): siRNA sense strand
gcccgucaaugcugugaug

SEQ ID NO: 562554 - RNA, 19 nt, Homo sapiens
  misc_RNA (1)...(19): siRNA sense strand
augaggagguggaggcuuu

SEQ ID NO: 562555 - RNA, 19 nt, Homo sapiens
  misc_RNA (1)...(19): siRNA sense strand
ccaagguggaugcgaauga

SEQ ID NO: 562556 - RNA, 19 nt, Homo sapiens
  misc_RNA (1)...(19): siRNA sense strand
ucaaacgccugaggaucuu

SEQ ID NO: 562557 - RNA, 19 nt, Homo sapiens
  misc_RNA (1)...(19): siRNA sense strand
ggucagcccaacucucuug

SEQ ID NO: 562558 - RNA, 19 nt, Homo sapiens
  misc_RNA (1)...(19): siRNA sense strand
gaccaugaaugugcagaag

SEQ ID NO: 562559 - RNA, 19 nt, Homo sapiens
  misc_RNA (1)...(19): siRNA sense strand
auuggugccugcaucguua

SEQ ID NO: 562560 - RNA, 19 nt, Homo sapiens
  misc_RNA (1)...(19): siRNA sense strand
gggaaggaagcaaagcaaa

SEQ ID NO: 562561 - RNA, 19 nt, Homo sapiens
  misc_RNA (1)...(19): siRNA sense strand
gggcccuacuuccucauga

SEQ ID NO: 562562 - RNA, 19 nt, Homo sapiens
  misc_RNA (1)...(19): siRNA sense strand
guucaugggcucccuguuc

SEQ ID NO: 562563 - RNA, 19 nt, Homo sapiens
  misc_RNA (1)...(19): siRNA sense strand
cagggcaggucaagcuuuc

SEQ ID NO: 562564 - RNA, 19 nt, Homo sapiens
  misc_RNA (1)...(19): siRNA sense strand
ugauggcgaugaagaccaa

SEQ ID NO: 562565 - RNA, 19 nt, Homo sapiens
  misc_RNA (1)...(19): siRNA sense strand
gagauugucaaccucaugu

SEQ ID NO: 562566 - RNA, 19 nt, Homo sapiens
  misc_RNA (1)...(19): siRNA sense strand
acaccgugcugcuguuugu

SEQ ID NO: 562567 - RNA, 19 nt, Homo sapiens
  misc_RNA (1)...(19): siRNA sense strand
ucuuaaaguugcucaucaa

SEQ ID NO: 562568 - RNA, 19 nt, Homo sapiens
  misc_RNA (1)...(19): siRNA sense strand
ucccggaggucaucaagau

SEQ ID NO: 562569 - RNA, 19 nt, Homo sapiens
  misc_RNA (1)...(19): siRNA sense strand
ggacagugcagggaagcaa

SEQ ID NO: 562570 - RNA, 19 nt, Homo sapiens
  misc_RNA (1)...(19): siRNA sense strand
ggagguggaggcuuugauc

SEQ ID NO: 562571 - RNA, 19 nt, Homo sapiens
  misc_RNA (1)...(19): siRNA sense strand
gcaggucaccacguacuug

SEQ ID NO: 562572 - RNA, 19 nt, Homo sapiens
  misc_RNA (1)...(19): siRNA sense strand
agaaggaggagaccuggaa

SEQ ID NO: 562573 - RNA, 19 nt, Homo sapiens
  misc_RNA (1)...(19): siRNA sense strand
ucgugugggugccuuguuu

SEQ ID NO: 562574 - RNA, 19 nt, Homo sapiens
  misc_RNA (1)...(19): siRNA sense strand
ccacaucugcuucgucagu

SEQ ID NO: 562575 - RNA, 19 nt, Homo sapiens
  misc_RNA (1)...(19): siRNA sense strand
gcaccaguacuuccacauc

SEQ ID NO: 562576 - RNA, 19 nt, Homo sapiens
  misc_RNA (1)...(19): siRNA sense strand
gaacaugucuccugaucua

SEQ ID NO: 562577 - RNA, 19 nt, Homo sapiens
  misc_RNA (1)...(19): siRNA sense strand
gaagacucaucuaaaguua

SEQ ID NO: 562578 - RNA, 19 nt, Homo sapiens
  misc_RNA (1)...(19): siRNA sense strand
ggaagugccugucauggua

SEQ ID NO: 562579 - RNA, 19 nt, Homo sapiens
  misc_RNA (1)...(19): siRNA sense strand
cgacaagacuucaacauga

SEQ ID NO: 562580 - RNA, 19 nt, Homo sapiens
  misc_RNA (1)...(19): siRNA sense strand
gcagauacauccucauaug

SEQ ID NO: 562581 - RNA, 19 nt, Homo sapiens
  misc_RNA (1)...(19): siRNA sense strand
gaaauaagauucgggaaca

SEQ ID NO: 562582 - RNA, 19 nt, Homo sapiens
  misc_RNA (1)...(19): siRNA sense strand
gcagaagacucaucuaaag

SEQ ID NO: 562583 - RNA, 19 nt, Homo sapiens
  misc_RNA (1)...(19): siRNA sense strand
caacccaacuggauuacua

SEQ ID NO: 562584 - RNA, 19 nt, Homo sapiens
  misc_RNA (1)...(19): siRNA sense strand
uggcugaacucaccaaaua

SEQ ID NO: 562585 - RNA, 19 nt, Homo sapiens
  misc_RNA (1)...(19): siRNA sense strand
gcaacuagccugugagauu

SEQ ID NO: 562586 - RNA, 19 nt, Homo sapiens
  misc_RNA (1)...(19): siRNA sense strand
gagcaagaccacauuauaa

SEQ ID NO: 562587 - RNA, 19 nt, Homo sapiens
  misc_RNA (1)...(19): siRNA sense strand
ggagaaaguugaggccuaa

SEQ ID NO: 562588 - RNA, 19 nt, Homo sapiens
  misc_RNA (1)...(19): siRNA sense strand
gagcagaggaaacgaguua

SEQ ID NO: 562589 - RNA, 19 nt, Homo sapiens
  misc_RNA (1)...(19): siRNA sense strand
ugggagauguugccuauua

SEQ ID NO: 562590 - RNA, 19 nt, Homo sapiens
  misc_RNA (1)...(19): siRNA sense strand
gcaagaccacauuauaaua

SEQ ID NO: 562591 - RNA, 19 nt, Homo sapiens
  misc_RNA (1)...(19): siRNA sense strand
ggagcaagaccacauuaua

SEQ ID NO: 562592 - RNA, 19 nt, Homo sapiens
  misc_RNA (1)...(19): siRNA sense strand
guauaaagcuuucacuuac

SEQ ID NO: 562593 - RNA, 19 nt, Homo sapiens
  misc_RNA (1)...(19): siRNA sense strand
aaggagaacuugaagagua

SEQ ID NO: 562594 - RNA, 19 nt, Homo sapiens
  misc_RNA (1)...(19): siRNA sense strand
uacagcagauugcagauua

SEQ ID NO: 562595 - RNA, 19 nt, Homo sapiens
  misc_RNA (1)...(19): siRNA sense strand
gaauucaacugcagaaggu

SEQ ID NO: 562596 - RNA, 19 nt, Homo sapiens
  misc_RNA (1)...(19): siRNA sense strand
gaugaaagcagaagacuca

SEQ ID NO: 562597 - RNA, 19 nt, Homo sapiens
  misc_RNA (1)...(19): siRNA sense strand
gcaaggaugauaugcauga

SEQ ID NO: 562598 - RNA, 19 nt, Homo sapiens
  misc_RNA (1)...(19): siRNA sense strand
gauaagccaccuucuacua

SEQ ID NO: 562599 - RNA, 19 nt, Homo sapiens
  misc_RNA (1)...(19): siRNA sense strand
gggcacaccuggcaaauac

SEQ ID NO: 562600 - RNA, 19 nt, Homo sapiens
  misc_RNA (1)...(19): siRNA sense strand
ccacaacccaacuggauua

SEQ ID NO: 562601 - RNA, 19 nt, Homo sapiens
  misc_RNA (1)...(19): siRNA sense strand
caacuagccugugagauuc

SEQ ID NO: 562602 - RNA, 19 nt, Homo sapiens
  misc_RNA (1)...(19): siRNA sense strand
guaaauggcaaggaugaua

SEQ ID NO: 562603 - RNA, 19 nt, Homo sapiens
  misc_RNA (1)...(19): siRNA sense strand
gauugcagauuacaucaug

SEQ ID NO: 562604 - RNA, 19 nt, Homo sapiens
  misc_RNA (1)...(19): siRNA sense strand
gugaguagguuaagcacaa

SEQ ID NO: 562605 - RNA, 19 nt, Homo sapiens
  misc_RNA (1)...(19): siRNA sense strand
gaacuugaagaguauaaga

SEQ ID NO: 562606 - RNA, 19 nt, Homo sapiens
  misc_RNA (1)...(19): siRNA sense strand
gcagcuguauccuccauga

SEQ ID NO: 562607 - RNA, 19 nt, Homo sapiens
  misc_RNA (1)...(19): siRNA sense strand
ccaauucuuucucggguuu

SEQ ID NO: 562608 - RNA, 19 nt, Homo sapiens
  misc_RNA (1)...(19): siRNA sense strand
gaacaggaggagagaauuc

SEQ ID NO: 562609 - RNA, 19 nt, Homo sapiens
  misc_RNA (1)...(19): siRNA sense strand
gguaguaaauggcaaggau

SEQ ID NO: 562610 - RNA, 19 nt, Homo sapiens
  misc_RNA (1)...(19): siRNA sense strand
gacaagacuucaacaugau

SEQ ID NO: 562611 - RNA, 19 nt, Homo sapiens
  misc_RNA (1)...(19): siRNA sense strand
uuacaggcauccucucauu

SEQ ID NO: 562612 - RNA, 19 nt, Homo sapiens
  misc_RNA (1)...(19): siRNA sense strand
ccagggaaguaccaauuug

SEQ ID NO: 562613 - RNA, 19 nt, Homo sapiens
  misc_RNA (1)...(19): siRNA sense strand
ccaaauacuuacaugaaag

SEQ ID NO: 562614 - RNA, 19 nt, Homo sapiens
  misc_RNA (1)...(19): siRNA sense strand
ugaacucaccaaauacuua

SEQ ID NO: 562615 - RNA, 19 nt, Homo sapiens
  misc_RNA (1)...(19): siRNA sense strand
gcacaaguacaaccauaga

SEQ ID NO: 562616 - RNA, 19 nt, Homo sapiens
  misc_RNA (1)...(19): siRNA sense strand
cagcaugccucacaaagag

SEQ ID NO: 562617 - RNA, 19 nt, Homo sapiens
  misc_RNA (1)...(19): siRNA sense strand
caacuggauuacuagcauu

SEQ ID NO: 562618 - RNA, 19 nt, Homo sapiens
  misc_RNA (1)...(19): siRNA sense strand
gaaagcagaagacucaucu

SEQ ID NO: 562619 - RNA, 19 nt, Homo sapiens
  misc_RNA (1)...(19): siRNA sense strand
ugaggacucuggacaacuu

SEQ ID NO: 562620 - RNA, 19 nt, Homo sapiens
  misc_RNA (1)...(19): siRNA sense strand
gugcagauacauccucaua

SEQ ID NO: 562621 - RNA, 19 nt, Homo sapiens
  misc_RNA (1)...(19): siRNA sense strand
gaagcuacagccuccaauu

SEQ ID NO: 562622 - RNA, 19 nt, Homo sapiens
  misc_RNA (1)...(19): siRNA sense strand
gaaaacaucgagauuacua

SEQ ID NO: 562623 - RNA, 19 nt, Homo sapiens
  misc_RNA (1)...(19): siRNA sense strand
gaaaucccagcaacuguga

SEQ ID NO: 562624 - RNA, 19 nt, Homo sapiens
  misc_RNA (1)...(19): siRNA sense strand
gagauguugccuauuauga

SEQ ID NO: 562625 - RNA, 19 nt, Homo sapiens
  misc_RNA (1)...(19): siRNA sense strand
gagagaagccuaggcacaa

SEQ ID NO: 562626 - RNA, 19 nt, Homo sapiens
  misc_RNA (1)...(19): siRNA sense strand
caagagugauguggaaauc

SEQ ID NO: 562627 - RNA, 19 nt, Homo sapiens
  misc_RNA (1)...(19): siRNA sense strand
gaauaaguaaggagcaaga

SEQ ID NO: 562628 - RNA, 19 nt, Homo sapiens
  misc_RNA (1)...(19): siRNA sense strand
gaaguccugucaccugaag

SEQ ID NO: 562629 - RNA, 19 nt, Homo sapiens
  misc_RNA (1)...(19): siRNA sense strand
aagcacaaguacaaccaua

SEQ ID NO: 562630 - RNA, 19 nt, Homo sapiens
  misc_RNA (1)...(19): siRNA sense strand
ugauaugcaugauguugaa

SEQ ID NO: 562631 - RNA, 19 nt, Homo sapiens
  misc_RNA (1)...(19): siRNA sense strand
cgaaugagguacuagaaaa

SEQ ID NO: 562632 - RNA, 19 nt, Homo sapiens
  misc_RNA (1)...(19): siRNA sense strand
gccacucucuccucucaaa

SEQ ID NO: 562633 - RNA, 19 nt, Homo sapiens
  misc_RNA (1)...(19): siRNA sense strand
gcagauugcagauuacauc

SEQ ID NO: 562634 - RNA, 19 nt, Homo sapiens
  misc_RNA (1)...(19): siRNA sense strand
ugugggauccuuccaauuu

SEQ ID NO: 562635 - RNA, 19 nt, Homo sapiens
  misc_RNA (1)...(19): siRNA sense strand
uauaauaggagaagugguu

SEQ ID NO: 562636 - RNA, 19 nt, Homo sapiens
  misc_RNA (1)...(19): siRNA sense strand
aagaacagaugaagaaagg

SEQ ID NO: 562637 - RNA, 19 nt, Homo sapiens
  misc_RNA (1)...(19): siRNA sense strand
gacaaucgaacguaaacaa

SEQ ID NO: 562638 - RNA, 19 nt, Homo sapiens
  misc_RNA (1)...(19): siRNA sense strand
agaggacaaucgaacguaa

SEQ ID NO: 562639 - RNA, 19 nt, Homo sapiens
  misc_RNA (1)...(19): siRNA sense strand
uaagccaccuucuacuaug

SEQ ID NO: 562640 - RNA, 19 nt, Homo sapiens
  misc_RNA (1)...(19): siRNA sense strand
gggagauguugccuauuau

SEQ ID NO: 562641 - RNA, 19 nt, Homo sapiens
  misc_RNA (1)...(19): siRNA sense strand
gaccagggaaguaccaauu

SEQ ID NO: 562642 - RNA, 19 nt, Homo sapiens
  misc_RNA (1)...(19): siRNA sense strand
ugcaugauguugaagauga

SEQ ID NO: 562643 - RNA, 19 nt, Homo sapiens
  misc_RNA (1)...(19): siRNA sense strand
gggaaguaccaauuugaaa

SEQ ID NO: 562644 - RNA, 19 nt, Homo sapiens
  misc_RNA (1)...(19): siRNA sense strand
caccaaauacuuacaugaa

SEQ ID NO: 562645 - RNA, 19 nt, Homo sapiens
  misc_RNA (1)...(19): siRNA sense strand
gaggaggcuuuucauuaua

SEQ ID NO: 562646 - RNA, 19 nt, Homo sapiens
  misc_RNA (1)...(19): siRNA sense strand
gcuguauccuccaugaaau

SEQ ID NO: 562647 - RNA, 19 nt, Homo sapiens
  misc_RNA (1)...(19): siRNA sense strand
caaaaucgccauccaagaa

SEQ ID NO: 562648 - RNA, 19 nt, Homo sapiens
  misc_RNA (1)...(19): siRNA sense strand
cuucuacuaugcaauuuga

SEQ ID NO: 562649 - RNA, 19 nt, Homo sapiens
  misc_RNA (1)...(19): siRNA sense strand
gaaaacagcaggaccacaa

SEQ ID NO: 562650 - RNA, 19 nt, Homo sapiens
  misc_RNA (1)...(19): siRNA sense strand
uaaaguuagugguggaaca

SEQ ID NO: 562651 - RNA, 19 nt, Homo sapiens
  misc_RNA (1)...(19): siRNA sense strand
aagcagaagacucaucuaa

SEQ ID NO: 562652 - RNA, 19 nt, Homo sapiens
  misc_RNA (1)...(19): siRNA sense strand
gaaugugccugaggagucu

SEQ ID NO: 562653 - RNA, 19 nt, Homo sapiens
  misc_RNA (1)...(19): siRNA sense strand
guccugauguuaagugugu

SEQ ID NO: 562654 - RNA, 19 nt, Homo sapiens
  misc_RNA (1)...(19): siRNA sense strand
cgagauuacuauuaagucu

SEQ ID NO: 562655 - RNA, 19 nt, Homo sapiens
  misc_RNA (1)...(19): siRNA sense strand
uaaacaacaaggccuagaa

SEQ ID NO: 562656 - RNA, 19 nt, Homo sapiens
  misc_RNA (1)...(19): siRNA sense strand
aaucgaacguaaacaacaa

SEQ ID NO: 562657 - RNA, 19 nt, Homo sapiens
  misc_RNA (1)...(19): siRNA sense strand
gaaccaaaaucacguggau

SEQ ID NO: 562658 - RNA, 19 nt, Homo sapiens
  misc_RNA (1)...(19): siRNA sense strand
gcacuuggagaaacauuag

SEQ ID NO: 562659 - RNA, 19 nt, Homo sapiens
  misc_RNA (1)...(19): siRNA sense strand
guucugggaccaaguugua

SEQ ID NO: 562660 - RNA, 19 nt, Homo sapiens
  misc_RNA (1)...(19): siRNA sense strand
ccaacuggauuacuagcau

SEQ ID NO: 562661 - RNA, 19 nt, Homo sapiens
  misc_RNA (1)...(19): siRNA sense strand
acaaguacaaccauagaaa

SEQ ID NO: 562662 - RNA, 19 nt, Homo sapiens
  misc_RNA (1)...(19): siRNA sense strand
gaugauaugcaugauguug

SEQ ID NO: 562663 - RNA, 19 nt, Homo sapiens
  misc_RNA (1)...(19): siRNA sense strand
gaagacuuggaaugccuua

SEQ ID NO: 562664 - RNA, 19 nt, Homo sapiens
  misc_RNA (1)...(19): siRNA sense strand
uaaauggcaaggaugauau

SEQ ID NO: 562665 - RNA, 19 nt, Homo sapiens
  misc_RNA (1)...(19): siRNA sense strand
ucaguugcuugcuggaauu

SEQ ID NO: 562666 - RNA, 19 nt, Homo sapiens
  misc_RNA (1)...(19): siRNA sense strand
agaagacucaucuaaaguu

SEQ ID NO: 562667 - RNA, 19 nt, Homo sapiens
  misc_RNA (1)...(19): siRNA sense strand
gaacucaccaaauacuuac

SEQ ID NO: 562668 - RNA, 19 nt, Homo sapiens
  misc_RNA (1)...(19): siRNA sense strand
ucagaaguauaaagcuuuc

SEQ ID NO: 562669 - RNA, 19 nt, Homo sapiens
  misc_RNA (1)...(19): siRNA sense strand
aguagacaaucuccaugua

SEQ ID NO: 562670 - RNA, 19 nt, Homo sapiens
  misc_RNA (1)...(19): siRNA sense strand
gauguugccuauuaugacu

SEQ ID NO: 562671 - RNA, 19 nt, Homo sapiens
  misc_RNA (1)...(19): siRNA sense strand
caucauggccaauucuuuc

SEQ ID NO: 562672 - RNA, 19 nt, Homo sapiens
  misc_RNA (1)...(19): siRNA sense strand
ggaaguaccaauuugaaaa

SEQ ID NO: 562673 - RNA, 19 nt, Homo sapiens
  misc_RNA (1)...(19): siRNA sense strand
uuacucagauccugcaaag

SEQ ID NO: 562674 - RNA, 19 nt, Homo sapiens
  misc_RNA (1)...(19): siRNA sense strand
ggaagguuggcgaaauuga

SEQ ID NO: 562675 - RNA, 19 nt, Homo sapiens
  misc_RNA (1)...(19): siRNA sense strand
uaaacacaaacccgaauga

SEQ ID NO: 562676 - RNA, 19 nt, Homo sapiens
  misc_RNA (1)...(19): siRNA sense strand
gaacaugucuccugaucua

SEQ ID NO: 562677 - RNA, 19 nt, Homo sapiens
  misc_RNA (1)...(19): siRNA sense strand
gaagacucaucuaaaguua

SEQ ID NO: 562678 - RNA, 19 nt, Homo sapiens
  misc_RNA (1)...(19): siRNA sense strand
ggaagugccugucauggua

SEQ ID NO: 562679 - RNA, 19 nt, Homo sapiens
  misc_RNA (1)...(19): siRNA sense strand
cgacaagacuucaacauga

SEQ ID NO: 562680 - RNA, 19 nt, Homo sapiens
  misc_RNA (1)...(19): siRNA sense strand
gcagauacauccucauaug

SEQ ID NO: 562681 - RNA, 19 nt, Homo sapiens
  misc_RNA (1)...(19): siRNA sense strand
gaaauaagauucgggaaca

SEQ ID NO: 562682 - RNA, 19 nt, Homo sapiens
  misc_RNA (1)...(19): siRNA sense strand
gcagaagacucaucuaaag

SEQ ID NO: 562683 - RNA, 19 nt, Homo sapiens
  misc_RNA (1)...(19): siRNA sense strand
caacccaacuggauuacua

SEQ ID NO: 562684 - RNA, 19 nt, Homo sapiens
  misc_RNA (1)...(19): siRNA sense strand
uggcugaacucaccaaaua

SEQ ID NO: 562685 - RNA, 19 nt, Homo sapiens
  misc_RNA (1)...(19): siRNA sense strand
gcaacuagccugugagauu

SEQ ID NO: 562686 - RNA, 19 nt, Homo sapiens
  misc_RNA (1)...(19): siRNA sense strand
gagcaagaccacauuauaa

SEQ ID NO: 562687 - RNA, 19 nt, Homo sapiens
  misc_RNA (1)...(19): siRNA sense strand
ggagaaaguugaggccuaa

SEQ ID NO: 562688 - RNA, 19 nt, Homo sapiens
  misc_RNA (1)...(19): siRNA sense strand
gagcagaggaaacgaguua

SEQ ID NO: 562689 - RNA, 19 nt, Homo sapiens
  misc_RNA (1)...(19): siRNA sense strand
ugggagauguugccuauua

SEQ ID NO: 562690 - RNA, 19 nt, Homo sapiens
  misc_RNA (1)...(19): siRNA sense strand
gcaagaccacauuauaaua

SEQ ID NO: 562691 - RNA, 19 nt, Homo sapiens
  misc_RNA (1)...(19): siRNA sense strand
ggagcaagaccacauuaua

SEQ ID NO: 562692 - RNA, 19 nt, Homo sapiens
  misc_RNA (1)...(19): siRNA sense strand
guauaaagcuuucacuuac

SEQ ID NO: 562693 - RNA, 19 nt, Homo sapiens
  misc_RNA (1)...(19): siRNA sense strand
aaggagaacuugaagagua

SEQ ID NO: 562694 - RNA, 19 nt, Homo sapiens
  misc_RNA (1)...(19): siRNA sense strand
uacagcagauugcagauua

SEQ ID NO: 562695 - RNA, 19 nt, Homo sapiens
  misc_RNA (1)...(19): siRNA sense strand
gaauucaacugcagaaggu

SEQ ID NO: 562696 - RNA, 19 nt, Homo sapiens
  misc_RNA (1)...(19): siRNA sense strand
gaugaaagcagaagacuca

SEQ ID NO: 562697 - RNA, 19 nt, Homo sapiens
  misc_RNA (1)...(19): siRNA sense strand
gcaaggaugauaugcauga

SEQ ID NO: 562698 - RNA, 19 nt, Homo sapiens
  misc_RNA (1)...(19): siRNA sense strand
gauaagccaccuucuacua

SEQ ID NO: 562699 - RNA, 19 nt, Homo sapiens
  misc_RNA (1)...(19): siRNA sense strand
gggcacaccuggcaaauac

SEQ ID NO: 562700 - RNA, 19 nt, Homo sapiens
  misc_RNA (1)...(19): siRNA sense strand
ccacaacccaacuggauua

SEQ ID NO: 562701 - RNA, 19 nt, Homo sapiens
  misc_RNA (1)...(19): siRNA sense strand
caacuagccugugagauuc

SEQ ID NO: 562702 - RNA, 19 nt, Homo sapiens
  misc_RNA (1)...(19): siRNA sense strand
guaaauggcaaggaugaua

SEQ ID NO: 562703 - RNA, 19 nt, Homo sapiens
  misc_RNA (1)...(19): siRNA sense strand
gauugcagauuacaucaug

SEQ ID NO: 562704 - RNA, 19 nt, Homo sapiens
  misc_RNA (1)...(19): siRNA sense strand
gugaguagguuaagcacaa

SEQ ID NO: 562705 - RNA, 19 nt, Homo sapiens
  misc_RNA (1)...(19): siRNA sense strand
gaacuugaagaguauaaga

SEQ ID NO: 562706 - RNA, 19 nt, Homo sapiens
  misc_RNA (1)...(19): siRNA sense strand
gcagcuguauccuccauga

SEQ ID NO: 562707 - RNA, 19 nt, Homo sapiens
  misc_RNA (1)...(19): siRNA sense strand
ccaauucuuucucggguuu

SEQ ID NO: 562708 - RNA, 19 nt, Homo sapiens
  misc_RNA (1)...(19): siRNA sense strand
gaacaggaggagagaauuc

SEQ ID NO: 562709 - RNA, 19 nt, Homo sapiens
  misc_RNA (1)...(19): siRNA sense strand
gguaguaaauggcaaggau

SEQ ID NO: 562710 - RNA, 19 nt, Homo sapiens
  misc_RNA (1)...(19): siRNA sense strand
gacaagacuucaacaugau

SEQ ID NO: 562711 - RNA, 19 nt, Homo sapiens
  misc_RNA (1)...(19): siRNA sense strand
uuacaggcauccucucauu

SEQ ID NO: 562712 - RNA, 19 nt, Homo sapiens
  misc_RNA (1)...(19): siRNA sense strand
ccagggaaguaccaauuug

SEQ ID NO: 562713 - RNA, 19 nt, Homo sapiens
  misc_RNA (1)...(19): siRNA sense strand
ccaaauacuuacaugaaag

SEQ ID NO: 562714 - RNA, 19 nt, Homo sapiens
  misc_RNA (1)...(19): siRNA sense strand
ugaacucaccaaauacuua

SEQ ID NO: 562715 - RNA, 19 nt, Homo sapiens
  misc_RNA (1)...(19): siRNA sense strand
gcacaaguacaaccauaga

SEQ ID NO: 562716 - RNA, 19 nt, Homo sapiens
  misc_RNA (1)...(19): siRNA sense strand
cagcaugccucacaaagag

SEQ ID NO: 562717 - RNA, 19 nt, Homo sapiens
  misc_RNA (1)...(19): siRNA sense strand
caacuggauuacuagcauu

SEQ ID NO: 562718 - RNA, 19 nt, Homo sapiens
  misc_RNA (1)...(19): siRNA sense strand
gaaagcagaagacucaucu

SEQ ID NO: 562719 - RNA, 19 nt, Homo sapiens
  misc_RNA (1)...(19): siRNA sense strand
ugaggacucuggacaacuu

SEQ ID NO: 562720 - RNA, 19 nt, Homo sapiens
  misc_RNA (1)...(19): siRNA sense strand
gugcagauacauccucaua

SEQ ID NO: 562721 - RNA, 19 nt, Homo sapiens
  misc_RNA (1)...(19): siRNA sense strand
gaagcuacagccuccaauu

SEQ ID NO: 562722 - RNA, 19 nt, Homo sapiens
  misc_RNA (1)...(19): siRNA sense strand
gaaaacaucgagauuacua

SEQ ID NO: 562723 - RNA, 19 nt, Homo sapiens
  misc_RNA (1)...(19): siRNA sense strand
gaaaucccagcaacuguga

SEQ ID NO: 562724 - RNA, 19 nt, Homo sapiens
  misc_RNA (1)...(19): siRNA sense strand
gagauguugccuauuauga

SEQ ID NO: 562725 - RNA, 19 nt, Homo sapiens
  misc_RNA (1)...(19): siRNA sense strand
gagagaagccuaggcacaa

SEQ ID NO: 562726 - RNA, 19 nt, Homo sapiens
  misc_RNA (1)...(19): siRNA sense strand
caagagugauguggaaauc

SEQ ID NO: 562727 - RNA, 19 nt, Homo sapiens
  misc_RNA (1)...(19): siRNA sense strand
gaauaaguaaggagcaaga

SEQ ID NO: 562728 - RNA, 19 nt, Homo sapiens
  misc_RNA (1)...(19): siRNA sense strand
gaaguccugucaccugaag

SEQ ID NO: 562729 - RNA, 19 nt, Homo sapiens
  misc_RNA (1)...(19): siRNA sense strand
aagcacaaguacaaccaua

SEQ ID NO: 562730 - RNA, 19 nt, Homo sapiens
  misc_RNA (1)...(19): siRNA sense strand
ugauaugcaugauguugaa

SEQ ID NO: 562731 - RNA, 19 nt, Homo sapiens
  misc_RNA (1)...(19): siRNA sense strand
cgaaugagguacuagaaaa

SEQ ID NO: 562732 - RNA, 19 nt, Homo sapiens
  misc_RNA (1)...(19): siRNA sense strand
gccacucucuccucucaaa

SEQ ID NO: 562733 - RNA, 19 nt, Homo sapiens
  misc_RNA (1)...(19): siRNA sense strand
gcagauugcagauuacauc

SEQ ID NO: 562734 - RNA, 19 nt, Homo sapiens
  misc_RNA (1)...(19): siRNA sense strand
ugugggauccuuccaauuu

SEQ ID NO: 562735 - RNA, 19 nt, Homo sapiens
  misc_RNA (1)...(19): siRNA sense strand
uauaauaggagaagugguu

SEQ ID NO: 562736 - RNA, 19 nt, Homo sapiens
  misc_RNA (1)...(19): siRNA sense strand
aagaacagaugaagaaagg

SEQ ID NO: 562737 - RNA, 19 nt, Homo sapiens
  misc_RNA (1)...(19): siRNA sense strand
gacaaucgaacguaaacaa

SEQ ID NO: 562738 - RNA, 19 nt, Homo sapiens
  misc_RNA (1)...(19): siRNA sense strand
agaggacaaucgaacguaa

SEQ ID NO: 562739 - RNA, 19 nt, Homo sapiens
  misc_RNA (1)...(19): siRNA sense strand
uaagccaccuucuacuaug

SEQ ID NO: 562740 - RNA, 19 nt, Homo sapiens
  misc_RNA (1)...(19): siRNA sense strand
gggagauguugccuauuau

SEQ ID NO: 562741 - RNA, 19 nt, Homo sapiens
  misc_RNA (1)...(19): siRNA sense strand
gaccagggaaguaccaauu

SEQ ID NO: 562742 - RNA, 19 nt, Homo sapiens
  misc_RNA (1)...(19): siRNA sense strand
ugcaugauguugaagauga

SEQ ID NO: 562743 - RNA, 19 nt, Homo sapiens
  misc_RNA (1)...(19): siRNA sense strand
gggaaguaccaauuugaaa

SEQ ID NO: 562744 - RNA, 19 nt, Homo sapiens
  misc_RNA (1)...(19): siRNA sense strand
caccaaauacuuacaugaa

SEQ ID NO: 562745 - RNA, 19 nt, Homo sapiens
  misc_RNA (1)...(19): siRNA sense strand
gaggaggcuuuucauuaua

SEQ ID NO: 562746 - RNA, 19 nt, Homo sapiens
  misc_RNA (1)...(19): siRNA sense strand
gcuguauccuccaugaaau

SEQ ID NO: 562747 - RNA, 19 nt, Homo sapiens
  misc_RNA (1)...(19): siRNA sense strand
caaaaucgccauccaagaa

SEQ ID NO: 562748 - RNA, 19 nt, Homo sapiens
  misc_RNA (1)...(19): siRNA sense strand
cuucuacuaugcaauuuga

SEQ ID NO: 562749 - RNA, 19 nt, Homo sapiens
  misc_RNA (1)...(19): siRNA sense strand
gaaaacagcaggaccacaa

SEQ ID NO: 562750 - RNA, 19 nt, Homo sapiens
  misc_RNA (1)...(19): siRNA sense strand
uaaaguuagugguggaaca

SEQ ID NO: 562751 - RNA, 19 nt, Homo sapiens
  misc_RNA (1)...(19): siRNA sense strand
aagcagaagacucaucuaa

SEQ ID NO: 562752 - RNA, 19 nt, Homo sapiens
  misc_RNA (1)...(19): siRNA sense strand
gaaugugccugaggagucu

SEQ ID NO: 562753 - RNA, 19 nt, Homo sapiens
  misc_RNA (1)...(19): siRNA sense strand
guccugauguuaagugugu

SEQ ID NO: 562754 - RNA, 19 nt, Homo sapiens
  misc_RNA (1)...(19): siRNA sense strand
cgagauuacuauuaagucu

SEQ ID NO: 562755 - RNA, 19 nt, Homo sapiens
  misc_RNA (1)...(19): siRNA sense strand
uaaacaacaaggccuagaa

SEQ ID NO: 562756 - RNA, 19 nt, Homo sapiens
  misc_RNA (1)...(19): siRNA sense strand
aaucgaacguaaacaacaa

SEQ ID NO: 562757 - RNA, 19 nt, Homo sapiens
  misc_RNA (1)...(19): siRNA sense strand
gaaccaaaaucacguggau

SEQ ID NO: 562758 - RNA, 19 nt, Homo sapiens
  misc_RNA (1)...(19): siRNA sense strand
gcacuuggagaaacauuag

SEQ ID NO: 562759 - RNA, 19 nt, Homo sapiens
  misc_RNA (1)...(19): siRNA sense strand
guucugggaccaaguugua

SEQ ID NO: 562760 - RNA, 19 nt, Homo sapiens
  misc_RNA (1)...(19): siRNA sense strand
ccaacuggauuacuagcau

SEQ ID NO: 562761 - RNA, 19 nt, Homo sapiens
  misc_RNA (1)...(19): siRNA sense strand
acaaguacaaccauagaaa

SEQ ID NO: 562762 - RNA, 19 nt, Homo sapiens
  misc_RNA (1)...(19): siRNA sense strand
gaugauaugcaugauguug

SEQ ID NO: 562763 - RNA, 19 nt, Homo sapiens
  misc_RNA (1)...(19): siRNA sense strand
gaagacuuggaaugccuua

SEQ ID NO: 562764 - RNA, 19 nt, Homo sapiens
  misc_RNA (1)...(19): siRNA sense strand
uaaauggcaaggaugauau

SEQ ID NO: 562765 - RNA, 19 nt, Homo sapiens
  misc_RNA (1)...(19): siRNA sense strand
ucaguugcuugcuggaauu

SEQ ID NO: 562766 - RNA, 19 nt, Homo sapiens
  misc_RNA (1)...(19): siRNA sense strand
agaagacucaucuaaaguu

SEQ ID NO: 562767 - RNA, 19 nt, Homo sapiens
  misc_RNA (1)...(19): siRNA sense strand
gaacucaccaaauacuuac

SEQ ID NO: 562768 - RNA, 19 nt, Homo sapiens
  misc_RNA (1)...(19): siRNA sense strand
ucagaaguauaaagcuuuc

SEQ ID NO: 562769 - RNA, 19 nt, Homo sapiens
  misc_RNA (1)...(19): siRNA sense strand
aguagacaaucuccaugua

SEQ ID NO: 562770 - RNA, 19 nt, Homo sapiens
  misc_RNA (1)...(19): siRNA sense strand
gauguugccuauuaugacu

SEQ ID NO: 562771 - RNA, 19 nt, Homo sapiens
  misc_RNA (1)...(19): siRNA sense strand
caucauggccaauucuuuc

SEQ ID NO: 562772 - RNA, 19 nt, Homo sapiens
  misc_RNA (1)...(19): siRNA sense strand
ggaaguaccaauuugaaaa

SEQ ID NO: 562773 - RNA, 19 nt, Homo sapiens
  misc_RNA (1)...(19): siRNA sense strand
uuacucagauccugcaaag

SEQ ID NO: 562774 - RNA, 19 nt, Homo sapiens
  misc_RNA (1)...(19): siRNA sense strand
ggaagguuggcgaaauuga

SEQ ID NO: 562775 - RNA, 19 nt, Homo sapiens
  misc_RNA (1)...(19): siRNA sense strand
uaaacacaaacccgaauga

SEQ ID NO: 562776 - RNA, 19 nt, Homo sapiens
  misc_RNA (1)...(19): siRNA sense strand
gaacugcacucuucaggaa

SEQ ID NO: 562777 - RNA, 19 nt, Homo sapiens
  misc_RNA (1)...(19): siRNA sense strand
caaagaaugucgacccuaa

SEQ ID NO: 562778 - RNA, 19 nt, Homo sapiens
  misc_RNA (1)...(19): siRNA sense strand
gcucuuugcugcacuauuu

SEQ ID NO: 562779 - RNA, 19 nt, Homo sapiens
  misc_RNA (1)...(19): siRNA sense strand
gcacgccgcucuucacugu

SEQ ID NO: 562780 - RNA, 19 nt, Homo sapiens
  misc_RNA (1)...(19): siRNA sense strand
gaucaugggugucaucuac

SEQ ID NO: 562781 - RNA, 19 nt, Homo sapiens
  misc_RNA (1)...(19): siRNA sense strand
gggcgucuaugcugcuuua

SEQ ID NO: 562782 - RNA, 19 nt, Homo sapiens
  misc_RNA (1)...(19): siRNA sense strand
ugaaacggauccagcaauu

SEQ ID NO: 562783 - RNA, 19 nt, Homo sapiens
  misc_RNA (1)...(19): siRNA sense strand
gcucugaacuggaugauac

SEQ ID NO: 562784 - RNA, 19 nt, Homo sapiens
  misc_RNA (1)...(19): siRNA sense strand
ucaaggugcugaagcugua

SEQ ID NO: 562785 - RNA, 19 nt, Homo sapiens
  misc_RNA (1)...(19): siRNA sense strand
agacagagauuggagagaa

SEQ ID NO: 562786 - RNA, 19 nt, Homo sapiens
  misc_RNA (1)...(19): siRNA sense strand
gcacaccggcuuaacacua

SEQ ID NO: 562787 - RNA, 19 nt, Homo sapiens
  misc_RNA (1)...(19): siRNA sense strand
gaccugcucuccuucauca

SEQ ID NO: 562788 - RNA, 19 nt, Homo sapiens
  misc_RNA (1)...(19): siRNA sense strand
cagacagacuucaucauug

SEQ ID NO: 562789 - RNA, 19 nt, Homo sapiens
  misc_RNA (1)...(19): siRNA sense strand
gagguggaguuccggaauu

SEQ ID NO: 562790 - RNA, 19 nt, Homo sapiens
  misc_RNA (1)...(19): siRNA sense strand
gaaauugucaaccucaugu

SEQ ID NO: 562791 - RNA, 19 nt, Homo sapiens
  misc_RNA (1)...(19): siRNA sense strand
ggugaaauccgcauugaug

SEQ ID NO: 562792 - RNA, 19 nt, Homo sapiens
  misc_RNA (1)...(19): siRNA sense strand
ccacaguccuucuuugaca

SEQ ID NO: 562793 - RNA, 19 nt, Homo sapiens
  misc_RNA (1)...(19): siRNA sense strand
ccagacagacuucaucauu

SEQ ID NO: 562794 - RNA, 19 nt, Homo sapiens
  misc_RNA (1)...(19): siRNA sense strand
ucuguguccuuguuuaaua

SEQ ID NO: 562795 - RNA, 19 nt, Homo sapiens
  misc_RNA (1)...(19): siRNA sense strand
agacagacuucaucauugu

SEQ ID NO: 562796 - RNA, 19 nt, Homo sapiens
  misc_RNA (1)...(19): siRNA sense strand
uuacagugaugccgauauu

SEQ ID NO: 562797 - RNA, 19 nt, Homo sapiens
  misc_RNA (1)...(19): siRNA sense strand
aguaguagcugaauuugau

SEQ ID NO: 562798 - RNA, 19 nt, Homo sapiens
  misc_RNA (1)...(19): siRNA sense strand
ccacccugcugauacagua

SEQ ID NO: 562799 - RNA, 19 nt, Homo sapiens
  misc_RNA (1)...(19): siRNA sense strand
gcucucagcugaccaucau

SEQ ID NO: 562800 - RNA, 19 nt, Homo sapiens
  misc_RNA (1)...(19): siRNA sense strand
gaaggcaaagugcacauga

SEQ ID NO: 562801 - RNA, 19 nt, Homo sapiens
  misc_RNA (1)...(19): siRNA sense strand
gaagcuagaaggcaaagug

SEQ ID NO: 562802 - RNA, 19 nt, Homo sapiens
  misc_RNA (1)...(19): siRNA sense strand
ggccaucugucuccuguau

SEQ ID NO: 562803 - RNA, 19 nt, Homo sapiens
  misc_RNA (1)...(19): siRNA sense strand
ggacaaaggaguaguagcu

SEQ ID NO: 562804 - RNA, 19 nt, Homo sapiens
  misc_RNA (1)...(19): siRNA sense strand
ccaucgaccuggagacuga

SEQ ID NO: 562805 - RNA, 19 nt, Homo sapiens
  misc_RNA (1)...(19): siRNA sense strand
ucaccuaugugguccagaa

SEQ ID NO: 562806 - RNA, 19 nt, Homo sapiens
  misc_RNA (1)...(19): siRNA sense strand
gcuggcaagucuuccauga

SEQ ID NO: 562807 - RNA, 19 nt, Homo sapiens
  misc_RNA (1)...(19): siRNA sense strand
ggaaggcucugguuaucac

SEQ ID NO: 562808 - RNA, 19 nt, Homo sapiens
  misc_RNA (1)...(19): siRNA sense strand
uggagagggucaaggagua

SEQ ID NO: 562809 - RNA, 19 nt, Homo sapiens
  misc_RNA (1)...(19): siRNA sense strand
uacgaaugaugucagauuu

SEQ ID NO: 562810 - RNA, 19 nt, Homo sapiens
  misc_RNA (1)...(19): siRNA sense strand
gaacugcguggugcucuuu

SEQ ID NO: 562811 - RNA, 19 nt, Homo sapiens
  misc_RNA (1)...(19): siRNA sense strand
guaccacgcuggccaucug

SEQ ID NO: 562812 - RNA, 19 nt, Homo sapiens
  misc_RNA (1)...(19): siRNA sense strand
cgucuaugcugcuuuagga

SEQ ID NO: 562813 - RNA, 19 nt, Homo sapiens
  misc_RNA (1)...(19): siRNA sense strand
guacguggacccaaacaau

SEQ ID NO: 562814 - RNA, 19 nt, Homo sapiens
  misc_RNA (1)...(19): siRNA sense strand
ugaagcggcuggaaucagu

SEQ ID NO: 562815 - RNA, 19 nt, Homo sapiens
  misc_RNA (1)...(19): siRNA sense strand
cgaaugaugucagauuugg

SEQ ID NO: 562816 - RNA, 19 nt, Homo sapiens
  misc_RNA (1)...(19): siRNA sense strand
ccagguaaagcaaaugaaa

SEQ ID NO: 562817 - RNA, 19 nt, Homo sapiens
  misc_RNA (1)...(19): siRNA sense strand
ugaacuggaugauacgaau

SEQ ID NO: 562818 - RNA, 19 nt, Homo sapiens
  misc_RNA (1)...(19): siRNA sense strand
guagacagaacaacacuuc

SEQ ID NO: 562819 - RNA, 19 nt, Homo sapiens
  misc_RNA (1)...(19): siRNA sense strand
ccaacuuucucugcaacua

SEQ ID NO: 562820 - RNA, 19 nt, Homo sapiens
  misc_RNA (1)...(19): siRNA sense strand
caaaggaguaguagcugaa

SEQ ID NO: 562821 - RNA, 19 nt, Homo sapiens
  misc_RNA (1)...(19): siRNA sense strand
cgagaaggccuuugugucu

SEQ ID NO: 562822 - RNA, 19 nt, Homo sapiens
  misc_RNA (1)...(19): siRNA sense strand
caggugacauuugcucuga

SEQ ID NO: 562823 - RNA, 19 nt, Homo sapiens
  misc_RNA (1)...(19): siRNA sense strand
caacugaagcggcuggaau

SEQ ID NO: 562824 - RNA, 19 nt, Homo sapiens
  misc_RNA (1)...(19): siRNA sense strand
ccaucugucuccuguaugu

SEQ ID NO: 562825 - RNA, 19 nt, Homo sapiens
  misc_RNA (1)...(19): siRNA sense strand
ucaguguguucugggauua

SEQ ID NO: 562826 - RNA, 19 nt, Homo sapiens
  misc_RNA (1)...(19): siRNA sense strand
acaaugauccagucaccua

SEQ ID NO: 562827 - RNA, 19 nt, Homo sapiens
  misc_RNA (1)...(19): siRNA sense strand
gaucuuacaacacuauuac

SEQ ID NO: 562828 - RNA, 19 nt, Homo sapiens
  misc_RNA (1)...(19): siRNA sense strand
uuaacacuaucauggacua

SEQ ID NO: 562829 - RNA, 19 nt, Homo sapiens
  misc_RNA (1)...(19): siRNA sense strand
ggaacugcguggugcucuu

SEQ ID NO: 562830 - RNA, 19 nt, Homo sapiens
  misc_RNA (1)...(19): siRNA sense strand
agaagcaguuuaugagaca

SEQ ID NO: 562831 - RNA, 19 nt, Homo sapiens
  misc_RNA (1)...(19): siRNA sense strand
ggaaauugucaaccucaug

SEQ ID NO: 562832 - RNA, 19 nt, Homo sapiens
  misc_RNA (1)...(19): siRNA sense strand
caggaaggcucugguuauc

SEQ ID NO: 562833 - RNA, 19 nt, Homo sapiens
  misc_RNA (1)...(19): siRNA sense strand
gcaucaaggugcugaagcu

SEQ ID NO: 562834 - RNA, 19 nt, Homo sapiens
  misc_RNA (1)...(19): siRNA sense strand
ucagucagccgcucaccua

SEQ ID NO: 562835 - RNA, 19 nt, Homo sapiens
  misc_RNA (1)...(19): siRNA sense strand
gcucuucacuguggucauc

SEQ ID NO: 562836 - RNA, 19 nt, Homo sapiens
  misc_RNA (1)...(19): siRNA sense strand
aagauacgcucgccacagu

SEQ ID NO: 562837 - RNA, 19 nt, Homo sapiens
  misc_RNA (1)...(19): siRNA sense strand
gcacugcugcacaacaaga

SEQ ID NO: 562838 - RNA, 19 nt, Homo sapiens
  misc_RNA (1)...(19): siRNA sense strand
aggaggcacugcugauuga

SEQ ID NO: 562839 - RNA, 19 nt, Homo sapiens
  misc_RNA (1)...(19): siRNA sense strand
guuggaaggugcagaggau

SEQ ID NO: 562840 - RNA, 19 nt, Homo sapiens
  misc_RNA (1)...(19): siRNA sense strand
gaagggcauuaaccugucu

SEQ ID NO: 562841 - RNA, 19 nt, Homo sapiens
  misc_RNA (1)...(19): siRNA sense strand
gaaggacucgcgcaucaag

SEQ ID NO: 562842 - RNA, 19 nt, Homo sapiens
  misc_RNA (1)...(19): siRNA sense strand
caaccucauugcagcuaga

SEQ ID NO: 562843 - RNA, 19 nt, Homo sapiens
  misc_RNA (1)...(19): siRNA sense strand
cacaccggcuuaacacuau

SEQ ID NO: 562844 - RNA, 19 nt, Homo sapiens
  misc_RNA (1)...(19): siRNA sense strand
ccacaucacggcaacugaa

SEQ ID NO: 562845 - RNA, 19 nt, Homo sapiens
  misc_RNA (1)...(19): siRNA sense strand
guccagaagcaguuuauga

SEQ ID NO: 562846 - RNA, 19 nt, Homo sapiens
  misc_RNA (1)...(19): siRNA sense strand
gaugcagucgcugaucuua

SEQ ID NO: 562847 - RNA, 19 nt, Homo sapiens
  misc_RNA (1)...(19): siRNA sense strand
cuaugcugcuuuaggaauu

SEQ ID NO: 562848 - RNA, 19 nt, Homo sapiens
  misc_RNA (1)...(19): siRNA sense strand
gaagggcuccguggccuau

SEQ ID NO: 562849 - RNA, 19 nt, Homo sapiens
  misc_RNA (1)...(19): siRNA sense strand
ucgcugaucuuacaacacu

SEQ ID NO: 562850 - RNA, 19 nt, Homo sapiens
  misc_RNA (1)...(19): siRNA sense strand
ugauacgaaugaugucaga

SEQ ID NO: 562851 - RNA, 19 nt, Homo sapiens
  misc_RNA (1)...(19): siRNA sense strand
gaacuggaugauacgaaug

SEQ ID NO: 562852 - RNA, 19 nt, Homo sapiens
  misc_RNA (1)...(19): siRNA sense strand
gacaguagacagaacaaca

SEQ ID NO: 562853 - RNA, 19 nt, Homo sapiens
  misc_RNA (1)...(19): siRNA sense strand
cauccacuuugcccuggua

SEQ ID NO: 562854 - RNA, 19 nt, Homo sapiens
  misc_RNA (1)...(19): siRNA sense strand
gcugcucaauuccuucuuc

SEQ ID NO: 562855 - RNA, 19 nt, Homo sapiens
  misc_RNA (1)...(19): siRNA sense strand
gcagacaguagacagaaca

SEQ ID NO: 562856 - RNA, 19 nt, Homo sapiens
  misc_RNA (1)...(19): siRNA sense strand
ucaaagugcggcugccauu

SEQ ID NO: 562857 - RNA, 19 nt, Homo sapiens
  misc_RNA (1)...(19): siRNA sense strand
ggagaagcuagaaggcaaa

SEQ ID NO: 562858 - RNA, 19 nt, Homo sapiens
  misc_RNA (1)...(19): siRNA sense strand
cccagaguguggaaagaaa

SEQ ID NO: 562859 - RNA, 19 nt, Homo sapiens
  misc_RNA (1)...(19): siRNA sense strand
uugaaggacucgcgcauca

SEQ ID NO: 562860 - RNA, 19 nt, Homo sapiens
  misc_RNA (1)...(19): siRNA sense strand
uaaaggaagaggacagauc

SEQ ID NO: 562861 - RNA, 19 nt, Homo sapiens
  misc_RNA (1)...(19): siRNA sense strand
gcagacggcacgacacaag

SEQ ID NO: 562862 - RNA, 19 nt, Homo sapiens
  misc_RNA (1)...(19): siRNA sense strand
uguccaagcucaagauggu

SEQ ID NO: 562863 - RNA, 19 nt, Homo sapiens
  misc_RNA (1)...(19): siRNA sense strand
gaggagaaagcagccauug

SEQ ID NO: 562864 - RNA, 19 nt, Homo sapiens
  misc_RNA (1)...(19): siRNA sense strand
gugucuguguccuuguuua

SEQ ID NO: 562865 - RNA, 19 nt, Homo sapiens
  misc_RNA (1)...(19): siRNA sense strand
gaaacggauccagcaauuc

SEQ ID NO: 562866 - RNA, 19 nt, Homo sapiens
  misc_RNA (1)...(19): siRNA sense strand
gaguaguagcugaauuuga

SEQ ID NO: 562867 - RNA, 19 nt, Homo sapiens
  misc_RNA (1)...(19): siRNA sense strand
agguggaguuccggaauua

SEQ ID NO: 562868 - RNA, 19 nt, Homo sapiens
  misc_RNA (1)...(19): siRNA sense strand
gcugugcucuacaccuuag

SEQ ID NO: 562869 - RNA, 19 nt, Homo sapiens
  misc_RNA (1)...(19): siRNA sense strand
ccagaagcaguuuaugaga

SEQ ID NO: 562870 - RNA, 19 nt, Homo sapiens
  misc_RNA (1)...(19): siRNA sense strand
uaaggaggcacugcugauu

SEQ ID NO: 562871 - RNA, 19 nt, Homo sapiens
  misc_RNA (1)...(19): siRNA sense strand
caacuuucucugcaacuau

SEQ ID NO: 562872 - RNA, 19 nt, Homo sapiens
  misc_RNA (1)...(19): siRNA sense strand
auccagaacugcacucuuc

SEQ ID NO: 562873 - RNA, 19 nt, Homo sapiens
  misc_RNA (1)...(19): siRNA sense strand
ggaggagaaagcagccauu

SEQ ID NO: 562874 - RNA, 19 nt, Homo sapiens
  misc_RNA (1)...(19): siRNA sense strand
aggaguaguagcugaauuu

SEQ ID NO: 562875 - RNA, 19 nt, Homo sapiens
  misc_RNA (1)...(19): siRNA sense strand
cauuugcucugaacuggau

SEQ ID NO: 562876 - RNA, 19 nt, Homo sapiens
  misc_RNA (1)...(19): siRNA sense strand
gaacugcacucuucaggaa

SEQ ID NO: 562877 - RNA, 19 nt, Homo sapiens
  misc_RNA (1)...(19): siRNA sense strand
caaagaaugucgacccuaa

SEQ ID NO: 562878 - RNA, 19 nt, Homo sapiens
  misc_RNA (1)...(19): siRNA sense strand
gcacgccgcucuucacugu

SEQ ID NO: 562879 - RNA, 19 nt, Homo sapiens
  misc_RNA (1)...(19): siRNA sense strand
gaucaugggugucaucuac

SEQ ID NO: 562880 - RNA, 19 nt, Homo sapiens
  misc_RNA (1)...(19): siRNA sense strand
gggcgucuaugcugcuuua

SEQ ID NO: 562881 - RNA, 19 nt, Homo sapiens
  misc_RNA (1)...(19): siRNA sense strand
ugaaacggauccagcaauu

SEQ ID NO: 562882 - RNA, 19 nt, Homo sapiens
  misc_RNA (1)...(19): siRNA sense strand
ucaaggugcugaagcugua

SEQ ID NO: 562883 - RNA, 19 nt, Homo sapiens
  misc_RNA (1)...(19): siRNA sense strand
agacagagauuggagagaa

SEQ ID NO: 562884 - RNA, 19 nt, Homo sapiens
  misc_RNA (1)...(19): siRNA sense strand
gaccugcucuccuucauca

SEQ ID NO: 562885 - RNA, 19 nt, Homo sapiens
  misc_RNA (1)...(19): siRNA sense strand
cagacagacuucaucauug

SEQ ID NO: 562886 - RNA, 19 nt, Homo sapiens
  misc_RNA (1)...(19): siRNA sense strand
gaaauugucaaccucaugu

SEQ ID NO: 562887 - RNA, 19 nt, Homo sapiens
  misc_RNA (1)...(19): siRNA sense strand
ccacaguccuucuuugaca

SEQ ID NO: 562888 - RNA, 19 nt, Homo sapiens
  misc_RNA (1)...(19): siRNA sense strand
ccagacagacuucaucauu

SEQ ID NO: 562889 - RNA, 19 nt, Homo sapiens
  misc_RNA (1)...(19): siRNA sense strand
ucuguguccuuguuuaaua

SEQ ID NO: 562890 - RNA, 19 nt, Homo sapiens
  misc_RNA (1)...(19): siRNA sense strand
agacagacuucaucauugu

SEQ ID NO: 562891 - RNA, 19 nt, Homo sapiens
  misc_RNA (1)...(19): siRNA sense strand
uuacagugaugccgauauu

SEQ ID NO: 562892 - RNA, 19 nt, Homo sapiens
  misc_RNA (1)...(19): siRNA sense strand
ccacccugcugauacagua

SEQ ID NO: 562893 - RNA, 19 nt, Homo sapiens
  misc_RNA (1)...(19): siRNA sense strand
gaaggcaaagugcacauga

SEQ ID NO: 562894 - RNA, 19 nt, Homo sapiens
  misc_RNA (1)...(19): siRNA sense strand
gaagcuagaaggcaaagug

SEQ ID NO: 562895 - RNA, 19 nt, Homo sapiens
  misc_RNA (1)...(19): siRNA sense strand
ggccaucugucuccuguau

SEQ ID NO: 562896 - RNA, 19 nt, Homo sapiens
  misc_RNA (1)...(19): siRNA sense strand
ucaccuaugugguccagaa

SEQ ID NO: 562897 - RNA, 19 nt, Homo sapiens
  misc_RNA (1)...(19): siRNA sense strand
ggaaggcucugguuaucac

SEQ ID NO: 562898 - RNA, 19 nt, Homo sapiens
  misc_RNA (1)...(19): siRNA sense strand
guaccacgcuggccaucug

SEQ ID NO: 562899 - RNA, 19 nt, Homo sapiens
  misc_RNA (1)...(19): siRNA sense strand
cgucuaugcugcuuuagga

SEQ ID NO: 562900 - RNA, 19 nt, Homo sapiens
  misc_RNA (1)...(19): siRNA sense strand
guacguggacccaaacaau

SEQ ID NO: 562901 - RNA, 19 nt, Homo sapiens
  misc_RNA (1)...(19): siRNA sense strand
ugaagcggcuggaaucagu

SEQ ID NO: 562902 - RNA, 19 nt, Homo sapiens
  misc_RNA (1)...(19): siRNA sense strand
ccagguaaagcaaaugaaa

SEQ ID NO: 562903 - RNA, 19 nt, Homo sapiens
  misc_RNA (1)...(19): siRNA sense strand
guagacagaacaacacuuc

SEQ ID NO: 562904 - RNA, 19 nt, Homo sapiens
  misc_RNA (1)...(19): siRNA sense strand
ccaacuuucucugcaacua

SEQ ID NO: 562905 - RNA, 19 nt, Homo sapiens
  misc_RNA (1)...(19): siRNA sense strand
cgagaaggccuuugugucu

SEQ ID NO: 562906 - RNA, 19 nt, Homo sapiens
  misc_RNA (1)...(19): siRNA sense strand
caacugaagcggcuggaau

SEQ ID NO: 562907 - RNA, 19 nt, Homo sapiens
  misc_RNA (1)...(19): siRNA sense strand
ccaucugucuccuguaugu

SEQ ID NO: 562908 - RNA, 19 nt, Homo sapiens
  misc_RNA (1)...(19): siRNA sense strand
ucaguguguucugggauua

SEQ ID NO: 562909 - RNA, 19 nt, Homo sapiens
  misc_RNA (1)...(19): siRNA sense strand
acaaugauccagucaccua

SEQ ID NO: 562910 - RNA, 19 nt, Homo sapiens
  misc_RNA (1)...(19): siRNA sense strand
gaucuuacaacacuauuac

SEQ ID NO: 562911 - RNA, 19 nt, Homo sapiens
  misc_RNA (1)...(19): siRNA sense strand
agaagcaguuuaugagaca

SEQ ID NO: 562912 - RNA, 19 nt, Homo sapiens
  misc_RNA (1)...(19): siRNA sense strand
ggaaauugucaaccucaug

SEQ ID NO: 562913 - RNA, 19 nt, Homo sapiens
  misc_RNA (1)...(19): siRNA sense strand
caggaaggcucugguuauc

SEQ ID NO: 562914 - RNA, 19 nt, Homo sapiens
  misc_RNA (1)...(19): siRNA sense strand
gcaucaaggugcugaagcu

SEQ ID NO: 562915 - RNA, 19 nt, Homo sapiens
  misc_RNA (1)...(19): siRNA sense strand
ucagucagccgcucaccua

SEQ ID NO: 562916 - RNA, 19 nt, Homo sapiens
  misc_RNA (1)...(19): siRNA sense strand
gcucuucacuguggucauc

SEQ ID NO: 562917 - RNA, 19 nt, Homo sapiens
  misc_RNA (1)...(19): siRNA sense strand
aagauacgcucgccacagu

SEQ ID NO: 562918 - RNA, 19 nt, Homo sapiens
  misc_RNA (1)...(19): siRNA sense strand
gcacugcugcacaacaaga

SEQ ID NO: 562919 - RNA, 19 nt, Homo sapiens
  misc_RNA (1)...(19): siRNA sense strand
aggaggcacugcugauuga

SEQ ID NO: 562920 - RNA, 19 nt, Homo sapiens
  misc_RNA (1)...(19): siRNA sense strand
guuggaaggugcagaggau

SEQ ID NO: 562921 - RNA, 19 nt, Homo sapiens
  misc_RNA (1)...(19): siRNA sense strand
gaagggcauuaaccugucu

SEQ ID NO: 562922 - RNA, 19 nt, Homo sapiens
  misc_RNA (1)...(19): siRNA sense strand
gaaggacucgcgcaucaag

SEQ ID NO: 562923 - RNA, 19 nt, Homo sapiens
  misc_RNA (1)...(19): siRNA sense strand
ccacaucacggcaacugaa

SEQ ID NO: 562924 - RNA, 19 nt, Homo sapiens
  misc_RNA (1)...(19): siRNA sense strand
guccagaagcaguuuauga

SEQ ID NO: 562925 - RNA, 19 nt, Homo sapiens
  misc_RNA (1)...(19): siRNA sense strand
gaugcagucgcugaucuua

SEQ ID NO: 562926 - RNA, 19 nt, Homo sapiens
  misc_RNA (1)...(19): siRNA sense strand
cuaugcugcuuuaggaauu

SEQ ID NO: 562927 - RNA, 19 nt, Homo sapiens
  misc_RNA (1)...(19): siRNA sense strand
gaagggcuccguggccuau

SEQ ID NO: 562928 - RNA, 19 nt, Homo sapiens
  misc_RNA (1)...(19): siRNA sense strand
ucgcugaucuuacaacacu

SEQ ID NO: 562929 - RNA, 19 nt, Homo sapiens
  misc_RNA (1)...(19): siRNA sense strand
gacaguagacagaacaaca

SEQ ID NO: 562930 - RNA, 19 nt, Homo sapiens
  misc_RNA (1)...(19): siRNA sense strand
cauccacuuugcccuggua

SEQ ID NO: 562931 - RNA, 19 nt, Homo sapiens
  misc_RNA (1)...(19): siRNA sense strand
gcugcucaauuccuucuuc

SEQ ID NO: 562932 - RNA, 19 nt, Homo sapiens
  misc_RNA (1)...(19): siRNA sense strand
gcagacaguagacagaaca

SEQ ID NO: 562933 - RNA, 19 nt, Homo sapiens
  misc_RNA (1)...(19): siRNA sense strand
ucaaagugcggcugccauu

SEQ ID NO: 562934 - RNA, 19 nt, Homo sapiens
  misc_RNA (1)...(19): siRNA sense strand
ggagaagcuagaaggcaaa

SEQ ID NO: 562935 - RNA, 19 nt, Homo sapiens
  misc_RNA (1)...(19): siRNA sense strand
cccagaguguggaaagaaa

SEQ ID NO: 562936 - RNA, 19 nt, Homo sapiens
  misc_RNA (1)...(19): siRNA sense strand
uugaaggacucgcgcauca

SEQ ID NO: 562937 - RNA, 19 nt, Homo sapiens
  misc_RNA (1)...(19): siRNA sense strand
uaaaggaagaggacagauc

SEQ ID NO: 562938 - RNA, 19 nt, Homo sapiens
  misc_RNA (1)...(19): siRNA sense strand
gcagacggcacgacacaag

SEQ ID NO: 562939 - RNA, 19 nt, Homo sapiens
  misc_RNA (1)...(19): siRNA sense strand
uguccaagcucaagauggu

SEQ ID NO: 562940 - RNA, 19 nt, Homo sapiens
  misc_RNA (1)...(19): siRNA sense strand
gaggagaaagcagccauug

SEQ ID NO: 562941 - RNA, 19 nt, Homo sapiens
  misc_RNA (1)...(19): siRNA sense strand
gugucuguguccuuguuua

SEQ ID NO: 562942 - RNA, 19 nt, Homo sapiens
  misc_RNA (1)...(19): siRNA sense strand
gaaacggauccagcaauuc

SEQ ID NO: 562943 - RNA, 19 nt, Homo sapiens
  misc_RNA (1)...(19): siRNA sense strand
gcugugcucuacaccuuag

SEQ ID NO: 562944 - RNA, 19 nt, Homo sapiens
  misc_RNA (1)...(19): siRNA sense strand
ccagaagcaguuuaugaga

SEQ ID NO: 562945 - RNA, 19 nt, Homo sapiens
  misc_RNA (1)...(19): siRNA sense strand
uaaggaggcacugcugauu

SEQ ID NO: 562946 - RNA, 19 nt, Homo sapiens
  misc_RNA (1)...(19): siRNA sense strand
caacuuucucugcaacuau

SEQ ID NO: 562947 - RNA, 19 nt, Homo sapiens
  misc_RNA (1)...(19): siRNA sense strand
auccagaacugcacucuuc

SEQ ID NO: 562948 - RNA, 19 nt, Homo sapiens
  misc_RNA (1)...(19): siRNA sense strand
gcauggaggaagcaggaaa

SEQ ID NO: 562949 - RNA, 19 nt, Homo sapiens
  misc_RNA (1)...(19): siRNA sense strand
ggaggagaaagcagccauu

SEQ ID NO: 562950 - RNA, 19 nt, Homo sapiens
  misc_RNA (1)...(19): siRNA sense strand
aggcacugcugauugaaga

SEQ ID NO: 562951 - RNA, 19 nt, Homo sapiens
  misc_RNA (1)...(19): siRNA sense strand
gcagcgcaacggcuccuuu

SEQ ID NO: 562952 - RNA, 19 nt, Homo sapiens
  misc_RNA (1)...(19): siRNA sense strand
gacagagauuggagagaag

SEQ ID NO: 562953 - RNA, 19 nt, Homo sapiens
  misc_RNA (1)...(19): siRNA sense strand
aggcauggauccagaacug

SEQ ID NO: 562954 - RNA, 19 nt, Homo sapiens
  misc_RNA (1)...(19): siRNA sense strand
caaccaccuucaccuggau

SEQ ID NO: 562955 - RNA, 19 nt, Homo sapiens
  misc_RNA (1)...(19): siRNA sense strand
ugcagucgcugaucuuaca

SEQ ID NO: 562956 - RNA, 19 nt, Homo sapiens
  misc_RNA (1)...(19): siRNA sense strand
acaggaaggcucugguuau

SEQ ID NO: 562957 - RNA, 19 nt, Homo sapiens
  misc_RNA (1)...(19): siRNA sense strand
ugaacugcuucuccaagga

SEQ ID NO: 562958 - RNA, 19 nt, Homo sapiens
  misc_RNA (1)...(19): siRNA sense strand
cucagugccuggacaaaug

SEQ ID NO: 562959 - RNA, 19 nt, Homo sapiens
  misc_RNA (1)...(19): siRNA sense strand
uagcugaccuggagaugcu

SEQ ID NO: 562960 - RNA, 19 nt, Homo sapiens
  misc_RNA (1)...(19): siRNA sense strand
agaaggccuuugugucugu

SEQ ID NO: 562961 - RNA, 19 nt, Homo sapiens
  misc_RNA (1)...(19): siRNA sense strand
gguaaagcaaaugaaauug

SEQ ID NO: 562962 - RNA, 19 nt, Homo sapiens
  misc_RNA (1)...(19): siRNA sense strand
uaucaccaacucagucaaa

SEQ ID NO: 562963 - RNA, 19 nt, Homo sapiens
  misc_RNA (1)...(19): siRNA sense strand
caucagugccugcuucaag

SEQ ID NO: 562964 - RNA, 19 nt, Homo sapiens
  misc_RNA (1)...(19): siRNA sense strand
gucagccgcucaccuaucu

SEQ ID NO: 562965 - RNA, 19 nt, Homo sapiens
  misc_RNA (1)...(19): siRNA sense strand
cuaugucguugaugagguu

SEQ ID NO: 562966 - RNA, 19 nt, Homo sapiens
  misc_RNA (1)...(19): siRNA sense strand
uggccaagcacaucuuuga

SEQ ID NO: 562967 - RNA, 19 nt, Homo sapiens
  misc_RNA (1)...(19): siRNA sense strand
uacaggaaggcucugguua

SEQ ID NO: 562968 - RNA, 19 nt, Homo sapiens
  misc_RNA (1)...(19): siRNA sense strand
cuauuaccacuacaucuuu

SEQ ID NO: 562969 - RNA, 19 nt, Homo sapiens
  misc_RNA (1)...(19): siRNA sense strand
acaacacuauuaccacuac

SEQ ID NO: 562970 - RNA, 19 nt, Homo sapiens
  misc_RNA (1)...(19): siRNA sense strand
uggcugugcucuacaccuu

SEQ ID NO: 562971 - RNA, 19 nt, Homo sapiens
  misc_RNA (1)...(19): siRNA sense strand
gcucagugccuggacaaau

SEQ ID NO: 562972 - RNA, 19 nt, Homo sapiens
  misc_RNA (1)...(19): siRNA sense strand
cggcuccuuugccaacuuu

SEQ ID NO: 562973 - RNA, 19 nt, Homo sapiens
  misc_RNA (1)...(19): siRNA sense strand
gagcuguggccgugaagau

SEQ ID NO: 562974 - RNA, 19 nt, Homo sapiens
  misc_RNA (1)...(19): siRNA sense strand
uauuaccacuacaucuuug

SEQ ID NO: 562975 - RNA, 19 nt, Homo sapiens
  misc_RNA (1)...(19): siRNA sense strand
aggcacugcugcacaacaa

SEQ ID NO: 562976 - RNA, 19 nt, Homo sapiens
  misc_RNA (1)...(19): siRNA sense strand
caaagaaugucgacccuaa

SEQ ID NO: 562977 - RNA, 19 nt, Homo sapiens
  misc_RNA (1)...(19): siRNA sense strand
gaucaugggugucaucuac

SEQ ID NO: 562978 - RNA, 19 nt, Homo sapiens
  misc_RNA (1)...(19): siRNA sense strand
gaccugcucuccuucauca

SEQ ID NO: 562979 - RNA, 19 nt, Homo sapiens
  misc_RNA (1)...(19): siRNA sense strand
gaaauugucaaccucaugu

SEQ ID NO: 562980 - RNA, 19 nt, Homo sapiens
  misc_RNA (1)...(19): siRNA sense strand
ccacccugcugauacagua

SEQ ID NO: 562981 - RNA, 19 nt, Homo sapiens
  misc_RNA (1)...(19): siRNA sense strand
ggaaggcucugguuaucac

SEQ ID NO: 562982 - RNA, 19 nt, Homo sapiens
  misc_RNA (1)...(19): siRNA sense strand
ccagguaaagcaaaugaaa

SEQ ID NO: 562983 - RNA, 19 nt, Homo sapiens
  misc_RNA (1)...(19): siRNA sense strand
gaucuuacaacacuauuac

SEQ ID NO: 562984 - RNA, 19 nt, Homo sapiens
  misc_RNA (1)...(19): siRNA sense strand
ggaaauugucaaccucaug

SEQ ID NO: 562985 - RNA, 19 nt, Homo sapiens
  misc_RNA (1)...(19): siRNA sense strand
caggaaggcucugguuauc

SEQ ID NO: 562986 - RNA, 19 nt, Homo sapiens
  misc_RNA (1)...(19): siRNA sense strand
gaaggacucgcgcaucaag

SEQ ID NO: 562987 - RNA, 19 nt, Homo sapiens
  misc_RNA (1)...(19): siRNA sense strand
gaugcagucgcugaucuua

SEQ ID NO: 562988 - RNA, 19 nt, Homo sapiens
  misc_RNA (1)...(19): siRNA sense strand
ucgcugaucuuacaacacu

SEQ ID NO: 562989 - RNA, 19 nt, Homo sapiens
  misc_RNA (1)...(19): siRNA sense strand
cauccacuuugcccuggua

SEQ ID NO: 562990 - RNA, 19 nt, Homo sapiens
  misc_RNA (1)...(19): siRNA sense strand
uugaaggacucgcgcauca

SEQ ID NO: 562991 - RNA, 19 nt, Homo sapiens
  misc_RNA (1)...(19): siRNA sense strand
uaaaggaagaggacagauc

SEQ ID NO: 562992 - RNA, 19 nt, Homo sapiens
  misc_RNA (1)...(19): siRNA sense strand
uguccaagcucaagauggu

SEQ ID NO: 562993 - RNA, 19 nt, Homo sapiens
  misc_RNA (1)...(19): siRNA sense strand
gcagacggcacgacacaag

SEQ ID NO: 562994 - RNA, 19 nt, Homo sapiens
  misc_RNA (1)...(19): siRNA sense strand
gcauggaggaagcaggaaa

SEQ ID NO: 562995 - RNA, 19 nt, Homo sapiens
  misc_RNA (1)...(19): siRNA sense strand
ugcagucgcugaucuuaca

SEQ ID NO: 562996 - RNA, 19 nt, Homo sapiens
  misc_RNA (1)...(19): siRNA sense strand
acaggaaggcucugguuau

SEQ ID NO: 562997 - RNA, 19 nt, Homo sapiens
  misc_RNA (1)...(19): siRNA sense strand
gguaaagcaaaugaaauug

SEQ ID NO: 562998 - RNA, 19 nt, Homo sapiens
  misc_RNA (1)...(19): siRNA sense strand
uaucaccaacucagucaaa

SEQ ID NO: 562999 - RNA, 19 nt, Homo sapiens
  misc_RNA (1)...(19): siRNA sense strand
caucagugccugcuucaag

SEQ ID NO: 563000 - RNA, 19 nt, Homo sapiens
  misc_RNA (1)...(19): siRNA sense strand
uacaggaaggcucugguua

SEQ ID NO: 563001 - RNA, 19 nt, Homo sapiens
  misc_RNA (1)...(19): siRNA sense strand
cuauuaccacuacaucuuu

SEQ ID NO: 563002 - RNA, 19 nt, Homo sapiens
  misc_RNA (1)...(19): siRNA sense strand
acaacacuauuaccacuac

SEQ ID NO: 563003 - RNA, 19 nt, Homo sapiens
  misc_RNA (1)...(19): siRNA sense strand
gagcuguggccgugaagau

SEQ ID NO: 563004 - RNA, 19 nt, Homo sapiens
  misc_RNA (1)...(19): siRNA sense strand
uauuaccacuacaucuuug

SEQ ID NO: 563005 - RNA, 19 nt, Homo sapiens
  misc_RNA (1)...(19): siRNA sense strand
ccucuggucccuaaaggaa

SEQ ID NO: 563006 - RNA, 19 nt, Homo sapiens
  misc_RNA (1)...(19): siRNA sense strand
gggaaauugucaaccucau

SEQ ID NO: 563007 - RNA, 19 nt, Homo sapiens
  misc_RNA (1)...(19): siRNA sense strand
ggcuccagcuuccucauca

SEQ ID NO: 563008 - RNA, 19 nt, Homo sapiens
  misc_RNA (1)...(19): siRNA sense strand
caaggcagagggugagauc

SEQ ID NO: 563009 - RNA, 19 nt, Homo sapiens
  misc_RNA (1)...(19): siRNA sense strand
gcugaucuuacaacacuau

SEQ ID NO: 563010 - RNA, 19 nt, Homo sapiens
  misc_RNA (1)...(19): siRNA sense strand
ucuggucccuaaaggaaga

SEQ ID NO: 563011 - RNA, 19 nt, Homo sapiens
  misc_RNA (1)...(19): siRNA sense strand
ggaggaagcaggaaaagca

SEQ ID NO: 563012 - RNA, 19 nt, Homo sapiens
  misc_RNA (1)...(19): siRNA sense strand
cagguaaagcaaaugaaau

SEQ ID NO: 563013 - RNA, 19 nt, Homo sapiens
  misc_RNA (1)...(19): siRNA sense strand
uucauggucuugcugauuc

SEQ ID NO: 563014 - RNA, 19 nt, Homo sapiens
  misc_RNA (1)...(19): siRNA sense strand
caccuucuacauccacuuu

SEQ ID NO: 563015 - RNA, 19 nt, Homo sapiens
  misc_RNA (1)...(19): siRNA sense strand
cuacaggaaggcucugguu

SEQ ID NO: 563016 - RNA, 19 nt, Homo sapiens
  misc_RNA (1)...(19): siRNA sense strand
caacacuauuaccacuaca

SEQ ID NO: 563017 - RNA, 19 nt, Homo sapiens
  misc_RNA (1)...(19): siRNA sense strand
ucaaacgugcguccacugu

SEQ ID NO: 563018 - RNA, 19 nt, Homo sapiens
  misc_RNA (1)...(19): siRNA sense strand
gcuggccacccugcugaua

SEQ ID NO: 563019 - RNA, 19 nt, Homo sapiens
  misc_RNA (1)...(19): siRNA sense strand
ugaucagguuuaucuccaa

SEQ ID NO: 563020 - RNA, 19 nt, Homo sapiens
  misc_RNA (1)...(19): siRNA sense strand
ggaccugcucuccuucauc

SEQ ID NO: 563021 - RNA, 19 nt, Homo sapiens
  misc_RNA (1)...(19): siRNA sense strand
gaacugcacucuucaggaa

SEQ ID NO: 563022 - RNA, 19 nt, Homo sapiens
  misc_RNA (1)...(19): siRNA sense strand
caaagaaugucgacccuaa

SEQ ID NO: 563023 - RNA, 19 nt, Homo sapiens
  misc_RNA (1)...(19): siRNA sense strand
gcucuuugcugcacuauuu

SEQ ID NO: 563024 - RNA, 19 nt, Homo sapiens
  misc_RNA (1)...(19): siRNA sense strand
gcacgccgcucuucacugu

SEQ ID NO: 563025 - RNA, 19 nt, Homo sapiens
  misc_RNA (1)...(19): siRNA sense strand
gaucaugggugucaucuac

SEQ ID NO: 563026 - RNA, 19 nt, Homo sapiens
  misc_RNA (1)...(19): siRNA sense strand
gggcgucuaugcugcuuua

SEQ ID NO: 563027 - RNA, 19 nt, Homo sapiens
  misc_RNA (1)...(19): siRNA sense strand
ugaaacggauccagcaauu

SEQ ID NO: 563028 - RNA, 19 nt, Homo sapiens
  misc_RNA (1)...(19): siRNA sense strand
gcucugaacuggaugauac

SEQ ID NO: 563029 - RNA, 19 nt, Homo sapiens
  misc_RNA (1)...(19): siRNA sense strand
ucaaggugcugaagcugua

SEQ ID NO: 563030 - RNA, 19 nt, Homo sapiens
  misc_RNA (1)...(19): siRNA sense strand
agacagagauuggagagaa

SEQ ID NO: 563031 - RNA, 19 nt, Homo sapiens
  misc_RNA (1)...(19): siRNA sense strand
gcacaccggcuuaacacua

SEQ ID NO: 563032 - RNA, 19 nt, Homo sapiens
  misc_RNA (1)...(19): siRNA sense strand
gaccugcucuccuucauca

SEQ ID NO: 563033 - RNA, 19 nt, Homo sapiens
  misc_RNA (1)...(19): siRNA sense strand
cagacagacuucaucauug

SEQ ID NO: 563034 - RNA, 19 nt, Homo sapiens
  misc_RNA (1)...(19): siRNA sense strand
gagguggaguuccggaauu

SEQ ID NO: 563035 - RNA, 19 nt, Homo sapiens
  misc_RNA (1)...(19): siRNA sense strand
gaaauugucaaccucaugu

SEQ ID NO: 563036 - RNA, 19 nt, Homo sapiens
  misc_RNA (1)...(19): siRNA sense strand
ggugaaauccgcauugaug

SEQ ID NO: 563037 - RNA, 19 nt, Homo sapiens
  misc_RNA (1)...(19): siRNA sense strand
ccacaguccuucuuugaca

SEQ ID NO: 563038 - RNA, 19 nt, Homo sapiens
  misc_RNA (1)...(19): siRNA sense strand
ccagacagacuucaucauu

SEQ ID NO: 563039 - RNA, 19 nt, Homo sapiens
  misc_RNA (1)...(19): siRNA sense strand
ucuguguccuuguuuaaua

SEQ ID NO: 563040 - RNA, 19 nt, Homo sapiens
  misc_RNA (1)...(19): siRNA sense strand
agacagacuucaucauugu

SEQ ID NO: 563041 - RNA, 19 nt, Homo sapiens
  misc_RNA (1)...(19): siRNA sense strand
uuacagugaugccgauauu

SEQ ID NO: 563042 - RNA, 19 nt, Homo sapiens
  misc_RNA (1)...(19): siRNA sense strand
aguaguagcugaauuugau

SEQ ID NO: 563043 - RNA, 19 nt, Homo sapiens
  misc_RNA (1)...(19): siRNA sense strand
ccacccugcugauacagua

SEQ ID NO: 563044 - RNA, 19 nt, Homo sapiens
  misc_RNA (1)...(19): siRNA sense strand
gcucucagcugaccaucau

SEQ ID NO: 563045 - RNA, 19 nt, Homo sapiens
  misc_RNA (1)...(19): siRNA sense strand
gaaggcaaagugcacauga

SEQ ID NO: 563046 - RNA, 19 nt, Homo sapiens
  misc_RNA (1)...(19): siRNA sense strand
gaagcuagaaggcaaagug

SEQ ID NO: 563047 - RNA, 19 nt, Homo sapiens
  misc_RNA (1)...(19): siRNA sense strand
ggccaucugucuccuguau

SEQ ID NO: 563048 - RNA, 19 nt, Homo sapiens
  misc_RNA (1)...(19): siRNA sense strand
ggacaaaggaguaguagcu

SEQ ID NO: 563049 - RNA, 19 nt, Homo sapiens
  misc_RNA (1)...(19): siRNA sense strand
ccaucgaccuggagacuga

SEQ ID NO: 563050 - RNA, 19 nt, Homo sapiens
  misc_RNA (1)...(19): siRNA sense strand
ucaccuaugugguccagaa

SEQ ID NO: 563051 - RNA, 19 nt, Homo sapiens
  misc_RNA (1)...(19): siRNA sense strand
gcuggcaagucuuccauga

SEQ ID NO: 563052 - RNA, 19 nt, Homo sapiens
  misc_RNA (1)...(19): siRNA sense strand
ggaaggcucugguuaucac

SEQ ID NO: 563053 - RNA, 19 nt, Homo sapiens
  misc_RNA (1)...(19): siRNA sense strand
uggagagggucaaggagua

SEQ ID NO: 563054 - RNA, 19 nt, Homo sapiens
  misc_RNA (1)...(19): siRNA sense strand
uacgaaugaugucagauuu

SEQ ID NO: 563055 - RNA, 19 nt, Homo sapiens
  misc_RNA (1)...(19): siRNA sense strand
gaacugcguggugcucuuu

SEQ ID NO: 563056 - RNA, 19 nt, Homo sapiens
  misc_RNA (1)...(19): siRNA sense strand
guaccacgcuggccaucug

SEQ ID NO: 563057 - RNA, 19 nt, Homo sapiens
  misc_RNA (1)...(19): siRNA sense strand
cgucuaugcugcuuuagga

SEQ ID NO: 563058 - RNA, 19 nt, Homo sapiens
  misc_RNA (1)...(19): siRNA sense strand
guacguggacccaaacaau

SEQ ID NO: 563059 - RNA, 19 nt, Homo sapiens
  misc_RNA (1)...(19): siRNA sense strand
ugaagcggcuggaaucagu

SEQ ID NO: 563060 - RNA, 19 nt, Homo sapiens
  misc_RNA (1)...(19): siRNA sense strand
cgaaugaugucagauuugg

SEQ ID NO: 563061 - RNA, 19 nt, Homo sapiens
  misc_RNA (1)...(19): siRNA sense strand
ccagguaaagcaaaugaaa

SEQ ID NO: 563062 - RNA, 19 nt, Homo sapiens
  misc_RNA (1)...(19): siRNA sense strand
ugaacuggaugauacgaau

SEQ ID NO: 563063 - RNA, 19 nt, Homo sapiens
  misc_RNA (1)...(19): siRNA sense strand
guagacagaacaacacuuc

SEQ ID NO: 563064 - RNA, 19 nt, Homo sapiens
  misc_RNA (1)...(19): siRNA sense strand
ccaacuuucucugcaacua

SEQ ID NO: 563065 - RNA, 19 nt, Homo sapiens
  misc_RNA (1)...(19): siRNA sense strand
caaaggaguaguagcugaa

SEQ ID NO: 563066 - RNA, 19 nt, Homo sapiens
  misc_RNA (1)...(19): siRNA sense strand
cgagaaggccuuugugucu

SEQ ID NO: 563067 - RNA, 19 nt, Homo sapiens
  misc_RNA (1)...(19): siRNA sense strand
caggugacauuugcucuga

SEQ ID NO: 563068 - RNA, 19 nt, Homo sapiens
  misc_RNA (1)...(19): siRNA sense strand
caacugaagcggcuggaau

SEQ ID NO: 563069 - RNA, 19 nt, Homo sapiens
  misc_RNA (1)...(19): siRNA sense strand
ccaucugucuccuguaugu

SEQ ID NO: 563070 - RNA, 19 nt, Homo sapiens
  misc_RNA (1)...(19): siRNA sense strand
ucaguguguucugggauua

SEQ ID NO: 563071 - RNA, 19 nt, Homo sapiens
  misc_RNA (1)...(19): siRNA sense strand
acaaugauccagucaccua

SEQ ID NO: 563072 - RNA, 19 nt, Homo sapiens
  misc_RNA (1)...(19): siRNA sense strand
gaucuuacaacacuauuac

SEQ ID NO: 563073 - RNA, 19 nt, Homo sapiens
  misc_RNA (1)...(19): siRNA sense strand
uuaacacuaucauggacua

SEQ ID NO: 563074 - RNA, 19 nt, Homo sapiens
  misc_RNA (1)...(19): siRNA sense strand
ggaacugcguggugcucuu

SEQ ID NO: 563075 - RNA, 19 nt, Homo sapiens
  misc_RNA (1)...(19): siRNA sense strand
agaagcaguuuaugagaca

SEQ ID NO: 563076 - RNA, 19 nt, Homo sapiens
  misc_RNA (1)...(19): siRNA sense strand
ggaaauugucaaccucaug

SEQ ID NO: 563077 - RNA, 19 nt, Homo sapiens
  misc_RNA (1)...(19): siRNA sense strand
caggaaggcucugguuauc

SEQ ID NO: 563078 - RNA, 19 nt, Homo sapiens
  misc_RNA (1)...(19): siRNA sense strand
gcaucaaggugcugaagcu

SEQ ID NO: 563079 - RNA, 19 nt, Homo sapiens
  misc_RNA (1)...(19): siRNA sense strand
ucagucagccgcucaccua

SEQ ID NO: 563080 - RNA, 19 nt, Homo sapiens
  misc_RNA (1)...(19): siRNA sense strand
gcucuucacuguggucauc

SEQ ID NO: 563081 - RNA, 19 nt, Homo sapiens
  misc_RNA (1)...(19): siRNA sense strand
aagauacgcucgccacagu

SEQ ID NO: 563082 - RNA, 19 nt, Homo sapiens
  misc_RNA (1)...(19): siRNA sense strand
gcacugcugcacaacaaga

SEQ ID NO: 563083 - RNA, 19 nt, Homo sapiens
  misc_RNA (1)...(19): siRNA sense strand
aggaggcacugcugauuga

SEQ ID NO: 563084 - RNA, 19 nt, Homo sapiens
  misc_RNA (1)...(19): siRNA sense strand
guuggaaggugcagaggau

SEQ ID NO: 563085 - RNA, 19 nt, Homo sapiens
  misc_RNA (1)...(19): siRNA sense strand
gaagggcauuaaccugucu

SEQ ID NO: 563086 - RNA, 19 nt, Homo sapiens
  misc_RNA (1)...(19): siRNA sense strand
gaaggacucgcgcaucaag

SEQ ID NO: 563087 - RNA, 19 nt, Homo sapiens
  misc_RNA (1)...(19): siRNA sense strand
caaccucauugcagcuaga

SEQ ID NO: 563088 - RNA, 19 nt, Homo sapiens
  misc_RNA (1)...(19): siRNA sense strand
cacaccggcuuaacacuau

SEQ ID NO: 563089 - RNA, 19 nt, Homo sapiens
  misc_RNA (1)...(19): siRNA sense strand
ccacaucacggcaacugaa

SEQ ID NO: 563090 - RNA, 19 nt, Homo sapiens
  misc_RNA (1)...(19): siRNA sense strand
guccagaagcaguuuauga

SEQ ID NO: 563091 - RNA, 19 nt, Homo sapiens
  misc_RNA (1)...(19): siRNA sense strand
gaugcagucgcugaucuua

SEQ ID NO: 563092 - RNA, 19 nt, Homo sapiens
  misc_RNA (1)...(19): siRNA sense strand
cuaugcugcuuuaggaauu

SEQ ID NO: 563093 - RNA, 19 nt, Homo sapiens
  misc_RNA (1)...(19): siRNA sense strand
gaagggcuccguggccuau

SEQ ID NO: 563094 - RNA, 19 nt, Homo sapiens
  misc_RNA (1)...(19): siRNA sense strand
ucgcugaucuuacaacacu

SEQ ID NO: 563095 - RNA, 19 nt, Homo sapiens
  misc_RNA (1)...(19): siRNA sense strand
ugauacgaaugaugucaga

SEQ ID NO: 563096 - RNA, 19 nt, Homo sapiens
  misc_RNA (1)...(19): siRNA sense strand
gaacuggaugauacgaaug

SEQ ID NO: 563097 - RNA, 19 nt, Homo sapiens
  misc_RNA (1)...(19): siRNA sense strand
gacaguagacagaacaaca

SEQ ID NO: 563098 - RNA, 19 nt, Homo sapiens
  misc_RNA (1)...(19): siRNA sense strand
cauccacuuugcccuggua

SEQ ID NO: 563099 - RNA, 19 nt, Homo sapiens
  misc_RNA (1)...(19): siRNA sense strand
gcugcucaauuccuucuuc

SEQ ID NO: 563100 - RNA, 19 nt, Homo sapiens
  misc_RNA (1)...(19): siRNA sense strand
gcagacaguagacagaaca

SEQ ID NO: 563101 - RNA, 19 nt, Homo sapiens
  misc_RNA (1)...(19): siRNA sense strand
ucaaagugcggcugccauu

SEQ ID NO: 563102 - RNA, 19 nt, Homo sapiens
  misc_RNA (1)...(19): siRNA sense strand
ggagaagcuagaaggcaaa

SEQ ID NO: 563103 - RNA, 19 nt, Homo sapiens
  misc_RNA (1)...(19): siRNA sense strand
cccagaguguggaaagaaa

SEQ ID NO: 563104 - RNA, 19 nt, Homo sapiens
  misc_RNA (1)...(19): siRNA sense strand
uugaaggacucgcgcauca

SEQ ID NO: 563105 - RNA, 19 nt, Homo sapiens
  misc_RNA (1)...(19): siRNA sense strand
uaaaggaagaggacagauc

SEQ ID NO: 563106 - RNA, 19 nt, Homo sapiens
  misc_RNA (1)...(19): siRNA sense strand
gcagacggcacgacacaag

SEQ ID NO: 563107 - RNA, 19 nt, Homo sapiens
  misc_RNA (1)...(19): siRNA sense strand
uguccaagcucaagauggu

SEQ ID NO: 563108 - RNA, 19 nt, Homo sapiens
  misc_RNA (1)...(19): siRNA sense strand
gaggagaaagcagccauug

SEQ ID NO: 563109 - RNA, 19 nt, Homo sapiens
  misc_RNA (1)...(19): siRNA sense strand
gugucuguguccuuguuua

SEQ ID NO: 563110 - RNA, 19 nt, Homo sapiens
  misc_RNA (1)...(19): siRNA sense strand
gaaacggauccagcaauuc

SEQ ID NO: 563111 - RNA, 19 nt, Homo sapiens
  misc_RNA (1)...(19): siRNA sense strand
gaguaguagcugaauuuga

SEQ ID NO: 563112 - RNA, 19 nt, Homo sapiens
  misc_RNA (1)...(19): siRNA sense strand
agguggaguuccggaauua

SEQ ID NO: 563113 - RNA, 19 nt, Homo sapiens
  misc_RNA (1)...(19): siRNA sense strand
gcugugcucuacaccuuag

SEQ ID NO: 563114 - RNA, 19 nt, Homo sapiens
  misc_RNA (1)...(19): siRNA sense strand
ccagaagcaguuuaugaga

SEQ ID NO: 563115 - RNA, 19 nt, Homo sapiens
  misc_RNA (1)...(19): siRNA sense strand
uaaggaggcacugcugauu

SEQ ID NO: 563116 - RNA, 19 nt, Homo sapiens
  misc_RNA (1)...(19): siRNA sense strand
caacuuucucugcaacuau

SEQ ID NO: 563117 - RNA, 19 nt, Homo sapiens
  misc_RNA (1)...(19): siRNA sense strand
auccagaacugcacucuuc

SEQ ID NO: 563118 - RNA, 19 nt, Homo sapiens
  misc_RNA (1)...(19): siRNA sense strand
ggaggagaaagcagccauu

SEQ ID NO: 563119 - RNA, 19 nt, Homo sapiens
  misc_RNA (1)...(19): siRNA sense strand
aggaguaguagcugaauuu

SEQ ID NO: 563120 - RNA, 19 nt, Homo sapiens
  misc_RNA (1)...(19): siRNA sense strand
cauuugcucugaacuggau

SEQ ID NO: 563121 - RNA, 19 nt, Homo sapiens
  misc_RNA (1)...(19): siRNA sense strand
gaacugcacucuucaggaa

SEQ ID NO: 563122 - RNA, 19 nt, Homo sapiens
  misc_RNA (1)...(19): siRNA sense strand
caaagaaugucgacccuaa

SEQ ID NO: 563123 - RNA, 19 nt, Homo sapiens
  misc_RNA (1)...(19): siRNA sense strand
gcacgccgcucuucacugu

SEQ ID NO: 563124 - RNA, 19 nt, Homo sapiens
  misc_RNA (1)...(19): siRNA sense strand
gaucaugggugucaucuac

SEQ ID NO: 563125 - RNA, 19 nt, Homo sapiens
  misc_RNA (1)...(19): siRNA sense strand
gggcgucuaugcugcuuua

SEQ ID NO: 563126 - RNA, 19 nt, Homo sapiens
  misc_RNA (1)...(19): siRNA sense strand
ugaaacggauccagcaauu

SEQ ID NO: 563127 - RNA, 19 nt, Homo sapiens
  misc_RNA (1)...(19): siRNA sense strand
ucaaggugcugaagcugua

SEQ ID NO: 563128 - RNA, 19 nt, Homo sapiens
  misc_RNA (1)...(19): siRNA sense strand
agacagagauuggagagaa

SEQ ID NO: 563129 - RNA, 19 nt, Homo sapiens
  misc_RNA (1)...(19): siRNA sense strand
gaccugcucuccuucauca

SEQ ID NO: 563130 - RNA, 19 nt, Homo sapiens
  misc_RNA (1)...(19): siRNA sense strand
cagacagacuucaucauug

SEQ ID NO: 563131 - RNA, 19 nt, Homo sapiens
  misc_RNA (1)...(19): siRNA sense strand
gaaauugucaaccucaugu

SEQ ID NO: 563132 - RNA, 19 nt, Homo sapiens
  misc_RNA (1)...(19): siRNA sense strand
ccacaguccuucuuugaca

SEQ ID NO: 563133 - RNA, 19 nt, Homo sapiens
  misc_RNA (1)...(19): siRNA sense strand
ccagacagacuucaucauu

SEQ ID NO: 563134 - RNA, 19 nt, Homo sapiens
  misc_RNA (1)...(19): siRNA sense strand
ucuguguccuuguuuaaua

SEQ ID NO: 563135 - RNA, 19 nt, Homo sapiens
  misc_RNA (1)...(19): siRNA sense strand
agacagacuucaucauugu

SEQ ID NO: 563136 - RNA, 19 nt, Homo sapiens
  misc_RNA (1)...(19): siRNA sense strand
uuacagugaugccgauauu

SEQ ID NO: 563137 - RNA, 19 nt, Homo sapiens
  misc_RNA (1)...(19): siRNA sense strand
ccacccugcugauacagua

SEQ ID NO: 563138 - RNA, 19 nt, Homo sapiens
  misc_RNA (1)...(19): siRNA sense strand
gaaggcaaagugcacauga

SEQ ID NO: 563139 - RNA, 19 nt, Homo sapiens
  misc_RNA (1)...(19): siRNA sense strand
gaagcuagaaggcaaagug

SEQ ID NO: 563140 - RNA, 19 nt, Homo sapiens
  misc_RNA (1)...(19): siRNA sense strand
ggccaucugucuccuguau

SEQ ID NO: 563141 - RNA, 19 nt, Homo sapiens
  misc_RNA (1)...(19): siRNA sense strand
ucaccuaugugguccagaa

SEQ ID NO: 563142 - RNA, 19 nt, Homo sapiens
  misc_RNA (1)...(19): siRNA sense strand
ggaaggcucugguuaucac

SEQ ID NO: 563143 - RNA, 19 nt, Homo sapiens
  misc_RNA (1)...(19): siRNA sense strand
guaccacgcuggccaucug

SEQ ID NO: 563144 - RNA, 19 nt, Homo sapiens
  misc_RNA (1)...(19): siRNA sense strand
cgucuaugcugcuuuagga

SEQ ID NO: 563145 - RNA, 19 nt, Homo sapiens
  misc_RNA (1)...(19): siRNA sense strand
guacguggacccaaacaau

SEQ ID NO: 563146 - RNA, 19 nt, Homo sapiens
  misc_RNA (1)...(19): siRNA sense strand
ugaagcggcuggaaucagu

SEQ ID NO: 563147 - RNA, 19 nt, Homo sapiens
  misc_RNA (1)...(19): siRNA sense strand
ccagguaaagcaaaugaaa

SEQ ID NO: 563148 - RNA, 19 nt, Homo sapiens
  misc_RNA (1)...(19): siRNA sense strand
guagacagaacaacacuuc

SEQ ID NO: 563149 - RNA, 19 nt, Homo sapiens
  misc_RNA (1)...(19): siRNA sense strand
ccaacuuucucugcaacua

SEQ ID NO: 563150 - RNA, 19 nt, Homo sapiens
  misc_RNA (1)...(19): siRNA sense strand
cgagaaggccuuugugucu

SEQ ID NO: 563151 - RNA, 19 nt, Homo sapiens
  misc_RNA (1)...(19): siRNA sense strand
caacugaagcggcuggaau

SEQ ID NO: 563152 - RNA, 19 nt, Homo sapiens
  misc_RNA (1)...(19): siRNA sense strand
ccaucugucuccuguaugu

SEQ ID NO: 563153 - RNA, 19 nt, Homo sapiens
  misc_RNA (1)...(19): siRNA sense strand
ucaguguguucugggauua

SEQ ID NO: 563154 - RNA, 19 nt, Homo sapiens
  misc_RNA (1)...(19): siRNA sense strand
acaaugauccagucaccua

SEQ ID NO: 563155 - RNA, 19 nt, Homo sapiens
  misc_RNA (1)...(19): siRNA sense strand
gaucuuacaacacuauuac

SEQ ID NO: 563156 - RNA, 19 nt, Homo sapiens
  misc_RNA (1)...(19): siRNA sense strand
agaagcaguuuaugagaca

SEQ ID NO: 563157 - RNA, 19 nt, Homo sapiens
  misc_RNA (1)...(19): siRNA sense strand
ggaaauugucaaccucaug

SEQ ID NO: 563158 - RNA, 19 nt, Homo sapiens
  misc_RNA (1)...(19): siRNA sense strand
caggaaggcucugguuauc

SEQ ID NO: 563159 - RNA, 19 nt, Homo sapiens
  misc_RNA (1)...(19): siRNA sense strand
gcaucaaggugcugaagcu

SEQ ID NO: 563160 - RNA, 19 nt, Homo sapiens
  misc_RNA (1)...(19): siRNA sense strand
ucagucagccgcucaccua

SEQ ID NO: 563161 - RNA, 19 nt, Homo sapiens
  misc_RNA (1)...(19): siRNA sense strand
gcucuucacuguggucauc

SEQ ID NO: 563162 - RNA, 19 nt, Homo sapiens
  misc_RNA (1)...(19): siRNA sense strand
aagauacgcucgccacagu

SEQ ID NO: 563163 - RNA, 19 nt, Homo sapiens
  misc_RNA (1)...(19): siRNA sense strand
gcacugcugcacaacaaga

SEQ ID NO: 563164 - RNA, 19 nt, Homo sapiens
  misc_RNA (1)...(19): siRNA sense strand
aggaggcacugcugauuga

SEQ ID NO: 563165 - RNA, 19 nt, Homo sapiens
  misc_RNA (1)...(19): siRNA sense strand
guuggaaggugcagaggau

SEQ ID NO: 563166 - RNA, 19 nt, Homo sapiens
  misc_RNA (1)...(19): siRNA sense strand
gaagggcauuaaccugucu

SEQ ID NO: 563167 - RNA, 19 nt, Homo sapiens
  misc_RNA (1)...(19): siRNA sense strand
gaaggacucgcgcaucaag

SEQ ID NO: 563168 - RNA, 19 nt, Homo sapiens
  misc_RNA (1)...(19): siRNA sense strand
ccacaucacggcaacugaa

SEQ ID NO: 563169 - RNA, 19 nt, Homo sapiens
  misc_RNA (1)...(19): siRNA sense strand
guccagaagcaguuuauga

SEQ ID NO: 563170 - RNA, 19 nt, Homo sapiens
  misc_RNA (1)...(19): siRNA sense strand
gaugcagucgcugaucuua

SEQ ID NO: 563171 - RNA, 19 nt, Homo sapiens
  misc_RNA (1)...(19): siRNA sense strand
cuaugcugcuuuaggaauu

SEQ ID NO: 563172 - RNA, 19 nt, Homo sapiens
  misc_RNA (1)...(19): siRNA sense strand
gaagggcuccguggccuau

SEQ ID NO: 563173 - RNA, 19 nt, Homo sapiens
  misc_RNA (1)...(19): siRNA sense strand
ucgcugaucuuacaacacu

SEQ ID NO: 563174 - RNA, 19 nt, Homo sapiens
  misc_RNA (1)...(19): siRNA sense strand
gacaguagacagaacaaca

SEQ ID NO: 563175 - RNA, 19 nt, Homo sapiens
  misc_RNA (1)...(19): siRNA sense strand
cauccacuuugcccuggua

SEQ ID NO: 563176 - RNA, 19 nt, Homo sapiens
  misc_RNA (1)...(19): siRNA sense strand
gcugcucaauuccuucuuc

SEQ ID NO: 563177 - RNA, 19 nt, Homo sapiens
  misc_RNA (1)...(19): siRNA sense strand
gcagacaguagacagaaca

SEQ ID NO: 563178 - RNA, 19 nt, Homo sapiens
  misc_RNA (1)...(19): siRNA sense strand
ucaaagugcggcugccauu

SEQ ID NO: 563179 - RNA, 19 nt, Homo sapiens
  misc_RNA (1)...(19): siRNA sense strand
ggagaagcuagaaggcaaa

SEQ ID NO: 563180 - RNA, 19 nt, Homo sapiens
  misc_RNA (1)...(19): siRNA sense strand
cccagaguguggaaagaaa

SEQ ID NO: 563181 - RNA, 19 nt, Homo sapiens
  misc_RNA (1)...(19): siRNA sense strand
uugaaggacucgcgcauca

SEQ ID NO: 563182 - RNA, 19 nt, Homo sapiens
  misc_RNA (1)...(19): siRNA sense strand
uaaaggaagaggacagauc

SEQ ID NO: 563183 - RNA, 19 nt, Homo sapiens
  misc_RNA (1)...(19): siRNA sense strand
gcagacggcacgacacaag

SEQ ID NO: 563184 - RNA, 19 nt, Homo sapiens
  misc_RNA (1)...(19): siRNA sense strand
uguccaagcucaagauggu

SEQ ID NO: 563185 - RNA, 19 nt, Homo sapiens
  misc_RNA (1)...(19): siRNA sense strand
gaggagaaagcagccauug

SEQ ID NO: 563186 - RNA, 19 nt, Homo sapiens
  misc_RNA (1)...(19): siRNA sense strand
gugucuguguccuuguuua

SEQ ID NO: 563187 - RNA, 19 nt, Homo sapiens
  misc_RNA (1)...(19): siRNA sense strand
gaaacggauccagcaauuc

SEQ ID NO: 563188 - RNA, 19 nt, Homo sapiens
  misc_RNA (1)...(19): siRNA sense strand
gcugugcucuacaccuuag

SEQ ID NO: 563189 - RNA, 19 nt, Homo sapiens
  misc_RNA (1)...(19): siRNA sense strand
ccagaagcaguuuaugaga

SEQ ID NO: 563190 - RNA, 19 nt, Homo sapiens
  misc_RNA (1)...(19): siRNA sense strand
uaaggaggcacugcugauu

SEQ ID NO: 563191 - RNA, 19 nt, Homo sapiens
  misc_RNA (1)...(19): siRNA sense strand
caacuuucucugcaacuau

SEQ ID NO: 563192 - RNA, 19 nt, Homo sapiens
  misc_RNA (1)...(19): siRNA sense strand
auccagaacugcacucuuc

SEQ ID NO: 563193 - RNA, 19 nt, Homo sapiens
  misc_RNA (1)...(19): siRNA sense strand
gcauggaggaagcaggaaa

SEQ ID NO: 563194 - RNA, 19 nt, Homo sapiens
  misc_RNA (1)...(19): siRNA sense strand
ggaggagaaagcagccauu

SEQ ID NO: 563195 - RNA, 19 nt, Homo sapiens
  misc_RNA (1)...(19): siRNA sense strand
aggcacugcugauugaaga

SEQ ID NO: 563196 - RNA, 19 nt, Homo sapiens
  misc_RNA (1)...(19): siRNA sense strand
gcagcgcaacggcuccuuu

SEQ ID NO: 563197 - RNA, 19 nt, Homo sapiens
  misc_RNA (1)...(19): siRNA sense strand
gacagagauuggagagaag

SEQ ID NO: 563198 - RNA, 19 nt, Homo sapiens
  misc_RNA (1)...(19): siRNA sense strand
aggcauggauccagaacug

SEQ ID NO: 563199 - RNA, 19 nt, Homo sapiens
  misc_RNA (1)...(19): siRNA sense strand
caaccaccuucaccuggau

SEQ ID NO: 563200 - RNA, 19 nt, Homo sapiens
  misc_RNA (1)...(19): siRNA sense strand
ugcagucgcugaucuuaca

SEQ ID NO: 563201 - RNA, 19 nt, Homo sapiens
  misc_RNA (1)...(19): siRNA sense strand
acaggaaggcucugguuau

SEQ ID NO: 563202 - RNA, 19 nt, Homo sapiens
  misc_RNA (1)...(19): siRNA sense strand
ugaacugcuucuccaagga

SEQ ID NO: 563203 - RNA, 19 nt, Homo sapiens
  misc_RNA (1)...(19): siRNA sense strand
cucagugccuggacaaaug

SEQ ID NO: 563204 - RNA, 19 nt, Homo sapiens
  misc_RNA (1)...(19): siRNA sense strand
uagcugaccuggagaugcu

SEQ ID NO: 563205 - RNA, 19 nt, Homo sapiens
  misc_RNA (1)...(19): siRNA sense strand
agaaggccuuugugucugu

SEQ ID NO: 563206 - RNA, 19 nt, Homo sapiens
  misc_RNA (1)...(19): siRNA sense strand
gguaaagcaaaugaaauug

SEQ ID NO: 563207 - RNA, 19 nt, Homo sapiens
  misc_RNA (1)...(19): siRNA sense strand
uaucaccaacucagucaaa

SEQ ID NO: 563208 - RNA, 19 nt, Homo sapiens
  misc_RNA (1)...(19): siRNA sense strand
caucagugccugcuucaag

SEQ ID NO: 563209 - RNA, 19 nt, Homo sapiens
  misc_RNA (1)...(19): siRNA sense strand
gucagccgcucaccuaucu

SEQ ID NO: 563210 - RNA, 19 nt, Homo sapiens
  misc_RNA (1)...(19): siRNA sense strand
cuaugucguugaugagguu

SEQ ID NO: 563211 - RNA, 19 nt, Homo sapiens
  misc_RNA (1)...(19): siRNA sense strand
uggccaagcacaucuuuga

SEQ ID NO: 563212 - RNA, 19 nt, Homo sapiens
  misc_RNA (1)...(19): siRNA sense strand
uacaggaaggcucugguua

SEQ ID NO: 563213 - RNA, 19 nt, Homo sapiens
  misc_RNA (1)...(19): siRNA sense strand
cuauuaccacuacaucuuu

SEQ ID NO: 563214 - RNA, 19 nt, Homo sapiens
  misc_RNA (1)...(19): siRNA sense strand
acaacacuauuaccacuac

SEQ ID NO: 563215 - RNA, 19 nt, Homo sapiens
  misc_RNA (1)...(19): siRNA sense strand
uggcugugcucuacaccuu

SEQ ID NO: 563216 - RNA, 19 nt, Homo sapiens
  misc_RNA (1)...(19): siRNA sense strand
gcucagugccuggacaaau

SEQ ID NO: 563217 - RNA, 19 nt, Homo sapiens
  misc_RNA (1)...(19): siRNA sense strand
cggcuccuuugccaacuuu

SEQ ID NO: 563218 - RNA, 19 nt, Homo sapiens
  misc_RNA (1)...(19): siRNA sense strand
gagcuguggccgugaagau

SEQ ID NO: 563219 - RNA, 19 nt, Homo sapiens
  misc_RNA (1)...(19): siRNA sense strand
uauuaccacuacaucuuug

SEQ ID NO: 563220 - RNA, 19 nt, Homo sapiens
  misc_RNA (1)...(19): siRNA sense strand
aggcacugcugcacaacaa

SEQ ID NO: 563221 - RNA, 19 nt, Homo sapiens
  misc_RNA (1)...(19): siRNA sense strand
caaagaaugucgacccuaa

SEQ ID NO: 563222 - RNA, 19 nt, Homo sapiens
  misc_RNA (1)...(19): siRNA sense strand
gaucaugggugucaucuac

SEQ ID NO: 563223 - RNA, 19 nt, Homo sapiens
  misc_RNA (1)...(19): siRNA sense strand
gaccugcucuccuucauca

SEQ ID NO: 563224 - RNA, 19 nt, Homo sapiens
  misc_RNA (1)...(19): siRNA sense strand
gaaauugucaaccucaugu

SEQ ID NO: 563225 - RNA, 19 nt, Homo sapiens
  misc_RNA (1)...(19): siRNA sense strand
ccacccugcugauacagua

SEQ ID NO: 563226 - RNA, 19 nt, Homo sapiens
  misc_RNA (1)...(19): siRNA sense strand
ggaaggcucugguuaucac

SEQ ID NO: 563227 - RNA, 19 nt, Homo sapiens
  misc_RNA (1)...(19): siRNA sense strand
ccagguaaagcaaaugaaa

SEQ ID NO: 563228 - RNA, 19 nt, Homo sapiens
  misc_RNA (1)...(19): siRNA sense strand
gaucuuacaacacuauuac

SEQ ID NO: 563229 - RNA, 19 nt, Homo sapiens
  misc_RNA (1)...(19): siRNA sense strand
ggaaauugucaaccucaug

SEQ ID NO: 563230 - RNA, 19 nt, Homo sapiens
  misc_RNA (1)...(19): siRNA sense strand
caggaaggcucugguuauc

SEQ ID NO: 563231 - RNA, 19 nt, Homo sapiens
  misc_RNA (1)...(19): siRNA sense strand
gaaggacucgcgcaucaag

SEQ ID NO: 563232 - RNA, 19 nt, Homo sapiens
  misc_RNA (1)...(19): siRNA sense strand
gaugcagucgcugaucuua

SEQ ID NO: 563233 - RNA, 19 nt, Homo sapiens
  misc_RNA (1)...(19): siRNA sense strand
ucgcugaucuuacaacacu

SEQ ID NO: 563234 - RNA, 19 nt, Homo sapiens
  misc_RNA (1)...(19): siRNA sense strand
cauccacuuugcccuggua

SEQ ID NO: 563235 - RNA, 19 nt, Homo sapiens
  misc_RNA (1)...(19): siRNA sense strand
uugaaggacucgcgcauca

SEQ ID NO: 563236 - RNA, 19 nt, Homo sapiens
  misc_RNA (1)...(19): siRNA sense strand
uaaaggaagaggacagauc

SEQ ID NO: 563237 - RNA, 19 nt, Homo sapiens
  misc_RNA (1)...(19): siRNA sense strand
uguccaagcucaagauggu

SEQ ID NO: 563238 - RNA, 19 nt, Homo sapiens
  misc_RNA (1)...(19): siRNA sense strand
gcagacggcacgacacaag

SEQ ID NO: 563239 - RNA, 19 nt, Homo sapiens
  misc_RNA (1)...(19): siRNA sense strand
gcauggaggaagcaggaaa

SEQ ID NO: 563240 - RNA, 19 nt, Homo sapiens
  misc_RNA (1)...(19): siRNA sense strand
ugcagucgcugaucuuaca

SEQ ID NO: 563241 - RNA, 19 nt, Homo sapiens
  misc_RNA (1)...(19): siRNA sense strand
acaggaaggcucugguuau

SEQ ID NO: 563242 - RNA, 19 nt, Homo sapiens
  misc_RNA (1)...(19): siRNA sense strand
gguaaagcaaaugaaauug

SEQ ID NO: 563243 - RNA, 19 nt, Homo sapiens
  misc_RNA (1)...(19): siRNA sense strand
uaucaccaacucagucaaa

SEQ ID NO: 563244 - RNA, 19 nt, Homo sapiens
  misc_RNA (1)...(19): siRNA sense strand
caucagugccugcuucaag

SEQ ID NO: 563245 - RNA, 19 nt, Homo sapiens
  misc_RNA (1)...(19): siRNA sense strand
uacaggaaggcucugguua

SEQ ID NO: 563246 - RNA, 19 nt, Homo sapiens
  misc_RNA (1)...(19): siRNA sense strand
cuauuaccacuacaucuuu

SEQ ID NO: 563247 - RNA, 19 nt, Homo sapiens
  misc_RNA (1)...(19): siRNA sense strand
acaacacuauuaccacuac

SEQ ID NO: 563248 - RNA, 19 nt, Homo sapiens
  misc_RNA (1)...(19): siRNA sense strand
gagcuguggccgugaagau

SEQ ID NO: 563249 - RNA, 19 nt, Homo sapiens
  misc_RNA (1)...(19): siRNA sense strand
uauuaccacuacaucuuug

SEQ ID NO: 563250 - RNA, 19 nt, Homo sapiens
  misc_RNA (1)...(19): siRNA sense strand
ccucuggucccuaaaggaa

SEQ ID NO: 563251 - RNA, 19 nt, Homo sapiens
  misc_RNA (1)...(19): siRNA sense strand
gggaaauugucaaccucau

SEQ ID NO: 563252 - RNA, 19 nt, Homo sapiens
  misc_RNA (1)...(19): siRNA sense strand
ggcuccagcuuccucauca

SEQ ID NO: 563253 - RNA, 19 nt, Homo sapiens
  misc_RNA (1)...(19): siRNA sense strand
caaggcagagggugagauc

SEQ ID NO: 563254 - RNA, 19 nt, Homo sapiens
  misc_RNA (1)...(19): siRNA sense strand
gcugaucuuacaacacuau

SEQ ID NO: 563255 - RNA, 19 nt, Homo sapiens
  misc_RNA (1)...(19): siRNA sense strand
ucuggucccuaaaggaaga

SEQ ID NO: 563256 - RNA, 19 nt, Homo sapiens
  misc_RNA (1)...(19): siRNA sense strand
ggaggaagcaggaaaagca

SEQ ID NO: 563257 - RNA, 19 nt, Homo sapiens
  misc_RNA (1)...(19): siRNA sense strand
cagguaaagcaaaugaaau

SEQ ID NO: 563258 - RNA, 19 nt, Homo sapiens
  misc_RNA (1)...(19): siRNA sense strand
uucauggucuugcugauuc

SEQ ID NO: 563259 - RNA, 19 nt, Homo sapiens
  misc_RNA (1)...(19): siRNA sense strand
caccuucuacauccacuuu

SEQ ID NO: 563260 - RNA, 19 nt, Homo sapiens
  misc_RNA (1)...(19): siRNA sense strand
cuacaggaaggcucugguu

SEQ ID NO: 563261 - RNA, 19 nt, Homo sapiens
  misc_RNA (1)...(19): siRNA sense strand
caacacuauuaccacuaca

SEQ ID NO: 563262 - RNA, 19 nt, Homo sapiens
  misc_RNA (1)...(19): siRNA sense strand
ucaaacgugcguccacugu

SEQ ID NO: 563263 - RNA, 19 nt, Homo sapiens
  misc_RNA (1)...(19): siRNA sense strand
gcuggccacccugcugaua

SEQ ID NO: 563264 - RNA, 19 nt, Homo sapiens
  misc_RNA (1)...(19): siRNA sense strand
ugaucagguuuaucuccaa

SEQ ID NO: 563265 - RNA, 19 nt, Homo sapiens
  misc_RNA (1)...(19): siRNA sense strand
ggaccugcucuccuucauc

SEQ ID NO: 563266 - RNA, 19 nt, Homo sapiens
  misc_RNA (1)...(19): siRNA sense strand
gaacugcacucuucaggaa

SEQ ID NO: 563267 - RNA, 19 nt, Homo sapiens
  misc_RNA (1)...(19): siRNA sense strand
caaagaaugucgacccuaa

SEQ ID NO: 563268 - RNA, 19 nt, Homo sapiens
  misc_RNA (1)...(19): siRNA sense strand
gcucuuugcugcacuauuu

SEQ ID NO: 563269 - RNA, 19 nt, Homo sapiens
  misc_RNA (1)...(19): siRNA sense strand
gcacgccgcucuucacugu

SEQ ID NO: 563270 - RNA, 19 nt, Homo sapiens
  misc_RNA (1)...(19): siRNA sense strand
gaucaugggugucaucuac

SEQ ID NO: 563271 - RNA, 19 nt, Homo sapiens
  misc_RNA (1)...(19): siRNA sense strand
gggcgucuaugcugcuuua

SEQ ID NO: 563272 - RNA, 19 nt, Homo sapiens
  misc_RNA (1)...(19): siRNA sense strand
ugaaacggauccagcaauu

SEQ ID NO: 563273 - RNA, 19 nt, Homo sapiens
  misc_RNA (1)...(19): siRNA sense strand
gcucugaacuggaugauac

SEQ ID NO: 563274 - RNA, 19 nt, Homo sapiens
  misc_RNA (1)...(19): siRNA sense strand
ucaaggugcugaagcugua

SEQ ID NO: 563275 - RNA, 19 nt, Homo sapiens
  misc_RNA (1)...(19): siRNA sense strand
agacagagauuggagagaa

SEQ ID NO: 563276 - RNA, 19 nt, Homo sapiens
  misc_RNA (1)...(19): siRNA sense strand
gcacaccggcuuaacacua

SEQ ID NO: 563277 - RNA, 19 nt, Homo sapiens
  misc_RNA (1)...(19): siRNA sense strand
gaccugcucuccuucauca

SEQ ID NO: 563278 - RNA, 19 nt, Homo sapiens
  misc_RNA (1)...(19): siRNA sense strand
cagacagacuucaucauug

SEQ ID NO: 563279 - RNA, 19 nt, Homo sapiens
  misc_RNA (1)...(19): siRNA sense strand
gagguggaguuccggaauu

SEQ ID NO: 563280 - RNA, 19 nt, Homo sapiens
  misc_RNA (1)...(19): siRNA sense strand
gaaauugucaaccucaugu

SEQ ID NO: 563281 - RNA, 19 nt, Homo sapiens
  misc_RNA (1)...(19): siRNA sense strand
ggugaaauccgcauugaug

SEQ ID NO: 563282 - RNA, 19 nt, Homo sapiens
  misc_RNA (1)...(19): siRNA sense strand
ccacaguccuucuuugaca

SEQ ID NO: 563283 - RNA, 19 nt, Homo sapiens
  misc_RNA (1)...(19): siRNA sense strand
ccagacagacuucaucauu

SEQ ID NO: 563284 - RNA, 19 nt, Homo sapiens
  misc_RNA (1)...(19): siRNA sense strand
ucuguguccuuguuuaaua

SEQ ID NO: 563285 - RNA, 19 nt, Homo sapiens
  misc_RNA (1)...(19): siRNA sense strand
agacagacuucaucauugu

SEQ ID NO: 563286 - RNA, 19 nt, Homo sapiens
  misc_RNA (1)...(19): siRNA sense strand
uuacagugaugccgauauu

SEQ ID NO: 563287 - RNA, 19 nt, Homo sapiens
  misc_RNA (1)...(19): siRNA sense strand
aguaguagcugaauuugau

SEQ ID NO: 563288 - RNA, 19 nt, Homo sapiens
  misc_RNA (1)...(19): siRNA sense strand
ccacccugcugauacagua

SEQ ID NO: 563289 - RNA, 19 nt, Homo sapiens
  misc_RNA (1)...(19): siRNA sense strand
gcucucagcugaccaucau

SEQ ID NO: 563290 - RNA, 19 nt, Homo sapiens
  misc_RNA (1)...(19): siRNA sense strand
gaaggcaaagugcacauga

SEQ ID NO: 563291 - RNA, 19 nt, Homo sapiens
  misc_RNA (1)...(19): siRNA sense strand
gaagcuagaaggcaaagug

SEQ ID NO: 563292 - RNA, 19 nt, Homo sapiens
  misc_RNA (1)...(19): siRNA sense strand
ggccaucugucuccuguau

SEQ ID NO: 563293 - RNA, 19 nt, Homo sapiens
  misc_RNA (1)...(19): siRNA sense strand
ggacaaaggaguaguagcu

SEQ ID NO: 563294 - RNA, 19 nt, Homo sapiens
  misc_RNA (1)...(19): siRNA sense strand
ccaucgaccuggagacuga

SEQ ID NO: 563295 - RNA, 19 nt, Homo sapiens
  misc_RNA (1)...(19): siRNA sense strand
ucaccuaugugguccagaa

SEQ ID NO: 563296 - RNA, 19 nt, Homo sapiens
  misc_RNA (1)...(19): siRNA sense strand
gcuggcaagucuuccauga

SEQ ID NO: 563297 - RNA, 19 nt, Homo sapiens
  misc_RNA (1)...(19): siRNA sense strand
ggaaggcucugguuaucac

SEQ ID NO: 563298 - RNA, 19 nt, Homo sapiens
  misc_RNA (1)...(19): siRNA sense strand
uggagagggucaaggagua

SEQ ID NO: 563299 - RNA, 19 nt, Homo sapiens
  misc_RNA (1)...(19): siRNA sense strand
uacgaaugaugucagauuu

SEQ ID NO: 563300 - RNA, 19 nt, Homo sapiens
  misc_RNA (1)...(19): siRNA sense strand
gaacugcguggugcucuuu

SEQ ID NO: 563301 - RNA, 19 nt, Homo sapiens
  misc_RNA (1)...(19): siRNA sense strand
guaccacgcuggccaucug

SEQ ID NO: 563302 - RNA, 19 nt, Homo sapiens
  misc_RNA (1)...(19): siRNA sense strand
cgucuaugcugcuuuagga

SEQ ID NO: 563303 - RNA, 19 nt, Homo sapiens
  misc_RNA (1)...(19): siRNA sense strand
guacguggacccaaacaau

SEQ ID NO: 563304 - RNA, 19 nt, Homo sapiens
  misc_RNA (1)...(19): siRNA sense strand
ugaagcggcuggaaucagu

SEQ ID NO: 563305 - RNA, 19 nt, Homo sapiens
  misc_RNA (1)...(19): siRNA sense strand
cgaaugaugucagauuugg

SEQ ID NO: 563306 - RNA, 19 nt, Homo sapiens
  misc_RNA (1)...(19): siRNA sense strand
ccagguaaagcaaaugaaa

SEQ ID NO: 563307 - RNA, 19 nt, Homo sapiens
  misc_RNA (1)...(19): siRNA sense strand
ugaacuggaugauacgaau

SEQ ID NO: 563308 - RNA, 19 nt, Homo sapiens
  misc_RNA (1)...(19): siRNA sense strand
guagacagaacaacacuuc

SEQ ID NO: 563309 - RNA, 19 nt, Homo sapiens
  misc_RNA (1)...(19): siRNA sense strand
ccaacuuucucugcaacua

SEQ ID NO: 563310 - RNA, 19 nt, Homo sapiens
  misc_RNA (1)...(19): siRNA sense strand
caaaggaguaguagcugaa

SEQ ID NO: 563311 - RNA, 19 nt, Homo sapiens
  misc_RNA (1)...(19): siRNA sense strand
cgagaaggccuuugugucu

SEQ ID NO: 563312 - RNA, 19 nt, Homo sapiens
  misc_RNA (1)...(19): siRNA sense strand
caggugacauuugcucuga

SEQ ID NO: 563313 - RNA, 19 nt, Homo sapiens
  misc_RNA (1)...(19): siRNA sense strand
caacugaagcggcuggaau

SEQ ID NO: 563314 - RNA, 19 nt, Homo sapiens
  misc_RNA (1)...(19): siRNA sense strand
ccaucugucuccuguaugu

SEQ ID NO: 563315 - RNA, 19 nt, Homo sapiens
  misc_RNA (1)...(19): siRNA sense strand
ucaguguguucugggauua

SEQ ID NO: 563316 - RNA, 19 nt, Homo sapiens
  misc_RNA (1)...(19): siRNA sense strand
acaaugauccagucaccua

SEQ ID NO: 563317 - RNA, 19 nt, Homo sapiens
  misc_RNA (1)...(19): siRNA sense strand
gaucuuacaacacuauuac

SEQ ID NO: 563318 - RNA, 19 nt, Homo sapiens
  misc_RNA (1)...(19): siRNA sense strand
uuaacacuaucauggacua

SEQ ID NO: 563319 - RNA, 19 nt, Homo sapiens
  misc_RNA (1)...(19): siRNA sense strand
ggaacugcguggugcucuu

SEQ ID NO: 563320 - RNA, 19 nt, Homo sapiens
  misc_RNA (1)...(19): siRNA sense strand
agaagcaguuuaugagaca

SEQ ID NO: 563321 - RNA, 19 nt, Homo sapiens
  misc_RNA (1)...(19): siRNA sense strand
ggaaauugucaaccucaug

SEQ ID NO: 563322 - RNA, 19 nt, Homo sapiens
  misc_RNA (1)...(19): siRNA sense strand
caggaaggcucugguuauc

SEQ ID NO: 563323 - RNA, 19 nt, Homo sapiens
  misc_RNA (1)...(19): siRNA sense strand
gcaucaaggugcugaagcu

SEQ ID NO: 563324 - RNA, 19 nt, Homo sapiens
  misc_RNA (1)...(19): siRNA sense strand
ucagucagccgcucaccua

SEQ ID NO: 563325 - RNA, 19 nt, Homo sapiens
  misc_RNA (1)...(19): siRNA sense strand
gcucuucacuguggucauc

SEQ ID NO: 563326 - RNA, 19 nt, Homo sapiens
  misc_RNA (1)...(19): siRNA sense strand
aagauacgcucgccacagu

SEQ ID NO: 563327 - RNA, 19 nt, Homo sapiens
  misc_RNA (1)...(19): siRNA sense strand
gcacugcugcacaacaaga

SEQ ID NO: 563328 - RNA, 19 nt, Homo sapiens
  misc_RNA (1)...(19): siRNA sense strand
aggaggcacugcugauuga

SEQ ID NO: 563329 - RNA, 19 nt, Homo sapiens
  misc_RNA (1)...(19): siRNA sense strand
guuggaaggugcagaggau

SEQ ID NO: 563330 - RNA, 19 nt, Homo sapiens
  misc_RNA (1)...(19): siRNA sense strand
gaagggcauuaaccugucu

SEQ ID NO: 563331 - RNA, 19 nt, Homo sapiens
  misc_RNA (1)...(19): siRNA sense strand
gaaggacucgcgcaucaag

SEQ ID NO: 563332 - RNA, 19 nt, Homo sapiens
  misc_RNA (1)...(19): siRNA sense strand
caaccucauugcagcuaga

SEQ ID NO: 563333 - RNA, 19 nt, Homo sapiens
  misc_RNA (1)...(19): siRNA sense strand
cacaccggcuuaacacuau

SEQ ID NO: 563334 - RNA, 19 nt, Homo sapiens
  misc_RNA (1)...(19): siRNA sense strand
ccacaucacggcaacugaa

SEQ ID NO: 563335 - RNA, 19 nt, Homo sapiens
  misc_RNA (1)...(19): siRNA sense strand
guccagaagcaguuuauga

SEQ ID NO: 563336 - RNA, 19 nt, Homo sapiens
  misc_RNA (1)...(19): siRNA sense strand
gaugcagucgcugaucuua

SEQ ID NO: 563337 - RNA, 19 nt, Homo sapiens
  misc_RNA (1)...(19): siRNA sense strand
cuaugcugcuuuaggaauu

SEQ ID NO: 563338 - RNA, 19 nt, Homo sapiens
  misc_RNA (1)...(19): siRNA sense strand
gaagggcuccguggccuau

SEQ ID NO: 563339 - RNA, 19 nt, Homo sapiens
  misc_RNA (1)...(19): siRNA sense strand
ucgcugaucuuacaacacu

SEQ ID NO: 563340 - RNA, 19 nt, Homo sapiens
  misc_RNA (1)...(19): siRNA sense strand
ugauacgaaugaugucaga

SEQ ID NO: 563341 - RNA, 19 nt, Homo sapiens
  misc_RNA (1)...(19): siRNA sense strand
gaacuggaugauacgaaug

SEQ ID NO: 563342 - RNA, 19 nt, Homo sapiens
  misc_RNA (1)...(19): siRNA sense strand
gacaguagacagaacaaca

SEQ ID NO: 563343 - RNA, 19 nt, Homo sapiens
  misc_RNA (1)...(19): siRNA sense strand
cauccacuuugcccuggua

SEQ ID NO: 563344 - RNA, 19 nt, Homo sapiens
  misc_RNA (1)...(19): siRNA sense strand
gcugcucaauuccuucuuc

SEQ ID NO: 563345 - RNA, 19 nt, Homo sapiens
  misc_RNA (1)...(19): siRNA sense strand
gcagacaguagacagaaca

SEQ ID NO: 563346 - RNA, 19 nt, Homo sapiens
  misc_RNA (1)...(19): siRNA sense strand
ucaaagugcggcugccauu

SEQ ID NO: 563347 - RNA, 19 nt, Homo sapiens
  misc_RNA (1)...(19): siRNA sense strand
ggagaagcuagaaggcaaa

SEQ ID NO: 563348 - RNA, 19 nt, Homo sapiens
  misc_RNA (1)...(19): siRNA sense strand
cccagaguguggaaagaaa

SEQ ID NO: 563349 - RNA, 19 nt, Homo sapiens
  misc_RNA (1)...(19): siRNA sense strand
uugaaggacucgcgcauca

SEQ ID NO: 563350 - RNA, 19 nt, Homo sapiens
  misc_RNA (1)...(19): siRNA sense strand
uaaaggaagaggacagauc

SEQ ID NO: 563351 - RNA, 19 nt, Homo sapiens
  misc_RNA (1)...(19): siRNA sense strand
gcagacggcacgacacaag

SEQ ID NO: 563352 - RNA, 19 nt, Homo sapiens
  misc_RNA (1)...(19): siRNA sense strand
uguccaagcucaagauggu

SEQ ID NO: 563353 - RNA, 19 nt, Homo sapiens
  misc_RNA (1)...(19): siRNA sense strand
gaggagaaagcagccauug

SEQ ID NO: 563354 - RNA, 19 nt, Homo sapiens
  misc_RNA (1)...(19): siRNA sense strand
gugucuguguccuuguuua

SEQ ID NO: 563355 - RNA, 19 nt, Homo sapiens
  misc_RNA (1)...(19): siRNA sense strand
gaaacggauccagcaauuc

SEQ ID NO: 563356 - RNA, 19 nt, Homo sapiens
  misc_RNA (1)...(19): siRNA sense strand
gaguaguagcugaauuuga

SEQ ID NO: 563357 - RNA, 19 nt, Homo sapiens
  misc_RNA (1)...(19): siRNA sense strand
agguggaguuccggaauua

SEQ ID NO: 563358 - RNA, 19 nt, Homo sapiens
  misc_RNA (1)...(19): siRNA sense strand
gcugugcucuacaccuuag

SEQ ID NO: 563359 - RNA, 19 nt, Homo sapiens
  misc_RNA (1)...(19): siRNA sense strand
ccagaagcaguuuaugaga

SEQ ID NO: 563360 - RNA, 19 nt, Homo sapiens
  misc_RNA (1)...(19): siRNA sense strand
uaaggaggcacugcugauu

SEQ ID NO: 563361 - RNA, 19 nt, Homo sapiens
  misc_RNA (1)...(19): siRNA sense strand
caacuuucucugcaacuau

SEQ ID NO: 563362 - RNA, 19 nt, Homo sapiens
  misc_RNA (1)...(19): siRNA sense strand
auccagaacugcacucuuc

SEQ ID NO: 563363 - RNA, 19 nt, Homo sapiens
  misc_RNA (1)...(19): siRNA sense strand
ggaggagaaagcagccauu

SEQ ID NO: 563364 - RNA, 19 nt, Homo sapiens
  misc_RNA (1)...(19): siRNA sense strand
aggaguaguagcugaauuu

SEQ ID NO: 563365 - RNA, 19 nt, Homo sapiens
  misc_RNA (1)...(19): siRNA sense strand
cauuugcucugaacuggau

SEQ ID NO: 563366 - RNA, 19 nt, Homo sapiens
  misc_RNA (1)...(19): siRNA sense strand
gaacugcacucuucaggaa

SEQ ID NO: 563367 - RNA, 19 nt, Homo sapiens
  misc_RNA (1)...(19): siRNA sense strand
caaagaaugucgacccuaa

SEQ ID NO: 563368 - RNA, 19 nt, Homo sapiens
  misc_RNA (1)...(19): siRNA sense strand
gcacgccgcucuucacugu

SEQ ID NO: 563369 - RNA, 19 nt, Homo sapiens
  misc_RNA (1)...(19): siRNA sense strand
gaucaugggugucaucuac

SEQ ID NO: 563370 - RNA, 19 nt, Homo sapiens
  misc_RNA (1)...(19): siRNA sense strand
gggcgucuaugcugcuuua

SEQ ID NO: 563371 - RNA, 19 nt, Homo sapiens
  misc_RNA (1)...(19): siRNA sense strand
ugaaacggauccagcaauu

SEQ ID NO: 563372 - RNA, 19 nt, Homo sapiens
  misc_RNA (1)...(19): siRNA sense strand
ucaaggugcugaagcugua

SEQ ID NO: 563373 - RNA, 19 nt, Homo sapiens
  misc_RNA (1)...(19): siRNA sense strand
agacagagauuggagagaa

SEQ ID NO: 563374 - RNA, 19 nt, Homo sapiens
  misc_RNA (1)...(19): siRNA sense strand
gaccugcucuccuucauca

SEQ ID NO: 563375 - RNA, 19 nt, Homo sapiens
  misc_RNA (1)...(19): siRNA sense strand
cagacagacuucaucauug

SEQ ID NO: 563376 - RNA, 19 nt, Homo sapiens
  misc_RNA (1)...(19): siRNA sense strand
gaaauugucaaccucaugu

SEQ ID NO: 563377 - RNA, 19 nt, Homo sapiens
  misc_RNA (1)...(19): siRNA sense strand
ccacaguccuucuuugaca

SEQ ID NO: 563378 - RNA, 19 nt, Homo sapiens
  misc_RNA (1)...(19): siRNA sense strand
ccagacagacuucaucauu

SEQ ID NO: 563379 - RNA, 19 nt, Homo sapiens
  misc_RNA (1)...(19): siRNA sense strand
ucuguguccuuguuuaaua

SEQ ID NO: 563380 - RNA, 19 nt, Homo sapiens
  misc_RNA (1)...(19): siRNA sense strand
agacagacuucaucauugu

SEQ ID NO: 563381 - RNA, 19 nt, Homo sapiens
  misc_RNA (1)...(19): siRNA sense strand
uuacagugaugccgauauu

SEQ ID NO: 563382 - RNA, 19 nt, Homo sapiens
  misc_RNA (1)...(19): siRNA sense strand
ccacccugcugauacagua

SEQ ID NO: 563383 - RNA, 19 nt, Homo sapiens
  misc_RNA (1)...(19): siRNA sense strand
gaaggcaaagugcacauga

SEQ ID NO: 563384 - RNA, 19 nt, Homo sapiens
  misc_RNA (1)...(19): siRNA sense strand
gaagcuagaaggcaaagug

SEQ ID NO: 563385 - RNA, 19 nt, Homo sapiens
  misc_RNA (1)...(19): siRNA sense strand
ggccaucugucuccuguau

SEQ ID NO: 563386 - RNA, 19 nt, Homo sapiens
  misc_RNA (1)...(19): siRNA sense strand
ucaccuaugugguccagaa

SEQ ID NO: 563387 - RNA, 19 nt, Homo sapiens
  misc_RNA (1)...(19): siRNA sense strand
ggaaggcucugguuaucac

SEQ ID NO: 563388 - RNA, 19 nt, Homo sapiens
  misc_RNA (1)...(19): siRNA sense strand
guaccacgcuggccaucug

SEQ ID NO: 563389 - RNA, 19 nt, Homo sapiens
  misc_RNA (1)...(19): siRNA sense strand
cgucuaugcugcuuuagga

SEQ ID NO: 563390 - RNA, 19 nt, Homo sapiens
  misc_RNA (1)...(19): siRNA sense strand
guacguggacccaaacaau

SEQ ID NO: 563391 - RNA, 19 nt, Homo sapiens
  misc_RNA (1)...(19): siRNA sense strand
ugaagcggcuggaaucagu

SEQ ID NO: 563392 - RNA, 19 nt, Homo sapiens
  misc_RNA (1)...(19): siRNA sense strand
ccagguaaagcaaaugaaa

SEQ ID NO: 563393 - RNA, 19 nt, Homo sapiens
  misc_RNA (1)...(19): siRNA sense strand
guagacagaacaacacuuc

SEQ ID NO: 563394 - RNA, 19 nt, Homo sapiens
  misc_RNA (1)...(19): siRNA sense strand
ccaacuuucucugcaacua

SEQ ID NO: 563395 - RNA, 19 nt, Homo sapiens
  misc_RNA (1)...(19): siRNA sense strand
cgagaaggccuuugugucu

SEQ ID NO: 563396 - RNA, 19 nt, Homo sapiens
  misc_RNA (1)...(19): siRNA sense strand
caacugaagcggcuggaau

SEQ ID NO: 563397 - RNA, 19 nt, Homo sapiens
  misc_RNA (1)...(19): siRNA sense strand
ccaucugucuccuguaugu

SEQ ID NO: 563398 - RNA, 19 nt, Homo sapiens
  misc_RNA (1)...(19): siRNA sense strand
ucaguguguucugggauua

SEQ ID NO: 563399 - RNA, 19 nt, Homo sapiens
  misc_RNA (1)...(19): siRNA sense strand
acaaugauccagucaccua

SEQ ID NO: 563400 - RNA, 19 nt, Homo sapiens
  misc_RNA (1)...(19): siRNA sense strand
gaucuuacaacacuauuac

SEQ ID NO: 563401 - RNA, 19 nt, Homo sapiens
  misc_RNA (1)...(19): siRNA sense strand
agaagcaguuuaugagaca

SEQ ID NO: 563402 - RNA, 19 nt, Homo sapiens
  misc_RNA (1)...(19): siRNA sense strand
ggaaauugucaaccucaug

SEQ ID NO: 563403 - RNA, 19 nt, Homo sapiens
  misc_RNA (1)...(19): siRNA sense strand
caggaaggcucugguuauc

SEQ ID NO: 563404 - RNA, 19 nt, Homo sapiens
  misc_RNA (1)...(19): siRNA sense strand
gcaucaaggugcugaagcu

SEQ ID NO: 563405 - RNA, 19 nt, Homo sapiens
  misc_RNA (1)...(19): siRNA sense strand
ucagucagccgcucaccua

SEQ ID NO: 563406 - RNA, 19 nt, Homo sapiens
  misc_RNA (1)...(19): siRNA sense strand
gcucuucacuguggucauc

SEQ ID NO: 563407 - RNA, 19 nt, Homo sapiens
  misc_RNA (1)...(19): siRNA sense strand
aagauacgcucgccacagu

SEQ ID NO: 563408 - RNA, 19 nt, Homo sapiens
  misc_RNA (1)...(19): siRNA sense strand
gcacugcugcacaacaaga

SEQ ID NO: 563409 - RNA, 19 nt, Homo sapiens
  misc_RNA (1)...(19): siRNA sense strand
aggaggcacugcugauuga

SEQ ID NO: 563410 - RNA, 19 nt, Homo sapiens
  misc_RNA (1)...(19): siRNA sense strand
guuggaaggugcagaggau

SEQ ID NO: 563411 - RNA, 19 nt, Homo sapiens
  misc_RNA (1)...(19): siRNA sense strand
gaagggcauuaaccugucu

SEQ ID NO: 563412 - RNA, 19 nt, Homo sapiens
  misc_RNA (1)...(19): siRNA sense strand
gaaggacucgcgcaucaag

SEQ ID NO: 563413 - RNA, 19 nt, Homo sapiens
  misc_RNA (1)...(19): siRNA sense strand
ccacaucacggcaacugaa

SEQ ID NO: 563414 - RNA, 19 nt, Homo sapiens
  misc_RNA (1)...(19): siRNA sense strand
guccagaagcaguuuauga

SEQ ID NO: 563415 - RNA, 19 nt, Homo sapiens
  misc_RNA (1)...(19): siRNA sense strand
gaugcagucgcugaucuua

SEQ ID NO: 563416 - RNA, 19 nt, Homo sapiens
  misc_RNA (1)...(19): siRNA sense strand
cuaugcugcuuuaggaauu

SEQ ID NO: 563417 - RNA, 19 nt, Homo sapiens
  misc_RNA (1)...(19): siRNA sense strand
gaagggcuccguggccuau

SEQ ID NO: 563418 - RNA, 19 nt, Homo sapiens
  misc_RNA (1)...(19): siRNA sense strand
ucgcugaucuuacaacacu

SEQ ID NO: 563419 - RNA, 19 nt, Homo sapiens
  misc_RNA (1)...(19): siRNA sense strand
gacaguagacagaacaaca

SEQ ID NO: 563420 - RNA, 19 nt, Homo sapiens
  misc_RNA (1)...(19): siRNA sense strand
cauccacuuugcccuggua

SEQ ID NO: 563421 - RNA, 19 nt, Homo sapiens
  misc_RNA (1)...(19): siRNA sense strand
gcugcucaauuccuucuuc

SEQ ID NO: 563422 - RNA, 19 nt, Homo sapiens
  misc_RNA (1)...(19): siRNA sense strand
gcagacaguagacagaaca

SEQ ID NO: 563423 - RNA, 19 nt, Homo sapiens
  misc_RNA (1)...(19): siRNA sense strand
ucaaagugcggcugccauu

SEQ ID NO: 563424 - RNA, 19 nt, Homo sapiens
  misc_RNA (1)...(19): siRNA sense strand
ggagaagcuagaaggcaaa

SEQ ID NO: 563425 - RNA, 19 nt, Homo sapiens
  misc_RNA (1)...(19): siRNA sense strand
cccagaguguggaaagaaa

SEQ ID NO: 563426 - RNA, 19 nt, Homo sapiens
  misc_RNA (1)...(19): siRNA sense strand
uugaaggacucgcgcauca

SEQ ID NO: 563427 - RNA, 19 nt, Homo sapiens
  misc_RNA (1)...(19): siRNA sense strand
uaaaggaagaggacagauc

SEQ ID NO: 563428 - RNA, 19 nt, Homo sapiens
  misc_RNA (1)...(19): siRNA sense strand
gcagacggcacgacacaag

SEQ ID NO: 563429 - RNA, 19 nt, Homo sapiens
  misc_RNA (1)...(19): siRNA sense strand
uguccaagcucaagauggu

SEQ ID NO: 563430 - RNA, 19 nt, Homo sapiens
  misc_RNA (1)...(19): siRNA sense strand
gaggagaaagcagccauug

SEQ ID NO: 563431 - RNA, 19 nt, Homo sapiens
  misc_RNA (1)...(19): siRNA sense strand
gugucuguguccuuguuua

SEQ ID NO: 563432 - RNA, 19 nt, Homo sapiens
  misc_RNA (1)...(19): siRNA sense strand
gaaacggauccagcaauuc

SEQ ID NO: 563433 - RNA, 19 nt, Homo sapiens
  misc_RNA (1)...(19): siRNA sense strand
gcugugcucuacaccuuag

SEQ ID NO: 563434 - RNA, 19 nt, Homo sapiens
  misc_RNA (1)...(19): siRNA sense strand
ccagaagcaguuuaugaga

SEQ ID NO: 563435 - RNA, 19 nt, Homo sapiens
  misc_RNA (1)...(19): siRNA sense strand
uaaggaggcacugcugauu

SEQ ID NO: 563436 - RNA, 19 nt, Homo sapiens
  misc_RNA (1)...(19): siRNA sense strand
caacuuucucugcaacuau

SEQ ID NO: 563437 - RNA, 19 nt, Homo sapiens
  misc_RNA (1)...(19): siRNA sense strand
auccagaacugcacucuuc

SEQ ID NO: 563438 - RNA, 19 nt, Homo sapiens
  misc_RNA (1)...(19): siRNA sense strand
gcauggaggaagcaggaaa

SEQ ID NO: 563439 - RNA, 19 nt, Homo sapiens
  misc_RNA (1)...(19): siRNA sense strand
ggaggagaaagcagccauu

SEQ ID NO: 563440 - RNA, 19 nt, Homo sapiens
  misc_RNA (1)...(19): siRNA sense strand
aggcacugcugauugaaga

SEQ ID NO: 563441 - RNA, 19 nt, Homo sapiens
  misc_RNA (1)...(19): siRNA sense strand
gcagcgcaacggcuccuuu

SEQ ID NO: 563442 - RNA, 19 nt, Homo sapiens
  misc_RNA (1)...(19): siRNA sense strand
gacagagauuggagagaag

SEQ ID NO: 563443 - RNA, 19 nt, Homo sapiens
  misc_RNA (1)...(19): siRNA sense strand
aggcauggauccagaacug

SEQ ID NO: 563444 - RNA, 19 nt, Homo sapiens
  misc_RNA (1)...(19): siRNA sense strand
caaccaccuucaccuggau

SEQ ID NO: 563445 - RNA, 19 nt, Homo sapiens
  misc_RNA (1)...(19): siRNA sense strand
ugcagucgcugaucuuaca

SEQ ID NO: 563446 - RNA, 19 nt, Homo sapiens
  misc_RNA (1)...(19): siRNA sense strand
acaggaaggcucugguuau

SEQ ID NO: 563447 - RNA, 19 nt, Homo sapiens
  misc_RNA (1)...(19): siRNA sense strand
ugaacugcuucuccaagga

SEQ ID NO: 563448 - RNA, 19 nt, Homo sapiens
  misc_RNA (1)...(19): siRNA sense strand
cucagugccuggacaaaug

SEQ ID NO: 563449 - RNA, 19 nt, Homo sapiens
  misc_RNA (1)...(19): siRNA sense strand
uagcugaccuggagaugcu

SEQ ID NO: 563450 - RNA, 19 nt, Homo sapiens
  misc_RNA (1)...(19): siRNA sense strand
agaaggccuuugugucugu

SEQ ID NO: 563451 - RNA, 19 nt, Homo sapiens
  misc_RNA (1)...(19): siRNA sense strand
gguaaagcaaaugaaauug

SEQ ID NO: 563452 - RNA, 19 nt, Homo sapiens
  misc_RNA (1)...(19): siRNA sense strand
uaucaccaacucagucaaa

SEQ ID NO: 563453 - RNA, 19 nt, Homo sapiens
  misc_RNA (1)...(19): siRNA sense strand
caucagugccugcuucaag

SEQ ID NO: 563454 - RNA, 19 nt, Homo sapiens
  misc_RNA (1)...(19): siRNA sense strand
gucagccgcucaccuaucu

SEQ ID NO: 563455 - RNA, 19 nt, Homo sapiens
  misc_RNA (1)...(19): siRNA sense strand
cuaugucguugaugagguu

SEQ ID NO: 563456 - RNA, 19 nt, Homo sapiens
  misc_RNA (1)...(19): siRNA sense strand
uggccaagcacaucuuuga

SEQ ID NO: 563457 - RNA, 19 nt, Homo sapiens
  misc_RNA (1)...(19): siRNA sense strand
uacaggaaggcucugguua

SEQ ID NO: 563458 - RNA, 19 nt, Homo sapiens
  misc_RNA (1)...(19): siRNA sense strand
cuauuaccacuacaucuuu

SEQ ID NO: 563459 - RNA, 19 nt, Homo sapiens
  misc_RNA (1)...(19): siRNA sense strand
acaacacuauuaccacuac

SEQ ID NO: 563460 - RNA, 19 nt, Homo sapiens
  misc_RNA (1)...(19): siRNA sense strand
uggcugugcucuacaccuu

SEQ ID NO: 563461 - RNA, 19 nt, Homo sapiens
  misc_RNA (1)...(19): siRNA sense strand
gcucagugccuggacaaau

SEQ ID NO: 563462 - RNA, 19 nt, Homo sapiens
  misc_RNA (1)...(19): siRNA sense strand
cggcuccuuugccaacuuu

SEQ ID NO: 563463 - RNA, 19 nt, Homo sapiens
  misc_RNA (1)...(19): siRNA sense strand
gagcuguggccgugaagau

SEQ ID NO: 563464 - RNA, 19 nt, Homo sapiens
  misc_RNA (1)...(19): siRNA sense strand
uauuaccacuacaucuuug

SEQ ID NO: 563465 - RNA, 19 nt, Homo sapiens
  misc_RNA (1)...(19): siRNA sense strand
aggcacugcugcacaacaa

SEQ ID NO: 563466 - RNA, 19 nt, Homo sapiens
  misc_RNA (1)...(19): siRNA sense strand
caaagaaugucgacccuaa

SEQ ID NO: 563467 - RNA, 19 nt, Homo sapiens
  misc_RNA (1)...(19): siRNA sense strand
gaucaugggugucaucuac

SEQ ID NO: 563468 - RNA, 19 nt, Homo sapiens
  misc_RNA (1)...(19): siRNA sense strand
gaccugcucuccuucauca

SEQ ID NO: 563469 - RNA, 19 nt, Homo sapiens
  misc_RNA (1)...(19): siRNA sense strand
gaaauugucaaccucaugu

SEQ ID NO: 563470 - RNA, 19 nt, Homo sapiens
  misc_RNA (1)...(19): siRNA sense strand
ccacccugcugauacagua

SEQ ID NO: 563471 - RNA, 19 nt, Homo sapiens
  misc_RNA (1)...(19): siRNA sense strand
ggaaggcucugguuaucac

SEQ ID NO: 563472 - RNA, 19 nt, Homo sapiens
  misc_RNA (1)...(19): siRNA sense strand
ccagguaaagcaaaugaaa

SEQ ID NO: 563473 - RNA, 19 nt, Homo sapiens
  misc_RNA (1)...(19): siRNA sense strand
gaucuuacaacacuauuac

SEQ ID NO: 563474 - RNA, 19 nt, Homo sapiens
  misc_RNA (1)...(19): siRNA sense strand
ggaaauugucaaccucaug

SEQ ID NO: 563475 - RNA, 19 nt, Homo sapiens
  misc_RNA (1)...(19): siRNA sense strand
caggaaggcucugguuauc

SEQ ID NO: 563476 - RNA, 19 nt, Homo sapiens
  misc_RNA (1)...(19): siRNA sense strand
gaaggacucgcgcaucaag

SEQ ID NO: 563477 - RNA, 19 nt, Homo sapiens
  misc_RNA (1)...(19): siRNA sense strand
gaugcagucgcugaucuua

SEQ ID NO: 563478 - RNA, 19 nt, Homo sapiens
  misc_RNA (1)...(19): siRNA sense strand
ucgcugaucuuacaacacu

SEQ ID NO: 563479 - RNA, 19 nt, Homo sapiens
  misc_RNA (1)...(19): siRNA sense strand
cauccacuuugcccuggua

SEQ ID NO: 563480 - RNA, 19 nt, Homo sapiens
  misc_RNA (1)...(19): siRNA sense strand
uugaaggacucgcgcauca

SEQ ID NO: 563481 - RNA, 19 nt, Homo sapiens
  misc_RNA (1)...(19): siRNA sense strand
uaaaggaagaggacagauc

SEQ ID NO: 563482 - RNA, 19 nt, Homo sapiens
  misc_RNA (1)...(19): siRNA sense strand
uguccaagcucaagauggu

SEQ ID NO: 563483 - RNA, 19 nt, Homo sapiens
  misc_RNA (1)...(19): siRNA sense strand
gcagacggcacgacacaag

SEQ ID NO: 563484 - RNA, 19 nt, Homo sapiens
  misc_RNA (1)...(19): siRNA sense strand
gcauggaggaagcaggaaa

SEQ ID NO: 563485 - RNA, 19 nt, Homo sapiens
  misc_RNA (1)...(19): siRNA sense strand
ugcagucgcugaucuuaca

SEQ ID NO: 563486 - RNA, 19 nt, Homo sapiens
  misc_RNA (1)...(19): siRNA sense strand
acaggaaggcucugguuau

SEQ ID NO: 563487 - RNA, 19 nt, Homo sapiens
  misc_RNA (1)...(19): siRNA sense strand
gguaaagcaaaugaaauug

SEQ ID NO: 563488 - RNA, 19 nt, Homo sapiens
  misc_RNA (1)...(19): siRNA sense strand
uaucaccaacucagucaaa

SEQ ID NO: 563489 - RNA, 19 nt, Homo sapiens
  misc_RNA (1)...(19): siRNA sense strand
caucagugccugcuucaag

SEQ ID NO: 563490 - RNA, 19 nt, Homo sapiens
  misc_RNA (1)...(19): siRNA sense strand
uacaggaaggcucugguua

SEQ ID NO: 563491 - RNA, 19 nt, Homo sapiens
  misc_RNA (1)...(19): siRNA sense strand
cuauuaccacuacaucuuu

SEQ ID NO: 563492 - RNA, 19 nt, Homo sapiens
  misc_RNA (1)...(19): siRNA sense strand
acaacacuauuaccacuac

SEQ ID NO: 563493 - RNA, 19 nt, Homo sapiens
  misc_RNA (1)...(19): siRNA sense strand
gagcuguggccgugaagau

SEQ ID NO: 563494 - RNA, 19 nt, Homo sapiens
  misc_RNA (1)...(19): siRNA sense strand
uauuaccacuacaucuuug

SEQ ID NO: 563495 - RNA, 19 nt, Homo sapiens
  misc_RNA (1)...(19): siRNA sense strand
ccucuggucccuaaaggaa

SEQ ID NO: 563496 - RNA, 19 nt, Homo sapiens
  misc_RNA (1)...(19): siRNA sense strand
gggaaauugucaaccucau

SEQ ID NO: 563497 - RNA, 19 nt, Homo sapiens
  misc_RNA (1)...(19): siRNA sense strand
ggcuccagcuuccucauca

SEQ ID NO: 563498 - RNA, 19 nt, Homo sapiens
  misc_RNA (1)...(19): siRNA sense strand
caaggcagagggugagauc

SEQ ID NO: 563499 - RNA, 19 nt, Homo sapiens
  misc_RNA (1)...(19): siRNA sense strand
gcugaucuuacaacacuau

SEQ ID NO: 563500 - RNA, 19 nt, Homo sapiens
  misc_RNA (1)...(19): siRNA sense strand
ucuggucccuaaaggaaga

SEQ ID NO: 563501 - RNA, 19 nt, Homo sapiens
  misc_RNA (1)...(19): siRNA sense strand
ggaggaagcaggaaaagca

SEQ ID NO: 563502 - RNA, 19 nt, Homo sapiens
  misc_RNA (1)...(19): siRNA sense strand
cagguaaagcaaaugaaau

SEQ ID NO: 563503 - RNA, 19 nt, Homo sapiens
  misc_RNA (1)...(19): siRNA sense strand
uucauggucuugcugauuc

SEQ ID NO: 563504 - RNA, 19 nt, Homo sapiens
  misc_RNA (1)...(19): siRNA sense strand
caccuucuacauccacuuu

SEQ ID NO: 563505 - RNA, 19 nt, Homo sapiens
  misc_RNA (1)...(19): siRNA sense strand
cuacaggaaggcucugguu

SEQ ID NO: 563506 - RNA, 19 nt, Homo sapiens
  misc_RNA (1)...(19): siRNA sense strand
caacacuauuaccacuaca

SEQ ID NO: 563507 - RNA, 19 nt, Homo sapiens
  misc_RNA (1)...(19): siRNA sense strand
ucaaacgugcguccacugu

SEQ ID NO: 563508 - RNA, 19 nt, Homo sapiens
  misc_RNA (1)...(19): siRNA sense strand
gcuggccacccugcugaua

SEQ ID NO: 563509 - RNA, 19 nt, Homo sapiens
  misc_RNA (1)...(19): siRNA sense strand
ugaucagguuuaucuccaa

SEQ ID NO: 563510 - RNA, 19 nt, Homo sapiens
  misc_RNA (1)...(19): siRNA sense strand
ggaccugcucuccuucauc

SEQ ID NO: 563511 - RNA, 19 nt, Homo sapiens
  misc_RNA (1)...(19): siRNA sense strand
gaagaaggccuaugagauu

SEQ ID NO: 563512 - RNA, 19 nt, Homo sapiens
  misc_RNA (1)...(19): siRNA sense strand
ccaaguaccuggccaagaa

SEQ ID NO: 563513 - RNA, 19 nt, Homo sapiens
  misc_RNA (1)...(19): siRNA sense strand
caacaaaucugagcaauac

SEQ ID NO: 563514 - RNA, 19 nt, Homo sapiens
  misc_RNA (1)...(19): siRNA sense strand
gcaaugggcuggaaaucau

SEQ ID NO: 563515 - RNA, 19 nt, Homo sapiens
  misc_RNA (1)...(19): siRNA sense strand
gcaaagcuguuaccaugga

SEQ ID NO: 563516 - RNA, 19 nt, Homo sapiens
  misc_RNA (1)...(19): siRNA sense strand
ccaagaaguucaacaaauc

SEQ ID NO: 563517 - RNA, 19 nt, Homo sapiens
  misc_RNA (1)...(19): siRNA sense strand
ggaaagugcuacacguuca

SEQ ID NO: 563518 - RNA, 19 nt, Homo sapiens
  misc_RNA (1)...(19): siRNA sense strand
caacaacagguaugagaua

SEQ ID NO: 563519 - RNA, 19 nt, Homo sapiens
  misc_RNA (1)...(19): siRNA sense strand
acacacagauggcagauga

SEQ ID NO: 563520 - RNA, 19 nt, Homo sapiens
  misc_RNA (1)...(19): siRNA sense strand
gccaagaaguucaacaaau

SEQ ID NO: 563521 - RNA, 19 nt, Homo sapiens
  misc_RNA (1)...(19): siRNA sense strand
gacauacgcugccaacauc

SEQ ID NO: 563522 - RNA, 19 nt, Homo sapiens
  misc_RNA (1)...(19): siRNA sense strand
gcacgacauucgagacaug

SEQ ID NO: 563523 - RNA, 19 nt, Homo sapiens
  misc_RNA (1)...(19): siRNA sense strand
ggacucggauuuggauuuc

SEQ ID NO: 563524 - RNA, 19 nt, Homo sapiens
  misc_RNA (1)...(19): siRNA sense strand
gcaaagccucagccaagua

SEQ ID NO: 563525 - RNA, 19 nt, Homo sapiens
  misc_RNA (1)...(19): siRNA sense strand
caaaucugagcaauacaua

SEQ ID NO: 563526 - RNA, 19 nt, Homo sapiens
  misc_RNA (1)...(19): siRNA sense strand
caacaugcgugaguucuac

SEQ ID NO: 563527 - RNA, 19 nt, Homo sapiens
  misc_RNA (1)...(19): siRNA sense strand
ucaacaaaucugagcaaua

SEQ ID NO: 563528 - RNA, 19 nt, Homo sapiens
  misc_RNA (1)...(19): siRNA sense strand
ccaagaaugaccuguauca

SEQ ID NO: 563529 - RNA, 19 nt, Homo sapiens
  misc_RNA (1)...(19): siRNA sense strand
caacuuccgcagcuucaaa

SEQ ID NO: 563530 - RNA, 19 nt, Homo sapiens
  misc_RNA (1)...(19): siRNA sense strand
guacaaggagugugcagau

SEQ ID NO: 563531 - RNA, 19 nt, Homo sapiens
  misc_RNA (1)...(19): siRNA sense strand
guacugcgugugugaaaug

SEQ ID NO: 563532 - RNA, 19 nt, Homo sapiens
  misc_RNA (1)...(19): siRNA sense strand
ccuacgaggucauuaagca

SEQ ID NO: 563533 - RNA, 19 nt, Homo sapiens
  misc_RNA (1)...(19): siRNA sense strand
ggagauacugcaggacaaa

SEQ ID NO: 563534 - RNA, 19 nt, Homo sapiens
  misc_RNA (1)...(19): siRNA sense strand
aagaaggccuaugagauug

SEQ ID NO: 563535 - RNA, 19 nt, Homo sapiens
  misc_RNA (1)...(19): siRNA sense strand
cagaagaaggccuaugaga

SEQ ID NO: 563536 - RNA, 19 nt, Homo sapiens
  misc_RNA (1)...(19): siRNA sense strand
gaacagaagaaggccuaug

SEQ ID NO: 563537 - RNA, 19 nt, Homo sapiens
  misc_RNA (1)...(19): siRNA sense strand
gaaagugcuacacguucaa

SEQ ID NO: 563538 - RNA, 19 nt, Homo sapiens
  misc_RNA (1)...(19): siRNA sense strand
ucaaagugcagauccauag

SEQ ID NO: 563539 - RNA, 19 nt, Homo sapiens
  misc_RNA (1)...(19): siRNA sense strand
ugacauacgcugccaacau

SEQ ID NO: 563540 - RNA, 19 nt, Homo sapiens
  misc_RNA (1)...(19): siRNA sense strand
ugcuggagcucuuugacua

SEQ ID NO: 563541 - RNA, 19 nt, Homo sapiens
  misc_RNA (1)...(19): siRNA sense strand
ucacggugcuggagcucuu

SEQ ID NO: 563542 - RNA, 19 nt, Homo sapiens
  misc_RNA (1)...(19): siRNA sense strand
cuucgaagcaggcaucaaa

SEQ ID NO: 563543 - RNA, 19 nt, Homo sapiens
  misc_RNA (1)...(19): siRNA sense strand
agaagaaggccuaugagau

SEQ ID NO: 563544 - RNA, 19 nt, Homo sapiens
  misc_RNA (1)...(19): siRNA sense strand
agccaagucuccaagaaug

SEQ ID NO: 563545 - RNA, 19 nt, Homo sapiens
  misc_RNA (1)...(19): siRNA sense strand
ggccaagaaguucaacaaa

SEQ ID NO: 563546 - RNA, 19 nt, Homo sapiens
  misc_RNA (1)...(19): siRNA sense strand
ugugcaaccucaacgaguu

SEQ ID NO: 563547 - RNA, 19 nt, Homo sapiens
  misc_RNA (1)...(19): siRNA sense strand
cgaagcaggcaucaaagug

SEQ ID NO: 563548 - RNA, 19 nt, Homo sapiens
  misc_RNA (1)...(19): siRNA sense strand
cucaacgaguuccgcuuua

SEQ ID NO: 563549 - RNA, 19 nt, Homo sapiens
  misc_RNA (1)...(19): siRNA sense strand
gaaggccuaugagauugca

SEQ ID NO: 563550 - RNA, 19 nt, Homo sapiens
  misc_RNA (1)...(19): siRNA sense strand
ccucaacgaguuccgcuuu

SEQ ID NO: 563551 - RNA, 19 nt, Homo sapiens
  misc_RNA (1)...(19): siRNA sense strand
gcaggacaaagccaacuuc

SEQ ID NO: 563552 - RNA, 19 nt, Homo sapiens
  misc_RNA (1)...(19): siRNA sense strand
cggagcgugugcaguacua

SEQ ID NO: 563553 - RNA, 19 nt, Homo sapiens
  misc_RNA (1)...(19): siRNA sense strand
cuccaagaaugaccuguau

SEQ ID NO: 563554 - RNA, 19 nt, Homo sapiens
  misc_RNA (1)...(19): siRNA sense strand
aacagaagaaggccuauga

SEQ ID NO: 563555 - RNA, 19 nt, Homo sapiens
  misc_RNA (1)...(19): siRNA sense strand
ggagaaggaccaggaguac

SEQ ID NO: 563556 - RNA, 19 nt, Homo sapiens
  misc_RNA (1)...(19): siRNA sense strand
gcaucaaagugcagaucca

SEQ ID NO: 563557 - RNA, 19 nt, Homo sapiens
  misc_RNA (1)...(19): siRNA sense strand
ucaacgaguuccgcuuuag

SEQ ID NO: 563558 - RNA, 19 nt, Homo sapiens
  misc_RNA (1)...(19): siRNA sense strand
gauaccagacacacagaug

SEQ ID NO: 563559 - RNA, 19 nt, Homo sapiens
  misc_RNA (1)...(19): siRNA sense strand
acacagauggcagaugaaa

SEQ ID NO: 563560 - RNA, 19 nt, Homo sapiens
  misc_RNA (1)...(19): siRNA sense strand
gaggcacguucgaggacuu

SEQ ID NO: 563561 - RNA, 19 nt, Homo sapiens
  misc_RNA (1)...(19): siRNA sense strand
caacuaugagaccauugaa

SEQ ID NO: 563562 - RNA, 19 nt, Homo sapiens
  misc_RNA (1)...(19): siRNA sense strand
uggcugugcugcugugugu

SEQ ID NO: 563563 - RNA, 19 nt, Homo sapiens
  misc_RNA (1)...(19): siRNA sense strand
ugugugaaaugccuugcaa

SEQ ID NO: 563564 - RNA, 19 nt, Homo sapiens
  misc_RNA (1)...(19): siRNA sense strand
uuagccaagucuccaagaa

SEQ ID NO: 563565 - RNA, 19 nt, Homo sapiens
  misc_RNA (1)...(19): siRNA sense strand
uggagaaggaccaggagua

SEQ ID NO: 563566 - RNA, 19 nt, Homo sapiens
  misc_RNA (1)...(19): siRNA sense strand
ggcaaugggcuggaaauca

SEQ ID NO: 563567 - RNA, 19 nt, Homo sapiens
  misc_RNA (1)...(19): siRNA sense strand
caagaaguucaacaaaucu

SEQ ID NO: 563568 - RNA, 19 nt, Homo sapiens
  misc_RNA (1)...(19): siRNA sense strand
gaguacugcgugugugaaa

SEQ ID NO: 563569 - RNA, 19 nt, Homo sapiens
  misc_RNA (1)...(19): siRNA sense strand
ggucuucacacgcuaugga

SEQ ID NO: 563570 - RNA, 19 nt, Homo sapiens
  misc_RNA (1)...(19): siRNA sense strand
ucaacaugcgugaguucua

SEQ ID NO: 563571 - RNA, 19 nt, Homo sapiens
  misc_RNA (1)...(19): siRNA sense strand
agaaggaccaggaguacug

SEQ ID NO: 563572 - RNA, 19 nt, Homo sapiens
  misc_RNA (1)...(19): siRNA sense strand
aagugcagauccauaguca

SEQ ID NO: 563573 - RNA, 19 nt, Homo sapiens
  misc_RNA (1)...(19): siRNA sense strand
acccaaacccuucaacaug

SEQ ID NO: 563574 - RNA, 19 nt, Homo sapiens
  misc_RNA (1)...(19): siRNA sense strand
uaugagaccauugaacaga

SEQ ID NO: 563575 - RNA, 19 nt, Homo sapiens
  misc_RNA (1)...(19): siRNA sense strand
cuccagagcaguacaagga

SEQ ID NO: 563576 - RNA, 19 nt, Homo sapiens
  misc_RNA (1)...(19): siRNA sense strand
gagauaccagacacacaga

SEQ ID NO: 563577 - RNA, 19 nt, Homo sapiens
  misc_RNA (1)...(19): siRNA sense strand
gagcugggcacgacauucg

SEQ ID NO: 563578 - RNA, 19 nt, Homo sapiens
  misc_RNA (1)...(19): siRNA sense strand
gccaagucuccaagaauga

SEQ ID NO: 563579 - RNA, 19 nt, Homo sapiens
  misc_RNA (1)...(19): siRNA sense strand
aaaagcagcuggagauacu

SEQ ID NO: 563580 - RNA, 19 nt, Homo sapiens
  misc_RNA (1)...(19): siRNA sense strand
guaccuggccaagaaguuc

SEQ ID NO: 563581 - RNA, 19 nt, Homo sapiens
  misc_RNA (1)...(19): siRNA sense strand
caaagccucagccaaguac

SEQ ID NO: 563582 - RNA, 19 nt, Homo sapiens
  misc_RNA (1)...(19): siRNA sense strand
acucggauuuggauuucuu

SEQ ID NO: 563583 - RNA, 19 nt, Homo sapiens
  misc_RNA (1)...(19): siRNA sense strand
cgagacguccuucgaagca

SEQ ID NO: 563584 - RNA, 19 nt, Homo sapiens
  misc_RNA (1)...(19): siRNA sense strand
uggagauacugcaggacaa

SEQ ID NO: 563585 - RNA, 19 nt, Homo sapiens
  misc_RNA (1)...(19): siRNA sense strand
acgagcggcugucucugaa

SEQ ID NO: 563586 - RNA, 19 nt, Homo sapiens
  misc_RNA (1)...(19): siRNA sense strand
ugagaccauugaacagaag

SEQ ID NO: 563587 - RNA, 19 nt, Homo sapiens
  misc_RNA (1)...(19): siRNA sense strand
acuaugagaccauugaaca

SEQ ID NO: 563588 - RNA, 19 nt, Homo sapiens
  misc_RNA (1)...(19): siRNA sense strand
cgcgcuaccugguggagaa

SEQ ID NO: 563589 - RNA, 19 nt, Homo sapiens
  misc_RNA (1)...(19): siRNA sense strand
ggaaaucaugcuggacauc

SEQ ID NO: 563590 - RNA, 19 nt, Homo sapiens
  misc_RNA (1)...(19): siRNA sense strand
guucaacaaaucugagcaa

SEQ ID NO: 563591 - RNA, 19 nt, Homo sapiens
  misc_RNA (1)...(19): siRNA sense strand
uggcccacaucuucuccua

SEQ ID NO: 563592 - RNA, 19 nt, Homo sapiens
  misc_RNA (1)...(19): siRNA sense strand
gacgaguaccugccugugu

SEQ ID NO: 563593 - RNA, 19 nt, Homo sapiens
  misc_RNA (1)...(19): siRNA sense strand
gacgggcaaugggcuggaa

SEQ ID NO: 563594 - RNA, 19 nt, Homo sapiens
  misc_RNA (1)...(19): siRNA sense strand
augagaccauugaacagaa

SEQ ID NO: 563595 - RNA, 19 nt, Homo sapiens
  misc_RNA (1)...(19): siRNA sense strand
acaaaucugagcaauacau

SEQ ID NO: 563596 - RNA, 19 nt, Homo sapiens
  misc_RNA (1)...(19): siRNA sense strand
uacgagcggcugucucuga

SEQ ID NO: 563597 - RNA, 19 nt, Homo sapiens
  misc_RNA (1)...(19): siRNA sense strand
ggaguacugcgugugugaa

SEQ ID NO: 563598 - RNA, 19 nt, Homo sapiens
  misc_RNA (1)...(19): siRNA sense strand
gggcacgacauucgagaca

SEQ ID NO: 563599 - RNA, 19 nt, Homo sapiens
  misc_RNA (1)...(19): siRNA sense strand
agaaguucaacaaaucuga

SEQ ID NO: 563600 - RNA, 19 nt, Homo sapiens
  misc_RNA (1)...(19): siRNA sense strand
ccaggaguacugcgugugu

SEQ ID NO: 563601 - RNA, 19 nt, Homo sapiens
  misc_RNA (1)...(19): siRNA sense strand
gaagaaggccuaugagauu

SEQ ID NO: 563602 - RNA, 19 nt, Homo sapiens
  misc_RNA (1)...(19): siRNA sense strand
ccaaguaccuggccaagaa

SEQ ID NO: 563603 - RNA, 19 nt, Homo sapiens
  misc_RNA (1)...(19): siRNA sense strand
caacaaaucugagcaauac

SEQ ID NO: 563604 - RNA, 19 nt, Homo sapiens
  misc_RNA (1)...(19): siRNA sense strand
gcaaugggcuggaaaucau

SEQ ID NO: 563605 - RNA, 19 nt, Homo sapiens
  misc_RNA (1)...(19): siRNA sense strand
gcaaagcuguuaccaugga

SEQ ID NO: 563606 - RNA, 19 nt, Homo sapiens
  misc_RNA (1)...(19): siRNA sense strand
ccaagaaguucaacaaauc

SEQ ID NO: 563607 - RNA, 19 nt, Homo sapiens
  misc_RNA (1)...(19): siRNA sense strand
ggaaagugcuacacguuca

SEQ ID NO: 563608 - RNA, 19 nt, Homo sapiens
  misc_RNA (1)...(19): siRNA sense strand
caacaacagguaugagaua

SEQ ID NO: 563609 - RNA, 19 nt, Homo sapiens
  misc_RNA (1)...(19): siRNA sense strand
acacacagauggcagauga

SEQ ID NO: 563610 - RNA, 19 nt, Homo sapiens
  misc_RNA (1)...(19): siRNA sense strand
gccaagaaguucaacaaau

SEQ ID NO: 563611 - RNA, 19 nt, Homo sapiens
  misc_RNA (1)...(19): siRNA sense strand
gacauacgcugccaacauc

SEQ ID NO: 563612 - RNA, 19 nt, Homo sapiens
  misc_RNA (1)...(19): siRNA sense strand
gcacgacauucgagacaug

SEQ ID NO: 563613 - RNA, 19 nt, Homo sapiens
  misc_RNA (1)...(19): siRNA sense strand
ggacucggauuuggauuuc

SEQ ID NO: 563614 - RNA, 19 nt, Homo sapiens
  misc_RNA (1)...(19): siRNA sense strand
gcaaagccucagccaagua

SEQ ID NO: 563615 - RNA, 19 nt, Homo sapiens
  misc_RNA (1)...(19): siRNA sense strand
caaaucugagcaauacaua

SEQ ID NO: 563616 - RNA, 19 nt, Homo sapiens
  misc_RNA (1)...(19): siRNA sense strand
caacaugcgugaguucuac

SEQ ID NO: 563617 - RNA, 19 nt, Homo sapiens
  misc_RNA (1)...(19): siRNA sense strand
ucaacaaaucugagcaaua

SEQ ID NO: 563618 - RNA, 19 nt, Homo sapiens
  misc_RNA (1)...(19): siRNA sense strand
ccaagaaugaccuguauca

SEQ ID NO: 563619 - RNA, 19 nt, Homo sapiens
  misc_RNA (1)...(19): siRNA sense strand
caacuuccgcagcuucaaa

SEQ ID NO: 563620 - RNA, 19 nt, Homo sapiens
  misc_RNA (1)...(19): siRNA sense strand
guacaaggagugugcagau

SEQ ID NO: 563621 - RNA, 19 nt, Homo sapiens
  misc_RNA (1)...(19): siRNA sense strand
guacugcgugugugaaaug

SEQ ID NO: 563622 - RNA, 19 nt, Homo sapiens
  misc_RNA (1)...(19): siRNA sense strand
ccuacgaggucauuaagca

SEQ ID NO: 563623 - RNA, 19 nt, Homo sapiens
  misc_RNA (1)...(19): siRNA sense strand
ggagauacugcaggacaaa

SEQ ID NO: 563624 - RNA, 19 nt, Homo sapiens
  misc_RNA (1)...(19): siRNA sense strand
aagaaggccuaugagauug

SEQ ID NO: 563625 - RNA, 19 nt, Homo sapiens
  misc_RNA (1)...(19): siRNA sense strand
cagaagaaggccuaugaga

SEQ ID NO: 563626 - RNA, 19 nt, Homo sapiens
  misc_RNA (1)...(19): siRNA sense strand
gaacagaagaaggccuaug

SEQ ID NO: 563627 - RNA, 19 nt, Homo sapiens
  misc_RNA (1)...(19): siRNA sense strand
gaaagugcuacacguucaa

SEQ ID NO: 563628 - RNA, 19 nt, Homo sapiens
  misc_RNA (1)...(19): siRNA sense strand
ucaaagugcagauccauag

SEQ ID NO: 563629 - RNA, 19 nt, Homo sapiens
  misc_RNA (1)...(19): siRNA sense strand
ugacauacgcugccaacau

SEQ ID NO: 563630 - RNA, 19 nt, Homo sapiens
  misc_RNA (1)...(19): siRNA sense strand
ugcuggagcucuuugacua

SEQ ID NO: 563631 - RNA, 19 nt, Homo sapiens
  misc_RNA (1)...(19): siRNA sense strand
ucacggugcuggagcucuu

SEQ ID NO: 563632 - RNA, 19 nt, Homo sapiens
  misc_RNA (1)...(19): siRNA sense strand
cuucgaagcaggcaucaaa

SEQ ID NO: 563633 - RNA, 19 nt, Homo sapiens
  misc_RNA (1)...(19): siRNA sense strand
agaagaaggccuaugagau

SEQ ID NO: 563634 - RNA, 19 nt, Homo sapiens
  misc_RNA (1)...(19): siRNA sense strand
agccaagucuccaagaaug

SEQ ID NO: 563635 - RNA, 19 nt, Homo sapiens
  misc_RNA (1)...(19): siRNA sense strand
ggccaagaaguucaacaaa

SEQ ID NO: 563636 - RNA, 19 nt, Homo sapiens
  misc_RNA (1)...(19): siRNA sense strand
ugugcaaccucaacgaguu

SEQ ID NO: 563637 - RNA, 19 nt, Homo sapiens
  misc_RNA (1)...(19): siRNA sense strand
cgaagcaggcaucaaagug

SEQ ID NO: 563638 - RNA, 19 nt, Homo sapiens
  misc_RNA (1)...(19): siRNA sense strand
cucaacgaguuccgcuuua

SEQ ID NO: 563639 - RNA, 19 nt, Homo sapiens
  misc_RNA (1)...(19): siRNA sense strand
gaaggccuaugagauugca

SEQ ID NO: 563640 - RNA, 19 nt, Homo sapiens
  misc_RNA (1)...(19): siRNA sense strand
ccucaacgaguuccgcuuu

SEQ ID NO: 563641 - RNA, 19 nt, Homo sapiens
  misc_RNA (1)...(19): siRNA sense strand
gcaggacaaagccaacuuc

SEQ ID NO: 563642 - RNA, 19 nt, Homo sapiens
  misc_RNA (1)...(19): siRNA sense strand
cggagcgugugcaguacua

SEQ ID NO: 563643 - RNA, 19 nt, Homo sapiens
  misc_RNA (1)...(19): siRNA sense strand
cuccaagaaugaccuguau

SEQ ID NO: 563644 - RNA, 19 nt, Homo sapiens
  misc_RNA (1)...(19): siRNA sense strand
aacagaagaaggccuauga

SEQ ID NO: 563645 - RNA, 19 nt, Homo sapiens
  misc_RNA (1)...(19): siRNA sense strand
ggagaaggaccaggaguac

SEQ ID NO: 563646 - RNA, 19 nt, Homo sapiens
  misc_RNA (1)...(19): siRNA sense strand
gcaucaaagugcagaucca

SEQ ID NO: 563647 - RNA, 19 nt, Homo sapiens
  misc_RNA (1)...(19): siRNA sense strand
ucaacgaguuccgcuuuag

SEQ ID NO: 563648 - RNA, 19 nt, Homo sapiens
  misc_RNA (1)...(19): siRNA sense strand
gauaccagacacacagaug

SEQ ID NO: 563649 - RNA, 19 nt, Homo sapiens
  misc_RNA (1)...(19): siRNA sense strand
acacagauggcagaugaaa

SEQ ID NO: 563650 - RNA, 19 nt, Homo sapiens
  misc_RNA (1)...(19): siRNA sense strand
gaggcacguucgaggacuu

SEQ ID NO: 563651 - RNA, 19 nt, Homo sapiens
  misc_RNA (1)...(19): siRNA sense strand
caacuaugagaccauugaa

SEQ ID NO: 563652 - RNA, 19 nt, Homo sapiens
  misc_RNA (1)...(19): siRNA sense strand
uggcugugcugcugugugu

SEQ ID NO: 563653 - RNA, 19 nt, Homo sapiens
  misc_RNA (1)...(19): siRNA sense strand
ugugugaaaugccuugcaa

SEQ ID NO: 563654 - RNA, 19 nt, Homo sapiens
  misc_RNA (1)...(19): siRNA sense strand
uuagccaagucuccaagaa

SEQ ID NO: 563655 - RNA, 19 nt, Homo sapiens
  misc_RNA (1)...(19): siRNA sense strand
uggagaaggaccaggagua

SEQ ID NO: 563656 - RNA, 19 nt, Homo sapiens
  misc_RNA (1)...(19): siRNA sense strand
ggcaaugggcuggaaauca

SEQ ID NO: 563657 - RNA, 19 nt, Homo sapiens
  misc_RNA (1)...(19): siRNA sense strand
caagaaguucaacaaaucu

SEQ ID NO: 563658 - RNA, 19 nt, Homo sapiens
  misc_RNA (1)...(19): siRNA sense strand
gaguacugcgugugugaaa

SEQ ID NO: 563659 - RNA, 19 nt, Homo sapiens
  misc_RNA (1)...(19): siRNA sense strand
ggucuucacacgcuaugga

SEQ ID NO: 563660 - RNA, 19 nt, Homo sapiens
  misc_RNA (1)...(19): siRNA sense strand
ucaacaugcgugaguucua

SEQ ID NO: 563661 - RNA, 19 nt, Homo sapiens
  misc_RNA (1)...(19): siRNA sense strand
agaaggaccaggaguacug

SEQ ID NO: 563662 - RNA, 19 nt, Homo sapiens
  misc_RNA (1)...(19): siRNA sense strand
aagugcagauccauaguca

SEQ ID NO: 563663 - RNA, 19 nt, Homo sapiens
  misc_RNA (1)...(19): siRNA sense strand
acccaaacccuucaacaug

SEQ ID NO: 563664 - RNA, 19 nt, Homo sapiens
  misc_RNA (1)...(19): siRNA sense strand
uaugagaccauugaacaga

SEQ ID NO: 563665 - RNA, 19 nt, Homo sapiens
  misc_RNA (1)...(19): siRNA sense strand
cuccagagcaguacaagga

SEQ ID NO: 563666 - RNA, 19 nt, Homo sapiens
  misc_RNA (1)...(19): siRNA sense strand
gagauaccagacacacaga

SEQ ID NO: 563667 - RNA, 19 nt, Homo sapiens
  misc_RNA (1)...(19): siRNA sense strand
gagcugggcacgacauucg

SEQ ID NO: 563668 - RNA, 19 nt, Homo sapiens
  misc_RNA (1)...(19): siRNA sense strand
gccaagucuccaagaauga

SEQ ID NO: 563669 - RNA, 19 nt, Homo sapiens
  misc_RNA (1)...(19): siRNA sense strand
aaaagcagcuggagauacu

SEQ ID NO: 563670 - RNA, 19 nt, Homo sapiens
  misc_RNA (1)...(19): siRNA sense strand
guaccuggccaagaaguuc

SEQ ID NO: 563671 - RNA, 19 nt, Homo sapiens
  misc_RNA (1)...(19): siRNA sense strand
caaagccucagccaaguac

SEQ ID NO: 563672 - RNA, 19 nt, Homo sapiens
  misc_RNA (1)...(19): siRNA sense strand
acucggauuuggauuucuu

SEQ ID NO: 563673 - RNA, 19 nt, Homo sapiens
  misc_RNA (1)...(19): siRNA sense strand
cgagacguccuucgaagca

SEQ ID NO: 563674 - RNA, 19 nt, Homo sapiens
  misc_RNA (1)...(19): siRNA sense strand
uggagauacugcaggacaa

SEQ ID NO: 563675 - RNA, 19 nt, Homo sapiens
  misc_RNA (1)...(19): siRNA sense strand
acgagcggcugucucugaa

SEQ ID NO: 563676 - RNA, 19 nt, Homo sapiens
  misc_RNA (1)...(19): siRNA sense strand
ugagaccauugaacagaag

SEQ ID NO: 563677 - RNA, 19 nt, Homo sapiens
  misc_RNA (1)...(19): siRNA sense strand
acuaugagaccauugaaca

SEQ ID NO: 563678 - RNA, 19 nt, Homo sapiens
  misc_RNA (1)...(19): siRNA sense strand
cgcgcuaccugguggagaa

SEQ ID NO: 563679 - RNA, 19 nt, Homo sapiens
  misc_RNA (1)...(19): siRNA sense strand
ggaaaucaugcuggacauc

SEQ ID NO: 563680 - RNA, 19 nt, Homo sapiens
  misc_RNA (1)...(19): siRNA sense strand
guucaacaaaucugagcaa

SEQ ID NO: 563681 - RNA, 19 nt, Homo sapiens
  misc_RNA (1)...(19): siRNA sense strand
uggcccacaucuucuccua

SEQ ID NO: 563682 - RNA, 19 nt, Homo sapiens
  misc_RNA (1)...(19): siRNA sense strand
gacgaguaccugccugugu

SEQ ID NO: 563683 - RNA, 19 nt, Homo sapiens
  misc_RNA (1)...(19): siRNA sense strand
gacgggcaaugggcuggaa

SEQ ID NO: 563684 - RNA, 19 nt, Homo sapiens
  misc_RNA (1)...(19): siRNA sense strand
augagaccauugaacagaa

SEQ ID NO: 563685 - RNA, 19 nt, Homo sapiens
  misc_RNA (1)...(19): siRNA sense strand
acaaaucugagcaauacau

SEQ ID NO: 563686 - RNA, 19 nt, Homo sapiens
  misc_RNA (1)...(19): siRNA sense strand
uacgagcggcugucucuga

SEQ ID NO: 563687 - RNA, 19 nt, Homo sapiens
  misc_RNA (1)...(19): siRNA sense strand
ggaguacugcgugugugaa

SEQ ID NO: 563688 - RNA, 19 nt, Homo sapiens
  misc_RNA (1)...(19): siRNA sense strand
gggcacgacauucgagaca

SEQ ID NO: 563689 - RNA, 19 nt, Homo sapiens
  misc_RNA (1)...(19): siRNA sense strand
agaaguucaacaaaucuga

SEQ ID NO: 563690 - RNA, 19 nt, Homo sapiens
  misc_RNA (1)...(19): siRNA sense strand
ccaggaguacugcgugugu

SEQ ID NO: 563691 - RNA, 19 nt, Homo sapiens
  misc_RNA (1)...(19): siRNA sense strand
gaacgaggaugcaaauuau

SEQ ID NO: 563692 - RNA, 19 nt, Homo sapiens
  misc_RNA (1)...(19): siRNA sense strand
ggaacgaggaugcaaauua

SEQ ID NO: 563693 - RNA, 19 nt, Homo sapiens
  misc_RNA (1)...(19): siRNA sense strand
gaacagguuucucuugcua

SEQ ID NO: 563694 - RNA, 19 nt, Homo sapiens
  misc_RNA (1)...(19): siRNA sense strand
caaauuauaugcugucgaa

SEQ ID NO: 563695 - RNA, 19 nt, Homo sapiens
  misc_RNA (1)...(19): siRNA sense strand
gagaacaugugcccaucua

SEQ ID NO: 563696 - RNA, 19 nt, Homo sapiens
  misc_RNA (1)...(19): siRNA sense strand
gaacaucaagucagccuaa

SEQ ID NO: 563697 - RNA, 19 nt, Homo sapiens
  misc_RNA (1)...(19): siRNA sense strand
gaacaugugcccaucuaug

SEQ ID NO: 563698 - RNA, 19 nt, Homo sapiens
  misc_RNA (1)...(19): siRNA sense strand
caucaagucagccuaauga

SEQ ID NO: 563699 - RNA, 19 nt, Homo sapiens
  misc_RNA (1)...(19): siRNA sense strand
gcuaaugagucuuuaucug

SEQ ID NO: 563700 - RNA, 19 nt, Homo sapiens
  misc_RNA (1)...(19): siRNA sense strand
ccauagaucaucaaacuuc

SEQ ID NO: 563701 - RNA, 19 nt, Homo sapiens
  misc_RNA (1)...(19): siRNA sense strand
uauaugcugucgaaaucaa

SEQ ID NO: 563702 - RNA, 19 nt, Homo sapiens
  misc_RNA (1)...(19): siRNA sense strand
agguuucucuugcuaauga

SEQ ID NO: 563703 - RNA, 19 nt, Homo sapiens
  misc_RNA (1)...(19): siRNA sense strand
cuccauagaucaucaaacu

SEQ ID NO: 563704 - RNA, 19 nt, Homo sapiens
  misc_RNA (1)...(19): siRNA sense strand
gcccaucuaugaaccucuu

SEQ ID NO: 563705 - RNA, 19 nt, Homo sapiens
  misc_RNA (1)...(19): siRNA sense strand
cauagaucaucaaacuuca

SEQ ID NO: 563706 - RNA, 19 nt, Homo sapiens
  misc_RNA (1)...(19): siRNA sense strand
ucaagggugugagaacaug

SEQ ID NO: 563707 - RNA, 19 nt, Homo sapiens
  misc_RNA (1)...(19): siRNA sense strand
gaaccucuucucccaugga

SEQ ID NO: 563708 - RNA, 19 nt, Homo sapiens
  misc_RNA (1)...(19): siRNA sense strand
auuauaugcugucgaaauc

SEQ ID NO: 563709 - RNA, 19 nt, Homo sapiens
  misc_RNA (1)...(19): siRNA sense strand
aacaugugcccaucuauga

SEQ ID NO: 563710 - RNA, 19 nt, Homo sapiens
  misc_RNA (1)...(19): siRNA sense strand
acagguuucucuugcuaau

SEQ ID NO: 563711 - RNA, 19 nt, Homo sapiens
  misc_RNA (1)...(19): siRNA sense strand
ccagaggaacaucaaguca

SEQ ID NO: 563712 - RNA, 19 nt, Homo sapiens
  misc_RNA (1)...(19): siRNA sense strand
gcugucgaaaucaaucuuu

SEQ ID NO: 563713 - RNA, 19 nt, Homo sapiens
  misc_RNA (1)...(19): siRNA sense strand
acgaggaugcaaauuauau

SEQ ID NO: 563714 - RNA, 19 nt, Homo sapiens
  misc_RNA (1)...(19): siRNA sense strand
cgaggaugcaaauuauaug

SEQ ID NO: 563715 - RNA, 19 nt, Homo sapiens
  misc_RNA (1)...(19): siRNA sense strand
cauggaacgaggaugcaaa

SEQ ID NO: 563716 - RNA, 19 nt, Homo sapiens
  misc_RNA (1)...(19): siRNA sense strand
gaacgaggaugcaaauuau

SEQ ID NO: 563717 - RNA, 19 nt, Homo sapiens
  misc_RNA (1)...(19): siRNA sense strand
ggaacgaggaugcaaauua

SEQ ID NO: 563718 - RNA, 19 nt, Homo sapiens
  misc_RNA (1)...(19): siRNA sense strand
gaacagguuucucuugcua

SEQ ID NO: 563719 - RNA, 19 nt, Homo sapiens
  misc_RNA (1)...(19): siRNA sense strand
caaauuauaugcugucgaa

SEQ ID NO: 563720 - RNA, 19 nt, Homo sapiens
  misc_RNA (1)...(19): siRNA sense strand
gagaacaugugcccaucua

SEQ ID NO: 563721 - RNA, 19 nt, Homo sapiens
  misc_RNA (1)...(19): siRNA sense strand
gaacaucaagucagccuaa

SEQ ID NO: 563722 - RNA, 19 nt, Homo sapiens
  misc_RNA (1)...(19): siRNA sense strand
gaacaugugcccaucuaug

SEQ ID NO: 563723 - RNA, 19 nt, Homo sapiens
  misc_RNA (1)...(19): siRNA sense strand
caucaagucagccuaauga

SEQ ID NO: 563724 - RNA, 19 nt, Homo sapiens
  misc_RNA (1)...(19): siRNA sense strand
gcuaaugagucuuuaucug

SEQ ID NO: 563725 - RNA, 19 nt, Homo sapiens
  misc_RNA (1)...(19): siRNA sense strand
ccauagaucaucaaacuuc

SEQ ID NO: 563726 - RNA, 19 nt, Homo sapiens
  misc_RNA (1)...(19): siRNA sense strand
uauaugcugucgaaaucaa

SEQ ID NO: 563727 - RNA, 19 nt, Homo sapiens
  misc_RNA (1)...(19): siRNA sense strand
agguuucucuugcuaauga

SEQ ID NO: 563728 - RNA, 19 nt, Homo sapiens
  misc_RNA (1)...(19): siRNA sense strand
cuccauagaucaucaaacu

SEQ ID NO: 563729 - RNA, 19 nt, Homo sapiens
  misc_RNA (1)...(19): siRNA sense strand
gcccaucuaugaaccucuu

SEQ ID NO: 563730 - RNA, 19 nt, Homo sapiens
  misc_RNA (1)...(19): siRNA sense strand
cauagaucaucaaacuuca

SEQ ID NO: 563731 - RNA, 19 nt, Homo sapiens
  misc_RNA (1)...(19): siRNA sense strand
ucaagggugugagaacaug

SEQ ID NO: 563732 - RNA, 19 nt, Homo sapiens
  misc_RNA (1)...(19): siRNA sense strand
gaaccucuucucccaugga

SEQ ID NO: 563733 - RNA, 19 nt, Homo sapiens
  misc_RNA (1)...(19): siRNA sense strand
auuauaugcugucgaaauc

SEQ ID NO: 563734 - RNA, 19 nt, Homo sapiens
  misc_RNA (1)...(19): siRNA sense strand
aacaugugcccaucuauga

SEQ ID NO: 563735 - RNA, 19 nt, Homo sapiens
  misc_RNA (1)...(19): siRNA sense strand
acagguuucucuugcuaau

SEQ ID NO: 563736 - RNA, 19 nt, Homo sapiens
  misc_RNA (1)...(19): siRNA sense strand
ccagaggaacaucaaguca

SEQ ID NO: 563737 - RNA, 19 nt, Homo sapiens
  misc_RNA (1)...(19): siRNA sense strand
gcugucgaaaucaaucuuu

SEQ ID NO: 563738 - RNA, 19 nt, Homo sapiens
  misc_RNA (1)...(19): siRNA sense strand
acgaggaugcaaauuauau

SEQ ID NO: 563739 - RNA, 19 nt, Homo sapiens
  misc_RNA (1)...(19): siRNA sense strand
cgaggaugcaaauuauaug

SEQ ID NO: 563740 - RNA, 19 nt, Homo sapiens
  misc_RNA (1)...(19): siRNA sense strand
cauggaacgaggaugcaaa

SEQ ID NO: 563741 - RNA, 19 nt, Homo sapiens
  misc_RNA (1)...(19): siRNA sense strand
gaacgaggaugcaaauuau

SEQ ID NO: 563742 - RNA, 19 nt, Homo sapiens
  misc_RNA (1)...(19): siRNA sense strand
ggaacgaggaugcaaauua

SEQ ID NO: 563743 - RNA, 19 nt, Homo sapiens
  misc_RNA (1)...(19): siRNA sense strand
gaacagguuucucuugcua

SEQ ID NO: 563744 - RNA, 19 nt, Homo sapiens
  misc_RNA (1)...(19): siRNA sense strand
caaauuauaugcugucgaa

SEQ ID NO: 563745 - RNA, 19 nt, Homo sapiens
  misc_RNA (1)...(19): siRNA sense strand
gagaacaugugcccaucua

SEQ ID NO: 563746 - RNA, 19 nt, Homo sapiens
  misc_RNA (1)...(19): siRNA sense strand
gaacaucaagucagccuaa

SEQ ID NO: 563747 - RNA, 19 nt, Homo sapiens
  misc_RNA (1)...(19): siRNA sense strand
gaacaugugcccaucuaug

SEQ ID NO: 563748 - RNA, 19 nt, Homo sapiens
  misc_RNA (1)...(19): siRNA sense strand
caucaagucagccuaauga

SEQ ID NO: 563749 - RNA, 19 nt, Homo sapiens
  misc_RNA (1)...(19): siRNA sense strand
gcuaaugagucuuuaucug

SEQ ID NO: 563750 - RNA, 19 nt, Homo sapiens
  misc_RNA (1)...(19): siRNA sense strand
ccauagaucaucaaacuuc

SEQ ID NO: 563751 - RNA, 19 nt, Homo sapiens
  misc_RNA (1)...(19): siRNA sense strand
uauaugcugucgaaaucaa

SEQ ID NO: 563752 - RNA, 19 nt, Homo sapiens
  misc_RNA (1)...(19): siRNA sense strand
agguuucucuugcuaauga

SEQ ID NO: 563753 - RNA, 19 nt, Homo sapiens
  misc_RNA (1)...(19): siRNA sense strand
cuccauagaucaucaaacu

SEQ ID NO: 563754 - RNA, 19 nt, Homo sapiens
  misc_RNA (1)...(19): siRNA sense strand
gcccaucuaugaaccucuu

SEQ ID NO: 563755 - RNA, 19 nt, Homo sapiens
  misc_RNA (1)...(19): siRNA sense strand
cauagaucaucaaacuuca

SEQ ID NO: 563756 - RNA, 19 nt, Homo sapiens
  misc_RNA (1)...(19): siRNA sense strand
ucaagggugugagaacaug

SEQ ID NO: 563757 - RNA, 19 nt, Homo sapiens
  misc_RNA (1)...(19): siRNA sense strand
gaaccucuucucccaugga

SEQ ID NO: 563758 - RNA, 19 nt, Homo sapiens
  misc_RNA (1)...(19): siRNA sense strand
auuauaugcugucgaaauc

SEQ ID NO: 563759 - RNA, 19 nt, Homo sapiens
  misc_RNA (1)...(19): siRNA sense strand
aacaugugcccaucuauga

SEQ ID NO: 563760 - RNA, 19 nt, Homo sapiens
  misc_RNA (1)...(19): siRNA sense strand
acagguuucucuugcuaau

SEQ ID NO: 563761 - RNA, 19 nt, Homo sapiens
  misc_RNA (1)...(19): siRNA sense strand
ccagaggaacaucaaguca

SEQ ID NO: 563762 - RNA, 19 nt, Homo sapiens
  misc_RNA (1)...(19): siRNA sense strand
gcugucgaaaucaaucuuu

SEQ ID NO: 563763 - RNA, 19 nt, Homo sapiens
  misc_RNA (1)...(19): siRNA sense strand
acgaggaugcaaauuauau

SEQ ID NO: 563764 - RNA, 19 nt, Homo sapiens
  misc_RNA (1)...(19): siRNA sense strand
cgaggaugcaaauuauaug

SEQ ID NO: 563765 - RNA, 19 nt, Homo sapiens
  misc_RNA (1)...(19): siRNA sense strand
cauggaacgaggaugcaaa

SEQ ID NO: 563766 - RNA, 19 nt, Homo sapiens
  misc_RNA (1)...(19): siRNA sense strand
gaacgaggaugcaaauuau

SEQ ID NO: 563767 - RNA, 19 nt, Homo sapiens
  misc_RNA (1)...(19): siRNA sense strand
ggaacgaggaugcaaauua

SEQ ID NO: 563768 - RNA, 19 nt, Homo sapiens
  misc_RNA (1)...(19): siRNA sense strand
gaacagguuucucuugcua

SEQ ID NO: 563769 - RNA, 19 nt, Homo sapiens
  misc_RNA (1)...(19): siRNA sense strand
caaauuauaugcugucgaa

SEQ ID NO: 563770 - RNA, 19 nt, Homo sapiens
  misc_RNA (1)...(19): siRNA sense strand
gagaacaugugcccaucua

SEQ ID NO: 563771 - RNA, 19 nt, Homo sapiens
  misc_RNA (1)...(19): siRNA sense strand
gaacaucaagucagccuaa

SEQ ID NO: 563772 - RNA, 19 nt, Homo sapiens
  misc_RNA (1)...(19): siRNA sense strand
gaacaugugcccaucuaug

SEQ ID NO: 563773 - RNA, 19 nt, Homo sapiens
  misc_RNA (1)...(19): siRNA sense strand
caucaagucagccuaauga

SEQ ID NO: 563774 - RNA, 19 nt, Homo sapiens
  misc_RNA (1)...(19): siRNA sense strand
gcuaaugagucuuuaucug

SEQ ID NO: 563775 - RNA, 19 nt, Homo sapiens
  misc_RNA (1)...(19): siRNA sense strand
ccauagaucaucaaacuuc

SEQ ID NO: 563776 - RNA, 19 nt, Homo sapiens
  misc_RNA (1)...(19): siRNA sense strand
uauaugcugucgaaaucaa

SEQ ID NO: 563777 - RNA, 19 nt, Homo sapiens
  misc_RNA (1)...(19): siRNA sense strand
agguuucucuugcuaauga

SEQ ID NO: 563778 - RNA, 19 nt, Homo sapiens
  misc_RNA (1)...(19): siRNA sense strand
cuccauagaucaucaaacu

SEQ ID NO: 563779 - RNA, 19 nt, Homo sapiens
  misc_RNA (1)...(19): siRNA sense strand
gcccaucuaugaaccucuu

SEQ ID NO: 563780 - RNA, 19 nt, Homo sapiens
  misc_RNA (1)...(19): siRNA sense strand
cauagaucaucaaacuuca

SEQ ID NO: 563781 - RNA, 19 nt, Homo sapiens
  misc_RNA (1)...(19): siRNA sense strand
ucaagggugugagaacaug

SEQ ID NO: 563782 - RNA, 19 nt, Homo sapiens
  misc_RNA (1)...(19): siRNA sense strand
gaaccucuucucccaugga

SEQ ID NO: 563783 - RNA, 19 nt, Homo sapiens
  misc_RNA (1)...(19): siRNA sense strand
auuauaugcugucgaaauc

SEQ ID NO: 563784 - RNA, 19 nt, Homo sapiens
  misc_RNA (1)...(19): siRNA sense strand
aacaugugcccaucuauga

SEQ ID NO: 563785 - RNA, 19 nt, Homo sapiens
  misc_RNA (1)...(19): siRNA sense strand
acagguuucucuugcuaau

SEQ ID NO: 563786 - RNA, 19 nt, Homo sapiens
  misc_RNA (1)...(19): siRNA sense strand
ccagaggaacaucaaguca

SEQ ID NO: 563787 - RNA, 19 nt, Homo sapiens
  misc_RNA (1)...(19): siRNA sense strand
gcugucgaaaucaaucuuu

SEQ ID NO: 563788 - RNA, 19 nt, Homo sapiens
  misc_RNA (1)...(19): siRNA sense strand
acgaggaugcaaauuauau

SEQ ID NO: 563789 - RNA, 19 nt, Homo sapiens
  misc_RNA (1)...(19): siRNA sense strand
cgaggaugcaaauuauaug

SEQ ID NO: 563790 - RNA, 19 nt, Homo sapiens
  misc_RNA (1)...(19): siRNA sense strand
cauggaacgaggaugcaaa

SEQ ID NO: 563791 - RNA, 19 nt, Homo sapiens
  misc_RNA (1)...(19): siRNA sense strand
gaacgaggaugcaaauuau

SEQ ID NO: 563792 - RNA, 19 nt, Homo sapiens
  misc_RNA (1)...(19): siRNA sense strand
ggaacgaggaugcaaauua

SEQ ID NO: 563793 - RNA, 19 nt, Homo sapiens
  misc_RNA (1)...(19): siRNA sense strand
gaacagguuucucuugcua

SEQ ID NO: 563794 - RNA, 19 nt, Homo sapiens
  misc_RNA (1)...(19): siRNA sense strand
caaauuauaugcugucgaa

SEQ ID NO: 563795 - RNA, 19 nt, Homo sapiens
  misc_RNA (1)...(19): siRNA sense strand
gagaacaugugcccaucua

SEQ ID NO: 563796 - RNA, 19 nt, Homo sapiens
  misc_RNA (1)...(19): siRNA sense strand
gaacaucaagucagccuaa

SEQ ID NO: 563797 - RNA, 19 nt, Homo sapiens
  misc_RNA (1)...(19): siRNA sense strand
gaacaugugcccaucuaug

SEQ ID NO: 563798 - RNA, 19 nt, Homo sapiens
  misc_RNA (1)...(19): siRNA sense strand
caucaagucagccuaauga

SEQ ID NO: 563799 - RNA, 19 nt, Homo sapiens
  misc_RNA (1)...(19): siRNA sense strand
gcuaaugagucuuuaucug

SEQ ID NO: 563800 - RNA, 19 nt, Homo sapiens
  misc_RNA (1)...(19): siRNA sense strand
ccauagaucaucaaacuuc

SEQ ID NO: 563801 - RNA, 19 nt, Homo sapiens
  misc_RNA (1)...(19): siRNA sense strand
uauaugcugucgaaaucaa

SEQ ID NO: 563802 - RNA, 19 nt, Homo sapiens
  misc_RNA (1)...(19): siRNA sense strand
agguuucucuugcuaauga

SEQ ID NO: 563803 - RNA, 19 nt, Homo sapiens
  misc_RNA (1)...(19): siRNA sense strand
cuccauagaucaucaaacu

SEQ ID NO: 563804 - RNA, 19 nt, Homo sapiens
  misc_RNA (1)...(19): siRNA sense strand
gcccaucuaugaaccucuu

SEQ ID NO: 563805 - RNA, 19 nt, Homo sapiens
  misc_RNA (1)...(19): siRNA sense strand
cauagaucaucaaacuuca

SEQ ID NO: 563806 - RNA, 19 nt, Homo sapiens
  misc_RNA (1)...(19): siRNA sense strand
ucaagggugugagaacaug

SEQ ID NO: 563807 - RNA, 19 nt, Homo sapiens
  misc_RNA (1)...(19): siRNA sense strand
gaaccucuucucccaugga

SEQ ID NO: 563808 - RNA, 19 nt, Homo sapiens
  misc_RNA (1)...(19): siRNA sense strand
auuauaugcugucgaaauc

SEQ ID NO: 563809 - RNA, 19 nt, Homo sapiens
  misc_RNA (1)...(19): siRNA sense strand
aacaugugcccaucuauga

SEQ ID NO: 563810 - RNA, 19 nt, Homo sapiens
  misc_RNA (1)...(19): siRNA sense strand
acagguuucucuugcuaau

SEQ ID NO: 563811 - RNA, 19 nt, Homo sapiens
  misc_RNA (1)...(19): siRNA sense strand
ccagaggaacaucaaguca

SEQ ID NO: 563812 - RNA, 19 nt, Homo sapiens
  misc_RNA (1)...(19): siRNA sense strand
gcugucgaaaucaaucuuu

SEQ ID NO: 563813 - RNA, 19 nt, Homo sapiens
  misc_RNA (1)...(19): siRNA sense strand
acgaggaugcaaauuauau

SEQ ID NO: 563814 - RNA, 19 nt, Homo sapiens
  misc_RNA (1)...(19): siRNA sense strand
cgaggaugcaaauuauaug

SEQ ID NO: 563815 - RNA, 19 nt, Homo sapiens
  misc_RNA (1)...(19): siRNA sense strand
cauggaacgaggaugcaaa

SEQ ID NO: 563816 - RNA, 19 nt, Homo sapiens
  misc_RNA (1)...(19): siRNA sense strand
gaacgaggaugcaaauuau

SEQ ID NO: 563817 - RNA, 19 nt, Homo sapiens
  misc_RNA (1)...(19): siRNA sense strand
ggaacgaggaugcaaauua

SEQ ID NO: 563818 - RNA, 19 nt, Homo sapiens
  misc_RNA (1)...(19): siRNA sense strand
gaacagguuucucuugcua

SEQ ID NO: 563819 - RNA, 19 nt, Homo sapiens
  misc_RNA (1)...(19): siRNA sense strand
caaauuauaugcugucgaa

SEQ ID NO: 563820 - RNA, 19 nt, Homo sapiens
  misc_RNA (1)...(19): siRNA sense strand
gagaacaugugcccaucua

SEQ ID NO: 563821 - RNA, 19 nt, Homo sapiens
  misc_RNA (1)...(19): siRNA sense strand
gaacaucaagucagccuaa

SEQ ID NO: 563822 - RNA, 19 nt, Homo sapiens
  misc_RNA (1)...(19): siRNA sense strand
gaacaugugcccaucuaug

SEQ ID NO: 563823 - RNA, 19 nt, Homo sapiens
  misc_RNA (1)...(19): siRNA sense strand
caucaagucagccuaauga

SEQ ID NO: 563824 - RNA, 19 nt, Homo sapiens
  misc_RNA (1)...(19): siRNA sense strand
gcuaaugagucuuuaucug

SEQ ID NO: 563825 - RNA, 19 nt, Homo sapiens
  misc_RNA (1)...(19): siRNA sense strand
ccauagaucaucaaacuuc

SEQ ID NO: 563826 - RNA, 19 nt, Homo sapiens
  misc_RNA (1)...(19): siRNA sense strand
uauaugcugucgaaaucaa

SEQ ID NO: 563827 - RNA, 19 nt, Homo sapiens
  misc_RNA (1)...(19): siRNA sense strand
agguuucucuugcuaauga

SEQ ID NO: 563828 - RNA, 19 nt, Homo sapiens
  misc_RNA (1)...(19): siRNA sense strand
cuccauagaucaucaaacu

SEQ ID NO: 563829 - RNA, 19 nt, Homo sapiens
  misc_RNA (1)...(19): siRNA sense strand
gcccaucuaugaaccucuu

SEQ ID NO: 563830 - RNA, 19 nt, Homo sapiens
  misc_RNA (1)...(19): siRNA sense strand
cauagaucaucaaacuuca

SEQ ID NO: 563831 - RNA, 19 nt, Homo sapiens
  misc_RNA (1)...(19): siRNA sense strand
ucaagggugugagaacaug

SEQ ID NO: 563832 - RNA, 19 nt, Homo sapiens
  misc_RNA (1)...(19): siRNA sense strand
gaaccucuucucccaugga

SEQ ID NO: 563833 - RNA, 19 nt, Homo sapiens
  misc_RNA (1)...(19): siRNA sense strand
auuauaugcugucgaaauc

SEQ ID NO: 563834 - RNA, 19 nt, Homo sapiens
  misc_RNA (1)...(19): siRNA sense strand
aacaugugcccaucuauga

SEQ ID NO: 563835 - RNA, 19 nt, Homo sapiens
  misc_RNA (1)...(19): siRNA sense strand
acagguuucucuugcuaau

SEQ ID NO: 563836 - RNA, 19 nt, Homo sapiens
  misc_RNA (1)...(19): siRNA sense strand
ccagaggaacaucaaguca

SEQ ID NO: 563837 - RNA, 19 nt, Homo sapiens
  misc_RNA (1)...(19): siRNA sense strand
gcugucgaaaucaaucuuu

SEQ ID NO: 563838 - RNA, 19 nt, Homo sapiens
  misc_RNA (1)...(19): siRNA sense strand
acgaggaugcaaauuauau

SEQ ID NO: 563839 - RNA, 19 nt, Homo sapiens
  misc_RNA (1)...(19): siRNA sense strand
cgaggaugcaaauuauaug

SEQ ID NO: 563840 - RNA, 19 nt, Homo sapiens
  misc_RNA (1)...(19): siRNA sense strand
cauggaacgaggaugcaaa

SEQ ID NO: 563841 - RNA, 19 nt, Homo sapiens
  misc_RNA (1)...(19): siRNA sense strand
gaacgaggaugcaaauuau

SEQ ID NO: 563842 - RNA, 19 nt, Homo sapiens
  misc_RNA (1)...(19): siRNA sense strand
ggaacgaggaugcaaauua

SEQ ID NO: 563843 - RNA, 19 nt, Homo sapiens
  misc_RNA (1)...(19): siRNA sense strand
gaacagguuucucuugcua

SEQ ID NO: 563844 - RNA, 19 nt, Homo sapiens
  misc_RNA (1)...(19): siRNA sense strand
caaauuauaugcugucgaa

SEQ ID NO: 563845 - RNA, 19 nt, Homo sapiens
  misc_RNA (1)...(19): siRNA sense strand
gagaacaugugcccaucua

SEQ ID NO: 563846 - RNA, 19 nt, Homo sapiens
  misc_RNA (1)...(19): siRNA sense strand
gaacaucaagucagccuaa

SEQ ID NO: 563847 - RNA, 19 nt, Homo sapiens
  misc_RNA (1)...(19): siRNA sense strand
gaacaugugcccaucuaug

SEQ ID NO: 563848 - RNA, 19 nt, Homo sapiens
  misc_RNA (1)...(19): siRNA sense strand
caucaagucagccuaauga

SEQ ID NO: 563849 - RNA, 19 nt, Homo sapiens
  misc_RNA (1)...(19): siRNA sense strand
gcuaaugagucuuuaucug

SEQ ID NO: 563850 - RNA, 19 nt, Homo sapiens
  misc_RNA (1)...(19): siRNA sense strand
ccauagaucaucaaacuuc

SEQ ID NO: 563851 - RNA, 19 nt, Homo sapiens
  misc_RNA (1)...(19): siRNA sense strand
uauaugcugucgaaaucaa

SEQ ID NO: 563852 - RNA, 19 nt, Homo sapiens
  misc_RNA (1)...(19): siRNA sense strand
agguuucucuugcuaauga

SEQ ID NO: 563853 - RNA, 19 nt, Homo sapiens
  misc_RNA (1)...(19): siRNA sense strand
cuccauagaucaucaaacu

SEQ ID NO: 563854 - RNA, 19 nt, Homo sapiens
  misc_RNA (1)...(19): siRNA sense strand
gcccaucuaugaaccucuu

SEQ ID NO: 563855 - RNA, 19 nt, Homo sapiens
  misc_RNA (1)...(19): siRNA sense strand
cauagaucaucaaacuuca

SEQ ID NO: 563856 - RNA, 19 nt, Homo sapiens
  misc_RNA (1)...(19): siRNA sense strand
ucaagggugugagaacaug

SEQ ID NO: 563857 - RNA, 19 nt, Homo sapiens
  misc_RNA (1)...(19): siRNA sense strand
gaaccucuucucccaugga

SEQ ID NO: 563858 - RNA, 19 nt, Homo sapiens
  misc_RNA (1)...(19): siRNA sense strand
auuauaugcugucgaaauc

SEQ ID NO: 563859 - RNA, 19 nt, Homo sapiens
  misc_RNA (1)...(19): siRNA sense strand
aacaugugcccaucuauga

SEQ ID NO: 563860 - RNA, 19 nt, Homo sapiens
  misc_RNA (1)...(19): siRNA sense strand
acagguuucucuugcuaau

SEQ ID NO: 563861 - RNA, 19 nt, Homo sapiens
  misc_RNA (1)...(19): siRNA sense strand
ccagaggaacaucaaguca

SEQ ID NO: 563862 - RNA, 19 nt, Homo sapiens
  misc_RNA (1)...(19): siRNA sense strand
gcugucgaaaucaaucuuu

SEQ ID NO: 563863 - RNA, 19 nt, Homo sapiens
  misc_RNA (1)...(19): siRNA sense strand
acgaggaugcaaauuauau

SEQ ID NO: 563864 - RNA, 19 nt, Homo sapiens
  misc_RNA (1)...(19): siRNA sense strand
cgaggaugcaaauuauaug

SEQ ID NO: 563865 - RNA, 19 nt, Homo sapiens
  misc_RNA (1)...(19): siRNA sense strand
cauggaacgaggaugcaaa

SEQ ID NO: 563866 - RNA, 19 nt, Homo sapiens
  misc_RNA (1)...(19): siRNA sense strand
gaacgaggaugcaaauuau

SEQ ID NO: 563867 - RNA, 19 nt, Homo sapiens
  misc_RNA (1)...(19): siRNA sense strand
ggaacgaggaugcaaauua

SEQ ID NO: 563868 - RNA, 19 nt, Homo sapiens
  misc_RNA (1)...(19): siRNA sense strand
gaacagguuucucuugcua

SEQ ID NO: 563869 - RNA, 19 nt, Homo sapiens
  misc_RNA (1)...(19): siRNA sense strand
caaauuauaugcugucgaa

SEQ ID NO: 563870 - RNA, 19 nt, Homo sapiens
  misc_RNA (1)...(19): siRNA sense strand
gagaacaugugcccaucua

SEQ ID NO: 563871 - RNA, 19 nt, Homo sapiens
  misc_RNA (1)...(19): siRNA sense strand
gaacaucaagucagccuaa

SEQ ID NO: 563872 - RNA, 19 nt, Homo sapiens
  misc_RNA (1)...(19): siRNA sense strand
gaacaugugcccaucuaug

SEQ ID NO: 563873 - RNA, 19 nt, Homo sapiens
  misc_RNA (1)...(19): siRNA sense strand
caucaagucagccuaauga

SEQ ID NO: 563874 - RNA, 19 nt, Homo sapiens
  misc_RNA (1)...(19): siRNA sense strand
gcuaaugagucuuuaucug

SEQ ID NO: 563875 - RNA, 19 nt, Homo sapiens
  misc_RNA (1)...(19): siRNA sense strand
ccauagaucaucaaacuuc

SEQ ID NO: 563876 - RNA, 19 nt, Homo sapiens
  misc_RNA (1)...(19): siRNA sense strand
uauaugcugucgaaaucaa

SEQ ID NO: 563877 - RNA, 19 nt, Homo sapiens
  misc_RNA (1)...(19): siRNA sense strand
agguuucucuugcuaauga

SEQ ID NO: 563878 - RNA, 19 nt, Homo sapiens
  misc_RNA (1)...(19): siRNA sense strand
cuccauagaucaucaaacu

SEQ ID NO: 563879 - RNA, 19 nt, Homo sapiens
  misc_RNA (1)...(19): siRNA sense strand
gcccaucuaugaaccucuu

SEQ ID NO: 563880 - RNA, 19 nt, Homo sapiens
  misc_RNA (1)...(19): siRNA sense strand
cauagaucaucaaacuuca

SEQ ID NO: 563881 - RNA, 19 nt, Homo sapiens
  misc_RNA (1)...(19): siRNA sense strand
ucaagggugugagaacaug

SEQ ID NO: 563882 - RNA, 19 nt, Homo sapiens
  misc_RNA (1)...(19): siRNA sense strand
gaaccucuucucccaugga

SEQ ID NO: 563883 - RNA, 19 nt, Homo sapiens
  misc_RNA (1)...(19): siRNA sense strand
auuauaugcugucgaaauc

SEQ ID NO: 563884 - RNA, 19 nt, Homo sapiens
  misc_RNA (1)...(19): siRNA sense strand
aacaugugcccaucuauga

SEQ ID NO: 563885 - RNA, 19 nt, Homo sapiens
  misc_RNA (1)...(19): siRNA sense strand
acagguuucucuugcuaau

SEQ ID NO: 563886 - RNA, 19 nt, Homo sapiens
  misc_RNA (1)...(19): siRNA sense strand
ccagaggaacaucaaguca

SEQ ID NO: 563887 - RNA, 19 nt, Homo sapiens
  misc_RNA (1)...(19): siRNA sense strand
gcugucgaaaucaaucuuu

SEQ ID NO: 563888 - RNA, 19 nt, Homo sapiens
  misc_RNA (1)...(19): siRNA sense strand
acgaggaugcaaauuauau

SEQ ID NO: 563889 - RNA, 19 nt, Homo sapiens
  misc_RNA (1)...(19): siRNA sense strand
cgaggaugcaaauuauaug

SEQ ID NO: 563890 - RNA, 19 nt, Homo sapiens
  misc_RNA (1)...(19): siRNA sense strand
cauggaacgaggaugcaaa

SEQ ID NO: 563891 - RNA, 19 nt, Homo sapiens
  misc_RNA (1)...(19): siRNA sense strand
gaacgaggaugcaaauuau

SEQ ID NO: 563892 - RNA, 19 nt, Homo sapiens
  misc_RNA (1)...(19): siRNA sense strand
ggaacgaggaugcaaauua

SEQ ID NO: 563893 - RNA, 19 nt, Homo sapiens
  misc_RNA (1)...(19): siRNA sense strand
gaacagguuucucuugcua

SEQ ID NO: 563894 - RNA, 19 nt, Homo sapiens
  misc_RNA (1)...(19): siRNA sense strand
caaauuauaugcugucgaa

SEQ ID NO: 563895 - RNA, 19 nt, Homo sapiens
  misc_RNA (1)...(19): siRNA sense strand
gagaacaugugcccaucua

SEQ ID NO: 563896 - RNA, 19 nt, Homo sapiens
  misc_RNA (1)...(19): siRNA sense strand
gaacaucaagucagccuaa

SEQ ID NO: 563897 - RNA, 19 nt, Homo sapiens
  misc_RNA (1)...(19): siRNA sense strand
gaacaugugcccaucuaug

SEQ ID NO: 563898 - RNA, 19 nt, Homo sapiens
  misc_RNA (1)...(19): siRNA sense strand
caucaagucagccuaauga

SEQ ID NO: 563899 - RNA, 19 nt, Homo sapiens
  misc_RNA (1)...(19): siRNA sense strand
gcuaaugagucuuuaucug

SEQ ID NO: 563900 - RNA, 19 nt, Homo sapiens
  misc_RNA (1)...(19): siRNA sense strand
ccauagaucaucaaacuuc

SEQ ID NO: 563901 - RNA, 19 nt, Homo sapiens
  misc_RNA (1)...(19): siRNA sense strand
uauaugcugucgaaaucaa

SEQ ID NO: 563902 - RNA, 19 nt, Homo sapiens
  misc_RNA (1)...(19): siRNA sense strand
agguuucucuugcuaauga

SEQ ID NO: 563903 - RNA, 19 nt, Homo sapiens
  misc_RNA (1)...(19): siRNA sense strand
cuccauagaucaucaaacu

SEQ ID NO: 563904 - RNA, 19 nt, Homo sapiens
  misc_RNA (1)...(19): siRNA sense strand
gcccaucuaugaaccucuu

SEQ ID NO: 563905 - RNA, 19 nt, Homo sapiens
  misc_RNA (1)...(19): siRNA sense strand
cauagaucaucaaacuuca

SEQ ID NO: 563906 - RNA, 19 nt, Homo sapiens
  misc_RNA (1)...(19): siRNA sense strand
ucaagggugugagaacaug

SEQ ID NO: 563907 - RNA, 19 nt, Homo sapiens
  misc_RNA (1)...(19): siRNA sense strand
gaaccucuucucccaugga

SEQ ID NO: 563908 - RNA, 19 nt, Homo sapiens
  misc_RNA (1)...(19): siRNA sense strand
auuauaugcugucgaaauc

SEQ ID NO: 563909 - RNA, 19 nt, Homo sapiens
  misc_RNA (1)...(19): siRNA sense strand
aacaugugcccaucuauga

SEQ ID NO: 563910 - RNA, 19 nt, Homo sapiens
  misc_RNA (1)...(19): siRNA sense strand
acagguuucucuugcuaau

SEQ ID NO: 563911 - RNA, 19 nt, Homo sapiens
  misc_RNA (1)...(19): siRNA sense strand
ccagaggaacaucaaguca

SEQ ID NO: 563912 - RNA, 19 nt, Homo sapiens
  misc_RNA (1)...(19): siRNA sense strand
gcugucgaaaucaaucuuu

SEQ ID NO: 563913 - RNA, 19 nt, Homo sapiens
  misc_RNA (1)...(19): siRNA sense strand
acgaggaugcaaauuauau

SEQ ID NO: 563914 - RNA, 19 nt, Homo sapiens
  misc_RNA (1)...(19): siRNA sense strand
cgaggaugcaaauuauaug

SEQ ID NO: 563915 - RNA, 19 nt, Homo sapiens
  misc_RNA (1)...(19): siRNA sense strand
cauggaacgaggaugcaaa

SEQ ID NO: 563916 - RNA, 19 nt, Homo sapiens
  misc_RNA (1)...(19): siRNA sense strand
gaacgaggaugcaaauuau

SEQ ID NO: 563917 - RNA, 19 nt, Homo sapiens
  misc_RNA (1)...(19): siRNA sense strand
ggaacgaggaugcaaauua

SEQ ID NO: 563918 - RNA, 19 nt, Homo sapiens
  misc_RNA (1)...(19): siRNA sense strand
gaacagguuucucuugcua

SEQ ID NO: 563919 - RNA, 19 nt, Homo sapiens
  misc_RNA (1)...(19): siRNA sense strand
caaauuauaugcugucgaa

SEQ ID NO: 563920 - RNA, 19 nt, Homo sapiens
  misc_RNA (1)...(19): siRNA sense strand
gagaacaugugcccaucua

SEQ ID NO: 563921 - RNA, 19 nt, Homo sapiens
  misc_RNA (1)...(19): siRNA sense strand
gaacaucaagucagccuaa

SEQ ID NO: 563922 - RNA, 19 nt, Homo sapiens
  misc_RNA (1)...(19): siRNA sense strand
gaacaugugcccaucuaug

SEQ ID NO: 563923 - RNA, 19 nt, Homo sapiens
  misc_RNA (1)...(19): siRNA sense strand
caucaagucagccuaauga

SEQ ID NO: 563924 - RNA, 19 nt, Homo sapiens
  misc_RNA (1)...(19): siRNA sense strand
gcuaaugagucuuuaucug

SEQ ID NO: 563925 - RNA, 19 nt, Homo sapiens
  misc_RNA (1)...(19): siRNA sense strand
ccauagaucaucaaacuuc

SEQ ID NO: 563926 - RNA, 19 nt, Homo sapiens
  misc_RNA (1)...(19): siRNA sense strand
uauaugcugucgaaaucaa

SEQ ID NO: 563927 - RNA, 19 nt, Homo sapiens
  misc_RNA (1)...(19): siRNA sense strand
agguuucucuugcuaauga

SEQ ID NO: 563928 - RNA, 19 nt, Homo sapiens
  misc_RNA (1)...(19): siRNA sense strand
cuccauagaucaucaaacu

SEQ ID NO: 563929 - RNA, 19 nt, Homo sapiens
  misc_RNA (1)...(19): siRNA sense strand
gcccaucuaugaaccucuu

SEQ ID NO: 563930 - RNA, 19 nt, Homo sapiens
  misc_RNA (1)...(19): siRNA sense strand
cauagaucaucaaacuuca

SEQ ID NO: 563931 - RNA, 19 nt, Homo sapiens
  misc_RNA (1)...(19): siRNA sense strand
ucaagggugugagaacaug

SEQ ID NO: 563932 - RNA, 19 nt, Homo sapiens
  misc_RNA (1)...(19): siRNA sense strand
gaaccucuucucccaugga

SEQ ID NO: 563933 - RNA, 19 nt, Homo sapiens
  misc_RNA (1)...(19): siRNA sense strand
auuauaugcugucgaaauc

SEQ ID NO: 563934 - RNA, 19 nt, Homo sapiens
  misc_RNA (1)...(19): siRNA sense strand
aacaugugcccaucuauga

SEQ ID NO: 563935 - RNA, 19 nt, Homo sapiens
  misc_RNA (1)...(19): siRNA sense strand
acagguuucucuugcuaau

SEQ ID NO: 563936 - RNA, 19 nt, Homo sapiens
  misc_RNA (1)...(19): siRNA sense strand
ccagaggaacaucaaguca

SEQ ID NO: 563937 - RNA, 19 nt, Homo sapiens
  misc_RNA (1)...(19): siRNA sense strand
gcugucgaaaucaaucuuu

SEQ ID NO: 563938 - RNA, 19 nt, Homo sapiens
  misc_RNA (1)...(19): siRNA sense strand
acgaggaugcaaauuauau

SEQ ID NO: 563939 - RNA, 19 nt, Homo sapiens
  misc_RNA (1)...(19): siRNA sense strand
cgaggaugcaaauuauaug

SEQ ID NO: 563940 - RNA, 19 nt, Homo sapiens
  misc_RNA (1)...(19): siRNA sense strand
cauggaacgaggaugcaaa

SEQ ID NO: 563941 - RNA, 19 nt, Homo sapiens
  misc_RNA (1)...(19): siRNA sense strand
gaacgaggaugcaaauuau

SEQ ID NO: 563942 - RNA, 19 nt, Homo sapiens
  misc_RNA (1)...(19): siRNA sense strand
ggaacgaggaugcaaauua

SEQ ID NO: 563943 - RNA, 19 nt, Homo sapiens
  misc_RNA (1)...(19): siRNA sense strand
gaacagguuucucuugcua

SEQ ID NO: 563944 - RNA, 19 nt, Homo sapiens
  misc_RNA (1)...(19): siRNA sense strand
caaauuauaugcugucgaa

SEQ ID NO: 563945 - RNA, 19 nt, Homo sapiens
  misc_RNA (1)...(19): siRNA sense strand
gagaacaugugcccaucua

SEQ ID NO: 563946 - RNA, 19 nt, Homo sapiens
  misc_RNA (1)...(19): siRNA sense strand
gaacaucaagucagccuaa

SEQ ID NO: 563947 - RNA, 19 nt, Homo sapiens
  misc_RNA (1)...(19): siRNA sense strand
gaacaugugcccaucuaug

SEQ ID NO: 563948 - RNA, 19 nt, Homo sapiens
  misc_RNA (1)...(19): siRNA sense strand
caucaagucagccuaauga

SEQ ID NO: 563949 - RNA, 19 nt, Homo sapiens
  misc_RNA (1)...(19): siRNA sense strand
gcuaaugagucuuuaucug

SEQ ID NO: 563950 - RNA, 19 nt, Homo sapiens
  misc_RNA (1)...(19): siRNA sense strand
ccauagaucaucaaacuuc

SEQ ID NO: 563951 - RNA, 19 nt, Homo sapiens
  misc_RNA (1)...(19): siRNA sense strand
uauaugcugucgaaaucaa

SEQ ID NO: 563952 - RNA, 19 nt, Homo sapiens
  misc_RNA (1)...(19): siRNA sense strand
agguuucucuugcuaauga

SEQ ID NO: 563953 - RNA, 19 nt, Homo sapiens
  misc_RNA (1)...(19): siRNA sense strand
cuccauagaucaucaaacu

SEQ ID NO: 563954 - RNA, 19 nt, Homo sapiens
  misc_RNA (1)...(19): siRNA sense strand
gcccaucuaugaaccucuu

SEQ ID NO: 563955 - RNA, 19 nt, Homo sapiens
  misc_RNA (1)...(19): siRNA sense strand
cauagaucaucaaacuuca

SEQ ID NO: 563956 - RNA, 19 nt, Homo sapiens
  misc_RNA (1)...(19): siRNA sense strand
ucaagggugugagaacaug

SEQ ID NO: 563957 - RNA, 19 nt, Homo sapiens
  misc_RNA (1)...(19): siRNA sense strand
gaaccucuucucccaugga

SEQ ID NO: 563958 - RNA, 19 nt, Homo sapiens
  misc_RNA (1)...(19): siRNA sense strand
auuauaugcugucgaaauc

SEQ ID NO: 563959 - RNA, 19 nt, Homo sapiens
  misc_RNA (1)...(19): siRNA sense strand
aacaugugcccaucuauga

SEQ ID NO: 563960 - RNA, 19 nt, Homo sapiens
  misc_RNA (1)...(19): siRNA sense strand
acagguuucucuugcuaau

SEQ ID NO: 563961 - RNA, 19 nt, Homo sapiens
  misc_RNA (1)...(19): siRNA sense strand
ccagaggaacaucaaguca

SEQ ID NO: 563962 - RNA, 19 nt, Homo sapiens
  misc_RNA (1)...(19): siRNA sense strand
gcugucgaaaucaaucuuu

SEQ ID NO: 563963 - RNA, 19 nt, Homo sapiens
  misc_RNA (1)...(19): siRNA sense strand
acgaggaugcaaauuauau

SEQ ID NO: 563964 - RNA, 19 nt, Homo sapiens
  misc_RNA (1)...(19): siRNA sense strand
cgaggaugcaaauuauaug

SEQ ID NO: 563965 - RNA, 19 nt, Homo sapiens
  misc_RNA (1)...(19): siRNA sense strand
cauggaacgaggaugcaaa

SEQ ID NO: 563966 - RNA, 19 nt, Homo sapiens
  misc_RNA (1)...(19): siRNA sense strand
gaacgaggaugcaaauuau

SEQ ID NO: 563967 - RNA, 19 nt, Homo sapiens
  misc_RNA (1)...(19): siRNA sense strand
ggaacgaggaugcaaauua

SEQ ID NO: 563968 - RNA, 19 nt, Homo sapiens
  misc_RNA (1)...(19): siRNA sense strand
gaacagguuucucuugcua

SEQ ID NO: 563969 - RNA, 19 nt, Homo sapiens
  misc_RNA (1)...(19): siRNA sense strand
caaauuauaugcugucgaa

SEQ ID NO: 563970 - RNA, 19 nt, Homo sapiens
  misc_RNA (1)...(19): siRNA sense strand
gagaacaugugcccaucua

SEQ ID NO: 563971 - RNA, 19 nt, Homo sapiens
  misc_RNA (1)...(19): siRNA sense strand
gaacaucaagucagccuaa

SEQ ID NO: 563972 - RNA, 19 nt, Homo sapiens
  misc_RNA (1)...(19): siRNA sense strand
gaacaugugcccaucuaug

SEQ ID NO: 563973 - RNA, 19 nt, Homo sapiens
  misc_RNA (1)...(19): siRNA sense strand
caucaagucagccuaauga

SEQ ID NO: 563974 - RNA, 19 nt, Homo sapiens
  misc_RNA (1)...(19): siRNA sense strand
gcuaaugagucuuuaucug

SEQ ID NO: 563975 - RNA, 19 nt, Homo sapiens
  misc_RNA (1)...(19): siRNA sense strand
ccauagaucaucaaacuuc

SEQ ID NO: 563976 - RNA, 19 nt, Homo sapiens
  misc_RNA (1)...(19): siRNA sense strand
uauaugcugucgaaaucaa

SEQ ID NO: 563977 - RNA, 19 nt, Homo sapiens
  misc_RNA (1)...(19): siRNA sense strand
agguuucucuugcuaauga

SEQ ID NO: 563978 - RNA, 19 nt, Homo sapiens
  misc_RNA (1)...(19): siRNA sense strand
cuccauagaucaucaaacu

SEQ ID NO: 563979 - RNA, 19 nt, Homo sapiens
  misc_RNA (1)...(19): siRNA sense strand
gcccaucuaugaaccucuu

SEQ ID NO: 563980 - RNA, 19 nt, Homo sapiens
  misc_RNA (1)...(19): siRNA sense strand
cauagaucaucaaacuuca

SEQ ID NO: 563981 - RNA, 19 nt, Homo sapiens
  misc_RNA (1)...(19): siRNA sense strand
ucaagggugugagaacaug

SEQ ID NO: 563982 - RNA, 19 nt, Homo sapiens
  misc_RNA (1)...(19): siRNA sense strand
gaaccucuucucccaugga

SEQ ID NO: 563983 - RNA, 19 nt, Homo sapiens
  misc_RNA (1)...(19): siRNA sense strand
auuauaugcugucgaaauc

SEQ ID NO: 563984 - RNA, 19 nt, Homo sapiens
  misc_RNA (1)...(19): siRNA sense strand
aacaugugcccaucuauga

SEQ ID NO: 563985 - RNA, 19 nt, Homo sapiens
  misc_RNA (1)...(19): siRNA sense strand
acagguuucucuugcuaau

SEQ ID NO: 563986 - RNA, 19 nt, Homo sapiens
  misc_RNA (1)...(19): siRNA sense strand
ccagaggaacaucaaguca

SEQ ID NO: 563987 - RNA, 19 nt, Homo sapiens
  misc_RNA (1)...(19): siRNA sense strand
gcugucgaaaucaaucuuu

SEQ ID NO: 563988 - RNA, 19 nt, Homo sapiens
  misc_RNA (1)...(19): siRNA sense strand
acgaggaugcaaauuauau

SEQ ID NO: 563989 - RNA, 19 nt, Homo sapiens
  misc_RNA (1)...(19): siRNA sense strand
cgaggaugcaaauuauaug

SEQ ID NO: 563990 - RNA, 19 nt, Homo sapiens
  misc_RNA (1)...(19): siRNA sense strand
cauggaacgaggaugcaaa

SEQ ID NO: 563991 - RNA, 19 nt, Homo sapiens
  misc_RNA (1)...(19): siRNA sense strand
gaacgaggaugcaaauuau

SEQ ID NO: 563992 - RNA, 19 nt, Homo sapiens
  misc_RNA (1)...(19): siRNA sense strand
ggaacgaggaugcaaauua

SEQ ID NO: 563993 - RNA, 19 nt, Homo sapiens
  misc_RNA (1)...(19): siRNA sense strand
gaacagguuucucuugcua

SEQ ID NO: 563994 - RNA, 19 nt, Homo sapiens
  misc_RNA (1)...(19): siRNA sense strand
caaauuauaugcugucgaa

SEQ ID NO: 563995 - RNA, 19 nt, Homo sapiens
  misc_RNA (1)...(19): siRNA sense strand
gagaacaugugcccaucua

SEQ ID NO: 563996 - RNA, 19 nt, Homo sapiens
  misc_RNA (1)...(19): siRNA sense strand
gaacaucaagucagccuaa

SEQ ID NO: 563997 - RNA, 19 nt, Homo sapiens
  misc_RNA (1)...(19): siRNA sense strand
gaacaugugcccaucuaug

SEQ ID NO: 563998 - RNA, 19 nt, Homo sapiens
  misc_RNA (1)...(19): siRNA sense strand
caucaagucagccuaauga

SEQ ID NO: 563999 - RNA, 19 nt, Homo sapiens
  misc_RNA (1)...(19): siRNA sense strand
gcuaaugagucuuuaucug

SEQ ID NO: 564000 - RNA, 19 nt, Homo sapiens
  misc_RNA (1)...(19): siRNA sense strand
ccauagaucaucaaacuuc

SEQ ID NO: 564001 - RNA, 19 nt, Homo sapiens
  misc_RNA (1)...(19): siRNA sense strand
uauaugcugucgaaaucaa

SEQ ID NO: 564002 - RNA, 19 nt, Homo sapiens
  misc_RNA (1)...(19): siRNA sense strand
agguuucucuugcuaauga

SEQ ID NO: 564003 - RNA, 19 nt, Homo sapiens
  misc_RNA (1)...(19): siRNA sense strand
cuccauagaucaucaaacu

SEQ ID NO: 564004 - RNA, 19 nt, Homo sapiens
  misc_RNA (1)...(19): siRNA sense strand
gcccaucuaugaaccucuu

SEQ ID NO: 564005 - RNA, 19 nt, Homo sapiens
  misc_RNA (1)...(19): siRNA sense strand
cauagaucaucaaacuuca

SEQ ID NO: 564006 - RNA, 19 nt, Homo sapiens
  misc_RNA (1)...(19): siRNA sense strand
ucaagggugugagaacaug

SEQ ID NO: 564007 - RNA, 19 nt, Homo sapiens
  misc_RNA (1)...(19): siRNA sense strand
gaaccucuucucccaugga

SEQ ID NO: 564008 - RNA, 19 nt, Homo sapiens
  misc_RNA (1)...(19): siRNA sense strand
auuauaugcugucgaaauc

SEQ ID NO: 564009 - RNA, 19 nt, Homo sapiens
  misc_RNA (1)...(19): siRNA sense strand
aacaugugcccaucuauga

SEQ ID NO: 564010 - RNA, 19 nt, Homo sapiens
  misc_RNA (1)...(19): siRNA sense strand
acagguuucucuugcuaau

SEQ ID NO: 564011 - RNA, 19 nt, Homo sapiens
  misc_RNA (1)...(19): siRNA sense strand
ccagaggaacaucaaguca

SEQ ID NO: 564012 - RNA, 19 nt, Homo sapiens
  misc_RNA (1)...(19): siRNA sense strand
gcugucgaaaucaaucuuu

SEQ ID NO: 564013 - RNA, 19 nt, Homo sapiens
  misc_RNA (1)...(19): siRNA sense strand
acgaggaugcaaauuauau

SEQ ID NO: 564014 - RNA, 19 nt, Homo sapiens
  misc_RNA (1)...(19): siRNA sense strand
cgaggaugcaaauuauaug

SEQ ID NO: 564015 - RNA, 19 nt, Homo sapiens
  misc_RNA (1)...(19): siRNA sense strand
cauggaacgaggaugcaaa

SEQ ID NO: 564016 - RNA, 19 nt, Homo sapiens
  misc_RNA (1)...(19): siRNA sense strand
gaacgaggaugcaaauuau

SEQ ID NO: 564017 - RNA, 19 nt, Homo sapiens
  misc_RNA (1)...(19): siRNA sense strand
ggaacgaggaugcaaauua

SEQ ID NO: 564018 - RNA, 19 nt, Homo sapiens
  misc_RNA (1)...(19): siRNA sense strand
gaacagguuucucuugcua

SEQ ID NO: 564019 - RNA, 19 nt, Homo sapiens
  misc_RNA (1)...(19): siRNA sense strand
caaauuauaugcugucgaa

SEQ ID NO: 564020 - RNA, 19 nt, Homo sapiens
  misc_RNA (1)...(19): siRNA sense strand
gagaacaugugcccaucua

SEQ ID NO: 564021 - RNA, 19 nt, Homo sapiens
  misc_RNA (1)...(19): siRNA sense strand
gaacaucaagucagccuaa

SEQ ID NO: 564022 - RNA, 19 nt, Homo sapiens
  misc_RNA (1)...(19): siRNA sense strand
gaacaugugcccaucuaug

SEQ ID NO: 564023 - RNA, 19 nt, Homo sapiens
  misc_RNA (1)...(19): siRNA sense strand
caucaagucagccuaauga

SEQ ID NO: 564024 - RNA, 19 nt, Homo sapiens
  misc_RNA (1)...(19): siRNA sense strand
gcuaaugagucuuuaucug

SEQ ID NO: 564025 - RNA, 19 nt, Homo sapiens
  misc_RNA (1)...(19): siRNA sense strand
ccauagaucaucaaacuuc

SEQ ID NO: 564026 - RNA, 19 nt, Homo sapiens
  misc_RNA (1)...(19): siRNA sense strand
uauaugcugucgaaaucaa

SEQ ID NO: 564027 - RNA, 19 nt, Homo sapiens
  misc_RNA (1)...(19): siRNA sense strand
agguuucucuugcuaauga

SEQ ID NO: 564028 - RNA, 19 nt, Homo sapiens
  misc_RNA (1)...(19): siRNA sense strand
cuccauagaucaucaaacu

SEQ ID NO: 564029 - RNA, 19 nt, Homo sapiens
  misc_RNA (1)...(19): siRNA sense strand
gcccaucuaugaaccucuu

SEQ ID NO: 564030 - RNA, 19 nt, Homo sapiens
  misc_RNA (1)...(19): siRNA sense strand
cauagaucaucaaacuuca

SEQ ID NO: 564031 - RNA, 19 nt, Homo sapiens
  misc_RNA (1)...(19): siRNA sense strand
ucaagggugugagaacaug

SEQ ID NO: 564032 - RNA, 19 nt, Homo sapiens
  misc_RNA (1)...(19): siRNA sense strand
gaaccucuucucccaugga

SEQ ID NO: 564033 - RNA, 19 nt, Homo sapiens
  misc_RNA (1)...(19): siRNA sense strand
auuauaugcugucgaaauc

SEQ ID NO: 564034 - RNA, 19 nt, Homo sapiens
  misc_RNA (1)...(19): siRNA sense strand
aacaugugcccaucuauga

SEQ ID NO: 564035 - RNA, 19 nt, Homo sapiens
  misc_RNA (1)...(19): siRNA sense strand
acagguuucucuugcuaau

SEQ ID NO: 564036 - RNA, 19 nt, Homo sapiens
  misc_RNA (1)...(19): siRNA sense strand
ccagaggaacaucaaguca

SEQ ID NO: 564037 - RNA, 19 nt, Homo sapiens
  misc_RNA (1)...(19): siRNA sense strand
gcugucgaaaucaaucuuu

SEQ ID NO: 564038 - RNA, 19 nt, Homo sapiens
  misc_RNA (1)...(19): siRNA sense strand
acgaggaugcaaauuauau

SEQ ID NO: 564039 - RNA, 19 nt, Homo sapiens
  misc_RNA (1)...(19): siRNA sense strand
cgaggaugcaaauuauaug

SEQ ID NO: 564040 - RNA, 19 nt, Homo sapiens
  misc_RNA (1)...(19): siRNA sense strand
cauggaacgaggaugcaaa

SEQ ID NO: 564041 - RNA, 19 nt, Homo sapiens
  misc_RNA (1)...(19): siRNA sense strand
gaacgaggaugcaaauuau

SEQ ID NO: 564042 - RNA, 19 nt, Homo sapiens
  misc_RNA (1)...(19): siRNA sense strand
ggaacgaggaugcaaauua

SEQ ID NO: 564043 - RNA, 19 nt, Homo sapiens
  misc_RNA (1)...(19): siRNA sense strand
gaacagguuucucuugcua

SEQ ID NO: 564044 - RNA, 19 nt, Homo sapiens
  misc_RNA (1)...(19): siRNA sense strand
caaauuauaugcugucgaa

SEQ ID NO: 564045 - RNA, 19 nt, Homo sapiens
  misc_RNA (1)...(19): siRNA sense strand
gagaacaugugcccaucua

SEQ ID NO: 564046 - RNA, 19 nt, Homo sapiens
  misc_RNA (1)...(19): siRNA sense strand
gaacaucaagucagccuaa

SEQ ID NO: 564047 - RNA, 19 nt, Homo sapiens
  misc_RNA (1)...(19): siRNA sense strand
gaacaugugcccaucuaug

SEQ ID NO: 564048 - RNA, 19 nt, Homo sapiens
  misc_RNA (1)...(19): siRNA sense strand
caucaagucagccuaauga

SEQ ID NO: 564049 - RNA, 19 nt, Homo sapiens
  misc_RNA (1)...(19): siRNA sense strand
gcuaaugagucuuuaucug

SEQ ID NO: 564050 - RNA, 19 nt, Homo sapiens
  misc_RNA (1)...(19): siRNA sense strand
ccauagaucaucaaacuuc

SEQ ID NO: 564051 - RNA, 19 nt, Homo sapiens
  misc_RNA (1)...(19): siRNA sense strand
uauaugcugucgaaaucaa

SEQ ID NO: 564052 - RNA, 19 nt, Homo sapiens
  misc_RNA (1)...(19): siRNA sense strand
agguuucucuugcuaauga

SEQ ID NO: 564053 - RNA, 19 nt, Homo sapiens
  misc_RNA (1)...(19): siRNA sense strand
cuccauagaucaucaaacu

SEQ ID NO: 564054 - RNA, 19 nt, Homo sapiens
  misc_RNA (1)...(19): siRNA sense strand
gcccaucuaugaaccucuu

SEQ ID NO: 564055 - RNA, 19 nt, Homo sapiens
  misc_RNA (1)...(19): siRNA sense strand
cauagaucaucaaacuuca

SEQ ID NO: 564056 - RNA, 19 nt, Homo sapiens
  misc_RNA (1)...(19): siRNA sense strand
ucaagggugugagaacaug

SEQ ID NO: 564057 - RNA, 19 nt, Homo sapiens
  misc_RNA (1)...(19): siRNA sense strand
gaaccucuucucccaugga

SEQ ID NO: 564058 - RNA, 19 nt, Homo sapiens
  misc_RNA (1)...(19): siRNA sense strand
auuauaugcugucgaaauc

SEQ ID NO: 564059 - RNA, 19 nt, Homo sapiens
  misc_RNA (1)...(19): siRNA sense strand
aacaugugcccaucuauga

SEQ ID NO: 564060 - RNA, 19 nt, Homo sapiens
  misc_RNA (1)...(19): siRNA sense strand
acagguuucucuugcuaau

SEQ ID NO: 564061 - RNA, 19 nt, Homo sapiens
  misc_RNA (1)...(19): siRNA sense strand
ccagaggaacaucaaguca

SEQ ID NO: 564062 - RNA, 19 nt, Homo sapiens
  misc_RNA (1)...(19): siRNA sense strand
gcugucgaaaucaaucuuu

SEQ ID NO: 564063 - RNA, 19 nt, Homo sapiens
  misc_RNA (1)...(19): siRNA sense strand
acgaggaugcaaauuauau

SEQ ID NO: 564064 - RNA, 19 nt, Homo sapiens
  misc_RNA (1)...(19): siRNA sense strand
cgaggaugcaaauuauaug

SEQ ID NO: 564065 - RNA, 19 nt, Homo sapiens
  misc_RNA (1)...(19): siRNA sense strand
cauggaacgaggaugcaaa

SEQ ID NO: 564066 - RNA, 19 nt, Homo sapiens
  misc_RNA (1)...(19): siRNA sense strand
gaacgaggaugcaaauuau

SEQ ID NO: 564067 - RNA, 19 nt, Homo sapiens
  misc_RNA (1)...(19): siRNA sense strand
ggaacgaggaugcaaauua

SEQ ID NO: 564068 - RNA, 19 nt, Homo sapiens
  misc_RNA (1)...(19): siRNA sense strand
gaacagguuucucuugcua

SEQ ID NO: 564069 - RNA, 19 nt, Homo sapiens
  misc_RNA (1)...(19): siRNA sense strand
caaauuauaugcugucgaa

SEQ ID NO: 564070 - RNA, 19 nt, Homo sapiens
  misc_RNA (1)...(19): siRNA sense strand
gagaacaugugcccaucua

SEQ ID NO: 564071 - RNA, 19 nt, Homo sapiens
  misc_RNA (1)...(19): siRNA sense strand
gaacaucaagucagccuaa

SEQ ID NO: 564072 - RNA, 19 nt, Homo sapiens
  misc_RNA (1)...(19): siRNA sense strand
gaacaugugcccaucuaug

SEQ ID NO: 564073 - RNA, 19 nt, Homo sapiens
  misc_RNA (1)...(19): siRNA sense strand
caucaagucagccuaauga

SEQ ID NO: 564074 - RNA, 19 nt, Homo sapiens
  misc_RNA (1)...(19): siRNA sense strand
gcuaaugagucuuuaucug

SEQ ID NO: 564075 - RNA, 19 nt, Homo sapiens
  misc_RNA (1)...(19): siRNA sense strand
ccauagaucaucaaacuuc

SEQ ID NO: 564076 - RNA, 19 nt, Homo sapiens
  misc_RNA (1)...(19): siRNA sense strand
uauaugcugucgaaaucaa

SEQ ID NO: 564077 - RNA, 19 nt, Homo sapiens
  misc_RNA (1)...(19): siRNA sense strand
agguuucucuugcuaauga

SEQ ID NO: 564078 - RNA, 19 nt, Homo sapiens
  misc_RNA (1)...(19): siRNA sense strand
cuccauagaucaucaaacu

SEQ ID NO: 564079 - RNA, 19 nt, Homo sapiens
  misc_RNA (1)...(19): siRNA sense strand
gcccaucuaugaaccucuu

SEQ ID NO: 564080 - RNA, 19 nt, Homo sapiens
  misc_RNA (1)...(19): siRNA sense strand
cauagaucaucaaacuuca

SEQ ID NO: 564081 - RNA, 19 nt, Homo sapiens
  misc_RNA (1)...(19): siRNA sense strand
ucaagggugugagaacaug

SEQ ID NO: 564082 - RNA, 19 nt, Homo sapiens
  misc_RNA (1)...(19): siRNA sense strand
gaaccucuucucccaugga

SEQ ID NO: 564083 - RNA, 19 nt, Homo sapiens
  misc_RNA (1)...(19): siRNA sense strand
auuauaugcugucgaaauc

SEQ ID NO: 564084 - RNA, 19 nt, Homo sapiens
  misc_RNA (1)...(19): siRNA sense strand
aacaugugcccaucuauga

SEQ ID NO: 564085 - RNA, 19 nt, Homo sapiens
  misc_RNA (1)...(19): siRNA sense strand
acagguuucucuugcuaau

SEQ ID NO: 564086 - RNA, 19 nt, Homo sapiens
  misc_RNA (1)...(19): siRNA sense strand
ccagaggaacaucaaguca

SEQ ID NO: 564087 - RNA, 19 nt, Homo sapiens
  misc_RNA (1)...(19): siRNA sense strand
gcugucgaaaucaaucuuu

SEQ ID NO: 564088 - RNA, 19 nt, Homo sapiens
  misc_RNA (1)...(19): siRNA sense strand
acgaggaugcaaauuauau

SEQ ID NO: 564089 - RNA, 19 nt, Homo sapiens
  misc_RNA (1)...(19): siRNA sense strand
cgaggaugcaaauuauaug

SEQ ID NO: 564090 - RNA, 19 nt, Homo sapiens
  misc_RNA (1)...(19): siRNA sense strand
cauggaacgaggaugcaaa

SEQ ID NO: 564091 - RNA, 19 nt, Homo sapiens
  misc_RNA (1)...(19): siRNA sense strand
gaacgaggaugcaaauuau

SEQ ID NO: 564092 - RNA, 19 nt, Homo sapiens
  misc_RNA (1)...(19): siRNA sense strand
ggaacgaggaugcaaauua

SEQ ID NO: 564093 - RNA, 19 nt, Homo sapiens
  misc_RNA (1)...(19): siRNA sense strand
gaacagguuucucuugcua

SEQ ID NO: 564094 - RNA, 19 nt, Homo sapiens
  misc_RNA (1)...(19): siRNA sense strand
caaauuauaugcugucgaa

SEQ ID NO: 564095 - RNA, 19 nt, Homo sapiens
  misc_RNA (1)...(19): siRNA sense strand
gagaacaugugcccaucua

SEQ ID NO: 564096 - RNA, 19 nt, Homo sapiens
  misc_RNA (1)...(19): siRNA sense strand
gaacaucaagucagccuaa

SEQ ID NO: 564097 - RNA, 19 nt, Homo sapiens
  misc_RNA (1)...(19): siRNA sense strand
gaacaugugcccaucuaug

SEQ ID NO: 564098 - RNA, 19 nt, Homo sapiens
  misc_RNA (1)...(19): siRNA sense strand
caucaagucagccuaauga

SEQ ID NO: 564099 - RNA, 19 nt, Homo sapiens
  misc_RNA (1)...(19): siRNA sense strand
gcuaaugagucuuuaucug

SEQ ID NO: 564100 - RNA, 19 nt, Homo sapiens
  misc_RNA (1)...(19): siRNA sense strand
ccauagaucaucaaacuuc

SEQ ID NO: 564101 - RNA, 19 nt, Homo sapiens
  misc_RNA (1)...(19): siRNA sense strand
uauaugcugucgaaaucaa

SEQ ID NO: 564102 - RNA, 19 nt, Homo sapiens
  misc_RNA (1)...(19): siRNA sense strand
agguuucucuugcuaauga

SEQ ID NO: 564103 - RNA, 19 nt, Homo sapiens
  misc_RNA (1)...(19): siRNA sense strand
cuccauagaucaucaaacu

SEQ ID NO: 564104 - RNA, 19 nt, Homo sapiens
  misc_RNA (1)...(19): siRNA sense strand
gcccaucuaugaaccucuu

SEQ ID NO: 564105 - RNA, 19 nt, Homo sapiens
  misc_RNA (1)...(19): siRNA sense strand
cauagaucaucaaacuuca

SEQ ID NO: 564106 - RNA, 19 nt, Homo sapiens
  misc_RNA (1)...(19): siRNA sense strand
ucaagggugugagaacaug

SEQ ID NO: 564107 - RNA, 19 nt, Homo sapiens
  misc_RNA (1)...(19): siRNA sense strand
gaaccucuucucccaugga

SEQ ID NO: 564108 - RNA, 19 nt, Homo sapiens
  misc_RNA (1)...(19): siRNA sense strand
auuauaugcugucgaaauc

SEQ ID NO: 564109 - RNA, 19 nt, Homo sapiens
  misc_RNA (1)...(19): siRNA sense strand
aacaugugcccaucuauga

SEQ ID NO: 564110 - RNA, 19 nt, Homo sapiens
  misc_RNA (1)...(19): siRNA sense strand
acagguuucucuugcuaau

SEQ ID NO: 564111 - RNA, 19 nt, Homo sapiens
  misc_RNA (1)...(19): siRNA sense strand
ccagaggaacaucaaguca

SEQ ID NO: 564112 - RNA, 19 nt, Homo sapiens
  misc_RNA (1)...(19): siRNA sense strand
gcugucgaaaucaaucuuu

SEQ ID NO: 564113 - RNA, 19 nt, Homo sapiens
  misc_RNA (1)...(19): siRNA sense strand
acgaggaugcaaauuauau

SEQ ID NO: 564114 - RNA, 19 nt, Homo sapiens
  misc_RNA (1)...(19): siRNA sense strand
cgaggaugcaaauuauaug

SEQ ID NO: 564115 - RNA, 19 nt, Homo sapiens
  misc_RNA (1)...(19): siRNA sense strand
cauggaacgaggaugcaaa

SEQ ID NO: 564116 - RNA, 19 nt, Homo sapiens
  misc_RNA (1)...(19): siRNA sense strand
gaacgaggaugcaaauuau

SEQ ID NO: 564117 - RNA, 19 nt, Homo sapiens
  misc_RNA (1)...(19): siRNA sense strand
ggaacgaggaugcaaauua

SEQ ID NO: 564118 - RNA, 19 nt, Homo sapiens
  misc_RNA (1)...(19): siRNA sense strand
gaacagguuucucuugcua

SEQ ID NO: 564119 - RNA, 19 nt, Homo sapiens
  misc_RNA (1)...(19): siRNA sense strand
caaauuauaugcugucgaa

SEQ ID NO: 564120 - RNA, 19 nt, Homo sapiens
  misc_RNA (1)...(19): siRNA sense strand
gagaacaugugcccaucua

SEQ ID NO: 564121 - RNA, 19 nt, Homo sapiens
  misc_RNA (1)...(19): siRNA sense strand
gaacaucaagucagccuaa

SEQ ID NO: 564122 - RNA, 19 nt, Homo sapiens
  misc_RNA (1)...(19): siRNA sense strand
gaacaugugcccaucuaug

SEQ ID NO: 564123 - RNA, 19 nt, Homo sapiens
  misc_RNA (1)...(19): siRNA sense strand
caucaagucagccuaauga

SEQ ID NO: 564124 - RNA, 19 nt, Homo sapiens
  misc_RNA (1)...(19): siRNA sense strand
gcuaaugagucuuuaucug

SEQ ID NO: 564125 - RNA, 19 nt, Homo sapiens
  misc_RNA (1)...(19): siRNA sense strand
ccauagaucaucaaacuuc

SEQ ID NO: 564126 - RNA, 19 nt, Homo sapiens
  misc_RNA (1)...(19): siRNA sense strand
uauaugcugucgaaaucaa

SEQ ID NO: 564127 - RNA, 19 nt, Homo sapiens
  misc_RNA (1)...(19): siRNA sense strand
agguuucucuugcuaauga

SEQ ID NO: 564128 - RNA, 19 nt, Homo sapiens
  misc_RNA (1)...(19): siRNA sense strand
cuccauagaucaucaaacu

SEQ ID NO: 564129 - RNA, 19 nt, Homo sapiens
  misc_RNA (1)...(19): siRNA sense strand
gcccaucuaugaaccucuu

SEQ ID NO: 564130 - RNA, 19 nt, Homo sapiens
  misc_RNA (1)...(19): siRNA sense strand
cauagaucaucaaacuuca

SEQ ID NO: 564131 - RNA, 19 nt, Homo sapiens
  misc_RNA (1)...(19): siRNA sense strand
ucaagggugugagaacaug

SEQ ID NO: 564132 - RNA, 19 nt, Homo sapiens
  misc_RNA (1)...(19): siRNA sense strand
gaaccucuucucccaugga

SEQ ID NO: 564133 - RNA, 19 nt, Homo sapiens
  misc_RNA (1)...(19): siRNA sense strand
auuauaugcugucgaaauc

SEQ ID NO: 564134 - RNA, 19 nt, Homo sapiens
  misc_RNA (1)...(19): siRNA sense strand
aacaugugcccaucuauga

SEQ ID NO: 564135 - RNA, 19 nt, Homo sapiens
  misc_RNA (1)...(19): siRNA sense strand
acagguuucucuugcuaau

SEQ ID NO: 564136 - RNA, 19 nt, Homo sapiens
  misc_RNA (1)...(19): siRNA sense strand
ccagaggaacaucaaguca

SEQ ID NO: 564137 - RNA, 19 nt, Homo sapiens
  misc_RNA (1)...(19): siRNA sense strand
gcugucgaaaucaaucuuu

SEQ ID NO: 564138 - RNA, 19 nt, Homo sapiens
  misc_RNA (1)...(19): siRNA sense strand
acgaggaugcaaauuauau

SEQ ID NO: 564139 - RNA, 19 nt, Homo sapiens
  misc_RNA (1)...(19): siRNA sense strand
cgaggaugcaaauuauaug

SEQ ID NO: 564140 - RNA, 19 nt, Homo sapiens
  misc_RNA (1)...(19): siRNA sense strand
cauggaacgaggaugcaaa

SEQ ID NO: 564141 - RNA, 19 nt, Homo sapiens
  misc_RNA (1)...(19): siRNA sense strand
gaacgaggaugcaaauuau

SEQ ID NO: 564142 - RNA, 19 nt, Homo sapiens
  misc_RNA (1)...(19): siRNA sense strand
ggaacgaggaugcaaauua

SEQ ID NO: 564143 - RNA, 19 nt, Homo sapiens
  misc_RNA (1)...(19): siRNA sense strand
gaacagguuucucuugcua

SEQ ID NO: 564144 - RNA, 19 nt, Homo sapiens
  misc_RNA (1)...(19): siRNA sense strand
caaauuauaugcugucgaa

SEQ ID NO: 564145 - RNA, 19 nt, Homo sapiens
  misc_RNA (1)...(19): siRNA sense strand
gagaacaugugcccaucua

SEQ ID NO: 564146 - RNA, 19 nt, Homo sapiens
  misc_RNA (1)...(19): siRNA sense strand
gaacaucaagucagccuaa

SEQ ID NO: 564147 - RNA, 19 nt, Homo sapiens
  misc_RNA (1)...(19): siRNA sense strand
gaacaugugcccaucuaug

SEQ ID NO: 564148 - RNA, 19 nt, Homo sapiens
  misc_RNA (1)...(19): siRNA sense strand
caucaagucagccuaauga

SEQ ID NO: 564149 - RNA, 19 nt, Homo sapiens
  misc_RNA (1)...(19): siRNA sense strand
gcuaaugagucuuuaucug

SEQ ID NO: 564150 - RNA, 19 nt, Homo sapiens
  misc_RNA (1)...(19): siRNA sense strand
ccauagaucaucaaacuuc

SEQ ID NO: 564151 - RNA, 19 nt, Homo sapiens
  misc_RNA (1)...(19): siRNA sense strand
uauaugcugucgaaaucaa

SEQ ID NO: 564152 - RNA, 19 nt, Homo sapiens
  misc_RNA (1)...(19): siRNA sense strand
agguuucucuugcuaauga

SEQ ID NO: 564153 - RNA, 19 nt, Homo sapiens
  misc_RNA (1)...(19): siRNA sense strand
cuccauagaucaucaaacu

SEQ ID NO: 564154 - RNA, 19 nt, Homo sapiens
  misc_RNA (1)...(19): siRNA sense strand
gcccaucuaugaaccucuu

SEQ ID NO: 564155 - RNA, 19 nt, Homo sapiens
  misc_RNA (1)...(19): siRNA sense strand
cauagaucaucaaacuuca

SEQ ID NO: 564156 - RNA, 19 nt, Homo sapiens
  misc_RNA (1)...(19): siRNA sense strand
ucaagggugugagaacaug

SEQ ID NO: 564157 - RNA, 19 nt, Homo sapiens
  misc_RNA (1)...(19): siRNA sense strand
gaaccucuucucccaugga

SEQ ID NO: 564158 - RNA, 19 nt, Homo sapiens
  misc_RNA (1)...(19): siRNA sense strand
auuauaugcugucgaaauc

SEQ ID NO: 564159 - RNA, 19 nt, Homo sapiens
  misc_RNA (1)...(19): siRNA sense strand
aacaugugcccaucuauga

SEQ ID NO: 564160 - RNA, 19 nt, Homo sapiens
  misc_RNA (1)...(19): siRNA sense strand
acagguuucucuugcuaau

SEQ ID NO: 564161 - RNA, 19 nt, Homo sapiens
  misc_RNA (1)...(19): siRNA sense strand
ccagaggaacaucaaguca

SEQ ID NO: 564162 - RNA, 19 nt, Homo sapiens
  misc_RNA (1)...(19): siRNA sense strand
gcugucgaaaucaaucuuu

SEQ ID NO: 564163 - RNA, 19 nt, Homo sapiens
  misc_RNA (1)...(19): siRNA sense strand
acgaggaugcaaauuauau

SEQ ID NO: 564164 - RNA, 19 nt, Homo sapiens
  misc_RNA (1)...(19): siRNA sense strand
cgaggaugcaaauuauaug

SEQ ID NO: 564165 - RNA, 19 nt, Homo sapiens
  misc_RNA (1)...(19): siRNA sense strand
cauggaacgaggaugcaaa

SEQ ID NO: 564166 - RNA, 19 nt, Homo sapiens
  misc_RNA (1)...(19): siRNA sense strand
gaacgaggaugcaaauuau

SEQ ID NO: 564167 - RNA, 19 nt, Homo sapiens
  misc_RNA (1)...(19): siRNA sense strand
ggaacgaggaugcaaauua

SEQ ID NO: 564168 - RNA, 19 nt, Homo sapiens
  misc_RNA (1)...(19): siRNA sense strand
gaacagguuucucuugcua

SEQ ID NO: 564169 - RNA, 19 nt, Homo sapiens
  misc_RNA (1)...(19): siRNA sense strand
caaauuauaugcugucgaa

SEQ ID NO: 564170 - RNA, 19 nt, Homo sapiens
  misc_RNA (1)...(19): siRNA sense strand
gagaacaugugcccaucua

SEQ ID NO: 564171 - RNA, 19 nt, Homo sapiens
  misc_RNA (1)...(19): siRNA sense strand
gaacaucaagucagccuaa

SEQ ID NO: 564172 - RNA, 19 nt, Homo sapiens
  misc_RNA (1)...(19): siRNA sense strand
gaacaugugcccaucuaug

SEQ ID NO: 564173 - RNA, 19 nt, Homo sapiens
  misc_RNA (1)...(19): siRNA sense strand
caucaagucagccuaauga

SEQ ID NO: 564174 - RNA, 19 nt, Homo sapiens
  misc_RNA (1)...(19): siRNA sense strand
gcuaaugagucuuuaucug

SEQ ID NO: 564175 - RNA, 19 nt, Homo sapiens
  misc_RNA (1)...(19): siRNA sense strand
ccauagaucaucaaacuuc

SEQ ID NO: 564176 - RNA, 19 nt, Homo sapiens
  misc_RNA (1)...(19): siRNA sense strand
uauaugcugucgaaaucaa

SEQ ID NO: 564177 - RNA, 19 nt, Homo sapiens
  misc_RNA (1)...(19): siRNA sense strand
agguuucucuugcuaauga

SEQ ID NO: 564178 - RNA, 19 nt, Homo sapiens
  misc_RNA (1)...(19): siRNA sense strand
cuccauagaucaucaaacu

SEQ ID NO: 564179 - RNA, 19 nt, Homo sapiens
  misc_RNA (1)...(19): siRNA sense strand
gcccaucuaugaaccucuu

SEQ ID NO: 564180 - RNA, 19 nt, Homo sapiens
  misc_RNA (1)...(19): siRNA sense strand
cauagaucaucaaacuuca

SEQ ID NO: 564181 - RNA, 19 nt, Homo sapiens
  misc_RNA (1)...(19): siRNA sense strand
ucaagggugugagaacaug

SEQ ID NO: 564182 - RNA, 19 nt, Homo sapiens
  misc_RNA (1)...(19): siRNA sense strand
gaaccucuucucccaugga

SEQ ID NO: 564183 - RNA, 19 nt, Homo sapiens
  misc_RNA (1)...(19): siRNA sense strand
auuauaugcugucgaaauc

SEQ ID NO: 564184 - RNA, 19 nt, Homo sapiens
  misc_RNA (1)...(19): siRNA sense strand
aacaugugcccaucuauga

SEQ ID NO: 564185 - RNA, 19 nt, Homo sapiens
  misc_RNA (1)...(19): siRNA sense strand
acagguuucucuugcuaau

SEQ ID NO: 564186 - RNA, 19 nt, Homo sapiens
  misc_RNA (1)...(19): siRNA sense strand
ccagaggaacaucaaguca

SEQ ID NO: 564187 - RNA, 19 nt, Homo sapiens
  misc_RNA (1)...(19): siRNA sense strand
gcugucgaaaucaaucuuu

SEQ ID NO: 564188 - RNA, 19 nt, Homo sapiens
  misc_RNA (1)...(19): siRNA sense strand
acgaggaugcaaauuauau

SEQ ID NO: 564189 - RNA, 19 nt, Homo sapiens
  misc_RNA (1)...(19): siRNA sense strand
cgaggaugcaaauuauaug

SEQ ID NO: 564190 - RNA, 19 nt, Homo sapiens
  misc_RNA (1)...(19): siRNA sense strand
cauggaacgaggaugcaaa

SEQ ID NO: 564191 - RNA, 19 nt, Homo sapiens
  misc_RNA (1)...(19): siRNA sense strand
gaacgaggaugcaaauuau

SEQ ID NO: 564192 - RNA, 19 nt, Homo sapiens
  misc_RNA (1)...(19): siRNA sense strand
ggaacgaggaugcaaauua

SEQ ID NO: 564193 - RNA, 19 nt, Homo sapiens
  misc_RNA (1)...(19): siRNA sense strand
gaacagguuucucuugcua

SEQ ID NO: 564194 - RNA, 19 nt, Homo sapiens
  misc_RNA (1)...(19): siRNA sense strand
caaauuauaugcugucgaa

SEQ ID NO: 564195 - RNA, 19 nt, Homo sapiens
  misc_RNA (1)...(19): siRNA sense strand
gagaacaugugcccaucua

SEQ ID NO: 564196 - RNA, 19 nt, Homo sapiens
  misc_RNA (1)...(19): siRNA sense strand
gaacaucaagucagccuaa

SEQ ID NO: 564197 - RNA, 19 nt, Homo sapiens
  misc_RNA (1)...(19): siRNA sense strand
gaacaugugcccaucuaug

SEQ ID NO: 564198 - RNA, 19 nt, Homo sapiens
  misc_RNA (1)...(19): siRNA sense strand
caucaagucagccuaauga

SEQ ID NO: 564199 - RNA, 19 nt, Homo sapiens
  misc_RNA (1)...(19): siRNA sense strand
gcuaaugagucuuuaucug

SEQ ID NO: 564200 - RNA, 19 nt, Homo sapiens
  misc_RNA (1)...(19): siRNA sense strand
ccauagaucaucaaacuuc

SEQ ID NO: 564201 - RNA, 19 nt, Homo sapiens
  misc_RNA (1)...(19): siRNA sense strand
uauaugcugucgaaaucaa

SEQ ID NO: 564202 - RNA, 19 nt, Homo sapiens
  misc_RNA (1)...(19): siRNA sense strand
agguuucucuugcuaauga

SEQ ID NO: 564203 - RNA, 19 nt, Homo sapiens
  misc_RNA (1)...(19): siRNA sense strand
cuccauagaucaucaaacu

SEQ ID NO: 564204 - RNA, 19 nt, Homo sapiens
  misc_RNA (1)...(19): siRNA sense strand
gcccaucuaugaaccucuu

SEQ ID NO: 564205 - RNA, 19 nt, Homo sapiens
  misc_RNA (1)...(19): siRNA sense strand
cauagaucaucaaacuuca

SEQ ID NO: 564206 - RNA, 19 nt, Homo sapiens
  misc_RNA (1)...(19): siRNA sense strand
ucaagggugugagaacaug

SEQ ID NO: 564207 - RNA, 19 nt, Homo sapiens
  misc_RNA (1)...(19): siRNA sense strand
gaaccucuucucccaugga

SEQ ID NO: 564208 - RNA, 19 nt, Homo sapiens
  misc_RNA (1)...(19): siRNA sense strand
auuauaugcugucgaaauc

SEQ ID NO: 564209 - RNA, 19 nt, Homo sapiens
  misc_RNA (1)...(19): siRNA sense strand
aacaugugcccaucuauga

SEQ ID NO: 564210 - RNA, 19 nt, Homo sapiens
  misc_RNA (1)...(19): siRNA sense strand
acagguuucucuugcuaau

SEQ ID NO: 564211 - RNA, 19 nt, Homo sapiens
  misc_RNA (1)...(19): siRNA sense strand
ccagaggaacaucaaguca

SEQ ID NO: 564212 - RNA, 19 nt, Homo sapiens
  misc_RNA (1)...(19): siRNA sense strand
gcugucgaaaucaaucuuu

SEQ ID NO: 564213 - RNA, 19 nt, Homo sapiens
  misc_RNA (1)...(19): siRNA sense strand
acgaggaugcaaauuauau

SEQ ID NO: 564214 - RNA, 19 nt, Homo sapiens
  misc_RNA (1)...(19): siRNA sense strand
cgaggaugcaaauuauaug

SEQ ID NO: 564215 - RNA, 19 nt, Homo sapiens
  misc_RNA (1)...(19): siRNA sense strand
cauggaacgaggaugcaaa

SEQ ID NO: 564216 - RNA, 19 nt, Homo sapiens
  misc_RNA (1)...(19): siRNA sense strand
gaacgaggaugcaaauuau

SEQ ID NO: 564217 - RNA, 19 nt, Homo sapiens
  misc_RNA (1)...(19): siRNA sense strand
ggaacgaggaugcaaauua

SEQ ID NO: 564218 - RNA, 19 nt, Homo sapiens
  misc_RNA (1)...(19): siRNA sense strand
gaacagguuucucuugcua

SEQ ID NO: 564219 - RNA, 19 nt, Homo sapiens
  misc_RNA (1)...(19): siRNA sense strand
caaauuauaugcugucgaa

SEQ ID NO: 564220 - RNA, 19 nt, Homo sapiens
  misc_RNA (1)...(19): siRNA sense strand
gagaacaugugcccaucua

SEQ ID NO: 564221 - RNA, 19 nt, Homo sapiens
  misc_RNA (1)...(19): siRNA sense strand
gaacaucaagucagccuaa

SEQ ID NO: 564222 - RNA, 19 nt, Homo sapiens
  misc_RNA (1)...(19): siRNA sense strand
gaacaugugcccaucuaug

SEQ ID NO: 564223 - RNA, 19 nt, Homo sapiens
  misc_RNA (1)...(19): siRNA sense strand
caucaagucagccuaauga

SEQ ID NO: 564224 - RNA, 19 nt, Homo sapiens
  misc_RNA (1)...(19): siRNA sense strand
gcuaaugagucuuuaucug

SEQ ID NO: 564225 - RNA, 19 nt, Homo sapiens
  misc_RNA (1)...(19): siRNA sense strand
ccauagaucaucaaacuuc

SEQ ID NO: 564226 - RNA, 19 nt, Homo sapiens
  misc_RNA (1)...(19): siRNA sense strand
uauaugcugucgaaaucaa

SEQ ID NO: 564227 - RNA, 19 nt, Homo sapiens
  misc_RNA (1)...(19): siRNA sense strand
agguuucucuugcuaauga

SEQ ID NO: 564228 - RNA, 19 nt, Homo sapiens
  misc_RNA (1)...(19): siRNA sense strand
cuccauagaucaucaaacu

SEQ ID NO: 564229 - RNA, 19 nt, Homo sapiens
  misc_RNA (1)...(19): siRNA sense strand
gcccaucuaugaaccucuu

SEQ ID NO: 564230 - RNA, 19 nt, Homo sapiens
  misc_RNA (1)...(19): siRNA sense strand
cauagaucaucaaacuuca

SEQ ID NO: 564231 - RNA, 19 nt, Homo sapiens
  misc_RNA (1)...(19): siRNA sense strand
ucaagggugugagaacaug

SEQ ID NO: 564232 - RNA, 19 nt, Homo sapiens
  misc_RNA (1)...(19): siRNA sense strand
gaaccucuucucccaugga

SEQ ID NO: 564233 - RNA, 19 nt, Homo sapiens
  misc_RNA (1)...(19): siRNA sense strand
auuauaugcugucgaaauc

SEQ ID NO: 564234 - RNA, 19 nt, Homo sapiens
  misc_RNA (1)...(19): siRNA sense strand
aacaugugcccaucuauga

SEQ ID NO: 564235 - RNA, 19 nt, Homo sapiens
  misc_RNA (1)...(19): siRNA sense strand
acagguuucucuugcuaau

SEQ ID NO: 564236 - RNA, 19 nt, Homo sapiens
  misc_RNA (1)...(19): siRNA sense strand
ccagaggaacaucaaguca

SEQ ID NO: 564237 - RNA, 19 nt, Homo sapiens
  misc_RNA (1)...(19): siRNA sense strand
gcugucgaaaucaaucuuu

SEQ ID NO: 564238 - RNA, 19 nt, Homo sapiens
  misc_RNA (1)...(19): siRNA sense strand
acgaggaugcaaauuauau

SEQ ID NO: 564239 - RNA, 19 nt, Homo sapiens
  misc_RNA (1)...(19): siRNA sense strand
cgaggaugcaaauuauaug

SEQ ID NO: 564240 - RNA, 19 nt, Homo sapiens
  misc_RNA (1)...(19): siRNA sense strand
cauggaacgaggaugcaaa

SEQ ID NO: 564241 - RNA, 19 nt, Homo sapiens
  misc_RNA (1)...(19): siRNA sense strand
gaacgaggaugcaaauuau

SEQ ID NO: 564242 - RNA, 19 nt, Homo sapiens
  misc_RNA (1)...(19): siRNA sense strand
ggaacgaggaugcaaauua

SEQ ID NO: 564243 - RNA, 19 nt, Homo sapiens
  misc_RNA (1)...(19): siRNA sense strand
gaacagguuucucuugcua

SEQ ID NO: 564244 - RNA, 19 nt, Homo sapiens
  misc_RNA (1)...(19): siRNA sense strand
caaauuauaugcugucgaa

SEQ ID NO: 564245 - RNA, 19 nt, Homo sapiens
  misc_RNA (1)...(19): siRNA sense strand
gagaacaugugcccaucua

SEQ ID NO: 564246 - RNA, 19 nt, Homo sapiens
  misc_RNA (1)...(19): siRNA sense strand
gaacaucaagucagccuaa

SEQ ID NO: 564247 - RNA, 19 nt, Homo sapiens
  misc_RNA (1)...(19): siRNA sense strand
gaacaugugcccaucuaug

SEQ ID NO: 564248 - RNA, 19 nt, Homo sapiens
  misc_RNA (1)...(19): siRNA sense strand
caucaagucagccuaauga

SEQ ID NO: 564249 - RNA, 19 nt, Homo sapiens
  misc_RNA (1)...(19): siRNA sense strand
gcuaaugagucuuuaucug

SEQ ID NO: 564250 - RNA, 19 nt, Homo sapiens
  misc_RNA (1)...(19): siRNA sense strand
ccauagaucaucaaacuuc

SEQ ID NO: 564251 - RNA, 19 nt, Homo sapiens
  misc_RNA (1)...(19): siRNA sense strand
uauaugcugucgaaaucaa

SEQ ID NO: 564252 - RNA, 19 nt, Homo sapiens
  misc_RNA (1)...(19): siRNA sense strand
agguuucucuugcuaauga

SEQ ID NO: 564253 - RNA, 19 nt, Homo sapiens
  misc_RNA (1)...(19): siRNA sense strand
cuccauagaucaucaaacu

SEQ ID NO: 564254 - RNA, 19 nt, Homo sapiens
  misc_RNA (1)...(19): siRNA sense strand
gcccaucuaugaaccucuu

SEQ ID NO: 564255 - RNA, 19 nt, Homo sapiens
  misc_RNA (1)...(19): siRNA sense strand
cauagaucaucaaacuuca

SEQ ID NO: 564256 - RNA, 19 nt, Homo sapiens
  misc_RNA (1)...(19): siRNA sense strand
ucaagggugugagaacaug

SEQ ID NO: 564257 - RNA, 19 nt, Homo sapiens
  misc_RNA (1)...(19): siRNA sense strand
gaaccucuucucccaugga

SEQ ID NO: 564258 - RNA, 19 nt, Homo sapiens
  misc_RNA (1)...(19): siRNA sense strand
auuauaugcugucgaaauc

SEQ ID NO: 564259 - RNA, 19 nt, Homo sapiens
  misc_RNA (1)...(19): siRNA sense strand
aacaugugcccaucuauga

SEQ ID NO: 564260 - RNA, 19 nt, Homo sapiens
  misc_RNA (1)...(19): siRNA sense strand
acagguuucucuugcuaau

SEQ ID NO: 564261 - RNA, 19 nt, Homo sapiens
  misc_RNA (1)...(19): siRNA sense strand
ccagaggaacaucaaguca

SEQ ID NO: 564262 - RNA, 19 nt, Homo sapiens
  misc_RNA (1)...(19): siRNA sense strand
gcugucgaaaucaaucuuu

SEQ ID NO: 564263 - RNA, 19 nt, Homo sapiens
  misc_RNA (1)...(19): siRNA sense strand
acgaggaugcaaauuauau

SEQ ID NO: 564264 - RNA, 19 nt, Homo sapiens
  misc_RNA (1)...(19): siRNA sense strand
cgaggaugcaaauuauaug

SEQ ID NO: 564265 - RNA, 19 nt, Homo sapiens
  misc_RNA (1)...(19): siRNA sense strand
cauggaacgaggaugcaaa

SEQ ID NO: 564266 - RNA, 19 nt, Homo sapiens
  misc_RNA (1)...(19): siRNA sense strand
gaacgaggaugcaaauuau

SEQ ID NO: 564267 - RNA, 19 nt, Homo sapiens
  misc_RNA (1)...(19): siRNA sense strand
ggaacgaggaugcaaauua

SEQ ID NO: 564268 - RNA, 19 nt, Homo sapiens
  misc_RNA (1)...(19): siRNA sense strand
gaacagguuucucuugcua

SEQ ID NO: 564269 - RNA, 19 nt, Homo sapiens
  misc_RNA (1)...(19): siRNA sense strand
caaauuauaugcugucgaa

SEQ ID NO: 564270 - RNA, 19 nt, Homo sapiens
  misc_RNA (1)...(19): siRNA sense strand
gagaacaugugcccaucua

SEQ ID NO: 564271 - RNA, 19 nt, Homo sapiens
  misc_RNA (1)...(19): siRNA sense strand
gaacaucaagucagccuaa

SEQ ID NO: 564272 - RNA, 19 nt, Homo sapiens
  misc_RNA (1)...(19): siRNA sense strand
gaacaugugcccaucuaug

SEQ ID NO: 564273 - RNA, 19 nt, Homo sapiens
  misc_RNA (1)...(19): siRNA sense strand
caucaagucagccuaauga

SEQ ID NO: 564274 - RNA, 19 nt, Homo sapiens
  misc_RNA (1)...(19): siRNA sense strand
gcuaaugagucuuuaucug

SEQ ID NO: 564275 - RNA, 19 nt, Homo sapiens
  misc_RNA (1)...(19): siRNA sense strand
ccauagaucaucaaacuuc

SEQ ID NO: 564276 - RNA, 19 nt, Homo sapiens
  misc_RNA (1)...(19): siRNA sense strand
uauaugcugucgaaaucaa

SEQ ID NO: 564277 - RNA, 19 nt, Homo sapiens
  misc_RNA (1)...(19): siRNA sense strand
agguuucucuugcuaauga

SEQ ID NO: 564278 - RNA, 19 nt, Homo sapiens
  misc_RNA (1)...(19): siRNA sense strand
cuccauagaucaucaaacu

SEQ ID NO: 564279 - RNA, 19 nt, Homo sapiens
  misc_RNA (1)...(19): siRNA sense strand
gcccaucuaugaaccucuu

SEQ ID NO: 564280 - RNA, 19 nt, Homo sapiens
  misc_RNA (1)...(19): siRNA sense strand
cauagaucaucaaacuuca

SEQ ID NO: 564281 - RNA, 19 nt, Homo sapiens
  misc_RNA (1)...(19): siRNA sense strand
ucaagggugugagaacaug

SEQ ID NO: 564282 - RNA, 19 nt, Homo sapiens
  misc_RNA (1)...(19): siRNA sense strand
gaaccucuucucccaugga

SEQ ID NO: 564283 - RNA, 19 nt, Homo sapiens
  misc_RNA (1)...(19): siRNA sense strand
auuauaugcugucgaaauc

SEQ ID NO: 564284 - RNA, 19 nt, Homo sapiens
  misc_RNA (1)...(19): siRNA sense strand
aacaugugcccaucuauga

SEQ ID NO: 564285 - RNA, 19 nt, Homo sapiens
  misc_RNA (1)...(19): siRNA sense strand
acagguuucucuugcuaau

SEQ ID NO: 564286 - RNA, 19 nt, Homo sapiens
  misc_RNA (1)...(19): siRNA sense strand
ccagaggaacaucaaguca

SEQ ID NO: 564287 - RNA, 19 nt, Homo sapiens
  misc_RNA (1)...(19): siRNA sense strand
gcugucgaaaucaaucuuu

SEQ ID NO: 564288 - RNA, 19 nt, Homo sapiens
  misc_RNA (1)...(19): siRNA sense strand
acgaggaugcaaauuauau

SEQ ID NO: 564289 - RNA, 19 nt, Homo sapiens
  misc_RNA (1)...(19): siRNA sense strand
cgaggaugcaaauuauaug

SEQ ID NO: 564290 - RNA, 19 nt, Homo sapiens
  misc_RNA (1)...(19): siRNA sense strand
cauggaacgaggaugcaaa

SEQ ID NO: 564291 - RNA, 19 nt, Homo sapiens
  misc_RNA (1)...(19): siRNA sense strand
gaacgaggaugcaaauuau

SEQ ID NO: 564292 - RNA, 19 nt, Homo sapiens
  misc_RNA (1)...(19): siRNA sense strand
ggaacgaggaugcaaauua

SEQ ID NO: 564293 - RNA, 19 nt, Homo sapiens
  misc_RNA (1)...(19): siRNA sense strand
gaacagguuucucuugcua

SEQ ID NO: 564294 - RNA, 19 nt, Homo sapiens
  misc_RNA (1)...(19): siRNA sense strand
caaauuauaugcugucgaa

SEQ ID NO: 564295 - RNA, 19 nt, Homo sapiens
  misc_RNA (1)...(19): siRNA sense strand
gagaacaugugcccaucua

SEQ ID NO: 564296 - RNA, 19 nt, Homo sapiens
  misc_RNA (1)...(19): siRNA sense strand
gaacaucaagucagccuaa

SEQ ID NO: 564297 - RNA, 19 nt, Homo sapiens
  misc_RNA (1)...(19): siRNA sense strand
gaacaugugcccaucuaug

SEQ ID NO: 564298 - RNA, 19 nt, Homo sapiens
  misc_RNA (1)...(19): siRNA sense strand
caucaagucagccuaauga

SEQ ID NO: 564299 - RNA, 19 nt, Homo sapiens
  misc_RNA (1)...(19): siRNA sense strand
gcuaaugagucuuuaucug

SEQ ID NO: 564300 - RNA, 19 nt, Homo sapiens
  misc_RNA (1)...(19): siRNA sense strand
ccauagaucaucaaacuuc

SEQ ID NO: 564301 - RNA, 19 nt, Homo sapiens
  misc_RNA (1)...(19): siRNA sense strand
uauaugcugucgaaaucaa

SEQ ID NO: 564302 - RNA, 19 nt, Homo sapiens
  misc_RNA (1)...(19): siRNA sense strand
agguuucucuugcuaauga

SEQ ID NO: 564303 - RNA, 19 nt, Homo sapiens
  misc_RNA (1)...(19): siRNA sense strand
cuccauagaucaucaaacu

SEQ ID NO: 564304 - RNA, 19 nt, Homo sapiens
  misc_RNA (1)...(19): siRNA sense strand
gcccaucuaugaaccucuu

SEQ ID NO: 564305 - RNA, 19 nt, Homo sapiens
  misc_RNA (1)...(19): siRNA sense strand
cauagaucaucaaacuuca

SEQ ID NO: 564306 - RNA, 19 nt, Homo sapiens
  misc_RNA (1)...(19): siRNA sense strand
ucaagggugugagaacaug

SEQ ID NO: 564307 - RNA, 19 nt, Homo sapiens
  misc_RNA (1)...(19): siRNA sense strand
gaaccucuucucccaugga

SEQ ID NO: 564308 - RNA, 19 nt, Homo sapiens
  misc_RNA (1)...(19): siRNA sense strand
auuauaugcugucgaaauc

SEQ ID NO: 564309 - RNA, 19 nt, Homo sapiens
  misc_RNA (1)...(19): siRNA sense strand
aacaugugcccaucuauga

SEQ ID NO: 564310 - RNA, 19 nt, Homo sapiens
  misc_RNA (1)...(19): siRNA sense strand
acagguuucucuugcuaau

SEQ ID NO: 564311 - RNA, 19 nt, Homo sapiens
  misc_RNA (1)...(19): siRNA sense strand
ccagaggaacaucaaguca

SEQ ID NO: 564312 - RNA, 19 nt, Homo sapiens
  misc_RNA (1)...(19): siRNA sense strand
gcugucgaaaucaaucuuu

SEQ ID NO: 564313 - RNA, 19 nt, Homo sapiens
  misc_RNA (1)...(19): siRNA sense strand
acgaggaugcaaauuauau

SEQ ID NO: 564314 - RNA, 19 nt, Homo sapiens
  misc_RNA (1)...(19): siRNA sense strand
cgaggaugcaaauuauaug

SEQ ID NO: 564315 - RNA, 19 nt, Homo sapiens
  misc_RNA (1)...(19): siRNA sense strand
cauggaacgaggaugcaaa

SEQ ID NO: 564316 - RNA, 19 nt, Homo sapiens
  misc_RNA (1)...(19): siRNA sense strand
gaacgaggaugcaaauuau

SEQ ID NO: 564317 - RNA, 19 nt, Homo sapiens
  misc_RNA (1)...(19): siRNA sense strand
ggaacgaggaugcaaauua

SEQ ID NO: 564318 - RNA, 19 nt, Homo sapiens
  misc_RNA (1)...(19): siRNA sense strand
gaacagguuucucuugcua

SEQ ID NO: 564319 - RNA, 19 nt, Homo sapiens
  misc_RNA (1)...(19): siRNA sense strand
caaauuauaugcugucgaa

SEQ ID NO: 564320 - RNA, 19 nt, Homo sapiens
  misc_RNA (1)...(19): siRNA sense strand
gagaacaugugcccaucua

SEQ ID NO: 564321 - RNA, 19 nt, Homo sapiens
  misc_RNA (1)...(19): siRNA sense strand
gaacaucaagucagccuaa

SEQ ID NO: 564322 - RNA, 19 nt, Homo sapiens
  misc_RNA (1)...(19): siRNA sense strand
gaacaugugcccaucuaug

SEQ ID NO: 564323 - RNA, 19 nt, Homo sapiens
  misc_RNA (1)...(19): siRNA sense strand
caucaagucagccuaauga

SEQ ID NO: 564324 - RNA, 19 nt, Homo sapiens
  misc_RNA (1)...(19): siRNA sense strand
gcuaaugagucuuuaucug

SEQ ID NO: 564325 - RNA, 19 nt, Homo sapiens
  misc_RNA (1)...(19): siRNA sense strand
ccauagaucaucaaacuuc

SEQ ID NO: 564326 - RNA, 19 nt, Homo sapiens
  misc_RNA (1)...(19): siRNA sense strand
uauaugcugucgaaaucaa

SEQ ID NO: 564327 - RNA, 19 nt, Homo sapiens
  misc_RNA (1)...(19): siRNA sense strand
agguuucucuugcuaauga

SEQ ID NO: 564328 - RNA, 19 nt, Homo sapiens
  misc_RNA (1)...(19): siRNA sense strand
cuccauagaucaucaaacu

SEQ ID NO: 564329 - RNA, 19 nt, Homo sapiens
  misc_RNA (1)...(19): siRNA sense strand
gcccaucuaugaaccucuu

SEQ ID NO: 564330 - RNA, 19 nt, Homo sapiens
  misc_RNA (1)...(19): siRNA sense strand
cauagaucaucaaacuuca

SEQ ID NO: 564331 - RNA, 19 nt, Homo sapiens
  misc_RNA (1)...(19): siRNA sense strand
ucaagggugugagaacaug

SEQ ID NO: 564332 - RNA, 19 nt, Homo sapiens
  misc_RNA (1)...(19): siRNA sense strand
gaaccucuucucccaugga

SEQ ID NO: 564333 - RNA, 19 nt, Homo sapiens
  misc_RNA (1)...(19): siRNA sense strand
auuauaugcugucgaaauc

SEQ ID NO: 564334 - RNA, 19 nt, Homo sapiens
  misc_RNA (1)...(19): siRNA sense strand
aacaugugcccaucuauga

SEQ ID NO: 564335 - RNA, 19 nt, Homo sapiens
  misc_RNA (1)...(19): siRNA sense strand
acagguuucucuugcuaau

SEQ ID NO: 564336 - RNA, 19 nt, Homo sapiens
  misc_RNA (1)...(19): siRNA sense strand
ccagaggaacaucaaguca

SEQ ID NO: 564337 - RNA, 19 nt, Homo sapiens
  misc_RNA (1)...(19): siRNA sense strand
gcugucgaaaucaaucuuu

SEQ ID NO: 564338 - RNA, 19 nt, Homo sapiens
  misc_RNA (1)...(19): siRNA sense strand
acgaggaugcaaauuauau

SEQ ID NO: 564339 - RNA, 19 nt, Homo sapiens
  misc_RNA (1)...(19): siRNA sense strand
cgaggaugcaaauuauaug

SEQ ID NO: 564340 - RNA, 19 nt, Homo sapiens
  misc_RNA (1)...(19): siRNA sense strand
cauggaacgaggaugcaaa

SEQ ID NO: 564341 - RNA, 19 nt, Homo sapiens
  misc_RNA (1)...(19): siRNA sense strand
gaacgaggaugcaaauuau

SEQ ID NO: 564342 - RNA, 19 nt, Homo sapiens
  misc_RNA (1)...(19): siRNA sense strand
ggaacgaggaugcaaauua

SEQ ID NO: 564343 - RNA, 19 nt, Homo sapiens
  misc_RNA (1)...(19): siRNA sense strand
gaacagguuucucuugcua

SEQ ID NO: 564344 - RNA, 19 nt, Homo sapiens
  misc_RNA (1)...(19): siRNA sense strand
caaauuauaugcugucgaa

SEQ ID NO: 564345 - RNA, 19 nt, Homo sapiens
  misc_RNA (1)...(19): siRNA sense strand
gagaacaugugcccaucua

SEQ ID NO: 564346 - RNA, 19 nt, Homo sapiens
  misc_RNA (1)...(19): siRNA sense strand
gaacaucaagucagccuaa

SEQ ID NO: 564347 - RNA, 19 nt, Homo sapiens
  misc_RNA (1)...(19): siRNA sense strand
gaacaugugcccaucuaug

SEQ ID NO: 564348 - RNA, 19 nt, Homo sapiens
  misc_RNA (1)...(19): siRNA sense strand
caucaagucagccuaauga

SEQ ID NO: 564349 - RNA, 19 nt, Homo sapiens
  misc_RNA (1)...(19): siRNA sense strand
gcuaaugagucuuuaucug

SEQ ID NO: 564350 - RNA, 19 nt, Homo sapiens
  misc_RNA (1)...(19): siRNA sense strand
ccauagaucaucaaacuuc

SEQ ID NO: 564351 - RNA, 19 nt, Homo sapiens
  misc_RNA (1)...(19): siRNA sense strand
uauaugcugucgaaaucaa

SEQ ID NO: 564352 - RNA, 19 nt, Homo sapiens
  misc_RNA (1)...(19): siRNA sense strand
agguuucucuugcuaauga

SEQ ID NO: 564353 - RNA, 19 nt, Homo sapiens
  misc_RNA (1)...(19): siRNA sense strand
cuccauagaucaucaaacu

SEQ ID NO: 564354 - RNA, 19 nt, Homo sapiens
  misc_RNA (1)...(19): siRNA sense strand
gcccaucuaugaaccucuu

SEQ ID NO: 564355 - RNA, 19 nt, Homo sapiens
  misc_RNA (1)...(19): siRNA sense strand
cauagaucaucaaacuuca

SEQ ID NO: 564356 - RNA, 19 nt, Homo sapiens
  misc_RNA (1)...(19): siRNA sense strand
ucaagggugugagaacaug

SEQ ID NO: 564357 - RNA, 19 nt, Homo sapiens
  misc_RNA (1)...(19): siRNA sense strand
gaaccucuucucccaugga

SEQ ID NO: 564358 - RNA, 19 nt, Homo sapiens
  misc_RNA (1)...(19): siRNA sense strand
auuauaugcugucgaaauc

SEQ ID NO: 564359 - RNA, 19 nt, Homo sapiens
  misc_RNA (1)...(19): siRNA sense strand
aacaugugcccaucuauga

SEQ ID NO: 564360 - RNA, 19 nt, Homo sapiens
  misc_RNA (1)...(19): siRNA sense strand
acagguuucucuugcuaau

SEQ ID NO: 564361 - RNA, 19 nt, Homo sapiens
  misc_RNA (1)...(19): siRNA sense strand
ccagaggaacaucaaguca

SEQ ID NO: 564362 - RNA, 19 nt, Homo sapiens
  misc_RNA (1)...(19): siRNA sense strand
gcugucgaaaucaaucuuu

SEQ ID NO: 564363 - RNA, 19 nt, Homo sapiens
  misc_RNA (1)...(19): siRNA sense strand
acgaggaugcaaauuauau

SEQ ID NO: 564364 - RNA, 19 nt, Homo sapiens
  misc_RNA (1)...(19): siRNA sense strand
cgaggaugcaaauuauaug

SEQ ID NO: 564365 - RNA, 19 nt, Homo sapiens
  misc_RNA (1)...(19): siRNA sense strand
cauggaacgaggaugcaaa

SEQ ID NO: 564366 - RNA, 19 nt, Homo sapiens
  misc_RNA (1)...(19): siRNA sense strand
gaacgaggaugcaaauuau

SEQ ID NO: 564367 - RNA, 19 nt, Homo sapiens
  misc_RNA (1)...(19): siRNA sense strand
ggaacgaggaugcaaauua

SEQ ID NO: 564368 - RNA, 19 nt, Homo sapiens
  misc_RNA (1)...(19): siRNA sense strand
gaacagguuucucuugcua

SEQ ID NO: 564369 - RNA, 19 nt, Homo sapiens
  misc_RNA (1)...(19): siRNA sense strand
caaauuauaugcugucgaa

SEQ ID NO: 564370 - RNA, 19 nt, Homo sapiens
  misc_RNA (1)...(19): siRNA sense strand
gagaacaugugcccaucua

SEQ ID NO: 564371 - RNA, 19 nt, Homo sapiens
  misc_RNA (1)...(19): siRNA sense strand
gaacaucaagucagccuaa

SEQ ID NO: 564372 - RNA, 19 nt, Homo sapiens
  misc_RNA (1)...(19): siRNA sense strand
gaacaugugcccaucuaug

SEQ ID NO: 564373 - RNA, 19 nt, Homo sapiens
  misc_RNA (1)...(19): siRNA sense strand
caucaagucagccuaauga

SEQ ID NO: 564374 - RNA, 19 nt, Homo sapiens
  misc_RNA (1)...(19): siRNA sense strand
gcuaaugagucuuuaucug

SEQ ID NO: 564375 - RNA, 19 nt, Homo sapiens
  misc_RNA (1)...(19): siRNA sense strand
ccauagaucaucaaacuuc

SEQ ID NO: 564376 - RNA, 19 nt, Homo sapiens
  misc_RNA (1)...(19): siRNA sense strand
uauaugcugucgaaaucaa

SEQ ID NO: 564377 - RNA, 19 nt, Homo sapiens
  misc_RNA (1)...(19): siRNA sense strand
agguuucucuugcuaauga

SEQ ID NO: 564378 - RNA, 19 nt, Homo sapiens
  misc_RNA (1)...(19): siRNA sense strand
cuccauagaucaucaaacu

SEQ ID NO: 564379 - RNA, 19 nt, Homo sapiens
  misc_RNA (1)...(19): siRNA sense strand
gcccaucuaugaaccucuu

SEQ ID NO: 564380 - RNA, 19 nt, Homo sapiens
  misc_RNA (1)...(19): siRNA sense strand
cauagaucaucaaacuuca

SEQ ID NO: 564381 - RNA, 19 nt, Homo sapiens
  misc_RNA (1)...(19): siRNA sense strand
ucaagggugugagaacaug

SEQ ID NO: 564382 - RNA, 19 nt, Homo sapiens
  misc_RNA (1)...(19): siRNA sense strand
gaaccucuucucccaugga

SEQ ID NO: 564383 - RNA, 19 nt, Homo sapiens
  misc_RNA (1)...(19): siRNA sense strand
auuauaugcugucgaaauc

SEQ ID NO: 564384 - RNA, 19 nt, Homo sapiens
  misc_RNA (1)...(19): siRNA sense strand
aacaugugcccaucuauga

SEQ ID NO: 564385 - RNA, 19 nt, Homo sapiens
  misc_RNA (1)...(19): siRNA sense strand
acagguuucucuugcuaau

SEQ ID NO: 564386 - RNA, 19 nt, Homo sapiens
  misc_RNA (1)...(19): siRNA sense strand
ccagaggaacaucaaguca

SEQ ID NO: 564387 - RNA, 19 nt, Homo sapiens
  misc_RNA (1)...(19): siRNA sense strand
gcugucgaaaucaaucuuu

SEQ ID NO: 564388 - RNA, 19 nt, Homo sapiens
  misc_RNA (1)...(19): siRNA sense strand
acgaggaugcaaauuauau

SEQ ID NO: 564389 - RNA, 19 nt, Homo sapiens
  misc_RNA (1)...(19): siRNA sense strand
cgaggaugcaaauuauaug

SEQ ID NO: 564390 - RNA, 19 nt, Homo sapiens
  misc_RNA (1)...(19): siRNA sense strand
cauggaacgaggaugcaaa

SEQ ID NO: 564391 - RNA, 19 nt, Homo sapiens
  misc_RNA (1)...(19): siRNA sense strand
gaacgaggaugcaaauuau

SEQ ID NO: 564392 - RNA, 19 nt, Homo sapiens
  misc_RNA (1)...(19): siRNA sense strand
ggaacgaggaugcaaauua

SEQ ID NO: 564393 - RNA, 19 nt, Homo sapiens
  misc_RNA (1)...(19): siRNA sense strand
gaacagguuucucuugcua

SEQ ID NO: 564394 - RNA, 19 nt, Homo sapiens
  misc_RNA (1)...(19): siRNA sense strand
caaauuauaugcugucgaa

SEQ ID NO: 564395 - RNA, 19 nt, Homo sapiens
  misc_RNA (1)...(19): siRNA sense strand
gagaacaugugcccaucua

SEQ ID NO: 564396 - RNA, 19 nt, Homo sapiens
  misc_RNA (1)...(19): siRNA sense strand
gaacaucaagucagccuaa

SEQ ID NO: 564397 - RNA, 19 nt, Homo sapiens
  misc_RNA (1)...(19): siRNA sense strand
gaacaugugcccaucuaug

SEQ ID NO: 564398 - RNA, 19 nt, Homo sapiens
  misc_RNA (1)...(19): siRNA sense strand
caucaagucagccuaauga

SEQ ID NO: 564399 - RNA, 19 nt, Homo sapiens
  misc_RNA (1)...(19): siRNA sense strand
gcuaaugagucuuuaucug

SEQ ID NO: 564400 - RNA, 19 nt, Homo sapiens
  misc_RNA (1)...(19): siRNA sense strand
ccauagaucaucaaacuuc

SEQ ID NO: 564401 - RNA, 19 nt, Homo sapiens
  misc_RNA (1)...(19): siRNA sense strand
uauaugcugucgaaaucaa

SEQ ID NO: 564402 - RNA, 19 nt, Homo sapiens
  misc_RNA (1)...(19): siRNA sense strand
agguuucucuugcuaauga

SEQ ID NO: 564403 - RNA, 19 nt, Homo sapiens
  misc_RNA (1)...(19): siRNA sense strand
cuccauagaucaucaaacu

SEQ ID NO: 564404 - RNA, 19 nt, Homo sapiens
  misc_RNA (1)...(19): siRNA sense strand
gcccaucuaugaaccucuu

SEQ ID NO: 564405 - RNA, 19 nt, Homo sapiens
  misc_RNA (1)...(19): siRNA sense strand
cauagaucaucaaacuuca

SEQ ID NO: 564406 - RNA, 19 nt, Homo sapiens
  misc_RNA (1)...(19): siRNA sense strand
ucaagggugugagaacaug

SEQ ID NO: 564407 - RNA, 19 nt, Homo sapiens
  misc_RNA (1)...(19): siRNA sense strand
gaaccucuucucccaugga

SEQ ID NO: 564408 - RNA, 19 nt, Homo sapiens
  misc_RNA (1)...(19): siRNA sense strand
auuauaugcugucgaaauc

SEQ ID NO: 564409 - RNA, 19 nt, Homo sapiens
  misc_RNA (1)...(19): siRNA sense strand
aacaugugcccaucuauga

SEQ ID NO: 564410 - RNA, 19 nt, Homo sapiens
  misc_RNA (1)...(19): siRNA sense strand
acagguuucucuugcuaau

SEQ ID NO: 564411 - RNA, 19 nt, Homo sapiens
  misc_RNA (1)...(19): siRNA sense strand
ccagaggaacaucaaguca

SEQ ID NO: 564412 - RNA, 19 nt, Homo sapiens
  misc_RNA (1)...(19): siRNA sense strand
gcugucgaaaucaaucuuu

SEQ ID NO: 564413 - RNA, 19 nt, Homo sapiens
  misc_RNA (1)...(19): siRNA sense strand
acgaggaugcaaauuauau

SEQ ID NO: 564414 - RNA, 19 nt, Homo sapiens
  misc_RNA (1)...(19): siRNA sense strand
cgaggaugcaaauuauaug

SEQ ID NO: 564415 - RNA, 19 nt, Homo sapiens
  misc_RNA (1)...(19): siRNA sense strand
cauggaacgaggaugcaaa

SEQ ID NO: 564416 - RNA, 19 nt, Homo sapiens
  misc_RNA (1)...(19): siRNA sense strand
gaacgaggaugcaaauuau

SEQ ID NO: 564417 - RNA, 19 nt, Homo sapiens
  misc_RNA (1)...(19): siRNA sense strand
ggaacgaggaugcaaauua

SEQ ID NO: 564418 - RNA, 19 nt, Homo sapiens
  misc_RNA (1)...(19): siRNA sense strand
gaacagguuucucuugcua

SEQ ID NO: 564419 - RNA, 19 nt, Homo sapiens
  misc_RNA (1)...(19): siRNA sense strand
caaauuauaugcugucgaa

SEQ ID NO: 564420 - RNA, 19 nt, Homo sapiens
  misc_RNA (1)...(19): siRNA sense strand
gagaacaugugcccaucua

SEQ ID NO: 564421 - RNA, 19 nt, Homo sapiens
  misc_RNA (1)...(19): siRNA sense strand
gaacaucaagucagccuaa

SEQ ID NO: 564422 - RNA, 19 nt, Homo sapiens
  misc_RNA (1)...(19): siRNA sense strand
gaacaugugcccaucuaug

SEQ ID NO: 564423 - RNA, 19 nt, Homo sapiens
  misc_RNA (1)...(19): siRNA sense strand
caucaagucagccuaauga

SEQ ID NO: 564424 - RNA, 19 nt, Homo sapiens
  misc_RNA (1)...(19): siRNA sense strand
gcuaaugagucuuuaucug

SEQ ID NO: 564425 - RNA, 19 nt, Homo sapiens
  misc_RNA (1)...(19): siRNA sense strand
ccauagaucaucaaacuuc

SEQ ID NO: 564426 - RNA, 19 nt, Homo sapiens
  misc_RNA (1)...(19): siRNA sense strand
uauaugcugucgaaaucaa

SEQ ID NO: 564427 - RNA, 19 nt, Homo sapiens
  misc_RNA (1)...(19): siRNA sense strand
agguuucucuugcuaauga

SEQ ID NO: 564428 - RNA, 19 nt, Homo sapiens
  misc_RNA (1)...(19): siRNA sense strand
cuccauagaucaucaaacu

SEQ ID NO: 564429 - RNA, 19 nt, Homo sapiens
  misc_RNA (1)...(19): siRNA sense strand
gcccaucuaugaaccucuu

SEQ ID NO: 564430 - RNA, 19 nt, Homo sapiens
  misc_RNA (1)...(19): siRNA sense strand
cauagaucaucaaacuuca

SEQ ID NO: 564431 - RNA, 19 nt, Homo sapiens
  misc_RNA (1)...(19): siRNA sense strand
ucaagggugugagaacaug

SEQ ID NO: 564432 - RNA, 19 nt, Homo sapiens
  misc_RNA (1)...(19): siRNA sense strand
gaaccucuucucccaugga

SEQ ID NO: 564433 - RNA, 19 nt, Homo sapiens
  misc_RNA (1)...(19): siRNA sense strand
auuauaugcugucgaaauc

SEQ ID NO: 564434 - RNA, 19 nt, Homo sapiens
  misc_RNA (1)...(19): siRNA sense strand
aacaugugcccaucuauga

SEQ ID NO: 564435 - RNA, 19 nt, Homo sapiens
  misc_RNA (1)...(19): siRNA sense strand
acagguuucucuugcuaau

SEQ ID NO: 564436 - RNA, 19 nt, Homo sapiens
  misc_RNA (1)...(19): siRNA sense strand
ccagaggaacaucaaguca

SEQ ID NO: 564437 - RNA, 19 nt, Homo sapiens
  misc_RNA (1)...(19): siRNA sense strand
gcugucgaaaucaaucuuu

SEQ ID NO: 564438 - RNA, 19 nt, Homo sapiens
  misc_RNA (1)...(19): siRNA sense strand
acgaggaugcaaauuauau

SEQ ID NO: 564439 - RNA, 19 nt, Homo sapiens
  misc_RNA (1)...(19): siRNA sense strand
cgaggaugcaaauuauaug

SEQ ID NO: 564440 - RNA, 19 nt, Homo sapiens
  misc_RNA (1)...(19): siRNA sense strand
cauggaacgaggaugcaaa

SEQ ID NO: 564441 - RNA, 19 nt, Homo sapiens
  misc_RNA (1)...(19): siRNA sense strand
gaacgaggaugcaaauuau

SEQ ID NO: 564442 - RNA, 19 nt, Homo sapiens
  misc_RNA (1)...(19): siRNA sense strand
ggaacgaggaugcaaauua

SEQ ID NO: 564443 - RNA, 19 nt, Homo sapiens
  misc_RNA (1)...(19): siRNA sense strand
gaacagguuucucuugcua

SEQ ID NO: 564444 - RNA, 19 nt, Homo sapiens
  misc_RNA (1)...(19): siRNA sense strand
caaauuauaugcugucgaa

SEQ ID NO: 564445 - RNA, 19 nt, Homo sapiens
  misc_RNA (1)...(19): siRNA sense strand
gagaacaugugcccaucua

SEQ ID NO: 564446 - RNA, 19 nt, Homo sapiens
  misc_RNA (1)...(19): siRNA sense strand
gaacaucaagucagccuaa

SEQ ID NO: 564447 - RNA, 19 nt, Homo sapiens
  misc_RNA (1)...(19): siRNA sense strand
gaacaugugcccaucuaug

SEQ ID NO: 564448 - RNA, 19 nt, Homo sapiens
  misc_RNA (1)...(19): siRNA sense strand
caucaagucagccuaauga

SEQ ID NO: 564449 - RNA, 19 nt, Homo sapiens
  misc_RNA (1)...(19): siRNA sense strand
gcuaaugagucuuuaucug

SEQ ID NO: 564450 - RNA, 19 nt, Homo sapiens
  misc_RNA (1)...(19): siRNA sense strand
ccauagaucaucaaacuuc

SEQ ID NO: 564451 - RNA, 19 nt, Homo sapiens
  misc_RNA (1)...(19): siRNA sense strand
uauaugcugucgaaaucaa

SEQ ID NO: 564452 - RNA, 19 nt, Homo sapiens
  misc_RNA (1)...(19): siRNA sense strand
agguuucucuugcuaauga

SEQ ID NO: 564453 - RNA, 19 nt, Homo sapiens
  misc_RNA (1)...(19): siRNA sense strand
cuccauagaucaucaaacu

SEQ ID NO: 564454 - RNA, 19 nt, Homo sapiens
  misc_RNA (1)...(19): siRNA sense strand
gcccaucuaugaaccucuu

SEQ ID NO: 564455 - RNA, 19 nt, Homo sapiens
  misc_RNA (1)...(19): siRNA sense strand
cauagaucaucaaacuuca

SEQ ID NO: 564456 - RNA, 19 nt, Homo sapiens
  misc_RNA (1)...(19): siRNA sense strand
ucaagggugugagaacaug

SEQ ID NO: 564457 - RNA, 19 nt, Homo sapiens
  misc_RNA (1)...(19): siRNA sense strand
gaaccucuucucccaugga

SEQ ID NO: 564458 - RNA, 19 nt, Homo sapiens
  misc_RNA (1)...(19): siRNA sense strand
auuauaugcugucgaaauc

SEQ ID NO: 564459 - RNA, 19 nt, Homo sapiens
  misc_RNA (1)...(19): siRNA sense strand
aacaugugcccaucuauga

SEQ ID NO: 564460 - RNA, 19 nt, Homo sapiens
  misc_RNA (1)...(19): siRNA sense strand
acagguuucucuugcuaau

SEQ ID NO: 564461 - RNA, 19 nt, Homo sapiens
  misc_RNA (1)...(19): siRNA sense strand
ccagaggaacaucaaguca

SEQ ID NO: 564462 - RNA, 19 nt, Homo sapiens
  misc_RNA (1)...(19): siRNA sense strand
gcugucgaaaucaaucuuu

SEQ ID NO: 564463 - RNA, 19 nt, Homo sapiens
  misc_RNA (1)...(19): siRNA sense strand
acgaggaugcaaauuauau

SEQ ID NO: 564464 - RNA, 19 nt, Homo sapiens
  misc_RNA (1)...(19): siRNA sense strand
cgaggaugcaaauuauaug

SEQ ID NO: 564465 - RNA, 19 nt, Homo sapiens
  misc_RNA (1)...(19): siRNA sense strand
cauggaacgaggaugcaaa

SEQ ID NO: 564466 - RNA, 19 nt, Homo sapiens
  misc_RNA (1)...(19): siRNA sense strand
gaacgaggaugcaaauuau

SEQ ID NO: 564467 - RNA, 19 nt, Homo sapiens
  misc_RNA (1)...(19): siRNA sense strand
ggaacgaggaugcaaauua

SEQ ID NO: 564468 - RNA, 19 nt, Homo sapiens
  misc_RNA (1)...(19): siRNA sense strand
gaacagguuucucuugcua

SEQ ID NO: 564469 - RNA, 19 nt, Homo sapiens
  misc_RNA (1)...(19): siRNA sense strand
caaauuauaugcugucgaa

SEQ ID NO: 564470 - RNA, 19 nt, Homo sapiens
  misc_RNA (1)...(19): siRNA sense strand
gagaacaugugcccaucua

SEQ ID NO: 564471 - RNA, 19 nt, Homo sapiens
  misc_RNA (1)...(19): siRNA sense strand
gaacaucaagucagccuaa

SEQ ID NO: 564472 - RNA, 19 nt, Homo sapiens
  misc_RNA (1)...(19): siRNA sense strand
gaacaugugcccaucuaug

SEQ ID NO: 564473 - RNA, 19 nt, Homo sapiens
  misc_RNA (1)...(19): siRNA sense strand
caucaagucagccuaauga

SEQ ID NO: 564474 - RNA, 19 nt, Homo sapiens
  misc_RNA (1)...(19): siRNA sense strand
gcuaaugagucuuuaucug

SEQ ID NO: 564475 - RNA, 19 nt, Homo sapiens
  misc_RNA (1)...(19): siRNA sense strand
ccauagaucaucaaacuuc

SEQ ID NO: 564476 - RNA, 19 nt, Homo sapiens
  misc_RNA (1)...(19): siRNA sense strand
uauaugcugucgaaaucaa

SEQ ID NO: 564477 - RNA, 19 nt, Homo sapiens
  misc_RNA (1)...(19): siRNA sense strand
agguuucucuugcuaauga

SEQ ID NO: 564478 - RNA, 19 nt, Homo sapiens
  misc_RNA (1)...(19): siRNA sense strand
cuccauagaucaucaaacu

SEQ ID NO: 564479 - RNA, 19 nt, Homo sapiens
  misc_RNA (1)...(19): siRNA sense strand
gcccaucuaugaaccucuu

SEQ ID NO: 564480 - RNA, 19 nt, Homo sapiens
  misc_RNA (1)...(19): siRNA sense strand
cauagaucaucaaacuuca

SEQ ID NO: 564481 - RNA, 19 nt, Homo sapiens
  misc_RNA (1)...(19): siRNA sense strand
ucaagggugugagaacaug

SEQ ID NO: 564482 - RNA, 19 nt, Homo sapiens
  misc_RNA (1)...(19): siRNA sense strand
gaaccucuucucccaugga

SEQ ID NO: 564483 - RNA, 19 nt, Homo sapiens
  misc_RNA (1)...(19): siRNA sense strand
auuauaugcugucgaaauc

SEQ ID NO: 564484 - RNA, 19 nt, Homo sapiens
  misc_RNA (1)...(19): siRNA sense strand
aacaugugcccaucuauga

SEQ ID NO: 564485 - RNA, 19 nt, Homo sapiens
  misc_RNA (1)...(19): siRNA sense strand
acagguuucucuugcuaau

SEQ ID NO: 564486 - RNA, 19 nt, Homo sapiens
  misc_RNA (1)...(19): siRNA sense strand
ccagaggaacaucaaguca

SEQ ID NO: 564487 - RNA, 19 nt, Homo sapiens
  misc_RNA (1)...(19): siRNA sense strand
gcugucgaaaucaaucuuu

SEQ ID NO: 564488 - RNA, 19 nt, Homo sapiens
  misc_RNA (1)...(19): siRNA sense strand
acgaggaugcaaauuauau

SEQ ID NO: 564489 - RNA, 19 nt, Homo sapiens
  misc_RNA (1)...(19): siRNA sense strand
cgaggaugcaaauuauaug

SEQ ID NO: 564490 - RNA, 19 nt, Homo sapiens
  misc_RNA (1)...(19): siRNA sense strand
cauggaacgaggaugcaaa

SEQ ID NO: 564491 - RNA, 19 nt, Homo sapiens
  misc_RNA (1)...(19): siRNA sense strand
gaacgaggaugcaaauuau

SEQ ID NO: 564492 - RNA, 19 nt, Homo sapiens
  misc_RNA (1)...(19): siRNA sense strand
ggaacgaggaugcaaauua

SEQ ID NO: 564493 - RNA, 19 nt, Homo sapiens
  misc_RNA (1)...(19): siRNA sense strand
gaacagguuucucuugcua

SEQ ID NO: 564494 - RNA, 19 nt, Homo sapiens
  misc_RNA (1)...(19): siRNA sense strand
caaauuauaugcugucgaa

SEQ ID NO: 564495 - RNA, 19 nt, Homo sapiens
  misc_RNA (1)...(19): siRNA sense strand
gagaacaugugcccaucua

SEQ ID NO: 564496 - RNA, 19 nt, Homo sapiens
  misc_RNA (1)...(19): siRNA sense strand
gaacaucaagucagccuaa

SEQ ID NO: 564497 - RNA, 19 nt, Homo sapiens
  misc_RNA (1)...(19): siRNA sense strand
gaacaugugcccaucuaug

SEQ ID NO: 564498 - RNA, 19 nt, Homo sapiens
  misc_RNA (1)...(19): siRNA sense strand
caucaagucagccuaauga

SEQ ID NO: 564499 - RNA, 19 nt, Homo sapiens
  misc_RNA (1)...(19): siRNA sense strand
gcuaaugagucuuuaucug

SEQ ID NO: 564500 - RNA, 19 nt, Homo sapiens
  misc_RNA (1)...(19): siRNA sense strand
ccauagaucaucaaacuuc

SEQ ID NO: 564501 - RNA, 19 nt, Homo sapiens
  misc_RNA (1)...(19): siRNA sense strand
uauaugcugucgaaaucaa

SEQ ID NO: 564502 - RNA, 19 nt, Homo sapiens
  misc_RNA (1)...(19): siRNA sense strand
agguuucucuugcuaauga

SEQ ID NO: 564503 - RNA, 19 nt, Homo sapiens
  misc_RNA (1)...(19): siRNA sense strand
cuccauagaucaucaaacu

SEQ ID NO: 564504 - RNA, 19 nt, Homo sapiens
  misc_RNA (1)...(19): siRNA sense strand
gcccaucuaugaaccucuu

SEQ ID NO: 564505 - RNA, 19 nt, Homo sapiens
  misc_RNA (1)...(19): siRNA sense strand
cauagaucaucaaacuuca

SEQ ID NO: 564506 - RNA, 19 nt, Homo sapiens
  misc_RNA (1)...(19): siRNA sense strand
ucaagggugugagaacaug

SEQ ID NO: 564507 - RNA, 19 nt, Homo sapiens
  misc_RNA (1)...(19): siRNA sense strand
gaaccucuucucccaugga

SEQ ID NO: 564508 - RNA, 19 nt, Homo sapiens
  misc_RNA (1)...(19): siRNA sense strand
auuauaugcugucgaaauc

SEQ ID NO: 564509 - RNA, 19 nt, Homo sapiens
  misc_RNA (1)...(19): siRNA sense strand
aacaugugcccaucuauga

SEQ ID NO: 564510 - RNA, 19 nt, Homo sapiens
  misc_RNA (1)...(19): siRNA sense strand
acagguuucucuugcuaau

SEQ ID NO: 564511 - RNA, 19 nt, Homo sapiens
  misc_RNA (1)...(19): siRNA sense strand
ccagaggaacaucaaguca

SEQ ID NO: 564512 - RNA, 19 nt, Homo sapiens
  misc_RNA (1)...(19): siRNA sense strand
gcugucgaaaucaaucuuu

SEQ ID NO: 564513 - RNA, 19 nt, Homo sapiens
  misc_RNA (1)...(19): siRNA sense strand
acgaggaugcaaauuauau

SEQ ID NO: 564514 - RNA, 19 nt, Homo sapiens
  misc_RNA (1)...(19): siRNA sense strand
cgaggaugcaaauuauaug

SEQ ID NO: 564515 - RNA, 19 nt, Homo sapiens
  misc_RNA (1)...(19): siRNA sense strand
cauggaacgaggaugcaaa

SEQ ID NO: 564516 - RNA, 19 nt, Homo sapiens
  misc_RNA (1)...(19): siRNA sense strand
gaacgaggaugcaaauuau

SEQ ID NO: 564517 - RNA, 19 nt, Homo sapiens
  misc_RNA (1)...(19): siRNA sense strand
ggaacgaggaugcaaauua

SEQ ID NO: 564518 - RNA, 19 nt, Homo sapiens
  misc_RNA (1)...(19): siRNA sense strand
gaacagguuucucuugcua

SEQ ID NO: 564519 - RNA, 19 nt, Homo sapiens
  misc_RNA (1)...(19): siRNA sense strand
caaauuauaugcugucgaa

SEQ ID NO: 564520 - RNA, 19 nt, Homo sapiens
  misc_RNA (1)...(19): siRNA sense strand
gagaacaugugcccaucua

SEQ ID NO: 564521 - RNA, 19 nt, Homo sapiens
  misc_RNA (1)...(19): siRNA sense strand
gaacaucaagucagccuaa

SEQ ID NO: 564522 - RNA, 19 nt, Homo sapiens
  misc_RNA (1)...(19): siRNA sense strand
gaacaugugcccaucuaug

SEQ ID NO: 564523 - RNA, 19 nt, Homo sapiens
  misc_RNA (1)...(19): siRNA sense strand
caucaagucagccuaauga

SEQ ID NO: 564524 - RNA, 19 nt, Homo sapiens
  misc_RNA (1)...(19): siRNA sense strand
gcuaaugagucuuuaucug

SEQ ID NO: 564525 - RNA, 19 nt, Homo sapiens
  misc_RNA (1)...(19): siRNA sense strand
ccauagaucaucaaacuuc

SEQ ID NO: 564526 - RNA, 19 nt, Homo sapiens
  misc_RNA (1)...(19): siRNA sense strand
uauaugcugucgaaaucaa

SEQ ID NO: 564527 - RNA, 19 nt, Homo sapiens
  misc_RNA (1)...(19): siRNA sense strand
agguuucucuugcuaauga

SEQ ID NO: 564528 - RNA, 19 nt, Homo sapiens
  misc_RNA (1)...(19): siRNA sense strand
cuccauagaucaucaaacu

SEQ ID NO: 564529 - RNA, 19 nt, Homo sapiens
  misc_RNA (1)...(19): siRNA sense strand
gcccaucuaugaaccucuu

SEQ ID NO: 564530 - RNA, 19 nt, Homo sapiens
  misc_RNA (1)...(19): siRNA sense strand
cauagaucaucaaacuuca

SEQ ID NO: 564531 - RNA, 19 nt, Homo sapiens
  misc_RNA (1)...(19): siRNA sense strand
ucaagggugugagaacaug

SEQ ID NO: 564532 - RNA, 19 nt, Homo sapiens
  misc_RNA (1)...(19): siRNA sense strand
gaaccucuucucccaugga

SEQ ID NO: 564533 - RNA, 19 nt, Homo sapiens
  misc_RNA (1)...(19): siRNA sense strand
auuauaugcugucgaaauc

SEQ ID NO: 564534 - RNA, 19 nt, Homo sapiens
  misc_RNA (1)...(19): siRNA sense strand
aacaugugcccaucuauga

SEQ ID NO: 564535 - RNA, 19 nt, Homo sapiens
  misc_RNA (1)...(19): siRNA sense strand
acagguuucucuugcuaau

SEQ ID NO: 564536 - RNA, 19 nt, Homo sapiens
  misc_RNA (1)...(19): siRNA sense strand
ccagaggaacaucaaguca

SEQ ID NO: 564537 - RNA, 19 nt, Homo sapiens
  misc_RNA (1)...(19): siRNA sense strand
gcugucgaaaucaaucuuu

SEQ ID NO: 564538 - RNA, 19 nt, Homo sapiens
  misc_RNA (1)...(19): siRNA sense strand
acgaggaugcaaauuauau

SEQ ID NO: 564539 - RNA, 19 nt, Homo sapiens
  misc_RNA (1)...(19): siRNA sense strand
cgaggaugcaaauuauaug

SEQ ID NO: 564540 - RNA, 19 nt, Homo sapiens
  misc_RNA (1)...(19): siRNA sense strand
cauggaacgaggaugcaaa

SEQ ID NO: 564541 - RNA, 19 nt, Homo sapiens
  misc_RNA (1)...(19): siRNA sense strand
gaacgaggaugcaaauuau

SEQ ID NO: 564542 - RNA, 19 nt, Homo sapiens
  misc_RNA (1)...(19): siRNA sense strand
ggaacgaggaugcaaauua

SEQ ID NO: 564543 - RNA, 19 nt, Homo sapiens
  misc_RNA (1)...(19): siRNA sense strand
gaacagguuucucuugcua

SEQ ID NO: 564544 - RNA, 19 nt, Homo sapiens
  misc_RNA (1)...(19): siRNA sense strand
caaauuauaugcugucgaa

SEQ ID NO: 564545 - RNA, 19 nt, Homo sapiens
  misc_RNA (1)...(19): siRNA sense strand
gagaacaugugcccaucua

SEQ ID NO: 564546 - RNA, 19 nt, Homo sapiens
  misc_RNA (1)...(19): siRNA sense strand
gaacaucaagucagccuaa

SEQ ID NO: 564547 - RNA, 19 nt, Homo sapiens
  misc_RNA (1)...(19): siRNA sense strand
gaacaugugcccaucuaug

SEQ ID NO: 564548 - RNA, 19 nt, Homo sapiens
  misc_RNA (1)...(19): siRNA sense strand
caucaagucagccuaauga

SEQ ID NO: 564549 - RNA, 19 nt, Homo sapiens
  misc_RNA (1)...(19): siRNA sense strand
gcuaaugagucuuuaucug

SEQ ID NO: 564550 - RNA, 19 nt, Homo sapiens
  misc_RNA (1)...(19): siRNA sense strand
ccauagaucaucaaacuuc

SEQ ID NO: 564551 - RNA, 19 nt, Homo sapiens
  misc_RNA (1)...(19): siRNA sense strand
uauaugcugucgaaaucaa

SEQ ID NO: 564552 - RNA, 19 nt, Homo sapiens
  misc_RNA (1)...(19): siRNA sense strand
agguuucucuugcuaauga

SEQ ID NO: 564553 - RNA, 19 nt, Homo sapiens
  misc_RNA (1)...(19): siRNA sense strand
cuccauagaucaucaaacu

SEQ ID NO: 564554 - RNA, 19 nt, Homo sapiens
  misc_RNA (1)...(19): siRNA sense strand
gcccaucuaugaaccucuu

SEQ ID NO: 564555 - RNA, 19 nt, Homo sapiens
  misc_RNA (1)...(19): siRNA sense strand
cauagaucaucaaacuuca

SEQ ID NO: 564556 - RNA, 19 nt, Homo sapiens
  misc_RNA (1)...(19): siRNA sense strand
ucaagggugugagaacaug

SEQ ID NO: 564557 - RNA, 19 nt, Homo sapiens
  misc_RNA (1)...(19): siRNA sense strand
gaaccucuucucccaugga

SEQ ID NO: 564558 - RNA, 19 nt, Homo sapiens
  misc_RNA (1)...(19): siRNA sense strand
auuauaugcugucgaaauc

SEQ ID NO: 564559 - RNA, 19 nt, Homo sapiens
  misc_RNA (1)...(19): siRNA sense strand
aacaugugcccaucuauga

SEQ ID NO: 564560 - RNA, 19 nt, Homo sapiens
  misc_RNA (1)...(19): siRNA sense strand
acagguuucucuugcuaau

SEQ ID NO: 564561 - RNA, 19 nt, Homo sapiens
  misc_RNA (1)...(19): siRNA sense strand
ccagaggaacaucaaguca

SEQ ID NO: 564562 - RNA, 19 nt, Homo sapiens
  misc_RNA (1)...(19): siRNA sense strand
gcugucgaaaucaaucuuu

SEQ ID NO: 564563 - RNA, 19 nt, Homo sapiens
  misc_RNA (1)...(19): siRNA sense strand
acgaggaugcaaauuauau

SEQ ID NO: 564564 - RNA, 19 nt, Homo sapiens
  misc_RNA (1)...(19): siRNA sense strand
cgaggaugcaaauuauaug

SEQ ID NO: 564565 - RNA, 19 nt, Homo sapiens
  misc_RNA (1)...(19): siRNA sense strand
cauggaacgaggaugcaaa

SEQ ID NO: 564566 - RNA, 19 nt, Homo sapiens
  misc_RNA (1)...(19): siRNA sense strand
gaacgaggaugcaaauuau

SEQ ID NO: 564567 - RNA, 19 nt, Homo sapiens
  misc_RNA (1)...(19): siRNA sense strand
ggaacgaggaugcaaauua

SEQ ID NO: 564568 - RNA, 19 nt, Homo sapiens
  misc_RNA (1)...(19): siRNA sense strand
gaacagguuucucuugcua

SEQ ID NO: 564569 - RNA, 19 nt, Homo sapiens
  misc_RNA (1)...(19): siRNA sense strand
caaauuauaugcugucgaa

SEQ ID NO: 564570 - RNA, 19 nt, Homo sapiens
  misc_RNA (1)...(19): siRNA sense strand
gagaacaugugcccaucua

SEQ ID NO: 564571 - RNA, 19 nt, Homo sapiens
  misc_RNA (1)...(19): siRNA sense strand
gaacaucaagucagccuaa

SEQ ID NO: 564572 - RNA, 19 nt, Homo sapiens
  misc_RNA (1)...(19): siRNA sense strand
gaacaugugcccaucuaug

SEQ ID NO: 564573 - RNA, 19 nt, Homo sapiens
  misc_RNA (1)...(19): siRNA sense strand
caucaagucagccuaauga

SEQ ID NO: 564574 - RNA, 19 nt, Homo sapiens
  misc_RNA (1)...(19): siRNA sense strand
gcuaaugagucuuuaucug

SEQ ID NO: 564575 - RNA, 19 nt, Homo sapiens
  misc_RNA (1)...(19): siRNA sense strand
ccauagaucaucaaacuuc

SEQ ID NO: 564576 - RNA, 19 nt, Homo sapiens
  misc_RNA (1)...(19): siRNA sense strand
uauaugcugucgaaaucaa

SEQ ID NO: 564577 - RNA, 19 nt, Homo sapiens
  misc_RNA (1)...(19): siRNA sense strand
agguuucucuugcuaauga

SEQ ID NO: 564578 - RNA, 19 nt, Homo sapiens
  misc_RNA (1)...(19): siRNA sense strand
cuccauagaucaucaaacu

SEQ ID NO: 564579 - RNA, 19 nt, Homo sapiens
  misc_RNA (1)...(19): siRNA sense strand
gcccaucuaugaaccucuu

SEQ ID NO: 564580 - RNA, 19 nt, Homo sapiens
  misc_RNA (1)...(19): siRNA sense strand
cauagaucaucaaacuuca

SEQ ID NO: 564581 - RNA, 19 nt, Homo sapiens
  misc_RNA (1)...(19): siRNA sense strand
ucaagggugugagaacaug

SEQ ID NO: 564582 - RNA, 19 nt, Homo sapiens
  misc_RNA (1)...(19): siRNA sense strand
gaaccucuucucccaugga

SEQ ID NO: 564583 - RNA, 19 nt, Homo sapiens
  misc_RNA (1)...(19): siRNA sense strand
auuauaugcugucgaaauc

SEQ ID NO: 564584 - RNA, 19 nt, Homo sapiens
  misc_RNA (1)...(19): siRNA sense strand
aacaugugcccaucuauga

SEQ ID NO: 564585 - RNA, 19 nt, Homo sapiens
  misc_RNA (1)...(19): siRNA sense strand
acagguuucucuugcuaau

SEQ ID NO: 564586 - RNA, 19 nt, Homo sapiens
  misc_RNA (1)...(19): siRNA sense strand
ccagaggaacaucaaguca

SEQ ID NO: 564587 - RNA, 19 nt, Homo sapiens
  misc_RNA (1)...(19): siRNA sense strand
gcugucgaaaucaaucuuu

SEQ ID NO: 564588 - RNA, 19 nt, Homo sapiens
  misc_RNA (1)...(19): siRNA sense strand
acgaggaugcaaauuauau

SEQ ID NO: 564589 - RNA, 19 nt, Homo sapiens
  misc_RNA (1)...(19): siRNA sense strand
cgaggaugcaaauuauaug

SEQ ID NO: 564590 - RNA, 19 nt, Homo sapiens
  misc_RNA (1)...(19): siRNA sense strand
cauggaacgaggaugcaaa

SEQ ID NO: 564591 - RNA, 19 nt, Homo sapiens
  misc_RNA (1)...(19): siRNA sense strand
gaacgaggaugcaaauuau

SEQ ID NO: 564592 - RNA, 19 nt, Homo sapiens
  misc_RNA (1)...(19): siRNA sense strand
ggaacgaggaugcaaauua

SEQ ID NO: 564593 - RNA, 19 nt, Homo sapiens
  misc_RNA (1)...(19): siRNA sense strand
gaacagguuucucuugcua

SEQ ID NO: 564594 - RNA, 19 nt, Homo sapiens
  misc_RNA (1)...(19): siRNA sense strand
caaauuauaugcugucgaa

SEQ ID NO: 564595 - RNA, 19 nt, Homo sapiens
  misc_RNA (1)...(19): siRNA sense strand
gagaacaugugcccaucua

SEQ ID NO: 564596 - RNA, 19 nt, Homo sapiens
  misc_RNA (1)...(19): siRNA sense strand
gaacaucaagucagccuaa

SEQ ID NO: 564597 - RNA, 19 nt, Homo sapiens
  misc_RNA (1)...(19): siRNA sense strand
gaacaugugcccaucuaug

SEQ ID NO: 564598 - RNA, 19 nt, Homo sapiens
  misc_RNA (1)...(19): siRNA sense strand
caucaagucagccuaauga

SEQ ID NO: 564599 - RNA, 19 nt, Homo sapiens
  misc_RNA (1)...(19): siRNA sense strand
gcuaaugagucuuuaucug

SEQ ID NO: 564600 - RNA, 19 nt, Homo sapiens
  misc_RNA (1)...(19): siRNA sense strand
ccauagaucaucaaacuuc

SEQ ID NO: 564601 - RNA, 19 nt, Homo sapiens
  misc_RNA (1)...(19): siRNA sense strand
uauaugcugucgaaaucaa

SEQ ID NO: 564602 - RNA, 19 nt, Homo sapiens
  misc_RNA (1)...(19): siRNA sense strand
agguuucucuugcuaauga

SEQ ID NO: 564603 - RNA, 19 nt, Homo sapiens
  misc_RNA (1)...(19): siRNA sense strand
cuccauagaucaucaaacu

SEQ ID NO: 564604 - RNA, 19 nt, Homo sapiens
  misc_RNA (1)...(19): siRNA sense strand
gcccaucuaugaaccucuu

SEQ ID NO: 564605 - RNA, 19 nt, Homo sapiens
  misc_RNA (1)...(19): siRNA sense strand
cauagaucaucaaacuuca

SEQ ID NO: 564606 - RNA, 19 nt, Homo sapiens
  misc_RNA (1)...(19): siRNA sense strand
ucaagggugugagaacaug

SEQ ID NO: 564607 - RNA, 19 nt, Homo sapiens
  misc_RNA (1)...(19): siRNA sense strand
gaaccucuucucccaugga

SEQ ID NO: 564608 - RNA, 19 nt, Homo sapiens
  misc_RNA (1)...(19): siRNA sense strand
auuauaugcugucgaaauc

SEQ ID NO: 564609 - RNA, 19 nt, Homo sapiens
  misc_RNA (1)...(19): siRNA sense strand
aacaugugcccaucuauga

SEQ ID NO: 564610 - RNA, 19 nt, Homo sapiens
  misc_RNA (1)...(19): siRNA sense strand
acagguuucucuugcuaau

SEQ ID NO: 564611 - RNA, 19 nt, Homo sapiens
  misc_RNA (1)...(19): siRNA sense strand
ccagaggaacaucaaguca

SEQ ID NO: 564612 - RNA, 19 nt, Homo sapiens
  misc_RNA (1)...(19): siRNA sense strand
gcugucgaaaucaaucuuu

SEQ ID NO: 564613 - RNA, 19 nt, Homo sapiens
  misc_RNA (1)...(19): siRNA sense strand
acgaggaugcaaauuauau

SEQ ID NO: 564614 - RNA, 19 nt, Homo sapiens
  misc_RNA (1)...(19): siRNA sense strand
cgaggaugcaaauuauaug

SEQ ID NO: 564615 - RNA, 19 nt, Homo sapiens
  misc_RNA (1)...(19): siRNA sense strand
cauggaacgaggaugcaaa

SEQ ID NO: 564616 - RNA, 19 nt, Homo sapiens
  misc_RNA (1)...(19): siRNA sense strand
gaacgaggaugcaaauuau

SEQ ID NO: 564617 - RNA, 19 nt, Homo sapiens
  misc_RNA (1)...(19): siRNA sense strand
ggaacgaggaugcaaauua

SEQ ID NO: 564618 - RNA, 19 nt, Homo sapiens
  misc_RNA (1)...(19): siRNA sense strand
gaacagguuucucuugcua

SEQ ID NO: 564619 - RNA, 19 nt, Homo sapiens
  misc_RNA (1)...(19): siRNA sense strand
caaauuauaugcugucgaa

SEQ ID NO: 564620 - RNA, 19 nt, Homo sapiens
  misc_RNA (1)...(19): siRNA sense strand
gagaacaugugcccaucua

SEQ ID NO: 564621 - RNA, 19 nt, Homo sapiens
  misc_RNA (1)...(19): siRNA sense strand
gaacaucaagucagccuaa

SEQ ID NO: 564622 - RNA, 19 nt, Homo sapiens
  misc_RNA (1)...(19): siRNA sense strand
gaacaugugcccaucuaug

SEQ ID NO: 564623 - RNA, 19 nt, Homo sapiens
  misc_RNA (1)...(19): siRNA sense strand
caucaagucagccuaauga

SEQ ID NO: 564624 - RNA, 19 nt, Homo sapiens
  misc_RNA (1)...(19): siRNA sense strand
gcuaaugagucuuuaucug

SEQ ID NO: 564625 - RNA, 19 nt, Homo sapiens
  misc_RNA (1)...(19): siRNA sense strand
ccauagaucaucaaacuuc

SEQ ID NO: 564626 - RNA, 19 nt, Homo sapiens
  misc_RNA (1)...(19): siRNA sense strand
uauaugcugucgaaaucaa

SEQ ID NO: 564627 - RNA, 19 nt, Homo sapiens
  misc_RNA (1)...(19): siRNA sense strand
agguuucucuugcuaauga

SEQ ID NO: 564628 - RNA, 19 nt, Homo sapiens
  misc_RNA (1)...(19): siRNA sense strand
cuccauagaucaucaaacu

SEQ ID NO: 564629 - RNA, 19 nt, Homo sapiens
  misc_RNA (1)...(19): siRNA sense strand
gcccaucuaugaaccucuu

SEQ ID NO: 564630 - RNA, 19 nt, Homo sapiens
  misc_RNA (1)...(19): siRNA sense strand
cauagaucaucaaacuuca

SEQ ID NO: 564631 - RNA, 19 nt, Homo sapiens
  misc_RNA (1)...(19): siRNA sense strand
ucaagggugugagaacaug

SEQ ID NO: 564632 - RNA, 19 nt, Homo sapiens
  misc_RNA (1)...(19): siRNA sense strand
gaaccucuucucccaugga

SEQ ID NO: 564633 - RNA, 19 nt, Homo sapiens
  misc_RNA (1)...(19): siRNA sense strand
auuauaugcugucgaaauc

SEQ ID NO: 564634 - RNA, 19 nt, Homo sapiens
  misc_RNA (1)...(19): siRNA sense strand
aacaugugcccaucuauga

SEQ ID NO: 564635 - RNA, 19 nt, Homo sapiens
  misc_RNA (1)...(19): siRNA sense strand
acagguuucucuugcuaau

SEQ ID NO: 564636 - RNA, 19 nt, Homo sapiens
  misc_RNA (1)...(19): siRNA sense strand
ccagaggaacaucaaguca

SEQ ID NO: 564637 - RNA, 19 nt, Homo sapiens
  misc_RNA (1)...(19): siRNA sense strand
gcugucgaaaucaaucuuu

SEQ ID NO: 564638 - RNA, 19 nt, Homo sapiens
  misc_RNA (1)...(19): siRNA sense strand
acgaggaugcaaauuauau

SEQ ID NO: 564639 - RNA, 19 nt, Homo sapiens
  misc_RNA (1)...(19): siRNA sense strand
cgaggaugcaaauuauaug

SEQ ID NO: 564640 - RNA, 19 nt, Homo sapiens
  misc_RNA (1)...(19): siRNA sense strand
cauggaacgaggaugcaaa

SEQ ID NO: 564641 - RNA, 19 nt, Homo sapiens
  misc_RNA (1)...(19): siRNA sense strand
gaacgaggaugcaaauuau

SEQ ID NO: 564642 - RNA, 19 nt, Homo sapiens
  misc_RNA (1)...(19): siRNA sense strand
ggaacgaggaugcaaauua

SEQ ID NO: 564643 - RNA, 19 nt, Homo sapiens
  misc_RNA (1)...(19): siRNA sense strand
gaacagguuucucuugcua

SEQ ID NO: 564644 - RNA, 19 nt, Homo sapiens
  misc_RNA (1)...(19): siRNA sense strand
caaauuauaugcugucgaa

SEQ ID NO: 564645 - RNA, 19 nt, Homo sapiens
  misc_RNA (1)...(19): siRNA sense strand
gagaacaugugcccaucua

SEQ ID NO: 564646 - RNA, 19 nt, Homo sapiens
  misc_RNA (1)...(19): siRNA sense strand
gaacaucaagucagccuaa

SEQ ID NO: 564647 - RNA, 19 nt, Homo sapiens
  misc_RNA (1)...(19): siRNA sense strand
gaacaugugcccaucuaug

SEQ ID NO: 564648 - RNA, 19 nt, Homo sapiens
  misc_RNA (1)...(19): siRNA sense strand
caucaagucagccuaauga

SEQ ID NO: 564649 - RNA, 19 nt, Homo sapiens
  misc_RNA (1)...(19): siRNA sense strand
gcuaaugagucuuuaucug

SEQ ID NO: 564650 - RNA, 19 nt, Homo sapiens
  misc_RNA (1)...(19): siRNA sense strand
ccauagaucaucaaacuuc

SEQ ID NO: 564651 - RNA, 19 nt, Homo sapiens
  misc_RNA (1)...(19): siRNA sense strand
uauaugcugucgaaaucaa

SEQ ID NO: 564652 - RNA, 19 nt, Homo sapiens
  misc_RNA (1)...(19): siRNA sense strand
agguuucucuugcuaauga

SEQ ID NO: 564653 - RNA, 19 nt, Homo sapiens
  misc_RNA (1)...(19): siRNA sense strand
cuccauagaucaucaaacu

SEQ ID NO: 564654 - RNA, 19 nt, Homo sapiens
  misc_RNA (1)...(19): siRNA sense strand
gcccaucuaugaaccucuu

SEQ ID NO: 564655 - RNA, 19 nt, Homo sapiens
  misc_RNA (1)...(19): siRNA sense strand
cauagaucaucaaacuuca

SEQ ID NO: 564656 - RNA, 19 nt, Homo sapiens
  misc_RNA (1)...(19): siRNA sense strand
ucaagggugugagaacaug

SEQ ID NO: 564657 - RNA, 19 nt, Homo sapiens
  misc_RNA (1)...(19): siRNA sense strand
gaaccucuucucccaugga

SEQ ID NO: 564658 - RNA, 19 nt, Homo sapiens
  misc_RNA (1)...(19): siRNA sense strand
auuauaugcugucgaaauc

SEQ ID NO: 564659 - RNA, 19 nt, Homo sapiens
  misc_RNA (1)...(19): siRNA sense strand
aacaugugcccaucuauga

SEQ ID NO: 564660 - RNA, 19 nt, Homo sapiens
  misc_RNA (1)...(19): siRNA sense strand
acagguuucucuugcuaau

SEQ ID NO: 564661 - RNA, 19 nt, Homo sapiens
  misc_RNA (1)...(19): siRNA sense strand
ccagaggaacaucaaguca

SEQ ID NO: 564662 - RNA, 19 nt, Homo sapiens
  misc_RNA (1)...(19): siRNA sense strand
gcugucgaaaucaaucuuu

SEQ ID NO: 564663 - RNA, 19 nt, Homo sapiens
  misc_RNA (1)...(19): siRNA sense strand
acgaggaugcaaauuauau

SEQ ID NO: 564664 - RNA, 19 nt, Homo sapiens
  misc_RNA (1)...(19): siRNA sense strand
cgaggaugcaaauuauaug

SEQ ID NO: 564665 - RNA, 19 nt, Homo sapiens
  misc_RNA (1)...(19): siRNA sense strand
cauggaacgaggaugcaaa

SEQ ID NO: 564666 - RNA, 19 nt, Homo sapiens
  misc_RNA (1)...(19): siRNA sense strand
gaacgaggaugcaaauuau

SEQ ID NO: 564667 - RNA, 19 nt, Homo sapiens
  misc_RNA (1)...(19): siRNA sense strand
ggaacgaggaugcaaauua

SEQ ID NO: 564668 - RNA, 19 nt, Homo sapiens
  misc_RNA (1)...(19): siRNA sense strand
gaacagguuucucuugcua

SEQ ID NO: 564669 - RNA, 19 nt, Homo sapiens
  misc_RNA (1)...(19): siRNA sense strand
caaauuauaugcugucgaa

SEQ ID NO: 564670 - RNA, 19 nt, Homo sapiens
  misc_RNA (1)...(19): siRNA sense strand
gagaacaugugcccaucua

SEQ ID NO: 564671 - RNA, 19 nt, Homo sapiens
  misc_RNA (1)...(19): siRNA sense strand
gaacaucaagucagccuaa

SEQ ID NO: 564672 - RNA, 19 nt, Homo sapiens
  misc_RNA (1)...(19): siRNA sense strand
gaacaugugcccaucuaug

SEQ ID NO: 564673 - RNA, 19 nt, Homo sapiens
  misc_RNA (1)...(19): siRNA sense strand
caucaagucagccuaauga

SEQ ID NO: 564674 - RNA, 19 nt, Homo sapiens
  misc_RNA (1)...(19): siRNA sense strand
gcuaaugagucuuuaucug

SEQ ID NO: 564675 - RNA, 19 nt, Homo sapiens
  misc_RNA (1)...(19): siRNA sense strand
ccauagaucaucaaacuuc

SEQ ID NO: 564676 - RNA, 19 nt, Homo sapiens
  misc_RNA (1)...(19): siRNA sense strand
uauaugcugucgaaaucaa

SEQ ID NO: 564677 - RNA, 19 nt, Homo sapiens
  misc_RNA (1)...(19): siRNA sense strand
agguuucucuugcuaauga

SEQ ID NO: 564678 - RNA, 19 nt, Homo sapiens
  misc_RNA (1)...(19): siRNA sense strand
cuccauagaucaucaaacu

SEQ ID NO: 564679 - RNA, 19 nt, Homo sapiens
  misc_RNA (1)...(19): siRNA sense strand
gcccaucuaugaaccucuu

SEQ ID NO: 564680 - RNA, 19 nt, Homo sapiens
  misc_RNA (1)...(19): siRNA sense strand
cauagaucaucaaacuuca

SEQ ID NO: 564681 - RNA, 19 nt, Homo sapiens
  misc_RNA (1)...(19): siRNA sense strand
ucaagggugugagaacaug

SEQ ID NO: 564682 - RNA, 19 nt, Homo sapiens
  misc_RNA (1)...(19): siRNA sense strand
gaaccucuucucccaugga

SEQ ID NO: 564683 - RNA, 19 nt, Homo sapiens
  misc_RNA (1)...(19): siRNA sense strand
auuauaugcugucgaaauc

SEQ ID NO: 564684 - RNA, 19 nt, Homo sapiens
  misc_RNA (1)...(19): siRNA sense strand
aacaugugcccaucuauga

SEQ ID NO: 564685 - RNA, 19 nt, Homo sapiens
  misc_RNA (1)...(19): siRNA sense strand
acagguuucucuugcuaau

SEQ ID NO: 564686 - RNA, 19 nt, Homo sapiens
  misc_RNA (1)...(19): siRNA sense strand
ccagaggaacaucaaguca

SEQ ID NO: 564687 - RNA, 19 nt, Homo sapiens
  misc_RNA (1)...(19): siRNA sense strand
gcugucgaaaucaaucuuu

SEQ ID NO: 564688 - RNA, 19 nt, Homo sapiens
  misc_RNA (1)...(19): siRNA sense strand
acgaggaugcaaauuauau

SEQ ID NO: 564689 - RNA, 19 nt, Homo sapiens
  misc_RNA (1)...(19): siRNA sense strand
cgaggaugcaaauuauaug

SEQ ID NO: 564690 - RNA, 19 nt, Homo sapiens
  misc_RNA (1)...(19): siRNA sense strand
cauggaacgaggaugcaaa

SEQ ID NO: 564691 - RNA, 19 nt, Homo sapiens
  misc_RNA (1)...(19): siRNA sense strand
gaacgaggaugcaaauuau

SEQ ID NO: 564692 - RNA, 19 nt, Homo sapiens
  misc_RNA (1)...(19): siRNA sense strand
ggaacgaggaugcaaauua

SEQ ID NO: 564693 - RNA, 19 nt, Homo sapiens
  misc_RNA (1)...(19): siRNA sense strand
gaacagguuucucuugcua

SEQ ID NO: 564694 - RNA, 19 nt, Homo sapiens
  misc_RNA (1)...(19): siRNA sense strand
caaauuauaugcugucgaa

SEQ ID NO: 564695 - RNA, 19 nt, Homo sapiens
  misc_RNA (1)...(19): siRNA sense strand
gagaacaugugcccaucua

SEQ ID NO: 564696 - RNA, 19 nt, Homo sapiens
  misc_RNA (1)...(19): siRNA sense strand
gaacaucaagucagccuaa

SEQ ID NO: 564697 - RNA, 19 nt, Homo sapiens
  misc_RNA (1)...(19): siRNA sense strand
gaacaugugcccaucuaug

SEQ ID NO: 564698 - RNA, 19 nt, Homo sapiens
  misc_RNA (1)...(19): siRNA sense strand
caucaagucagccuaauga

SEQ ID NO: 564699 - RNA, 19 nt, Homo sapiens
  misc_RNA (1)...(19): siRNA sense strand
gcuaaugagucuuuaucug

SEQ ID NO: 564700 - RNA, 19 nt, Homo sapiens
  misc_RNA (1)...(19): siRNA sense strand
ccauagaucaucaaacuuc

SEQ ID NO: 564701 - RNA, 19 nt, Homo sapiens
  misc_RNA (1)...(19): siRNA sense strand
uauaugcugucgaaaucaa

SEQ ID NO: 564702 - RNA, 19 nt, Homo sapiens
  misc_RNA (1)...(19): siRNA sense strand
agguuucucuugcuaauga

SEQ ID NO: 564703 - RNA, 19 nt, Homo sapiens
  misc_RNA (1)...(19): siRNA sense strand
cuccauagaucaucaaacu

SEQ ID NO: 564704 - RNA, 19 nt, Homo sapiens
  misc_RNA (1)...(19): siRNA sense strand
gcccaucuaugaaccucuu

SEQ ID NO: 564705 - RNA, 19 nt, Homo sapiens
  misc_RNA (1)...(19): siRNA sense strand
cauagaucaucaaacuuca

SEQ ID NO: 564706 - RNA, 19 nt, Homo sapiens
  misc_RNA (1)...(19): siRNA sense strand
ucaagggugugagaacaug

SEQ ID NO: 564707 - RNA, 19 nt, Homo sapiens
  misc_RNA (1)...(19): siRNA sense strand
gaaccucuucucccaugga

SEQ ID NO: 564708 - RNA, 19 nt, Homo sapiens
  misc_RNA (1)...(19): siRNA sense strand
auuauaugcugucgaaauc

SEQ ID NO: 564709 - RNA, 19 nt, Homo sapiens
  misc_RNA (1)...(19): siRNA sense strand
aacaugugcccaucuauga

SEQ ID NO: 564710 - RNA, 19 nt, Homo sapiens
  misc_RNA (1)...(19): siRNA sense strand
acagguuucucuugcuaau

SEQ ID NO: 564711 - RNA, 19 nt, Homo sapiens
  misc_RNA (1)...(19): siRNA sense strand
ccagaggaacaucaaguca

SEQ ID NO: 564712 - RNA, 19 nt, Homo sapiens
  misc_RNA (1)...(19): siRNA sense strand
gcugucgaaaucaaucuuu

SEQ ID NO: 564713 - RNA, 19 nt, Homo sapiens
  misc_RNA (1)...(19): siRNA sense strand
acgaggaugcaaauuauau

SEQ ID NO: 564714 - RNA, 19 nt, Homo sapiens
  misc_RNA (1)...(19): siRNA sense strand
cgaggaugcaaauuauaug

SEQ ID NO: 564715 - RNA, 19 nt, Homo sapiens
  misc_RNA (1)...(19): siRNA sense strand
cauggaacgaggaugcaaa

SEQ ID NO: 564716 - RNA, 19 nt, Homo sapiens
  misc_RNA (1)...(19): siRNA sense strand
gaacgaggaugcaaauuau

SEQ ID NO: 564717 - RNA, 19 nt, Homo sapiens
  misc_RNA (1)...(19): siRNA sense strand
ggaacgaggaugcaaauua

SEQ ID NO: 564718 - RNA, 19 nt, Homo sapiens
  misc_RNA (1)...(19): siRNA sense strand
gaacagguuucucuugcua

SEQ ID NO: 564719 - RNA, 19 nt, Homo sapiens
  misc_RNA (1)...(19): siRNA sense strand
caaauuauaugcugucgaa

SEQ ID NO: 564720 - RNA, 19 nt, Homo sapiens
  misc_RNA (1)...(19): siRNA sense strand
gagaacaugugcccaucua

SEQ ID NO: 564721 - RNA, 19 nt, Homo sapiens
  misc_RNA (1)...(19): siRNA sense strand
gaacaucaagucagccuaa

SEQ ID NO: 564722 - RNA, 19 nt, Homo sapiens
  misc_RNA (1)...(19): siRNA sense strand
gaacaugugcccaucuaug

SEQ ID NO: 564723 - RNA, 19 nt, Homo sapiens
  misc_RNA (1)...(19): siRNA sense strand
caucaagucagccuaauga

SEQ ID NO: 564724 - RNA, 19 nt, Homo sapiens
  misc_RNA (1)...(19): siRNA sense strand
gcuaaugagucuuuaucug

SEQ ID NO: 564725 - RNA, 19 nt, Homo sapiens
  misc_RNA (1)...(19): siRNA sense strand
ccauagaucaucaaacuuc

SEQ ID NO: 564726 - RNA, 19 nt, Homo sapiens
  misc_RNA (1)...(19): siRNA sense strand
uauaugcugucgaaaucaa

SEQ ID NO: 564727 - RNA, 19 nt, Homo sapiens
  misc_RNA (1)...(19): siRNA sense strand
agguuucucuugcuaauga

SEQ ID NO: 564728 - RNA, 19 nt, Homo sapiens
  misc_RNA (1)...(19): siRNA sense strand
cuccauagaucaucaaacu

SEQ ID NO: 564729 - RNA, 19 nt, Homo sapiens
  misc_RNA (1)...(19): siRNA sense strand
gcccaucuaugaaccucuu

SEQ ID NO: 564730 - RNA, 19 nt, Homo sapiens
  misc_RNA (1)...(19): siRNA sense strand
cauagaucaucaaacuuca

SEQ ID NO: 564731 - RNA, 19 nt, Homo sapiens
  misc_RNA (1)...(19): siRNA sense strand
ucaagggugugagaacaug

SEQ ID NO: 564732 - RNA, 19 nt, Homo sapiens
  misc_RNA (1)...(19): siRNA sense strand
gaaccucuucucccaugga

SEQ ID NO: 564733 - RNA, 19 nt, Homo sapiens
  misc_RNA (1)...(19): siRNA sense strand
auuauaugcugucgaaauc

SEQ ID NO: 564734 - RNA, 19 nt, Homo sapiens
  misc_RNA (1)...(19): siRNA sense strand
aacaugugcccaucuauga

SEQ ID NO: 564735 - RNA, 19 nt, Homo sapiens
  misc_RNA (1)...(19): siRNA sense strand
acagguuucucuugcuaau

SEQ ID NO: 564736 - RNA, 19 nt, Homo sapiens
  misc_RNA (1)...(19): siRNA sense strand
ccagaggaacaucaaguca

SEQ ID NO: 564737 - RNA, 19 nt, Homo sapiens
  misc_RNA (1)...(19): siRNA sense strand
gcugucgaaaucaaucuuu

SEQ ID NO: 564738 - RNA, 19 nt, Homo sapiens
  misc_RNA (1)...(19): siRNA sense strand
acgaggaugcaaauuauau

SEQ ID NO: 564739 - RNA, 19 nt, Homo sapiens
  misc_RNA (1)...(19): siRNA sense strand
cgaggaugcaaauuauaug

SEQ ID NO: 564740 - RNA, 19 nt, Homo sapiens
  misc_RNA (1)...(19): siRNA sense strand
cauggaacgaggaugcaaa

SEQ ID NO: 564741 - RNA, 19 nt, Homo sapiens
  misc_RNA (1)...(19): siRNA sense strand
gaacgaggaugcaaauuau

SEQ ID NO: 564742 - RNA, 19 nt, Homo sapiens
  misc_RNA (1)...(19): siRNA sense strand
ggaacgaggaugcaaauua

SEQ ID NO: 564743 - RNA, 19 nt, Homo sapiens
  misc_RNA (1)...(19): siRNA sense strand
gaacagguuucucuugcua

SEQ ID NO: 564744 - RNA, 19 nt, Homo sapiens
  misc_RNA (1)...(19): siRNA sense strand
caaauuauaugcugucgaa

SEQ ID NO: 564745 - RNA, 19 nt, Homo sapiens
  misc_RNA (1)...(19): siRNA sense strand
gagaacaugugcccaucua

SEQ ID NO: 564746 - RNA, 19 nt, Homo sapiens
  misc_RNA (1)...(19): siRNA sense strand
gaacaucaagucagccuaa

SEQ ID NO: 564747 - RNA, 19 nt, Homo sapiens
  misc_RNA (1)...(19): siRNA sense strand
gaacaugugcccaucuaug

SEQ ID NO: 564748 - RNA, 19 nt, Homo sapiens
  misc_RNA (1)...(19): siRNA sense strand
caucaagucagccuaauga

SEQ ID NO: 564749 - RNA, 19 nt, Homo sapiens
  misc_RNA (1)...(19): siRNA sense strand
gcuaaugagucuuuaucug

SEQ ID NO: 564750 - RNA, 19 nt, Homo sapiens
  misc_RNA (1)...(19): siRNA sense strand
ccauagaucaucaaacuuc

SEQ ID NO: 564751 - RNA, 19 nt, Homo sapiens
  misc_RNA (1)...(19): siRNA sense strand
uauaugcugucgaaaucaa

SEQ ID NO: 564752 - RNA, 19 nt, Homo sapiens
  misc_RNA (1)...(19): siRNA sense strand
agguuucucuugcuaauga

SEQ ID NO: 564753 - RNA, 19 nt, Homo sapiens
  misc_RNA (1)...(19): siRNA sense strand
cuccauagaucaucaaacu

SEQ ID NO: 564754 - RNA, 19 nt, Homo sapiens
  misc_RNA (1)...(19): siRNA sense strand
gcccaucuaugaaccucuu

SEQ ID NO: 564755 - RNA, 19 nt, Homo sapiens
  misc_RNA (1)...(19): siRNA sense strand
cauagaucaucaaacuuca

SEQ ID NO: 564756 - RNA, 19 nt, Homo sapiens
  misc_RNA (1)...(19): siRNA sense strand
ucaagggugugagaacaug

SEQ ID NO: 564757 - RNA, 19 nt, Homo sapiens
  misc_RNA (1)...(19): siRNA sense strand
gaaccucuucucccaugga

SEQ ID NO: 564758 - RNA, 19 nt, Homo sapiens
  misc_RNA (1)...(19): siRNA sense strand
auuauaugcugucgaaauc

SEQ ID NO: 564759 - RNA, 19 nt, Homo sapiens
  misc_RNA (1)...(19): siRNA sense strand
aacaugugcccaucuauga

SEQ ID NO: 564760 - RNA, 19 nt, Homo sapiens
  misc_RNA (1)...(19): siRNA sense strand
acagguuucucuugcuaau

SEQ ID NO: 564761 - RNA, 19 nt, Homo sapiens
  misc_RNA (1)...(19): siRNA sense strand
ccagaggaacaucaaguca

SEQ ID NO: 564762 - RNA, 19 nt, Homo sapiens
  misc_RNA (1)...(19): siRNA sense strand
gcugucgaaaucaaucuuu

SEQ ID NO: 564763 - RNA, 19 nt, Homo sapiens
  misc_RNA (1)...(19): siRNA sense strand
acgaggaugcaaauuauau

SEQ ID NO: 564764 - RNA, 19 nt, Homo sapiens
  misc_RNA (1)...(19): siRNA sense strand
cgaggaugcaaauuauaug

SEQ ID NO: 564765 - RNA, 19 nt, Homo sapiens
  misc_RNA (1)...(19): siRNA sense strand
cauggaacgaggaugcaaa

SEQ ID NO: 564766 - RNA, 19 nt, Homo sapiens
  misc_RNA (1)...(19): siRNA sense strand
gaacgaggaugcaaauuau

SEQ ID NO: 564767 - RNA, 19 nt, Homo sapiens
  misc_RNA (1)...(19): siRNA sense strand
ggaacgaggaugcaaauua

SEQ ID NO: 564768 - RNA, 19 nt, Homo sapiens
  misc_RNA (1)...(19): siRNA sense strand
gaacagguuucucuugcua

SEQ ID NO: 564769 - RNA, 19 nt, Homo sapiens
  misc_RNA (1)...(19): siRNA sense strand
caaauuauaugcugucgaa

SEQ ID NO: 564770 - RNA, 19 nt, Homo sapiens
  misc_RNA (1)...(19): siRNA sense strand
gagaacaugugcccaucua

SEQ ID NO: 564771 - RNA, 19 nt, Homo sapiens
  misc_RNA (1)...(19): siRNA sense strand
gaacaucaagucagccuaa

SEQ ID NO: 564772 - RNA, 19 nt, Homo sapiens
  misc_RNA (1)...(19): siRNA sense strand
gaacaugugcccaucuaug

SEQ ID NO: 564773 - RNA, 19 nt, Homo sapiens
  misc_RNA (1)...(19): siRNA sense strand
caucaagucagccuaauga

SEQ ID NO: 564774 - RNA, 19 nt, Homo sapiens
  misc_RNA (1)...(19): siRNA sense strand
gcuaaugagucuuuaucug

SEQ ID NO: 564775 - RNA, 19 nt, Homo sapiens
  misc_RNA (1)...(19): siRNA sense strand
ccauagaucaucaaacuuc

SEQ ID NO: 564776 - RNA, 19 nt, Homo sapiens
  misc_RNA (1)...(19): siRNA sense strand
uauaugcugucgaaaucaa

SEQ ID NO: 564777 - RNA, 19 nt, Homo sapiens
  misc_RNA (1)...(19): siRNA sense strand
agguuucucuugcuaauga

SEQ ID NO: 564778 - RNA, 19 nt, Homo sapiens
  misc_RNA (1)...(19): siRNA sense strand
cuccauagaucaucaaacu

SEQ ID NO: 564779 - RNA, 19 nt, Homo sapiens
  misc_RNA (1)...(19): siRNA sense strand
gcccaucuaugaaccucuu

SEQ ID NO: 564780 - RNA, 19 nt, Homo sapiens
  misc_RNA (1)...(19): siRNA sense strand
cauagaucaucaaacuuca

SEQ ID NO: 564781 - RNA, 19 nt, Homo sapiens
  misc_RNA (1)...(19): siRNA sense strand
ucaagggugugagaacaug

SEQ ID NO: 564782 - RNA, 19 nt, Homo sapiens
  misc_RNA (1)...(19): siRNA sense strand
gaaccucuucucccaugga

SEQ ID NO: 564783 - RNA, 19 nt, Homo sapiens
  misc_RNA (1)...(19): siRNA sense strand
auuauaugcugucgaaauc

SEQ ID NO: 564784 - RNA, 19 nt, Homo sapiens
  misc_RNA (1)...(19): siRNA sense strand
aacaugugcccaucuauga

SEQ ID NO: 564785 - RNA, 19 nt, Homo sapiens
  misc_RNA (1)...(19): siRNA sense strand
acagguuucucuugcuaau

SEQ ID NO: 564786 - RNA, 19 nt, Homo sapiens
  misc_RNA (1)...(19): siRNA sense strand
ccagaggaacaucaaguca

SEQ ID NO: 564787 - RNA, 19 nt, Homo sapiens
  misc_RNA (1)...(19): siRNA sense strand
gcugucgaaaucaaucuuu

SEQ ID NO: 564788 - RNA, 19 nt, Homo sapiens
  misc_RNA (1)...(19): siRNA sense strand
acgaggaugcaaauuauau

SEQ ID NO: 564789 - RNA, 19 nt, Homo sapiens
  misc_RNA (1)...(19): siRNA sense strand
cgaggaugcaaauuauaug

SEQ ID NO: 564790 - RNA, 19 nt, Homo sapiens
  misc_RNA (1)...(19): siRNA sense strand
cauggaacgaggaugcaaa

SEQ ID NO: 564791 - RNA, 19 nt, Homo sapiens
  misc_RNA (1)...(19): siRNA sense strand
ggacgaggaucuucuauuu

SEQ ID NO: 564792 - RNA, 19 nt, Homo sapiens
  misc_RNA (1)...(19): siRNA sense strand
ggaugaagcuauuaagaua

SEQ ID NO: 564793 - RNA, 19 nt, Homo sapiens
  misc_RNA (1)...(19): siRNA sense strand
gaagaaagauaauguagca

SEQ ID NO: 564794 - RNA, 19 nt, Homo sapiens
  misc_RNA (1)...(19): siRNA sense strand
gaagaguucuauagguuaa

SEQ ID NO: 564795 - RNA, 19 nt, Homo sapiens
  misc_RNA (1)...(19): siRNA sense strand
guuaugaacugacugguuu

SEQ ID NO: 564796 - RNA, 19 nt, Homo sapiens
  misc_RNA (1)...(19): siRNA sense strand
gggaacaguuggcuaaauu

SEQ ID NO: 564797 - RNA, 19 nt, Homo sapiens
  misc_RNA (1)...(19): siRNA sense strand
gcaggugacuucagcacua

SEQ ID NO: 564798 - RNA, 19 nt, Homo sapiens
  misc_RNA (1)...(19): siRNA sense strand
cgacagauccuaaagaaga

SEQ ID NO: 564799 - RNA, 19 nt, Homo sapiens
  misc_RNA (1)...(19): siRNA sense strand
gaacaguuggcuaaauuaa

SEQ ID NO: 564800 - RNA, 19 nt, Homo sapiens
  misc_RNA (1)...(19): siRNA sense strand
gaacguacucuugcuuaua

SEQ ID NO: 564801 - RNA, 19 nt, Homo sapiens
  misc_RNA (1)...(19): siRNA sense strand
gagaaggacuuggagcaaa

SEQ ID NO: 564802 - RNA, 19 nt, Homo sapiens
  misc_RNA (1)...(19): siRNA sense strand
caugaaggcucguuuaaag

SEQ ID NO: 564803 - RNA, 19 nt, Homo sapiens
  misc_RNA (1)...(19): siRNA sense strand
gcaaagaccgaauugaaau

SEQ ID NO: 564804 - RNA, 19 nt, Homo sapiens
  misc_RNA (1)...(19): siRNA sense strand
ugccuuaacucuucgauuu

SEQ ID NO: 564805 - RNA, 19 nt, Homo sapiens
  misc_RNA (1)...(19): siRNA sense strand
gggcaaagaccgaauugaa

SEQ ID NO: 564806 - RNA, 19 nt, Homo sapiens
  misc_RNA (1)...(19): siRNA sense strand
aaagaggaauuaugccaaa

SEQ ID NO: 564807 - RNA, 19 nt, Homo sapiens
  misc_RNA (1)...(19): siRNA sense strand
ggaacaguuggcuaaauua

SEQ ID NO: 564808 - RNA, 19 nt, Homo sapiens
  misc_RNA (1)...(19): siRNA sense strand
gucgaaaccuccugaagaa

SEQ ID NO: 564809 - RNA, 19 nt, Homo sapiens
  misc_RNA (1)...(19): siRNA sense strand
gaugagagaagcugccuuu

SEQ ID NO: 564810 - RNA, 19 nt, Homo sapiens
  misc_RNA (1)...(19): siRNA sense strand
acgaggaucuucuauuuga

SEQ ID NO: 564811 - RNA, 19 nt, Homo sapiens
  misc_RNA (1)...(19): siRNA sense strand
gagagaagcugccuuuuca

SEQ ID NO: 564812 - RNA, 19 nt, Homo sapiens
  misc_RNA (1)...(19): siRNA sense strand
gauaauguagcagguguua

SEQ ID NO: 564813 - RNA, 19 nt, Homo sapiens
  misc_RNA (1)...(19): siRNA sense strand
agaccgaauugaaaucuuu

SEQ ID NO: 564814 - RNA, 19 nt, Homo sapiens
  misc_RNA (1)...(19): siRNA sense strand
gcacuacaguuauccaaaa

SEQ ID NO: 564815 - RNA, 19 nt, Homo sapiens
  misc_RNA (1)...(19): siRNA sense strand
ggucgaaaccuccugaaga

SEQ ID NO: 564816 - RNA, 19 nt, Homo sapiens
  misc_RNA (1)...(19): siRNA sense strand
cauugaacaugucaucauu

SEQ ID NO: 564817 - RNA, 19 nt, Homo sapiens
  misc_RNA (1)...(19): siRNA sense strand
ggcaaagaccgaauugaaa

SEQ ID NO: 564818 - RNA, 19 nt, Homo sapiens
  misc_RNA (1)...(19): siRNA sense strand
gacuucagcacuacaguua

SEQ ID NO: 564819 - RNA, 19 nt, Homo sapiens
  misc_RNA (1)...(19): siRNA sense strand
gagcgaagaaagauaaugu

SEQ ID NO: 564820 - RNA, 19 nt, Homo sapiens
  misc_RNA (1)...(19): siRNA sense strand
caauaaagcgcaagugaag

SEQ ID NO: 564821 - RNA, 19 nt, Homo sapiens
  misc_RNA (1)...(19): siRNA sense strand
uagcuucucugcagacuuc

SEQ ID NO: 564822 - RNA, 19 nt, Homo sapiens
  misc_RNA (1)...(19): siRNA sense strand
acaguuggcuaaauuaaag

SEQ ID NO: 564823 - RNA, 19 nt, Homo sapiens
  misc_RNA (1)...(19): siRNA sense strand
gaacauuaccaugaaggaa

SEQ ID NO: 564824 - RNA, 19 nt, Homo sapiens
  misc_RNA (1)...(19): siRNA sense strand
caucaugaaggcucguuua

SEQ ID NO: 564825 - RNA, 19 nt, Homo sapiens
  misc_RNA (1)...(19): siRNA sense strand
ucugaugccuuaacucuuc

SEQ ID NO: 564826 - RNA, 19 nt, Homo sapiens
  misc_RNA (1)...(19): siRNA sense strand
gaggaauuaugccaaagca

SEQ ID NO: 564827 - RNA, 19 nt, Homo sapiens
  misc_RNA (1)...(19): siRNA sense strand
aacguacucuugcuuauau

SEQ ID NO: 564828 - RNA, 19 nt, Homo sapiens
  misc_RNA (1)...(19): siRNA sense strand
uguagcagguguuacuuug

SEQ ID NO: 564829 - RNA, 19 nt, Homo sapiens
  misc_RNA (1)...(19): siRNA sense strand
gacagauccuaaagaagau

SEQ ID NO: 564830 - RNA, 19 nt, Homo sapiens
  misc_RNA (1)...(19): siRNA sense strand
ugccaguauuugaacauua

SEQ ID NO: 564831 - RNA, 19 nt, Homo sapiens
  misc_RNA (1)...(19): siRNA sense strand
ucaauaaagcgcaagugaa

SEQ ID NO: 564832 - RNA, 19 nt, Homo sapiens
  misc_RNA (1)...(19): siRNA sense strand
uugcuuauaucaucacaga

SEQ ID NO: 564833 - RNA, 19 nt, Homo sapiens
  misc_RNA (1)...(19): siRNA sense strand
ugaacguacucuugcuuau

SEQ ID NO: 564834 - RNA, 19 nt, Homo sapiens
  misc_RNA (1)...(19): siRNA sense strand
gaagcugccuuuucacuag

SEQ ID NO: 564835 - RNA, 19 nt, Homo sapiens
  misc_RNA (1)...(19): siRNA sense strand
gccaguauuugaacauuac

SEQ ID NO: 564836 - RNA, 19 nt, Homo sapiens
  misc_RNA (1)...(19): siRNA sense strand
ccaaagcaguggaacuacu

SEQ ID NO: 564837 - RNA, 19 nt, Homo sapiens
  misc_RNA (1)...(19): siRNA sense strand
gaggaucuucuauuugaau

SEQ ID NO: 564838 - RNA, 19 nt, Homo sapiens
  misc_RNA (1)...(19): siRNA sense strand
gcgaagaaagauaauguag

SEQ ID NO: 564839 - RNA, 19 nt, Homo sapiens
  misc_RNA (1)...(19): siRNA sense strand
guuggagccugcuaaucuu

SEQ ID NO: 564840 - RNA, 19 nt, Homo sapiens
  misc_RNA (1)...(19): siRNA sense strand
cugcagacuucuuuuguua

SEQ ID NO: 564841 - RNA, 19 nt, Homo sapiens
  misc_RNA (1)...(19): siRNA sense strand
agagagagcgagaagaguu

SEQ ID NO: 564842 - RNA, 19 nt, Homo sapiens
  misc_RNA (1)...(19): siRNA sense strand
gcuauuaagauaaccaaca

SEQ ID NO: 564843 - RNA, 19 nt, Homo sapiens
  misc_RNA (1)...(19): siRNA sense strand
gaacuacugguggaacuag

SEQ ID NO: 564844 - RNA, 19 nt, Homo sapiens
  misc_RNA (1)...(19): siRNA sense strand
gucaauaaagcgcaaguga

SEQ ID NO: 564845 - RNA, 19 nt, Homo sapiens
  misc_RNA (1)...(19): siRNA sense strand
agaaggacuuggagcaaag

SEQ ID NO: 564846 - RNA, 19 nt, Homo sapiens
  misc_RNA (1)...(19): siRNA sense strand
gagcacagacaggucgaaa

SEQ ID NO: 564847 - RNA, 19 nt, Homo sapiens
  misc_RNA (1)...(19): siRNA sense strand
cgaggaucuucuauuugaa

SEQ ID NO: 564848 - RNA, 19 nt, Homo sapiens
  misc_RNA (1)...(19): siRNA sense strand
uggcuaaauuaaagaggaa

SEQ ID NO: 564849 - RNA, 19 nt, Homo sapiens
  misc_RNA (1)...(19): siRNA sense strand
uucgacagauccuaaagaa

SEQ ID NO: 564850 - RNA, 19 nt, Homo sapiens
  misc_RNA (1)...(19): siRNA sense strand
gacgaggaucuucuauuug

SEQ ID NO: 564851 - RNA, 19 nt, Homo sapiens
  misc_RNA (1)...(19): siRNA sense strand
cuucagcacuacaguuauc

SEQ ID NO: 564852 - RNA, 19 nt, Homo sapiens
  misc_RNA (1)...(19): siRNA sense strand
ggaacuacugguggaacua

SEQ ID NO: 564853 - RNA, 19 nt, Homo sapiens
  misc_RNA (1)...(19): siRNA sense strand
caaagaccgaauugaaauc

SEQ ID NO: 564854 - RNA, 19 nt, Homo sapiens
  misc_RNA (1)...(19): siRNA sense strand
gcacagacaggucgaaacc

SEQ ID NO: 564855 - RNA, 19 nt, Homo sapiens
  misc_RNA (1)...(19): siRNA sense strand
gagagagcgagaagaguuc

SEQ ID NO: 564856 - RNA, 19 nt, Homo sapiens
  misc_RNA (1)...(19): siRNA sense strand
gaugagagagagcgagaag

SEQ ID NO: 564857 - RNA, 19 nt, Homo sapiens
  misc_RNA (1)...(19): siRNA sense strand
ucaugaaggcucguuuaaa

SEQ ID NO: 564858 - RNA, 19 nt, Homo sapiens
  misc_RNA (1)...(19): siRNA sense strand
guugaugggcgaagugaug

SEQ ID NO: 564859 - RNA, 19 nt, Homo sapiens
  misc_RNA (1)...(19): siRNA sense strand
uggcacagaccaucaugaa

SEQ ID NO: 564860 - RNA, 19 nt, Homo sapiens
  misc_RNA (1)...(19): siRNA sense strand
cgauuucgacagauccuaa

SEQ ID NO: 564861 - RNA, 19 nt, Homo sapiens
  misc_RNA (1)...(19): siRNA sense strand
uacuuuggaugaagcuauu

SEQ ID NO: 564862 - RNA, 19 nt, Homo sapiens
  misc_RNA (1)...(19): siRNA sense strand
ugagagagagcgagaagag

SEQ ID NO: 564863 - RNA, 19 nt, Homo sapiens
  misc_RNA (1)...(19): siRNA sense strand
cuauuaagauaaccaacag

SEQ ID NO: 564864 - RNA, 19 nt, Homo sapiens
  misc_RNA (1)...(19): siRNA sense strand
uaauguagcagguguuacu

SEQ ID NO: 564865 - RNA, 19 nt, Homo sapiens
  misc_RNA (1)...(19): siRNA sense strand
uggaugaagcuauuaagau

SEQ ID NO: 564866 - RNA, 19 nt, Homo sapiens
  misc_RNA (1)...(19): siRNA sense strand
ugccaaagcaguggaacua

SEQ ID NO: 564867 - RNA, 19 nt, Homo sapiens
  misc_RNA (1)...(19): siRNA sense strand
cgaaaccuccugaagaaaa

SEQ ID NO: 564868 - RNA, 19 nt, Homo sapiens
  misc_RNA (1)...(19): siRNA sense strand
cggauugaacguacucuug

SEQ ID NO: 564869 - RNA, 19 nt, Homo sapiens
  misc_RNA (1)...(19): siRNA sense strand
ccaacaggcguguaaaugc

SEQ ID NO: 564870 - RNA, 19 nt, Homo sapiens
  misc_RNA (1)...(19): siRNA sense strand
auaaagcgcaagugaagau

SEQ ID NO: 564871 - RNA, 19 nt, Homo sapiens
  misc_RNA (1)...(19): siRNA sense strand
ggagccugcuaaucuucug

SEQ ID NO: 564872 - RNA, 19 nt, Homo sapiens
  misc_RNA (1)...(19): siRNA sense strand
cuacaguuauccaaaaugu

SEQ ID NO: 564873 - RNA, 19 nt, Homo sapiens
  misc_RNA (1)...(19): siRNA sense strand
uugaacguacucuugcuua

SEQ ID NO: 564874 - RNA, 19 nt, Homo sapiens
  misc_RNA (1)...(19): siRNA sense strand
ugacuucagcacuacaguu

SEQ ID NO: 564875 - RNA, 19 nt, Homo sapiens
  misc_RNA (1)...(19): siRNA sense strand
gauuucgacagauccuaaa

SEQ ID NO: 564876 - RNA, 19 nt, Homo sapiens
  misc_RNA (1)...(19): siRNA sense strand
auaaccaacaggcguguaa

SEQ ID NO: 564877 - RNA, 19 nt, Homo sapiens
  misc_RNA (1)...(19): siRNA sense strand
ugggcgaagugaugagaga

SEQ ID NO: 564878 - RNA, 19 nt, Homo sapiens
  misc_RNA (1)...(19): siRNA sense strand
aaucugagaaggacuugga

SEQ ID NO: 564879 - RNA, 19 nt, Homo sapiens
  misc_RNA (1)...(19): siRNA sense strand
cagauccuaaagaagauaa

SEQ ID NO: 564880 - RNA, 19 nt, Homo sapiens
  misc_RNA (1)...(19): siRNA sense strand
gauaaccaacaggcgugua

SEQ ID NO: 564881 - RNA, 19 nt, Homo sapiens
  misc_RNA (1)...(19): siRNA sense strand
gauugaacguacucuugcu

SEQ ID NO: 564882 - RNA, 19 nt, Homo sapiens
  misc_RNA (1)...(19): siRNA sense strand
ggacauagaguguuucaug

SEQ ID NO: 564883 - RNA, 19 nt, Homo sapiens
  misc_RNA (1)...(19): siRNA sense strand
gaugaaaccuaccugaugu

SEQ ID NO: 564884 - RNA, 19 nt, Homo sapiens
  misc_RNA (1)...(19): siRNA sense strand
gcgagaaacugcaaucugu

SEQ ID NO: 564885 - RNA, 19 nt, Homo sapiens
  misc_RNA (1)...(19): siRNA sense strand
gcacaaacacgcaaacaau

SEQ ID NO: 564886 - RNA, 19 nt, Homo sapiens
  misc_RNA (1)...(19): siRNA sense strand
ucacagccaucgacaggua

SEQ ID NO: 564887 - RNA, 19 nt, Homo sapiens
  misc_RNA (1)...(19): siRNA sense strand
ggucaagauugccaaggua

SEQ ID NO: 564888 - RNA, 19 nt, Homo sapiens
  misc_RNA (1)...(19): siRNA sense strand
gacauuagguuagccaaga

SEQ ID NO: 564889 - RNA, 19 nt, Homo sapiens
  misc_RNA (1)...(19): siRNA sense strand
ugaacaagcucauuaagac

SEQ ID NO: 564890 - RNA, 19 nt, Homo sapiens
  misc_RNA (1)...(19): siRNA sense strand
caugguguaugaugucuuu

SEQ ID NO: 564891 - RNA, 19 nt, Homo sapiens
  misc_RNA (1)...(19): siRNA sense strand
ccacugaccuccuguacgu

SEQ ID NO: 564892 - RNA, 19 nt, Homo sapiens
  misc_RNA (1)...(19): siRNA sense strand
caagagcacggucaagauu

SEQ ID NO: 564893 - RNA, 19 nt, Homo sapiens
  misc_RNA (1)...(19): siRNA sense strand
caacguguuucuguucaaa

SEQ ID NO: 564894 - RNA, 19 nt, Homo sapiens
  misc_RNA (1)...(19): siRNA sense strand
gaccauagccauugugauc

SEQ ID NO: 564895 - RNA, 19 nt, Homo sapiens
  misc_RNA (1)...(19): siRNA sense strand
uuaagacgguguuugcauu

SEQ ID NO: 564896 - RNA, 19 nt, Homo sapiens
  misc_RNA (1)...(19): siRNA sense strand
gauccuagauggccuugca

SEQ ID NO: 564897 - RNA, 19 nt, Homo sapiens
  misc_RNA (1)...(19): siRNA sense strand
aaaccuaccugauguucug

SEQ ID NO: 564898 - RNA, 19 nt, Homo sapiens
  misc_RNA (1)...(19): siRNA sense strand
ucauggacauagaguguuu

SEQ ID NO: 564899 - RNA, 19 nt, Homo sapiens
  misc_RNA (1)...(19): siRNA sense strand
gagcauguuucccucuugu

SEQ ID NO: 564900 - RNA, 19 nt, Homo sapiens
  misc_RNA (1)...(19): siRNA sense strand
cuagauggccuugcagaua

SEQ ID NO: 564901 - RNA, 19 nt, Homo sapiens
  misc_RNA (1)...(19): siRNA sense strand
gcaacguguuucuguucaa

SEQ ID NO: 564902 - RNA, 19 nt, Homo sapiens
  misc_RNA (1)...(19): siRNA sense strand
ggagcauguuucccucuug

SEQ ID NO: 564903 - RNA, 19 nt, Homo sapiens
  misc_RNA (1)...(19): siRNA sense strand
ucuaugcucugaggaguaa

SEQ ID NO: 564904 - RNA, 19 nt, Homo sapiens
  misc_RNA (1)...(19): siRNA sense strand
acauguauauucucuggaa

SEQ ID NO: 564905 - RNA, 19 nt, Homo sapiens
  misc_RNA (1)...(19): siRNA sense strand
gaacugcgagaaacugcaa

SEQ ID NO: 564906 - RNA, 19 nt, Homo sapiens
  misc_RNA (1)...(19): siRNA sense strand
ccgcauggacauuagguua

SEQ ID NO: 564907 - RNA, 19 nt, Homo sapiens
  misc_RNA (1)...(19): siRNA sense strand
gcauguuucccucuuguga

SEQ ID NO: 564908 - RNA, 19 nt, Homo sapiens
  misc_RNA (1)...(19): siRNA sense strand
uagauggccuugcagauac

SEQ ID NO: 564909 - RNA, 19 nt, Homo sapiens
  misc_RNA (1)...(19): siRNA sense strand
ggagaacuucauggacaua

SEQ ID NO: 564910 - RNA, 19 nt, Homo sapiens
  misc_RNA (1)...(19): siRNA sense strand
acagguacauauccauuca

SEQ ID NO: 564911 - RNA, 19 nt, Homo sapiens
  misc_RNA (1)...(19): siRNA sense strand
cgacagguacauauccauu

SEQ ID NO: 564912 - RNA, 19 nt, Homo sapiens
  misc_RNA (1)...(19): siRNA sense strand
gggagaacuucauggacau

SEQ ID NO: 564913 - RNA, 19 nt, Homo sapiens
  misc_RNA (1)...(19): siRNA sense strand
gaacuucauggacauagag

SEQ ID NO: 564914 - RNA, 19 nt, Homo sapiens
  misc_RNA (1)...(19): siRNA sense strand
cugcgcagccucuggauaa

SEQ ID NO: 564915 - RNA, 19 nt, Homo sapiens
  misc_RNA (1)...(19): siRNA sense strand
ugaugaaaccuaccugaug

SEQ ID NO: 564916 - RNA, 19 nt, Homo sapiens
  misc_RNA (1)...(19): siRNA sense strand
ucaguacgaagacaucaaa

SEQ ID NO: 564917 - RNA, 19 nt, Homo sapiens
  misc_RNA (1)...(19): siRNA sense strand
caagcccgcauggacauua

SEQ ID NO: 564918 - RNA, 19 nt, Homo sapiens
  misc_RNA (1)...(19): siRNA sense strand
gggcuggaacugcgagaaa

SEQ ID NO: 564919 - RNA, 19 nt, Homo sapiens
  misc_RNA (1)...(19): siRNA sense strand
gauguggaccauagccauu

SEQ ID NO: 564920 - RNA, 19 nt, Homo sapiens
  misc_RNA (1)...(19): siRNA sense strand
uacgugggcucaaaugaca

SEQ ID NO: 564921 - RNA, 19 nt, Homo sapiens
  misc_RNA (1)...(19): siRNA sense strand
caaacaaugcagccagugu

SEQ ID NO: 564922 - RNA, 19 nt, Homo sapiens
  misc_RNA (1)...(19): siRNA sense strand
cggacugccugcacaaaca

SEQ ID NO: 564923 - RNA, 19 nt, Homo sapiens
  misc_RNA (1)...(19): siRNA sense strand
cacaaacacgcaaacaaug

SEQ ID NO: 564924 - RNA, 19 nt, Homo sapiens
  misc_RNA (1)...(19): siRNA sense strand
cagcguggcacccagaaga

SEQ ID NO: 564925 - RNA, 19 nt, Homo sapiens
  misc_RNA (1)...(19): siRNA sense strand
ucauugacuuccacguguu

SEQ ID NO: 564926 - RNA, 19 nt, Homo sapiens
  misc_RNA (1)...(19): siRNA sense strand
gcaaagauagccgcaacgu

SEQ ID NO: 564927 - RNA, 19 nt, Homo sapiens
  misc_RNA (1)...(19): siRNA sense strand
agaacuucauggacauaga

SEQ ID NO: 564928 - RNA, 19 nt, Homo sapiens
  misc_RNA (1)...(19): siRNA sense strand
gcguacauguauauucucu

SEQ ID NO: 564929 - RNA, 19 nt, Homo sapiens
  misc_RNA (1)...(19): siRNA sense strand
ccagcguacugcuucuguu

SEQ ID NO: 564930 - RNA, 19 nt, Homo sapiens
  misc_RNA (1)...(19): siRNA sense strand
gucuacagcuucauugacu

SEQ ID NO: 564931 - RNA, 19 nt, Homo sapiens
  misc_RNA (1)...(19): siRNA sense strand
ucaagagcacggucaagau

SEQ ID NO: 564932 - RNA, 19 nt, Homo sapiens
  misc_RNA (1)...(19): siRNA sense strand
cgagaaacugcaaucuguu

SEQ ID NO: 564933 - RNA, 19 nt, Homo sapiens
  misc_RNA (1)...(19): siRNA sense strand
gccgcaacguguuucuguu

SEQ ID NO: 564934 - RNA, 19 nt, Homo sapiens
  misc_RNA (1)...(19): siRNA sense strand
gucaagauugccaagguaa

SEQ ID NO: 564935 - RNA, 19 nt, Homo sapiens
  misc_RNA (1)...(19): siRNA sense strand
gcauggacauuagguuagc

SEQ ID NO: 564936 - RNA, 19 nt, Homo sapiens
  misc_RNA (1)...(19): siRNA sense strand
ugccugauguggaccauag

SEQ ID NO: 564937 - RNA, 19 nt, Homo sapiens
  misc_RNA (1)...(19): siRNA sense strand
gacagguacauauccauuc

SEQ ID NO: 564938 - RNA, 19 nt, Homo sapiens
  misc_RNA (1)...(19): siRNA sense strand
ggucacggccuccuucacu

SEQ ID NO: 564939 - RNA, 19 nt, Homo sapiens
  misc_RNA (1)...(19): siRNA sense strand
caaacacgcaaacaaugca

SEQ ID NO: 564940 - RNA, 19 nt, Homo sapiens
  misc_RNA (1)...(19): siRNA sense strand
agaagagcaucaucaucca

SEQ ID NO: 564941 - RNA, 19 nt, Homo sapiens
  misc_RNA (1)...(19): siRNA sense strand
ccacgccguccgcaugauu

SEQ ID NO: 564942 - RNA, 19 nt, Homo sapiens
  misc_RNA (1)...(19): siRNA sense strand
ccacguguuccaccgcaaa

SEQ ID NO: 564943 - RNA, 19 nt, Homo sapiens
  misc_RNA (1)...(19): siRNA sense strand
guacgugggcucaaaugac

SEQ ID NO: 564944 - RNA, 19 nt, Homo sapiens
  misc_RNA (1)...(19): siRNA sense strand
cccaucaucuaugcucuga

SEQ ID NO: 564945 - RNA, 19 nt, Homo sapiens
  misc_RNA (1)...(19): siRNA sense strand
uaagacgguguuugcauuc

SEQ ID NO: 564946 - RNA, 19 nt, Homo sapiens
  misc_RNA (1)...(19): siRNA sense strand
gcguacugcuucuguucau

SEQ ID NO: 564947 - RNA, 19 nt, Homo sapiens
  misc_RNA (1)...(19): siRNA sense strand
gaaaccuaccugauguucu

SEQ ID NO: 564948 - RNA, 19 nt, Homo sapiens
  misc_RNA (1)...(19): siRNA sense strand
guguuccaccgcaaagaua

SEQ ID NO: 564949 - RNA, 19 nt, Homo sapiens
  misc_RNA (1)...(19): siRNA sense strand
gacauucaguacgaagaca

SEQ ID NO: 564950 - RNA, 19 nt, Homo sapiens
  misc_RNA (1)...(19): siRNA sense strand
ccaagguaaccaugucugu

SEQ ID NO: 564951 - RNA, 19 nt, Homo sapiens
  misc_RNA (1)...(19): siRNA sense strand
cggagcauguuucccucuu

SEQ ID NO: 564952 - RNA, 19 nt, Homo sapiens
  misc_RNA (1)...(19): siRNA sense strand
augcguacauguauauucu

SEQ ID NO: 564953 - RNA, 19 nt, Homo sapiens
  misc_RNA (1)...(19): siRNA sense strand
gcccucugcuugcaaucau

SEQ ID NO: 564954 - RNA, 19 nt, Homo sapiens
  misc_RNA (1)...(19): siRNA sense strand
ggagaaugaggagaacauc

SEQ ID NO: 564955 - RNA, 19 nt, Homo sapiens
  misc_RNA (1)...(19): siRNA sense strand
ccagaagagcaucaucauc

SEQ ID NO: 564956 - RNA, 19 nt, Homo sapiens
  misc_RNA (1)...(19): siRNA sense strand
ggacauagaguguuucaug

SEQ ID NO: 564957 - RNA, 19 nt, Homo sapiens
  misc_RNA (1)...(19): siRNA sense strand
gaugaaaccuaccugaugu

SEQ ID NO: 564958 - RNA, 19 nt, Homo sapiens
  misc_RNA (1)...(19): siRNA sense strand
gcgagaaacugcaaucugu

SEQ ID NO: 564959 - RNA, 19 nt, Homo sapiens
  misc_RNA (1)...(19): siRNA sense strand
gcacaaacacgcaaacaau

SEQ ID NO: 564960 - RNA, 19 nt, Homo sapiens
  misc_RNA (1)...(19): siRNA sense strand
ucacagccaucgacaggua

SEQ ID NO: 564961 - RNA, 19 nt, Homo sapiens
  misc_RNA (1)...(19): siRNA sense strand
gacauuagguuagccaaga

SEQ ID NO: 564962 - RNA, 19 nt, Homo sapiens
  misc_RNA (1)...(19): siRNA sense strand
ugaacaagcucauuaagac

SEQ ID NO: 564963 - RNA, 19 nt, Homo sapiens
  misc_RNA (1)...(19): siRNA sense strand
caugguguaugaugucuuu

SEQ ID NO: 564964 - RNA, 19 nt, Homo sapiens
  misc_RNA (1)...(19): siRNA sense strand
caacguguuucuguucaaa

SEQ ID NO: 564965 - RNA, 19 nt, Homo sapiens
  misc_RNA (1)...(19): siRNA sense strand
ccacugaccuccuguacgu

SEQ ID NO: 564966 - RNA, 19 nt, Homo sapiens
  misc_RNA (1)...(19): siRNA sense strand
gaccauagccauugugauc

SEQ ID NO: 564967 - RNA, 19 nt, Homo sapiens
  misc_RNA (1)...(19): siRNA sense strand
uuaagacgguguuugcauu

SEQ ID NO: 564968 - RNA, 19 nt, Homo sapiens
  misc_RNA (1)...(19): siRNA sense strand
aaaccuaccugauguucug

SEQ ID NO: 564969 - RNA, 19 nt, Homo sapiens
  misc_RNA (1)...(19): siRNA sense strand
ucauggacauagaguguuu

SEQ ID NO: 564970 - RNA, 19 nt, Homo sapiens
  misc_RNA (1)...(19): siRNA sense strand
gagcauguuucccucuugu

SEQ ID NO: 564971 - RNA, 19 nt, Homo sapiens
  misc_RNA (1)...(19): siRNA sense strand
gcaacguguuucuguucaa

SEQ ID NO: 564972 - RNA, 19 nt, Homo sapiens
  misc_RNA (1)...(19): siRNA sense strand
ggagcauguuucccucuug

SEQ ID NO: 564973 - RNA, 19 nt, Homo sapiens
  misc_RNA (1)...(19): siRNA sense strand
ucuaugcucugaggaguaa

SEQ ID NO: 564974 - RNA, 19 nt, Homo sapiens
  misc_RNA (1)...(19): siRNA sense strand
acauguauauucucuggaa

SEQ ID NO: 564975 - RNA, 19 nt, Homo sapiens
  misc_RNA (1)...(19): siRNA sense strand
gaacugcgagaaacugcaa

SEQ ID NO: 564976 - RNA, 19 nt, Homo sapiens
  misc_RNA (1)...(19): siRNA sense strand
ccgcauggacauuagguua

SEQ ID NO: 564977 - RNA, 19 nt, Homo sapiens
  misc_RNA (1)...(19): siRNA sense strand
gcauguuucccucuuguga

SEQ ID NO: 564978 - RNA, 19 nt, Homo sapiens
  misc_RNA (1)...(19): siRNA sense strand
ggagaacuucauggacaua

SEQ ID NO: 564979 - RNA, 19 nt, Homo sapiens
  misc_RNA (1)...(19): siRNA sense strand
acagguacauauccauuca

SEQ ID NO: 564980 - RNA, 19 nt, Homo sapiens
  misc_RNA (1)...(19): siRNA sense strand
cgacagguacauauccauu

SEQ ID NO: 564981 - RNA, 19 nt, Homo sapiens
  misc_RNA (1)...(19): siRNA sense strand
gggagaacuucauggacau

SEQ ID NO: 564982 - RNA, 19 nt, Homo sapiens
  misc_RNA (1)...(19): siRNA sense strand
gaacuucauggacauagag

SEQ ID NO: 564983 - RNA, 19 nt, Homo sapiens
  misc_RNA (1)...(19): siRNA sense strand
cugcgcagccucuggauaa

SEQ ID NO: 564984 - RNA, 19 nt, Homo sapiens
  misc_RNA (1)...(19): siRNA sense strand
ugaugaaaccuaccugaug

SEQ ID NO: 564985 - RNA, 19 nt, Homo sapiens
  misc_RNA (1)...(19): siRNA sense strand
ucaguacgaagacaucaaa

SEQ ID NO: 564986 - RNA, 19 nt, Homo sapiens
  misc_RNA (1)...(19): siRNA sense strand
caagcccgcauggacauua

SEQ ID NO: 564987 - RNA, 19 nt, Homo sapiens
  misc_RNA (1)...(19): siRNA sense strand
gggcuggaacugcgagaaa

SEQ ID NO: 564988 - RNA, 19 nt, Homo sapiens
  misc_RNA (1)...(19): siRNA sense strand
gauguggaccauagccauu

SEQ ID NO: 564989 - RNA, 19 nt, Homo sapiens
  misc_RNA (1)...(19): siRNA sense strand
uacgugggcucaaaugaca

SEQ ID NO: 564990 - RNA, 19 nt, Homo sapiens
  misc_RNA (1)...(19): siRNA sense strand
caaacaaugcagccagugu

SEQ ID NO: 564991 - RNA, 19 nt, Homo sapiens
  misc_RNA (1)...(19): siRNA sense strand
cggacugccugcacaaaca

SEQ ID NO: 564992 - RNA, 19 nt, Homo sapiens
  misc_RNA (1)...(19): siRNA sense strand
cacaaacacgcaaacaaug

SEQ ID NO: 564993 - RNA, 19 nt, Homo sapiens
  misc_RNA (1)...(19): siRNA sense strand
cagcguggcacccagaaga

SEQ ID NO: 564994 - RNA, 19 nt, Homo sapiens
  misc_RNA (1)...(19): siRNA sense strand
ucauugacuuccacguguu

SEQ ID NO: 564995 - RNA, 19 nt, Homo sapiens
  misc_RNA (1)...(19): siRNA sense strand
gcaaagauagccgcaacgu

SEQ ID NO: 564996 - RNA, 19 nt, Homo sapiens
  misc_RNA (1)...(19): siRNA sense strand
agaacuucauggacauaga

SEQ ID NO: 564997 - RNA, 19 nt, Homo sapiens
  misc_RNA (1)...(19): siRNA sense strand
gcguacauguauauucucu

SEQ ID NO: 564998 - RNA, 19 nt, Homo sapiens
  misc_RNA (1)...(19): siRNA sense strand
ccagcguacugcuucuguu

SEQ ID NO: 564999 - RNA, 19 nt, Homo sapiens
  misc_RNA (1)...(19): siRNA sense strand
gucuacagcuucauugacu

SEQ ID NO: 565000 - RNA, 19 nt, Homo sapiens
  misc_RNA (1)...(19): siRNA sense strand
cgagaaacugcaaucuguu

SEQ ID NO: 565001 - RNA, 19 nt, Homo sapiens
  misc_RNA (1)...(19): siRNA sense strand
gccgcaacguguuucuguu

SEQ ID NO: 565002 - RNA, 19 nt, Homo sapiens
  misc_RNA (1)...(19): siRNA sense strand
gucaagauugccaagguaa

SEQ ID NO: 565003 - RNA, 19 nt, Homo sapiens
  misc_RNA (1)...(19): siRNA sense strand
gcauggacauuagguuagc

SEQ ID NO: 565004 - RNA, 19 nt, Homo sapiens
  misc_RNA (1)...(19): siRNA sense strand
ugccugauguggaccauag

SEQ ID NO: 565005 - RNA, 19 nt, Homo sapiens
  misc_RNA (1)...(19): siRNA sense strand
gacagguacauauccauuc

SEQ ID NO: 565006 - RNA, 19 nt, Homo sapiens
  misc_RNA (1)...(19): siRNA sense strand
ggucacggccuccuucacu

SEQ ID NO: 565007 - RNA, 19 nt, Homo sapiens
  misc_RNA (1)...(19): siRNA sense strand
caaacacgcaaacaaugca

SEQ ID NO: 565008 - RNA, 19 nt, Homo sapiens
  misc_RNA (1)...(19): siRNA sense strand
agaagagcaucaucaucca

SEQ ID NO: 565009 - RNA, 19 nt, Homo sapiens
  misc_RNA (1)...(19): siRNA sense strand
ccacgccguccgcaugauu

SEQ ID NO: 565010 - RNA, 19 nt, Homo sapiens
  misc_RNA (1)...(19): siRNA sense strand
ccacguguuccaccgcaaa

SEQ ID NO: 565011 - RNA, 19 nt, Homo sapiens
  misc_RNA (1)...(19): siRNA sense strand
guacgugggcucaaaugac

SEQ ID NO: 565012 - RNA, 19 nt, Homo sapiens
  misc_RNA (1)...(19): siRNA sense strand
cccaucaucuaugcucuga

SEQ ID NO: 565013 - RNA, 19 nt, Homo sapiens
  misc_RNA (1)...(19): siRNA sense strand
uaagacgguguuugcauuc

SEQ ID NO: 565014 - RNA, 19 nt, Homo sapiens
  misc_RNA (1)...(19): siRNA sense strand
gcguacugcuucuguucau

SEQ ID NO: 565015 - RNA, 19 nt, Homo sapiens
  misc_RNA (1)...(19): siRNA sense strand
gaaaccuaccugauguucu

SEQ ID NO: 565016 - RNA, 19 nt, Homo sapiens
  misc_RNA (1)...(19): siRNA sense strand
guguuccaccgcaaagaua

SEQ ID NO: 565017 - RNA, 19 nt, Homo sapiens
  misc_RNA (1)...(19): siRNA sense strand
gacauucaguacgaagaca

SEQ ID NO: 565018 - RNA, 19 nt, Homo sapiens
  misc_RNA (1)...(19): siRNA sense strand
ccaagguaaccaugucugu

SEQ ID NO: 565019 - RNA, 19 nt, Homo sapiens
  misc_RNA (1)...(19): siRNA sense strand
cggagcauguuucccucuu

SEQ ID NO: 565020 - RNA, 19 nt, Homo sapiens
  misc_RNA (1)...(19): siRNA sense strand
ggagaaugaggagaacauc

SEQ ID NO: 565021 - RNA, 19 nt, Homo sapiens
  misc_RNA (1)...(19): siRNA sense strand
gcccucugcuugcaaucau

SEQ ID NO: 565022 - RNA, 19 nt, Homo sapiens
  misc_RNA (1)...(19): siRNA sense strand
ccagaagagcaucaucauc

SEQ ID NO: 565023 - RNA, 19 nt, Homo sapiens
  misc_RNA (1)...(19): siRNA sense strand
augcguacauguauauucu

SEQ ID NO: 565024 - RNA, 19 nt, Homo sapiens
  misc_RNA (1)...(19): siRNA sense strand
aaacugagcugaagaugga

SEQ ID NO: 565025 - RNA, 19 nt, Homo sapiens
  misc_RNA (1)...(19): siRNA sense strand
gcaggaagcacuugaguuu

SEQ ID NO: 565026 - RNA, 19 nt, Homo sapiens
  misc_RNA (1)...(19): siRNA sense strand
gaacuaagggaaacacuug

SEQ ID NO: 565027 - RNA, 19 nt, Homo sapiens
  misc_RNA (1)...(19): siRNA sense strand
gaaaacaccccucagaaua

SEQ ID NO: 565028 - RNA, 19 nt, Homo sapiens
  misc_RNA (1)...(19): siRNA sense strand
gaauagagccauaguucaa

SEQ ID NO: 565029 - RNA, 19 nt, Homo sapiens
  misc_RNA (1)...(19): siRNA sense strand
gaaagagaacuaagggaaa

SEQ ID NO: 565030 - RNA, 19 nt, Homo sapiens
  misc_RNA (1)...(19): siRNA sense strand
gaaaggacaauacaagaug

SEQ ID NO: 565031 - RNA, 19 nt, Homo sapiens
  misc_RNA (1)...(19): siRNA sense strand
gacaaacucucucuaacug

SEQ ID NO: 565032 - RNA, 19 nt, Homo sapiens
  misc_RNA (1)...(19): siRNA sense strand
gauggaagacuguauuuga

SEQ ID NO: 565033 - RNA, 19 nt, Homo sapiens
  misc_RNA (1)...(19): siRNA sense strand
ugccagagcucaagagaaa

SEQ ID NO: 565034 - RNA, 19 nt, Homo sapiens
  misc_RNA (1)...(19): siRNA sense strand
gggaaacacuugagaagca

SEQ ID NO: 565035 - RNA, 19 nt, Homo sapiens
  misc_RNA (1)...(19): siRNA sense strand
gaaaguugccauagauaau

SEQ ID NO: 565036 - RNA, 19 nt, Homo sapiens
  misc_RNA (1)...(19): siRNA sense strand
ucucaugucuccugggaua

SEQ ID NO: 565037 - RNA, 19 nt, Homo sapiens
  misc_RNA (1)...(19): siRNA sense strand
ucgagacucuucugacuaa

SEQ ID NO: 565038 - RNA, 19 nt, Homo sapiens
  misc_RNA (1)...(19): siRNA sense strand
gcaguuggcuauggaacaa

SEQ ID NO: 565039 - RNA, 19 nt, Homo sapiens
  misc_RNA (1)...(19): siRNA sense strand
gcaaacucaucuccaggaa

SEQ ID NO: 565040 - RNA, 19 nt, Homo sapiens
  misc_RNA (1)...(19): siRNA sense strand
gaaacggcgugaacaagca

SEQ ID NO: 565041 - RNA, 19 nt, Homo sapiens
  misc_RNA (1)...(19): siRNA sense strand
gugaaccgcugcaaacuca

SEQ ID NO: 565042 - RNA, 19 nt, Homo sapiens
  misc_RNA (1)...(19): siRNA sense strand
gagaagaaggcaaagagaa

SEQ ID NO: 565043 - RNA, 19 nt, Homo sapiens
  misc_RNA (1)...(19): siRNA sense strand
ucgagacccucuacaauga

SEQ ID NO: 565044 - RNA, 19 nt, Homo sapiens
  misc_RNA (1)...(19): siRNA sense strand
guugaaaguugccauagau

SEQ ID NO: 565045 - RNA, 19 nt, Homo sapiens
  misc_RNA (1)...(19): siRNA sense strand
aggaagcacuugaguuuga

SEQ ID NO: 565046 - RNA, 19 nt, Homo sapiens
  misc_RNA (1)...(19): siRNA sense strand
cagaacagaugcugaaagg

SEQ ID NO: 565047 - RNA, 19 nt, Homo sapiens
  misc_RNA (1)...(19): siRNA sense strand
caagauggaagacuguauu

SEQ ID NO: 565048 - RNA, 19 nt, Homo sapiens
  misc_RNA (1)...(19): siRNA sense strand
aaacuacugucauguacug

SEQ ID NO: 565049 - RNA, 19 nt, Homo sapiens
  misc_RNA (1)...(19): siRNA sense strand
ggaaacccguguacucaac

SEQ ID NO: 565050 - RNA, 19 nt, Homo sapiens
  misc_RNA (1)...(19): siRNA sense strand
gagaagcaguuggcuaugg

SEQ ID NO: 565051 - RNA, 19 nt, Homo sapiens
  misc_RNA (1)...(19): siRNA sense strand
ugaaaguugccauagauaa

SEQ ID NO: 565052 - RNA, 19 nt, Homo sapiens
  misc_RNA (1)...(19): siRNA sense strand
gagacagccuugacaaacu

SEQ ID NO: 565053 - RNA, 19 nt, Homo sapiens
  misc_RNA (1)...(19): siRNA sense strand
gacaauacaagauggaaga

SEQ ID NO: 565054 - RNA, 19 nt, Homo sapiens
  misc_RNA (1)...(19): siRNA sense strand
ggaagacuguauuugaaaa

SEQ ID NO: 565055 - RNA, 19 nt, Homo sapiens
  misc_RNA (1)...(19): siRNA sense strand
agaagaaggcaaagagaaa

SEQ ID NO: 565056 - RNA, 19 nt, Homo sapiens
  misc_RNA (1)...(19): siRNA sense strand
ggagaagaaggcaaagaga

SEQ ID NO: 565057 - RNA, 19 nt, Homo sapiens
  misc_RNA (1)...(19): siRNA sense strand
acaggcagcuucaacagau

SEQ ID NO: 565058 - RNA, 19 nt, Homo sapiens
  misc_RNA (1)...(19): siRNA sense strand
ggagugaaccgcugcaaac

SEQ ID NO: 565059 - RNA, 19 nt, Homo sapiens
  misc_RNA (1)...(19): siRNA sense strand
gaaaacuacugucauguac

SEQ ID NO: 565060 - RNA, 19 nt, Homo sapiens
  misc_RNA (1)...(19): siRNA sense strand
gauagucucagggucuuaa

SEQ ID NO: 565061 - RNA, 19 nt, Homo sapiens
  misc_RNA (1)...(19): siRNA sense strand
aagaauagagccauaguuc

SEQ ID NO: 565062 - RNA, 19 nt, Homo sapiens
  misc_RNA (1)...(19): siRNA sense strand
caucgagacucuucugacu

SEQ ID NO: 565063 - RNA, 19 nt, Homo sapiens
  misc_RNA (1)...(19): siRNA sense strand
agaaggagaagaaggcaaa

SEQ ID NO: 565064 - RNA, 19 nt, Homo sapiens
  misc_RNA (1)...(19): siRNA sense strand
aaaagaggcuaaagaagga

SEQ ID NO: 565065 - RNA, 19 nt, Homo sapiens
  misc_RNA (1)...(19): siRNA sense strand
ccuaagaggacucaaagug

SEQ ID NO: 565066 - RNA, 19 nt, Homo sapiens
  misc_RNA (1)...(19): siRNA sense strand
gcugaaaggacaauacaag

SEQ ID NO: 565067 - RNA, 19 nt, Homo sapiens
  misc_RNA (1)...(19): siRNA sense strand
aagcagaacagacgcuaaa

SEQ ID NO: 565068 - RNA, 19 nt, Homo sapiens
  misc_RNA (1)...(19): siRNA sense strand
ggaaaacaccccucagaau

SEQ ID NO: 565069 - RNA, 19 nt, Homo sapiens
  misc_RNA (1)...(19): siRNA sense strand
agaagcaguuggcuaugga

SEQ ID NO: 565070 - RNA, 19 nt, Homo sapiens
  misc_RNA (1)...(19): siRNA sense strand
uaagggaaacacuugagaa

SEQ ID NO: 565071 - RNA, 19 nt, Homo sapiens
  misc_RNA (1)...(19): siRNA sense strand
aaagagaacuaagggaaac

SEQ ID NO: 565072 - RNA, 19 nt, Homo sapiens
  misc_RNA (1)...(19): siRNA sense strand
caggcagcuucaacagaua

SEQ ID NO: 565073 - RNA, 19 nt, Homo sapiens
  misc_RNA (1)...(19): siRNA sense strand
cuaagaggacucaaagugu

SEQ ID NO: 565074 - RNA, 19 nt, Homo sapiens
  misc_RNA (1)...(19): siRNA sense strand
ugaaaggacaauacaagau

SEQ ID NO: 565075 - RNA, 19 nt, Homo sapiens
  misc_RNA (1)...(19): siRNA sense strand
ggcuaaagaaggagaagaa

SEQ ID NO: 565076 - RNA, 19 nt, Homo sapiens
  misc_RNA (1)...(19): siRNA sense strand
auggaagacuguauuugaa

SEQ ID NO: 565077 - RNA, 19 nt, Homo sapiens
  misc_RNA (1)...(19): siRNA sense strand
ucacgccgguggugugcaa

SEQ ID NO: 565078 - RNA, 19 nt, Homo sapiens
  misc_RNA (1)...(19): siRNA sense strand
gcagaacagaugcugaaag

SEQ ID NO: 565079 - RNA, 19 nt, Homo sapiens
  misc_RNA (1)...(19): siRNA sense strand
ucagaauaaugagugcaaa

SEQ ID NO: 565080 - RNA, 19 nt, Homo sapiens
  misc_RNA (1)...(19): siRNA sense strand
gaugagaccccgcuuucua

SEQ ID NO: 565081 - RNA, 19 nt, Homo sapiens
  misc_RNA (1)...(19): siRNA sense strand
ugacaaacucucucuaacu

SEQ ID NO: 565082 - RNA, 19 nt, Homo sapiens
  misc_RNA (1)...(19): siRNA sense strand
cacuugaguuugagacgaa

SEQ ID NO: 565083 - RNA, 19 nt, Homo sapiens
  misc_RNA (1)...(19): siRNA sense strand
ggugugcaauguggaacaa

SEQ ID NO: 565084 - RNA, 19 nt, Homo sapiens
  misc_RNA (1)...(19): siRNA sense strand
gacgaaacggcgugaacaa

SEQ ID NO: 565085 - RNA, 19 nt, Homo sapiens
  misc_RNA (1)...(19): siRNA sense strand
ggaagcacuugaguuugag

SEQ ID NO: 565086 - RNA, 19 nt, Homo sapiens
  misc_RNA (1)...(19): siRNA sense strand
acaaaagaauagagccaua

SEQ ID NO: 565087 - RNA, 19 nt, Homo sapiens
  misc_RNA (1)...(19): siRNA sense strand
gcuguugaaaguugccaua

SEQ ID NO: 565088 - RNA, 19 nt, Homo sapiens
  misc_RNA (1)...(19): siRNA sense strand
ccuggaaggccuccuaaga

SEQ ID NO: 565089 - RNA, 19 nt, Homo sapiens
  misc_RNA (1)...(19): siRNA sense strand
gaaccgcugcaaacucauc

SEQ ID NO: 565090 - RNA, 19 nt, Homo sapiens
  misc_RNA (1)...(19): siRNA sense strand
cggcagaacagaugcugaa

SEQ ID NO: 565091 - RNA, 19 nt, Homo sapiens
  misc_RNA (1)...(19): siRNA sense strand
gucucagggucuuaaauga

SEQ ID NO: 565092 - RNA, 19 nt, Homo sapiens
  misc_RNA (1)...(19): siRNA sense strand
gaagaaggcaaagagaaaa

SEQ ID NO: 565093 - RNA, 19 nt, Homo sapiens
  misc_RNA (1)...(19): siRNA sense strand
uguugaaaguugccauaga

SEQ ID NO: 565094 - RNA, 19 nt, Homo sapiens
  misc_RNA (1)...(19): siRNA sense strand
uggaagacuguauuugaaa

SEQ ID NO: 565095 - RNA, 19 nt, Homo sapiens
  misc_RNA (1)...(19): siRNA sense strand
gggaaacccguguacucaa

SEQ ID NO: 565096 - RNA, 19 nt, Homo sapiens
  misc_RNA (1)...(19): siRNA sense strand
aaaacaccccucagaauaa

SEQ ID NO: 565097 - RNA, 19 nt, Homo sapiens
  misc_RNA (1)...(19): siRNA sense strand
cagauagucucagggucuu

SEQ ID NO: 565098 - RNA, 19 nt, Homo sapiens
  misc_RNA (1)...(19): siRNA sense strand
caugucuccugggauaauu

SEQ ID NO: 565099 - RNA, 19 nt, Homo sapiens
  misc_RNA (1)...(19): siRNA sense strand
gauaaugccagagcucaag

SEQ ID NO: 565100 - RNA, 19 nt, Homo sapiens
  misc_RNA (1)...(19): siRNA sense strand
cuugacaaacucucucuaa

SEQ ID NO: 565101 - RNA, 19 nt, Homo sapiens
  misc_RNA (1)...(19): siRNA sense strand
agacagccuugacaaacuc

SEQ ID NO: 565102 - RNA, 19 nt, Homo sapiens
  misc_RNA (1)...(19): siRNA sense strand
ggacuucgagacccucuac

SEQ ID NO: 565103 - RNA, 19 nt, Homo sapiens
  misc_RNA (1)...(19): siRNA sense strand
ugaaaacuacugucaugua

SEQ ID NO: 565104 - RNA, 19 nt, Homo sapiens
  misc_RNA (1)...(19): siRNA sense strand
ccagagcucaagagaaaca

SEQ ID NO: 565105 - RNA, 19 nt, Homo sapiens
  misc_RNA (1)...(19): siRNA sense strand
aaaguugccauagauaaug

SEQ ID NO: 565106 - RNA, 19 nt, Homo sapiens
  misc_RNA (1)...(19): siRNA sense strand
agacucuucugacuaacau

SEQ ID NO: 565107 - RNA, 19 nt, Homo sapiens
  misc_RNA (1)...(19): siRNA sense strand
ugggauaauuccaccaaca

SEQ ID NO: 565108 - RNA, 19 nt, Homo sapiens
  misc_RNA (1)...(19): siRNA sense strand
gaccuggaaggccuccuaa

SEQ ID NO: 565109 - RNA, 19 nt, Homo sapiens
  misc_RNA (1)...(19): siRNA sense strand
aaagaauagagccauaguu

SEQ ID NO: 565110 - RNA, 19 nt, Homo sapiens
  misc_RNA (1)...(19): siRNA sense strand
gaagcaguuggcuauggaa

SEQ ID NO: 565111 - RNA, 19 nt, Homo sapiens
  misc_RNA (1)...(19): siRNA sense strand
aguagcagcagcagcagua

SEQ ID NO: 565112 - RNA, 19 nt, Homo sapiens
  misc_RNA (1)...(19): siRNA sense strand
caagcagaacagacgcuaa

SEQ ID NO: 565113 - RNA, 19 nt, Homo sapiens
  misc_RNA (1)...(19): siRNA sense strand
gaauaaugagugcaaaaug

SEQ ID NO: 565114 - RNA, 19 nt, Homo sapiens
  misc_RNA (1)...(19): siRNA sense strand
ugcauacggucuacaccaa

SEQ ID NO: 565115 - RNA, 19 nt, Homo sapiens
  misc_RNA (1)...(19): siRNA sense strand
aagauggaagacuguauuu

SEQ ID NO: 565116 - RNA, 19 nt, Homo sapiens
  misc_RNA (1)...(19): siRNA sense strand
gagacucuucugacuaaca

SEQ ID NO: 565117 - RNA, 19 nt, Homo sapiens
  misc_RNA (1)...(19): siRNA sense strand
aagagacagccuugacaaa

SEQ ID NO: 565118 - RNA, 19 nt, Homo sapiens
  misc_RNA (1)...(19): siRNA sense strand
gagacccucuacaaugacu

SEQ ID NO: 565119 - RNA, 19 nt, Homo sapiens
  misc_RNA (1)...(19): siRNA sense strand
gaaggcaaagagaaaauug

SEQ ID NO: 565120 - RNA, 19 nt, Homo sapiens
  misc_RNA (1)...(19): siRNA sense strand
gcaaguucuagaccuggaa

SEQ ID NO: 565121 - RNA, 19 nt, Homo sapiens
  misc_RNA (1)...(19): siRNA sense strand
uugagaagcaguuggcuau

SEQ ID NO: 565122 - RNA, 19 nt, Homo sapiens
  misc_RNA (1)...(19): siRNA sense strand
cugaaaggacaauacaaga

SEQ ID NO: 565123 - RNA, 19 nt, Homo sapiens
  misc_RNA (1)...(19): siRNA sense strand
agaauagagccauaguuca

SEQ ID NO: 565124 - RNA, 19 nt, Homo sapiens
  misc_RNA (1)...(19): siRNA sense strand
aaacugagcugaagaugga

SEQ ID NO: 565125 - RNA, 19 nt, Homo sapiens
  misc_RNA (1)...(19): siRNA sense strand
gcaggaagcacuugaguuu

SEQ ID NO: 565126 - RNA, 19 nt, Homo sapiens
  misc_RNA (1)...(19): siRNA sense strand
gaacuaagggaaacacuug

SEQ ID NO: 565127 - RNA, 19 nt, Homo sapiens
  misc_RNA (1)...(19): siRNA sense strand
gaaaacaccccucagaaua

SEQ ID NO: 565128 - RNA, 19 nt, Homo sapiens
  misc_RNA (1)...(19): siRNA sense strand
gaauagagccauaguucaa

SEQ ID NO: 565129 - RNA, 19 nt, Homo sapiens
  misc_RNA (1)...(19): siRNA sense strand
gaaagagaacuaagggaaa

SEQ ID NO: 565130 - RNA, 19 nt, Homo sapiens
  misc_RNA (1)...(19): siRNA sense strand
gaaaggacaauacaagaug

SEQ ID NO: 565131 - RNA, 19 nt, Homo sapiens
  misc_RNA (1)...(19): siRNA sense strand
gacaaacucucucuaacug

SEQ ID NO: 565132 - RNA, 19 nt, Homo sapiens
  misc_RNA (1)...(19): siRNA sense strand
gauggaagacuguauuuga

SEQ ID NO: 565133 - RNA, 19 nt, Homo sapiens
  misc_RNA (1)...(19): siRNA sense strand
ugccagagcucaagagaaa

SEQ ID NO: 565134 - RNA, 19 nt, Homo sapiens
  misc_RNA (1)...(19): siRNA sense strand
gggaaacacuugagaagca

SEQ ID NO: 565135 - RNA, 19 nt, Homo sapiens
  misc_RNA (1)...(19): siRNA sense strand
gaaaguugccauagauaau

SEQ ID NO: 565136 - RNA, 19 nt, Homo sapiens
  misc_RNA (1)...(19): siRNA sense strand
ucucaugucuccugggaua

SEQ ID NO: 565137 - RNA, 19 nt, Homo sapiens
  misc_RNA (1)...(19): siRNA sense strand
ucgagacucuucugacuaa

SEQ ID NO: 565138 - RNA, 19 nt, Homo sapiens
  misc_RNA (1)...(19): siRNA sense strand
gcaguuggcuauggaacaa

SEQ ID NO: 565139 - RNA, 19 nt, Homo sapiens
  misc_RNA (1)...(19): siRNA sense strand
gcaaacucaucuccaggaa

SEQ ID NO: 565140 - RNA, 19 nt, Homo sapiens
  misc_RNA (1)...(19): siRNA sense strand
gaaacggcgugaacaagca

SEQ ID NO: 565141 - RNA, 19 nt, Homo sapiens
  misc_RNA (1)...(19): siRNA sense strand
gugaaccgcugcaaacuca

SEQ ID NO: 565142 - RNA, 19 nt, Homo sapiens
  misc_RNA (1)...(19): siRNA sense strand
gagaagaaggcaaagagaa

SEQ ID NO: 565143 - RNA, 19 nt, Homo sapiens
  misc_RNA (1)...(19): siRNA sense strand
ucgagacccucuacaauga

SEQ ID NO: 565144 - RNA, 19 nt, Homo sapiens
  misc_RNA (1)...(19): siRNA sense strand
guugaaaguugccauagau

SEQ ID NO: 565145 - RNA, 19 nt, Homo sapiens
  misc_RNA (1)...(19): siRNA sense strand
aggaagcacuugaguuuga

SEQ ID NO: 565146 - RNA, 19 nt, Homo sapiens
  misc_RNA (1)...(19): siRNA sense strand
cagaacagaugcugaaagg

SEQ ID NO: 565147 - RNA, 19 nt, Homo sapiens
  misc_RNA (1)...(19): siRNA sense strand
caagauggaagacuguauu

SEQ ID NO: 565148 - RNA, 19 nt, Homo sapiens
  misc_RNA (1)...(19): siRNA sense strand
aaacuacugucauguacug

SEQ ID NO: 565149 - RNA, 19 nt, Homo sapiens
  misc_RNA (1)...(19): siRNA sense strand
ggaaacccguguacucaac

SEQ ID NO: 565150 - RNA, 19 nt, Homo sapiens
  misc_RNA (1)...(19): siRNA sense strand
gagaagcaguuggcuaugg

SEQ ID NO: 565151 - RNA, 19 nt, Homo sapiens
  misc_RNA (1)...(19): siRNA sense strand
ugaaaguugccauagauaa

SEQ ID NO: 565152 - RNA, 19 nt, Homo sapiens
  misc_RNA (1)...(19): siRNA sense strand
gagacagccuugacaaacu

SEQ ID NO: 565153 - RNA, 19 nt, Homo sapiens
  misc_RNA (1)...(19): siRNA sense strand
gacaauacaagauggaaga

SEQ ID NO: 565154 - RNA, 19 nt, Homo sapiens
  misc_RNA (1)...(19): siRNA sense strand
ggaagacuguauuugaaaa

SEQ ID NO: 565155 - RNA, 19 nt, Homo sapiens
  misc_RNA (1)...(19): siRNA sense strand
agaagaaggcaaagagaaa

SEQ ID NO: 565156 - RNA, 19 nt, Homo sapiens
  misc_RNA (1)...(19): siRNA sense strand
ggagaagaaggcaaagaga

SEQ ID NO: 565157 - RNA, 19 nt, Homo sapiens
  misc_RNA (1)...(19): siRNA sense strand
acaggcagcuucaacagau

SEQ ID NO: 565158 - RNA, 19 nt, Homo sapiens
  misc_RNA (1)...(19): siRNA sense strand
ggagugaaccgcugcaaac

SEQ ID NO: 565159 - RNA, 19 nt, Homo sapiens
  misc_RNA (1)...(19): siRNA sense strand
gaaaacuacugucauguac

SEQ ID NO: 565160 - RNA, 19 nt, Homo sapiens
  misc_RNA (1)...(19): siRNA sense strand
gauagucucagggucuuaa

SEQ ID NO: 565161 - RNA, 19 nt, Homo sapiens
  misc_RNA (1)...(19): siRNA sense strand
aagaauagagccauaguuc

SEQ ID NO: 565162 - RNA, 19 nt, Homo sapiens
  misc_RNA (1)...(19): siRNA sense strand
caucgagacucuucugacu

SEQ ID NO: 565163 - RNA, 19 nt, Homo sapiens
  misc_RNA (1)...(19): siRNA sense strand
agaaggagaagaaggcaaa

SEQ ID NO: 565164 - RNA, 19 nt, Homo sapiens
  misc_RNA (1)...(19): siRNA sense strand
aaaagaggcuaaagaagga

SEQ ID NO: 565165 - RNA, 19 nt, Homo sapiens
  misc_RNA (1)...(19): siRNA sense strand
ccuaagaggacucaaagug

SEQ ID NO: 565166 - RNA, 19 nt, Homo sapiens
  misc_RNA (1)...(19): siRNA sense strand
gcugaaaggacaauacaag

SEQ ID NO: 565167 - RNA, 19 nt, Homo sapiens
  misc_RNA (1)...(19): siRNA sense strand
aagcagaacagacgcuaaa

SEQ ID NO: 565168 - RNA, 19 nt, Homo sapiens
  misc_RNA (1)...(19): siRNA sense strand
ggaaaacaccccucagaau

SEQ ID NO: 565169 - RNA, 19 nt, Homo sapiens
  misc_RNA (1)...(19): siRNA sense strand
agaagcaguuggcuaugga

SEQ ID NO: 565170 - RNA, 19 nt, Homo sapiens
  misc_RNA (1)...(19): siRNA sense strand
uaagggaaacacuugagaa

SEQ ID NO: 565171 - RNA, 19 nt, Homo sapiens
  misc_RNA (1)...(19): siRNA sense strand
aaagagaacuaagggaaac

SEQ ID NO: 565172 - RNA, 19 nt, Homo sapiens
  misc_RNA (1)...(19): siRNA sense strand
caggcagcuucaacagaua

SEQ ID NO: 565173 - RNA, 19 nt, Homo sapiens
  misc_RNA (1)...(19): siRNA sense strand
cuaagaggacucaaagugu

SEQ ID NO: 565174 - RNA, 19 nt, Homo sapiens
  misc_RNA (1)...(19): siRNA sense strand
ugaaaggacaauacaagau

SEQ ID NO: 565175 - RNA, 19 nt, Homo sapiens
  misc_RNA (1)...(19): siRNA sense strand
ggcuaaagaaggagaagaa

SEQ ID NO: 565176 - RNA, 19 nt, Homo sapiens
  misc_RNA (1)...(19): siRNA sense strand
auggaagacuguauuugaa

SEQ ID NO: 565177 - RNA, 19 nt, Homo sapiens
  misc_RNA (1)...(19): siRNA sense strand
ucacgccgguggugugcaa

SEQ ID NO: 565178 - RNA, 19 nt, Homo sapiens
  misc_RNA (1)...(19): siRNA sense strand
gcagaacagaugcugaaag

SEQ ID NO: 565179 - RNA, 19 nt, Homo sapiens
  misc_RNA (1)...(19): siRNA sense strand
ucagaauaaugagugcaaa

SEQ ID NO: 565180 - RNA, 19 nt, Homo sapiens
  misc_RNA (1)...(19): siRNA sense strand
gaugagaccccgcuuucua

SEQ ID NO: 565181 - RNA, 19 nt, Homo sapiens
  misc_RNA (1)...(19): siRNA sense strand
ugacaaacucucucuaacu

SEQ ID NO: 565182 - RNA, 19 nt, Homo sapiens
  misc_RNA (1)...(19): siRNA sense strand
cacuugaguuugagacgaa

SEQ ID NO: 565183 - RNA, 19 nt, Homo sapiens
  misc_RNA (1)...(19): siRNA sense strand
ggugugcaauguggaacaa

SEQ ID NO: 565184 - RNA, 19 nt, Homo sapiens
  misc_RNA (1)...(19): siRNA sense strand
gacgaaacggcgugaacaa

SEQ ID NO: 565185 - RNA, 19 nt, Homo sapiens
  misc_RNA (1)...(19): siRNA sense strand
ggaagcacuugaguuugag

SEQ ID NO: 565186 - RNA, 19 nt, Homo sapiens
  misc_RNA (1)...(19): siRNA sense strand
acaaaagaauagagccaua

SEQ ID NO: 565187 - RNA, 19 nt, Homo sapiens
  misc_RNA (1)...(19): siRNA sense strand
gcuguugaaaguugccaua

SEQ ID NO: 565188 - RNA, 19 nt, Homo sapiens
  misc_RNA (1)...(19): siRNA sense strand
ccuggaaggccuccuaaga

SEQ ID NO: 565189 - RNA, 19 nt, Homo sapiens
  misc_RNA (1)...(19): siRNA sense strand
gaaccgcugcaaacucauc

SEQ ID NO: 565190 - RNA, 19 nt, Homo sapiens
  misc_RNA (1)...(19): siRNA sense strand
cggcagaacagaugcugaa

SEQ ID NO: 565191 - RNA, 19 nt, Homo sapiens
  misc_RNA (1)...(19): siRNA sense strand
gucucagggucuuaaauga

SEQ ID NO: 565192 - RNA, 19 nt, Homo sapiens
  misc_RNA (1)...(19): siRNA sense strand
gaagaaggcaaagagaaaa

SEQ ID NO: 565193 - RNA, 19 nt, Homo sapiens
  misc_RNA (1)...(19): siRNA sense strand
uguugaaaguugccauaga

SEQ ID NO: 565194 - RNA, 19 nt, Homo sapiens
  misc_RNA (1)...(19): siRNA sense strand
uggaagacuguauuugaaa

SEQ ID NO: 565195 - RNA, 19 nt, Homo sapiens
  misc_RNA (1)...(19): siRNA sense strand
gggaaacccguguacucaa

SEQ ID NO: 565196 - RNA, 19 nt, Homo sapiens
  misc_RNA (1)...(19): siRNA sense strand
aaaacaccccucagaauaa

SEQ ID NO: 565197 - RNA, 19 nt, Homo sapiens
  misc_RNA (1)...(19): siRNA sense strand
cagauagucucagggucuu

SEQ ID NO: 565198 - RNA, 19 nt, Homo sapiens
  misc_RNA (1)...(19): siRNA sense strand
caugucuccugggauaauu

SEQ ID NO: 565199 - RNA, 19 nt, Homo sapiens
  misc_RNA (1)...(19): siRNA sense strand
gauaaugccagagcucaag

SEQ ID NO: 565200 - RNA, 19 nt, Homo sapiens
  misc_RNA (1)...(19): siRNA sense strand
cuugacaaacucucucuaa

SEQ ID NO: 565201 - RNA, 19 nt, Homo sapiens
  misc_RNA (1)...(19): siRNA sense strand
agacagccuugacaaacuc

SEQ ID NO: 565202 - RNA, 19 nt, Homo sapiens
  misc_RNA (1)...(19): siRNA sense strand
ggacuucgagacccucuac

SEQ ID NO: 565203 - RNA, 19 nt, Homo sapiens
  misc_RNA (1)...(19): siRNA sense strand
ugaaaacuacugucaugua

SEQ ID NO: 565204 - RNA, 19 nt, Homo sapiens
  misc_RNA (1)...(19): siRNA sense strand
ccagagcucaagagaaaca

SEQ ID NO: 565205 - RNA, 19 nt, Homo sapiens
  misc_RNA (1)...(19): siRNA sense strand
aaaguugccauagauaaug

SEQ ID NO: 565206 - RNA, 19 nt, Homo sapiens
  misc_RNA (1)...(19): siRNA sense strand
agacucuucugacuaacau

SEQ ID NO: 565207 - RNA, 19 nt, Homo sapiens
  misc_RNA (1)...(19): siRNA sense strand
ugggauaauuccaccaaca

SEQ ID NO: 565208 - RNA, 19 nt, Homo sapiens
  misc_RNA (1)...(19): siRNA sense strand
gaccuggaaggccuccuaa

SEQ ID NO: 565209 - RNA, 19 nt, Homo sapiens
  misc_RNA (1)...(19): siRNA sense strand
aaagaauagagccauaguu

SEQ ID NO: 565210 - RNA, 19 nt, Homo sapiens
  misc_RNA (1)...(19): siRNA sense strand
gaagcaguuggcuauggaa

SEQ ID NO: 565211 - RNA, 19 nt, Homo sapiens
  misc_RNA (1)...(19): siRNA sense strand
aguagcagcagcagcagua

SEQ ID NO: 565212 - RNA, 19 nt, Homo sapiens
  misc_RNA (1)...(19): siRNA sense strand
caagcagaacagacgcuaa

SEQ ID NO: 565213 - RNA, 19 nt, Homo sapiens
  misc_RNA (1)...(19): siRNA sense strand
gaauaaugagugcaaaaug

SEQ ID NO: 565214 - RNA, 19 nt, Homo sapiens
  misc_RNA (1)...(19): siRNA sense strand
ugcauacggucuacaccaa

SEQ ID NO: 565215 - RNA, 19 nt, Homo sapiens
  misc_RNA (1)...(19): siRNA sense strand
aagauggaagacuguauuu

SEQ ID NO: 565216 - RNA, 19 nt, Homo sapiens
  misc_RNA (1)...(19): siRNA sense strand
gagacucuucugacuaaca

SEQ ID NO: 565217 - RNA, 19 nt, Homo sapiens
  misc_RNA (1)...(19): siRNA sense strand
aagagacagccuugacaaa

SEQ ID NO: 565218 - RNA, 19 nt, Homo sapiens
  misc_RNA (1)...(19): siRNA sense strand
gagacccucuacaaugacu

SEQ ID NO: 565219 - RNA, 19 nt, Homo sapiens
  misc_RNA (1)...(19): siRNA sense strand
gaaggcaaagagaaaauug

SEQ ID NO: 565220 - RNA, 19 nt, Homo sapiens
  misc_RNA (1)...(19): siRNA sense strand
gcaaguucuagaccuggaa

SEQ ID NO: 565221 - RNA, 19 nt, Homo sapiens
  misc_RNA (1)...(19): siRNA sense strand
uugagaagcaguuggcuau

SEQ ID NO: 565222 - RNA, 19 nt, Homo sapiens
  misc_RNA (1)...(19): siRNA sense strand
cugaaaggacaauacaaga

SEQ ID NO: 565223 - RNA, 19 nt, Homo sapiens
  misc_RNA (1)...(19): siRNA sense strand
agaauagagccauaguuca

SEQ ID NO: 565224 - RNA, 19 nt, Homo sapiens
  misc_RNA (1)...(19): siRNA sense strand
aaacugagcugaagaugga

SEQ ID NO: 565225 - RNA, 19 nt, Homo sapiens
  misc_RNA (1)...(19): siRNA sense strand
gcaggaagcacuugaguuu

SEQ ID NO: 565226 - RNA, 19 nt, Homo sapiens
  misc_RNA (1)...(19): siRNA sense strand
gaacuaagggaaacacuug

SEQ ID NO: 565227 - RNA, 19 nt, Homo sapiens
  misc_RNA (1)...(19): siRNA sense strand
gaaaacaccccucagaaua

SEQ ID NO: 565228 - RNA, 19 nt, Homo sapiens
  misc_RNA (1)...(19): siRNA sense strand
gaauagagccauaguucaa

SEQ ID NO: 565229 - RNA, 19 nt, Homo sapiens
  misc_RNA (1)...(19): siRNA sense strand
gaaagagaacuaagggaaa

SEQ ID NO: 565230 - RNA, 19 nt, Homo sapiens
  misc_RNA (1)...(19): siRNA sense strand
gaaaggacaauacaagaug

SEQ ID NO: 565231 - RNA, 19 nt, Homo sapiens
  misc_RNA (1)...(19): siRNA sense strand
gacaaacucucucuaacug

SEQ ID NO: 565232 - RNA, 19 nt, Homo sapiens
  misc_RNA (1)...(19): siRNA sense strand
gauggaagacuguauuuga

SEQ ID NO: 565233 - RNA, 19 nt, Homo sapiens
  misc_RNA (1)...(19): siRNA sense strand
ugccagagcucaagagaaa

SEQ ID NO: 565234 - RNA, 19 nt, Homo sapiens
  misc_RNA (1)...(19): siRNA sense strand
gggaaacacuugagaagca

SEQ ID NO: 565235 - RNA, 19 nt, Homo sapiens
  misc_RNA (1)...(19): siRNA sense strand
gaaaguugccauagauaau

SEQ ID NO: 565236 - RNA, 19 nt, Homo sapiens
  misc_RNA (1)...(19): siRNA sense strand
ucucaugucuccugggaua

SEQ ID NO: 565237 - RNA, 19 nt, Homo sapiens
  misc_RNA (1)...(19): siRNA sense strand
ucgagacucuucugacuaa

SEQ ID NO: 565238 - RNA, 19 nt, Homo sapiens
  misc_RNA (1)...(19): siRNA sense strand
gcaguuggcuauggaacaa

SEQ ID NO: 565239 - RNA, 19 nt, Homo sapiens
  misc_RNA (1)...(19): siRNA sense strand
gcaaacucaucuccaggaa

SEQ ID NO: 565240 - RNA, 19 nt, Homo sapiens
  misc_RNA (1)...(19): siRNA sense strand
gaaacggcgugaacaagca

SEQ ID NO: 565241 - RNA, 19 nt, Homo sapiens
  misc_RNA (1)...(19): siRNA sense strand
gugaaccgcugcaaacuca

SEQ ID NO: 565242 - RNA, 19 nt, Homo sapiens
  misc_RNA (1)...(19): siRNA sense strand
gagaagaaggcaaagagaa

SEQ ID NO: 565243 - RNA, 19 nt, Homo sapiens
  misc_RNA (1)...(19): siRNA sense strand
ucgagacccucuacaauga

SEQ ID NO: 565244 - RNA, 19 nt, Homo sapiens
  misc_RNA (1)...(19): siRNA sense strand
guugaaaguugccauagau

SEQ ID NO: 565245 - RNA, 19 nt, Homo sapiens
  misc_RNA (1)...(19): siRNA sense strand
aggaagcacuugaguuuga

SEQ ID NO: 565246 - RNA, 19 nt, Homo sapiens
  misc_RNA (1)...(19): siRNA sense strand
cagaacagaugcugaaagg

SEQ ID NO: 565247 - RNA, 19 nt, Homo sapiens
  misc_RNA (1)...(19): siRNA sense strand
caagauggaagacuguauu

SEQ ID NO: 565248 - RNA, 19 nt, Homo sapiens
  misc_RNA (1)...(19): siRNA sense strand
aaacuacugucauguacug

SEQ ID NO: 565249 - RNA, 19 nt, Homo sapiens
  misc_RNA (1)...(19): siRNA sense strand
ggaaacccguguacucaac

SEQ ID NO: 565250 - RNA, 19 nt, Homo sapiens
  misc_RNA (1)...(19): siRNA sense strand
gagaagcaguuggcuaugg

SEQ ID NO: 565251 - RNA, 19 nt, Homo sapiens
  misc_RNA (1)...(19): siRNA sense strand
ugaaaguugccauagauaa

SEQ ID NO: 565252 - RNA, 19 nt, Homo sapiens
  misc_RNA (1)...(19): siRNA sense strand
gagacagccuugacaaacu

SEQ ID NO: 565253 - RNA, 19 nt, Homo sapiens
  misc_RNA (1)...(19): siRNA sense strand
gacaauacaagauggaaga

SEQ ID NO: 565254 - RNA, 19 nt, Homo sapiens
  misc_RNA (1)...(19): siRNA sense strand
ggaagacuguauuugaaaa

SEQ ID NO: 565255 - RNA, 19 nt, Homo sapiens
  misc_RNA (1)...(19): siRNA sense strand
agaagaaggcaaagagaaa

SEQ ID NO: 565256 - RNA, 19 nt, Homo sapiens
  misc_RNA (1)...(19): siRNA sense strand
ggagaagaaggcaaagaga

SEQ ID NO: 565257 - RNA, 19 nt, Homo sapiens
  misc_RNA (1)...(19): siRNA sense strand
acaggcagcuucaacagau

SEQ ID NO: 565258 - RNA, 19 nt, Homo sapiens
  misc_RNA (1)...(19): siRNA sense strand
ggagugaaccgcugcaaac

SEQ ID NO: 565259 - RNA, 19 nt, Homo sapiens
  misc_RNA (1)...(19): siRNA sense strand
gaaaacuacugucauguac

SEQ ID NO: 565260 - RNA, 19 nt, Homo sapiens
  misc_RNA (1)...(19): siRNA sense strand
gauagucucagggucuuaa

SEQ ID NO: 565261 - RNA, 19 nt, Homo sapiens
  misc_RNA (1)...(19): siRNA sense strand
aagaauagagccauaguuc

SEQ ID NO: 565262 - RNA, 19 nt, Homo sapiens
  misc_RNA (1)...(19): siRNA sense strand
caucgagacucuucugacu

SEQ ID NO: 565263 - RNA, 19 nt, Homo sapiens
  misc_RNA (1)...(19): siRNA sense strand
agaaggagaagaaggcaaa

SEQ ID NO: 565264 - RNA, 19 nt, Homo sapiens
  misc_RNA (1)...(19): siRNA sense strand
aaaagaggcuaaagaagga

SEQ ID NO: 565265 - RNA, 19 nt, Homo sapiens
  misc_RNA (1)...(19): siRNA sense strand
ccuaagaggacucaaagug

SEQ ID NO: 565266 - RNA, 19 nt, Homo sapiens
  misc_RNA (1)...(19): siRNA sense strand
gcugaaaggacaauacaag

SEQ ID NO: 565267 - RNA, 19 nt, Homo sapiens
  misc_RNA (1)...(19): siRNA sense strand
aagcagaacagacgcuaaa

SEQ ID NO: 565268 - RNA, 19 nt, Homo sapiens
  misc_RNA (1)...(19): siRNA sense strand
ggaaaacaccccucagaau

SEQ ID NO: 565269 - RNA, 19 nt, Homo sapiens
  misc_RNA (1)...(19): siRNA sense strand
agaagcaguuggcuaugga

SEQ ID NO: 565270 - RNA, 19 nt, Homo sapiens
  misc_RNA (1)...(19): siRNA sense strand
uaagggaaacacuugagaa

SEQ ID NO: 565271 - RNA, 19 nt, Homo sapiens
  misc_RNA (1)...(19): siRNA sense strand
aaagagaacuaagggaaac

SEQ ID NO: 565272 - RNA, 19 nt, Homo sapiens
  misc_RNA (1)...(19): siRNA sense strand
caggcagcuucaacagaua

SEQ ID NO: 565273 - RNA, 19 nt, Homo sapiens
  misc_RNA (1)...(19): siRNA sense strand
cuaagaggacucaaagugu

SEQ ID NO: 565274 - RNA, 19 nt, Homo sapiens
  misc_RNA (1)...(19): siRNA sense strand
ugaaaggacaauacaagau

SEQ ID NO: 565275 - RNA, 19 nt, Homo sapiens
  misc_RNA (1)...(19): siRNA sense strand
ggcuaaagaaggagaagaa

SEQ ID NO: 565276 - RNA, 19 nt, Homo sapiens
  misc_RNA (1)...(19): siRNA sense strand
auggaagacuguauuugaa

SEQ ID NO: 565277 - RNA, 19 nt, Homo sapiens
  misc_RNA (1)...(19): siRNA sense strand
ucacgccgguggugugcaa

SEQ ID NO: 565278 - RNA, 19 nt, Homo sapiens
  misc_RNA (1)...(19): siRNA sense strand
gcagaacagaugcugaaag

SEQ ID NO: 565279 - RNA, 19 nt, Homo sapiens
  misc_RNA (1)...(19): siRNA sense strand
ucagaauaaugagugcaaa

SEQ ID NO: 565280 - RNA, 19 nt, Homo sapiens
  misc_RNA (1)...(19): siRNA sense strand
gaugagaccccgcuuucua

SEQ ID NO: 565281 - RNA, 19 nt, Homo sapiens
  misc_RNA (1)...(19): siRNA sense strand
ugacaaacucucucuaacu

SEQ ID NO: 565282 - RNA, 19 nt, Homo sapiens
  misc_RNA (1)...(19): siRNA sense strand
cacuugaguuugagacgaa

SEQ ID NO: 565283 - RNA, 19 nt, Homo sapiens
  misc_RNA (1)...(19): siRNA sense strand
ggugugcaauguggaacaa

SEQ ID NO: 565284 - RNA, 19 nt, Homo sapiens
  misc_RNA (1)...(19): siRNA sense strand
gacgaaacggcgugaacaa

SEQ ID NO: 565285 - RNA, 19 nt, Homo sapiens
  misc_RNA (1)...(19): siRNA sense strand
ggaagcacuugaguuugag

SEQ ID NO: 565286 - RNA, 19 nt, Homo sapiens
  misc_RNA (1)...(19): siRNA sense strand
acaaaagaauagagccaua

SEQ ID NO: 565287 - RNA, 19 nt, Homo sapiens
  misc_RNA (1)...(19): siRNA sense strand
gcuguugaaaguugccaua

SEQ ID NO: 565288 - RNA, 19 nt, Homo sapiens
  misc_RNA (1)...(19): siRNA sense strand
ccuggaaggccuccuaaga

SEQ ID NO: 565289 - RNA, 19 nt, Homo sapiens
  misc_RNA (1)...(19): siRNA sense strand
gaaccgcugcaaacucauc

SEQ ID NO: 565290 - RNA, 19 nt, Homo sapiens
  misc_RNA (1)...(19): siRNA sense strand
cggcagaacagaugcugaa

SEQ ID NO: 565291 - RNA, 19 nt, Homo sapiens
  misc_RNA (1)...(19): siRNA sense strand
gucucagggucuuaaauga

SEQ ID NO: 565292 - RNA, 19 nt, Homo sapiens
  misc_RNA (1)...(19): siRNA sense strand
gaagaaggcaaagagaaaa

SEQ ID NO: 565293 - RNA, 19 nt, Homo sapiens
  misc_RNA (1)...(19): siRNA sense strand
uguugaaaguugccauaga

SEQ ID NO: 565294 - RNA, 19 nt, Homo sapiens
  misc_RNA (1)...(19): siRNA sense strand
uggaagacuguauuugaaa

SEQ ID NO: 565295 - RNA, 19 nt, Homo sapiens
  misc_RNA (1)...(19): siRNA sense strand
gggaaacccguguacucaa

SEQ ID NO: 565296 - RNA, 19 nt, Homo sapiens
  misc_RNA (1)...(19): siRNA sense strand
aaaacaccccucagaauaa

SEQ ID NO: 565297 - RNA, 19 nt, Homo sapiens
  misc_RNA (1)...(19): siRNA sense strand
cagauagucucagggucuu

SEQ ID NO: 565298 - RNA, 19 nt, Homo sapiens
  misc_RNA (1)...(19): siRNA sense strand
caugucuccugggauaauu

SEQ ID NO: 565299 - RNA, 19 nt, Homo sapiens
  misc_RNA (1)...(19): siRNA sense strand
gauaaugccagagcucaag

SEQ ID NO: 565300 - RNA, 19 nt, Homo sapiens
  misc_RNA (1)...(19): siRNA sense strand
cuugacaaacucucucuaa

SEQ ID NO: 565301 - RNA, 19 nt, Homo sapiens
  misc_RNA (1)...(19): siRNA sense strand
agacagccuugacaaacuc

SEQ ID NO: 565302 - RNA, 19 nt, Homo sapiens
  misc_RNA (1)...(19): siRNA sense strand
ggacuucgagacccucuac

SEQ ID NO: 565303 - RNA, 19 nt, Homo sapiens
  misc_RNA (1)...(19): siRNA sense strand
ugaaaacuacugucaugua

SEQ ID NO: 565304 - RNA, 19 nt, Homo sapiens
  misc_RNA (1)...(19): siRNA sense strand
ccagagcucaagagaaaca

SEQ ID NO: 565305 - RNA, 19 nt, Homo sapiens
  misc_RNA (1)...(19): siRNA sense strand
aaaguugccauagauaaug

SEQ ID NO: 565306 - RNA, 19 nt, Homo sapiens
  misc_RNA (1)...(19): siRNA sense strand
agacucuucugacuaacau

SEQ ID NO: 565307 - RNA, 19 nt, Homo sapiens
  misc_RNA (1)...(19): siRNA sense strand
ugggauaauuccaccaaca

SEQ ID NO: 565308 - RNA, 19 nt, Homo sapiens
  misc_RNA (1)...(19): siRNA sense strand
gaccuggaaggccuccuaa

SEQ ID NO: 565309 - RNA, 19 nt, Homo sapiens
  misc_RNA (1)...(19): siRNA sense strand
aaagaauagagccauaguu

SEQ ID NO: 565310 - RNA, 19 nt, Homo sapiens
  misc_RNA (1)...(19): siRNA sense strand
gaagcaguuggcuauggaa

SEQ ID NO: 565311 - RNA, 19 nt, Homo sapiens
  misc_RNA (1)...(19): siRNA sense strand
aguagcagcagcagcagua

SEQ ID NO: 565312 - RNA, 19 nt, Homo sapiens
  misc_RNA (1)...(19): siRNA sense strand
caagcagaacagacgcuaa

SEQ ID NO: 565313 - RNA, 19 nt, Homo sapiens
  misc_RNA (1)...(19): siRNA sense strand
gaauaaugagugcaaaaug

SEQ ID NO: 565314 - RNA, 19 nt, Homo sapiens
  misc_RNA (1)...(19): siRNA sense strand
ugcauacggucuacaccaa

SEQ ID NO: 565315 - RNA, 19 nt, Homo sapiens
  misc_RNA (1)...(19): siRNA sense strand
aagauggaagacuguauuu

SEQ ID NO: 565316 - RNA, 19 nt, Homo sapiens
  misc_RNA (1)...(19): siRNA sense strand
gagacucuucugacuaaca

SEQ ID NO: 565317 - RNA, 19 nt, Homo sapiens
  misc_RNA (1)...(19): siRNA sense strand
aagagacagccuugacaaa

SEQ ID NO: 565318 - RNA, 19 nt, Homo sapiens
  misc_RNA (1)...(19): siRNA sense strand
gagacccucuacaaugacu

SEQ ID NO: 565319 - RNA, 19 nt, Homo sapiens
  misc_RNA (1)...(19): siRNA sense strand
gaaggcaaagagaaaauug

SEQ ID NO: 565320 - RNA, 19 nt, Homo sapiens
  misc_RNA (1)...(19): siRNA sense strand
gcaaguucuagaccuggaa

SEQ ID NO: 565321 - RNA, 19 nt, Homo sapiens
  misc_RNA (1)...(19): siRNA sense strand
uugagaagcaguuggcuau

SEQ ID NO: 565322 - RNA, 19 nt, Homo sapiens
  misc_RNA (1)...(19): siRNA sense strand
cugaaaggacaauacaaga

SEQ ID NO: 565323 - RNA, 19 nt, Homo sapiens
  misc_RNA (1)...(19): siRNA sense strand
agaauagagccauaguuca

SEQ ID NO: 565324 - RNA, 19 nt, Homo sapiens
  misc_RNA (1)...(19): siRNA sense strand
aaacugagcugaagaugga

SEQ ID NO: 565325 - RNA, 19 nt, Homo sapiens
  misc_RNA (1)...(19): siRNA sense strand
gcaggaagcacuugaguuu

SEQ ID NO: 565326 - RNA, 19 nt, Homo sapiens
  misc_RNA (1)...(19): siRNA sense strand
gaacuaagggaaacacuug

SEQ ID NO: 565327 - RNA, 19 nt, Homo sapiens
  misc_RNA (1)...(19): siRNA sense strand
gaaaacaccccucagaaua

SEQ ID NO: 565328 - RNA, 19 nt, Homo sapiens
  misc_RNA (1)...(19): siRNA sense strand
gaauagagccauaguucaa

SEQ ID NO: 565329 - RNA, 19 nt, Homo sapiens
  misc_RNA (1)...(19): siRNA sense strand
gaaagagaacuaagggaaa

SEQ ID NO: 565330 - RNA, 19 nt, Homo sapiens
  misc_RNA (1)...(19): siRNA sense strand
gaaaggacaauacaagaug

SEQ ID NO: 565331 - RNA, 19 nt, Homo sapiens
  misc_RNA (1)...(19): siRNA sense strand
gacaaacucucucuaacug

SEQ ID NO: 565332 - RNA, 19 nt, Homo sapiens
  misc_RNA (1)...(19): siRNA sense strand
gauggaagacuguauuuga

SEQ ID NO: 565333 - RNA, 19 nt, Homo sapiens
  misc_RNA (1)...(19): siRNA sense strand
ugccagagcucaagagaaa

SEQ ID NO: 565334 - RNA, 19 nt, Homo sapiens
  misc_RNA (1)...(19): siRNA sense strand
gggaaacacuugagaagca

SEQ ID NO: 565335 - RNA, 19 nt, Homo sapiens
  misc_RNA (1)...(19): siRNA sense strand
gaaaguugccauagauaau

SEQ ID NO: 565336 - RNA, 19 nt, Homo sapiens
  misc_RNA (1)...(19): siRNA sense strand
ucucaugucuccugggaua

SEQ ID NO: 565337 - RNA, 19 nt, Homo sapiens
  misc_RNA (1)...(19): siRNA sense strand
ucgagacucuucugacuaa

SEQ ID NO: 565338 - RNA, 19 nt, Homo sapiens
  misc_RNA (1)...(19): siRNA sense strand
gcaguuggcuauggaacaa

SEQ ID NO: 565339 - RNA, 19 nt, Homo sapiens
  misc_RNA (1)...(19): siRNA sense strand
gcaaacucaucuccaggaa

SEQ ID NO: 565340 - RNA, 19 nt, Homo sapiens
  misc_RNA (1)...(19): siRNA sense strand
gaaacggcgugaacaagca

SEQ ID NO: 565341 - RNA, 19 nt, Homo sapiens
  misc_RNA (1)...(19): siRNA sense strand
gugaaccgcugcaaacuca

SEQ ID NO: 565342 - RNA, 19 nt, Homo sapiens
  misc_RNA (1)...(19): siRNA sense strand
gagaagaaggcaaagagaa

SEQ ID NO: 565343 - RNA, 19 nt, Homo sapiens
  misc_RNA (1)...(19): siRNA sense strand
ucgagacccucuacaauga

SEQ ID NO: 565344 - RNA, 19 nt, Homo sapiens
  misc_RNA (1)...(19): siRNA sense strand
guugaaaguugccauagau

SEQ ID NO: 565345 - RNA, 19 nt, Homo sapiens
  misc_RNA (1)...(19): siRNA sense strand
aggaagcacuugaguuuga

SEQ ID NO: 565346 - RNA, 19 nt, Homo sapiens
  misc_RNA (1)...(19): siRNA sense strand
cagaacagaugcugaaagg

SEQ ID NO: 565347 - RNA, 19 nt, Homo sapiens
  misc_RNA (1)...(19): siRNA sense strand
caagauggaagacuguauu

SEQ ID NO: 565348 - RNA, 19 nt, Homo sapiens
  misc_RNA (1)...(19): siRNA sense strand
aaacuacugucauguacug

SEQ ID NO: 565349 - RNA, 19 nt, Homo sapiens
  misc_RNA (1)...(19): siRNA sense strand
ggaaacccguguacucaac

SEQ ID NO: 565350 - RNA, 19 nt, Homo sapiens
  misc_RNA (1)...(19): siRNA sense strand
gagaagcaguuggcuaugg

SEQ ID NO: 565351 - RNA, 19 nt, Homo sapiens
  misc_RNA (1)...(19): siRNA sense strand
ugaaaguugccauagauaa

SEQ ID NO: 565352 - RNA, 19 nt, Homo sapiens
  misc_RNA (1)...(19): siRNA sense strand
gagacagccuugacaaacu

SEQ ID NO: 565353 - RNA, 19 nt, Homo sapiens
  misc_RNA (1)...(19): siRNA sense strand
gacaauacaagauggaaga

SEQ ID NO: 565354 - RNA, 19 nt, Homo sapiens
  misc_RNA (1)...(19): siRNA sense strand
ggaagacuguauuugaaaa

SEQ ID NO: 565355 - RNA, 19 nt, Homo sapiens
  misc_RNA (1)...(19): siRNA sense strand
agaagaaggcaaagagaaa

SEQ ID NO: 565356 - RNA, 19 nt, Homo sapiens
  misc_RNA (1)...(19): siRNA sense strand
ggagaagaaggcaaagaga

SEQ ID NO: 565357 - RNA, 19 nt, Homo sapiens
  misc_RNA (1)...(19): siRNA sense strand
acaggcagcuucaacagau

SEQ ID NO: 565358 - RNA, 19 nt, Homo sapiens
  misc_RNA (1)...(19): siRNA sense strand
ggagugaaccgcugcaaac

SEQ ID NO: 565359 - RNA, 19 nt, Homo sapiens
  misc_RNA (1)...(19): siRNA sense strand
gaaaacuacugucauguac

SEQ ID NO: 565360 - RNA, 19 nt, Homo sapiens
  misc_RNA (1)...(19): siRNA sense strand
gauagucucagggucuuaa

SEQ ID NO: 565361 - RNA, 19 nt, Homo sapiens
  misc_RNA (1)...(19): siRNA sense strand
aagaauagagccauaguuc

SEQ ID NO: 565362 - RNA, 19 nt, Homo sapiens
  misc_RNA (1)...(19): siRNA sense strand
caucgagacucuucugacu

SEQ ID NO: 565363 - RNA, 19 nt, Homo sapiens
  misc_RNA (1)...(19): siRNA sense strand
agaaggagaagaaggcaaa

SEQ ID NO: 565364 - RNA, 19 nt, Homo sapiens
  misc_RNA (1)...(19): siRNA sense strand
aaaagaggcuaaagaagga

SEQ ID NO: 565365 - RNA, 19 nt, Homo sapiens
  misc_RNA (1)...(19): siRNA sense strand
ccuaagaggacucaaagug

SEQ ID NO: 565366 - RNA, 19 nt, Homo sapiens
  misc_RNA (1)...(19): siRNA sense strand
gcugaaaggacaauacaag

SEQ ID NO: 565367 - RNA, 19 nt, Homo sapiens
  misc_RNA (1)...(19): siRNA sense strand
aagcagaacagacgcuaaa

SEQ ID NO: 565368 - RNA, 19 nt, Homo sapiens
  misc_RNA (1)...(19): siRNA sense strand
ggaaaacaccccucagaau

SEQ ID NO: 565369 - RNA, 19 nt, Homo sapiens
  misc_RNA (1)...(19): siRNA sense strand
agaagcaguuggcuaugga

SEQ ID NO: 565370 - RNA, 19 nt, Homo sapiens
  misc_RNA (1)...(19): siRNA sense strand
uaagggaaacacuugagaa

SEQ ID NO: 565371 - RNA, 19 nt, Homo sapiens
  misc_RNA (1)...(19): siRNA sense strand
aaagagaacuaagggaaac

SEQ ID NO: 565372 - RNA, 19 nt, Homo sapiens
  misc_RNA (1)...(19): siRNA sense strand
caggcagcuucaacagaua

SEQ ID NO: 565373 - RNA, 19 nt, Homo sapiens
  misc_RNA (1)...(19): siRNA sense strand
cuaagaggacucaaagugu

SEQ ID NO: 565374 - RNA, 19 nt, Homo sapiens
  misc_RNA (1)...(19): siRNA sense strand
ugaaaggacaauacaagau

SEQ ID NO: 565375 - RNA, 19 nt, Homo sapiens
  misc_RNA (1)...(19): siRNA sense strand
ggcuaaagaaggagaagaa

SEQ ID NO: 565376 - RNA, 19 nt, Homo sapiens
  misc_RNA (1)...(19): siRNA sense strand
auggaagacuguauuugaa

SEQ ID NO: 565377 - RNA, 19 nt, Homo sapiens
  misc_RNA (1)...(19): siRNA sense strand
ucacgccgguggugugcaa

SEQ ID NO: 565378 - RNA, 19 nt, Homo sapiens
  misc_RNA (1)...(19): siRNA sense strand
gcagaacagaugcugaaag

SEQ ID NO: 565379 - RNA, 19 nt, Homo sapiens
  misc_RNA (1)...(19): siRNA sense strand
ucagaauaaugagugcaaa

SEQ ID NO: 565380 - RNA, 19 nt, Homo sapiens
  misc_RNA (1)...(19): siRNA sense strand
gaugagaccccgcuuucua

SEQ ID NO: 565381 - RNA, 19 nt, Homo sapiens
  misc_RNA (1)...(19): siRNA sense strand
ugacaaacucucucuaacu

SEQ ID NO: 565382 - RNA, 19 nt, Homo sapiens
  misc_RNA (1)...(19): siRNA sense strand
cacuugaguuugagacgaa

SEQ ID NO: 565383 - RNA, 19 nt, Homo sapiens
  misc_RNA (1)...(19): siRNA sense strand
ggugugcaauguggaacaa

SEQ ID NO: 565384 - RNA, 19 nt, Homo sapiens
  misc_RNA (1)...(19): siRNA sense strand
gacgaaacggcgugaacaa

SEQ ID NO: 565385 - RNA, 19 nt, Homo sapiens
  misc_RNA (1)...(19): siRNA sense strand
ggaagcacuugaguuugag

SEQ ID NO: 565386 - RNA, 19 nt, Homo sapiens
  misc_RNA (1)...(19): siRNA sense strand
acaaaagaauagagccaua

SEQ ID NO: 565387 - RNA, 19 nt, Homo sapiens
  misc_RNA (1)...(19): siRNA sense strand
gcuguugaaaguugccaua

SEQ ID NO: 565388 - RNA, 19 nt, Homo sapiens
  misc_RNA (1)...(19): siRNA sense strand
ccuggaaggccuccuaaga

SEQ ID NO: 565389 - RNA, 19 nt, Homo sapiens
  misc_RNA (1)...(19): siRNA sense strand
gaaccgcugcaaacucauc

SEQ ID NO: 565390 - RNA, 19 nt, Homo sapiens
  misc_RNA (1)...(19): siRNA sense strand
cggcagaacagaugcugaa

SEQ ID NO: 565391 - RNA, 19 nt, Homo sapiens
  misc_RNA (1)...(19): siRNA sense strand
gucucagggucuuaaauga

SEQ ID NO: 565392 - RNA, 19 nt, Homo sapiens
  misc_RNA (1)...(19): siRNA sense strand
gaagaaggcaaagagaaaa

SEQ ID NO: 565393 - RNA, 19 nt, Homo sapiens
  misc_RNA (1)...(19): siRNA sense strand
uguugaaaguugccauaga

SEQ ID NO: 565394 - RNA, 19 nt, Homo sapiens
  misc_RNA (1)...(19): siRNA sense strand
uggaagacuguauuugaaa

SEQ ID NO: 565395 - RNA, 19 nt, Homo sapiens
  misc_RNA (1)...(19): siRNA sense strand
gggaaacccguguacucaa

SEQ ID NO: 565396 - RNA, 19 nt, Homo sapiens
  misc_RNA (1)...(19): siRNA sense strand
aaaacaccccucagaauaa

SEQ ID NO: 565397 - RNA, 19 nt, Homo sapiens
  misc_RNA (1)...(19): siRNA sense strand
cagauagucucagggucuu

SEQ ID NO: 565398 - RNA, 19 nt, Homo sapiens
  misc_RNA (1)...(19): siRNA sense strand
caugucuccugggauaauu

SEQ ID NO: 565399 - RNA, 19 nt, Homo sapiens
  misc_RNA (1)...(19): siRNA sense strand
gauaaugccagagcucaag

SEQ ID NO: 565400 - RNA, 19 nt, Homo sapiens
  misc_RNA (1)...(19): siRNA sense strand
cuugacaaacucucucuaa

SEQ ID NO: 565401 - RNA, 19 nt, Homo sapiens
  misc_RNA (1)...(19): siRNA sense strand
agacagccuugacaaacuc

SEQ ID NO: 565402 - RNA, 19 nt, Homo sapiens
  misc_RNA (1)...(19): siRNA sense strand
ggacuucgagacccucuac

SEQ ID NO: 565403 - RNA, 19 nt, Homo sapiens
  misc_RNA (1)...(19): siRNA sense strand
ugaaaacuacugucaugua

SEQ ID NO: 565404 - RNA, 19 nt, Homo sapiens
  misc_RNA (1)...(19): siRNA sense strand
ccagagcucaagagaaaca

SEQ ID NO: 565405 - RNA, 19 nt, Homo sapiens
  misc_RNA (1)...(19): siRNA sense strand
aaaguugccauagauaaug

SEQ ID NO: 565406 - RNA, 19 nt, Homo sapiens
  misc_RNA (1)...(19): siRNA sense strand
agacucuucugacuaacau

SEQ ID NO: 565407 - RNA, 19 nt, Homo sapiens
  misc_RNA (1)...(19): siRNA sense strand
ugggauaauuccaccaaca

SEQ ID NO: 565408 - RNA, 19 nt, Homo sapiens
  misc_RNA (1)...(19): siRNA sense strand
gaccuggaaggccuccuaa

SEQ ID NO: 565409 - RNA, 19 nt, Homo sapiens
  misc_RNA (1)...(19): siRNA sense strand
aaagaauagagccauaguu

SEQ ID NO: 565410 - RNA, 19 nt, Homo sapiens
  misc_RNA (1)...(19): siRNA sense strand
gaagcaguuggcuauggaa

SEQ ID NO: 565411 - RNA, 19 nt, Homo sapiens
  misc_RNA (1)...(19): siRNA sense strand
aguagcagcagcagcagua

SEQ ID NO: 565412 - RNA, 19 nt, Homo sapiens
  misc_RNA (1)...(19): siRNA sense strand
caagcagaacagacgcuaa

SEQ ID NO: 565413 - RNA, 19 nt, Homo sapiens
  misc_RNA (1)...(19): siRNA sense strand
gaauaaugagugcaaaaug

SEQ ID NO: 565414 - RNA, 19 nt, Homo sapiens
  misc_RNA (1)...(19): siRNA sense strand
ugcauacggucuacaccaa

SEQ ID NO: 565415 - RNA, 19 nt, Homo sapiens
  misc_RNA (1)...(19): siRNA sense strand
aagauggaagacuguauuu

SEQ ID NO: 565416 - RNA, 19 nt, Homo sapiens
  misc_RNA (1)...(19): siRNA sense strand
gagacucuucugacuaaca

SEQ ID NO: 565417 - RNA, 19 nt, Homo sapiens
  misc_RNA (1)...(19): siRNA sense strand
aagagacagccuugacaaa

SEQ ID NO: 565418 - RNA, 19 nt, Homo sapiens
  misc_RNA (1)...(19): siRNA sense strand
gagacccucuacaaugacu

SEQ ID NO: 565419 - RNA, 19 nt, Homo sapiens
  misc_RNA (1)...(19): siRNA sense strand
gaaggcaaagagaaaauug

SEQ ID NO: 565420 - RNA, 19 nt, Homo sapiens
  misc_RNA (1)...(19): siRNA sense strand
gcaaguucuagaccuggaa

SEQ ID NO: 565421 - RNA, 19 nt, Homo sapiens
  misc_RNA (1)...(19): siRNA sense strand
uugagaagcaguuggcuau

SEQ ID NO: 565422 - RNA, 19 nt, Homo sapiens
  misc_RNA (1)...(19): siRNA sense strand
cugaaaggacaauacaaga

SEQ ID NO: 565423 - RNA, 19 nt, Homo sapiens
  misc_RNA (1)...(19): siRNA sense strand
agaauagagccauaguuca

SEQ ID NO: 565424 - RNA, 19 nt, Homo sapiens
  misc_RNA (1)...(19): siRNA sense strand
aaacugagcugaagaugga

SEQ ID NO: 565425 - RNA, 19 nt, Homo sapiens
  misc_RNA (1)...(19): siRNA sense strand
gcaggaagcacuugaguuu

SEQ ID NO: 565426 - RNA, 19 nt, Homo sapiens
  misc_RNA (1)...(19): siRNA sense strand
gaacuaagggaaacacuug

SEQ ID NO: 565427 - RNA, 19 nt, Homo sapiens
  misc_RNA (1)...(19): siRNA sense strand
gaaaacaccccucagaaua

SEQ ID NO: 565428 - RNA, 19 nt, Homo sapiens
  misc_RNA (1)...(19): siRNA sense strand
gaauagagccauaguucaa

SEQ ID NO: 565429 - RNA, 19 nt, Homo sapiens
  misc_RNA (1)...(19): siRNA sense strand
gaaagagaacuaagggaaa

SEQ ID NO: 565430 - RNA, 19 nt, Homo sapiens
  misc_RNA (1)...(19): siRNA sense strand
gaaaggacaauacaagaug

SEQ ID NO: 565431 - RNA, 19 nt, Homo sapiens
  misc_RNA (1)...(19): siRNA sense strand
gacaaacucucucuaacug

SEQ ID NO: 565432 - RNA, 19 nt, Homo sapiens
  misc_RNA (1)...(19): siRNA sense strand
gauggaagacuguauuuga

SEQ ID NO: 565433 - RNA, 19 nt, Homo sapiens
  misc_RNA (1)...(19): siRNA sense strand
ugccagagcucaagagaaa

SEQ ID NO: 565434 - RNA, 19 nt, Homo sapiens
  misc_RNA (1)...(19): siRNA sense strand
gggaaacacuugagaagca

SEQ ID NO: 565435 - RNA, 19 nt, Homo sapiens
  misc_RNA (1)...(19): siRNA sense strand
gaaaguugccauagauaau

SEQ ID NO: 565436 - RNA, 19 nt, Homo sapiens
  misc_RNA (1)...(19): siRNA sense strand
ucucaugucuccugggaua

SEQ ID NO: 565437 - RNA, 19 nt, Homo sapiens
  misc_RNA (1)...(19): siRNA sense strand
ucgagacucuucugacuaa

SEQ ID NO: 565438 - RNA, 19 nt, Homo sapiens
  misc_RNA (1)...(19): siRNA sense strand
gcaguuggcuauggaacaa

SEQ ID NO: 565439 - RNA, 19 nt, Homo sapiens
  misc_RNA (1)...(19): siRNA sense strand
gcaaacucaucuccaggaa

SEQ ID NO: 565440 - RNA, 19 nt, Homo sapiens
  misc_RNA (1)...(19): siRNA sense strand
gaaacggcgugaacaagca

SEQ ID NO: 565441 - RNA, 19 nt, Homo sapiens
  misc_RNA (1)...(19): siRNA sense strand
gugaaccgcugcaaacuca

SEQ ID NO: 565442 - RNA, 19 nt, Homo sapiens
  misc_RNA (1)...(19): siRNA sense strand
gagaagaaggcaaagagaa

SEQ ID NO: 565443 - RNA, 19 nt, Homo sapiens
  misc_RNA (1)...(19): siRNA sense strand
ucgagacccucuacaauga

SEQ ID NO: 565444 - RNA, 19 nt, Homo sapiens
  misc_RNA (1)...(19): siRNA sense strand
guugaaaguugccauagau

SEQ ID NO: 565445 - RNA, 19 nt, Homo sapiens
  misc_RNA (1)...(19): siRNA sense strand
aggaagcacuugaguuuga

SEQ ID NO: 565446 - RNA, 19 nt, Homo sapiens
  misc_RNA (1)...(19): siRNA sense strand
cagaacagaugcugaaagg

SEQ ID NO: 565447 - RNA, 19 nt, Homo sapiens
  misc_RNA (1)...(19): siRNA sense strand
caagauggaagacuguauu

SEQ ID NO: 565448 - RNA, 19 nt, Homo sapiens
  misc_RNA (1)...(19): siRNA sense strand
aaacuacugucauguacug

SEQ ID NO: 565449 - RNA, 19 nt, Homo sapiens
  misc_RNA (1)...(19): siRNA sense strand
ggaaacccguguacucaac

SEQ ID NO: 565450 - RNA, 19 nt, Homo sapiens
  misc_RNA (1)...(19): siRNA sense strand
gagaagcaguuggcuaugg

SEQ ID NO: 565451 - RNA, 19 nt, Homo sapiens
  misc_RNA (1)...(19): siRNA sense strand
ugaaaguugccauagauaa

SEQ ID NO: 565452 - RNA, 19 nt, Homo sapiens
  misc_RNA (1)...(19): siRNA sense strand
gagacagccuugacaaacu

SEQ ID NO: 565453 - RNA, 19 nt, Homo sapiens
  misc_RNA (1)...(19): siRNA sense strand
gacaauacaagauggaaga

SEQ ID NO: 565454 - RNA, 19 nt, Homo sapiens
  misc_RNA (1)...(19): siRNA sense strand
ggaagacuguauuugaaaa

SEQ ID NO: 565455 - RNA, 19 nt, Homo sapiens
  misc_RNA (1)...(19): siRNA sense strand
agaagaaggcaaagagaaa

SEQ ID NO: 565456 - RNA, 19 nt, Homo sapiens
  misc_RNA (1)...(19): siRNA sense strand
ggagaagaaggcaaagaga

SEQ ID NO: 565457 - RNA, 19 nt, Homo sapiens
  misc_RNA (1)...(19): siRNA sense strand
acaggcagcuucaacagau

SEQ ID NO: 565458 - RNA, 19 nt, Homo sapiens
  misc_RNA (1)...(19): siRNA sense strand
ggagugaaccgcugcaaac

SEQ ID NO: 565459 - RNA, 19 nt, Homo sapiens
  misc_RNA (1)...(19): siRNA sense strand
gaaaacuacugucauguac

SEQ ID NO: 565460 - RNA, 19 nt, Homo sapiens
  misc_RNA (1)...(19): siRNA sense strand
gauagucucagggucuuaa

SEQ ID NO: 565461 - RNA, 19 nt, Homo sapiens
  misc_RNA (1)...(19): siRNA sense strand
aagaauagagccauaguuc

SEQ ID NO: 565462 - RNA, 19 nt, Homo sapiens
  misc_RNA (1)...(19): siRNA sense strand
caucgagacucuucugacu

SEQ ID NO: 565463 - RNA, 19 nt, Homo sapiens
  misc_RNA (1)...(19): siRNA sense strand
agaaggagaagaaggcaaa

SEQ ID NO: 565464 - RNA, 19 nt, Homo sapiens
  misc_RNA (1)...(19): siRNA sense strand
aaaagaggcuaaagaagga

SEQ ID NO: 565465 - RNA, 19 nt, Homo sapiens
  misc_RNA (1)...(19): siRNA sense strand
ccuaagaggacucaaagug

SEQ ID NO: 565466 - RNA, 19 nt, Homo sapiens
  misc_RNA (1)...(19): siRNA sense strand
gcugaaaggacaauacaag

SEQ ID NO: 565467 - RNA, 19 nt, Homo sapiens
  misc_RNA (1)...(19): siRNA sense strand
aagcagaacagacgcuaaa

SEQ ID NO: 565468 - RNA, 19 nt, Homo sapiens
  misc_RNA (1)...(19): siRNA sense strand
ggaaaacaccccucagaau

SEQ ID NO: 565469 - RNA, 19 nt, Homo sapiens
  misc_RNA (1)...(19): siRNA sense strand
agaagcaguuggcuaugga

SEQ ID NO: 565470 - RNA, 19 nt, Homo sapiens
  misc_RNA (1)...(19): siRNA sense strand
uaagggaaacacuugagaa

SEQ ID NO: 565471 - RNA, 19 nt, Homo sapiens
  misc_RNA (1)...(19): siRNA sense strand
aaagagaacuaagggaaac

SEQ ID NO: 565472 - RNA, 19 nt, Homo sapiens
  misc_RNA (1)...(19): siRNA sense strand
caggcagcuucaacagaua

SEQ ID NO: 565473 - RNA, 19 nt, Homo sapiens
  misc_RNA (1)...(19): siRNA sense strand
cuaagaggacucaaagugu

SEQ ID NO: 565474 - RNA, 19 nt, Homo sapiens
  misc_RNA (1)...(19): siRNA sense strand
ugaaaggacaauacaagau

SEQ ID NO: 565475 - RNA, 19 nt, Homo sapiens
  misc_RNA (1)...(19): siRNA sense strand
ggcuaaagaaggagaagaa

SEQ ID NO: 565476 - RNA, 19 nt, Homo sapiens
  misc_RNA (1)...(19): siRNA sense strand
auggaagacuguauuugaa

SEQ ID NO: 565477 - RNA, 19 nt, Homo sapiens
  misc_RNA (1)...(19): siRNA sense strand
ucacgccgguggugugcaa

SEQ ID NO: 565478 - RNA, 19 nt, Homo sapiens
  misc_RNA (1)...(19): siRNA sense strand
gcagaacagaugcugaaag

SEQ ID NO: 565479 - RNA, 19 nt, Homo sapiens
  misc_RNA (1)...(19): siRNA sense strand
ucagaauaaugagugcaaa

SEQ ID NO: 565480 - RNA, 19 nt, Homo sapiens
  misc_RNA (1)...(19): siRNA sense strand
gaugagaccccgcuuucua

SEQ ID NO: 565481 - RNA, 19 nt, Homo sapiens
  misc_RNA (1)...(19): siRNA sense strand
ugacaaacucucucuaacu

SEQ ID NO: 565482 - RNA, 19 nt, Homo sapiens
  misc_RNA (1)...(19): siRNA sense strand
cacuugaguuugagacgaa

SEQ ID NO: 565483 - RNA, 19 nt, Homo sapiens
  misc_RNA (1)...(19): siRNA sense strand
ggugugcaauguggaacaa

SEQ ID NO: 565484 - RNA, 19 nt, Homo sapiens
  misc_RNA (1)...(19): siRNA sense strand
gacgaaacggcgugaacaa

SEQ ID NO: 565485 - RNA, 19 nt, Homo sapiens
  misc_RNA (1)...(19): siRNA sense strand
ggaagcacuugaguuugag

SEQ ID NO: 565486 - RNA, 19 nt, Homo sapiens
  misc_RNA (1)...(19): siRNA sense strand
acaaaagaauagagccaua

SEQ ID NO: 565487 - RNA, 19 nt, Homo sapiens
  misc_RNA (1)...(19): siRNA sense strand
gcuguugaaaguugccaua

SEQ ID NO: 565488 - RNA, 19 nt, Homo sapiens
  misc_RNA (1)...(19): siRNA sense strand
ccuggaaggccuccuaaga

SEQ ID NO: 565489 - RNA, 19 nt, Homo sapiens
  misc_RNA (1)...(19): siRNA sense strand
gaaccgcugcaaacucauc

SEQ ID NO: 565490 - RNA, 19 nt, Homo sapiens
  misc_RNA (1)...(19): siRNA sense strand
cggcagaacagaugcugaa

SEQ ID NO: 565491 - RNA, 19 nt, Homo sapiens
  misc_RNA (1)...(19): siRNA sense strand
gucucagggucuuaaauga

SEQ ID NO: 565492 - RNA, 19 nt, Homo sapiens
  misc_RNA (1)...(19): siRNA sense strand
gaagaaggcaaagagaaaa

SEQ ID NO: 565493 - RNA, 19 nt, Homo sapiens
  misc_RNA (1)...(19): siRNA sense strand
uguugaaaguugccauaga

SEQ ID NO: 565494 - RNA, 19 nt, Homo sapiens
  misc_RNA (1)...(19): siRNA sense strand
uggaagacuguauuugaaa

SEQ ID NO: 565495 - RNA, 19 nt, Homo sapiens
  misc_RNA (1)...(19): siRNA sense strand
gggaaacccguguacucaa

SEQ ID NO: 565496 - RNA, 19 nt, Homo sapiens
  misc_RNA (1)...(19): siRNA sense strand
aaaacaccccucagaauaa

SEQ ID NO: 565497 - RNA, 19 nt, Homo sapiens
  misc_RNA (1)...(19): siRNA sense strand
cagauagucucagggucuu

SEQ ID NO: 565498 - RNA, 19 nt, Homo sapiens
  misc_RNA (1)...(19): siRNA sense strand
caugucuccugggauaauu

SEQ ID NO: 565499 - RNA, 19 nt, Homo sapiens
  misc_RNA (1)...(19): siRNA sense strand
gauaaugccagagcucaag

SEQ ID NO: 565500 - RNA, 19 nt, Homo sapiens
  misc_RNA (1)...(19): siRNA sense strand
cuugacaaacucucucuaa

SEQ ID NO: 565501 - RNA, 19 nt, Homo sapiens
  misc_RNA (1)...(19): siRNA sense strand
agacagccuugacaaacuc

SEQ ID NO: 565502 - RNA, 19 nt, Homo sapiens
  misc_RNA (1)...(19): siRNA sense strand
ggacuucgagacccucuac

SEQ ID NO: 565503 - RNA, 19 nt, Homo sapiens
  misc_RNA (1)...(19): siRNA sense strand
ugaaaacuacugucaugua

SEQ ID NO: 565504 - RNA, 19 nt, Homo sapiens
  misc_RNA (1)...(19): siRNA sense strand
ccagagcucaagagaaaca

SEQ ID NO: 565505 - RNA, 19 nt, Homo sapiens
  misc_RNA (1)...(19): siRNA sense strand
aaaguugccauagauaaug

SEQ ID NO: 565506 - RNA, 19 nt, Homo sapiens
  misc_RNA (1)...(19): siRNA sense strand
agacucuucugacuaacau

SEQ ID NO: 565507 - RNA, 19 nt, Homo sapiens
  misc_RNA (1)...(19): siRNA sense strand
ugggauaauuccaccaaca

SEQ ID NO: 565508 - RNA, 19 nt, Homo sapiens
  misc_RNA (1)...(19): siRNA sense strand
gaccuggaaggccuccuaa

SEQ ID NO: 565509 - RNA, 19 nt, Homo sapiens
  misc_RNA (1)...(19): siRNA sense strand
aaagaauagagccauaguu

SEQ ID NO: 565510 - RNA, 19 nt, Homo sapiens
  misc_RNA (1)...(19): siRNA sense strand
gaagcaguuggcuauggaa

SEQ ID NO: 565511 - RNA, 19 nt, Homo sapiens
  misc_RNA (1)...(19): siRNA sense strand
aguagcagcagcagcagua

SEQ ID NO: 565512 - RNA, 19 nt, Homo sapiens
  misc_RNA (1)...(19): siRNA sense strand
caagcagaacagacgcuaa

SEQ ID NO: 565513 - RNA, 19 nt, Homo sapiens
  misc_RNA (1)...(19): siRNA sense strand
gaauaaugagugcaaaaug

SEQ ID NO: 565514 - RNA, 19 nt, Homo sapiens
  misc_RNA (1)...(19): siRNA sense strand
ugcauacggucuacaccaa

SEQ ID NO: 565515 - RNA, 19 nt, Homo sapiens
  misc_RNA (1)...(19): siRNA sense strand
aagauggaagacuguauuu

SEQ ID NO: 565516 - RNA, 19 nt, Homo sapiens
  misc_RNA (1)...(19): siRNA sense strand
gagacucuucugacuaaca

SEQ ID NO: 565517 - RNA, 19 nt, Homo sapiens
  misc_RNA (1)...(19): siRNA sense strand
aagagacagccuugacaaa

SEQ ID NO: 565518 - RNA, 19 nt, Homo sapiens
  misc_RNA (1)...(19): siRNA sense strand
gagacccucuacaaugacu

SEQ ID NO: 565519 - RNA, 19 nt, Homo sapiens
  misc_RNA (1)...(19): siRNA sense strand
gaaggcaaagagaaaauug

SEQ ID NO: 565520 - RNA, 19 nt, Homo sapiens
  misc_RNA (1)...(19): siRNA sense strand
gcaaguucuagaccuggaa

SEQ ID NO: 565521 - RNA, 19 nt, Homo sapiens
  misc_RNA (1)...(19): siRNA sense strand
uugagaagcaguuggcuau

SEQ ID NO: 565522 - RNA, 19 nt, Homo sapiens
  misc_RNA (1)...(19): siRNA sense strand
cugaaaggacaauacaaga

SEQ ID NO: 565523 - RNA, 19 nt, Homo sapiens
  misc_RNA (1)...(19): siRNA sense strand
agaauagagccauaguuca

SEQ ID NO: 565524 - RNA, 19 nt, Homo sapiens
  misc_RNA (1)...(19): siRNA sense strand
aaacugagcugaagaugga

SEQ ID NO: 565525 - RNA, 19 nt, Homo sapiens
  misc_RNA (1)...(19): siRNA sense strand
gcaggaagcacuugaguuu

SEQ ID NO: 565526 - RNA, 19 nt, Homo sapiens
  misc_RNA (1)...(19): siRNA sense strand
gaacuaagggaaacacuug

SEQ ID NO: 565527 - RNA, 19 nt, Homo sapiens
  misc_RNA (1)...(19): siRNA sense strand
gaaaacaccccucagaaua

SEQ ID NO: 565528 - RNA, 19 nt, Homo sapiens
  misc_RNA (1)...(19): siRNA sense strand
gaauagagccauaguucaa

SEQ ID NO: 565529 - RNA, 19 nt, Homo sapiens
  misc_RNA (1)...(19): siRNA sense strand
gaaagagaacuaagggaaa

SEQ ID NO: 565530 - RNA, 19 nt, Homo sapiens
  misc_RNA (1)...(19): siRNA sense strand
gaaaggacaauacaagaug

SEQ ID NO: 565531 - RNA, 19 nt, Homo sapiens
  misc_RNA (1)...(19): siRNA sense strand
gacaaacucucucuaacug

SEQ ID NO: 565532 - RNA, 19 nt, Homo sapiens
  misc_RNA (1)...(19): siRNA sense strand
gauggaagacuguauuuga

SEQ ID NO: 565533 - RNA, 19 nt, Homo sapiens
  misc_RNA (1)...(19): siRNA sense strand
ugccagagcucaagagaaa

SEQ ID NO: 565534 - RNA, 19 nt, Homo sapiens
  misc_RNA (1)...(19): siRNA sense strand
gggaaacacuugagaagca

SEQ ID NO: 565535 - RNA, 19 nt, Homo sapiens
  misc_RNA (1)...(19): siRNA sense strand
gaaaguugccauagauaau

SEQ ID NO: 565536 - RNA, 19 nt, Homo sapiens
  misc_RNA (1)...(19): siRNA sense strand
ucucaugucuccugggaua

SEQ ID NO: 565537 - RNA, 19 nt, Homo sapiens
  misc_RNA (1)...(19): siRNA sense strand
ucgagacucuucugacuaa

SEQ ID NO: 565538 - RNA, 19 nt, Homo sapiens
  misc_RNA (1)...(19): siRNA sense strand
gcaguuggcuauggaacaa

SEQ ID NO: 565539 - RNA, 19 nt, Homo sapiens
  misc_RNA (1)...(19): siRNA sense strand
gcaaacucaucuccaggaa

SEQ ID NO: 565540 - RNA, 19 nt, Homo sapiens
  misc_RNA (1)...(19): siRNA sense strand
gaaacggcgugaacaagca

SEQ ID NO: 565541 - RNA, 19 nt, Homo sapiens
  misc_RNA (1)...(19): siRNA sense strand
gugaaccgcugcaaacuca

SEQ ID NO: 565542 - RNA, 19 nt, Homo sapiens
  misc_RNA (1)...(19): siRNA sense strand
gagaagaaggcaaagagaa

SEQ ID NO: 565543 - RNA, 19 nt, Homo sapiens
  misc_RNA (1)...(19): siRNA sense strand
ucgagacccucuacaauga

SEQ ID NO: 565544 - RNA, 19 nt, Homo sapiens
  misc_RNA (1)...(19): siRNA sense strand
guugaaaguugccauagau

SEQ ID NO: 565545 - RNA, 19 nt, Homo sapiens
  misc_RNA (1)...(19): siRNA sense strand
aggaagcacuugaguuuga

SEQ ID NO: 565546 - RNA, 19 nt, Homo sapiens
  misc_RNA (1)...(19): siRNA sense strand
cagaacagaugcugaaagg

SEQ ID NO: 565547 - RNA, 19 nt, Homo sapiens
  misc_RNA (1)...(19): siRNA sense strand
caagauggaagacuguauu

SEQ ID NO: 565548 - RNA, 19 nt, Homo sapiens
  misc_RNA (1)...(19): siRNA sense strand
aaacuacugucauguacug

SEQ ID NO: 565549 - RNA, 19 nt, Homo sapiens
  misc_RNA (1)...(19): siRNA sense strand
ggaaacccguguacucaac

SEQ ID NO: 565550 - RNA, 19 nt, Homo sapiens
  misc_RNA (1)...(19): siRNA sense strand
gagaagcaguuggcuaugg

SEQ ID NO: 565551 - RNA, 19 nt, Homo sapiens
  misc_RNA (1)...(19): siRNA sense strand
ugaaaguugccauagauaa

SEQ ID NO: 565552 - RNA, 19 nt, Homo sapiens
  misc_RNA (1)...(19): siRNA sense strand
gagacagccuugacaaacu

SEQ ID NO: 565553 - RNA, 19 nt, Homo sapiens
  misc_RNA (1)...(19): siRNA sense strand
gacaauacaagauggaaga

SEQ ID NO: 565554 - RNA, 19 nt, Homo sapiens
  misc_RNA (1)...(19): siRNA sense strand
ggaagacuguauuugaaaa

SEQ ID NO: 565555 - RNA, 19 nt, Homo sapiens
  misc_RNA (1)...(19): siRNA sense strand
agaagaaggcaaagagaaa

SEQ ID NO: 565556 - RNA, 19 nt, Homo sapiens
  misc_RNA (1)...(19): siRNA sense strand
ggagaagaaggcaaagaga

SEQ ID NO: 565557 - RNA, 19 nt, Homo sapiens
  misc_RNA (1)...(19): siRNA sense strand
acaggcagcuucaacagau

SEQ ID NO: 565558 - RNA, 19 nt, Homo sapiens
  misc_RNA (1)...(19): siRNA sense strand
ggagugaaccgcugcaaac

SEQ ID NO: 565559 - RNA, 19 nt, Homo sapiens
  misc_RNA (1)...(19): siRNA sense strand
gaaaacuacugucauguac

SEQ ID NO: 565560 - RNA, 19 nt, Homo sapiens
  misc_RNA (1)...(19): siRNA sense strand
gauagucucagggucuuaa

SEQ ID NO: 565561 - RNA, 19 nt, Homo sapiens
  misc_RNA (1)...(19): siRNA sense strand
aagaauagagccauaguuc

SEQ ID NO: 565562 - RNA, 19 nt, Homo sapiens
  misc_RNA (1)...(19): siRNA sense strand
caucgagacucuucugacu

SEQ ID NO: 565563 - RNA, 19 nt, Homo sapiens
  misc_RNA (1)...(19): siRNA sense strand
agaaggagaagaaggcaaa

SEQ ID NO: 565564 - RNA, 19 nt, Homo sapiens
  misc_RNA (1)...(19): siRNA sense strand
aaaagaggcuaaagaagga

SEQ ID NO: 565565 - RNA, 19 nt, Homo sapiens
  misc_RNA (1)...(19): siRNA sense strand
ccuaagaggacucaaagug

SEQ ID NO: 565566 - RNA, 19 nt, Homo sapiens
  misc_RNA (1)...(19): siRNA sense strand
gcugaaaggacaauacaag

SEQ ID NO: 565567 - RNA, 19 nt, Homo sapiens
  misc_RNA (1)...(19): siRNA sense strand
aagcagaacagacgcuaaa

SEQ ID NO: 565568 - RNA, 19 nt, Homo sapiens
  misc_RNA (1)...(19): siRNA sense strand
ggaaaacaccccucagaau

SEQ ID NO: 565569 - RNA, 19 nt, Homo sapiens
  misc_RNA (1)...(19): siRNA sense strand
agaagcaguuggcuaugga

SEQ ID NO: 565570 - RNA, 19 nt, Homo sapiens
  misc_RNA (1)...(19): siRNA sense strand
uaagggaaacacuugagaa

SEQ ID NO: 565571 - RNA, 19 nt, Homo sapiens
  misc_RNA (1)...(19): siRNA sense strand
aaagagaacuaagggaaac

SEQ ID NO: 565572 - RNA, 19 nt, Homo sapiens
  misc_RNA (1)...(19): siRNA sense strand
caggcagcuucaacagaua

SEQ ID NO: 565573 - RNA, 19 nt, Homo sapiens
  misc_RNA (1)...(19): siRNA sense strand
cuaagaggacucaaagugu

SEQ ID NO: 565574 - RNA, 19 nt, Homo sapiens
  misc_RNA (1)...(19): siRNA sense strand
ugaaaggacaauacaagau

SEQ ID NO: 565575 - RNA, 19 nt, Homo sapiens
  misc_RNA (1)...(19): siRNA sense strand
ggcuaaagaaggagaagaa

SEQ ID NO: 565576 - RNA, 19 nt, Homo sapiens
  misc_RNA (1)...(19): siRNA sense strand
auggaagacuguauuugaa

SEQ ID NO: 565577 - RNA, 19 nt, Homo sapiens
  misc_RNA (1)...(19): siRNA sense strand
ucacgccgguggugugcaa

SEQ ID NO: 565578 - RNA, 19 nt, Homo sapiens
  misc_RNA (1)...(19): siRNA sense strand
gcagaacagaugcugaaag

SEQ ID NO: 565579 - RNA, 19 nt, Homo sapiens
  misc_RNA (1)...(19): siRNA sense strand
ucagaauaaugagugcaaa

SEQ ID NO: 565580 - RNA, 19 nt, Homo sapiens
  misc_RNA (1)...(19): siRNA sense strand
gaugagaccccgcuuucua

SEQ ID NO: 565581 - RNA, 19 nt, Homo sapiens
  misc_RNA (1)...(19): siRNA sense strand
ugacaaacucucucuaacu

SEQ ID NO: 565582 - RNA, 19 nt, Homo sapiens
  misc_RNA (1)...(19): siRNA sense strand
cacuugaguuugagacgaa

SEQ ID NO: 565583 - RNA, 19 nt, Homo sapiens
  misc_RNA (1)...(19): siRNA sense strand
ggugugcaauguggaacaa

SEQ ID NO: 565584 - RNA, 19 nt, Homo sapiens
  misc_RNA (1)...(19): siRNA sense strand
gacgaaacggcgugaacaa

SEQ ID NO: 565585 - RNA, 19 nt, Homo sapiens
  misc_RNA (1)...(19): siRNA sense strand
ggaagcacuugaguuugag

SEQ ID NO: 565586 - RNA, 19 nt, Homo sapiens
  misc_RNA (1)...(19): siRNA sense strand
acaaaagaauagagccaua

SEQ ID NO: 565587 - RNA, 19 nt, Homo sapiens
  misc_RNA (1)...(19): siRNA sense strand
gcuguugaaaguugccaua

SEQ ID NO: 565588 - RNA, 19 nt, Homo sapiens
  misc_RNA (1)...(19): siRNA sense strand
ccuggaaggccuccuaaga

SEQ ID NO: 565589 - RNA, 19 nt, Homo sapiens
  misc_RNA (1)...(19): siRNA sense strand
gaaccgcugcaaacucauc

SEQ ID NO: 565590 - RNA, 19 nt, Homo sapiens
  misc_RNA (1)...(19): siRNA sense strand
cggcagaacagaugcugaa

SEQ ID NO: 565591 - RNA, 19 nt, Homo sapiens
  misc_RNA (1)...(19): siRNA sense strand
gucucagggucuuaaauga

SEQ ID NO: 565592 - RNA, 19 nt, Homo sapiens
  misc_RNA (1)...(19): siRNA sense strand
gaagaaggcaaagagaaaa

SEQ ID NO: 565593 - RNA, 19 nt, Homo sapiens
  misc_RNA (1)...(19): siRNA sense strand
uguugaaaguugccauaga

SEQ ID NO: 565594 - RNA, 19 nt, Homo sapiens
  misc_RNA (1)...(19): siRNA sense strand
uggaagacuguauuugaaa

SEQ ID NO: 565595 - RNA, 19 nt, Homo sapiens
  misc_RNA (1)...(19): siRNA sense strand
gggaaacccguguacucaa

SEQ ID NO: 565596 - RNA, 19 nt, Homo sapiens
  misc_RNA (1)...(19): siRNA sense strand
aaaacaccccucagaauaa

SEQ ID NO: 565597 - RNA, 19 nt, Homo sapiens
  misc_RNA (1)...(19): siRNA sense strand
cagauagucucagggucuu

SEQ ID NO: 565598 - RNA, 19 nt, Homo sapiens
  misc_RNA (1)...(19): siRNA sense strand
caugucuccugggauaauu

SEQ ID NO: 565599 - RNA, 19 nt, Homo sapiens
  misc_RNA (1)...(19): siRNA sense strand
gauaaugccagagcucaag

SEQ ID NO: 565600 - RNA, 19 nt, Homo sapiens
  misc_RNA (1)...(19): siRNA sense strand
cuugacaaacucucucuaa

SEQ ID NO: 565601 - RNA, 19 nt, Homo sapiens
  misc_RNA (1)...(19): siRNA sense strand
agacagccuugacaaacuc

SEQ ID NO: 565602 - RNA, 19 nt, Homo sapiens
  misc_RNA (1)...(19): siRNA sense strand
ggacuucgagacccucuac

SEQ ID NO: 565603 - RNA, 19 nt, Homo sapiens
  misc_RNA (1)...(19): siRNA sense strand
ugaaaacuacugucaugua

SEQ ID NO: 565604 - RNA, 19 nt, Homo sapiens
  misc_RNA (1)...(19): siRNA sense strand
ccagagcucaagagaaaca

SEQ ID NO: 565605 - RNA, 19 nt, Homo sapiens
  misc_RNA (1)...(19): siRNA sense strand
aaaguugccauagauaaug

SEQ ID NO: 565606 - RNA, 19 nt, Homo sapiens
  misc_RNA (1)...(19): siRNA sense strand
agacucuucugacuaacau

SEQ ID NO: 565607 - RNA, 19 nt, Homo sapiens
  misc_RNA (1)...(19): siRNA sense strand
ugggauaauuccaccaaca

SEQ ID NO: 565608 - RNA, 19 nt, Homo sapiens
  misc_RNA (1)...(19): siRNA sense strand
gaccuggaaggccuccuaa

SEQ ID NO: 565609 - RNA, 19 nt, Homo sapiens
  misc_RNA (1)...(19): siRNA sense strand
aaagaauagagccauaguu

SEQ ID NO: 565610 - RNA, 19 nt, Homo sapiens
  misc_RNA (1)...(19): siRNA sense strand
gaagcaguuggcuauggaa

SEQ ID NO: 565611 - RNA, 19 nt, Homo sapiens
  misc_RNA (1)...(19): siRNA sense strand
aguagcagcagcagcagua

SEQ ID NO: 565612 - RNA, 19 nt, Homo sapiens
  misc_RNA (1)...(19): siRNA sense strand
caagcagaacagacgcuaa

SEQ ID NO: 565613 - RNA, 19 nt, Homo sapiens
  misc_RNA (1)...(19): siRNA sense strand
gaauaaugagugcaaaaug

SEQ ID NO: 565614 - RNA, 19 nt, Homo sapiens
  misc_RNA (1)...(19): siRNA sense strand
ugcauacggucuacaccaa

SEQ ID NO: 565615 - RNA, 19 nt, Homo sapiens
  misc_RNA (1)...(19): siRNA sense strand
aagauggaagacuguauuu

SEQ ID NO: 565616 - RNA, 19 nt, Homo sapiens
  misc_RNA (1)...(19): siRNA sense strand
gagacucuucugacuaaca

SEQ ID NO: 565617 - RNA, 19 nt, Homo sapiens
  misc_RNA (1)...(19): siRNA sense strand
aagagacagccuugacaaa

SEQ ID NO: 565618 - RNA, 19 nt, Homo sapiens
  misc_RNA (1)...(19): siRNA sense strand
gagacccucuacaaugacu

SEQ ID NO: 565619 - RNA, 19 nt, Homo sapiens
  misc_RNA (1)...(19): siRNA sense strand
gaaggcaaagagaaaauug

SEQ ID NO: 565620 - RNA, 19 nt, Homo sapiens
  misc_RNA (1)...(19): siRNA sense strand
gcaaguucuagaccuggaa

SEQ ID NO: 565621 - RNA, 19 nt, Homo sapiens
  misc_RNA (1)...(19): siRNA sense strand
uugagaagcaguuggcuau

SEQ ID NO: 565622 - RNA, 19 nt, Homo sapiens
  misc_RNA (1)...(19): siRNA sense strand
cugaaaggacaauacaaga

SEQ ID NO: 565623 - RNA, 19 nt, Homo sapiens
  misc_RNA (1)...(19): siRNA sense strand
agaauagagccauaguuca

SEQ ID NO: 565624 - RNA, 19 nt, Homo sapiens
  misc_RNA (1)...(19): siRNA sense strand
gaacaucgaucgcaacauc

SEQ ID NO: 565625 - RNA, 19 nt, Homo sapiens
  misc_RNA (1)...(19): siRNA sense strand
ugagagaggaugauucuua

SEQ ID NO: 565626 - RNA, 19 nt, Homo sapiens
  misc_RNA (1)...(19): siRNA sense strand
cagcaagucugaaguugaa

SEQ ID NO: 565627 - RNA, 19 nt, Homo sapiens
  misc_RNA (1)...(19): siRNA sense strand
ggagguagcccguuacaug

SEQ ID NO: 565628 - RNA, 19 nt, Homo sapiens
  misc_RNA (1)...(19): siRNA sense strand
ggaagaagaagaagaggaa

SEQ ID NO: 565629 - RNA, 19 nt, Homo sapiens
  misc_RNA (1)...(19): siRNA sense strand
gcacucagccgaagccauu

SEQ ID NO: 565630 - RNA, 19 nt, Homo sapiens
  misc_RNA (1)...(19): siRNA sense strand
caucuucgcuggagacaga

SEQ ID NO: 565631 - RNA, 19 nt, Homo sapiens
  misc_RNA (1)...(19): siRNA sense strand
ggaggaagaggaagaagaa

SEQ ID NO: 565632 - RNA, 19 nt, Homo sapiens
  misc_RNA (1)...(19): siRNA sense strand
uaaaugcaguggacaaaca

SEQ ID NO: 565633 - RNA, 19 nt, Homo sapiens
  misc_RNA (1)...(19): siRNA sense strand
gaagugacccugacgaaag

SEQ ID NO: 565634 - RNA, 19 nt, Homo sapiens
  misc_RNA (1)...(19): siRNA sense strand
gggaggagcuaggguuuga

SEQ ID NO: 565635 - RNA, 19 nt, Homo sapiens
  misc_RNA (1)...(19): siRNA sense strand
ggaagaggaggaagaagaa

SEQ ID NO: 565636 - RNA, 19 nt, Homo sapiens
  misc_RNA (1)...(19): siRNA sense strand
ggaugaaucugagaaucuu

SEQ ID NO: 565637 - RNA, 19 nt, Homo sapiens
  misc_RNA (1)...(19): siRNA sense strand
uaacugaacaacuaaguga

SEQ ID NO: 565638 - RNA, 19 nt, Homo sapiens
  misc_RNA (1)...(19): siRNA sense strand
gcaccaagaccugcgauuu

SEQ ID NO: 565639 - RNA, 19 nt, Homo sapiens
  misc_RNA (1)...(19): siRNA sense strand
ugacaaggaugggcgauug

SEQ ID NO: 565640 - RNA, 19 nt, Homo sapiens
  misc_RNA (1)...(19): siRNA sense strand
gagagaggaugauucuuac

SEQ ID NO: 565641 - RNA, 19 nt, Homo sapiens
  misc_RNA (1)...(19): siRNA sense strand
ggaugauucuuaccucuuc

SEQ ID NO: 565642 - RNA, 19 nt, Homo sapiens
  misc_RNA (1)...(19): siRNA sense strand
ggagagguguacugcauag

SEQ ID NO: 565643 - RNA, 19 nt, Homo sapiens
  misc_RNA (1)...(19): siRNA sense strand
ggagacagagcgaggguuu

SEQ ID NO: 565644 - RNA, 19 nt, Homo sapiens
  misc_RNA (1)...(19): siRNA sense strand
ccaggaauuuaacaagauu

SEQ ID NO: 565645 - RNA, 19 nt, Homo sapiens
  misc_RNA (1)...(19): siRNA sense strand
ggcgauugcuccaggaauu

SEQ ID NO: 565646 - RNA, 19 nt, Homo sapiens
  misc_RNA (1)...(19): siRNA sense strand
gagguguacugcauagaug

SEQ ID NO: 565647 - RNA, 19 nt, Homo sapiens
  misc_RNA (1)...(19): siRNA sense strand
gcccugaggauuacaagua

SEQ ID NO: 565648 - RNA, 19 nt, Homo sapiens
  misc_RNA (1)...(19): siRNA sense strand
guccagaguuuggcuauga

SEQ ID NO: 565649 - RNA, 19 nt, Homo sapiens
  misc_RNA (1)...(19): siRNA sense strand
gaaaaucaccuccaucugu

SEQ ID NO: 565650 - RNA, 19 nt, Homo sapiens
  misc_RNA (1)...(19): siRNA sense strand
gagcuaggguuugacuaug

SEQ ID NO: 565651 - RNA, 19 nt, Homo sapiens
  misc_RNA (1)...(19): siRNA sense strand
gcaaggccaagaagaaaug

SEQ ID NO: 565652 - RNA, 19 nt, Homo sapiens
  misc_RNA (1)...(19): siRNA sense strand
gguggugggugaugacuuc

SEQ ID NO: 565653 - RNA, 19 nt, Homo sapiens
  misc_RNA (1)...(19): siRNA sense strand
ggagcuaggguuugacuau

SEQ ID NO: 565654 - RNA, 19 nt, Homo sapiens
  misc_RNA (1)...(19): siRNA sense strand
gggaaucagucagauagga

SEQ ID NO: 565655 - RNA, 19 nt, Homo sapiens
  misc_RNA (1)...(19): siRNA sense strand
ggaagaagaagaggaagau

SEQ ID NO: 565656 - RNA, 19 nt, Homo sapiens
  misc_RNA (1)...(19): siRNA sense strand
gagaagugacccugacgaa

SEQ ID NO: 565657 - RNA, 19 nt, Homo sapiens
  misc_RNA (1)...(19): siRNA sense strand
ggaggaagaggaggaagaa

SEQ ID NO: 565658 - RNA, 19 nt, Homo sapiens
  misc_RNA (1)...(19): siRNA sense strand
gaccucagaucuggccaaa

SEQ ID NO: 565659 - RNA, 19 nt, Homo sapiens
  misc_RNA (1)...(19): siRNA sense strand
gcaagaaccgggucguaca

SEQ ID NO: 565660 - RNA, 19 nt, Homo sapiens
  misc_RNA (1)...(19): siRNA sense strand
ugaaugggauggucuucug

SEQ ID NO: 565661 - RNA, 19 nt, Homo sapiens
  misc_RNA (1)...(19): siRNA sense strand
ggaggaagaagaagaagag

SEQ ID NO: 565662 - RNA, 19 nt, Homo sapiens
  misc_RNA (1)...(19): siRNA sense strand
gacagcaagucugaaguug

SEQ ID NO: 565663 - RNA, 19 nt, Homo sapiens
  misc_RNA (1)...(19): siRNA sense strand
cgacagcaagucugaaguu

SEQ ID NO: 565664 - RNA, 19 nt, Homo sapiens
  misc_RNA (1)...(19): siRNA sense strand
caacaucagccgcuucauc

SEQ ID NO: 565665 - RNA, 19 nt, Homo sapiens
  misc_RNA (1)...(19): siRNA sense strand
ggaccuucaucugcgagua

SEQ ID NO: 565666 - RNA, 19 nt, Homo sapiens
  misc_RNA (1)...(19): siRNA sense strand
gauugagccuccgcugauu

SEQ ID NO: 565667 - RNA, 19 nt, Homo sapiens
  misc_RNA (1)...(19): siRNA sense strand
cgugguggcugugucuaua

SEQ ID NO: 565668 - RNA, 19 nt, Homo sapiens
  misc_RNA (1)...(19): siRNA sense strand
auacagcauuuccgcauga

SEQ ID NO: 565669 - RNA, 19 nt, Homo sapiens
  misc_RNA (1)...(19): siRNA sense strand
caauguggcucugagaagu

SEQ ID NO: 565670 - RNA, 19 nt, Homo sapiens
  misc_RNA (1)...(19): siRNA sense strand
gguuugcgcuucaacucaa

SEQ ID NO: 565671 - RNA, 19 nt, Homo sapiens
  misc_RNA (1)...(19): siRNA sense strand
gcgcaaggccaagaagaaa

SEQ ID NO: 565672 - RNA, 19 nt, Homo sapiens
  misc_RNA (1)...(19): siRNA sense strand
ggaagaggaagaagaagag

SEQ ID NO: 565673 - RNA, 19 nt, Homo sapiens
  misc_RNA (1)...(19): siRNA sense strand
agaggaagaugaggaguca

SEQ ID NO: 565674 - RNA, 19 nt, Homo sapiens
  misc_RNA (1)...(19): siRNA sense strand
cgacuuagacaacaaggau

SEQ ID NO: 565675 - RNA, 19 nt, Homo sapiens
  misc_RNA (1)...(19): siRNA sense strand
cagaggagccaccgagaga

SEQ ID NO: 565676 - RNA, 19 nt, Homo sapiens
  misc_RNA (1)...(19): siRNA sense strand
ggacaccccucguagugaa

SEQ ID NO: 565677 - RNA, 19 nt, Homo sapiens
  misc_RNA (1)...(19): siRNA sense strand
gcucuaacugaacaacuaa

SEQ ID NO: 565678 - RNA, 19 nt, Homo sapiens
  misc_RNA (1)...(19): siRNA sense strand
gaugaggagucagggaauc

SEQ ID NO: 565679 - RNA, 19 nt, Homo sapiens
  misc_RNA (1)...(19): siRNA sense strand
aagaagaagaggaagauga

SEQ ID NO: 565680 - RNA, 19 nt, Homo sapiens
  misc_RNA (1)...(19): siRNA sense strand
cuacuaugauuccuacucu

SEQ ID NO: 565681 - RNA, 19 nt, Homo sapiens
  misc_RNA (1)...(19): siRNA sense strand
caggacagguggacgucaa

SEQ ID NO: 565682 - RNA, 19 nt, Homo sapiens
  misc_RNA (1)...(19): siRNA sense strand
ggagugccacccugacuuc

SEQ ID NO: 565683 - RNA, 19 nt, Homo sapiens
  misc_RNA (1)...(19): siRNA sense strand
ggaggaggaagaggaagaa

SEQ ID NO: 565684 - RNA, 19 nt, Homo sapiens
  misc_RNA (1)...(19): siRNA sense strand
auucuuaccucuucgacuu

SEQ ID NO: 565685 - RNA, 19 nt, Homo sapiens
  misc_RNA (1)...(19): siRNA sense strand
cuacagcucuaccgaacag

SEQ ID NO: 565686 - RNA, 19 nt, Homo sapiens
  misc_RNA (1)...(19): siRNA sense strand
gaaccgggucguacagagu

SEQ ID NO: 565687 - RNA, 19 nt, Homo sapiens
  misc_RNA (1)...(19): siRNA sense strand
agacagagcgaggguuuga

SEQ ID NO: 565688 - RNA, 19 nt, Homo sapiens
  misc_RNA (1)...(19): siRNA sense strand
ucagggaaucagucagaua

SEQ ID NO: 565689 - RNA, 19 nt, Homo sapiens
  misc_RNA (1)...(19): siRNA sense strand
ugcgagacguccaccauga

SEQ ID NO: 565690 - RNA, 19 nt, Homo sapiens
  misc_RNA (1)...(19): siRNA sense strand
uaugagaacgugcccauuc

SEQ ID NO: 565691 - RNA, 19 nt, Homo sapiens
  misc_RNA (1)...(19): siRNA sense strand
cgggagagcuaccaugacu

SEQ ID NO: 565692 - RNA, 19 nt, Homo sapiens
  misc_RNA (1)...(19): siRNA sense strand
cauaaaugcaguggacaaa

SEQ ID NO: 565693 - RNA, 19 nt, Homo sapiens
  misc_RNA (1)...(19): siRNA sense strand
gcaaugccgccauccucaa

SEQ ID NO: 565694 - RNA, 19 nt, Homo sapiens
  misc_RNA (1)...(19): siRNA sense strand
cauggaggcacccaagauu

SEQ ID NO: 565695 - RNA, 19 nt, Homo sapiens
  misc_RNA (1)...(19): siRNA sense strand
gcauggaggcacccaagau

SEQ ID NO: 565696 - RNA, 19 nt, Homo sapiens
  misc_RNA (1)...(19): siRNA sense strand
ggugaagccgucucggaaa

SEQ ID NO: 565697 - RNA, 19 nt, Homo sapiens
  misc_RNA (1)...(19): siRNA sense strand
caccaagaccugcgauuuc

SEQ ID NO: 565698 - RNA, 19 nt, Homo sapiens
  misc_RNA (1)...(19): siRNA sense strand
gggaugaaucugagaaucu

SEQ ID NO: 565699 - RNA, 19 nt, Homo sapiens
  misc_RNA (1)...(19): siRNA sense strand
cuccaggaauuuaacaaga

SEQ ID NO: 565700 - RNA, 19 nt, Homo sapiens
  misc_RNA (1)...(19): siRNA sense strand
cgauugcuccaggaauuua

SEQ ID NO: 565701 - RNA, 19 nt, Homo sapiens
  misc_RNA (1)...(19): siRNA sense strand
gugcugguaugacaaggau

SEQ ID NO: 565702 - RNA, 19 nt, Homo sapiens
  misc_RNA (1)...(19): siRNA sense strand
gaagaagaagaggaagaug

SEQ ID NO: 565703 - RNA, 19 nt, Homo sapiens
  misc_RNA (1)...(19): siRNA sense strand
gcaucgccuucuucaguuc

SEQ ID NO: 565704 - RNA, 19 nt, Homo sapiens
  misc_RNA (1)...(19): siRNA sense strand
ggauuacaaguacaucuca

SEQ ID NO: 565705 - RNA, 19 nt, Homo sapiens
  misc_RNA (1)...(19): siRNA sense strand
gcagaaggugauccugaug

SEQ ID NO: 565706 - RNA, 19 nt, Homo sapiens
  misc_RNA (1)...(19): siRNA sense strand
gcgaggguuugaggaguug

SEQ ID NO: 565707 - RNA, 19 nt, Homo sapiens
  misc_RNA (1)...(19): siRNA sense strand
ggagucagggaaucaguca

SEQ ID NO: 565708 - RNA, 19 nt, Homo sapiens
  misc_RNA (1)...(19): siRNA sense strand
ccucagaucuggccaaaag

SEQ ID NO: 565709 - RNA, 19 nt, Homo sapiens
  misc_RNA (1)...(19): siRNA sense strand
gaugugagagaggaugauu

SEQ ID NO: 565710 - RNA, 19 nt, Homo sapiens
  misc_RNA (1)...(19): siRNA sense strand
gcgauugcuccaggaauuu

SEQ ID NO: 565711 - RNA, 19 nt, Homo sapiens
  misc_RNA (1)...(19): siRNA sense strand
agaggaagaagaagaggaa

SEQ ID NO: 565712 - RNA, 19 nt, Homo sapiens
  misc_RNA (1)...(19): siRNA sense strand
ccgcaugagugaugauguc

SEQ ID NO: 565713 - RNA, 19 nt, Homo sapiens
  misc_RNA (1)...(19): siRNA sense strand
gugauccgcaugcuacuga

SEQ ID NO: 565714 - RNA, 19 nt, Homo sapiens
  misc_RNA (1)...(19): siRNA sense strand
cugaacaacuaagugaaga

SEQ ID NO: 565715 - RNA, 19 nt, Homo sapiens
  misc_RNA (1)...(19): siRNA sense strand
ggugggugaugacuucagu

SEQ ID NO: 565716 - RNA, 19 nt, Homo sapiens
  misc_RNA (1)...(19): siRNA sense strand
agacgguggugggugauga

SEQ ID NO: 565717 - RNA, 19 nt, Homo sapiens
  misc_RNA (1)...(19): siRNA sense strand
gcgagacguccaccaugaa

SEQ ID NO: 565718 - RNA, 19 nt, Homo sapiens
  misc_RNA (1)...(19): siRNA sense strand
cagggaaucagucagauag

SEQ ID NO: 565719 - RNA, 19 nt, Homo sapiens
  misc_RNA (1)...(19): siRNA sense strand
acuucagucucuacuauga

SEQ ID NO: 565720 - RNA, 19 nt, Homo sapiens
  misc_RNA (1)...(19): siRNA sense strand
gugaagccgucucggaaac

SEQ ID NO: 565721 - RNA, 19 nt, Homo sapiens
  misc_RNA (1)...(19): siRNA sense strand
gcaucaaggugcggcuaca

SEQ ID NO: 565722 - RNA, 19 nt, Homo sapiens
  misc_RNA (1)...(19): siRNA sense strand
uccaggaauuuaacaagau

SEQ ID NO: 565723 - RNA, 19 nt, Homo sapiens
  misc_RNA (1)...(19): siRNA sense strand
uggaggcacccaagauuga

SEQ ID NO: 565724 - RNA, 19 nt, Homo sapiens
  misc_RNA (1)...(19): siRNA sense strand
gaacaucgaucgcaacauc

SEQ ID NO: 565725 - RNA, 19 nt, Homo sapiens
  misc_RNA (1)...(19): siRNA sense strand
ugagagaggaugauucuua

SEQ ID NO: 565726 - RNA, 19 nt, Homo sapiens
  misc_RNA (1)...(19): siRNA sense strand
cagcaagucugaaguugaa

SEQ ID NO: 565727 - RNA, 19 nt, Homo sapiens
  misc_RNA (1)...(19): siRNA sense strand
ggagguagcccguuacaug

SEQ ID NO: 565728 - RNA, 19 nt, Homo sapiens
  misc_RNA (1)...(19): siRNA sense strand
ggaagaagaagaagaggaa

SEQ ID NO: 565729 - RNA, 19 nt, Homo sapiens
  misc_RNA (1)...(19): siRNA sense strand
gcacucagccgaagccauu

SEQ ID NO: 565730 - RNA, 19 nt, Homo sapiens
  misc_RNA (1)...(19): siRNA sense strand
caucuucgcuggagacaga

SEQ ID NO: 565731 - RNA, 19 nt, Homo sapiens
  misc_RNA (1)...(19): siRNA sense strand
ggaggaagaggaagaagaa

SEQ ID NO: 565732 - RNA, 19 nt, Homo sapiens
  misc_RNA (1)...(19): siRNA sense strand
uaaaugcaguggacaaaca

SEQ ID NO: 565733 - RNA, 19 nt, Homo sapiens
  misc_RNA (1)...(19): siRNA sense strand
gaagugacccugacgaaag

SEQ ID NO: 565734 - RNA, 19 nt, Homo sapiens
  misc_RNA (1)...(19): siRNA sense strand
gggaggagcuaggguuuga

SEQ ID NO: 565735 - RNA, 19 nt, Homo sapiens
  misc_RNA (1)...(19): siRNA sense strand
ggaagaggaggaagaagaa

SEQ ID NO: 565736 - RNA, 19 nt, Homo sapiens
  misc_RNA (1)...(19): siRNA sense strand
ggaugaaucugagaaucuu

SEQ ID NO: 565737 - RNA, 19 nt, Homo sapiens
  misc_RNA (1)...(19): siRNA sense strand
uaacugaacaacuaaguga

SEQ ID NO: 565738 - RNA, 19 nt, Homo sapiens
  misc_RNA (1)...(19): siRNA sense strand
gcaccaagaccugcgauuu

SEQ ID NO: 565739 - RNA, 19 nt, Homo sapiens
  misc_RNA (1)...(19): siRNA sense strand
ugacaaggaugggcgauug

SEQ ID NO: 565740 - RNA, 19 nt, Homo sapiens
  misc_RNA (1)...(19): siRNA sense strand
gagagaggaugauucuuac

SEQ ID NO: 565741 - RNA, 19 nt, Homo sapiens
  misc_RNA (1)...(19): siRNA sense strand
ggaugauucuuaccucuuc

SEQ ID NO: 565742 - RNA, 19 nt, Homo sapiens
  misc_RNA (1)...(19): siRNA sense strand
ggagagguguacugcauag

SEQ ID NO: 565743 - RNA, 19 nt, Homo sapiens
  misc_RNA (1)...(19): siRNA sense strand
ggagacagagcgaggguuu

SEQ ID NO: 565744 - RNA, 19 nt, Homo sapiens
  misc_RNA (1)...(19): siRNA sense strand
ccaggaauuuaacaagauu

SEQ ID NO: 565745 - RNA, 19 nt, Homo sapiens
  misc_RNA (1)...(19): siRNA sense strand
ggcgauugcuccaggaauu

SEQ ID NO: 565746 - RNA, 19 nt, Homo sapiens
  misc_RNA (1)...(19): siRNA sense strand
gagguguacugcauagaug

SEQ ID NO: 565747 - RNA, 19 nt, Homo sapiens
  misc_RNA (1)...(19): siRNA sense strand
gcccugaggauuacaagua

SEQ ID NO: 565748 - RNA, 19 nt, Homo sapiens
  misc_RNA (1)...(19): siRNA sense strand
guccagaguuuggcuauga

SEQ ID NO: 565749 - RNA, 19 nt, Homo sapiens
  misc_RNA (1)...(19): siRNA sense strand
gaaaaucaccuccaucugu

SEQ ID NO: 565750 - RNA, 19 nt, Homo sapiens
  misc_RNA (1)...(19): siRNA sense strand
gagcuaggguuugacuaug

SEQ ID NO: 565751 - RNA, 19 nt, Homo sapiens
  misc_RNA (1)...(19): siRNA sense strand
gcaaggccaagaagaaaug

SEQ ID NO: 565752 - RNA, 19 nt, Homo sapiens
  misc_RNA (1)...(19): siRNA sense strand
gguggugggugaugacuuc

SEQ ID NO: 565753 - RNA, 19 nt, Homo sapiens
  misc_RNA (1)...(19): siRNA sense strand
ggagcuaggguuugacuau

SEQ ID NO: 565754 - RNA, 19 nt, Homo sapiens
  misc_RNA (1)...(19): siRNA sense strand
gggaaucagucagauagga

SEQ ID NO: 565755 - RNA, 19 nt, Homo sapiens
  misc_RNA (1)...(19): siRNA sense strand
ggaagaagaagaggaagau

SEQ ID NO: 565756 - RNA, 19 nt, Homo sapiens
  misc_RNA (1)...(19): siRNA sense strand
gagaagugacccugacgaa

SEQ ID NO: 565757 - RNA, 19 nt, Homo sapiens
  misc_RNA (1)...(19): siRNA sense strand
ggaggaagaggaggaagaa

SEQ ID NO: 565758 - RNA, 19 nt, Homo sapiens
  misc_RNA (1)...(19): siRNA sense strand
gaccucagaucuggccaaa

SEQ ID NO: 565759 - RNA, 19 nt, Homo sapiens
  misc_RNA (1)...(19): siRNA sense strand
gcaagaaccgggucguaca

SEQ ID NO: 565760 - RNA, 19 nt, Homo sapiens
  misc_RNA (1)...(19): siRNA sense strand
ugaaugggauggucuucug

SEQ ID NO: 565761 - RNA, 19 nt, Homo sapiens
  misc_RNA (1)...(19): siRNA sense strand
ggaggaagaagaagaagag

SEQ ID NO: 565762 - RNA, 19 nt, Homo sapiens
  misc_RNA (1)...(19): siRNA sense strand
gacagcaagucugaaguug

SEQ ID NO: 565763 - RNA, 19 nt, Homo sapiens
  misc_RNA (1)...(19): siRNA sense strand
cgacagcaagucugaaguu

SEQ ID NO: 565764 - RNA, 19 nt, Homo sapiens
  misc_RNA (1)...(19): siRNA sense strand
caacaucagccgcuucauc

SEQ ID NO: 565765 - RNA, 19 nt, Homo sapiens
  misc_RNA (1)...(19): siRNA sense strand
ggaccuucaucugcgagua

SEQ ID NO: 565766 - RNA, 19 nt, Homo sapiens
  misc_RNA (1)...(19): siRNA sense strand
gauugagccuccgcugauu

SEQ ID NO: 565767 - RNA, 19 nt, Homo sapiens
  misc_RNA (1)...(19): siRNA sense strand
cgugguggcugugucuaua

SEQ ID NO: 565768 - RNA, 19 nt, Homo sapiens
  misc_RNA (1)...(19): siRNA sense strand
auacagcauuuccgcauga

SEQ ID NO: 565769 - RNA, 19 nt, Homo sapiens
  misc_RNA (1)...(19): siRNA sense strand
caauguggcucugagaagu

SEQ ID NO: 565770 - RNA, 19 nt, Homo sapiens
  misc_RNA (1)...(19): siRNA sense strand
gguuugcgcuucaacucaa

SEQ ID NO: 565771 - RNA, 19 nt, Homo sapiens
  misc_RNA (1)...(19): siRNA sense strand
gcgcaaggccaagaagaaa

SEQ ID NO: 565772 - RNA, 19 nt, Homo sapiens
  misc_RNA (1)...(19): siRNA sense strand
ggaagaggaagaagaagag

SEQ ID NO: 565773 - RNA, 19 nt, Homo sapiens
  misc_RNA (1)...(19): siRNA sense strand
agaggaagaugaggaguca

SEQ ID NO: 565774 - RNA, 19 nt, Homo sapiens
  misc_RNA (1)...(19): siRNA sense strand
cgacuuagacaacaaggau

SEQ ID NO: 565775 - RNA, 19 nt, Homo sapiens
  misc_RNA (1)...(19): siRNA sense strand
cagaggagccaccgagaga

SEQ ID NO: 565776 - RNA, 19 nt, Homo sapiens
  misc_RNA (1)...(19): siRNA sense strand
ggacaccccucguagugaa

SEQ ID NO: 565777 - RNA, 19 nt, Homo sapiens
  misc_RNA (1)...(19): siRNA sense strand
gcucuaacugaacaacuaa

SEQ ID NO: 565778 - RNA, 19 nt, Homo sapiens
  misc_RNA (1)...(19): siRNA sense strand
gaugaggagucagggaauc

SEQ ID NO: 565779 - RNA, 19 nt, Homo sapiens
  misc_RNA (1)...(19): siRNA sense strand
aagaagaagaggaagauga

SEQ ID NO: 565780 - RNA, 19 nt, Homo sapiens
  misc_RNA (1)...(19): siRNA sense strand
cuacuaugauuccuacucu

SEQ ID NO: 565781 - RNA, 19 nt, Homo sapiens
  misc_RNA (1)...(19): siRNA sense strand
caggacagguggacgucaa

SEQ ID NO: 565782 - RNA, 19 nt, Homo sapiens
  misc_RNA (1)...(19): siRNA sense strand
ggagugccacccugacuuc

SEQ ID NO: 565783 - RNA, 19 nt, Homo sapiens
  misc_RNA (1)...(19): siRNA sense strand
ggaggaggaagaggaagaa

SEQ ID NO: 565784 - RNA, 19 nt, Homo sapiens
  misc_RNA (1)...(19): siRNA sense strand
auucuuaccucuucgacuu

SEQ ID NO: 565785 - RNA, 19 nt, Homo sapiens
  misc_RNA (1)...(19): siRNA sense strand
cuacagcucuaccgaacag

SEQ ID NO: 565786 - RNA, 19 nt, Homo sapiens
  misc_RNA (1)...(19): siRNA sense strand
gaaccgggucguacagagu

SEQ ID NO: 565787 - RNA, 19 nt, Homo sapiens
  misc_RNA (1)...(19): siRNA sense strand
agacagagcgaggguuuga

SEQ ID NO: 565788 - RNA, 19 nt, Homo sapiens
  misc_RNA (1)...(19): siRNA sense strand
ucagggaaucagucagaua

SEQ ID NO: 565789 - RNA, 19 nt, Homo sapiens
  misc_RNA (1)...(19): siRNA sense strand
ugcgagacguccaccauga

SEQ ID NO: 565790 - RNA, 19 nt, Homo sapiens
  misc_RNA (1)...(19): siRNA sense strand
uaugagaacgugcccauuc

SEQ ID NO: 565791 - RNA, 19 nt, Homo sapiens
  misc_RNA (1)...(19): siRNA sense strand
cgggagagcuaccaugacu

SEQ ID NO: 565792 - RNA, 19 nt, Homo sapiens
  misc_RNA (1)...(19): siRNA sense strand
cauaaaugcaguggacaaa

SEQ ID NO: 565793 - RNA, 19 nt, Homo sapiens
  misc_RNA (1)...(19): siRNA sense strand
gcaaugccgccauccucaa

SEQ ID NO: 565794 - RNA, 19 nt, Homo sapiens
  misc_RNA (1)...(19): siRNA sense strand
cauggaggcacccaagauu

SEQ ID NO: 565795 - RNA, 19 nt, Homo sapiens
  misc_RNA (1)...(19): siRNA sense strand
gcauggaggcacccaagau

SEQ ID NO: 565796 - RNA, 19 nt, Homo sapiens
  misc_RNA (1)...(19): siRNA sense strand
ggugaagccgucucggaaa

SEQ ID NO: 565797 - RNA, 19 nt, Homo sapiens
  misc_RNA (1)...(19): siRNA sense strand
caccaagaccugcgauuuc

SEQ ID NO: 565798 - RNA, 19 nt, Homo sapiens
  misc_RNA (1)...(19): siRNA sense strand
gggaugaaucugagaaucu

SEQ ID NO: 565799 - RNA, 19 nt, Homo sapiens
  misc_RNA (1)...(19): siRNA sense strand
cuccaggaauuuaacaaga

SEQ ID NO: 565800 - RNA, 19 nt, Homo sapiens
  misc_RNA (1)...(19): siRNA sense strand
cgauugcuccaggaauuua

SEQ ID NO: 565801 - RNA, 19 nt, Homo sapiens
  misc_RNA (1)...(19): siRNA sense strand
gugcugguaugacaaggau

SEQ ID NO: 565802 - RNA, 19 nt, Homo sapiens
  misc_RNA (1)...(19): siRNA sense strand
gaagaagaagaggaagaug

SEQ ID NO: 565803 - RNA, 19 nt, Homo sapiens
  misc_RNA (1)...(19): siRNA sense strand
gcaucgccuucuucaguuc

SEQ ID NO: 565804 - RNA, 19 nt, Homo sapiens
  misc_RNA (1)...(19): siRNA sense strand
ggauuacaaguacaucuca

SEQ ID NO: 565805 - RNA, 19 nt, Homo sapiens
  misc_RNA (1)...(19): siRNA sense strand
gcagaaggugauccugaug

SEQ ID NO: 565806 - RNA, 19 nt, Homo sapiens
  misc_RNA (1)...(19): siRNA sense strand
gcgaggguuugaggaguug

SEQ ID NO: 565807 - RNA, 19 nt, Homo sapiens
  misc_RNA (1)...(19): siRNA sense strand
ggagucagggaaucaguca

SEQ ID NO: 565808 - RNA, 19 nt, Homo sapiens
  misc_RNA (1)...(19): siRNA sense strand
ccucagaucuggccaaaag

SEQ ID NO: 565809 - RNA, 19 nt, Homo sapiens
  misc_RNA (1)...(19): siRNA sense strand
gaugugagagaggaugauu

SEQ ID NO: 565810 - RNA, 19 nt, Homo sapiens
  misc_RNA (1)...(19): siRNA sense strand
gcgauugcuccaggaauuu

SEQ ID NO: 565811 - RNA, 19 nt, Homo sapiens
  misc_RNA (1)...(19): siRNA sense strand
agaggaagaagaagaggaa

SEQ ID NO: 565812 - RNA, 19 nt, Homo sapiens
  misc_RNA (1)...(19): siRNA sense strand
ccgcaugagugaugauguc

SEQ ID NO: 565813 - RNA, 19 nt, Homo sapiens
  misc_RNA (1)...(19): siRNA sense strand
gugauccgcaugcuacuga

SEQ ID NO: 565814 - RNA, 19 nt, Homo sapiens
  misc_RNA (1)...(19): siRNA sense strand
cugaacaacuaagugaaga

SEQ ID NO: 565815 - RNA, 19 nt, Homo sapiens
  misc_RNA (1)...(19): siRNA sense strand
ggugggugaugacuucagu

SEQ ID NO: 565816 - RNA, 19 nt, Homo sapiens
  misc_RNA (1)...(19): siRNA sense strand
agacgguggugggugauga

SEQ ID NO: 565817 - RNA, 19 nt, Homo sapiens
  misc_RNA (1)...(19): siRNA sense strand
gcgagacguccaccaugaa

SEQ ID NO: 565818 - RNA, 19 nt, Homo sapiens
  misc_RNA (1)...(19): siRNA sense strand
cagggaaucagucagauag

SEQ ID NO: 565819 - RNA, 19 nt, Homo sapiens
  misc_RNA (1)...(19): siRNA sense strand
acuucagucucuacuauga

SEQ ID NO: 565820 - RNA, 19 nt, Homo sapiens
  misc_RNA (1)...(19): siRNA sense strand
gugaagccgucucggaaac

SEQ ID NO: 565821 - RNA, 19 nt, Homo sapiens
  misc_RNA (1)...(19): siRNA sense strand
gcaucaaggugcggcuaca

SEQ ID NO: 565822 - RNA, 19 nt, Homo sapiens
  misc_RNA (1)...(19): siRNA sense strand
uccaggaauuuaacaagau

SEQ ID NO: 565823 - RNA, 19 nt, Homo sapiens
  misc_RNA (1)...(19): siRNA sense strand
uggaggcacccaagauuga

SEQ ID NO: 565824 - RNA, 19 nt, Homo sapiens
  misc_RNA (1)...(19): siRNA sense strand
gaaucgagaucaacagaua

SEQ ID NO: 565825 - RNA, 19 nt, Homo sapiens
  misc_RNA (1)...(19): siRNA sense strand
caaaguacacccucaaaua

SEQ ID NO: 565826 - RNA, 19 nt, Homo sapiens
  misc_RNA (1)...(19): siRNA sense strand
gaacauacaagaaaccaaa

SEQ ID NO: 565827 - RNA, 19 nt, Homo sapiens
  misc_RNA (1)...(19): siRNA sense strand
ucagauaccuuucauacaa

SEQ ID NO: 565828 - RNA, 19 nt, Homo sapiens
  misc_RNA (1)...(19): siRNA sense strand
gagcacaucugacucugaa

SEQ ID NO: 565829 - RNA, 19 nt, Homo sapiens
  misc_RNA (1)...(19): siRNA sense strand
ccuaauaacucuucagaau

SEQ ID NO: 565830 - RNA, 19 nt, Homo sapiens
  misc_RNA (1)...(19): siRNA sense strand
gaaguaaacagcauaaauc

SEQ ID NO: 565831 - RNA, 19 nt, Homo sapiens
  misc_RNA (1)...(19): siRNA sense strand
ggucuuugcugauguagaa

SEQ ID NO: 565832 - RNA, 19 nt, Homo sapiens
  misc_RNA (1)...(19): siRNA sense strand
ccauacaugugucauuaua

SEQ ID NO: 565833 - RNA, 19 nt, Homo sapiens
  misc_RNA (1)...(19): siRNA sense strand
caccauacaugugucauua

SEQ ID NO: 565834 - RNA, 19 nt, Homo sapiens
  misc_RNA (1)...(19): siRNA sense strand
caaaggacaauauccauuu

SEQ ID NO: 565835 - RNA, 19 nt, Homo sapiens
  misc_RNA (1)...(19): siRNA sense strand
gaauuaccuucuccuuuga

SEQ ID NO: 565836 - RNA, 19 nt, Homo sapiens
  misc_RNA (1)...(19): siRNA sense strand
gaauuugcuuugucccuuu

SEQ ID NO: 565837 - RNA, 19 nt, Homo sapiens
  misc_RNA (1)...(19): siRNA sense strand
acaaguagaugacgaagau

SEQ ID NO: 565838 - RNA, 19 nt, Homo sapiens
  misc_RNA (1)...(19): siRNA sense strand
aaaguacacccucaaauaa

SEQ ID NO: 565839 - RNA, 19 nt, Homo sapiens
  misc_RNA (1)...(19): siRNA sense strand
acucagggauggaauuaua

SEQ ID NO: 565840 - RNA, 19 nt, Homo sapiens
  misc_RNA (1)...(19): siRNA sense strand
ugaaaguccucguguauca

SEQ ID NO: 565841 - RNA, 19 nt, Homo sapiens
  misc_RNA (1)...(19): siRNA sense strand
cagaagaacauacaagaaa

SEQ ID NO: 565842 - RNA, 19 nt, Homo sapiens
  misc_RNA (1)...(19): siRNA sense strand
gaagcaucauuuggaauuu

SEQ ID NO: 565843 - RNA, 19 nt, Homo sapiens
  misc_RNA (1)...(19): siRNA sense strand
aaaugaagaugcugagcua

SEQ ID NO: 565844 - RNA, 19 nt, Homo sapiens
  misc_RNA (1)...(19): siRNA sense strand
acaagaaaccaaacaagua

SEQ ID NO: 565845 - RNA, 19 nt, Homo sapiens
  misc_RNA (1)...(19): siRNA sense strand
uaagaagccuaagcaacua

SEQ ID NO: 565846 - RNA, 19 nt, Homo sapiens
  misc_RNA (1)...(19): siRNA sense strand
ggaacaaucaugugaggaa

SEQ ID NO: 565847 - RNA, 19 nt, Homo sapiens
  misc_RNA (1)...(19): siRNA sense strand
gaaagaaaaucccauugug

SEQ ID NO: 565848 - RNA, 19 nt, Homo sapiens
  misc_RNA (1)...(19): siRNA sense strand
gaccuuugaucccaagaaa

SEQ ID NO: 565849 - RNA, 19 nt, Homo sapiens
  misc_RNA (1)...(19): siRNA sense strand
agaaauaguucaccacaag

SEQ ID NO: 565850 - RNA, 19 nt, Homo sapiens
  misc_RNA (1)...(19): siRNA sense strand
ucauaagccuggcgaaaug

SEQ ID NO: 565851 - RNA, 19 nt, Homo sapiens
  misc_RNA (1)...(19): siRNA sense strand
ccagugucaucaaauguuu

SEQ ID NO: 565852 - RNA, 19 nt, Homo sapiens
  misc_RNA (1)...(19): siRNA sense strand
uuauugagccuuugucuaa

SEQ ID NO: 565853 - RNA, 19 nt, Homo sapiens
  misc_RNA (1)...(19): siRNA sense strand
aaaugaaaguccucgugua

SEQ ID NO: 565854 - RNA, 19 nt, Homo sapiens
  misc_RNA (1)...(19): siRNA sense strand
cuaagcaacuagaaggauu

SEQ ID NO: 565855 - RNA, 19 nt, Homo sapiens
  misc_RNA (1)...(19): siRNA sense strand
ggauggaauuauagaagga

SEQ ID NO: 565856 - RNA, 19 nt, Homo sapiens
  misc_RNA (1)...(19): siRNA sense strand
ugaaucacgugaagcauca

SEQ ID NO: 565857 - RNA, 19 nt, Homo sapiens
  misc_RNA (1)...(19): siRNA sense strand
caagaaaccaaacaaguag

SEQ ID NO: 565858 - RNA, 19 nt, Homo sapiens
  misc_RNA (1)...(19): siRNA sense strand
aaaguaugaucaccuuaga

SEQ ID NO: 565859 - RNA, 19 nt, Homo sapiens
  misc_RNA (1)...(19): siRNA sense strand
gcaaaguacacccucaaau

SEQ ID NO: 565860 - RNA, 19 nt, Homo sapiens
  misc_RNA (1)...(19): siRNA sense strand
cgaaguaaacagcauaaau

SEQ ID NO: 565861 - RNA, 19 nt, Homo sapiens
  misc_RNA (1)...(19): siRNA sense strand
agauacugcucgcaaauug

SEQ ID NO: 565862 - RNA, 19 nt, Homo sapiens
  misc_RNA (1)...(19): siRNA sense strand
gacccagugucaucaaaug

SEQ ID NO: 565863 - RNA, 19 nt, Homo sapiens
  misc_RNA (1)...(19): siRNA sense strand
ugaagcaucauuuggaauu

SEQ ID NO: 565864 - RNA, 19 nt, Homo sapiens
  misc_RNA (1)...(19): siRNA sense strand
gaaauucuucagcuucguu

SEQ ID NO: 565865 - RNA, 19 nt, Homo sapiens
  misc_RNA (1)...(19): siRNA sense strand
cagaucagguccucuuaca

SEQ ID NO: 565866 - RNA, 19 nt, Homo sapiens
  misc_RNA (1)...(19): siRNA sense strand
gauuaccuccugaaacaaa

SEQ ID NO: 565867 - RNA, 19 nt, Homo sapiens
  misc_RNA (1)...(19): siRNA sense strand
ugaagaugcugagcuaauc

SEQ ID NO: 565868 - RNA, 19 nt, Homo sapiens
  misc_RNA (1)...(19): siRNA sense strand
uaagcaacuagaaggauua

SEQ ID NO: 565869 - RNA, 19 nt, Homo sapiens
  misc_RNA (1)...(19): siRNA sense strand
aaacucagggauggaauua

SEQ ID NO: 565870 - RNA, 19 nt, Homo sapiens
  misc_RNA (1)...(19): siRNA sense strand
ugucuaaaccugauuauag

SEQ ID NO: 565871 - RNA, 19 nt, Homo sapiens
  misc_RNA (1)...(19): siRNA sense strand
gaacauguaaaugaagaug

SEQ ID NO: 565872 - RNA, 19 nt, Homo sapiens
  misc_RNA (1)...(19): siRNA sense strand
gaucagguccucuuacaac

SEQ ID NO: 565873 - RNA, 19 nt, Homo sapiens
  misc_RNA (1)...(19): siRNA sense strand
gcuacagugucacaucgaa

SEQ ID NO: 565874 - RNA, 19 nt, Homo sapiens
  misc_RNA (1)...(19): siRNA sense strand
gagaagggcagccggaaca

SEQ ID NO: 565875 - RNA, 19 nt, Homo sapiens
  misc_RNA (1)...(19): siRNA sense strand
cagcuucguucccuucaga

SEQ ID NO: 565876 - RNA, 19 nt, Homo sapiens
  misc_RNA (1)...(19): siRNA sense strand
augcugagcucaucuuugu

SEQ ID NO: 565877 - RNA, 19 nt, Homo sapiens
  misc_RNA (1)...(19): siRNA sense strand
uuuagaacgugccaugaaa

SEQ ID NO: 565878 - RNA, 19 nt, Homo sapiens
  misc_RNA (1)...(19): siRNA sense strand
ccaaaggacaauauccauu

SEQ ID NO: 565879 - RNA, 19 nt, Homo sapiens
  misc_RNA (1)...(19): siRNA sense strand
gcugagcucaucuuuguug

SEQ ID NO: 565880 - RNA, 19 nt, Homo sapiens
  misc_RNA (1)...(19): siRNA sense strand
aguaggagguauaaaugaa

SEQ ID NO: 565881 - RNA, 19 nt, Homo sapiens
  misc_RNA (1)...(19): siRNA sense strand
caaacaaguagaugacgaa

SEQ ID NO: 565882 - RNA, 19 nt, Homo sapiens
  misc_RNA (1)...(19): siRNA sense strand
uguggaacauguaaaugaa

SEQ ID NO: 565883 - RNA, 19 nt, Homo sapiens
  misc_RNA (1)...(19): siRNA sense strand
cgugaagcaucauuuggaa

SEQ ID NO: 565884 - RNA, 19 nt, Homo sapiens
  misc_RNA (1)...(19): siRNA sense strand
cagauaccuuucauacaau

SEQ ID NO: 565885 - RNA, 19 nt, Homo sapiens
  misc_RNA (1)...(19): siRNA sense strand
aaaggacaauauccauuuc

SEQ ID NO: 565886 - RNA, 19 nt, Homo sapiens
  misc_RNA (1)...(19): siRNA sense strand
aaaccaaacaaguagauga

SEQ ID NO: 565887 - RNA, 19 nt, Homo sapiens
  misc_RNA (1)...(19): siRNA sense strand
aaacagaucagguccucuu

SEQ ID NO: 565888 - RNA, 19 nt, Homo sapiens
  misc_RNA (1)...(19): siRNA sense strand
guaggagguauaaaugaaa

SEQ ID NO: 565889 - RNA, 19 nt, Homo sapiens
  misc_RNA (1)...(19): siRNA sense strand
ucugugaauugucauuuga

SEQ ID NO: 565890 - RNA, 19 nt, Homo sapiens
  misc_RNA (1)...(19): siRNA sense strand
agacucacaccaccuuuaa

SEQ ID NO: 565891 - RNA, 19 nt, Homo sapiens
  misc_RNA (1)...(19): siRNA sense strand
uggaacauguaaaugaaga

SEQ ID NO: 565892 - RNA, 19 nt, Homo sapiens
  misc_RNA (1)...(19): siRNA sense strand
caagugccggcuacaguuu

SEQ ID NO: 565893 - RNA, 19 nt, Homo sapiens
  misc_RNA (1)...(19): siRNA sense strand
ugccagguuugccauuaua

SEQ ID NO: 565894 - RNA, 19 nt, Homo sapiens
  misc_RNA (1)...(19): siRNA sense strand
caggagcccucuacugucu

SEQ ID NO: 565895 - RNA, 19 nt, Homo sapiens
  misc_RNA (1)...(19): siRNA sense strand
uagaaauaguucaccacaa

SEQ ID NO: 565896 - RNA, 19 nt, Homo sapiens
  misc_RNA (1)...(19): siRNA sense strand
aguacacccucaaauaaug

SEQ ID NO: 565897 - RNA, 19 nt, Homo sapiens
  misc_RNA (1)...(19): siRNA sense strand
caucuuuguugguguggaa

SEQ ID NO: 565898 - RNA, 19 nt, Homo sapiens
  misc_RNA (1)...(19): siRNA sense strand
gaaauaguucaccacaagu

SEQ ID NO: 565899 - RNA, 19 nt, Homo sapiens
  misc_RNA (1)...(19): siRNA sense strand
guguggaacauguaaauga

SEQ ID NO: 565900 - RNA, 19 nt, Homo sapiens
  misc_RNA (1)...(19): siRNA sense strand
augcugagcuaaucuuugu

SEQ ID NO: 565901 - RNA, 19 nt, Homo sapiens
  misc_RNA (1)...(19): siRNA sense strand
uuaagaagccuaagcaacu

SEQ ID NO: 565902 - RNA, 19 nt, Homo sapiens
  misc_RNA (1)...(19): siRNA sense strand
uguguuacuuagugacuuu

SEQ ID NO: 565903 - RNA, 19 nt, Homo sapiens
  misc_RNA (1)...(19): siRNA sense strand
agaagaacauacaagaaac

SEQ ID NO: 565904 - RNA, 19 nt, Homo sapiens
  misc_RNA (1)...(19): siRNA sense strand
gcugagcuaaucuuuguug

SEQ ID NO: 565905 - RNA, 19 nt, Homo sapiens
  misc_RNA (1)...(19): siRNA sense strand
ggagcccucuacugucugu

SEQ ID NO: 565906 - RNA, 19 nt, Homo sapiens
  misc_RNA (1)...(19): siRNA sense strand
gaagacucacaccaccuuu

SEQ ID NO: 565907 - RNA, 19 nt, Homo sapiens
  misc_RNA (1)...(19): siRNA sense strand
ggacaauauccauuucaag

SEQ ID NO: 565908 - RNA, 19 nt, Homo sapiens
  misc_RNA (1)...(19): siRNA sense strand
gaagagaaagagccugaac

SEQ ID NO: 565909 - RNA, 19 nt, Homo sapiens
  misc_RNA (1)...(19): siRNA sense strand
gcaacuuuccacuuucgaa

SEQ ID NO: 565910 - RNA, 19 nt, Homo sapiens
  misc_RNA (1)...(19): siRNA sense strand
ucaguaggagguauaaaug

SEQ ID NO: 565911 - RNA, 19 nt, Homo sapiens
  misc_RNA (1)...(19): siRNA sense strand
aguaugaucaccuuagaaa

SEQ ID NO: 565912 - RNA, 19 nt, Homo sapiens
  misc_RNA (1)...(19): siRNA sense strand
ccaagugccggcuacaguu

SEQ ID NO: 565913 - RNA, 19 nt, Homo sapiens
  misc_RNA (1)...(19): siRNA sense strand
gugccagguuugccauuau

SEQ ID NO: 565914 - RNA, 19 nt, Homo sapiens
  misc_RNA (1)...(19): siRNA sense strand
ucacagauucauugcauca

SEQ ID NO: 565915 - RNA, 19 nt, Homo sapiens
  misc_RNA (1)...(19): siRNA sense strand
cacagaagaacauacaaga

SEQ ID NO: 565916 - RNA, 19 nt, Homo sapiens
  misc_RNA (1)...(19): siRNA sense strand
ugagaccguuacaucagaa

SEQ ID NO: 565917 - RNA, 19 nt, Homo sapiens
  misc_RNA (1)...(19): siRNA sense strand
aagcaucauuuggaauuug

SEQ ID NO: 565918 - RNA, 19 nt, Homo sapiens
  misc_RNA (1)...(19): siRNA sense strand
caaugaauacucagcaaag

SEQ ID NO: 565919 - RNA, 19 nt, Homo sapiens
  misc_RNA (1)...(19): siRNA sense strand
gaaaguccucguguaucaa

SEQ ID NO: 565920 - RNA, 19 nt, Homo sapiens
  misc_RNA (1)...(19): siRNA sense strand
aaugaaaguccucguguau

SEQ ID NO: 565921 - RNA, 19 nt, Homo sapiens
  misc_RNA (1)...(19): siRNA sense strand
ccugccagcuucccaacuu

SEQ ID NO: 565922 - RNA, 19 nt, Homo sapiens
  misc_RNA (1)...(19): siRNA sense strand
ugugccagguuugccauua

SEQ ID NO: 565923 - RNA, 19 nt, Homo sapiens
  misc_RNA (1)...(19): siRNA sense strand
auacaugugucauuauagg

SEQ ID NO: 565924 - RNA, 19 nt, Homo sapiens
  misc_RNA (1)...(19): siRNA sense strand
gaacggaacaucuauauug

SEQ ID NO: 565925 - RNA, 19 nt, Homo sapiens
  misc_RNA (1)...(19): siRNA sense strand
gaagaaugccagagaaaua

SEQ ID NO: 565926 - RNA, 19 nt, Homo sapiens
  misc_RNA (1)...(19): siRNA sense strand
ggacacaaaugauaucaca

SEQ ID NO: 565927 - RNA, 19 nt, Homo sapiens
  misc_RNA (1)...(19): siRNA sense strand
uaacacaggacacaaauga

SEQ ID NO: 565928 - RNA, 19 nt, Homo sapiens
  misc_RNA (1)...(19): siRNA sense strand
gggaauuaaucuacaauca

SEQ ID NO: 565929 - RNA, 19 nt, Homo sapiens
  misc_RNA (1)...(19): siRNA sense strand
gacuacagcugaccugguu

SEQ ID NO: 565930 - RNA, 19 nt, Homo sapiens
  misc_RNA (1)...(19): siRNA sense strand
ccagagacaucacccugaa

SEQ ID NO: 565931 - RNA, 19 nt, Homo sapiens
  misc_RNA (1)...(19): siRNA sense strand
acacaggacacaaaugaua

SEQ ID NO: 565932 - RNA, 19 nt, Homo sapiens
  misc_RNA (1)...(19): siRNA sense strand
cgagaagaaugccagagaa

SEQ ID NO: 565933 - RNA, 19 nt, Homo sapiens
  misc_RNA (1)...(19): siRNA sense strand
gcgaggacguucacucuca

SEQ ID NO: 565934 - RNA, 19 nt, Homo sapiens
  misc_RNA (1)...(19): siRNA sense strand
ugagaacacuggaucuaau

SEQ ID NO: 565935 - RNA, 19 nt, Homo sapiens
  misc_RNA (1)...(19): siRNA sense strand
ggagagagcguguccuaca

SEQ ID NO: 565936 - RNA, 19 nt, Homo sapiens
  misc_RNA (1)...(19): siRNA sense strand
gagaagaaugccagagaaa

SEQ ID NO: 565937 - RNA, 19 nt, Homo sapiens
  misc_RNA (1)...(19): siRNA sense strand
gacguucacucucaaguca

SEQ ID NO: 565938 - RNA, 19 nt, Homo sapiens
  misc_RNA (1)...(19): siRNA sense strand
gaacacuggaucuaaugaa

SEQ ID NO: 565939 - RNA, 19 nt, Homo sapiens
  misc_RNA (1)...(19): siRNA sense strand
ggacugccaacuugucuga

SEQ ID NO: 565940 - RNA, 19 nt, Homo sapiens
  misc_RNA (1)...(19): siRNA sense strand
cuaaugaacggaacaucua

SEQ ID NO: 565941 - RNA, 19 nt, Homo sapiens
  misc_RNA (1)...(19): siRNA sense strand
ggacagaaacggccucaac

SEQ ID NO: 565942 - RNA, 19 nt, Homo sapiens
  misc_RNA (1)...(19): siRNA sense strand
ccaacaaccacacggagua

SEQ ID NO: 565943 - RNA, 19 nt, Homo sapiens
  misc_RNA (1)...(19): siRNA sense strand
gcagagaaccaggugaaug

SEQ ID NO: 565944 - RNA, 19 nt, Homo sapiens
  misc_RNA (1)...(19): siRNA sense strand
gaaauaacacaggacacaa

SEQ ID NO: 565945 - RNA, 19 nt, Homo sapiens
  misc_RNA (1)...(19): siRNA sense strand
gagaaacaacauggacuuu

SEQ ID NO: 565946 - RNA, 19 nt, Homo sapiens
  misc_RNA (1)...(19): siRNA sense strand
cagagaaccaggugaaugu

SEQ ID NO: 565947 - RNA, 19 nt, Homo sapiens
  misc_RNA (1)...(19): siRNA sense strand
gagaacacuggaucuaaug

SEQ ID NO: 565948 - RNA, 19 nt, Homo sapiens
  misc_RNA (1)...(19): siRNA sense strand
gguugcagcuggagagaca

SEQ ID NO: 565949 - RNA, 19 nt, Homo sapiens
  misc_RNA (1)...(19): siRNA sense strand
gggcagagaaccaggugaa

SEQ ID NO: 565950 - RNA, 19 nt, Homo sapiens
  misc_RNA (1)...(19): siRNA sense strand
aaauaacacaggacacaaa

SEQ ID NO: 565951 - RNA, 19 nt, Homo sapiens
  misc_RNA (1)...(19): siRNA sense strand
aagaaugccagagaaauaa

SEQ ID NO: 565952 - RNA, 19 nt, Homo sapiens
  misc_RNA (1)...(19): siRNA sense strand
gagagagcguguccuacag

SEQ ID NO: 565953 - RNA, 19 nt, Homo sapiens
  misc_RNA (1)...(19): siRNA sense strand
gcacugcgaccucucugau

SEQ ID NO: 565954 - RNA, 19 nt, Homo sapiens
  misc_RNA (1)...(19): siRNA sense strand
gcagccagcggucagcaaa

SEQ ID NO: 565955 - RNA, 19 nt, Homo sapiens
  misc_RNA (1)...(19): siRNA sense strand
ucacaaagagaaacaacau

SEQ ID NO: 565956 - RNA, 19 nt, Homo sapiens
  misc_RNA (1)...(19): siRNA sense strand
gcugguggcccuacugaug

SEQ ID NO: 565957 - RNA, 19 nt, Homo sapiens
  misc_RNA (1)...(19): siRNA sense strand
gggcuccacuucuucuaca

SEQ ID NO: 565958 - RNA, 19 nt, Homo sapiens
  misc_RNA (1)...(19): siRNA sense strand
caaagagaaacaacaugga

SEQ ID NO: 565959 - RNA, 19 nt, Homo sapiens
  misc_RNA (1)...(19): siRNA sense strand
ugcaugagcccgagaagaa

SEQ ID NO: 565960 - RNA, 19 nt, Homo sapiens
  misc_RNA (1)...(19): siRNA sense strand
ugacaaguccguguugguu

SEQ ID NO: 565961 - RNA, 19 nt, Homo sapiens
  misc_RNA (1)...(19): siRNA sense strand
ucacauaugcagaccugaa

SEQ ID NO: 565962 - RNA, 19 nt, Homo sapiens
  misc_RNA (1)...(19): siRNA sense strand
gcugagaacacuggaucua

SEQ ID NO: 565963 - RNA, 19 nt, Homo sapiens
  misc_RNA (1)...(19): siRNA sense strand
cuacuacugugugaaguuc

SEQ ID NO: 565964 - RNA, 19 nt, Homo sapiens
  misc_RNA (1)...(19): siRNA sense strand
gagccguccuucucagagu

SEQ ID NO: 565965 - RNA, 19 nt, Homo sapiens
  misc_RNA (1)...(19): siRNA sense strand
ucucagacuuccagaccaa

SEQ ID NO: 565966 - RNA, 19 nt, Homo sapiens
  misc_RNA (1)...(19): siRNA sense strand
ugaccugguuggagaaugg

SEQ ID NO: 565967 - RNA, 19 nt, Homo sapiens
  misc_RNA (1)...(19): siRNA sense strand
cgaggacguucacucucaa

SEQ ID NO: 565968 - RNA, 19 nt, Homo sapiens
  misc_RNA (1)...(19): siRNA sense strand
caacaaccacacggaguau

SEQ ID NO: 565969 - RNA, 19 nt, Homo sapiens
  misc_RNA (1)...(19): siRNA sense strand
aggaggagcugcaggugau

SEQ ID NO: 565970 - RNA, 19 nt, Homo sapiens
  misc_RNA (1)...(19): siRNA sense strand
caaaagccaugaccugaag

SEQ ID NO: 565971 - RNA, 19 nt, Homo sapiens
  misc_RNA (1)...(19): siRNA sense strand
ggccacaccucagcacaca

SEQ ID NO: 565972 - RNA, 19 nt, Homo sapiens
  misc_RNA (1)...(19): siRNA sense strand
ccacuucuucuacaagguu

SEQ ID NO: 565973 - RNA, 19 nt, Homo sapiens
  misc_RNA (1)...(19): siRNA sense strand
gcuggcuccuggugaaugu

SEQ ID NO: 565974 - RNA, 19 nt, Homo sapiens
  misc_RNA (1)...(19): siRNA sense strand
gagaaccaggugaauguca

SEQ ID NO: 565975 - RNA, 19 nt, Homo sapiens
  misc_RNA (1)...(19): siRNA sense strand
ccuuggagguuacucaaca

SEQ ID NO: 565976 - RNA, 19 nt, Homo sapiens
  misc_RNA (1)...(19): siRNA sense strand
ggaaagggagccccgauga

SEQ ID NO: 565977 - RNA, 19 nt, Homo sapiens
  misc_RNA (1)...(19): siRNA sense strand
aacggaacaucuauauugu

SEQ ID NO: 565978 - RNA, 19 nt, Homo sapiens
  misc_RNA (1)...(19): siRNA sense strand
ggacguucacucucaaguc

SEQ ID NO: 565979 - RNA, 19 nt, Homo sapiens
  misc_RNA (1)...(19): siRNA sense strand
acaucacccugaaaugguu

SEQ ID NO: 565980 - RNA, 19 nt, Homo sapiens
  misc_RNA (1)...(19): siRNA sense strand
cgaaucagacagaagaaag

SEQ ID NO: 565981 - RNA, 19 nt, Homo sapiens
  misc_RNA (1)...(19): siRNA sense strand
acaaggaugguaccuacaa

SEQ ID NO: 565982 - RNA, 19 nt, Homo sapiens
  misc_RNA (1)...(19): siRNA sense strand
agaaauaacacaggacaca

SEQ ID NO: 565983 - RNA, 19 nt, Homo sapiens
  misc_RNA (1)...(19): siRNA sense strand
ccgagaagaaugccagaga

SEQ ID NO: 565984 - RNA, 19 nt, Homo sapiens
  misc_RNA (1)...(19): siRNA sense strand
gaaugccagagaaauaaca

SEQ ID NO: 565985 - RNA, 19 nt, Homo sapiens
  misc_RNA (1)...(19): siRNA sense strand
gagacaucacccugaaaug

SEQ ID NO: 565986 - RNA, 19 nt, Homo sapiens
  misc_RNA (1)...(19): siRNA sense strand
cacaggacacaaaugauau

SEQ ID NO: 565987 - RNA, 19 nt, Homo sapiens
  misc_RNA (1)...(19): siRNA sense strand
guccgaaucagacagaaga

SEQ ID NO: 565988 - RNA, 19 nt, Homo sapiens
  misc_RNA (1)...(19): siRNA sense strand
gcaaaagccaugaccugaa

SEQ ID NO: 565989 - RNA, 19 nt, Homo sapiens
  misc_RNA (1)...(19): siRNA sense strand
caaggaugguaccuacaac

SEQ ID NO: 565990 - RNA, 19 nt, Homo sapiens
  misc_RNA (1)...(19): siRNA sense strand
gacaucacccugaaauggu

SEQ ID NO: 565991 - RNA, 19 nt, Homo sapiens
  misc_RNA (1)...(19): siRNA sense strand
agacaucacccugaaaugg

SEQ ID NO: 565992 - RNA, 19 nt, Homo sapiens
  misc_RNA (1)...(19): siRNA sense strand
cagcagaugccggcaccua

SEQ ID NO: 565993 - RNA, 19 nt, Homo sapiens
  misc_RNA (1)...(19): siRNA sense strand
agagacaucacccugaaau

SEQ ID NO: 565994 - RNA, 19 nt, Homo sapiens
  misc_RNA (1)...(19): siRNA sense strand
ucgugggacugccaacuug

SEQ ID NO: 565995 - RNA, 19 nt, Homo sapiens
  misc_RNA (1)...(19): siRNA sense strand
agagaaacaacauggacuu

SEQ ID NO: 565996 - RNA, 19 nt, Homo sapiens
  misc_RNA (1)...(19): siRNA sense strand
gcaugagcccgagaagaau

SEQ ID NO: 565997 - RNA, 19 nt, Homo sapiens
  misc_RNA (1)...(19): siRNA sense strand
ugaacggaacaucuauauu

SEQ ID NO: 565998 - RNA, 19 nt, Homo sapiens
  misc_RNA (1)...(19): siRNA sense strand
uaaugaacggaacaucuau

SEQ ID NO: 565999 - RNA, 19 nt, Homo sapiens
  misc_RNA (1)...(19): siRNA sense strand
ugugugaaguuccggaaag

SEQ ID NO: 566000 - RNA, 19 nt, Homo sapiens
  misc_RNA (1)...(19): siRNA sense strand
aaugaacggaacaucuaua

SEQ ID NO: 566001 - RNA, 19 nt, Homo sapiens
  misc_RNA (1)...(19): siRNA sense strand
cagaugccggcaccuacua

SEQ ID NO: 566002 - RNA, 19 nt, Homo sapiens
  misc_RNA (1)...(19): siRNA sense strand
agaagaaugccagagaaau

SEQ ID NO: 566003 - RNA, 19 nt, Homo sapiens
  misc_RNA (1)...(19): siRNA sense strand
ucugagaccauccgaguuc

SEQ ID NO: 566004 - RNA, 19 nt, Homo sapiens
  misc_RNA (1)...(19): siRNA sense strand
ccacaccucagcacacagu

SEQ ID NO: 566005 - RNA, 19 nt, Homo sapiens
  misc_RNA (1)...(19): siRNA sense strand
cugagaacacuggaucuaa

SEQ ID NO: 566006 - RNA, 19 nt, Homo sapiens
  misc_RNA (1)...(19): siRNA sense strand
gaaucagacagaagaaagc

SEQ ID NO: 566007 - RNA, 19 nt, Homo sapiens
  misc_RNA (1)...(19): siRNA sense strand
gcagaugccggcaccuacu

SEQ ID NO: 566008 - RNA, 19 nt, Homo sapiens
  misc_RNA (1)...(19): siRNA sense strand
ugaaugcuauccuugcaaa

SEQ ID NO: 566009 - RNA, 19 nt, Homo sapiens
  misc_RNA (1)...(19): siRNA sense strand
cgccaaagauggagggaau

SEQ ID NO: 566010 - RNA, 19 nt, Homo sapiens
  misc_RNA (1)...(19): siRNA sense strand
ugagucgccuggagaacuu

SEQ ID NO: 566011 - RNA, 19 nt, Homo sapiens
  misc_RNA (1)...(19): siRNA sense strand
ggauccugcugaaugcuau

SEQ ID NO: 566012 - RNA, 19 nt, Homo sapiens
  misc_RNA (1)...(19): siRNA sense strand
gcugaaugcuauccuugca

SEQ ID NO: 566013 - RNA, 19 nt, Homo sapiens
  misc_RNA (1)...(19): siRNA sense strand
ucaagauggucauguacuc

SEQ ID NO: 566014 - RNA, 19 nt, Homo sapiens
  misc_RNA (1)...(19): siRNA sense strand
aaagauggagggaauguca

SEQ ID NO: 566015 - RNA, 19 nt, Homo sapiens
  misc_RNA (1)...(19): siRNA sense strand
gcgcagggcauggaagguu

SEQ ID NO: 566016 - RNA, 19 nt, Homo sapiens
  misc_RNA (1)...(19): siRNA sense strand
cccucaagauggucaugua

SEQ ID NO: 566017 - RNA, 19 nt, Homo sapiens
  misc_RNA (1)...(19): siRNA sense strand
ccaaagauggagggaaugu

SEQ ID NO: 566018 - RNA, 19 nt, Homo sapiens
  misc_RNA (1)...(19): siRNA sense strand
ccauggacccacacaagga

SEQ ID NO: 566019 - RNA, 19 nt, Homo sapiens
  misc_RNA (1)...(19): siRNA sense strand
gggauccugcugaaugcua

SEQ ID NO: 566020 - RNA, 19 nt, Homo sapiens
  misc_RNA (1)...(19): siRNA sense strand
caagauggucauguacuca

SEQ ID NO: 566021 - RNA, 19 nt, Homo sapiens
  misc_RNA (1)...(19): siRNA sense strand
gaaucccgccaaagaugga

SEQ ID NO: 566022 - RNA, 19 nt, Homo sapiens
  misc_RNA (1)...(19): siRNA sense strand
ccauggacccacacaagga

SEQ ID NO: 566023 - RNA, 19 nt, Homo sapiens
  misc_RNA (1)...(19): siRNA sense strand
ccauggacccacacaagga

SEQ ID NO: 566024 - RNA, 19 nt, Homo sapiens
  misc_RNA (1)...(19): siRNA sense strand
ugaaugcuauccuugcaaa

SEQ ID NO: 566025 - RNA, 19 nt, Homo sapiens
  misc_RNA (1)...(19): siRNA sense strand
cgccaaagauggagggaau

SEQ ID NO: 566026 - RNA, 19 nt, Homo sapiens
  misc_RNA (1)...(19): siRNA sense strand
ugagucgccuggagaacuu

SEQ ID NO: 566027 - RNA, 19 nt, Homo sapiens
  misc_RNA (1)...(19): siRNA sense strand
ggauccugcugaaugcuau

SEQ ID NO: 566028 - RNA, 19 nt, Homo sapiens
  misc_RNA (1)...(19): siRNA sense strand
gcugaaugcuauccuugca

SEQ ID NO: 566029 - RNA, 19 nt, Homo sapiens
  misc_RNA (1)...(19): siRNA sense strand
ucaagauggucauguacuc

SEQ ID NO: 566030 - RNA, 19 nt, Homo sapiens
  misc_RNA (1)...(19): siRNA sense strand
aaagauggagggaauguca

SEQ ID NO: 566031 - RNA, 19 nt, Homo sapiens
  misc_RNA (1)...(19): siRNA sense strand
gcgcagggcauggaagguu

SEQ ID NO: 566032 - RNA, 19 nt, Homo sapiens
  misc_RNA (1)...(19): siRNA sense strand
cccucaagauggucaugua

SEQ ID NO: 566033 - RNA, 19 nt, Homo sapiens
  misc_RNA (1)...(19): siRNA sense strand
ccaaagauggagggaaugu

SEQ ID NO: 566034 - RNA, 19 nt, Homo sapiens
  misc_RNA (1)...(19): siRNA sense strand
ccauggacccacacaagga

SEQ ID NO: 566035 - RNA, 19 nt, Homo sapiens
  misc_RNA (1)...(19): siRNA sense strand
gggauccugcugaaugcua

SEQ ID NO: 566036 - RNA, 19 nt, Homo sapiens
  misc_RNA (1)...(19): siRNA sense strand
caagauggucauguacuca

SEQ ID NO: 566037 - RNA, 19 nt, Homo sapiens
  misc_RNA (1)...(19): siRNA sense strand
gaaucccgccaaagaugga

SEQ ID NO: 566038 - RNA, 19 nt, Homo sapiens
  misc_RNA (1)...(19): siRNA sense strand
ugaaugcuauccuugcaaa

SEQ ID NO: 566039 - RNA, 19 nt, Homo sapiens
  misc_RNA (1)...(19): siRNA sense strand
cgccaaagauggagggaau

SEQ ID NO: 566040 - RNA, 19 nt, Homo sapiens
  misc_RNA (1)...(19): siRNA sense strand
ugagucgccuggagaacuu

SEQ ID NO: 566041 - RNA, 19 nt, Homo sapiens
  misc_RNA (1)...(19): siRNA sense strand
ggauccugcugaaugcuau

SEQ ID NO: 566042 - RNA, 19 nt, Homo sapiens
  misc_RNA (1)...(19): siRNA sense strand
gcugaaugcuauccuugca

SEQ ID NO: 566043 - RNA, 19 nt, Homo sapiens
  misc_RNA (1)...(19): siRNA sense strand
ucaagauggucauguacuc

SEQ ID NO: 566044 - RNA, 19 nt, Homo sapiens
  misc_RNA (1)...(19): siRNA sense strand
aaagauggagggaauguca

SEQ ID NO: 566045 - RNA, 19 nt, Homo sapiens
  misc_RNA (1)...(19): siRNA sense strand
gcgcagggcauggaagguu

SEQ ID NO: 566046 - RNA, 19 nt, Homo sapiens
  misc_RNA (1)...(19): siRNA sense strand
cccucaagauggucaugua

SEQ ID NO: 566047 - RNA, 19 nt, Homo sapiens
  misc_RNA (1)...(19): siRNA sense strand
ccaaagauggagggaaugu

SEQ ID NO: 566048 - RNA, 19 nt, Homo sapiens
  misc_RNA (1)...(19): siRNA sense strand
ccauggacccacacaagga

SEQ ID NO: 566049 - RNA, 19 nt, Homo sapiens
  misc_RNA (1)...(19): siRNA sense strand
gggauccugcugaaugcua

SEQ ID NO: 566050 - RNA, 19 nt, Homo sapiens
  misc_RNA (1)...(19): siRNA sense strand
caagauggucauguacuca

SEQ ID NO: 566051 - RNA, 19 nt, Homo sapiens
  misc_RNA (1)...(19): siRNA sense strand
gaaucccgccaaagaugga

SEQ ID NO: 566052 - RNA, 19 nt, Homo sapiens
  misc_RNA (1)...(19): siRNA sense strand
ccauggacccacacaagga

SEQ ID NO: 566053 - RNA, 19 nt, Homo sapiens
  misc_RNA (1)...(19): siRNA sense strand
ccauggacccacacaagga

SEQ ID NO: 566054 - RNA, 19 nt, Homo sapiens
  misc_RNA (1)...(19): siRNA sense strand
ugaaugcuauccuugcaaa

SEQ ID NO: 566055 - RNA, 19 nt, Homo sapiens
  misc_RNA (1)...(19): siRNA sense strand
cgccaaagauggagggaau

SEQ ID NO: 566056 - RNA, 19 nt, Homo sapiens
  misc_RNA (1)...(19): siRNA sense strand
ugagucgccuggagaacuu

SEQ ID NO: 566057 - RNA, 19 nt, Homo sapiens
  misc_RNA (1)...(19): siRNA sense strand
ggauccugcugaaugcuau

SEQ ID NO: 566058 - RNA, 19 nt, Homo sapiens
  misc_RNA (1)...(19): siRNA sense strand
gcugaaugcuauccuugca

SEQ ID NO: 566059 - RNA, 19 nt, Homo sapiens
  misc_RNA (1)...(19): siRNA sense strand
ucaagauggucauguacuc

SEQ ID NO: 566060 - RNA, 19 nt, Homo sapiens
  misc_RNA (1)...(19): siRNA sense strand
aaagauggagggaauguca

SEQ ID NO: 566061 - RNA, 19 nt, Homo sapiens
  misc_RNA (1)...(19): siRNA sense strand
gcgcagggcauggaagguu

SEQ ID NO: 566062 - RNA, 19 nt, Homo sapiens
  misc_RNA (1)...(19): siRNA sense strand
cccucaagauggucaugua

SEQ ID NO: 566063 - RNA, 19 nt, Homo sapiens
  misc_RNA (1)...(19): siRNA sense strand
ccaaagauggagggaaugu

SEQ ID NO: 566064 - RNA, 19 nt, Homo sapiens
  misc_RNA (1)...(19): siRNA sense strand
ccauggacccacacaagga

SEQ ID NO: 566065 - RNA, 19 nt, Homo sapiens
  misc_RNA (1)...(19): siRNA sense strand
gggauccugcugaaugcua

SEQ ID NO: 566066 - RNA, 19 nt, Homo sapiens
  misc_RNA (1)...(19): siRNA sense strand
caagauggucauguacuca

SEQ ID NO: 566067 - RNA, 19 nt, Homo sapiens
  misc_RNA (1)...(19): siRNA sense strand
gaaucccgccaaagaugga

SEQ ID NO: 566068 - RNA, 19 nt, Homo sapiens
  misc_RNA (1)...(19): siRNA sense strand
ugaaugcuauccuugcaaa

SEQ ID NO: 566069 - RNA, 19 nt, Homo sapiens
  misc_RNA (1)...(19): siRNA sense strand
cgccaaagauggagggaau

SEQ ID NO: 566070 - RNA, 19 nt, Homo sapiens
  misc_RNA (1)...(19): siRNA sense strand
ugagucgccuggagaacuu

SEQ ID NO: 566071 - RNA, 19 nt, Homo sapiens
  misc_RNA (1)...(19): siRNA sense strand
ggauccugcugaaugcuau

SEQ ID NO: 566072 - RNA, 19 nt, Homo sapiens
  misc_RNA (1)...(19): siRNA sense strand
gcugaaugcuauccuugca

SEQ ID NO: 566073 - RNA, 19 nt, Homo sapiens
  misc_RNA (1)...(19): siRNA sense strand
ucaagauggucauguacuc

SEQ ID NO: 566074 - RNA, 19 nt, Homo sapiens
  misc_RNA (1)...(19): siRNA sense strand
aaagauggagggaauguca

SEQ ID NO: 566075 - RNA, 19 nt, Homo sapiens
  misc_RNA (1)...(19): siRNA sense strand
gcgcagggcauggaagguu

SEQ ID NO: 566076 - RNA, 19 nt, Homo sapiens
  misc_RNA (1)...(19): siRNA sense strand
cccucaagauggucaugua

SEQ ID NO: 566077 - RNA, 19 nt, Homo sapiens
  misc_RNA (1)...(19): siRNA sense strand
ccaaagauggagggaaugu

SEQ ID NO: 566078 - RNA, 19 nt, Homo sapiens
  misc_RNA (1)...(19): siRNA sense strand
ccauggacccacacaagga

SEQ ID NO: 566079 - RNA, 19 nt, Homo sapiens
  misc_RNA (1)...(19): siRNA sense strand
gggauccugcugaaugcua

SEQ ID NO: 566080 - RNA, 19 nt, Homo sapiens
  misc_RNA (1)...(19): siRNA sense strand
caagauggucauguacuca

SEQ ID NO: 566081 - RNA, 19 nt, Homo sapiens
  misc_RNA (1)...(19): siRNA sense strand
gaaucccgccaaagaugga

SEQ ID NO: 566082 - RNA, 19 nt, Homo sapiens
  misc_RNA (1)...(19): siRNA sense strand
ccauggacccacacaagga

SEQ ID NO: 566083 - RNA, 19 nt, Homo sapiens
  misc_RNA (1)...(19): siRNA sense strand
ccauggacccacacaagga

SEQ ID NO: 566084 - RNA, 19 nt, Homo sapiens
  misc_RNA (1)...(19): siRNA sense strand
ugaaugcuauccuugcaaa

SEQ ID NO: 566085 - RNA, 19 nt, Homo sapiens
  misc_RNA (1)...(19): siRNA sense strand
cgccaaagauggagggaau

SEQ ID NO: 566086 - RNA, 19 nt, Homo sapiens
  misc_RNA (1)...(19): siRNA sense strand
ugagucgccuggagaacuu

SEQ ID NO: 566087 - RNA, 19 nt, Homo sapiens
  misc_RNA (1)...(19): siRNA sense strand
ggauccugcugaaugcuau

SEQ ID NO: 566088 - RNA, 19 nt, Homo sapiens
  misc_RNA (1)...(19): siRNA sense strand
gcugaaugcuauccuugca

SEQ ID NO: 566089 - RNA, 19 nt, Homo sapiens
  misc_RNA (1)...(19): siRNA sense strand
ucaagauggucauguacuc

SEQ ID NO: 566090 - RNA, 19 nt, Homo sapiens
  misc_RNA (1)...(19): siRNA sense strand
aaagauggagggaauguca

SEQ ID NO: 566091 - RNA, 19 nt, Homo sapiens
  misc_RNA (1)...(19): siRNA sense strand
gcgcagggcauggaagguu

SEQ ID NO: 566092 - RNA, 19 nt, Homo sapiens
  misc_RNA (1)...(19): siRNA sense strand
cccucaagauggucaugua

SEQ ID NO: 566093 - RNA, 19 nt, Homo sapiens
  misc_RNA (1)...(19): siRNA sense strand
ccaaagauggagggaaugu

SEQ ID NO: 566094 - RNA, 19 nt, Homo sapiens
  misc_RNA (1)...(19): siRNA sense strand
ccauggacccacacaagga

SEQ ID NO: 566095 - RNA, 19 nt, Homo sapiens
  misc_RNA (1)...(19): siRNA sense strand
gggauccugcugaaugcua

SEQ ID NO: 566096 - RNA, 19 nt, Homo sapiens
  misc_RNA (1)...(19): siRNA sense strand
caagauggucauguacuca

SEQ ID NO: 566097 - RNA, 19 nt, Homo sapiens
  misc_RNA (1)...(19): siRNA sense strand
gaaucccgccaaagaugga

SEQ ID NO: 566098 - RNA, 19 nt, Homo sapiens
  misc_RNA (1)...(19): siRNA sense strand
aaggagagaugguggauua

SEQ ID NO: 566099 - RNA, 19 nt, Homo sapiens
  misc_RNA (1)...(19): siRNA sense strand
cagcugggcuuccugguuu

SEQ ID NO: 566100 - RNA, 19 nt, Homo sapiens
  misc_RNA (1)...(19): siRNA sense strand
ccaaagacaucuccaggau

SEQ ID NO: 566101 - RNA, 19 nt, Homo sapiens
  misc_RNA (1)...(19): siRNA sense strand
gagagaugguggauuacaa

SEQ ID NO: 566102 - RNA, 19 nt, Homo sapiens
  misc_RNA (1)...(19): siRNA sense strand
aaagggaccucgcgguaaa

SEQ ID NO: 566103 - RNA, 19 nt, Homo sapiens
  misc_RNA (1)...(19): siRNA sense strand
gaugguggauuacaaugga

SEQ ID NO: 566104 - RNA, 19 nt, Homo sapiens
  misc_RNA (1)...(19): siRNA sense strand
ggauuacaauggaaacauc

SEQ ID NO: 566105 - RNA, 19 nt, Homo sapiens
  misc_RNA (1)...(19): siRNA sense strand
caagggagaaccagggaaa

SEQ ID NO: 566106 - RNA, 19 nt, Homo sapiens
  misc_RNA (1)...(19): siRNA sense strand
ggaagcaggacuagaugga

SEQ ID NO: 566107 - RNA, 19 nt, Homo sapiens
  misc_RNA (1)...(19): siRNA sense strand
caaggcugcuggaacaagu

SEQ ID NO: 566108 - RNA, 19 nt, Homo sapiens
  misc_RNA (1)...(19): siRNA sense strand
gggagaagcaggugucgau

SEQ ID NO: 566109 - RNA, 19 nt, Homo sapiens
  misc_RNA (1)...(19): siRNA sense strand
ggagaacagggaccagaug

SEQ ID NO: 566110 - RNA, 19 nt, Homo sapiens
  misc_RNA (1)...(19): siRNA sense strand
acaauggaaacaucaauga

SEQ ID NO: 566111 - RNA, 19 nt, Homo sapiens
  misc_RNA (1)...(19): siRNA sense strand
gaaaggagagaugguggau

SEQ ID NO: 566112 - RNA, 19 nt, Homo sapiens
  misc_RNA (1)...(19): siRNA sense strand
cuagagguuucccuggauu

SEQ ID NO: 566113 - RNA, 19 nt, Homo sapiens
  misc_RNA (1)...(19): siRNA sense strand
gcaaauggagacggcuauu

SEQ ID NO: 566114 - RNA, 19 nt, Homo sapiens
  misc_RNA (1)...(19): siRNA sense strand
gaaaggcuuccagggagaa

SEQ ID NO: 566115 - RNA, 19 nt, Homo sapiens
  misc_RNA (1)...(19): siRNA sense strand
gcagcugggcuuccugguu

SEQ ID NO: 566116 - RNA, 19 nt, Homo sapiens
  misc_RNA (1)...(19): siRNA sense strand
ggagagaugguggauuaca

SEQ ID NO: 566117 - RNA, 19 nt, Homo sapiens
  misc_RNA (1)...(19): siRNA sense strand
gaugcuggcaacuccauug

SEQ ID NO: 566118 - RNA, 19 nt, Homo sapiens
  misc_RNA (1)...(19): siRNA sense strand
gcguggagcagcuggagaa

SEQ ID NO: 566119 - RNA, 19 nt, Homo sapiens
  misc_RNA (1)...(19): siRNA sense strand
uggagcagcuggagaacag

SEQ ID NO: 566120 - RNA, 19 nt, Homo sapiens
  misc_RNA (1)...(19): siRNA sense strand
ggauuuccgggucccauug

SEQ ID NO: 566121 - RNA, 19 nt, Homo sapiens
  misc_RNA (1)...(19): siRNA sense strand
gagaugguggauuacaaug

SEQ ID NO: 566122 - RNA, 19 nt, Homo sapiens
  misc_RNA (1)...(19): siRNA sense strand
uagcggagcgcacccacaa

SEQ ID NO: 566123 - RNA, 19 nt, Homo sapiens
  misc_RNA (1)...(19): siRNA sense strand
gggagaaccagggaaagga

SEQ ID NO: 566124 - RNA, 19 nt, Homo sapiens
  misc_RNA (1)...(19): siRNA sense strand
gagccaggccagcauccaa

SEQ ID NO: 566125 - RNA, 19 nt, Homo sapiens
  misc_RNA (1)...(19): siRNA sense strand
gguacuccaggaccaauug

SEQ ID NO: 566126 - RNA, 19 nt, Homo sapiens
  misc_RNA (1)...(19): siRNA sense strand
aaaggagacccugggauga

SEQ ID NO: 566127 - RNA, 19 nt, Homo sapiens
  misc_RNA (1)...(19): siRNA sense strand
gagccagggaucccaggaa

SEQ ID NO: 566128 - RNA, 19 nt, Homo sapiens
  misc_RNA (1)...(19): siRNA sense strand
gaaccagggaaaggagaga

SEQ ID NO: 566129 - RNA, 19 nt, Homo sapiens
  misc_RNA (1)...(19): siRNA sense strand
gauuacaauggaaacauca

SEQ ID NO: 566130 - RNA, 19 nt, Homo sapiens
  misc_RNA (1)...(19): siRNA sense strand
ggucaaccaggaacuagag

SEQ ID NO: 566131 - RNA, 19 nt, Homo sapiens
  misc_RNA (1)...(19): siRNA sense strand
aaggagagaugguggauua

SEQ ID NO: 566132 - RNA, 19 nt, Homo sapiens
  misc_RNA (1)...(19): siRNA sense strand
cagcugggcuuccugguuu

SEQ ID NO: 566133 - RNA, 19 nt, Homo sapiens
  misc_RNA (1)...(19): siRNA sense strand
ccaaagacaucuccaggau

SEQ ID NO: 566134 - RNA, 19 nt, Homo sapiens
  misc_RNA (1)...(19): siRNA sense strand
gagagaugguggauuacaa

SEQ ID NO: 566135 - RNA, 19 nt, Homo sapiens
  misc_RNA (1)...(19): siRNA sense strand
aaagggaccucgcgguaaa

SEQ ID NO: 566136 - RNA, 19 nt, Homo sapiens
  misc_RNA (1)...(19): siRNA sense strand
gaugguggauuacaaugga

SEQ ID NO: 566137 - RNA, 19 nt, Homo sapiens
  misc_RNA (1)...(19): siRNA sense strand
ggauuacaauggaaacauc

SEQ ID NO: 566138 - RNA, 19 nt, Homo sapiens
  misc_RNA (1)...(19): siRNA sense strand
caagggagaaccagggaaa

SEQ ID NO: 566139 - RNA, 19 nt, Homo sapiens
  misc_RNA (1)...(19): siRNA sense strand
ggaagcaggacuagaugga

SEQ ID NO: 566140 - RNA, 19 nt, Homo sapiens
  misc_RNA (1)...(19): siRNA sense strand
caaggcugcuggaacaagu

SEQ ID NO: 566141 - RNA, 19 nt, Homo sapiens
  misc_RNA (1)...(19): siRNA sense strand
gggagaagcaggugucgau

SEQ ID NO: 566142 - RNA, 19 nt, Homo sapiens
  misc_RNA (1)...(19): siRNA sense strand
ggagaacagggaccagaug

SEQ ID NO: 566143 - RNA, 19 nt, Homo sapiens
  misc_RNA (1)...(19): siRNA sense strand
acaauggaaacaucaauga

SEQ ID NO: 566144 - RNA, 19 nt, Homo sapiens
  misc_RNA (1)...(19): siRNA sense strand
gaaaggagagaugguggau

SEQ ID NO: 566145 - RNA, 19 nt, Homo sapiens
  misc_RNA (1)...(19): siRNA sense strand
cuagagguuucccuggauu

SEQ ID NO: 566146 - RNA, 19 nt, Homo sapiens
  misc_RNA (1)...(19): siRNA sense strand
gcaaauggagacggcuauu

SEQ ID NO: 566147 - RNA, 19 nt, Homo sapiens
  misc_RNA (1)...(19): siRNA sense strand
gaaaggcuuccagggagaa

SEQ ID NO: 566148 - RNA, 19 nt, Homo sapiens
  misc_RNA (1)...(19): siRNA sense strand
gcagcugggcuuccugguu

SEQ ID NO: 566149 - RNA, 19 nt, Homo sapiens
  misc_RNA (1)...(19): siRNA sense strand
ggagagaugguggauuaca

SEQ ID NO: 566150 - RNA, 19 nt, Homo sapiens
  misc_RNA (1)...(19): siRNA sense strand
gaugcuggcaacuccauug

SEQ ID NO: 566151 - RNA, 19 nt, Homo sapiens
  misc_RNA (1)...(19): siRNA sense strand
gcguggagcagcuggagaa

SEQ ID NO: 566152 - RNA, 19 nt, Homo sapiens
  misc_RNA (1)...(19): siRNA sense strand
uggagcagcuggagaacag

SEQ ID NO: 566153 - RNA, 19 nt, Homo sapiens
  misc_RNA (1)...(19): siRNA sense strand
ggauuuccgggucccauug

SEQ ID NO: 566154 - RNA, 19 nt, Homo sapiens
  misc_RNA (1)...(19): siRNA sense strand
gagaugguggauuacaaug

SEQ ID NO: 566155 - RNA, 19 nt, Homo sapiens
  misc_RNA (1)...(19): siRNA sense strand
uagcggagcgcacccacaa

SEQ ID NO: 566156 - RNA, 19 nt, Homo sapiens
  misc_RNA (1)...(19): siRNA sense strand
gggagaaccagggaaagga

SEQ ID NO: 566157 - RNA, 19 nt, Homo sapiens
  misc_RNA (1)...(19): siRNA sense strand
gagccaggccagcauccaa

SEQ ID NO: 566158 - RNA, 19 nt, Homo sapiens
  misc_RNA (1)...(19): siRNA sense strand
gguacuccaggaccaauug

SEQ ID NO: 566159 - RNA, 19 nt, Homo sapiens
  misc_RNA (1)...(19): siRNA sense strand
aaaggagacccugggauga

SEQ ID NO: 566160 - RNA, 19 nt, Homo sapiens
  misc_RNA (1)...(19): siRNA sense strand
gagccagggaucccaggaa

SEQ ID NO: 566161 - RNA, 19 nt, Homo sapiens
  misc_RNA (1)...(19): siRNA sense strand
gaaccagggaaaggagaga

SEQ ID NO: 566162 - RNA, 19 nt, Homo sapiens
  misc_RNA (1)...(19): siRNA sense strand
gauuacaauggaaacauca

SEQ ID NO: 566163 - RNA, 19 nt, Homo sapiens
  misc_RNA (1)...(19): siRNA sense strand
ggucaaccaggaacuagag

SEQ ID NO: 566164 - RNA, 19 nt, Homo sapiens
  misc_RNA (1)...(19): siRNA sense strand
aaggagagaugguggauua

SEQ ID NO: 566165 - RNA, 19 nt, Homo sapiens
  misc_RNA (1)...(19): siRNA sense strand
cagcugggcuuccugguuu

SEQ ID NO: 566166 - RNA, 19 nt, Homo sapiens
  misc_RNA (1)...(19): siRNA sense strand
ccaaagacaucuccaggau

SEQ ID NO: 566167 - RNA, 19 nt, Homo sapiens
  misc_RNA (1)...(19): siRNA sense strand
gagagaugguggauuacaa

SEQ ID NO: 566168 - RNA, 19 nt, Homo sapiens
  misc_RNA (1)...(19): siRNA sense strand
aaagggaccucgcgguaaa

SEQ ID NO: 566169 - RNA, 19 nt, Homo sapiens
  misc_RNA (1)...(19): siRNA sense strand
gaugguggauuacaaugga

SEQ ID NO: 566170 - RNA, 19 nt, Homo sapiens
  misc_RNA (1)...(19): siRNA sense strand
ggauuacaauggaaacauc

SEQ ID NO: 566171 - RNA, 19 nt, Homo sapiens
  misc_RNA (1)...(19): siRNA sense strand
caagggagaaccagggaaa

SEQ ID NO: 566172 - RNA, 19 nt, Homo sapiens
  misc_RNA (1)...(19): siRNA sense strand
ggaagcaggacuagaugga

SEQ ID NO: 566173 - RNA, 19 nt, Homo sapiens
  misc_RNA (1)...(19): siRNA sense strand
caaggcugcuggaacaagu

SEQ ID NO: 566174 - RNA, 19 nt, Homo sapiens
  misc_RNA (1)...(19): siRNA sense strand
gggagaagcaggugucgau

SEQ ID NO: 566175 - RNA, 19 nt, Homo sapiens
  misc_RNA (1)...(19): siRNA sense strand
ggagaacagggaccagaug

SEQ ID NO: 566176 - RNA, 19 nt, Homo sapiens
  misc_RNA (1)...(19): siRNA sense strand
acaauggaaacaucaauga

SEQ ID NO: 566177 - RNA, 19 nt, Homo sapiens
  misc_RNA (1)...(19): siRNA sense strand
gaaaggagagaugguggau

SEQ ID NO: 566178 - RNA, 19 nt, Homo sapiens
  misc_RNA (1)...(19): siRNA sense strand
cuagagguuucccuggauu

SEQ ID NO: 566179 - RNA, 19 nt, Homo sapiens
  misc_RNA (1)...(19): siRNA sense strand
gcaaauggagacggcuauu

SEQ ID NO: 566180 - RNA, 19 nt, Homo sapiens
  misc_RNA (1)...(19): siRNA sense strand
gaaaggcuuccagggagaa

SEQ ID NO: 566181 - RNA, 19 nt, Homo sapiens
  misc_RNA (1)...(19): siRNA sense strand
gcagcugggcuuccugguu

SEQ ID NO: 566182 - RNA, 19 nt, Homo sapiens
  misc_RNA (1)...(19): siRNA sense strand
ggagagaugguggauuaca

SEQ ID NO: 566183 - RNA, 19 nt, Homo sapiens
  misc_RNA (1)...(19): siRNA sense strand
gaugcuggcaacuccauug

SEQ ID NO: 566184 - RNA, 19 nt, Homo sapiens
  misc_RNA (1)...(19): siRNA sense strand
gcguggagcagcuggagaa

SEQ ID NO: 566185 - RNA, 19 nt, Homo sapiens
  misc_RNA (1)...(19): siRNA sense strand
uggagcagcuggagaacag

SEQ ID NO: 566186 - RNA, 19 nt, Homo sapiens
  misc_RNA (1)...(19): siRNA sense strand
ggauuuccgggucccauug

SEQ ID NO: 566187 - RNA, 19 nt, Homo sapiens
  misc_RNA (1)...(19): siRNA sense strand
gagaugguggauuacaaug

SEQ ID NO: 566188 - RNA, 19 nt, Homo sapiens
  misc_RNA (1)...(19): siRNA sense strand
uagcggagcgcacccacaa

SEQ ID NO: 566189 - RNA, 19 nt, Homo sapiens
  misc_RNA (1)...(19): siRNA sense strand
gggagaaccagggaaagga

SEQ ID NO: 566190 - RNA, 19 nt, Homo sapiens
  misc_RNA (1)...(19): siRNA sense strand
gagccaggccagcauccaa

SEQ ID NO: 566191 - RNA, 19 nt, Homo sapiens
  misc_RNA (1)...(19): siRNA sense strand
gguacuccaggaccaauug

SEQ ID NO: 566192 - RNA, 19 nt, Homo sapiens
  misc_RNA (1)...(19): siRNA sense strand
aaaggagacccugggauga

SEQ ID NO: 566193 - RNA, 19 nt, Homo sapiens
  misc_RNA (1)...(19): siRNA sense strand
gagccagggaucccaggaa

SEQ ID NO: 566194 - RNA, 19 nt, Homo sapiens
  misc_RNA (1)...(19): siRNA sense strand
gaaccagggaaaggagaga

SEQ ID NO: 566195 - RNA, 19 nt, Homo sapiens
  misc_RNA (1)...(19): siRNA sense strand
gauuacaauggaaacauca

SEQ ID NO: 566196 - RNA, 19 nt, Homo sapiens
  misc_RNA (1)...(19): siRNA sense strand
ggucaaccaggaacuagag

SEQ ID NO: 566197 - RNA, 19 nt, Homo sapiens
  misc_RNA (1)...(19): siRNA sense strand
aaggagagaugguggauua

SEQ ID NO: 566198 - RNA, 19 nt, Homo sapiens
  misc_RNA (1)...(19): siRNA sense strand
cagcugggcuuccugguuu

SEQ ID NO: 566199 - RNA, 19 nt, Homo sapiens
  misc_RNA (1)...(19): siRNA sense strand
ccaaagacaucuccaggau

SEQ ID NO: 566200 - RNA, 19 nt, Homo sapiens
  misc_RNA (1)...(19): siRNA sense strand
gagagaugguggauuacaa

SEQ ID NO: 566201 - RNA, 19 nt, Homo sapiens
  misc_RNA (1)...(19): siRNA sense strand
aaagggaccucgcgguaaa

SEQ ID NO: 566202 - RNA, 19 nt, Homo sapiens
  misc_RNA (1)...(19): siRNA sense strand
gaugguggauuacaaugga

SEQ ID NO: 566203 - RNA, 19 nt, Homo sapiens
  misc_RNA (1)...(19): siRNA sense strand
ggauuacaauggaaacauc

SEQ ID NO: 566204 - RNA, 19 nt, Homo sapiens
  misc_RNA (1)...(19): siRNA sense strand
caagggagaaccagggaaa

SEQ ID NO: 566205 - RNA, 19 nt, Homo sapiens
  misc_RNA (1)...(19): siRNA sense strand
ggaagcaggacuagaugga

SEQ ID NO: 566206 - RNA, 19 nt, Homo sapiens
  misc_RNA (1)...(19): siRNA sense strand
caaggcugcuggaacaagu

SEQ ID NO: 566207 - RNA, 19 nt, Homo sapiens
  misc_RNA (1)...(19): siRNA sense strand
gggagaagcaggugucgau

SEQ ID NO: 566208 - RNA, 19 nt, Homo sapiens
  misc_RNA (1)...(19): siRNA sense strand
ggagaacagggaccagaug

SEQ ID NO: 566209 - RNA, 19 nt, Homo sapiens
  misc_RNA (1)...(19): siRNA sense strand
acaauggaaacaucaauga

SEQ ID NO: 566210 - RNA, 19 nt, Homo sapiens
  misc_RNA (1)...(19): siRNA sense strand
gaaaggagagaugguggau

SEQ ID NO: 566211 - RNA, 19 nt, Homo sapiens
  misc_RNA (1)...(19): siRNA sense strand
cuagagguuucccuggauu

SEQ ID NO: 566212 - RNA, 19 nt, Homo sapiens
  misc_RNA (1)...(19): siRNA sense strand
gcaaauggagacggcuauu

SEQ ID NO: 566213 - RNA, 19 nt, Homo sapiens
  misc_RNA (1)...(19): siRNA sense strand
gaaaggcuuccagggagaa

SEQ ID NO: 566214 - RNA, 19 nt, Homo sapiens
  misc_RNA (1)...(19): siRNA sense strand
gcagcugggcuuccugguu

SEQ ID NO: 566215 - RNA, 19 nt, Homo sapiens
  misc_RNA (1)...(19): siRNA sense strand
ggagagaugguggauuaca

SEQ ID NO: 566216 - RNA, 19 nt, Homo sapiens
  misc_RNA (1)...(19): siRNA sense strand
gaugcuggcaacuccauug

SEQ ID NO: 566217 - RNA, 19 nt, Homo sapiens
  misc_RNA (1)...(19): siRNA sense strand
gcguggagcagcuggagaa

SEQ ID NO: 566218 - RNA, 19 nt, Homo sapiens
  misc_RNA (1)...(19): siRNA sense strand
uggagcagcuggagaacag

SEQ ID NO: 566219 - RNA, 19 nt, Homo sapiens
  misc_RNA (1)...(19): siRNA sense strand
ggauuuccgggucccauug

SEQ ID NO: 566220 - RNA, 19 nt, Homo sapiens
  misc_RNA (1)...(19): siRNA sense strand
gagaugguggauuacaaug

SEQ ID NO: 566221 - RNA, 19 nt, Homo sapiens
  misc_RNA (1)...(19): siRNA sense strand
uagcggagcgcacccacaa

SEQ ID NO: 566222 - RNA, 19 nt, Homo sapiens
  misc_RNA (1)...(19): siRNA sense strand
gggagaaccagggaaagga

SEQ ID NO: 566223 - RNA, 19 nt, Homo sapiens
  misc_RNA (1)...(19): siRNA sense strand
gagccaggccagcauccaa

SEQ ID NO: 566224 - RNA, 19 nt, Homo sapiens
  misc_RNA (1)...(19): siRNA sense strand
gguacuccaggaccaauug

SEQ ID NO: 566225 - RNA, 19 nt, Homo sapiens
  misc_RNA (1)...(19): siRNA sense strand
aaaggagacccugggauga

SEQ ID NO: 566226 - RNA, 19 nt, Homo sapiens
  misc_RNA (1)...(19): siRNA sense strand
gagccagggaucccaggaa

SEQ ID NO: 566227 - RNA, 19 nt, Homo sapiens
  misc_RNA (1)...(19): siRNA sense strand
gaaccagggaaaggagaga

SEQ ID NO: 566228 - RNA, 19 nt, Homo sapiens
  misc_RNA (1)...(19): siRNA sense strand
gauuacaauggaaacauca

SEQ ID NO: 566229 - RNA, 19 nt, Homo sapiens
  misc_RNA (1)...(19): siRNA sense strand
ggucaaccaggaacuagag

SEQ ID NO: 566230 - RNA, 19 nt, Homo sapiens
  misc_RNA (1)...(19): siRNA sense strand
aaggagagaugguggauua

SEQ ID NO: 566231 - RNA, 19 nt, Homo sapiens
  misc_RNA (1)...(19): siRNA sense strand
cagcugggcuuccugguuu

SEQ ID NO: 566232 - RNA, 19 nt, Homo sapiens
  misc_RNA (1)...(19): siRNA sense strand
ccaaagacaucuccaggau

SEQ ID NO: 566233 - RNA, 19 nt, Homo sapiens
  misc_RNA (1)...(19): siRNA sense strand
gagagaugguggauuacaa

SEQ ID NO: 566234 - RNA, 19 nt, Homo sapiens
  misc_RNA (1)...(19): siRNA sense strand
aaagggaccucgcgguaaa

SEQ ID NO: 566235 - RNA, 19 nt, Homo sapiens
  misc_RNA (1)...(19): siRNA sense strand
gaugguggauuacaaugga

SEQ ID NO: 566236 - RNA, 19 nt, Homo sapiens
  misc_RNA (1)...(19): siRNA sense strand
ggauuacaauggaaacauc

SEQ ID NO: 566237 - RNA, 19 nt, Homo sapiens
  misc_RNA (1)...(19): siRNA sense strand
caagggagaaccagggaaa

SEQ ID NO: 566238 - RNA, 19 nt, Homo sapiens
  misc_RNA (1)...(19): siRNA sense strand
ggaagcaggacuagaugga

SEQ ID NO: 566239 - RNA, 19 nt, Homo sapiens
  misc_RNA (1)...(19): siRNA sense strand
caaggcugcuggaacaagu

SEQ ID NO: 566240 - RNA, 19 nt, Homo sapiens
  misc_RNA (1)...(19): siRNA sense strand
gggagaagcaggugucgau

SEQ ID NO: 566241 - RNA, 19 nt, Homo sapiens
  misc_RNA (1)...(19): siRNA sense strand
ggagaacagggaccagaug

SEQ ID NO: 566242 - RNA, 19 nt, Homo sapiens
  misc_RNA (1)...(19): siRNA sense strand
acaauggaaacaucaauga

SEQ ID NO: 566243 - RNA, 19 nt, Homo sapiens
  misc_RNA (1)...(19): siRNA sense strand
gaaaggagagaugguggau

SEQ ID NO: 566244 - RNA, 19 nt, Homo sapiens
  misc_RNA (1)...(19): siRNA sense strand
cuagagguuucccuggauu

SEQ ID NO: 566245 - RNA, 19 nt, Homo sapiens
  misc_RNA (1)...(19): siRNA sense strand
gcaaauggagacggcuauu

SEQ ID NO: 566246 - RNA, 19 nt, Homo sapiens
  misc_RNA (1)...(19): siRNA sense strand
gaaaggcuuccagggagaa

SEQ ID NO: 566247 - RNA, 19 nt, Homo sapiens
  misc_RNA (1)...(19): siRNA sense strand
gcagcugggcuuccugguu

SEQ ID NO: 566248 - RNA, 19 nt, Homo sapiens
  misc_RNA (1)...(19): siRNA sense strand
ggagagaugguggauuaca

SEQ ID NO: 566249 - RNA, 19 nt, Homo sapiens
  misc_RNA (1)...(19): siRNA sense strand
gaugcuggcaacuccauug

SEQ ID NO: 566250 - RNA, 19 nt, Homo sapiens
  misc_RNA (1)...(19): siRNA sense strand
gcguggagcagcuggagaa

SEQ ID NO: 566251 - RNA, 19 nt, Homo sapiens
  misc_RNA (1)...(19): siRNA sense strand
uggagcagcuggagaacag

SEQ ID NO: 566252 - RNA, 19 nt, Homo sapiens
  misc_RNA (1)...(19): siRNA sense strand
ggauuuccgggucccauug

SEQ ID NO: 566253 - RNA, 19 nt, Homo sapiens
  misc_RNA (1)...(19): siRNA sense strand
gagaugguggauuacaaug

SEQ ID NO: 566254 - RNA, 19 nt, Homo sapiens
  misc_RNA (1)...(19): siRNA sense strand
uagcggagcgcacccacaa

SEQ ID NO: 566255 - RNA, 19 nt, Homo sapiens
  misc_RNA (1)...(19): siRNA sense strand
gggagaaccagggaaagga

SEQ ID NO: 566256 - RNA, 19 nt, Homo sapiens
  misc_RNA (1)...(19): siRNA sense strand
gagccaggccagcauccaa

SEQ ID NO: 566257 - RNA, 19 nt, Homo sapiens
  misc_RNA (1)...(19): siRNA sense strand
gguacuccaggaccaauug

SEQ ID NO: 566258 - RNA, 19 nt, Homo sapiens
  misc_RNA (1)...(19): siRNA sense strand
aaaggagacccugggauga

SEQ ID NO: 566259 - RNA, 19 nt, Homo sapiens
  misc_RNA (1)...(19): siRNA sense strand
gagccagggaucccaggaa

SEQ ID NO: 566260 - RNA, 19 nt, Homo sapiens
  misc_RNA (1)...(19): siRNA sense strand
gaaccagggaaaggagaga

SEQ ID NO: 566261 - RNA, 19 nt, Homo sapiens
  misc_RNA (1)...(19): siRNA sense strand
gauuacaauggaaacauca

SEQ ID NO: 566262 - RNA, 19 nt, Homo sapiens
  misc_RNA (1)...(19): siRNA sense strand
ggucaaccaggaacuagag

SEQ ID NO: 566263 - RNA, 19 nt, Homo sapiens
  misc_RNA (1)...(19): siRNA sense strand
aaggagagaugguggauua

SEQ ID NO: 566264 - RNA, 19 nt, Homo sapiens
  misc_RNA (1)...(19): siRNA sense strand
cagcugggcuuccugguuu

SEQ ID NO: 566265 - RNA, 19 nt, Homo sapiens
  misc_RNA (1)...(19): siRNA sense strand
ccaaagacaucuccaggau

SEQ ID NO: 566266 - RNA, 19 nt, Homo sapiens
  misc_RNA (1)...(19): siRNA sense strand
gagagaugguggauuacaa

SEQ ID NO: 566267 - RNA, 19 nt, Homo sapiens
  misc_RNA (1)...(19): siRNA sense strand
aaagggaccucgcgguaaa

SEQ ID NO: 566268 - RNA, 19 nt, Homo sapiens
  misc_RNA (1)...(19): siRNA sense strand
gaugguggauuacaaugga

SEQ ID NO: 566269 - RNA, 19 nt, Homo sapiens
  misc_RNA (1)...(19): siRNA sense strand
ggauuacaauggaaacauc

SEQ ID NO: 566270 - RNA, 19 nt, Homo sapiens
  misc_RNA (1)...(19): siRNA sense strand
caagggagaaccagggaaa

SEQ ID NO: 566271 - RNA, 19 nt, Homo sapiens
  misc_RNA (1)...(19): siRNA sense strand
ggaagcaggacuagaugga

SEQ ID NO: 566272 - RNA, 19 nt, Homo sapiens
  misc_RNA (1)...(19): siRNA sense strand
caaggcugcuggaacaagu

SEQ ID NO: 566273 - RNA, 19 nt, Homo sapiens
  misc_RNA (1)...(19): siRNA sense strand
gggagaagcaggugucgau

SEQ ID NO: 566274 - RNA, 19 nt, Homo sapiens
  misc_RNA (1)...(19): siRNA sense strand
ggagaacagggaccagaug

SEQ ID NO: 566275 - RNA, 19 nt, Homo sapiens
  misc_RNA (1)...(19): siRNA sense strand
acaauggaaacaucaauga

SEQ ID NO: 566276 - RNA, 19 nt, Homo sapiens
  misc_RNA (1)...(19): siRNA sense strand
gaaaggagagaugguggau

SEQ ID NO: 566277 - RNA, 19 nt, Homo sapiens
  misc_RNA (1)...(19): siRNA sense strand
cuagagguuucccuggauu

SEQ ID NO: 566278 - RNA, 19 nt, Homo sapiens
  misc_RNA (1)...(19): siRNA sense strand
gcaaauggagacggcuauu

SEQ ID NO: 566279 - RNA, 19 nt, Homo sapiens
  misc_RNA (1)...(19): siRNA sense strand
gaaaggcuuccagggagaa

SEQ ID NO: 566280 - RNA, 19 nt, Homo sapiens
  misc_RNA (1)...(19): siRNA sense strand
gcagcugggcuuccugguu

SEQ ID NO: 566281 - RNA, 19 nt, Homo sapiens
  misc_RNA (1)...(19): siRNA sense strand
ggagagaugguggauuaca

SEQ ID NO: 566282 - RNA, 19 nt, Homo sapiens
  misc_RNA (1)...(19): siRNA sense strand
gaugcuggcaacuccauug

SEQ ID NO: 566283 - RNA, 19 nt, Homo sapiens
  misc_RNA (1)...(19): siRNA sense strand
gcguggagcagcuggagaa

SEQ ID NO: 566284 - RNA, 19 nt, Homo sapiens
  misc_RNA (1)...(19): siRNA sense strand
uggagcagcuggagaacag

SEQ ID NO: 566285 - RNA, 19 nt, Homo sapiens
  misc_RNA (1)...(19): siRNA sense strand
ggauuuccgggucccauug

SEQ ID NO: 566286 - RNA, 19 nt, Homo sapiens
  misc_RNA (1)...(19): siRNA sense strand
gagaugguggauuacaaug

SEQ ID NO: 566287 - RNA, 19 nt, Homo sapiens
  misc_RNA (1)...(19): siRNA sense strand
uagcggagcgcacccacaa

SEQ ID NO: 566288 - RNA, 19 nt, Homo sapiens
  misc_RNA (1)...(19): siRNA sense strand
gggagaaccagggaaagga

SEQ ID NO: 566289 - RNA, 19 nt, Homo sapiens
  misc_RNA (1)...(19): siRNA sense strand
gagccaggccagcauccaa

SEQ ID NO: 566290 - RNA, 19 nt, Homo sapiens
  misc_RNA (1)...(19): siRNA sense strand
gguacuccaggaccaauug

SEQ ID NO: 566291 - RNA, 19 nt, Homo sapiens
  misc_RNA (1)...(19): siRNA sense strand
aaaggagacccugggauga

SEQ ID NO: 566292 - RNA, 19 nt, Homo sapiens
  misc_RNA (1)...(19): siRNA sense strand
gagccagggaucccaggaa

SEQ ID NO: 566293 - RNA, 19 nt, Homo sapiens
  misc_RNA (1)...(19): siRNA sense strand
gaaccagggaaaggagaga

SEQ ID NO: 566294 - RNA, 19 nt, Homo sapiens
  misc_RNA (1)...(19): siRNA sense strand
gauuacaauggaaacauca

SEQ ID NO: 566295 - RNA, 19 nt, Homo sapiens
  misc_RNA (1)...(19): siRNA sense strand
ggucaaccaggaacuagag

SEQ ID NO: 566296 - RNA, 19 nt, Homo sapiens
  misc_RNA (1)...(19): siRNA sense strand
aaggagagaugguggauua

SEQ ID NO: 566297 - RNA, 19 nt, Homo sapiens
  misc_RNA (1)...(19): siRNA sense strand
cagcugggcuuccugguuu

SEQ ID NO: 566298 - RNA, 19 nt, Homo sapiens
  misc_RNA (1)...(19): siRNA sense strand
ccaaagacaucuccaggau

SEQ ID NO: 566299 - RNA, 19 nt, Homo sapiens
  misc_RNA (1)...(19): siRNA sense strand
gagagaugguggauuacaa

SEQ ID NO: 566300 - RNA, 19 nt, Homo sapiens
  misc_RNA (1)...(19): siRNA sense strand
aaagggaccucgcgguaaa

SEQ ID NO: 566301 - RNA, 19 nt, Homo sapiens
  misc_RNA (1)...(19): siRNA sense strand
gaugguggauuacaaugga

SEQ ID NO: 566302 - RNA, 19 nt, Homo sapiens
  misc_RNA (1)...(19): siRNA sense strand
ggauuacaauggaaacauc

SEQ ID NO: 566303 - RNA, 19 nt, Homo sapiens
  misc_RNA (1)...(19): siRNA sense strand
caagggagaaccagggaaa

SEQ ID NO: 566304 - RNA, 19 nt, Homo sapiens
  misc_RNA (1)...(19): siRNA sense strand
ggaagcaggacuagaugga

SEQ ID NO: 566305 - RNA, 19 nt, Homo sapiens
  misc_RNA (1)...(19): siRNA sense strand
caaggcugcuggaacaagu

SEQ ID NO: 566306 - RNA, 19 nt, Homo sapiens
  misc_RNA (1)...(19): siRNA sense strand
gggagaagcaggugucgau

SEQ ID NO: 566307 - RNA, 19 nt, Homo sapiens
  misc_RNA (1)...(19): siRNA sense strand
ggagaacagggaccagaug

SEQ ID NO: 566308 - RNA, 19 nt, Homo sapiens
  misc_RNA (1)...(19): siRNA sense strand
acaauggaaacaucaauga

SEQ ID NO: 566309 - RNA, 19 nt, Homo sapiens
  misc_RNA (1)...(19): siRNA sense strand
gaaaggagagaugguggau

SEQ ID NO: 566310 - RNA, 19 nt, Homo sapiens
  misc_RNA (1)...(19): siRNA sense strand
cuagagguuucccuggauu

SEQ ID NO: 566311 - RNA, 19 nt, Homo sapiens
  misc_RNA (1)...(19): siRNA sense strand
gcaaauggagacggcuauu

SEQ ID NO: 566312 - RNA, 19 nt, Homo sapiens
  misc_RNA (1)...(19): siRNA sense strand
gaaaggcuuccagggagaa

SEQ ID NO: 566313 - RNA, 19 nt, Homo sapiens
  misc_RNA (1)...(19): siRNA sense strand
gcagcugggcuuccugguu

SEQ ID NO: 566314 - RNA, 19 nt, Homo sapiens
  misc_RNA (1)...(19): siRNA sense strand
ggagagaugguggauuaca

SEQ ID NO: 566315 - RNA, 19 nt, Homo sapiens
  misc_RNA (1)...(19): siRNA sense strand
gaugcuggcaacuccauug

SEQ ID NO: 566316 - RNA, 19 nt, Homo sapiens
  misc_RNA (1)...(19): siRNA sense strand
gcguggagcagcuggagaa

SEQ ID NO: 566317 - RNA, 19 nt, Homo sapiens
  misc_RNA (1)...(19): siRNA sense strand
uggagcagcuggagaacag

SEQ ID NO: 566318 - RNA, 19 nt, Homo sapiens
  misc_RNA (1)...(19): siRNA sense strand
ggauuuccgggucccauug

SEQ ID NO: 566319 - RNA, 19 nt, Homo sapiens
  misc_RNA (1)...(19): siRNA sense strand
gagaugguggauuacaaug

SEQ ID NO: 566320 - RNA, 19 nt, Homo sapiens
  misc_RNA (1)...(19): siRNA sense strand
uagcggagcgcacccacaa

SEQ ID NO: 566321 - RNA, 19 nt, Homo sapiens
  misc_RNA (1)...(19): siRNA sense strand
gggagaaccagggaaagga

SEQ ID NO: 566322 - RNA, 19 nt, Homo sapiens
  misc_RNA (1)...(19): siRNA sense strand
gagccaggccagcauccaa

SEQ ID NO: 566323 - RNA, 19 nt, Homo sapiens
  misc_RNA (1)...(19): siRNA sense strand
gguacuccaggaccaauug

SEQ ID NO: 566324 - RNA, 19 nt, Homo sapiens
  misc_RNA (1)...(19): siRNA sense strand
aaaggagacccugggauga

SEQ ID NO: 566325 - RNA, 19 nt, Homo sapiens
  misc_RNA (1)...(19): siRNA sense strand
gagccagggaucccaggaa

SEQ ID NO: 566326 - RNA, 19 nt, Homo sapiens
  misc_RNA (1)...(19): siRNA sense strand
gaaccagggaaaggagaga

SEQ ID NO: 566327 - RNA, 19 nt, Homo sapiens
  misc_RNA (1)...(19): siRNA sense strand
gauuacaauggaaacauca

SEQ ID NO: 566328 - RNA, 19 nt, Homo sapiens
  misc_RNA (1)...(19): siRNA sense strand
ggucaaccaggaacuagag

SEQ ID NO: 566329 - RNA, 19 nt, Homo sapiens
  misc_RNA (1)...(19): siRNA sense strand
aaggagagaugguggauua

SEQ ID NO: 566330 - RNA, 19 nt, Homo sapiens
  misc_RNA (1)...(19): siRNA sense strand
cagcugggcuuccugguuu

SEQ ID NO: 566331 - RNA, 19 nt, Homo sapiens
  misc_RNA (1)...(19): siRNA sense strand
ccaaagacaucuccaggau

SEQ ID NO: 566332 - RNA, 19 nt, Homo sapiens
  misc_RNA (1)...(19): siRNA sense strand
gagagaugguggauuacaa

SEQ ID NO: 566333 - RNA, 19 nt, Homo sapiens
  misc_RNA (1)...(19): siRNA sense strand
aaagggaccucgcgguaaa

SEQ ID NO: 566334 - RNA, 19 nt, Homo sapiens
  misc_RNA (1)...(19): siRNA sense strand
gaugguggauuacaaugga

SEQ ID NO: 566335 - RNA, 19 nt, Homo sapiens
  misc_RNA (1)...(19): siRNA sense strand
ggauuacaauggaaacauc

SEQ ID NO: 566336 - RNA, 19 nt, Homo sapiens
  misc_RNA (1)...(19): siRNA sense strand
caagggagaaccagggaaa

SEQ ID NO: 566337 - RNA, 19 nt, Homo sapiens
  misc_RNA (1)...(19): siRNA sense strand
ggaagcaggacuagaugga

SEQ ID NO: 566338 - RNA, 19 nt, Homo sapiens
  misc_RNA (1)...(19): siRNA sense strand
caaggcugcuggaacaagu

SEQ ID NO: 566339 - RNA, 19 nt, Homo sapiens
  misc_RNA (1)...(19): siRNA sense strand
gggagaagcaggugucgau

SEQ ID NO: 566340 - RNA, 19 nt, Homo sapiens
  misc_RNA (1)...(19): siRNA sense strand
ggagaacagggaccagaug

SEQ ID NO: 566341 - RNA, 19 nt, Homo sapiens
  misc_RNA (1)...(19): siRNA sense strand
acaauggaaacaucaauga

SEQ ID NO: 566342 - RNA, 19 nt, Homo sapiens
  misc_RNA (1)...(19): siRNA sense strand
gaaaggagagaugguggau

SEQ ID NO: 566343 - RNA, 19 nt, Homo sapiens
  misc_RNA (1)...(19): siRNA sense strand
cuagagguuucccuggauu

SEQ ID NO: 566344 - RNA, 19 nt, Homo sapiens
  misc_RNA (1)...(19): siRNA sense strand
gcaaauggagacggcuauu

SEQ ID NO: 566345 - RNA, 19 nt, Homo sapiens
  misc_RNA (1)...(19): siRNA sense strand
gaaaggcuuccagggagaa

SEQ ID NO: 566346 - RNA, 19 nt, Homo sapiens
  misc_RNA (1)...(19): siRNA sense strand
gcagcugggcuuccugguu

SEQ ID NO: 566347 - RNA, 19 nt, Homo sapiens
  misc_RNA (1)...(19): siRNA sense strand
ggagagaugguggauuaca

SEQ ID NO: 566348 - RNA, 19 nt, Homo sapiens
  misc_RNA (1)...(19): siRNA sense strand
gaugcuggcaacuccauug

SEQ ID NO: 566349 - RNA, 19 nt, Homo sapiens
  misc_RNA (1)...(19): siRNA sense strand
gcguggagcagcuggagaa

SEQ ID NO: 566350 - RNA, 19 nt, Homo sapiens
  misc_RNA (1)...(19): siRNA sense strand
uggagcagcuggagaacag

SEQ ID NO: 566351 - RNA, 19 nt, Homo sapiens
  misc_RNA (1)...(19): siRNA sense strand
ggauuuccgggucccauug

SEQ ID NO: 566352 - RNA, 19 nt, Homo sapiens
  misc_RNA (1)...(19): siRNA sense strand
gagaugguggauuacaaug

SEQ ID NO: 566353 - RNA, 19 nt, Homo sapiens
  misc_RNA (1)...(19): siRNA sense strand
uagcggagcgcacccacaa

SEQ ID NO: 566354 - RNA, 19 nt, Homo sapiens
  misc_RNA (1)...(19): siRNA sense strand
gggagaaccagggaaagga

SEQ ID NO: 566355 - RNA, 19 nt, Homo sapiens
  misc_RNA (1)...(19): siRNA sense strand
gagccaggccagcauccaa

SEQ ID NO: 566356 - RNA, 19 nt, Homo sapiens
  misc_RNA (1)...(19): siRNA sense strand
gguacuccaggaccaauug

SEQ ID NO: 566357 - RNA, 19 nt, Homo sapiens
  misc_RNA (1)...(19): siRNA sense strand
aaaggagacccugggauga

SEQ ID NO: 566358 - RNA, 19 nt, Homo sapiens
  misc_RNA (1)...(19): siRNA sense strand
gagccagggaucccaggaa

SEQ ID NO: 566359 - RNA, 19 nt, Homo sapiens
  misc_RNA (1)...(19): siRNA sense strand
gaaccagggaaaggagaga

SEQ ID NO: 566360 - RNA, 19 nt, Homo sapiens
  misc_RNA (1)...(19): siRNA sense strand
gauuacaauggaaacauca

SEQ ID NO: 566361 - RNA, 19 nt, Homo sapiens
  misc_RNA (1)...(19): siRNA sense strand
ggucaaccaggaacuagag

SEQ ID NO: 566362 - RNA, 19 nt, Homo sapiens
  misc_RNA (1)...(19): siRNA sense strand
aaggagagaugguggauua

SEQ ID NO: 566363 - RNA, 19 nt, Homo sapiens
  misc_RNA (1)...(19): siRNA sense strand
cagcugggcuuccugguuu

SEQ ID NO: 566364 - RNA, 19 nt, Homo sapiens
  misc_RNA (1)...(19): siRNA sense strand
ccaaagacaucuccaggau

SEQ ID NO: 566365 - RNA, 19 nt, Homo sapiens
  misc_RNA (1)...(19): siRNA sense strand
gagagaugguggauuacaa

SEQ ID NO: 566366 - RNA, 19 nt, Homo sapiens
  misc_RNA (1)...(19): siRNA sense strand
aaagggaccucgcgguaaa

SEQ ID NO: 566367 - RNA, 19 nt, Homo sapiens
  misc_RNA (1)...(19): siRNA sense strand
gaugguggauuacaaugga

SEQ ID NO: 566368 - RNA, 19 nt, Homo sapiens
  misc_RNA (1)...(19): siRNA sense strand
ggauuacaauggaaacauc

SEQ ID NO: 566369 - RNA, 19 nt, Homo sapiens
  misc_RNA (1)...(19): siRNA sense strand
caagggagaaccagggaaa

SEQ ID NO: 566370 - RNA, 19 nt, Homo sapiens
  misc_RNA (1)...(19): siRNA sense strand
ggaagcaggacuagaugga

SEQ ID NO: 566371 - RNA, 19 nt, Homo sapiens
  misc_RNA (1)...(19): siRNA sense strand
caaggcugcuggaacaagu

SEQ ID NO: 566372 - RNA, 19 nt, Homo sapiens
  misc_RNA (1)...(19): siRNA sense strand
gggagaagcaggugucgau

SEQ ID NO: 566373 - RNA, 19 nt, Homo sapiens
  misc_RNA (1)...(19): siRNA sense strand
ggagaacagggaccagaug

SEQ ID NO: 566374 - RNA, 19 nt, Homo sapiens
  misc_RNA (1)...(19): siRNA sense strand
acaauggaaacaucaauga

SEQ ID NO: 566375 - RNA, 19 nt, Homo sapiens
  misc_RNA (1)...(19): siRNA sense strand
gaaaggagagaugguggau

SEQ ID NO: 566376 - RNA, 19 nt, Homo sapiens
  misc_RNA (1)...(19): siRNA sense strand
cuagagguuucccuggauu

SEQ ID NO: 566377 - RNA, 19 nt, Homo sapiens
  misc_RNA (1)...(19): siRNA sense strand
gcaaauggagacggcuauu

SEQ ID NO: 566378 - RNA, 19 nt, Homo sapiens
  misc_RNA (1)...(19): siRNA sense strand
gaaaggcuuccagggagaa

SEQ ID NO: 566379 - RNA, 19 nt, Homo sapiens
  misc_RNA (1)...(19): siRNA sense strand
gcagcugggcuuccugguu

SEQ ID NO: 566380 - RNA, 19 nt, Homo sapiens
  misc_RNA (1)...(19): siRNA sense strand
ggagagaugguggauuaca

SEQ ID NO: 566381 - RNA, 19 nt, Homo sapiens
  misc_RNA (1)...(19): siRNA sense strand
gaugcuggcaacuccauug

SEQ ID NO: 566382 - RNA, 19 nt, Homo sapiens
  misc_RNA (1)...(19): siRNA sense strand
gcguggagcagcuggagaa

SEQ ID NO: 566383 - RNA, 19 nt, Homo sapiens
  misc_RNA (1)...(19): siRNA sense strand
uggagcagcuggagaacag

SEQ ID NO: 566384 - RNA, 19 nt, Homo sapiens
  misc_RNA (1)...(19): siRNA sense strand
ggauuuccgggucccauug

SEQ ID NO: 566385 - RNA, 19 nt, Homo sapiens
  misc_RNA (1)...(19): siRNA sense strand
gagaugguggauuacaaug

SEQ ID NO: 566386 - RNA, 19 nt, Homo sapiens
  misc_RNA (1)...(19): siRNA sense strand
uagcggagcgcacccacaa

SEQ ID NO: 566387 - RNA, 19 nt, Homo sapiens
  misc_RNA (1)...(19): siRNA sense strand
gggagaaccagggaaagga

SEQ ID NO: 566388 - RNA, 19 nt, Homo sapiens
  misc_RNA (1)...(19): siRNA sense strand
gagccaggccagcauccaa

SEQ ID NO: 566389 - RNA, 19 nt, Homo sapiens
  misc_RNA (1)...(19): siRNA sense strand
gguacuccaggaccaauug

SEQ ID NO: 566390 - RNA, 19 nt, Homo sapiens
  misc_RNA (1)...(19): siRNA sense strand
aaaggagacccugggauga

SEQ ID NO: 566391 - RNA, 19 nt, Homo sapiens
  misc_RNA (1)...(19): siRNA sense strand
gagccagggaucccaggaa

SEQ ID NO: 566392 - RNA, 19 nt, Homo sapiens
  misc_RNA (1)...(19): siRNA sense strand
gaaccagggaaaggagaga

SEQ ID NO: 566393 - RNA, 19 nt, Homo sapiens
  misc_RNA (1)...(19): siRNA sense strand
gauuacaauggaaacauca

SEQ ID NO: 566394 - RNA, 19 nt, Homo sapiens
  misc_RNA (1)...(19): siRNA sense strand
ggucaaccaggaacuagag

SEQ ID NO: 566395 - RNA, 19 nt, Homo sapiens
  misc_RNA (1)...(19): siRNA sense strand
aaggagagaugguggauua

SEQ ID NO: 566396 - RNA, 19 nt, Homo sapiens
  misc_RNA (1)...(19): siRNA sense strand
cagcugggcuuccugguuu

SEQ ID NO: 566397 - RNA, 19 nt, Homo sapiens
  misc_RNA (1)...(19): siRNA sense strand
ccaaagacaucuccaggau

SEQ ID NO: 566398 - RNA, 19 nt, Homo sapiens
  misc_RNA (1)...(19): siRNA sense strand
gagagaugguggauuacaa

SEQ ID NO: 566399 - RNA, 19 nt, Homo sapiens
  misc_RNA (1)...(19): siRNA sense strand
aaagggaccucgcgguaaa

SEQ ID NO: 566400 - RNA, 19 nt, Homo sapiens
  misc_RNA (1)...(19): siRNA sense strand
gaugguggauuacaaugga

SEQ ID NO: 566401 - RNA, 19 nt, Homo sapiens
  misc_RNA (1)...(19): siRNA sense strand
ggauuacaauggaaacauc

SEQ ID NO: 566402 - RNA, 19 nt, Homo sapiens
  misc_RNA (1)...(19): siRNA sense strand
caagggagaaccagggaaa

SEQ ID NO: 566403 - RNA, 19 nt, Homo sapiens
  misc_RNA (1)...(19): siRNA sense strand
ggaagcaggacuagaugga

SEQ ID NO: 566404 - RNA, 19 nt, Homo sapiens
  misc_RNA (1)...(19): siRNA sense strand
caaggcugcuggaacaagu

SEQ ID NO: 566405 - RNA, 19 nt, Homo sapiens
  misc_RNA (1)...(19): siRNA sense strand
gggagaagcaggugucgau

SEQ ID NO: 566406 - RNA, 19 nt, Homo sapiens
  misc_RNA (1)...(19): siRNA sense strand
ggagaacagggaccagaug

SEQ ID NO: 566407 - RNA, 19 nt, Homo sapiens
  misc_RNA (1)...(19): siRNA sense strand
acaauggaaacaucaauga

SEQ ID NO: 566408 - RNA, 19 nt, Homo sapiens
  misc_RNA (1)...(19): siRNA sense strand
gaaaggagagaugguggau

SEQ ID NO: 566409 - RNA, 19 nt, Homo sapiens
  misc_RNA (1)...(19): siRNA sense strand
cuagagguuucccuggauu

SEQ ID NO: 566410 - RNA, 19 nt, Homo sapiens
  misc_RNA (1)...(19): siRNA sense strand
gcaaauggagacggcuauu

SEQ ID NO: 566411 - RNA, 19 nt, Homo sapiens
  misc_RNA (1)...(19): siRNA sense strand
gaaaggcuuccagggagaa

SEQ ID NO: 566412 - RNA, 19 nt, Homo sapiens
  misc_RNA (1)...(19): siRNA sense strand
gcagcugggcuuccugguu

SEQ ID NO: 566413 - RNA, 19 nt, Homo sapiens
  misc_RNA (1)...(19): siRNA sense strand
ggagagaugguggauuaca

SEQ ID NO: 566414 - RNA, 19 nt, Homo sapiens
  misc_RNA (1)...(19): siRNA sense strand
gaugcuggcaacuccauug

SEQ ID NO: 566415 - RNA, 19 nt, Homo sapiens
  misc_RNA (1)...(19): siRNA sense strand
gcguggagcagcuggagaa

SEQ ID NO: 566416 - RNA, 19 nt, Homo sapiens
  misc_RNA (1)...(19): siRNA sense strand
uggagcagcuggagaacag

SEQ ID NO: 566417 - RNA, 19 nt, Homo sapiens
  misc_RNA (1)...(19): siRNA sense strand
ggauuuccgggucccauug

SEQ ID NO: 566418 - RNA, 19 nt, Homo sapiens
  misc_RNA (1)...(19): siRNA sense strand
gagaugguggauuacaaug

SEQ ID NO: 566419 - RNA, 19 nt, Homo sapiens
  misc_RNA (1)...(19): siRNA sense strand
uagcggagcgcacccacaa

SEQ ID NO: 566420 - RNA, 19 nt, Homo sapiens
  misc_RNA (1)...(19): siRNA sense strand
gggagaaccagggaaagga

SEQ ID NO: 566421 - RNA, 19 nt, Homo sapiens
  misc_RNA (1)...(19): siRNA sense strand
gagccaggccagcauccaa

SEQ ID NO: 566422 - RNA, 19 nt, Homo sapiens
  misc_RNA (1)...(19): siRNA sense strand
gguacuccaggaccaauug

SEQ ID NO: 566423 - RNA, 19 nt, Homo sapiens
  misc_RNA (1)...(19): siRNA sense strand
aaaggagacccugggauga

SEQ ID NO: 566424 - RNA, 19 nt, Homo sapiens
  misc_RNA (1)...(19): siRNA sense strand
gagccagggaucccaggaa

SEQ ID NO: 566425 - RNA, 19 nt, Homo sapiens
  misc_RNA (1)...(19): siRNA sense strand
gaaccagggaaaggagaga

SEQ ID NO: 566426 - RNA, 19 nt, Homo sapiens
  misc_RNA (1)...(19): siRNA sense strand
gauuacaauggaaacauca

SEQ ID NO: 566427 - RNA, 19 nt, Homo sapiens
  misc_RNA (1)...(19): siRNA sense strand
ggucaaccaggaacuagag

SEQ ID NO: 566428 - RNA, 19 nt, Homo sapiens
  misc_RNA (1)...(19): siRNA sense strand
aaggagagaugguggauua

SEQ ID NO: 566429 - RNA, 19 nt, Homo sapiens
  misc_RNA (1)...(19): siRNA sense strand
cagcugggcuuccugguuu

SEQ ID NO: 566430 - RNA, 19 nt, Homo sapiens
  misc_RNA (1)...(19): siRNA sense strand
ccaaagacaucuccaggau

SEQ ID NO: 566431 - RNA, 19 nt, Homo sapiens
  misc_RNA (1)...(19): siRNA sense strand
gagagaugguggauuacaa

SEQ ID NO: 566432 - RNA, 19 nt, Homo sapiens
  misc_RNA (1)...(19): siRNA sense strand
aaagggaccucgcgguaaa

SEQ ID NO: 566433 - RNA, 19 nt, Homo sapiens
  misc_RNA (1)...(19): siRNA sense strand
gaugguggauuacaaugga

SEQ ID NO: 566434 - RNA, 19 nt, Homo sapiens
  misc_RNA (1)...(19): siRNA sense strand
ggauuacaauggaaacauc

SEQ ID NO: 566435 - RNA, 19 nt, Homo sapiens
  misc_RNA (1)...(19): siRNA sense strand
caagggagaaccagggaaa

SEQ ID NO: 566436 - RNA, 19 nt, Homo sapiens
  misc_RNA (1)...(19): siRNA sense strand
ggaagcaggacuagaugga

SEQ ID NO: 566437 - RNA, 19 nt, Homo sapiens
  misc_RNA (1)...(19): siRNA sense strand
caaggcugcuggaacaagu

SEQ ID NO: 566438 - RNA, 19 nt, Homo sapiens
  misc_RNA (1)...(19): siRNA sense strand
gggagaagcaggugucgau

SEQ ID NO: 566439 - RNA, 19 nt, Homo sapiens
  misc_RNA (1)...(19): siRNA sense strand
ggagaacagggaccagaug

SEQ ID NO: 566440 - RNA, 19 nt, Homo sapiens
  misc_RNA (1)...(19): siRNA sense strand
acaauggaaacaucaauga

SEQ ID NO: 566441 - RNA, 19 nt, Homo sapiens
  misc_RNA (1)...(19): siRNA sense strand
gaaaggagagaugguggau

SEQ ID NO: 566442 - RNA, 19 nt, Homo sapiens
  misc_RNA (1)...(19): siRNA sense strand
cuagagguuucccuggauu

SEQ ID NO: 566443 - RNA, 19 nt, Homo sapiens
  misc_RNA (1)...(19): siRNA sense strand
gcaaauggagacggcuauu

SEQ ID NO: 566444 - RNA, 19 nt, Homo sapiens
  misc_RNA (1)...(19): siRNA sense strand
gaaaggcuuccagggagaa

SEQ ID NO: 566445 - RNA, 19 nt, Homo sapiens
  misc_RNA (1)...(19): siRNA sense strand
gcagcugggcuuccugguu

SEQ ID NO: 566446 - RNA, 19 nt, Homo sapiens
  misc_RNA (1)...(19): siRNA sense strand
ggagagaugguggauuaca

SEQ ID NO: 566447 - RNA, 19 nt, Homo sapiens
  misc_RNA (1)...(19): siRNA sense strand
gaugcuggcaacuccauug

SEQ ID NO: 566448 - RNA, 19 nt, Homo sapiens
  misc_RNA (1)...(19): siRNA sense strand
gcguggagcagcuggagaa

SEQ ID NO: 566449 - RNA, 19 nt, Homo sapiens
  misc_RNA (1)...(19): siRNA sense strand
uggagcagcuggagaacag

SEQ ID NO: 566450 - RNA, 19 nt, Homo sapiens
  misc_RNA (1)...(19): siRNA sense strand
ggauuuccgggucccauug

SEQ ID NO: 566451 - RNA, 19 nt, Homo sapiens
  misc_RNA (1)...(19): siRNA sense strand
gagaugguggauuacaaug

SEQ ID NO: 566452 - RNA, 19 nt, Homo sapiens
  misc_RNA (1)...(19): siRNA sense strand
uagcggagcgcacccacaa

SEQ ID NO: 566453 - RNA, 19 nt, Homo sapiens
  misc_RNA (1)...(19): siRNA sense strand
gggagaaccagggaaagga

SEQ ID NO: 566454 - RNA, 19 nt, Homo sapiens
  misc_RNA (1)...(19): siRNA sense strand
gagccaggccagcauccaa

SEQ ID NO: 566455 - RNA, 19 nt, Homo sapiens
  misc_RNA (1)...(19): siRNA sense strand
gguacuccaggaccaauug

SEQ ID NO: 566456 - RNA, 19 nt, Homo sapiens
  misc_RNA (1)...(19): siRNA sense strand
aaaggagacccugggauga

SEQ ID NO: 566457 - RNA, 19 nt, Homo sapiens
  misc_RNA (1)...(19): siRNA sense strand
gagccagggaucccaggaa

SEQ ID NO: 566458 - RNA, 19 nt, Homo sapiens
  misc_RNA (1)...(19): siRNA sense strand
gaaccagggaaaggagaga

SEQ ID NO: 566459 - RNA, 19 nt, Homo sapiens
  misc_RNA (1)...(19): siRNA sense strand
gauuacaauggaaacauca

SEQ ID NO: 566460 - RNA, 19 nt, Homo sapiens
  misc_RNA (1)...(19): siRNA sense strand
ggucaaccaggaacuagag

SEQ ID NO: 566461 - RNA, 19 nt, Homo sapiens
  misc_RNA (1)...(19): siRNA sense strand
aaggagagaugguggauua

SEQ ID NO: 566462 - RNA, 19 nt, Homo sapiens
  misc_RNA (1)...(19): siRNA sense strand
cagcugggcuuccugguuu

SEQ ID NO: 566463 - RNA, 19 nt, Homo sapiens
  misc_RNA (1)...(19): siRNA sense strand
ccaaagacaucuccaggau

SEQ ID NO: 566464 - RNA, 19 nt, Homo sapiens
  misc_RNA (1)...(19): siRNA sense strand
gagagaugguggauuacaa

SEQ ID NO: 566465 - RNA, 19 nt, Homo sapiens
  misc_RNA (1)...(19): siRNA sense strand
aaagggaccucgcgguaaa

SEQ ID NO: 566466 - RNA, 19 nt, Homo sapiens
  misc_RNA (1)...(19): siRNA sense strand
gaugguggauuacaaugga

SEQ ID NO: 566467 - RNA, 19 nt, Homo sapiens
  misc_RNA (1)...(19): siRNA sense strand
ggauuacaauggaaacauc

SEQ ID NO: 566468 - RNA, 19 nt, Homo sapiens
  misc_RNA (1)...(19): siRNA sense strand
caagggagaaccagggaaa

SEQ ID NO: 566469 - RNA, 19 nt, Homo sapiens
  misc_RNA (1)...(19): siRNA sense strand
ggaagcaggacuagaugga

SEQ ID NO: 566470 - RNA, 19 nt, Homo sapiens
  misc_RNA (1)...(19): siRNA sense strand
caaggcugcuggaacaagu

SEQ ID NO: 566471 - RNA, 19 nt, Homo sapiens
  misc_RNA (1)...(19): siRNA sense strand
gggagaagcaggugucgau

SEQ ID NO: 566472 - RNA, 19 nt, Homo sapiens
  misc_RNA (1)...(19): siRNA sense strand
ggagaacagggaccagaug

SEQ ID NO: 566473 - RNA, 19 nt, Homo sapiens
  misc_RNA (1)...(19): siRNA sense strand
acaauggaaacaucaauga

SEQ ID NO: 566474 - RNA, 19 nt, Homo sapiens
  misc_RNA (1)...(19): siRNA sense strand
gaaaggagagaugguggau

SEQ ID NO: 566475 - RNA, 19 nt, Homo sapiens
  misc_RNA (1)...(19): siRNA sense strand
cuagagguuucccuggauu

SEQ ID NO: 566476 - RNA, 19 nt, Homo sapiens
  misc_RNA (1)...(19): siRNA sense strand
gcaaauggagacggcuauu

SEQ ID NO: 566477 - RNA, 19 nt, Homo sapiens
  misc_RNA (1)...(19): siRNA sense strand
gaaaggcuuccagggagaa

SEQ ID NO: 566478 - RNA, 19 nt, Homo sapiens
  misc_RNA (1)...(19): siRNA sense strand
gcagcugggcuuccugguu

SEQ ID NO: 566479 - RNA, 19 nt, Homo sapiens
  misc_RNA (1)...(19): siRNA sense strand
ggagagaugguggauuaca

SEQ ID NO: 566480 - RNA, 19 nt, Homo sapiens
  misc_RNA (1)...(19): siRNA sense strand
gaugcuggcaacuccauug

SEQ ID NO: 566481 - RNA, 19 nt, Homo sapiens
  misc_RNA (1)...(19): siRNA sense strand
gcguggagcagcuggagaa

SEQ ID NO: 566482 - RNA, 19 nt, Homo sapiens
  misc_RNA (1)...(19): siRNA sense strand
uggagcagcuggagaacag

SEQ ID NO: 566483 - RNA, 19 nt, Homo sapiens
  misc_RNA (1)...(19): siRNA sense strand
ggauuuccgggucccauug

SEQ ID NO: 566484 - RNA, 19 nt, Homo sapiens
  misc_RNA (1)...(19): siRNA sense strand
gagaugguggauuacaaug

SEQ ID NO: 566485 - RNA, 19 nt, Homo sapiens
  misc_RNA (1)...(19): siRNA sense strand
uagcggagcgcacccacaa

SEQ ID NO: 566486 - RNA, 19 nt, Homo sapiens
  misc_RNA (1)...(19): siRNA sense strand
gggagaaccagggaaagga

SEQ ID NO: 566487 - RNA, 19 nt, Homo sapiens
  misc_RNA (1)...(19): siRNA sense strand
gagccaggccagcauccaa

SEQ ID NO: 566488 - RNA, 19 nt, Homo sapiens
  misc_RNA (1)...(19): siRNA sense strand
gguacuccaggaccaauug

SEQ ID NO: 566489 - RNA, 19 nt, Homo sapiens
  misc_RNA (1)...(19): siRNA sense strand
aaaggagacccugggauga

SEQ ID NO: 566490 - RNA, 19 nt, Homo sapiens
  misc_RNA (1)...(19): siRNA sense strand
gagccagggaucccaggaa

SEQ ID NO: 566491 - RNA, 19 nt, Homo sapiens
  misc_RNA (1)...(19): siRNA sense strand
gaaccagggaaaggagaga

SEQ ID NO: 566492 - RNA, 19 nt, Homo sapiens
  misc_RNA (1)...(19): siRNA sense strand
gauuacaauggaaacauca

SEQ ID NO: 566493 - RNA, 19 nt, Homo sapiens
  misc_RNA (1)...(19): siRNA sense strand
ggucaaccaggaacuagag

SEQ ID NO: 566494 - RNA, 19 nt, Homo sapiens
  misc_RNA (1)...(19): siRNA sense strand
aaggagagaugguggauua

SEQ ID NO: 566495 - RNA, 19 nt, Homo sapiens
  misc_RNA (1)...(19): siRNA sense strand
cagcugggcuuccugguuu

SEQ ID NO: 566496 - RNA, 19 nt, Homo sapiens
  misc_RNA (1)...(19): siRNA sense strand
ccaaagacaucuccaggau

SEQ ID NO: 566497 - RNA, 19 nt, Homo sapiens
  misc_RNA (1)...(19): siRNA sense strand
gagagaugguggauuacaa

SEQ ID NO: 566498 - RNA, 19 nt, Homo sapiens
  misc_RNA (1)...(19): siRNA sense strand
aaagggaccucgcgguaaa

SEQ ID NO: 566499 - RNA, 19 nt, Homo sapiens
  misc_RNA (1)...(19): siRNA sense strand
gaugguggauuacaaugga

SEQ ID NO: 566500 - RNA, 19 nt, Homo sapiens
  misc_RNA (1)...(19): siRNA sense strand
ggauuacaauggaaacauc

SEQ ID NO: 566501 - RNA, 19 nt, Homo sapiens
  misc_RNA (1)...(19): siRNA sense strand
caagggagaaccagggaaa

SEQ ID NO: 566502 - RNA, 19 nt, Homo sapiens
  misc_RNA (1)...(19): siRNA sense strand
ggaagcaggacuagaugga

SEQ ID NO: 566503 - RNA, 19 nt, Homo sapiens
  misc_RNA (1)...(19): siRNA sense strand
caaggcugcuggaacaagu

SEQ ID NO: 566504 - RNA, 19 nt, Homo sapiens
  misc_RNA (1)...(19): siRNA sense strand
gggagaagcaggugucgau

SEQ ID NO: 566505 - RNA, 19 nt, Homo sapiens
  misc_RNA (1)...(19): siRNA sense strand
ggagaacagggaccagaug

SEQ ID NO: 566506 - RNA, 19 nt, Homo sapiens
  misc_RNA (1)...(19): siRNA sense strand
acaauggaaacaucaauga

SEQ ID NO: 566507 - RNA, 19 nt, Homo sapiens
  misc_RNA (1)...(19): siRNA sense strand
gaaaggagagaugguggau

SEQ ID NO: 566508 - RNA, 19 nt, Homo sapiens
  misc_RNA (1)...(19): siRNA sense strand
cuagagguuucccuggauu

SEQ ID NO: 566509 - RNA, 19 nt, Homo sapiens
  misc_RNA (1)...(19): siRNA sense strand
gcaaauggagacggcuauu

SEQ ID NO: 566510 - RNA, 19 nt, Homo sapiens
  misc_RNA (1)...(19): siRNA sense strand
gaaaggcuuccagggagaa

SEQ ID NO: 566511 - RNA, 19 nt, Homo sapiens
  misc_RNA (1)...(19): siRNA sense strand
gcagcugggcuuccugguu

SEQ ID NO: 566512 - RNA, 19 nt, Homo sapiens
  misc_RNA (1)...(19): siRNA sense strand
ggagagaugguggauuaca

SEQ ID NO: 566513 - RNA, 19 nt, Homo sapiens
  misc_RNA (1)...(19): siRNA sense strand
gaugcuggcaacuccauug

SEQ ID NO: 566514 - RNA, 19 nt, Homo sapiens
  misc_RNA (1)...(19): siRNA sense strand
gcguggagcagcuggagaa

SEQ ID NO: 566515 - RNA, 19 nt, Homo sapiens
  misc_RNA (1)...(19): siRNA sense strand
uggagcagcuggagaacag

SEQ ID NO: 566516 - RNA, 19 nt, Homo sapiens
  misc_RNA (1)...(19): siRNA sense strand
ggauuuccgggucccauug

SEQ ID NO: 566517 - RNA, 19 nt, Homo sapiens
  misc_RNA (1)...(19): siRNA sense strand
gagaugguggauuacaaug

SEQ ID NO: 566518 - RNA, 19 nt, Homo sapiens
  misc_RNA (1)...(19): siRNA sense strand
uagcggagcgcacccacaa

SEQ ID NO: 566519 - RNA, 19 nt, Homo sapiens
  misc_RNA (1)...(19): siRNA sense strand
gggagaaccagggaaagga

SEQ ID NO: 566520 - RNA, 19 nt, Homo sapiens
  misc_RNA (1)...(19): siRNA sense strand
gagccaggccagcauccaa

SEQ ID NO: 566521 - RNA, 19 nt, Homo sapiens
  misc_RNA (1)...(19): siRNA sense strand
gguacuccaggaccaauug

SEQ ID NO: 566522 - RNA, 19 nt, Homo sapiens
  misc_RNA (1)...(19): siRNA sense strand
aaaggagacccugggauga

SEQ ID NO: 566523 - RNA, 19 nt, Homo sapiens
  misc_RNA (1)...(19): siRNA sense strand
gagccagggaucccaggaa

SEQ ID NO: 566524 - RNA, 19 nt, Homo sapiens
  misc_RNA (1)...(19): siRNA sense strand
gaaccagggaaaggagaga

SEQ ID NO: 566525 - RNA, 19 nt, Homo sapiens
  misc_RNA (1)...(19): siRNA sense strand
gauuacaauggaaacauca

SEQ ID NO: 566526 - RNA, 19 nt, Homo sapiens
  misc_RNA (1)...(19): siRNA sense strand
ggucaaccaggaacuagag

SEQ ID NO: 566527 - RNA, 19 nt, Homo sapiens
  misc_RNA (1)...(19): siRNA sense strand
aaggagagaugguggauua

SEQ ID NO: 566528 - RNA, 19 nt, Homo sapiens
  misc_RNA (1)...(19): siRNA sense strand
cagcugggcuuccugguuu

SEQ ID NO: 566529 - RNA, 19 nt, Homo sapiens
  misc_RNA (1)...(19): siRNA sense strand
ccaaagacaucuccaggau

SEQ ID NO: 566530 - RNA, 19 nt, Homo sapiens
  misc_RNA (1)...(19): siRNA sense strand
gagagaugguggauuacaa

SEQ ID NO: 566531 - RNA, 19 nt, Homo sapiens
  misc_RNA (1)...(19): siRNA sense strand
aaagggaccucgcgguaaa

SEQ ID NO: 566532 - RNA, 19 nt, Homo sapiens
  misc_RNA (1)...(19): siRNA sense strand
gaugguggauuacaaugga

SEQ ID NO: 566533 - RNA, 19 nt, Homo sapiens
  misc_RNA (1)...(19): siRNA sense strand
ggauuacaauggaaacauc

SEQ ID NO: 566534 - RNA, 19 nt, Homo sapiens
  misc_RNA (1)...(19): siRNA sense strand
caagggagaaccagggaaa

SEQ ID NO: 566535 - RNA, 19 nt, Homo sapiens
  misc_RNA (1)...(19): siRNA sense strand
ggaagcaggacuagaugga

SEQ ID NO: 566536 - RNA, 19 nt, Homo sapiens
  misc_RNA (1)...(19): siRNA sense strand
caaggcugcuggaacaagu

SEQ ID NO: 566537 - RNA, 19 nt, Homo sapiens
  misc_RNA (1)...(19): siRNA sense strand
gggagaagcaggugucgau

SEQ ID NO: 566538 - RNA, 19 nt, Homo sapiens
  misc_RNA (1)...(19): siRNA sense strand
ggagaacagggaccagaug

SEQ ID NO: 566539 - RNA, 19 nt, Homo sapiens
  misc_RNA (1)...(19): siRNA sense strand
acaauggaaacaucaauga

SEQ ID NO: 566540 - RNA, 19 nt, Homo sapiens
  misc_RNA (1)...(19): siRNA sense strand
gaaaggagagaugguggau

SEQ ID NO: 566541 - RNA, 19 nt, Homo sapiens
  misc_RNA (1)...(19): siRNA sense strand
cuagagguuucccuggauu

SEQ ID NO: 566542 - RNA, 19 nt, Homo sapiens
  misc_RNA (1)...(19): siRNA sense strand
gcaaauggagacggcuauu

SEQ ID NO: 566543 - RNA, 19 nt, Homo sapiens
  misc_RNA (1)...(19): siRNA sense strand
gaaaggcuuccagggagaa

SEQ ID NO: 566544 - RNA, 19 nt, Homo sapiens
  misc_RNA (1)...(19): siRNA sense strand
gcagcugggcuuccugguu

SEQ ID NO: 566545 - RNA, 19 nt, Homo sapiens
  misc_RNA (1)...(19): siRNA sense strand
ggagagaugguggauuaca

SEQ ID NO: 566546 - RNA, 19 nt, Homo sapiens
  misc_RNA (1)...(19): siRNA sense strand
gaugcuggcaacuccauug

SEQ ID NO: 566547 - RNA, 19 nt, Homo sapiens
  misc_RNA (1)...(19): siRNA sense strand
gcguggagcagcuggagaa

SEQ ID NO: 566548 - RNA, 19 nt, Homo sapiens
  misc_RNA (1)...(19): siRNA sense strand
uggagcagcuggagaacag

SEQ ID NO: 566549 - RNA, 19 nt, Homo sapiens
  misc_RNA (1)...(19): siRNA sense strand
ggauuuccgggucccauug

SEQ ID NO: 566550 - RNA, 19 nt, Homo sapiens
  misc_RNA (1)...(19): siRNA sense strand
gagaugguggauuacaaug

SEQ ID NO: 566551 - RNA, 19 nt, Homo sapiens
  misc_RNA (1)...(19): siRNA sense strand
uagcggagcgcacccacaa

SEQ ID NO: 566552 - RNA, 19 nt, Homo sapiens
  misc_RNA (1)...(19): siRNA sense strand
gggagaaccagggaaagga

SEQ ID NO: 566553 - RNA, 19 nt, Homo sapiens
  misc_RNA (1)...(19): siRNA sense strand
gagccaggccagcauccaa

SEQ ID NO: 566554 - RNA, 19 nt, Homo sapiens
  misc_RNA (1)...(19): siRNA sense strand
gguacuccaggaccaauug

SEQ ID NO: 566555 - RNA, 19 nt, Homo sapiens
  misc_RNA (1)...(19): siRNA sense strand
aaaggagacccugggauga

SEQ ID NO: 566556 - RNA, 19 nt, Homo sapiens
  misc_RNA (1)...(19): siRNA sense strand
gagccagggaucccaggaa

SEQ ID NO: 566557 - RNA, 19 nt, Homo sapiens
  misc_RNA (1)...(19): siRNA sense strand
gaaccagggaaaggagaga

SEQ ID NO: 566558 - RNA, 19 nt, Homo sapiens
  misc_RNA (1)...(19): siRNA sense strand
gauuacaauggaaacauca

SEQ ID NO: 566559 - RNA, 19 nt, Homo sapiens
  misc_RNA (1)...(19): siRNA sense strand
ggucaaccaggaacuagag

SEQ ID NO: 566560 - RNA, 19 nt, Homo sapiens
  misc_RNA (1)...(19): siRNA sense strand
aaggagagaugguggauua

SEQ ID NO: 566561 - RNA, 19 nt, Homo sapiens
  misc_RNA (1)...(19): siRNA sense strand
cagcugggcuuccugguuu

SEQ ID NO: 566562 - RNA, 19 nt, Homo sapiens
  misc_RNA (1)...(19): siRNA sense strand
ccaaagacaucuccaggau

SEQ ID NO: 566563 - RNA, 19 nt, Homo sapiens
  misc_RNA (1)...(19): siRNA sense strand
gagagaugguggauuacaa

SEQ ID NO: 566564 - RNA, 19 nt, Homo sapiens
  misc_RNA (1)...(19): siRNA sense strand
aaagggaccucgcgguaaa

SEQ ID NO: 566565 - RNA, 19 nt, Homo sapiens
  misc_RNA (1)...(19): siRNA sense strand
gaugguggauuacaaugga

SEQ ID NO: 566566 - RNA, 19 nt, Homo sapiens
  misc_RNA (1)...(19): siRNA sense strand
ggauuacaauggaaacauc

SEQ ID NO: 566567 - RNA, 19 nt, Homo sapiens
  misc_RNA (1)...(19): siRNA sense strand
caagggagaaccagggaaa

SEQ ID NO: 566568 - RNA, 19 nt, Homo sapiens
  misc_RNA (1)...(19): siRNA sense strand
ggaagcaggacuagaugga

SEQ ID NO: 566569 - RNA, 19 nt, Homo sapiens
  misc_RNA (1)...(19): siRNA sense strand
caaggcugcuggaacaagu

SEQ ID NO: 566570 - RNA, 19 nt, Homo sapiens
  misc_RNA (1)...(19): siRNA sense strand
gggagaagcaggugucgau

SEQ ID NO: 566571 - RNA, 19 nt, Homo sapiens
  misc_RNA (1)...(19): siRNA sense strand
ggagaacagggaccagaug

SEQ ID NO: 566572 - RNA, 19 nt, Homo sapiens
  misc_RNA (1)...(19): siRNA sense strand
acaauggaaacaucaauga

SEQ ID NO: 566573 - RNA, 19 nt, Homo sapiens
  misc_RNA (1)...(19): siRNA sense strand
gaaaggagagaugguggau

SEQ ID NO: 566574 - RNA, 19 nt, Homo sapiens
  misc_RNA (1)...(19): siRNA sense strand
cuagagguuucccuggauu

SEQ ID NO: 566575 - RNA, 19 nt, Homo sapiens
  misc_RNA (1)...(19): siRNA sense strand
gcaaauggagacggcuauu

SEQ ID NO: 566576 - RNA, 19 nt, Homo sapiens
  misc_RNA (1)...(19): siRNA sense strand
gaaaggcuuccagggagaa

SEQ ID NO: 566577 - RNA, 19 nt, Homo sapiens
  misc_RNA (1)...(19): siRNA sense strand
gcagcugggcuuccugguu

SEQ ID NO: 566578 - RNA, 19 nt, Homo sapiens
  misc_RNA (1)...(19): siRNA sense strand
ggagagaugguggauuaca

SEQ ID NO: 566579 - RNA, 19 nt, Homo sapiens
  misc_RNA (1)...(19): siRNA sense strand
gaugcuggcaacuccauug

SEQ ID NO: 566580 - RNA, 19 nt, Homo sapiens
  misc_RNA (1)...(19): siRNA sense strand
gcguggagcagcuggagaa

SEQ ID NO: 566581 - RNA, 19 nt, Homo sapiens
  misc_RNA (1)...(19): siRNA sense strand
uggagcagcuggagaacag

SEQ ID NO: 566582 - RNA, 19 nt, Homo sapiens
  misc_RNA (1)...(19): siRNA sense strand
ggauuuccgggucccauug

SEQ ID NO: 566583 - RNA, 19 nt, Homo sapiens
  misc_RNA (1)...(19): siRNA sense strand
gagaugguggauuacaaug

SEQ ID NO: 566584 - RNA, 19 nt, Homo sapiens
  misc_RNA (1)...(19): siRNA sense strand
uagcggagcgcacccacaa

SEQ ID NO: 566585 - RNA, 19 nt, Homo sapiens
  misc_RNA (1)...(19): siRNA sense strand
gggagaaccagggaaagga

SEQ ID NO: 566586 - RNA, 19 nt, Homo sapiens
  misc_RNA (1)...(19): siRNA sense strand
gagccaggccagcauccaa

SEQ ID NO: 566587 - RNA, 19 nt, Homo sapiens
  misc_RNA (1)...(19): siRNA sense strand
gguacuccaggaccaauug

SEQ ID NO: 566588 - RNA, 19 nt, Homo sapiens
  misc_RNA (1)...(19): siRNA sense strand
aaaggagacccugggauga

SEQ ID NO: 566589 - RNA, 19 nt, Homo sapiens
  misc_RNA (1)...(19): siRNA sense strand
gagccagggaucccaggaa

SEQ ID NO: 566590 - RNA, 19 nt, Homo sapiens
  misc_RNA (1)...(19): siRNA sense strand
gaaccagggaaaggagaga

SEQ ID NO: 566591 - RNA, 19 nt, Homo sapiens
  misc_RNA (1)...(19): siRNA sense strand
gauuacaauggaaacauca

SEQ ID NO: 566592 - RNA, 19 nt, Homo sapiens
  misc_RNA (1)...(19): siRNA sense strand
ggucaaccaggaacuagag

SEQ ID NO: 566593 - RNA, 19 nt, Homo sapiens
  misc_RNA (1)...(19): siRNA sense strand
aaggagagaugguggauua

SEQ ID NO: 566594 - RNA, 19 nt, Homo sapiens
  misc_RNA (1)...(19): siRNA sense strand
cagcugggcuuccugguuu

SEQ ID NO: 566595 - RNA, 19 nt, Homo sapiens
  misc_RNA (1)...(19): siRNA sense strand
ccaaagacaucuccaggau

SEQ ID NO: 566596 - RNA, 19 nt, Homo sapiens
  misc_RNA (1)...(19): siRNA sense strand
gagagaugguggauuacaa

SEQ ID NO: 566597 - RNA, 19 nt, Homo sapiens
  misc_RNA (1)...(19): siRNA sense strand
aaagggaccucgcgguaaa

SEQ ID NO: 566598 - RNA, 19 nt, Homo sapiens
  misc_RNA (1)...(19): siRNA sense strand
gaugguggauuacaaugga

SEQ ID NO: 566599 - RNA, 19 nt, Homo sapiens
  misc_RNA (1)...(19): siRNA sense strand
ggauuacaauggaaacauc

SEQ ID NO: 566600 - RNA, 19 nt, Homo sapiens
  misc_RNA (1)...(19): siRNA sense strand
caagggagaaccagggaaa

SEQ ID NO: 566601 - RNA, 19 nt, Homo sapiens
  misc_RNA (1)...(19): siRNA sense strand
ggaagcaggacuagaugga

SEQ ID NO: 566602 - RNA, 19 nt, Homo sapiens
  misc_RNA (1)...(19): siRNA sense strand
caaggcugcuggaacaagu

SEQ ID NO: 566603 - RNA, 19 nt, Homo sapiens
  misc_RNA (1)...(19): siRNA sense strand
gggagaagcaggugucgau

SEQ ID NO: 566604 - RNA, 19 nt, Homo sapiens
  misc_RNA (1)...(19): siRNA sense strand
ggagaacagggaccagaug

SEQ ID NO: 566605 - RNA, 19 nt, Homo sapiens
  misc_RNA (1)...(19): siRNA sense strand
acaauggaaacaucaauga

SEQ ID NO: 566606 - RNA, 19 nt, Homo sapiens
  misc_RNA (1)...(19): siRNA sense strand
gaaaggagagaugguggau

SEQ ID NO: 566607 - RNA, 19 nt, Homo sapiens
  misc_RNA (1)...(19): siRNA sense strand
cuagagguuucccuggauu

SEQ ID NO: 566608 - RNA, 19 nt, Homo sapiens
  misc_RNA (1)...(19): siRNA sense strand
gcaaauggagacggcuauu

SEQ ID NO: 566609 - RNA, 19 nt, Homo sapiens
  misc_RNA (1)...(19): siRNA sense strand
gaaaggcuuccagggagaa

SEQ ID NO: 566610 - RNA, 19 nt, Homo sapiens
  misc_RNA (1)...(19): siRNA sense strand
gcagcugggcuuccugguu

SEQ ID NO: 566611 - RNA, 19 nt, Homo sapiens
  misc_RNA (1)...(19): siRNA sense strand
ggagagaugguggauuaca

SEQ ID NO: 566612 - RNA, 19 nt, Homo sapiens
  misc_RNA (1)...(19): siRNA sense strand
gaugcuggcaacuccauug

SEQ ID NO: 566613 - RNA, 19 nt, Homo sapiens
  misc_RNA (1)...(19): siRNA sense strand
gcguggagcagcuggagaa

SEQ ID NO: 566614 - RNA, 19 nt, Homo sapiens
  misc_RNA (1)...(19): siRNA sense strand
uggagcagcuggagaacag

SEQ ID NO: 566615 - RNA, 19 nt, Homo sapiens
  misc_RNA (1)...(19): siRNA sense strand
ggauuuccgggucccauug

SEQ ID NO: 566616 - RNA, 19 nt, Homo sapiens
  misc_RNA (1)...(19): siRNA sense strand
gagaugguggauuacaaug

SEQ ID NO: 566617 - RNA, 19 nt, Homo sapiens
  misc_RNA (1)...(19): siRNA sense strand
uagcggagcgcacccacaa

SEQ ID NO: 566618 - RNA, 19 nt, Homo sapiens
  misc_RNA (1)...(19): siRNA sense strand
gggagaaccagggaaagga

SEQ ID NO: 566619 - RNA, 19 nt, Homo sapiens
  misc_RNA (1)...(19): siRNA sense strand
gagccaggccagcauccaa

SEQ ID NO: 566620 - RNA, 19 nt, Homo sapiens
  misc_RNA (1)...(19): siRNA sense strand
gguacuccaggaccaauug

SEQ ID NO: 566621 - RNA, 19 nt, Homo sapiens
  misc_RNA (1)...(19): siRNA sense strand
aaaggagacccugggauga

SEQ ID NO: 566622 - RNA, 19 nt, Homo sapiens
  misc_RNA (1)...(19): siRNA sense strand
gagccagggaucccaggaa

SEQ ID NO: 566623 - RNA, 19 nt, Homo sapiens
  misc_RNA (1)...(19): siRNA sense strand
gaaccagggaaaggagaga

SEQ ID NO: 566624 - RNA, 19 nt, Homo sapiens
  misc_RNA (1)...(19): siRNA sense strand
gauuacaauggaaacauca

SEQ ID NO: 566625 - RNA, 19 nt, Homo sapiens
  misc_RNA (1)...(19): siRNA sense strand
ggucaaccaggaacuagag

SEQ ID NO: 566626 - RNA, 19 nt, Homo sapiens
  misc_RNA (1)...(19): siRNA sense strand
aaggagagaugguggauua

SEQ ID NO: 566627 - RNA, 19 nt, Homo sapiens
  misc_RNA (1)...(19): siRNA sense strand
cagcugggcuuccugguuu

SEQ ID NO: 566628 - RNA, 19 nt, Homo sapiens
  misc_RNA (1)...(19): siRNA sense strand
ccaaagacaucuccaggau

SEQ ID NO: 566629 - RNA, 19 nt, Homo sapiens
  misc_RNA (1)...(19): siRNA sense strand
gagagaugguggauuacaa

SEQ ID NO: 566630 - RNA, 19 nt, Homo sapiens
  misc_RNA (1)...(19): siRNA sense strand
aaagggaccucgcgguaaa

SEQ ID NO: 566631 - RNA, 19 nt, Homo sapiens
  misc_RNA (1)...(19): siRNA sense strand
gaugguggauuacaaugga

SEQ ID NO: 566632 - RNA, 19 nt, Homo sapiens
  misc_RNA (1)...(19): siRNA sense strand
ggauuacaauggaaacauc

SEQ ID NO: 566633 - RNA, 19 nt, Homo sapiens
  misc_RNA (1)...(19): siRNA sense strand
caagggagaaccagggaaa

SEQ ID NO: 566634 - RNA, 19 nt, Homo sapiens
  misc_RNA (1)...(19): siRNA sense strand
ggaagcaggacuagaugga

SEQ ID NO: 566635 - RNA, 19 nt, Homo sapiens
  misc_RNA (1)...(19): siRNA sense strand
caaggcugcuggaacaagu

SEQ ID NO: 566636 - RNA, 19 nt, Homo sapiens
  misc_RNA (1)...(19): siRNA sense strand
gggagaagcaggugucgau

SEQ ID NO: 566637 - RNA, 19 nt, Homo sapiens
  misc_RNA (1)...(19): siRNA sense strand
ggagaacagggaccagaug

SEQ ID NO: 566638 - RNA, 19 nt, Homo sapiens
  misc_RNA (1)...(19): siRNA sense strand
acaauggaaacaucaauga

SEQ ID NO: 566639 - RNA, 19 nt, Homo sapiens
  misc_RNA (1)...(19): siRNA sense strand
gaaaggagagaugguggau

SEQ ID NO: 566640 - RNA, 19 nt, Homo sapiens
  misc_RNA (1)...(19): siRNA sense strand
cuagagguuucccuggauu

SEQ ID NO: 566641 - RNA, 19 nt, Homo sapiens
  misc_RNA (1)...(19): siRNA sense strand
gcaaauggagacggcuauu

SEQ ID NO: 566642 - RNA, 19 nt, Homo sapiens
  misc_RNA (1)...(19): siRNA sense strand
gaaaggcuuccagggagaa

SEQ ID NO: 566643 - RNA, 19 nt, Homo sapiens
  misc_RNA (1)...(19): siRNA sense strand
gcagcugggcuuccugguu

SEQ ID NO: 566644 - RNA, 19 nt, Homo sapiens
  misc_RNA (1)...(19): siRNA sense strand
ggagagaugguggauuaca

SEQ ID NO: 566645 - RNA, 19 nt, Homo sapiens
  misc_RNA (1)...(19): siRNA sense strand
gaugcuggcaacuccauug

SEQ ID NO: 566646 - RNA, 19 nt, Homo sapiens
  misc_RNA (1)...(19): siRNA sense strand
gcguggagcagcuggagaa

SEQ ID NO: 566647 - RNA, 19 nt, Homo sapiens
  misc_RNA (1)...(19): siRNA sense strand
uggagcagcuggagaacag

SEQ ID NO: 566648 - RNA, 19 nt, Homo sapiens
  misc_RNA (1)...(19): siRNA sense strand
ggauuuccgggucccauug

SEQ ID NO: 566649 - RNA, 19 nt, Homo sapiens
  misc_RNA (1)...(19): siRNA sense strand
gagaugguggauuacaaug

SEQ ID NO: 566650 - RNA, 19 nt, Homo sapiens
  misc_RNA (1)...(19): siRNA sense strand
uagcggagcgcacccacaa

SEQ ID NO: 566651 - RNA, 19 nt, Homo sapiens
  misc_RNA (1)...(19): siRNA sense strand
gggagaaccagggaaagga

SEQ ID NO: 566652 - RNA, 19 nt, Homo sapiens
  misc_RNA (1)...(19): siRNA sense strand
gagccaggccagcauccaa

SEQ ID NO: 566653 - RNA, 19 nt, Homo sapiens
  misc_RNA (1)...(19): siRNA sense strand
gguacuccaggaccaauug

SEQ ID NO: 566654 - RNA, 19 nt, Homo sapiens
  misc_RNA (1)...(19): siRNA sense strand
aaaggagacccugggauga

SEQ ID NO: 566655 - RNA, 19 nt, Homo sapiens
  misc_RNA (1)...(19): siRNA sense strand
gagccagggaucccaggaa

SEQ ID NO: 566656 - RNA, 19 nt, Homo sapiens
  misc_RNA (1)...(19): siRNA sense strand
gaaccagggaaaggagaga

SEQ ID NO: 566657 - RNA, 19 nt, Homo sapiens
  misc_RNA (1)...(19): siRNA sense strand
gauuacaauggaaacauca

SEQ ID NO: 566658 - RNA, 19 nt, Homo sapiens
  misc_RNA (1)...(19): siRNA sense strand
ggucaaccaggaacuagag

SEQ ID NO: 566659 - RNA, 19 nt, Homo sapiens
  misc_RNA (1)...(19): siRNA sense strand
aaggagagaugguggauua

SEQ ID NO: 566660 - RNA, 19 nt, Homo sapiens
  misc_RNA (1)...(19): siRNA sense strand
cagcugggcuuccugguuu

SEQ ID NO: 566661 - RNA, 19 nt, Homo sapiens
  misc_RNA (1)...(19): siRNA sense strand
ccaaagacaucuccaggau

SEQ ID NO: 566662 - RNA, 19 nt, Homo sapiens
  misc_RNA (1)...(19): siRNA sense strand
gagagaugguggauuacaa

SEQ ID NO: 566663 - RNA, 19 nt, Homo sapiens
  misc_RNA (1)...(19): siRNA sense strand
aaagggaccucgcgguaaa

SEQ ID NO: 566664 - RNA, 19 nt, Homo sapiens
  misc_RNA (1)...(19): siRNA sense strand
gaugguggauuacaaugga

SEQ ID NO: 566665 - RNA, 19 nt, Homo sapiens
  misc_RNA (1)...(19): siRNA sense strand
ggauuacaauggaaacauc

SEQ ID NO: 566666 - RNA, 19 nt, Homo sapiens
  misc_RNA (1)...(19): siRNA sense strand
caagggagaaccagggaaa

SEQ ID NO: 566667 - RNA, 19 nt, Homo sapiens
  misc_RNA (1)...(19): siRNA sense strand
ggaagcaggacuagaugga

SEQ ID NO: 566668 - RNA, 19 nt, Homo sapiens
  misc_RNA (1)...(19): siRNA sense strand
caaggcugcuggaacaagu

SEQ ID NO: 566669 - RNA, 19 nt, Homo sapiens
  misc_RNA (1)...(19): siRNA sense strand
gggagaagcaggugucgau

SEQ ID NO: 566670 - RNA, 19 nt, Homo sapiens
  misc_RNA (1)...(19): siRNA sense strand
ggagaacagggaccagaug

SEQ ID NO: 566671 - RNA, 19 nt, Homo sapiens
  misc_RNA (1)...(19): siRNA sense strand
acaauggaaacaucaauga

SEQ ID NO: 566672 - RNA, 19 nt, Homo sapiens
  misc_RNA (1)...(19): siRNA sense strand
gaaaggagagaugguggau

SEQ ID NO: 566673 - RNA, 19 nt, Homo sapiens
  misc_RNA (1)...(19): siRNA sense strand
cuagagguuucccuggauu

SEQ ID NO: 566674 - RNA, 19 nt, Homo sapiens
  misc_RNA (1)...(19): siRNA sense strand
gcaaauggagacggcuauu

SEQ ID NO: 566675 - RNA, 19 nt, Homo sapiens
  misc_RNA (1)...(19): siRNA sense strand
gaaaggcuuccagggagaa

SEQ ID NO: 566676 - RNA, 19 nt, Homo sapiens
  misc_RNA (1)...(19): siRNA sense strand
gcagcugggcuuccugguu

SEQ ID NO: 566677 - RNA, 19 nt, Homo sapiens
  misc_RNA (1)...(19): siRNA sense strand
ggagagaugguggauuaca

SEQ ID NO: 566678 - RNA, 19 nt, Homo sapiens
  misc_RNA (1)...(19): siRNA sense strand
gaugcuggcaacuccauug

SEQ ID NO: 566679 - RNA, 19 nt, Homo sapiens
  misc_RNA (1)...(19): siRNA sense strand
gcguggagcagcuggagaa

SEQ ID NO: 566680 - RNA, 19 nt, Homo sapiens
  misc_RNA (1)...(19): siRNA sense strand
uggagcagcuggagaacag

SEQ ID NO: 566681 - RNA, 19 nt, Homo sapiens
  misc_RNA (1)...(19): siRNA sense strand
ggauuuccgggucccauug

SEQ ID NO: 566682 - RNA, 19 nt, Homo sapiens
  misc_RNA (1)...(19): siRNA sense strand
gagaugguggauuacaaug

SEQ ID NO: 566683 - RNA, 19 nt, Homo sapiens
  misc_RNA (1)...(19): siRNA sense strand
uagcggagcgcacccacaa

SEQ ID NO: 566684 - RNA, 19 nt, Homo sapiens
  misc_RNA (1)...(19): siRNA sense strand
gggagaaccagggaaagga

SEQ ID NO: 566685 - RNA, 19 nt, Homo sapiens
  misc_RNA (1)...(19): siRNA sense strand
gagccaggccagcauccaa

SEQ ID NO: 566686 - RNA, 19 nt, Homo sapiens
  misc_RNA (1)...(19): siRNA sense strand
gguacuccaggaccaauug

SEQ ID NO: 566687 - RNA, 19 nt, Homo sapiens
  misc_RNA (1)...(19): siRNA sense strand
aaaggagacccugggauga

SEQ ID NO: 566688 - RNA, 19 nt, Homo sapiens
  misc_RNA (1)...(19): siRNA sense strand
gagccagggaucccaggaa

SEQ ID NO: 566689 - RNA, 19 nt, Homo sapiens
  misc_RNA (1)...(19): siRNA sense strand
gaaccagggaaaggagaga

SEQ ID NO: 566690 - RNA, 19 nt, Homo sapiens
  misc_RNA (1)...(19): siRNA sense strand
gauuacaauggaaacauca

SEQ ID NO: 566691 - RNA, 19 nt, Homo sapiens
  misc_RNA (1)...(19): siRNA sense strand
ggucaaccaggaacuagag

SEQ ID NO: 566692 - RNA, 19 nt, Homo sapiens
  misc_RNA (1)...(19): siRNA sense strand
aaggagagaugguggauua

SEQ ID NO: 566693 - RNA, 19 nt, Homo sapiens
  misc_RNA (1)...(19): siRNA sense strand
cagcugggcuuccugguuu

SEQ ID NO: 566694 - RNA, 19 nt, Homo sapiens
  misc_RNA (1)...(19): siRNA sense strand
ccaaagacaucuccaggau

SEQ ID NO: 566695 - RNA, 19 nt, Homo sapiens
  misc_RNA (1)...(19): siRNA sense strand
gagagaugguggauuacaa

SEQ ID NO: 566696 - RNA, 19 nt, Homo sapiens
  misc_RNA (1)...(19): siRNA sense strand
aaagggaccucgcgguaaa

SEQ ID NO: 566697 - RNA, 19 nt, Homo sapiens
  misc_RNA (1)...(19): siRNA sense strand
gaugguggauuacaaugga

SEQ ID NO: 566698 - RNA, 19 nt, Homo sapiens
  misc_RNA (1)...(19): siRNA sense strand
ggauuacaauggaaacauc

SEQ ID NO: 566699 - RNA, 19 nt, Homo sapiens
  misc_RNA (1)...(19): siRNA sense strand
gggcgaagauggcuuacca

SEQ ID NO: 566700 - RNA, 19 nt, Homo sapiens
  misc_RNA (1)...(19): siRNA sense strand
caagggagaaccagggaaa

SEQ ID NO: 566701 - RNA, 19 nt, Homo sapiens
  misc_RNA (1)...(19): siRNA sense strand
ggaagcaggacuagaugga

SEQ ID NO: 566702 - RNA, 19 nt, Homo sapiens
  misc_RNA (1)...(19): siRNA sense strand
caaggcugcuggaacaagu

SEQ ID NO: 566703 - RNA, 19 nt, Homo sapiens
  misc_RNA (1)...(19): siRNA sense strand
gggagaagcaggugucgau

SEQ ID NO: 566704 - RNA, 19 nt, Homo sapiens
  misc_RNA (1)...(19): siRNA sense strand
ggagaacagggaccagaug

SEQ ID NO: 566705 - RNA, 19 nt, Homo sapiens
  misc_RNA (1)...(19): siRNA sense strand
acaauggaaacaucaauga

SEQ ID NO: 566706 - RNA, 19 nt, Homo sapiens
  misc_RNA (1)...(19): siRNA sense strand
gaaaggagagaugguggau

SEQ ID NO: 566707 - RNA, 19 nt, Homo sapiens
  misc_RNA (1)...(19): siRNA sense strand
cuagagguuucccuggauu

SEQ ID NO: 566708 - RNA, 19 nt, Homo sapiens
  misc_RNA (1)...(19): siRNA sense strand
gcaaauggagacggcuauu

SEQ ID NO: 566709 - RNA, 19 nt, Homo sapiens
  misc_RNA (1)...(19): siRNA sense strand
gaaaggcuuccagggagaa

SEQ ID NO: 566710 - RNA, 19 nt, Homo sapiens
  misc_RNA (1)...(19): siRNA sense strand
gcagcugggcuuccugguu

SEQ ID NO: 566711 - RNA, 19 nt, Homo sapiens
  misc_RNA (1)...(19): siRNA sense strand
ggagagaugguggauuaca

SEQ ID NO: 566712 - RNA, 19 nt, Homo sapiens
  misc_RNA (1)...(19): siRNA sense strand
gaugcuggcaacuccauug

SEQ ID NO: 566713 - RNA, 19 nt, Homo sapiens
  misc_RNA (1)...(19): siRNA sense strand
gcguggagcagcuggagaa

SEQ ID NO: 566714 - RNA, 19 nt, Homo sapiens
  misc_RNA (1)...(19): siRNA sense strand
uggagcagcuggagaacag

SEQ ID NO: 566715 - RNA, 19 nt, Homo sapiens
  misc_RNA (1)...(19): siRNA sense strand
ggauuuccgggucccauug

SEQ ID NO: 566716 - RNA, 19 nt, Homo sapiens
  misc_RNA (1)...(19): siRNA sense strand
gagaugguggauuacaaug

SEQ ID NO: 566717 - RNA, 19 nt, Homo sapiens
  misc_RNA (1)...(19): siRNA sense strand
uagcggagcgcacccacaa

SEQ ID NO: 566718 - RNA, 19 nt, Homo sapiens
  misc_RNA (1)...(19): siRNA sense strand
gggagaaccagggaaagga

SEQ ID NO: 566719 - RNA, 19 nt, Homo sapiens
  misc_RNA (1)...(19): siRNA sense strand
gagccaggccagcauccaa

SEQ ID NO: 566720 - RNA, 19 nt, Homo sapiens
  misc_RNA (1)...(19): siRNA sense strand
gguacuccaggaccaauug

SEQ ID NO: 566721 - RNA, 19 nt, Homo sapiens
  misc_RNA (1)...(19): siRNA sense strand
aaaggagacccugggauga

SEQ ID NO: 566722 - RNA, 19 nt, Homo sapiens
  misc_RNA (1)...(19): siRNA sense strand
gagccagggaucccaggaa

SEQ ID NO: 566723 - RNA, 19 nt, Homo sapiens
  misc_RNA (1)...(19): siRNA sense strand
gaaccagggaaaggagaga

SEQ ID NO: 566724 - RNA, 19 nt, Homo sapiens
  misc_RNA (1)...(19): siRNA sense strand
gauuacaauggaaacauca

SEQ ID NO: 566725 - RNA, 19 nt, Homo sapiens
  misc_RNA (1)...(19): siRNA sense strand
ggucaaccaggaacuagag

SEQ ID NO: 566726 - RNA, 19 nt, Homo sapiens
  misc_RNA (1)...(19): siRNA sense strand
guaaagaacagaagccaaa

SEQ ID NO: 566727 - RNA, 19 nt, Homo sapiens
  misc_RNA (1)...(19): siRNA sense strand
gcaaugaggaggcaccuaa

SEQ ID NO: 566728 - RNA, 19 nt, Homo sapiens
  misc_RNA (1)...(19): siRNA sense strand
gaccgaagccugaauguga

SEQ ID NO: 566729 - RNA, 19 nt, Homo sapiens
  misc_RNA (1)...(19): siRNA sense strand
gaacaggagcccacugaga

SEQ ID NO: 566730 - RNA, 19 nt, Homo sapiens
  misc_RNA (1)...(19): siRNA sense strand
cgaccagccucuucugaaa

SEQ ID NO: 566731 - RNA, 19 nt, Homo sapiens
  misc_RNA (1)...(19): siRNA sense strand
caacaacagguuuaugauu

SEQ ID NO: 566732 - RNA, 19 nt, Homo sapiens
  misc_RNA (1)...(19): siRNA sense strand
ugagaaagcugcaaaucca

SEQ ID NO: 566733 - RNA, 19 nt, Homo sapiens
  misc_RNA (1)...(19): siRNA sense strand
cgccgucacuguuguauaa

SEQ ID NO: 566734 - RNA, 19 nt, Homo sapiens
  misc_RNA (1)...(19): siRNA sense strand
gcgauggccugaccuugaa

SEQ ID NO: 566735 - RNA, 19 nt, Homo sapiens
  misc_RNA (1)...(19): siRNA sense strand
gauaaaggguagaauugag

SEQ ID NO: 566736 - RNA, 19 nt, Homo sapiens
  misc_RNA (1)...(19): siRNA sense strand
gaugacaccuccgauagug

SEQ ID NO: 566737 - RNA, 19 nt, Homo sapiens
  misc_RNA (1)...(19): siRNA sense strand
caagagaccagcuccagaa

SEQ ID NO: 566738 - RNA, 19 nt, Homo sapiens
  misc_RNA (1)...(19): siRNA sense strand
gcaagaagaaacucaagau

SEQ ID NO: 566739 - RNA, 19 nt, Homo sapiens
  misc_RNA (1)...(19): siRNA sense strand
gagcaguuccugaccauug

SEQ ID NO: 566740 - RNA, 19 nt, Homo sapiens
  misc_RNA (1)...(19): siRNA sense strand
ugaggagccuggagacuug

SEQ ID NO: 566741 - RNA, 19 nt, Homo sapiens
  misc_RNA (1)...(19): siRNA sense strand
gacuauaucugcccaaacu

SEQ ID NO: 566742 - RNA, 19 nt, Homo sapiens
  misc_RNA (1)...(19): siRNA sense strand
gggcgagcgaucacaauua

SEQ ID NO: 566743 - RNA, 19 nt, Homo sapiens
  misc_RNA (1)...(19): siRNA sense strand
ggauaaaggguagaauuga

SEQ ID NO: 566744 - RNA, 19 nt, Homo sapiens
  misc_RNA (1)...(19): siRNA sense strand
gggauaaaggguagaauug

SEQ ID NO: 566745 - RNA, 19 nt, Homo sapiens
  misc_RNA (1)...(19): siRNA sense strand
gaucuuccagccugugaua

SEQ ID NO: 566746 - RNA, 19 nt, Homo sapiens
  misc_RNA (1)...(19): siRNA sense strand
cagcaaagaguucaggaaa

SEQ ID NO: 566747 - RNA, 19 nt, Homo sapiens
  misc_RNA (1)...(19): siRNA sense strand
uagcgaagaccaagggaua

SEQ ID NO: 566748 - RNA, 19 nt, Homo sapiens
  misc_RNA (1)...(19): siRNA sense strand
ugacagagagaguaaguug

SEQ ID NO: 566749 - RNA, 19 nt, Homo sapiens
  misc_RNA (1)...(19): siRNA sense strand
gaauugagaaagcugcaaa

SEQ ID NO: 566750 - RNA, 19 nt, Homo sapiens
  misc_RNA (1)...(19): siRNA sense strand
guacaaguauaggaacaau

SEQ ID NO: 566751 - RNA, 19 nt, Homo sapiens
  misc_RNA (1)...(19): siRNA sense strand
agaguaaguuggagggaaa

SEQ ID NO: 566752 - RNA, 19 nt, Homo sapiens
  misc_RNA (1)...(19): siRNA sense strand
acaacagguuuaugauuug

SEQ ID NO: 566753 - RNA, 19 nt, Homo sapiens
  misc_RNA (1)...(19): siRNA sense strand
cacaacaacagguuuauga

SEQ ID NO: 566754 - RNA, 19 nt, Homo sapiens
  misc_RNA (1)...(19): siRNA sense strand
caucaaacccaccagcaaa

SEQ ID NO: 566755 - RNA, 19 nt, Homo sapiens
  misc_RNA (1)...(19): siRNA sense strand
gaaaggcggcucaggacau

SEQ ID NO: 566756 - RNA, 19 nt, Homo sapiens
  misc_RNA (1)...(19): siRNA sense strand
cagaucagcaggaagcuaa

SEQ ID NO: 566757 - RNA, 19 nt, Homo sapiens
  misc_RNA (1)...(19): siRNA sense strand
uaaugacuguauccucaaa

SEQ ID NO: 566758 - RNA, 19 nt, Homo sapiens
  misc_RNA (1)...(19): siRNA sense strand
gaagccaaagccuaaagaa

SEQ ID NO: 566759 - RNA, 19 nt, Homo sapiens
  misc_RNA (1)...(19): siRNA sense strand
guggaaagcgcuucugaga

SEQ ID NO: 566760 - RNA, 19 nt, Homo sapiens
  misc_RNA (1)...(19): siRNA sense strand
acaaugaaguuucuaagcu

SEQ ID NO: 566761 - RNA, 19 nt, Homo sapiens
  misc_RNA (1)...(19): siRNA sense strand
gaacaauagagcagaaguc

SEQ ID NO: 566762 - RNA, 19 nt, Homo sapiens
  misc_RNA (1)...(19): siRNA sense strand
gaagaugaagccagagaag

SEQ ID NO: 566763 - RNA, 19 nt, Homo sapiens
  misc_RNA (1)...(19): siRNA sense strand
gugaagcacucgggaagga

SEQ ID NO: 566764 - RNA, 19 nt, Homo sapiens
  misc_RNA (1)...(19): siRNA sense strand
gggaacaggagcccacuga

SEQ ID NO: 566765 - RNA, 19 nt, Homo sapiens
  misc_RNA (1)...(19): siRNA sense strand
gcaccgauuguacaaguau

SEQ ID NO: 566766 - RNA, 19 nt, Homo sapiens
  misc_RNA (1)...(19): siRNA sense strand
gaaagaugacagagagagu

SEQ ID NO: 566767 - RNA, 19 nt, Homo sapiens
  misc_RNA (1)...(19): siRNA sense strand
cagagucgccugcggaaga

SEQ ID NO: 566768 - RNA, 19 nt, Homo sapiens
  misc_RNA (1)...(19): siRNA sense strand
ccucacaacaacagguuua

SEQ ID NO: 566769 - RNA, 19 nt, Homo sapiens
  misc_RNA (1)...(19): siRNA sense strand
gcugauggcaccgauugua

SEQ ID NO: 566770 - RNA, 19 nt, Homo sapiens
  misc_RNA (1)...(19): siRNA sense strand
ggcgagcgaucacaauuac

SEQ ID NO: 566771 - RNA, 19 nt, Homo sapiens
  misc_RNA (1)...(19): siRNA sense strand
uuucuaagcucagguaaag

SEQ ID NO: 566772 - RNA, 19 nt, Homo sapiens
  misc_RNA (1)...(19): siRNA sense strand
gcaaauccaaguggcaaga

SEQ ID NO: 566773 - RNA, 19 nt, Homo sapiens
  misc_RNA (1)...(19): siRNA sense strand
acaaguauaggaacaauag

SEQ ID NO: 566774 - RNA, 19 nt, Homo sapiens
  misc_RNA (1)...(19): siRNA sense strand
aaagaugacagagagagua

SEQ ID NO: 566775 - RNA, 19 nt, Homo sapiens
  misc_RNA (1)...(19): siRNA sense strand
gcaaagaguucaggaaaac

SEQ ID NO: 566776 - RNA, 19 nt, Homo sapiens
  misc_RNA (1)...(19): siRNA sense strand
ccaacgcccuguauugcau

SEQ ID NO: 566777 - RNA, 19 nt, Homo sapiens
  misc_RNA (1)...(19): siRNA sense strand
guaagcaggagcccgagaa

SEQ ID NO: 566778 - RNA, 19 nt, Homo sapiens
  misc_RNA (1)...(19): siRNA sense strand
cgucacuguuguauaaaug

SEQ ID NO: 566779 - RNA, 19 nt, Homo sapiens
  misc_RNA (1)...(19): siRNA sense strand
ucacaauuacaaugcagua

SEQ ID NO: 566780 - RNA, 19 nt, Homo sapiens
  misc_RNA (1)...(19): siRNA sense strand
cagcgacaaugaaguuucu

SEQ ID NO: 566781 - RNA, 19 nt, Homo sapiens
  misc_RNA (1)...(19): siRNA sense strand
gcgaagaccaagggauaaa

SEQ ID NO: 566782 - RNA, 19 nt, Homo sapiens
  misc_RNA (1)...(19): siRNA sense strand
uaggaacaauagagcagaa

SEQ ID NO: 566783 - RNA, 19 nt, Homo sapiens
  misc_RNA (1)...(19): siRNA sense strand
gcgauugugugggcauuuc

SEQ ID NO: 566784 - RNA, 19 nt, Homo sapiens
  misc_RNA (1)...(19): siRNA sense strand
aacagaagccaaagccuaa

SEQ ID NO: 566785 - RNA, 19 nt, Homo sapiens
  misc_RNA (1)...(19): siRNA sense strand
ucuaagcucagguaaagaa

SEQ ID NO: 566786 - RNA, 19 nt, Homo sapiens
  misc_RNA (1)...(19): siRNA sense strand
gcgacaaugaaguuucuaa

SEQ ID NO: 566787 - RNA, 19 nt, Homo sapiens
  misc_RNA (1)...(19): siRNA sense strand
caagaagaaacucaagauc

SEQ ID NO: 566788 - RNA, 19 nt, Homo sapiens
  misc_RNA (1)...(19): siRNA sense strand
gauuguacaaguauaggaa

SEQ ID NO: 566789 - RNA, 19 nt, Homo sapiens
  misc_RNA (1)...(19): siRNA sense strand
aaagagaccacagugaaga

SEQ ID NO: 566790 - RNA, 19 nt, Homo sapiens
  misc_RNA (1)...(19): siRNA sense strand
cgagcgaucacaauuacaa

SEQ ID NO: 566791 - RNA, 19 nt, Homo sapiens
  misc_RNA (1)...(19): siRNA sense strand
ugaccgcugugaagaaugg

SEQ ID NO: 566792 - RNA, 19 nt, Homo sapiens
  misc_RNA (1)...(19): siRNA sense strand
gaacgaccagccucuucug

SEQ ID NO: 566793 - RNA, 19 nt, Homo sapiens
  misc_RNA (1)...(19): siRNA sense strand
gaaagcugcaaauccaagu

SEQ ID NO: 566794 - RNA, 19 nt, Homo sapiens
  misc_RNA (1)...(19): siRNA sense strand
gaagaccaagggauaaagg

SEQ ID NO: 566795 - RNA, 19 nt, Homo sapiens
  misc_RNA (1)...(19): siRNA sense strand
gguuuaugauuugcuguga

SEQ ID NO: 566796 - RNA, 19 nt, Homo sapiens
  misc_RNA (1)...(19): siRNA sense strand
acagagagaguaaguugga

SEQ ID NO: 566797 - RNA, 19 nt, Homo sapiens
  misc_RNA (1)...(19): siRNA sense strand
gaugacagagagaguaagu

SEQ ID NO: 566798 - RNA, 19 nt, Homo sapiens
  misc_RNA (1)...(19): siRNA sense strand
ggcaccgauuguacaagua

SEQ ID NO: 566799 - RNA, 19 nt, Homo sapiens
  misc_RNA (1)...(19): siRNA sense strand
caccgauuguacaaguaua

SEQ ID NO: 566800 - RNA, 19 nt, Homo sapiens
  misc_RNA (1)...(19): siRNA sense strand
gagaaagcugcaaauccaa

SEQ ID NO: 566801 - RNA, 19 nt, Homo sapiens
  misc_RNA (1)...(19): siRNA sense strand
uaaaggguagaauugagaa

SEQ ID NO: 566802 - RNA, 19 nt, Homo sapiens
  misc_RNA (1)...(19): siRNA sense strand
ggaacgaccagccucuucu

SEQ ID NO: 566803 - RNA, 19 nt, Homo sapiens
  misc_RNA (1)...(19): siRNA sense strand
ccgcagcgacaaugaaguu

SEQ ID NO: 566804 - RNA, 19 nt, Homo sapiens
  misc_RNA (1)...(19): siRNA sense strand
aagaagaaacucaagaucu

SEQ ID NO: 566805 - RNA, 19 nt, Homo sapiens
  misc_RNA (1)...(19): siRNA sense strand
gcagaucagcaggaagcua

SEQ ID NO: 566806 - RNA, 19 nt, Homo sapiens
  misc_RNA (1)...(19): siRNA sense strand
ugcccaaacugcaccauuc

SEQ ID NO: 566807 - RNA, 19 nt, Homo sapiens
  misc_RNA (1)...(19): siRNA sense strand
agaaucgccuucgcaggaa

SEQ ID NO: 566808 - RNA, 19 nt, Homo sapiens
  misc_RNA (1)...(19): siRNA sense strand
gcagcgacaaugaaguuuc

SEQ ID NO: 566809 - RNA, 19 nt, Homo sapiens
  misc_RNA (1)...(19): siRNA sense strand
uggcaccgauuguacaagu

SEQ ID NO: 566810 - RNA, 19 nt, Homo sapiens
  misc_RNA (1)...(19): siRNA sense strand
caacagguuuaugauuugc

SEQ ID NO: 566811 - RNA, 19 nt, Homo sapiens
  misc_RNA (1)...(19): siRNA sense strand
cacgaugacaccuccgaua

SEQ ID NO: 566812 - RNA, 19 nt, Homo sapiens
  misc_RNA (1)...(19): siRNA sense strand
aagccaaagccuaaagaaa

SEQ ID NO: 566813 - RNA, 19 nt, Homo sapiens
  misc_RNA (1)...(19): siRNA sense strand
gcucagguaaagaacagaa

SEQ ID NO: 566814 - RNA, 19 nt, Homo sapiens
  misc_RNA (1)...(19): siRNA sense strand
guaaugacuguauccucaa

SEQ ID NO: 566815 - RNA, 19 nt, Homo sapiens
  misc_RNA (1)...(19): siRNA sense strand
ggcaagaagaaacucaaga

SEQ ID NO: 566816 - RNA, 19 nt, Homo sapiens
  misc_RNA (1)...(19): siRNA sense strand
ggaacaauagagcagaagu

SEQ ID NO: 566817 - RNA, 19 nt, Homo sapiens
  misc_RNA (1)...(19): siRNA sense strand
gauggcaccgauuguacaa

SEQ ID NO: 566818 - RNA, 19 nt, Homo sapiens
  misc_RNA (1)...(19): siRNA sense strand
aagaugacagagagaguaa

SEQ ID NO: 566819 - RNA, 19 nt, Homo sapiens
  misc_RNA (1)...(19): siRNA sense strand
aagacuauaucugcccaaa

SEQ ID NO: 566820 - RNA, 19 nt, Homo sapiens
  misc_RNA (1)...(19): siRNA sense strand
aaaggcggcucaggacauc

SEQ ID NO: 566821 - RNA, 19 nt, Homo sapiens
  misc_RNA (1)...(19): siRNA sense strand
caaaggcgacccgagcaau

SEQ ID NO: 566822 - RNA, 19 nt, Homo sapiens
  misc_RNA (1)...(19): siRNA sense strand
gcaccuaaggccaucaaac

SEQ ID NO: 566823 - RNA, 19 nt, Homo sapiens
  misc_RNA (1)...(19): siRNA sense strand
caagggauaaaggguagaa

SEQ ID NO: 566824 - RNA, 19 nt, Homo sapiens
  misc_RNA (1)...(19): siRNA sense strand
ggaauggggaagacuauau

SEQ ID NO: 566825 - RNA, 19 nt, Homo sapiens
  misc_RNA (1)...(19): siRNA sense strand
caaauccaaguggcaagaa

SEQ ID NO: 566826 - RNA, 19 nt, Homo sapiens
  misc_RNA (1)...(19): siRNA sense strand
guaaagaacagaagccaaa

SEQ ID NO: 566827 - RNA, 19 nt, Homo sapiens
  misc_RNA (1)...(19): siRNA sense strand
gcaaugaggaggcaccuaa

SEQ ID NO: 566828 - RNA, 19 nt, Homo sapiens
  misc_RNA (1)...(19): siRNA sense strand
gaccgaagccugaauguga

SEQ ID NO: 566829 - RNA, 19 nt, Homo sapiens
  misc_RNA (1)...(19): siRNA sense strand
gaacaggagcccacugaga

SEQ ID NO: 566830 - RNA, 19 nt, Homo sapiens
  misc_RNA (1)...(19): siRNA sense strand
cgaccagccucuucugaaa

SEQ ID NO: 566831 - RNA, 19 nt, Homo sapiens
  misc_RNA (1)...(19): siRNA sense strand
caacaacagguuuaugauu

SEQ ID NO: 566832 - RNA, 19 nt, Homo sapiens
  misc_RNA (1)...(19): siRNA sense strand
ugagaaagcugcaaaucca

SEQ ID NO: 566833 - RNA, 19 nt, Homo sapiens
  misc_RNA (1)...(19): siRNA sense strand
cgccgucacuguuguauaa

SEQ ID NO: 566834 - RNA, 19 nt, Homo sapiens
  misc_RNA (1)...(19): siRNA sense strand
gcgauggccugaccuugaa

SEQ ID NO: 566835 - RNA, 19 nt, Homo sapiens
  misc_RNA (1)...(19): siRNA sense strand
gauaaaggguagaauugag

SEQ ID NO: 566836 - RNA, 19 nt, Homo sapiens
  misc_RNA (1)...(19): siRNA sense strand
gaugacaccuccgauagug

SEQ ID NO: 566837 - RNA, 19 nt, Homo sapiens
  misc_RNA (1)...(19): siRNA sense strand
caagagaccagcuccagaa

SEQ ID NO: 566838 - RNA, 19 nt, Homo sapiens
  misc_RNA (1)...(19): siRNA sense strand
gcaagaagaaacucaagau

SEQ ID NO: 566839 - RNA, 19 nt, Homo sapiens
  misc_RNA (1)...(19): siRNA sense strand
gagcaguuccugaccauug

SEQ ID NO: 566840 - RNA, 19 nt, Homo sapiens
  misc_RNA (1)...(19): siRNA sense strand
ugaggagccuggagacuug

SEQ ID NO: 566841 - RNA, 19 nt, Homo sapiens
  misc_RNA (1)...(19): siRNA sense strand
gacuauaucugcccaaacu

SEQ ID NO: 566842 - RNA, 19 nt, Homo sapiens
  misc_RNA (1)...(19): siRNA sense strand
gggcgagcgaucacaauua

SEQ ID NO: 566843 - RNA, 19 nt, Homo sapiens
  misc_RNA (1)...(19): siRNA sense strand
ggauaaaggguagaauuga

SEQ ID NO: 566844 - RNA, 19 nt, Homo sapiens
  misc_RNA (1)...(19): siRNA sense strand
gggauaaaggguagaauug

SEQ ID NO: 566845 - RNA, 19 nt, Homo sapiens
  misc_RNA (1)...(19): siRNA sense strand
gaucuuccagccugugaua

SEQ ID NO: 566846 - RNA, 19 nt, Homo sapiens
  misc_RNA (1)...(19): siRNA sense strand
cagcaaagaguucaggaaa

SEQ ID NO: 566847 - RNA, 19 nt, Homo sapiens
  misc_RNA (1)...(19): siRNA sense strand
uagcgaagaccaagggaua

SEQ ID NO: 566848 - RNA, 19 nt, Homo sapiens
  misc_RNA (1)...(19): siRNA sense strand
ugacagagagaguaaguug

SEQ ID NO: 566849 - RNA, 19 nt, Homo sapiens
  misc_RNA (1)...(19): siRNA sense strand
gaauugagaaagcugcaaa

SEQ ID NO: 566850 - RNA, 19 nt, Homo sapiens
  misc_RNA (1)...(19): siRNA sense strand
guacaaguauaggaacaau

SEQ ID NO: 566851 - RNA, 19 nt, Homo sapiens
  misc_RNA (1)...(19): siRNA sense strand
agaguaaguuggagggaaa

SEQ ID NO: 566852 - RNA, 19 nt, Homo sapiens
  misc_RNA (1)...(19): siRNA sense strand
acaacagguuuaugauuug

SEQ ID NO: 566853 - RNA, 19 nt, Homo sapiens
  misc_RNA (1)...(19): siRNA sense strand
cacaacaacagguuuauga

SEQ ID NO: 566854 - RNA, 19 nt, Homo sapiens
  misc_RNA (1)...(19): siRNA sense strand
caucaaacccaccagcaaa

SEQ ID NO: 566855 - RNA, 19 nt, Homo sapiens
  misc_RNA (1)...(19): siRNA sense strand
gaaaggcggcucaggacau

SEQ ID NO: 566856 - RNA, 19 nt, Homo sapiens
  misc_RNA (1)...(19): siRNA sense strand
cagaucagcaggaagcuaa

SEQ ID NO: 566857 - RNA, 19 nt, Homo sapiens
  misc_RNA (1)...(19): siRNA sense strand
uaaugacuguauccucaaa

SEQ ID NO: 566858 - RNA, 19 nt, Homo sapiens
  misc_RNA (1)...(19): siRNA sense strand
gaagccaaagccuaaagaa

SEQ ID NO: 566859 - RNA, 19 nt, Homo sapiens
  misc_RNA (1)...(19): siRNA sense strand
guggaaagcgcuucugaga

SEQ ID NO: 566860 - RNA, 19 nt, Homo sapiens
  misc_RNA (1)...(19): siRNA sense strand
acaaugaaguuucuaagcu

SEQ ID NO: 566861 - RNA, 19 nt, Homo sapiens
  misc_RNA (1)...(19): siRNA sense strand
gaacaauagagcagaaguc

SEQ ID NO: 566862 - RNA, 19 nt, Homo sapiens
  misc_RNA (1)...(19): siRNA sense strand
gaagaugaagccagagaag

SEQ ID NO: 566863 - RNA, 19 nt, Homo sapiens
  misc_RNA (1)...(19): siRNA sense strand
gugaagcacucgggaagga

SEQ ID NO: 566864 - RNA, 19 nt, Homo sapiens
  misc_RNA (1)...(19): siRNA sense strand
gggaacaggagcccacuga

SEQ ID NO: 566865 - RNA, 19 nt, Homo sapiens
  misc_RNA (1)...(19): siRNA sense strand
gcaccgauuguacaaguau

SEQ ID NO: 566866 - RNA, 19 nt, Homo sapiens
  misc_RNA (1)...(19): siRNA sense strand
gaaagaugacagagagagu

SEQ ID NO: 566867 - RNA, 19 nt, Homo sapiens
  misc_RNA (1)...(19): siRNA sense strand
cagagucgccugcggaaga

SEQ ID NO: 566868 - RNA, 19 nt, Homo sapiens
  misc_RNA (1)...(19): siRNA sense strand
ccucacaacaacagguuua

SEQ ID NO: 566869 - RNA, 19 nt, Homo sapiens
  misc_RNA (1)...(19): siRNA sense strand
gcugauggcaccgauugua

SEQ ID NO: 566870 - RNA, 19 nt, Homo sapiens
  misc_RNA (1)...(19): siRNA sense strand
ggcgagcgaucacaauuac

SEQ ID NO: 566871 - RNA, 19 nt, Homo sapiens
  misc_RNA (1)...(19): siRNA sense strand
uuucuaagcucagguaaag

SEQ ID NO: 566872 - RNA, 19 nt, Homo sapiens
  misc_RNA (1)...(19): siRNA sense strand
gcaaauccaaguggcaaga

SEQ ID NO: 566873 - RNA, 19 nt, Homo sapiens
  misc_RNA (1)...(19): siRNA sense strand
acaaguauaggaacaauag

SEQ ID NO: 566874 - RNA, 19 nt, Homo sapiens
  misc_RNA (1)...(19): siRNA sense strand
aaagaugacagagagagua

SEQ ID NO: 566875 - RNA, 19 nt, Homo sapiens
  misc_RNA (1)...(19): siRNA sense strand
gcaaagaguucaggaaaac

SEQ ID NO: 566876 - RNA, 19 nt, Homo sapiens
  misc_RNA (1)...(19): siRNA sense strand
ccaacgcccuguauugcau

SEQ ID NO: 566877 - RNA, 19 nt, Homo sapiens
  misc_RNA (1)...(19): siRNA sense strand
guaagcaggagcccgagaa

SEQ ID NO: 566878 - RNA, 19 nt, Homo sapiens
  misc_RNA (1)...(19): siRNA sense strand
cgucacuguuguauaaaug

SEQ ID NO: 566879 - RNA, 19 nt, Homo sapiens
  misc_RNA (1)...(19): siRNA sense strand
ucacaauuacaaugcagua

SEQ ID NO: 566880 - RNA, 19 nt, Homo sapiens
  misc_RNA (1)...(19): siRNA sense strand
cagcgacaaugaaguuucu

SEQ ID NO: 566881 - RNA, 19 nt, Homo sapiens
  misc_RNA (1)...(19): siRNA sense strand
gcgaagaccaagggauaaa

SEQ ID NO: 566882 - RNA, 19 nt, Homo sapiens
  misc_RNA (1)...(19): siRNA sense strand
uaggaacaauagagcagaa

SEQ ID NO: 566883 - RNA, 19 nt, Homo sapiens
  misc_RNA (1)...(19): siRNA sense strand
gcgauugugugggcauuuc

SEQ ID NO: 566884 - RNA, 19 nt, Homo sapiens
  misc_RNA (1)...(19): siRNA sense strand
aacagaagccaaagccuaa

SEQ ID NO: 566885 - RNA, 19 nt, Homo sapiens
  misc_RNA (1)...(19): siRNA sense strand
ucuaagcucagguaaagaa

SEQ ID NO: 566886 - RNA, 19 nt, Homo sapiens
  misc_RNA (1)...(19): siRNA sense strand
gcgacaaugaaguuucuaa

SEQ ID NO: 566887 - RNA, 19 nt, Homo sapiens
  misc_RNA (1)...(19): siRNA sense strand
caagaagaaacucaagauc

SEQ ID NO: 566888 - RNA, 19 nt, Homo sapiens
  misc_RNA (1)...(19): siRNA sense strand
gauuguacaaguauaggaa

SEQ ID NO: 566889 - RNA, 19 nt, Homo sapiens
  misc_RNA (1)...(19): siRNA sense strand
aaagagaccacagugaaga

SEQ ID NO: 566890 - RNA, 19 nt, Homo sapiens
  misc_RNA (1)...(19): siRNA sense strand
cgagcgaucacaauuacaa

SEQ ID NO: 566891 - RNA, 19 nt, Homo sapiens
  misc_RNA (1)...(19): siRNA sense strand
ugaccgcugugaagaaugg

SEQ ID NO: 566892 - RNA, 19 nt, Homo sapiens
  misc_RNA (1)...(19): siRNA sense strand
gaacgaccagccucuucug

SEQ ID NO: 566893 - RNA, 19 nt, Homo sapiens
  misc_RNA (1)...(19): siRNA sense strand
gaaagcugcaaauccaagu

SEQ ID NO: 566894 - RNA, 19 nt, Homo sapiens
  misc_RNA (1)...(19): siRNA sense strand
gaagaccaagggauaaagg

SEQ ID NO: 566895 - RNA, 19 nt, Homo sapiens
  misc_RNA (1)...(19): siRNA sense strand
gguuuaugauuugcuguga

SEQ ID NO: 566896 - RNA, 19 nt, Homo sapiens
  misc_RNA (1)...(19): siRNA sense strand
acagagagaguaaguugga

SEQ ID NO: 566897 - RNA, 19 nt, Homo sapiens
  misc_RNA (1)...(19): siRNA sense strand
gaugacagagagaguaagu

SEQ ID NO: 566898 - RNA, 19 nt, Homo sapiens
  misc_RNA (1)...(19): siRNA sense strand
ggcaccgauuguacaagua

SEQ ID NO: 566899 - RNA, 19 nt, Homo sapiens
  misc_RNA (1)...(19): siRNA sense strand
caccgauuguacaaguaua

SEQ ID NO: 566900 - RNA, 19 nt, Homo sapiens
  misc_RNA (1)...(19): siRNA sense strand
gagaaagcugcaaauccaa

SEQ ID NO: 566901 - RNA, 19 nt, Homo sapiens
  misc_RNA (1)...(19): siRNA sense strand
uaaaggguagaauugagaa

SEQ ID NO: 566902 - RNA, 19 nt, Homo sapiens
  misc_RNA (1)...(19): siRNA sense strand
ggaacgaccagccucuucu

SEQ ID NO: 566903 - RNA, 19 nt, Homo sapiens
  misc_RNA (1)...(19): siRNA sense strand
ccgcagcgacaaugaaguu

SEQ ID NO: 566904 - RNA, 19 nt, Homo sapiens
  misc_RNA (1)...(19): siRNA sense strand
aagaagaaacucaagaucu

SEQ ID NO: 566905 - RNA, 19 nt, Homo sapiens
  misc_RNA (1)...(19): siRNA sense strand
gcagaucagcaggaagcua

SEQ ID NO: 566906 - RNA, 19 nt, Homo sapiens
  misc_RNA (1)...(19): siRNA sense strand
ugcccaaacugcaccauuc

SEQ ID NO: 566907 - RNA, 19 nt, Homo sapiens
  misc_RNA (1)...(19): siRNA sense strand
agaaucgccuucgcaggaa

SEQ ID NO: 566908 - RNA, 19 nt, Homo sapiens
  misc_RNA (1)...(19): siRNA sense strand
gcagcgacaaugaaguuuc

SEQ ID NO: 566909 - RNA, 19 nt, Homo sapiens
  misc_RNA (1)...(19): siRNA sense strand
uggcaccgauuguacaagu

SEQ ID NO: 566910 - RNA, 19 nt, Homo sapiens
  misc_RNA (1)...(19): siRNA sense strand
caacagguuuaugauuugc

SEQ ID NO: 566911 - RNA, 19 nt, Homo sapiens
  misc_RNA (1)...(19): siRNA sense strand
cacgaugacaccuccgaua

SEQ ID NO: 566912 - RNA, 19 nt, Homo sapiens
  misc_RNA (1)...(19): siRNA sense strand
aagccaaagccuaaagaaa

SEQ ID NO: 566913 - RNA, 19 nt, Homo sapiens
  misc_RNA (1)...(19): siRNA sense strand
gcucagguaaagaacagaa

SEQ ID NO: 566914 - RNA, 19 nt, Homo sapiens
  misc_RNA (1)...(19): siRNA sense strand
guaaugacuguauccucaa

SEQ ID NO: 566915 - RNA, 19 nt, Homo sapiens
  misc_RNA (1)...(19): siRNA sense strand
ggcaagaagaaacucaaga

SEQ ID NO: 566916 - RNA, 19 nt, Homo sapiens
  misc_RNA (1)...(19): siRNA sense strand
ggaacaauagagcagaagu

SEQ ID NO: 566917 - RNA, 19 nt, Homo sapiens
  misc_RNA (1)...(19): siRNA sense strand
gauggcaccgauuguacaa

SEQ ID NO: 566918 - RNA, 19 nt, Homo sapiens
  misc_RNA (1)...(19): siRNA sense strand
aagaugacagagagaguaa

SEQ ID NO: 566919 - RNA, 19 nt, Homo sapiens
  misc_RNA (1)...(19): siRNA sense strand
aagacuauaucugcccaaa

SEQ ID NO: 566920 - RNA, 19 nt, Homo sapiens
  misc_RNA (1)...(19): siRNA sense strand
aaaggcggcucaggacauc

SEQ ID NO: 566921 - RNA, 19 nt, Homo sapiens
  misc_RNA (1)...(19): siRNA sense strand
caaaggcgacccgagcaau

SEQ ID NO: 566922 - RNA, 19 nt, Homo sapiens
  misc_RNA (1)...(19): siRNA sense strand
gcaccuaaggccaucaaac

SEQ ID NO: 566923 - RNA, 19 nt, Homo sapiens
  misc_RNA (1)...(19): siRNA sense strand
caagggauaaaggguagaa

SEQ ID NO: 566924 - RNA, 19 nt, Homo sapiens
  misc_RNA (1)...(19): siRNA sense strand
ggaauggggaagacuauau

SEQ ID NO: 566925 - RNA, 19 nt, Homo sapiens
  misc_RNA (1)...(19): siRNA sense strand
caaauccaaguggcaagaa

SEQ ID NO: 566926 - RNA, 19 nt, Homo sapiens
  misc_RNA (1)...(19): siRNA sense strand
guaaagaacagaagccaaa

SEQ ID NO: 566927 - RNA, 19 nt, Homo sapiens
  misc_RNA (1)...(19): siRNA sense strand
gcaaugaggaggcaccuaa

SEQ ID NO: 566928 - RNA, 19 nt, Homo sapiens
  misc_RNA (1)...(19): siRNA sense strand
gaccgaagccugaauguga

SEQ ID NO: 566929 - RNA, 19 nt, Homo sapiens
  misc_RNA (1)...(19): siRNA sense strand
gaacaggagcccacugaga

SEQ ID NO: 566930 - RNA, 19 nt, Homo sapiens
  misc_RNA (1)...(19): siRNA sense strand
cgaccagccucuucugaaa

SEQ ID NO: 566931 - RNA, 19 nt, Homo sapiens
  misc_RNA (1)...(19): siRNA sense strand
caacaacagguuuaugauu

SEQ ID NO: 566932 - RNA, 19 nt, Homo sapiens
  misc_RNA (1)...(19): siRNA sense strand
ugagaaagcugcaaaucca

SEQ ID NO: 566933 - RNA, 19 nt, Homo sapiens
  misc_RNA (1)...(19): siRNA sense strand
cgccgucacuguuguauaa

SEQ ID NO: 566934 - RNA, 19 nt, Homo sapiens
  misc_RNA (1)...(19): siRNA sense strand
gcgauggccugaccuugaa

SEQ ID NO: 566935 - RNA, 19 nt, Homo sapiens
  misc_RNA (1)...(19): siRNA sense strand
gauaaaggguagaauugag

SEQ ID NO: 566936 - RNA, 19 nt, Homo sapiens
  misc_RNA (1)...(19): siRNA sense strand
gaugacaccuccgauagug

SEQ ID NO: 566937 - RNA, 19 nt, Homo sapiens
  misc_RNA (1)...(19): siRNA sense strand
caagagaccagcuccagaa

SEQ ID NO: 566938 - RNA, 19 nt, Homo sapiens
  misc_RNA (1)...(19): siRNA sense strand
gcaagaagaaacucaagau

SEQ ID NO: 566939 - RNA, 19 nt, Homo sapiens
  misc_RNA (1)...(19): siRNA sense strand
gagcaguuccugaccauug

SEQ ID NO: 566940 - RNA, 19 nt, Homo sapiens
  misc_RNA (1)...(19): siRNA sense strand
ugaggagccuggagacuug

SEQ ID NO: 566941 - RNA, 19 nt, Homo sapiens
  misc_RNA (1)...(19): siRNA sense strand
gacuauaucugcccaaacu

SEQ ID NO: 566942 - RNA, 19 nt, Homo sapiens
  misc_RNA (1)...(19): siRNA sense strand
gggcgagcgaucacaauua

SEQ ID NO: 566943 - RNA, 19 nt, Homo sapiens
  misc_RNA (1)...(19): siRNA sense strand
ggauaaaggguagaauuga

SEQ ID NO: 566944 - RNA, 19 nt, Homo sapiens
  misc_RNA (1)...(19): siRNA sense strand
gggauaaaggguagaauug

SEQ ID NO: 566945 - RNA, 19 nt, Homo sapiens
  misc_RNA (1)...(19): siRNA sense strand
gaucuuccagccugugaua

SEQ ID NO: 566946 - RNA, 19 nt, Homo sapiens
  misc_RNA (1)...(19): siRNA sense strand
cagcaaagaguucaggaaa

SEQ ID NO: 566947 - RNA, 19 nt, Homo sapiens
  misc_RNA (1)...(19): siRNA sense strand
uagcgaagaccaagggaua

SEQ ID NO: 566948 - RNA, 19 nt, Homo sapiens
  misc_RNA (1)...(19): siRNA sense strand
ugacagagagaguaaguug

SEQ ID NO: 566949 - RNA, 19 nt, Homo sapiens
  misc_RNA (1)...(19): siRNA sense strand
gaauugagaaagcugcaaa

SEQ ID NO: 566950 - RNA, 19 nt, Homo sapiens
  misc_RNA (1)...(19): siRNA sense strand
guacaaguauaggaacaau

SEQ ID NO: 566951 - RNA, 19 nt, Homo sapiens
  misc_RNA (1)...(19): siRNA sense strand
agaguaaguuggagggaaa

SEQ ID NO: 566952 - RNA, 19 nt, Homo sapiens
  misc_RNA (1)...(19): siRNA sense strand
acaacagguuuaugauuug

SEQ ID NO: 566953 - RNA, 19 nt, Homo sapiens
  misc_RNA (1)...(19): siRNA sense strand
cacaacaacagguuuauga

SEQ ID NO: 566954 - RNA, 19 nt, Homo sapiens
  misc_RNA (1)...(19): siRNA sense strand
caucaaacccaccagcaaa

SEQ ID NO: 566955 - RNA, 19 nt, Homo sapiens
  misc_RNA (1)...(19): siRNA sense strand
gaaaggcggcucaggacau

SEQ ID NO: 566956 - RNA, 19 nt, Homo sapiens
  misc_RNA (1)...(19): siRNA sense strand
cagaucagcaggaagcuaa

SEQ ID NO: 566957 - RNA, 19 nt, Homo sapiens
  misc_RNA (1)...(19): siRNA sense strand
uaaugacuguauccucaaa

SEQ ID NO: 566958 - RNA, 19 nt, Homo sapiens
  misc_RNA (1)...(19): siRNA sense strand
gaagccaaagccuaaagaa

SEQ ID NO: 566959 - RNA, 19 nt, Homo sapiens
  misc_RNA (1)...(19): siRNA sense strand
guggaaagcgcuucugaga

SEQ ID NO: 566960 - RNA, 19 nt, Homo sapiens
  misc_RNA (1)...(19): siRNA sense strand
acaaugaaguuucuaagcu

SEQ ID NO: 566961 - RNA, 19 nt, Homo sapiens
  misc_RNA (1)...(19): siRNA sense strand
gaacaauagagcagaaguc

SEQ ID NO: 566962 - RNA, 19 nt, Homo sapiens
  misc_RNA (1)...(19): siRNA sense strand
gaagaugaagccagagaag

SEQ ID NO: 566963 - RNA, 19 nt, Homo sapiens
  misc_RNA (1)...(19): siRNA sense strand
gugaagcacucgggaagga

SEQ ID NO: 566964 - RNA, 19 nt, Homo sapiens
  misc_RNA (1)...(19): siRNA sense strand
gggaacaggagcccacuga

SEQ ID NO: 566965 - RNA, 19 nt, Homo sapiens
  misc_RNA (1)...(19): siRNA sense strand
gcaccgauuguacaaguau

SEQ ID NO: 566966 - RNA, 19 nt, Homo sapiens
  misc_RNA (1)...(19): siRNA sense strand
gaaagaugacagagagagu

SEQ ID NO: 566967 - RNA, 19 nt, Homo sapiens
  misc_RNA (1)...(19): siRNA sense strand
cagagucgccugcggaaga

SEQ ID NO: 566968 - RNA, 19 nt, Homo sapiens
  misc_RNA (1)...(19): siRNA sense strand
guaaguauucguauucucu

SEQ ID NO: 566969 - RNA, 19 nt, Homo sapiens
  misc_RNA (1)...(19): siRNA sense strand
gcucugguaaguauucgua

SEQ ID NO: 566970 - RNA, 19 nt, Homo sapiens
  misc_RNA (1)...(19): siRNA sense strand
ccucacaacaacagguuua

SEQ ID NO: 566971 - RNA, 19 nt, Homo sapiens
  misc_RNA (1)...(19): siRNA sense strand
gcugauggcaccgauugua

SEQ ID NO: 566972 - RNA, 19 nt, Homo sapiens
  misc_RNA (1)...(19): siRNA sense strand
ggcgagcgaucacaauuac

SEQ ID NO: 566973 - RNA, 19 nt, Homo sapiens
  misc_RNA (1)...(19): siRNA sense strand
uuucuaagcucagguaaag

SEQ ID NO: 566974 - RNA, 19 nt, Homo sapiens
  misc_RNA (1)...(19): siRNA sense strand
gcaaauccaaguggcaaga

SEQ ID NO: 566975 - RNA, 19 nt, Homo sapiens
  misc_RNA (1)...(19): siRNA sense strand
acaaguauaggaacaauag

SEQ ID NO: 566976 - RNA, 19 nt, Homo sapiens
  misc_RNA (1)...(19): siRNA sense strand
aaagaugacagagagagua

SEQ ID NO: 566977 - RNA, 19 nt, Homo sapiens
  misc_RNA (1)...(19): siRNA sense strand
gcaaagaguucaggaaaac

SEQ ID NO: 566978 - RNA, 19 nt, Homo sapiens
  misc_RNA (1)...(19): siRNA sense strand
ccaacgcccuguauugcau

SEQ ID NO: 566979 - RNA, 19 nt, Homo sapiens
  misc_RNA (1)...(19): siRNA sense strand
guaagcaggagcccgagaa

SEQ ID NO: 566980 - RNA, 19 nt, Homo sapiens
  misc_RNA (1)...(19): siRNA sense strand
cgucacuguuguauaaaug

SEQ ID NO: 566981 - RNA, 19 nt, Homo sapiens
  misc_RNA (1)...(19): siRNA sense strand
ucacaauuacaaugcagua

SEQ ID NO: 566982 - RNA, 19 nt, Homo sapiens
  misc_RNA (1)...(19): siRNA sense strand
cagcgacaaugaaguuucu

SEQ ID NO: 566983 - RNA, 19 nt, Homo sapiens
  misc_RNA (1)...(19): siRNA sense strand
gcgaagaccaagggauaaa

SEQ ID NO: 566984 - RNA, 19 nt, Homo sapiens
  misc_RNA (1)...(19): siRNA sense strand
uaggaacaauagagcagaa

SEQ ID NO: 566985 - RNA, 19 nt, Homo sapiens
  misc_RNA (1)...(19): siRNA sense strand
gcgauugugugggcauuuc

SEQ ID NO: 566986 - RNA, 19 nt, Homo sapiens
  misc_RNA (1)...(19): siRNA sense strand
aacagaagccaaagccuaa

SEQ ID NO: 566987 - RNA, 19 nt, Homo sapiens
  misc_RNA (1)...(19): siRNA sense strand
ucuaagcucagguaaagaa

SEQ ID NO: 566988 - RNA, 19 nt, Homo sapiens
  misc_RNA (1)...(19): siRNA sense strand
gcgacaaugaaguuucuaa

SEQ ID NO: 566989 - RNA, 19 nt, Homo sapiens
  misc_RNA (1)...(19): siRNA sense strand
caagaagaaacucaagauc

SEQ ID NO: 566990 - RNA, 19 nt, Homo sapiens
  misc_RNA (1)...(19): siRNA sense strand
gauuguacaaguauaggaa

SEQ ID NO: 566991 - RNA, 19 nt, Homo sapiens
  misc_RNA (1)...(19): siRNA sense strand
aaagagaccacagugaaga

SEQ ID NO: 566992 - RNA, 19 nt, Homo sapiens
  misc_RNA (1)...(19): siRNA sense strand
cgagcgaucacaauuacaa

SEQ ID NO: 566993 - RNA, 19 nt, Homo sapiens
  misc_RNA (1)...(19): siRNA sense strand
ugaccgcugugaagaaugg

SEQ ID NO: 566994 - RNA, 19 nt, Homo sapiens
  misc_RNA (1)...(19): siRNA sense strand
gaugacagagagaguaagu

SEQ ID NO: 566995 - RNA, 19 nt, Homo sapiens
  misc_RNA (1)...(19): siRNA sense strand
gaacgaccagccucuucug

SEQ ID NO: 566996 - RNA, 19 nt, Homo sapiens
  misc_RNA (1)...(19): siRNA sense strand
gaaagcugcaaauccaagu

SEQ ID NO: 566997 - RNA, 19 nt, Homo sapiens
  misc_RNA (1)...(19): siRNA sense strand
gaagaccaagggauaaagg

SEQ ID NO: 566998 - RNA, 19 nt, Homo sapiens
  misc_RNA (1)...(19): siRNA sense strand
gguuuaugauuugcuguga

SEQ ID NO: 566999 - RNA, 19 nt, Homo sapiens
  misc_RNA (1)...(19): siRNA sense strand
acagagagaguaaguugga

SEQ ID NO: 567000 - RNA, 19 nt, Homo sapiens
  misc_RNA (1)...(19): siRNA sense strand
ggcaccgauuguacaagua

SEQ ID NO: 567001 - RNA, 19 nt, Homo sapiens
  misc_RNA (1)...(19): siRNA sense strand
ucugguaaguauucguauu

SEQ ID NO: 567002 - RNA, 19 nt, Homo sapiens
  misc_RNA (1)...(19): siRNA sense strand
caccgauuguacaaguaua

SEQ ID NO: 567003 - RNA, 19 nt, Homo sapiens
  misc_RNA (1)...(19): siRNA sense strand
gagaaagcugcaaauccaa

SEQ ID NO: 567004 - RNA, 19 nt, Homo sapiens
  misc_RNA (1)...(19): siRNA sense strand
uaaaggguagaauugagaa

SEQ ID NO: 567005 - RNA, 19 nt, Homo sapiens
  misc_RNA (1)...(19): siRNA sense strand
ugcccaaacugcaccauuc

SEQ ID NO: 567006 - RNA, 19 nt, Homo sapiens
  misc_RNA (1)...(19): siRNA sense strand
ccgcagcgacaaugaaguu

SEQ ID NO: 567007 - RNA, 19 nt, Homo sapiens
  misc_RNA (1)...(19): siRNA sense strand
aagaagaaacucaagaucu

SEQ ID NO: 567008 - RNA, 19 nt, Homo sapiens
  misc_RNA (1)...(19): siRNA sense strand
ggaacgaccagccucuucu

SEQ ID NO: 567009 - RNA, 19 nt, Homo sapiens
  misc_RNA (1)...(19): siRNA sense strand
gcagaucagcaggaagcua

SEQ ID NO: 567010 - RNA, 19 nt, Homo sapiens
  misc_RNA (1)...(19): siRNA sense strand
caacagguuuaugauuugc

SEQ ID NO: 567011 - RNA, 19 nt, Homo sapiens
  misc_RNA (1)...(19): siRNA sense strand
gcagcgacaaugaaguuuc

SEQ ID NO: 567012 - RNA, 19 nt, Homo sapiens
  misc_RNA (1)...(19): siRNA sense strand
uggcaccgauuguacaagu

SEQ ID NO: 567013 - RNA, 19 nt, Homo sapiens
  misc_RNA (1)...(19): siRNA sense strand
agaaucgccuucgcaggaa

SEQ ID NO: 567014 - RNA, 19 nt, Homo sapiens
  misc_RNA (1)...(19): siRNA sense strand
gauggcaccgauuguacaa

SEQ ID NO: 567015 - RNA, 19 nt, Homo sapiens
  misc_RNA (1)...(19): siRNA sense strand
aagccaaagccuaaagaaa

SEQ ID NO: 567016 - RNA, 19 nt, Homo sapiens
  misc_RNA (1)...(19): siRNA sense strand
gcucagguaaagaacagaa

SEQ ID NO: 567017 - RNA, 19 nt, Homo sapiens
  misc_RNA (1)...(19): siRNA sense strand
guaaugacuguauccucaa

SEQ ID NO: 567018 - RNA, 19 nt, Homo sapiens
  misc_RNA (1)...(19): siRNA sense strand
ggcaagaagaaacucaaga

SEQ ID NO: 567019 - RNA, 19 nt, Homo sapiens
  misc_RNA (1)...(19): siRNA sense strand
cacgaugacaccuccgaua

SEQ ID NO: 567020 - RNA, 19 nt, Homo sapiens
  misc_RNA (1)...(19): siRNA sense strand
ggaacaauagagcagaagu

SEQ ID NO: 567021 - RNA, 19 nt, Homo sapiens
  misc_RNA (1)...(19): siRNA sense strand
aagaugacagagagaguaa

SEQ ID NO: 567022 - RNA, 19 nt, Homo sapiens
  misc_RNA (1)...(19): siRNA sense strand
aagacuauaucugcccaaa

SEQ ID NO: 567023 - RNA, 19 nt, Homo sapiens
  misc_RNA (1)...(19): siRNA sense strand
aaaggcggcucaggacauc

SEQ ID NO: 567024 - RNA, 19 nt, Homo sapiens
  misc_RNA (1)...(19): siRNA sense strand
gguaaguauucguauucuc

SEQ ID NO: 567025 - RNA, 19 nt, Homo sapiens
  misc_RNA (1)...(19): siRNA sense strand
cuucaucccagucugauug

SEQ ID NO: 567026 - RNA, 19 nt, Homo sapiens
  misc_RNA (1)...(19): siRNA sense strand
gcagaacaguuauuuguaa

SEQ ID NO: 567027 - RNA, 19 nt, Homo sapiens
  misc_RNA (1)...(19): siRNA sense strand
ggaaacaccuccuaaauac

SEQ ID NO: 567028 - RNA, 19 nt, Homo sapiens
  misc_RNA (1)...(19): siRNA sense strand
gcacagcuguucauccauu

SEQ ID NO: 567029 - RNA, 19 nt, Homo sapiens
  misc_RNA (1)...(19): siRNA sense strand
gagcagaagugccgacaga

SEQ ID NO: 567030 - RNA, 19 nt, Homo sapiens
  misc_RNA (1)...(19): siRNA sense strand
gaacucauguuagauaagu

SEQ ID NO: 567031 - RNA, 19 nt, Homo sapiens
  misc_RNA (1)...(19): siRNA sense strand
ggauuccgaugaugaaauu

SEQ ID NO: 567032 - RNA, 19 nt, Homo sapiens
  misc_RNA (1)...(19): siRNA sense strand
ucagugaacucauguuaga

SEQ ID NO: 567033 - RNA, 19 nt, Homo sapiens
  misc_RNA (1)...(19): siRNA sense strand
ggaagacuauuuauucucu

SEQ ID NO: 567034 - RNA, 19 nt, Homo sapiens
  misc_RNA (1)...(19): siRNA sense strand
ccaauuccuucuucuauga

SEQ ID NO: 567035 - RNA, 19 nt, Homo sapiens
  misc_RNA (1)...(19): siRNA sense strand
cuucagggcuuccgucuaa

SEQ ID NO: 567036 - RNA, 19 nt, Homo sapiens
  misc_RNA (1)...(19): siRNA sense strand
gaaguuaucuuggucaaaa

SEQ ID NO: 567037 - RNA, 19 nt, Homo sapiens
  misc_RNA (1)...(19): siRNA sense strand
gaucagauuuagccuuuag

SEQ ID NO: 567038 - RNA, 19 nt, Homo sapiens
  misc_RNA (1)...(19): siRNA sense strand
guucagcccugugucauaa

SEQ ID NO: 567039 - RNA, 19 nt, Homo sapiens
  misc_RNA (1)...(19): siRNA sense strand
aaucacaacuuuagcuuug

SEQ ID NO: 567040 - RNA, 19 nt, Homo sapiens
  misc_RNA (1)...(19): siRNA sense strand
acacgcagauugauuaugu

SEQ ID NO: 567041 - RNA, 19 nt, Homo sapiens
  misc_RNA (1)...(19): siRNA sense strand
gaagauagugauauggauu

SEQ ID NO: 567042 - RNA, 19 nt, Homo sapiens
  misc_RNA (1)...(19): siRNA sense strand
uggaaacaccuccuaaaua

SEQ ID NO: 567043 - RNA, 19 nt, Homo sapiens
  misc_RNA (1)...(19): siRNA sense strand
cauauaugcagaacaguua

SEQ ID NO: 567044 - RNA, 19 nt, Homo sapiens
  misc_RNA (1)...(19): siRNA sense strand
gccgaucucuuaaacagaa

SEQ ID NO: 567045 - RNA, 19 nt, Homo sapiens
  misc_RNA (1)...(19): siRNA sense strand
acacacugcuccuauaaau

SEQ ID NO: 567046 - RNA, 19 nt, Homo sapiens
  misc_RNA (1)...(19): siRNA sense strand
aaacagaaacugcaagaug

SEQ ID NO: 567047 - RNA, 19 nt, Homo sapiens
  misc_RNA (1)...(19): siRNA sense strand
gcagaagugccgacagaaa

SEQ ID NO: 567048 - RNA, 19 nt, Homo sapiens
  misc_RNA (1)...(19): siRNA sense strand
acaguggaaucacaacuuu

SEQ ID NO: 567049 - RNA, 19 nt, Homo sapiens
  misc_RNA (1)...(19): siRNA sense strand
gaaaggaagcacagcuguu

SEQ ID NO: 567050 - RNA, 19 nt, Homo sapiens
  misc_RNA (1)...(19): siRNA sense strand
ucgaucagauuuagccuuu

SEQ ID NO: 567051 - RNA, 19 nt, Homo sapiens
  misc_RNA (1)...(19): siRNA sense strand
gaguuggacuuagaucauu

SEQ ID NO: 567052 - RNA, 19 nt, Homo sapiens
  misc_RNA (1)...(19): siRNA sense strand
ccauugaguuggacuuaga

SEQ ID NO: 567053 - RNA, 19 nt, Homo sapiens
  misc_RNA (1)...(19): siRNA sense strand
gaauugaacaguggaauca

SEQ ID NO: 567054 - RNA, 19 nt, Homo sapiens
  misc_RNA (1)...(19): siRNA sense strand
gugaacucauguuagauaa

SEQ ID NO: 567055 - RNA, 19 nt, Homo sapiens
  misc_RNA (1)...(19): siRNA sense strand
gcacaggaagacuauuuau

SEQ ID NO: 567056 - RNA, 19 nt, Homo sapiens
  misc_RNA (1)...(19): siRNA sense strand
ucuauccacucccuuaauu

SEQ ID NO: 567057 - RNA, 19 nt, Homo sapiens
  misc_RNA (1)...(19): siRNA sense strand
gcgccuguauguucuuuga

SEQ ID NO: 567058 - RNA, 19 nt, Homo sapiens
  misc_RNA (1)...(19): siRNA sense strand
uuacugggcuccuagaaca

SEQ ID NO: 567059 - RNA, 19 nt, Homo sapiens
  misc_RNA (1)...(19): siRNA sense strand
acaggaagacuauuuauuc

SEQ ID NO: 567060 - RNA, 19 nt, Homo sapiens
  misc_RNA (1)...(19): siRNA sense strand
uaucagugaacucauguua

SEQ ID NO: 567061 - RNA, 19 nt, Homo sapiens
  misc_RNA (1)...(19): siRNA sense strand
cgacacacugcuccuauaa

SEQ ID NO: 567062 - RNA, 19 nt, Homo sapiens
  misc_RNA (1)...(19): siRNA sense strand
gaaucacaacuuuagcuuu

SEQ ID NO: 567063 - RNA, 19 nt, Homo sapiens
  misc_RNA (1)...(19): siRNA sense strand
uaccagaccuccuucagau

SEQ ID NO: 567064 - RNA, 19 nt, Homo sapiens
  misc_RNA (1)...(19): siRNA sense strand
gcugagacagugaauggua

SEQ ID NO: 567065 - RNA, 19 nt, Homo sapiens
  misc_RNA (1)...(19): siRNA sense strand
cagcacaggaagacuauuu

SEQ ID NO: 567066 - RNA, 19 nt, Homo sapiens
  misc_RNA (1)...(19): siRNA sense strand
acacugcuccuauaaauuc

SEQ ID NO: 567067 - RNA, 19 nt, Homo sapiens
  misc_RNA (1)...(19): siRNA sense strand
aaaccgaagugucuuuaag

SEQ ID NO: 567068 - RNA, 19 nt, Homo sapiens
  misc_RNA (1)...(19): siRNA sense strand
ugacauuacugggcuccua

SEQ ID NO: 567069 - RNA, 19 nt, Homo sapiens
  misc_RNA (1)...(19): siRNA sense strand
ggggagugauggauaaaua

SEQ ID NO: 567070 - RNA, 19 nt, Homo sapiens
  misc_RNA (1)...(19): siRNA sense strand
ucauaucagugaacucaug

SEQ ID NO: 567071 - RNA, 19 nt, Homo sapiens
  misc_RNA (1)...(19): siRNA sense strand
uauagucguucucuucaug

SEQ ID NO: 567072 - RNA, 19 nt, Homo sapiens
  misc_RNA (1)...(19): siRNA sense strand
gaaauucuaacacuuugca

SEQ ID NO: 567073 - RNA, 19 nt, Homo sapiens
  misc_RNA (1)...(19): siRNA sense strand
gacagugaaugguauagag

SEQ ID NO: 567074 - RNA, 19 nt, Homo sapiens
  misc_RNA (1)...(19): siRNA sense strand
caggauugaugcaccagaa

SEQ ID NO: 567075 - RNA, 19 nt, Homo sapiens
  misc_RNA (1)...(19): siRNA sense strand
guaacuguacaacuuauga

SEQ ID NO: 567076 - RNA, 19 nt, Homo sapiens
  misc_RNA (1)...(19): siRNA sense strand
gaaauccugcaguuggaaa

SEQ ID NO: 567077 - RNA, 19 nt, Homo sapiens
  misc_RNA (1)...(19): siRNA sense strand
gguuauguguggaguggaa

SEQ ID NO: 567078 - RNA, 19 nt, Homo sapiens
  misc_RNA (1)...(19): siRNA sense strand
ugauauggauuccgaugau

SEQ ID NO: 567079 - RNA, 19 nt, Homo sapiens
  misc_RNA (1)...(19): siRNA sense strand
caggaagacuauuuauucu

SEQ ID NO: 567080 - RNA, 19 nt, Homo sapiens
  misc_RNA (1)...(19): siRNA sense strand
gauuauguccacugucuug

SEQ ID NO: 567081 - RNA, 19 nt, Homo sapiens
  misc_RNA (1)...(19): siRNA sense strand
uagagaagguccuaugacu

SEQ ID NO: 567082 - RNA, 19 nt, Homo sapiens
  misc_RNA (1)...(19): siRNA sense strand
ggaaucacaacuuuagcuu

SEQ ID NO: 567083 - RNA, 19 nt, Homo sapiens
  misc_RNA (1)...(19): siRNA sense strand
gauauggauuccgaugaug

SEQ ID NO: 567084 - RNA, 19 nt, Homo sapiens
  misc_RNA (1)...(19): siRNA sense strand
caucgaugcccuuccaauu

SEQ ID NO: 567085 - RNA, 19 nt, Homo sapiens
  misc_RNA (1)...(19): siRNA sense strand
gacccaagcgccuguaugu

SEQ ID NO: 567086 - RNA, 19 nt, Homo sapiens
  misc_RNA (1)...(19): siRNA sense strand
uaaauacgcagccgaagca

SEQ ID NO: 567087 - RNA, 19 nt, Homo sapiens
  misc_RNA (1)...(19): siRNA sense strand
gccuuuagguggcauuuua

SEQ ID NO: 567088 - RNA, 19 nt, Homo sapiens
  misc_RNA (1)...(19): siRNA sense strand
guaccagaccuccuucaga

SEQ ID NO: 567089 - RNA, 19 nt, Homo sapiens
  misc_RNA (1)...(19): siRNA sense strand
aaugggauuuggaugauga

SEQ ID NO: 567090 - RNA, 19 nt, Homo sapiens
  misc_RNA (1)...(19): siRNA sense strand
gagugagaguuauucagau

SEQ ID NO: 567091 - RNA, 19 nt, Homo sapiens
  misc_RNA (1)...(19): siRNA sense strand
cuaaauaccacacgcagau

SEQ ID NO: 567092 - RNA, 19 nt, Homo sapiens
  misc_RNA (1)...(19): siRNA sense strand
cagcuaaaacgaagaaaua

SEQ ID NO: 567093 - RNA, 19 nt, Homo sapiens
  misc_RNA (1)...(19): siRNA sense strand
aagcacagcuguucaucca

SEQ ID NO: 567094 - RNA, 19 nt, Homo sapiens
  misc_RNA (1)...(19): siRNA sense strand
uaaggaaccaagaaaggaa

SEQ ID NO: 567095 - RNA, 19 nt, Homo sapiens
  misc_RNA (1)...(19): siRNA sense strand
aaagaaacaaacccaaaug

SEQ ID NO: 567096 - RNA, 19 nt, Homo sapiens
  misc_RNA (1)...(19): siRNA sense strand
ggaaaauucauaucaguga

SEQ ID NO: 567097 - RNA, 19 nt, Homo sapiens
  misc_RNA (1)...(19): siRNA sense strand
gaaaaccgaagugucuuua

SEQ ID NO: 567098 - RNA, 19 nt, Homo sapiens
  misc_RNA (1)...(19): siRNA sense strand
ccaccucgaucagauuuag

SEQ ID NO: 567099 - RNA, 19 nt, Homo sapiens
  misc_RNA (1)...(19): siRNA sense strand
acgacacacugcuccuaua

SEQ ID NO: 567100 - RNA, 19 nt, Homo sapiens
  misc_RNA (1)...(19): siRNA sense strand
uuagaguacucaggauuga

SEQ ID NO: 567101 - RNA, 19 nt, Homo sapiens
  misc_RNA (1)...(19): siRNA sense strand
ucacaacuuuagcuuugau

SEQ ID NO: 567102 - RNA, 19 nt, Homo sapiens
  misc_RNA (1)...(19): siRNA sense strand
uuuagacgcuauagucguu

SEQ ID NO: 567103 - RNA, 19 nt, Homo sapiens
  misc_RNA (1)...(19): siRNA sense strand
gauguaaggcccaaaacua

SEQ ID NO: 567104 - RNA, 19 nt, Homo sapiens
  misc_RNA (1)...(19): siRNA sense strand
acgaagaaauauggaagaa

SEQ ID NO: 567105 - RNA, 19 nt, Homo sapiens
  misc_RNA (1)...(19): siRNA sense strand
ccaagcgccuguauguucu

SEQ ID NO: 567106 - RNA, 19 nt, Homo sapiens
  misc_RNA (1)...(19): siRNA sense strand
agugaacucauguuagaua

SEQ ID NO: 567107 - RNA, 19 nt, Homo sapiens
  misc_RNA (1)...(19): siRNA sense strand
aagcacuacuggaaggaaa

SEQ ID NO: 567108 - RNA, 19 nt, Homo sapiens
  misc_RNA (1)...(19): siRNA sense strand
auacgcagccgaagcacua

SEQ ID NO: 567109 - RNA, 19 nt, Homo sapiens
  misc_RNA (1)...(19): siRNA sense strand
agagugagaguuauucaga

SEQ ID NO: 567110 - RNA, 19 nt, Homo sapiens
  misc_RNA (1)...(19): siRNA sense strand
ccagaccuccuucagauca

SEQ ID NO: 567111 - RNA, 19 nt, Homo sapiens
  misc_RNA (1)...(19): siRNA sense strand
gauugauuauguccacugu

SEQ ID NO: 567112 - RNA, 19 nt, Homo sapiens
  misc_RNA (1)...(19): siRNA sense strand
guaguagucggcacucuuc

SEQ ID NO: 567113 - RNA, 19 nt, Homo sapiens
  misc_RNA (1)...(19): siRNA sense strand
guuagaguacucaggauug

SEQ ID NO: 567114 - RNA, 19 nt, Homo sapiens
  misc_RNA (1)...(19): siRNA sense strand
uagaagauagugauaugga

SEQ ID NO: 567115 - RNA, 19 nt, Homo sapiens
  misc_RNA (1)...(19): siRNA sense strand
aaacaccuccuaaauacca

SEQ ID NO: 567116 - RNA, 19 nt, Homo sapiens
  misc_RNA (1)...(19): siRNA sense strand
uaauucggacuuucccuuu

SEQ ID NO: 567117 - RNA, 19 nt, Homo sapiens
  misc_RNA (1)...(19): siRNA sense strand
gcuauagucguucucuuca

SEQ ID NO: 567118 - RNA, 19 nt, Homo sapiens
  misc_RNA (1)...(19): siRNA sense strand
cacaggaagacuauuuauu

SEQ ID NO: 567119 - RNA, 19 nt, Homo sapiens
  misc_RNA (1)...(19): siRNA sense strand
gacacacugcuccuauaaa

SEQ ID NO: 567120 - RNA, 19 nt, Homo sapiens
  misc_RNA (1)...(19): siRNA sense strand
cccaagcgccuguauguuc

SEQ ID NO: 567121 - RNA, 19 nt, Homo sapiens
  misc_RNA (1)...(19): siRNA sense strand
agugagaguuauucagaug

SEQ ID NO: 567122 - RNA, 19 nt, Homo sapiens
  misc_RNA (1)...(19): siRNA sense strand
aaaggaagcacagcuguuc

SEQ ID NO: 567123 - RNA, 19 nt, Homo sapiens
  misc_RNA (1)...(19): siRNA sense strand
gaucaauaacaacccaugu

SEQ ID NO: 567124 - RNA, 19 nt, Homo sapiens
  misc_RNA (1)...(19): siRNA sense strand
cgaagaaauauggaagaaa

SEQ ID NO: 567125 - RNA, 19 nt, Homo sapiens
  misc_RNA (1)...(19): siRNA sense strand
ggaguggaaagaaguuauc

SEQ ID NO: 567126 - RNA, 19 nt, Homo sapiens
  misc_RNA (1)...(19): siRNA sense strand
uaaagaggguauagagaaa

SEQ ID NO: 567127 - RNA, 19 nt, Homo sapiens
  misc_RNA (1)...(19): siRNA sense strand
aaacaaggaugaagaugug

SEQ ID NO: 567128 - RNA, 19 nt, Homo sapiens
  misc_RNA (1)...(19): siRNA sense strand
gaaacaaggaugaagaugu

SEQ ID NO: 567129 - RNA, 19 nt, Homo sapiens
  misc_RNA (1)...(19): siRNA sense strand
gaaaggaaguguuguuacc

SEQ ID NO: 567130 - RNA, 19 nt, Homo sapiens
  misc_RNA (1)...(19): siRNA sense strand
gggaaaggaaguguuguua

SEQ ID NO: 567131 - RNA, 19 nt, Homo sapiens
  misc_RNA (1)...(19): siRNA sense strand
ggaagaaggaggaaacaag

SEQ ID NO: 567132 - RNA, 19 nt, Homo sapiens
  misc_RNA (1)...(19): siRNA sense strand
uuaaagaggguauagagaa

SEQ ID NO: 567133 - RNA, 19 nt, Homo sapiens
  misc_RNA (1)...(19): siRNA sense strand
gaggaaacaaggaugaaga

SEQ ID NO: 567134 - RNA, 19 nt, Homo sapiens
  misc_RNA (1)...(19): siRNA sense strand
gaaggaacuggaagaagga

SEQ ID NO: 567135 - RNA, 19 nt, Homo sapiens
  misc_RNA (1)...(19): siRNA sense strand
uaccagguguccucagaaa

SEQ ID NO: 567136 - RNA, 19 nt, Homo sapiens
  misc_RNA (1)...(19): siRNA sense strand
ccagguguccucagaaaug

SEQ ID NO: 567137 - RNA, 19 nt, Homo sapiens
  misc_RNA (1)...(19): siRNA sense strand
caacguacgcugcuucaag

SEQ ID NO: 567138 - RNA, 19 nt, Homo sapiens
  misc_RNA (1)...(19): siRNA sense strand
cauggugucucucguucuu

SEQ ID NO: 567139 - RNA, 19 nt, Homo sapiens
  misc_RNA (1)...(19): siRNA sense strand
uugcccagcugacaacgua

SEQ ID NO: 567140 - RNA, 19 nt, Homo sapiens
  misc_RNA (1)...(19): siRNA sense strand
ggaaaggaaguguuguuac

SEQ ID NO: 567141 - RNA, 19 nt, Homo sapiens
  misc_RNA (1)...(19): siRNA sense strand
cagguguccucagaaauga

SEQ ID NO: 567142 - RNA, 19 nt, Homo sapiens
  misc_RNA (1)...(19): siRNA sense strand
uguccaggcuccuccucua

SEQ ID NO: 567143 - RNA, 19 nt, Homo sapiens
  misc_RNA (1)...(19): siRNA sense strand
ggaaacaaggaugaagaug

SEQ ID NO: 567144 - RNA, 19 nt, Homo sapiens
  misc_RNA (1)...(19): siRNA sense strand
guuaaagaggguauagaga

SEQ ID NO: 567145 - RNA, 19 nt, Homo sapiens
  misc_RNA (1)...(19): siRNA sense strand
gaacuggaagaaggaggaa

SEQ ID NO: 567146 - RNA, 19 nt, Homo sapiens
  misc_RNA (1)...(19): siRNA sense strand
ggaguuaaagaggguauag

SEQ ID NO: 567147 - RNA, 19 nt, Homo sapiens
  misc_RNA (1)...(19): siRNA sense strand
ccugguggcuguggaagga

SEQ ID NO: 567148 - RNA, 19 nt, Homo sapiens
  misc_RNA (1)...(19): siRNA sense strand
ucuaccagguguccucaga

SEQ ID NO: 567149 - RNA, 19 nt, Homo sapiens
  misc_RNA (1)...(19): siRNA sense strand
caaggaugaagauguguca

SEQ ID NO: 567150 - RNA, 19 nt, Homo sapiens
  misc_RNA (1)...(19): siRNA sense strand
aacguacgcugcuucaagu

SEQ ID NO: 567151 - RNA, 19 nt, Homo sapiens
  misc_RNA (1)...(19): siRNA sense strand
ggaggaaacaaggaugaag

SEQ ID NO: 567152 - RNA, 19 nt, Homo sapiens
  misc_RNA (1)...(19): siRNA sense strand
caacaucgcugaccaggau

SEQ ID NO: 567153 - RNA, 19 nt, Homo sapiens
  misc_RNA (1)...(19): siRNA sense strand
ccaggucgcugcagcauuu

SEQ ID NO: 567154 - RNA, 19 nt, Homo sapiens
  misc_RNA (1)...(19): siRNA sense strand
caacauccgugcucugaga

SEQ ID NO: 567155 - RNA, 19 nt, Homo sapiens
  misc_RNA (1)...(19): siRNA sense strand
ccagagcgauggagggauu

SEQ ID NO: 567156 - RNA, 19 nt, Homo sapiens
  misc_RNA (1)...(19): siRNA sense strand
gaguuggucuccagaagag

SEQ ID NO: 567157 - RNA, 19 nt, Homo sapiens
  misc_RNA (1)...(19): siRNA sense strand
ggagggauuuccgcuucaa

SEQ ID NO: 567158 - RNA, 19 nt, Homo sapiens
  misc_RNA (1)...(19): siRNA sense strand
gaccugcccuugccuucug

SEQ ID NO: 567159 - RNA, 19 nt, Homo sapiens
  misc_RNA (1)...(19): siRNA sense strand
gcgccaacaccauggacua

SEQ ID NO: 567160 - RNA, 19 nt, Homo sapiens
  misc_RNA (1)...(19): siRNA sense strand
ccugauuccgucuuugaua

SEQ ID NO: 567161 - RNA, 19 nt, Homo sapiens
  misc_RNA (1)...(19): siRNA sense strand
ucuggucucugacauacga

SEQ ID NO: 567162 - RNA, 19 nt, Homo sapiens
  misc_RNA (1)...(19): siRNA sense strand
ggauuuccgcuucaacauc

SEQ ID NO: 567163 - RNA, 19 nt, Homo sapiens
  misc_RNA (1)...(19): siRNA sense strand
uugagggcgugcucuacua

SEQ ID NO: 567164 - RNA, 19 nt, Homo sapiens
  misc_RNA (1)...(19): siRNA sense strand
ugaguuggucuccagaaga

SEQ ID NO: 567165 - RNA, 19 nt, Homo sapiens
  misc_RNA (1)...(19): siRNA sense strand
gcuaccugcagcuggauuu

SEQ ID NO: 567166 - RNA, 19 nt, Homo sapiens
  misc_RNA (1)...(19): siRNA sense strand
gacucuggucucugacaua

SEQ ID NO: 567167 - RNA, 19 nt, Homo sapiens
  misc_RNA (1)...(19): siRNA sense strand
cugauuccgucuuugauac

SEQ ID NO: 567168 - RNA, 19 nt, Homo sapiens
  misc_RNA (1)...(19): siRNA sense strand
gcagaaaguuccuagauuu

SEQ ID NO: 567169 - RNA, 19 nt, Homo sapiens
  misc_RNA (1)...(19): siRNA sense strand
gaucugcucuauguuaaua

SEQ ID NO: 567170 - RNA, 19 nt, Homo sapiens
  misc_RNA (1)...(19): siRNA sense strand
gaaccuacauaacaaugaa

SEQ ID NO: 567171 - RNA, 19 nt, Homo sapiens
  misc_RNA (1)...(19): siRNA sense strand
gcaaugaaccuacauaaca

SEQ ID NO: 567172 - RNA, 19 nt, Homo sapiens
  misc_RNA (1)...(19): siRNA sense strand
gaugaucugcucuauguua

SEQ ID NO: 567173 - RNA, 19 nt, Homo sapiens
  misc_RNA (1)...(19): siRNA sense strand
ggaaaaccaugucuucuuu

SEQ ID NO: 567174 - RNA, 19 nt, Homo sapiens
  misc_RNA (1)...(19): siRNA sense strand
caaugaaccuacauaacaa

SEQ ID NO: 567175 - RNA, 19 nt, Homo sapiens
  misc_RNA (1)...(19): siRNA sense strand
ugacugauguccacacuug

SEQ ID NO: 567176 - RNA, 19 nt, Homo sapiens
  misc_RNA (1)...(19): siRNA sense strand
ccaaagagacagcauuuau

SEQ ID NO: 567177 - RNA, 19 nt, Homo sapiens
  misc_RNA (1)...(19): siRNA sense strand
caaagagacagcauuuauu

SEQ ID NO: 567178 - RNA, 19 nt, Homo sapiens
  misc_RNA (1)...(19): siRNA sense strand
gagacagcauuuauuuaug

SEQ ID NO: 567179 - RNA, 19 nt, Homo sapiens
  misc_RNA (1)...(19): siRNA sense strand
uaauaagucucccaacuac

SEQ ID NO: 567180 - RNA, 19 nt, Homo sapiens
  misc_RNA (1)...(19): siRNA sense strand
ggccauuuguugaaggaua

SEQ ID NO: 567181 - RNA, 19 nt, Homo sapiens
  misc_RNA (1)...(19): siRNA sense strand
aggaugaucugcucuaugu

SEQ ID NO: 567182 - RNA, 19 nt, Homo sapiens
  misc_RNA (1)...(19): siRNA sense strand
gccauuuguugaaggauaa

SEQ ID NO: 567183 - RNA, 19 nt, Homo sapiens
  misc_RNA (1)...(19): siRNA sense strand
ccaaguugaugucaguaga

SEQ ID NO: 567184 - RNA, 19 nt, Homo sapiens
  misc_RNA (1)...(19): siRNA sense strand
gugaaagcaugacugaugu

SEQ ID NO: 567185 - RNA, 19 nt, Homo sapiens
  misc_RNA (1)...(19): siRNA sense strand
agauggaacugcaugauca

SEQ ID NO: 567186 - RNA, 19 nt, Homo sapiens
  misc_RNA (1)...(19): siRNA sense strand
guggagaggugugagugua

SEQ ID NO: 567187 - RNA, 19 nt, Homo sapiens
  misc_RNA (1)...(19): siRNA sense strand
uuaauaagucucccaacua

SEQ ID NO: 567188 - RNA, 19 nt, Homo sapiens
  misc_RNA (1)...(19): siRNA sense strand
guuaauaagucucccaacu

SEQ ID NO: 567189 - RNA, 19 nt, Homo sapiens
  misc_RNA (1)...(19): siRNA sense strand
gcaugugguucagcagaaa

SEQ ID NO: 567190 - RNA, 19 nt, Homo sapiens
  misc_RNA (1)...(19): siRNA sense strand
agaaggagcugugcaagag

SEQ ID NO: 567191 - RNA, 19 nt, Homo sapiens
  misc_RNA (1)...(19): siRNA sense strand
caaaguacuauuagcaaug

SEQ ID NO: 567192 - RNA, 19 nt, Homo sapiens
  misc_RNA (1)...(19): siRNA sense strand
gcaccaaagagacagcauu

SEQ ID NO: 567193 - RNA, 19 nt, Homo sapiens
  misc_RNA (1)...(19): siRNA sense strand
gugaaaacaugcuggaaaa

SEQ ID NO: 567194 - RNA, 19 nt, Homo sapiens
  misc_RNA (1)...(19): siRNA sense strand
caccaaagagacagcauuu

SEQ ID NO: 567195 - RNA, 19 nt, Homo sapiens
  misc_RNA (1)...(19): siRNA sense strand
ggaaaauaccaauccauaa

SEQ ID NO: 567196 - RNA, 19 nt, Homo sapiens
  misc_RNA (1)...(19): siRNA sense strand
aaagauuggccauuuguug

SEQ ID NO: 567197 - RNA, 19 nt, Homo sapiens
  misc_RNA (1)...(19): siRNA sense strand
ccgaugauguccaguaugg

SEQ ID NO: 567198 - RNA, 19 nt, Homo sapiens
  misc_RNA (1)...(19): siRNA sense strand
aaauaccaauccauaagga

SEQ ID NO: 567199 - RNA, 19 nt, Homo sapiens
  misc_RNA (1)...(19): siRNA sense strand
uaaggaugaucugcucuau

SEQ ID NO: 567200 - RNA, 19 nt, Homo sapiens
  misc_RNA (1)...(19): siRNA sense strand
gaaacaccacgggcaaaga

SEQ ID NO: 567201 - RNA, 19 nt, Homo sapiens
  misc_RNA (1)...(19): siRNA sense strand
ggcaggcugucgccaaguu

SEQ ID NO: 567202 - RNA, 19 nt, Homo sapiens
  misc_RNA (1)...(19): siRNA sense strand
aaacaccacgggcaaagaa

SEQ ID NO: 567203 - RNA, 19 nt, Homo sapiens
  misc_RNA (1)...(19): siRNA sense strand
uagcaaugaaccuacauaa

SEQ ID NO: 567204 - RNA, 19 nt, Homo sapiens
  misc_RNA (1)...(19): siRNA sense strand
aagcugggcugcgccaauu

SEQ ID NO: 567205 - RNA, 19 nt, Homo sapiens
  misc_RNA (1)...(19): siRNA sense strand
ggcaugugguucagcagaa

SEQ ID NO: 567206 - RNA, 19 nt, Homo sapiens
  misc_RNA (1)...(19): siRNA sense strand
gaaaauaccaauccauaag

SEQ ID NO: 567207 - RNA, 19 nt, Homo sapiens
  misc_RNA (1)...(19): siRNA sense strand
agcagaaaguuccuagauu

SEQ ID NO: 567208 - RNA, 19 nt, Homo sapiens
  misc_RNA (1)...(19): siRNA sense strand
ggagaggugugaguguaag

SEQ ID NO: 567209 - RNA, 19 nt, Homo sapiens
  misc_RNA (1)...(19): siRNA sense strand
cagcagaaaguuccuagau

SEQ ID NO: 567210 - RNA, 19 nt, Homo sapiens
  misc_RNA (1)...(19): siRNA sense strand
ugugaaagcaugacugaug

SEQ ID NO: 567211 - RNA, 19 nt, Homo sapiens
  misc_RNA (1)...(19): siRNA sense strand
ggugugaaagcaugacuga

SEQ ID NO: 567212 - RNA, 19 nt, Homo sapiens
  misc_RNA (1)...(19): siRNA sense strand
gggcaaagaaaacaaagua

SEQ ID NO: 567213 - RNA, 19 nt, Homo sapiens
  misc_RNA (1)...(19): siRNA sense strand
ggacacaaggcagagaaug

SEQ ID NO: 567214 - RNA, 19 nt, Homo sapiens
  misc_RNA (1)...(19): siRNA sense strand
gagauggaacugcaugauc

SEQ ID NO: 567215 - RNA, 19 nt, Homo sapiens
  misc_RNA (1)...(19): siRNA sense strand
gcaggcaacaugacagagu

SEQ ID NO: 567216 - RNA, 19 nt, Homo sapiens
  misc_RNA (1)...(19): siRNA sense strand
cagaaggagcugugcaaga

SEQ ID NO: 567217 - RNA, 19 nt, Homo sapiens
  misc_RNA (1)...(19): siRNA sense strand
gaaaagauuggccauuugu

SEQ ID NO: 567218 - RNA, 19 nt, Homo sapiens
  misc_RNA (1)...(19): siRNA sense strand
gcuccgaugauguccagua

SEQ ID NO: 567219 - RNA, 19 nt, Homo sapiens
  misc_RNA (1)...(19): siRNA sense strand
gcgccaauuugccgcugaa

SEQ ID NO: 567220 - RNA, 19 nt, Homo sapiens
  misc_RNA (1)...(19): siRNA sense strand
gagguuacaacacccaugu

SEQ ID NO: 567221 - RNA, 19 nt, Homo sapiens
  misc_RNA (1)...(19): siRNA sense strand
gaagcugggcugcgccaau

SEQ ID NO: 567222 - RNA, 19 nt, Homo sapiens
  misc_RNA (1)...(19): siRNA sense strand
ggaaacaccacgggcaaag

SEQ ID NO: 567223 - RNA, 19 nt, Homo sapiens
  misc_RNA (1)...(19): siRNA sense strand
aagauuggccauuuguuga

SEQ ID NO: 567224 - RNA, 19 nt, Homo sapiens
  misc_RNA (1)...(19): siRNA sense strand
ugaaaagauuggccauuug

SEQ ID NO: 567225 - RNA, 19 nt, Homo sapiens
  misc_RNA (1)...(19): siRNA sense strand
gagcagcggcaccaaagag

SEQ ID NO: 567226 - RNA, 19 nt, Homo sapiens
  misc_RNA (1)...(19): siRNA sense strand
gauaagaaacugggaaucc

SEQ ID NO: 567227 - RNA, 19 nt, Homo sapiens
  misc_RNA (1)...(19): siRNA sense strand
cggcuccugugcugugaaa

SEQ ID NO: 567228 - RNA, 19 nt, Homo sapiens
  misc_RNA (1)...(19): siRNA sense strand
gaaugcaaccguacaucag

SEQ ID NO: 567229 - RNA, 19 nt, Homo sapiens
  misc_RNA (1)...(19): siRNA sense strand
gagagauggaacugcauga

SEQ ID NO: 567230 - RNA, 19 nt, Homo sapiens
  misc_RNA (1)...(19): siRNA sense strand
uguagaagauaagaaacug

SEQ ID NO: 567231 - RNA, 19 nt, Homo sapiens
  misc_RNA (1)...(19): siRNA sense strand
gcucuauguuaauaagucu

SEQ ID NO: 567232 - RNA, 19 nt, Homo sapiens
  misc_RNA (1)...(19): siRNA sense strand
augaucugcucuauguuaa

SEQ ID NO: 567233 - RNA, 19 nt, Homo sapiens
  misc_RNA (1)...(19): siRNA sense strand
agaaugcaaccguacauca

SEQ ID NO: 567234 - RNA, 19 nt, Homo sapiens
  misc_RNA (1)...(19): siRNA sense strand
uugaaaagauuggccauuu

SEQ ID NO: 567235 - RNA, 19 nt, Homo sapiens
  misc_RNA (1)...(19): siRNA sense strand
ccaauuugccgcugaacag

SEQ ID NO: 567236 - RNA, 19 nt, Homo sapiens
  misc_RNA (1)...(19): siRNA sense strand
uauuagcaaugaaccuaca

SEQ ID NO: 567237 - RNA, 19 nt, Homo sapiens
  misc_RNA (1)...(19): siRNA sense strand
gaggugugaguguaaguuc

SEQ ID NO: 567238 - RNA, 19 nt, Homo sapiens
  misc_RNA (1)...(19): siRNA sense strand
aaaaugcgcaggagagaaa

SEQ ID NO: 567239 - RNA, 19 nt, Homo sapiens
  misc_RNA (1)...(19): siRNA sense strand
ccagauaucagacaaaaca

SEQ ID NO: 567240 - RNA, 19 nt, Homo sapiens
  misc_RNA (1)...(19): siRNA sense strand
ugaaccuacauaacaauga

SEQ ID NO: 567241 - RNA, 19 nt, Homo sapiens
  misc_RNA (1)...(19): siRNA sense strand
gcugggcugcgccaauuug

SEQ ID NO: 567242 - RNA, 19 nt, Homo sapiens
  misc_RNA (1)...(19): siRNA sense strand
gauuggccauuuguugaag

SEQ ID NO: 567243 - RNA, 19 nt, Homo sapiens
  misc_RNA (1)...(19): siRNA sense strand
gccagaaggagcugugcaa

SEQ ID NO: 567244 - RNA, 19 nt, Homo sapiens
  misc_RNA (1)...(19): siRNA sense strand
gggcugcuccgaugauguc

SEQ ID NO: 567245 - RNA, 19 nt, Homo sapiens
  misc_RNA (1)...(19): siRNA sense strand
ucgccaaguugaugucagu

SEQ ID NO: 567246 - RNA, 19 nt, Homo sapiens
  misc_RNA (1)...(19): siRNA sense strand
aaccaugucuucuuuugaa

SEQ ID NO: 567247 - RNA, 19 nt, Homo sapiens
  misc_RNA (1)...(19): siRNA sense strand
gcaggcugucgccaaguug

SEQ ID NO: 567248 - RNA, 19 nt, Homo sapiens
  misc_RNA (1)...(19): siRNA sense strand
guucaucuggugcugcuau

SEQ ID NO: 567249 - RNA, 19 nt, Homo sapiens
  misc_RNA (1)...(19): siRNA sense strand
gagaaugcaaccguacauc

SEQ ID NO: 567250 - RNA, 19 nt, Homo sapiens
  misc_RNA (1)...(19): siRNA sense strand
gugcaggcaacaugacaga

SEQ ID NO: 567251 - RNA, 19 nt, Homo sapiens
  misc_RNA (1)...(19): siRNA sense strand
auaagucucccaacuacug

SEQ ID NO: 567252 - RNA, 19 nt, Homo sapiens
  misc_RNA (1)...(19): siRNA sense strand
gaucagaggaaaauaccaa

SEQ ID NO: 567253 - RNA, 19 nt, Homo sapiens
  misc_RNA (1)...(19): siRNA sense strand
caguauggcaugugguuca

SEQ ID NO: 567254 - RNA, 19 nt, Homo sapiens
  misc_RNA (1)...(19): siRNA sense strand
gcagaaaguuccuagauuu

SEQ ID NO: 567255 - RNA, 19 nt, Homo sapiens
  misc_RNA (1)...(19): siRNA sense strand
gaucugcucuauguuaaua

SEQ ID NO: 567256 - RNA, 19 nt, Homo sapiens
  misc_RNA (1)...(19): siRNA sense strand
gaaccuacauaacaaugaa

SEQ ID NO: 567257 - RNA, 19 nt, Homo sapiens
  misc_RNA (1)...(19): siRNA sense strand
gcaaugaaccuacauaaca

SEQ ID NO: 567258 - RNA, 19 nt, Homo sapiens
  misc_RNA (1)...(19): siRNA sense strand
gaugaucugcucuauguua

SEQ ID NO: 567259 - RNA, 19 nt, Homo sapiens
  misc_RNA (1)...(19): siRNA sense strand
ggaaaaccaugucuucuuu

SEQ ID NO: 567260 - RNA, 19 nt, Homo sapiens
  misc_RNA (1)...(19): siRNA sense strand
caaugaaccuacauaacaa

SEQ ID NO: 567261 - RNA, 19 nt, Homo sapiens
  misc_RNA (1)...(19): siRNA sense strand
ugacugauguccacacuug

SEQ ID NO: 567262 - RNA, 19 nt, Homo sapiens
  misc_RNA (1)...(19): siRNA sense strand
ccaaagagacagcauuuau

SEQ ID NO: 567263 - RNA, 19 nt, Homo sapiens
  misc_RNA (1)...(19): siRNA sense strand
caaagagacagcauuuauu

SEQ ID NO: 567264 - RNA, 19 nt, Homo sapiens
  misc_RNA (1)...(19): siRNA sense strand
gagacagcauuuauuuaug

SEQ ID NO: 567265 - RNA, 19 nt, Homo sapiens
  misc_RNA (1)...(19): siRNA sense strand
uaauaagucucccaacuac

SEQ ID NO: 567266 - RNA, 19 nt, Homo sapiens
  misc_RNA (1)...(19): siRNA sense strand
ggccauuuguugaaggaua

SEQ ID NO: 567267 - RNA, 19 nt, Homo sapiens
  misc_RNA (1)...(19): siRNA sense strand
aggaugaucugcucuaugu

SEQ ID NO: 567268 - RNA, 19 nt, Homo sapiens
  misc_RNA (1)...(19): siRNA sense strand
gccauuuguugaaggauaa

SEQ ID NO: 567269 - RNA, 19 nt, Homo sapiens
  misc_RNA (1)...(19): siRNA sense strand
ccaaguugaugucaguaga

SEQ ID NO: 567270 - RNA, 19 nt, Homo sapiens
  misc_RNA (1)...(19): siRNA sense strand
gugaaagcaugacugaugu

SEQ ID NO: 567271 - RNA, 19 nt, Homo sapiens
  misc_RNA (1)...(19): siRNA sense strand
agauggaacugcaugauca

SEQ ID NO: 567272 - RNA, 19 nt, Homo sapiens
  misc_RNA (1)...(19): siRNA sense strand
guggagaggugugagugua

SEQ ID NO: 567273 - RNA, 19 nt, Homo sapiens
  misc_RNA (1)...(19): siRNA sense strand
uuaauaagucucccaacua

SEQ ID NO: 567274 - RNA, 19 nt, Homo sapiens
  misc_RNA (1)...(19): siRNA sense strand
guuaauaagucucccaacu

SEQ ID NO: 567275 - RNA, 19 nt, Homo sapiens
  misc_RNA (1)...(19): siRNA sense strand
gcaugugguucagcagaaa

SEQ ID NO: 567276 - RNA, 19 nt, Homo sapiens
  misc_RNA (1)...(19): siRNA sense strand
agaaggagcugugcaagag

SEQ ID NO: 567277 - RNA, 19 nt, Homo sapiens
  misc_RNA (1)...(19): siRNA sense strand
caaaguacuauuagcaaug

SEQ ID NO: 567278 - RNA, 19 nt, Homo sapiens
  misc_RNA (1)...(19): siRNA sense strand
gcaccaaagagacagcauu

SEQ ID NO: 567279 - RNA, 19 nt, Homo sapiens
  misc_RNA (1)...(19): siRNA sense strand
gugaaaacaugcuggaaaa

SEQ ID NO: 567280 - RNA, 19 nt, Homo sapiens
  misc_RNA (1)...(19): siRNA sense strand
caccaaagagacagcauuu

SEQ ID NO: 567281 - RNA, 19 nt, Homo sapiens
  misc_RNA (1)...(19): siRNA sense strand
ggaaaauaccaauccauaa

SEQ ID NO: 567282 - RNA, 19 nt, Homo sapiens
  misc_RNA (1)...(19): siRNA sense strand
aaagauuggccauuuguug

SEQ ID NO: 567283 - RNA, 19 nt, Homo sapiens
  misc_RNA (1)...(19): siRNA sense strand
ccgaugauguccaguaugg

SEQ ID NO: 567284 - RNA, 19 nt, Homo sapiens
  misc_RNA (1)...(19): siRNA sense strand
aaauaccaauccauaagga

SEQ ID NO: 567285 - RNA, 19 nt, Homo sapiens
  misc_RNA (1)...(19): siRNA sense strand
uaaggaugaucugcucuau

SEQ ID NO: 567286 - RNA, 19 nt, Homo sapiens
  misc_RNA (1)...(19): siRNA sense strand
gaaacaccacgggcaaaga

SEQ ID NO: 567287 - RNA, 19 nt, Homo sapiens
  misc_RNA (1)...(19): siRNA sense strand
ggcaggcugucgccaaguu

SEQ ID NO: 567288 - RNA, 19 nt, Homo sapiens
  misc_RNA (1)...(19): siRNA sense strand
aaacaccacgggcaaagaa

SEQ ID NO: 567289 - RNA, 19 nt, Homo sapiens
  misc_RNA (1)...(19): siRNA sense strand
uagcaaugaaccuacauaa

SEQ ID NO: 567290 - RNA, 19 nt, Homo sapiens
  misc_RNA (1)...(19): siRNA sense strand
aagcugggcugcgccaauu

SEQ ID NO: 567291 - RNA, 19 nt, Homo sapiens
  misc_RNA (1)...(19): siRNA sense strand
ggcaugugguucagcagaa

SEQ ID NO: 567292 - RNA, 19 nt, Homo sapiens
  misc_RNA (1)...(19): siRNA sense strand
gaaaauaccaauccauaag

SEQ ID NO: 567293 - RNA, 19 nt, Homo sapiens
  misc_RNA (1)...(19): siRNA sense strand
agcagaaaguuccuagauu

SEQ ID NO: 567294 - RNA, 19 nt, Homo sapiens
  misc_RNA (1)...(19): siRNA sense strand
ggagaggugugaguguaag

SEQ ID NO: 567295 - RNA, 19 nt, Homo sapiens
  misc_RNA (1)...(19): siRNA sense strand
cagcagaaaguuccuagau

SEQ ID NO: 567296 - RNA, 19 nt, Homo sapiens
  misc_RNA (1)...(19): siRNA sense strand
ugugaaagcaugacugaug

SEQ ID NO: 567297 - RNA, 19 nt, Homo sapiens
  misc_RNA (1)...(19): siRNA sense strand
ggugugaaagcaugacuga

SEQ ID NO: 567298 - RNA, 19 nt, Homo sapiens
  misc_RNA (1)...(19): siRNA sense strand
gggcaaagaaaacaaagua

SEQ ID NO: 567299 - RNA, 19 nt, Homo sapiens
  misc_RNA (1)...(19): siRNA sense strand
ggacacaaggcagagaaug

SEQ ID NO: 567300 - RNA, 19 nt, Homo sapiens
  misc_RNA (1)...(19): siRNA sense strand
gagauggaacugcaugauc

SEQ ID NO: 567301 - RNA, 19 nt, Homo sapiens
  misc_RNA (1)...(19): siRNA sense strand
gcaggcaacaugacagagu

SEQ ID NO: 567302 - RNA, 19 nt, Homo sapiens
  misc_RNA (1)...(19): siRNA sense strand
cagaaggagcugugcaaga

SEQ ID NO: 567303 - RNA, 19 nt, Homo sapiens
  misc_RNA (1)...(19): siRNA sense strand
gaaaagauuggccauuugu

SEQ ID NO: 567304 - RNA, 19 nt, Homo sapiens
  misc_RNA (1)...(19): siRNA sense strand
gcuccgaugauguccagua

SEQ ID NO: 567305 - RNA, 19 nt, Homo sapiens
  misc_RNA (1)...(19): siRNA sense strand
gcgccaauuugccgcugaa

SEQ ID NO: 567306 - RNA, 19 nt, Homo sapiens
  misc_RNA (1)...(19): siRNA sense strand
gagguuacaacacccaugu

SEQ ID NO: 567307 - RNA, 19 nt, Homo sapiens
  misc_RNA (1)...(19): siRNA sense strand
gaagcugggcugcgccaau

SEQ ID NO: 567308 - RNA, 19 nt, Homo sapiens
  misc_RNA (1)...(19): siRNA sense strand
ggaaacaccacgggcaaag

SEQ ID NO: 567309 - RNA, 19 nt, Homo sapiens
  misc_RNA (1)...(19): siRNA sense strand
aagauuggccauuuguuga

SEQ ID NO: 567310 - RNA, 19 nt, Homo sapiens
  misc_RNA (1)...(19): siRNA sense strand
ugaaaagauuggccauuug

SEQ ID NO: 567311 - RNA, 19 nt, Homo sapiens
  misc_RNA (1)...(19): siRNA sense strand
gagcagcggcaccaaagag

SEQ ID NO: 567312 - RNA, 19 nt, Homo sapiens
  misc_RNA (1)...(19): siRNA sense strand
gauaagaaacugggaaucc

SEQ ID NO: 567313 - RNA, 19 nt, Homo sapiens
  misc_RNA (1)...(19): siRNA sense strand
cggcuccugugcugugaaa

SEQ ID NO: 567314 - RNA, 19 nt, Homo sapiens
  misc_RNA (1)...(19): siRNA sense strand
gaaugcaaccguacaucag

SEQ ID NO: 567315 - RNA, 19 nt, Homo sapiens
  misc_RNA (1)...(19): siRNA sense strand
gagagauggaacugcauga

SEQ ID NO: 567316 - RNA, 19 nt, Homo sapiens
  misc_RNA (1)...(19): siRNA sense strand
uguagaagauaagaaacug

SEQ ID NO: 567317 - RNA, 19 nt, Homo sapiens
  misc_RNA (1)...(19): siRNA sense strand
gcucuauguuaauaagucu

SEQ ID NO: 567318 - RNA, 19 nt, Homo sapiens
  misc_RNA (1)...(19): siRNA sense strand
augaucugcucuauguuaa

SEQ ID NO: 567319 - RNA, 19 nt, Homo sapiens
  misc_RNA (1)...(19): siRNA sense strand
agaaugcaaccguacauca

SEQ ID NO: 567320 - RNA, 19 nt, Homo sapiens
  misc_RNA (1)...(19): siRNA sense strand
uugaaaagauuggccauuu

SEQ ID NO: 567321 - RNA, 19 nt, Homo sapiens
  misc_RNA (1)...(19): siRNA sense strand
ccaauuugccgcugaacag

SEQ ID NO: 567322 - RNA, 19 nt, Homo sapiens
  misc_RNA (1)...(19): siRNA sense strand
uauuagcaaugaaccuaca

SEQ ID NO: 567323 - RNA, 19 nt, Homo sapiens
  misc_RNA (1)...(19): siRNA sense strand
gaggugugaguguaaguuc

SEQ ID NO: 567324 - RNA, 19 nt, Homo sapiens
  misc_RNA (1)...(19): siRNA sense strand
aaaaugcgcaggagagaaa

SEQ ID NO: 567325 - RNA, 19 nt, Homo sapiens
  misc_RNA (1)...(19): siRNA sense strand
ccagauaucagacaaaaca

SEQ ID NO: 567326 - RNA, 19 nt, Homo sapiens
  misc_RNA (1)...(19): siRNA sense strand
ugaaccuacauaacaauga

SEQ ID NO: 567327 - RNA, 19 nt, Homo sapiens
  misc_RNA (1)...(19): siRNA sense strand
gcugggcugcgccaauuug

SEQ ID NO: 567328 - RNA, 19 nt, Homo sapiens
  misc_RNA (1)...(19): siRNA sense strand
gauuggccauuuguugaag

SEQ ID NO: 567329 - RNA, 19 nt, Homo sapiens
  misc_RNA (1)...(19): siRNA sense strand
gccagaaggagcugugcaa

SEQ ID NO: 567330 - RNA, 19 nt, Homo sapiens
  misc_RNA (1)...(19): siRNA sense strand
gggcugcuccgaugauguc

SEQ ID NO: 567331 - RNA, 19 nt, Homo sapiens
  misc_RNA (1)...(19): siRNA sense strand
ucgccaaguugaugucagu

SEQ ID NO: 567332 - RNA, 19 nt, Homo sapiens
  misc_RNA (1)...(19): siRNA sense strand
aaccaugucuucuuuugaa

SEQ ID NO: 567333 - RNA, 19 nt, Homo sapiens
  misc_RNA (1)...(19): siRNA sense strand
gcaggcugucgccaaguug

SEQ ID NO: 567334 - RNA, 19 nt, Homo sapiens
  misc_RNA (1)...(19): siRNA sense strand
guucaucuggugcugcuau

SEQ ID NO: 567335 - RNA, 19 nt, Homo sapiens
  misc_RNA (1)...(19): siRNA sense strand
gagaaugcaaccguacauc

SEQ ID NO: 567336 - RNA, 19 nt, Homo sapiens
  misc_RNA (1)...(19): siRNA sense strand
gugcaggcaacaugacaga

SEQ ID NO: 567337 - RNA, 19 nt, Homo sapiens
  misc_RNA (1)...(19): siRNA sense strand
auaagucucccaacuacug

SEQ ID NO: 567338 - RNA, 19 nt, Homo sapiens
  misc_RNA (1)...(19): siRNA sense strand
gaucagaggaaaauaccaa

SEQ ID NO: 567339 - RNA, 19 nt, Homo sapiens
  misc_RNA (1)...(19): siRNA sense strand
caguauggcaugugguuca

SEQ ID NO: 567340 - RNA, 19 nt, Homo sapiens
  misc_RNA (1)...(19): siRNA sense strand
gaacaacccugacugagaa

SEQ ID NO: 567341 - RNA, 19 nt, Homo sapiens
  misc_RNA (1)...(19): siRNA sense strand
ugagggagcuguugguaua

SEQ ID NO: 567342 - RNA, 19 nt, Homo sapiens
  misc_RNA (1)...(19): siRNA sense strand
caagaagccugaagaugaa

SEQ ID NO: 567343 - RNA, 19 nt, Homo sapiens
  misc_RNA (1)...(19): siRNA sense strand
ggaucaagauauucaagua

SEQ ID NO: 567344 - RNA, 19 nt, Homo sapiens
  misc_RNA (1)...(19): siRNA sense strand
agagugagguucccuauaa

SEQ ID NO: 567345 - RNA, 19 nt, Homo sapiens
  misc_RNA (1)...(19): siRNA sense strand
ccaagaagccugaagauga

SEQ ID NO: 567346 - RNA, 19 nt, Homo sapiens
  misc_RNA (1)...(19): siRNA sense strand
caacaagacccuacuaaga

SEQ ID NO: 567347 - RNA, 19 nt, Homo sapiens
  misc_RNA (1)...(19): siRNA sense strand
aaacagggcuacaacaaga

SEQ ID NO: 567348 - RNA, 19 nt, Homo sapiens
  misc_RNA (1)...(19): siRNA sense strand
gaaacuaggccgaucuauu

SEQ ID NO: 567349 - RNA, 19 nt, Homo sapiens
  misc_RNA (1)...(19): siRNA sense strand
aaacacguaugcagacuuu

SEQ ID NO: 567350 - RNA, 19 nt, Homo sapiens
  misc_RNA (1)...(19): siRNA sense strand
aaacuaggccgaucuauug

SEQ ID NO: 567351 - RNA, 19 nt, Homo sapiens
  misc_RNA (1)...(19): siRNA sense strand
caacucggcuaccugcuuu

SEQ ID NO: 567352 - RNA, 19 nt, Homo sapiens
  misc_RNA (1)...(19): siRNA sense strand
ggaguagugucccagauug

SEQ ID NO: 567353 - RNA, 19 nt, Homo sapiens
  misc_RNA (1)...(19): siRNA sense strand
ucugagcucuucuuacaua

SEQ ID NO: 567354 - RNA, 19 nt, Homo sapiens
  misc_RNA (1)...(19): siRNA sense strand
guacaucagcuucaacaaa

SEQ ID NO: 567355 - RNA, 19 nt, Homo sapiens
  misc_RNA (1)...(19): siRNA sense strand
ggaacaacccugacugaga

SEQ ID NO: 567356 - RNA, 19 nt, Homo sapiens
  misc_RNA (1)...(19): siRNA sense strand
cuacugaccuauggaauga

SEQ ID NO: 567357 - RNA, 19 nt, Homo sapiens
  misc_RNA (1)...(19): siRNA sense strand
caacaugaaugcugucaac

SEQ ID NO: 567358 - RNA, 19 nt, Homo sapiens
  misc_RNA (1)...(19): siRNA sense strand
ggauuucaccaacaccuua

SEQ ID NO: 567359 - RNA, 19 nt, Homo sapiens
  misc_RNA (1)...(19): siRNA sense strand
ugucugagcucuucuuaca

SEQ ID NO: 567360 - RNA, 19 nt, Homo sapiens
  misc_RNA (1)...(19): siRNA sense strand
acacugagauugagaaacu

SEQ ID NO: 567361 - RNA, 19 nt, Homo sapiens
  misc_RNA (1)...(19): siRNA sense strand
acaccaaagugaugucuga

SEQ ID NO: 567362 - RNA, 19 nt, Homo sapiens
  misc_RNA (1)...(19): siRNA sense strand
caacguugcagaggaguua

SEQ ID NO: 567363 - RNA, 19 nt, Homo sapiens
  misc_RNA (1)...(19): siRNA sense strand
ggagcuggcuggacagaag

SEQ ID NO: 567364 - RNA, 19 nt, Homo sapiens
  misc_RNA (1)...(19): siRNA sense strand
gucauguucuucauuguuu

SEQ ID NO: 567365 - RNA, 19 nt, Homo sapiens
  misc_RNA (1)...(19): siRNA sense strand
guggugagauuccaacguu

SEQ ID NO: 567366 - RNA, 19 nt, Homo sapiens
  misc_RNA (1)...(19): siRNA sense strand
ucaccaaguuugacagaga

SEQ ID NO: 567367 - RNA, 19 nt, Homo sapiens
  misc_RNA (1)...(19): siRNA sense strand
cuacaaugcuaucgacaau

SEQ ID NO: 567368 - RNA, 19 nt, Homo sapiens
  misc_RNA (1)...(19): siRNA sense strand
gagugagguucccuauaaa

SEQ ID NO: 567369 - RNA, 19 nt, Homo sapiens
  misc_RNA (1)...(19): siRNA sense strand
gcugagaaccgggaacuuu

SEQ ID NO: 567370 - RNA, 19 nt, Homo sapiens
  misc_RNA (1)...(19): siRNA sense strand
gcuggagacuguccuggaa

SEQ ID NO: 567371 - RNA, 19 nt, Homo sapiens
  misc_RNA (1)...(19): siRNA sense strand
gagcugcuaugaugucuac

SEQ ID NO: 567372 - RNA, 19 nt, Homo sapiens
  misc_RNA (1)...(19): siRNA sense strand
gagaaccgggaacuuuaua

SEQ ID NO: 567373 - RNA, 19 nt, Homo sapiens
  misc_RNA (1)...(19): siRNA sense strand
gagaagaggaagccuuaga

SEQ ID NO: 567374 - RNA, 19 nt, Homo sapiens
  misc_RNA (1)...(19): siRNA sense strand
caacugggacuucuuuauc

SEQ ID NO: 567375 - RNA, 19 nt, Homo sapiens
  misc_RNA (1)...(19): siRNA sense strand
gaaacagggcuacaacaag

SEQ ID NO: 567376 - RNA, 19 nt, Homo sapiens
  misc_RNA (1)...(19): siRNA sense strand
aggaugagcugcaacuuuc

SEQ ID NO: 567377 - RNA, 19 nt, Homo sapiens
  misc_RNA (1)...(19): siRNA sense strand
auucugagcugcuaugaug

SEQ ID NO: 567378 - RNA, 19 nt, Homo sapiens
  misc_RNA (1)...(19): siRNA sense strand
gagcagcccacaaggcaaa

SEQ ID NO: 567379 - RNA, 19 nt, Homo sapiens
  misc_RNA (1)...(19): siRNA sense strand
gcugugaggucaucuucug

SEQ ID NO: 567380 - RNA, 19 nt, Homo sapiens
  misc_RNA (1)...(19): siRNA sense strand
gcaacugggacuucuuuau

SEQ ID NO: 567381 - RNA, 19 nt, Homo sapiens
  misc_RNA (1)...(19): siRNA sense strand
cagcggagguggcuacuac

SEQ ID NO: 567382 - RNA, 19 nt, Homo sapiens
  misc_RNA (1)...(19): siRNA sense strand
aagagaagaggaagccuua

SEQ ID NO: 567383 - RNA, 19 nt, Homo sapiens
  misc_RNA (1)...(19): siRNA sense strand
gaaggaacaagcuauuugg

SEQ ID NO: 567384 - RNA, 19 nt, Homo sapiens
  misc_RNA (1)...(19): siRNA sense strand
gaaccgggaacuuuauauc

SEQ ID NO: 567385 - RNA, 19 nt, Homo sapiens
  misc_RNA (1)...(19): siRNA sense strand
gagaaacuaggccgaucua

SEQ ID NO: 567386 - RNA, 19 nt, Homo sapiens
  misc_RNA (1)...(19): siRNA sense strand
ggguggcccucaacacuga

SEQ ID NO: 567387 - RNA, 19 nt, Homo sapiens
  misc_RNA (1)...(19): siRNA sense strand
ccugggcccugccuacuuu

SEQ ID NO: 567388 - RNA, 19 nt, Homo sapiens
  misc_RNA (1)...(19): siRNA sense strand
gggcuucgccgucauguuc

SEQ ID NO: 567389 - RNA, 19 nt, Homo sapiens
  misc_RNA (1)...(19): siRNA sense strand
ucaaguacaucagcuucaa

SEQ ID NO: 567390 - RNA, 19 nt, Homo sapiens
  misc_RNA (1)...(19): siRNA sense strand
gagagugagguucccuaua

SEQ ID NO: 567391 - RNA, 19 nt, Homo sapiens
  misc_RNA (1)...(19): siRNA sense strand
ugaaggaacaagcuauuug

SEQ ID NO: 567392 - RNA, 19 nt, Homo sapiens
  misc_RNA (1)...(19): siRNA sense strand
cuaggccgaucuauuguga

SEQ ID NO: 567393 - RNA, 19 nt, Homo sapiens
  misc_RNA (1)...(19): siRNA sense strand
ggagaggguuucggaugug

SEQ ID NO: 567394 - RNA, 19 nt, Homo sapiens
  misc_RNA (1)...(19): siRNA sense strand
gacuuugacuacaaugcua

SEQ ID NO: 567395 - RNA, 19 nt, Homo sapiens
  misc_RNA (1)...(19): siRNA sense strand
gggagcuguugguauauau

SEQ ID NO: 567396 - RNA, 19 nt, Homo sapiens
  misc_RNA (1)...(19): siRNA sense strand
guugguauauauuguguuc

SEQ ID NO: 567397 - RNA, 19 nt, Homo sapiens
  misc_RNA (1)...(19): siRNA sense strand
gccgucauguucuucauug

SEQ ID NO: 567398 - RNA, 19 nt, Homo sapiens
  misc_RNA (1)...(19): siRNA sense strand
ugaaacagggcuacaacaa

SEQ ID NO: 567399 - RNA, 19 nt, Homo sapiens
  misc_RNA (1)...(19): siRNA sense strand
gagcuguugguauauauug

SEQ ID NO: 567400 - RNA, 19 nt, Homo sapiens
  misc_RNA (1)...(19): siRNA sense strand
agcaggagauccaguuuga

SEQ ID NO: 567401 - RNA, 19 nt, Homo sapiens
  misc_RNA (1)...(19): siRNA sense strand
gaugucugagcucuucuua

SEQ ID NO: 567402 - RNA, 19 nt, Homo sapiens
  misc_RNA (1)...(19): siRNA sense strand
ucaaugacacauauucaga

SEQ ID NO: 567403 - RNA, 19 nt, Homo sapiens
  misc_RNA (1)...(19): siRNA sense strand
cagcaacugggacuucuuu

SEQ ID NO: 567404 - RNA, 19 nt, Homo sapiens
  misc_RNA (1)...(19): siRNA sense strand
gagcucuucuuacauacuc

SEQ ID NO: 567405 - RNA, 19 nt, Homo sapiens
  misc_RNA (1)...(19): siRNA sense strand
ugaaaaugcuggagaggaa

SEQ ID NO: 567406 - RNA, 19 nt, Homo sapiens
  misc_RNA (1)...(19): siRNA sense strand
caucuacuaugagaacaug

SEQ ID NO: 567407 - RNA, 19 nt, Homo sapiens
  misc_RNA (1)...(19): siRNA sense strand
cugagaaccgggaacuuua

SEQ ID NO: 567408 - RNA, 19 nt, Homo sapiens
  misc_RNA (1)...(19): siRNA sense strand
gcucaaagcugaaaaugcu

SEQ ID NO: 567409 - RNA, 19 nt, Homo sapiens
  misc_RNA (1)...(19): siRNA sense strand
gaugagaaggaacaggaaa

SEQ ID NO: 567410 - RNA, 19 nt, Homo sapiens
  misc_RNA (1)...(19): siRNA sense strand
ugacagagaugggaaucgu

SEQ ID NO: 567411 - RNA, 19 nt, Homo sapiens
  misc_RNA (1)...(19): siRNA sense strand
gagcaggagauccaguuug

SEQ ID NO: 567412 - RNA, 19 nt, Homo sapiens
  misc_RNA (1)...(19): siRNA sense strand
ucgccuggaucaagauauu

SEQ ID NO: 567413 - RNA, 19 nt, Homo sapiens
  misc_RNA (1)...(19): siRNA sense strand
ugaaugcugucaaccucuu

SEQ ID NO: 567414 - RNA, 19 nt, Homo sapiens
  misc_RNA (1)...(19): siRNA sense strand
caaggcaucagaggacuuu

SEQ ID NO: 567415 - RNA, 19 nt, Homo sapiens
  misc_RNA (1)...(19): siRNA sense strand
gcuccagugcuuauuacua

SEQ ID NO: 567416 - RNA, 19 nt, Homo sapiens
  misc_RNA (1)...(19): siRNA sense strand
gcaaauccgcacagucaag

SEQ ID NO: 567417 - RNA, 19 nt, Homo sapiens
  misc_RNA (1)...(19): siRNA sense strand
uggcaaauccgcacaguca

SEQ ID NO: 567418 - RNA, 19 nt, Homo sapiens
  misc_RNA (1)...(19): siRNA sense strand
cuacaaugccaauaucaau

SEQ ID NO: 567419 - RNA, 19 nt, Homo sapiens
  misc_RNA (1)...(19): siRNA sense strand
acaaugcuaucgacaaugc

SEQ ID NO: 567420 - RNA, 19 nt, Homo sapiens
  misc_RNA (1)...(19): siRNA sense strand
gcaggaggcuggguuucag

SEQ ID NO: 567421 - RNA, 19 nt, Homo sapiens
  misc_RNA (1)...(19): siRNA sense strand
ggacacgcagagcaugaaa

SEQ ID NO: 567422 - RNA, 19 nt, Homo sapiens
  misc_RNA (1)...(19): siRNA sense strand
ucuacuaugugguggaaga

SEQ ID NO: 567423 - RNA, 19 nt, Homo sapiens
  misc_RNA (1)...(19): siRNA sense strand
ggagagugagguucccuau

SEQ ID NO: 567424 - RNA, 19 nt, Homo sapiens
  misc_RNA (1)...(19): siRNA sense strand
caacacugagauugagaaa

SEQ ID NO: 567425 - RNA, 19 nt, Homo sapiens
  misc_RNA (1)...(19): siRNA sense strand
ggagcaggagauccaguuu

SEQ ID NO: 567426 - RNA, 19 nt, Homo sapiens
  misc_RNA (1)...(19): siRNA sense strand
uacaucagcuucaacaaaa

SEQ ID NO: 567427 - RNA, 19 nt, Homo sapiens
  misc_RNA (1)...(19): siRNA sense strand
guaugcagacuuugaguuc

SEQ ID NO: 567428 - RNA, 19 nt, Homo sapiens
  misc_RNA (1)...(19): siRNA sense strand
agacaaagaagaacaacuc

SEQ ID NO: 567429 - RNA, 19 nt, Homo sapiens
  misc_RNA (1)...(19): siRNA sense strand
acacguaugcagacuuuga

SEQ ID NO: 567430 - RNA, 19 nt, Homo sapiens
  misc_RNA (1)...(19): siRNA sense strand
aagcugauccgcuauguca

SEQ ID NO: 567431 - RNA, 19 nt, Homo sapiens
  misc_RNA (1)...(19): siRNA sense strand
ucacucaguuccggauaau

SEQ ID NO: 567432 - RNA, 19 nt, Homo sapiens
  misc_RNA (1)...(19): siRNA sense strand
cuucuuacauacuccauca

SEQ ID NO: 567433 - RNA, 19 nt, Homo sapiens
  misc_RNA (1)...(19): siRNA sense strand
gugaaggaacaagcuauuu

SEQ ID NO: 567434 - RNA, 19 nt, Homo sapiens
  misc_RNA (1)...(19): siRNA sense strand
acagaaggaugagcugcaa

SEQ ID NO: 567435 - RNA, 19 nt, Homo sapiens
  misc_RNA (1)...(19): siRNA sense strand
ugucaccuaugucuucuuc

SEQ ID NO: 567436 - RNA, 19 nt, Homo sapiens
  misc_RNA (1)...(19): siRNA sense strand
guggaaaacuuuagcacuu

SEQ ID NO: 567437 - RNA, 19 nt, Homo sapiens
  misc_RNA (1)...(19): siRNA sense strand
gcacagcguggacauacca

SEQ ID NO: 567438 - RNA, 19 nt, Homo sapiens
  misc_RNA (1)...(19): siRNA sense strand
gaucaagauauucaaguac

SEQ ID NO: 567439 - RNA, 19 nt, Homo sapiens
  misc_RNA (1)...(19): siRNA sense strand
agggagcuguugguauaua

SEQ ID NO: 567440 - RNA, 19 nt, Homo sapiens
  misc_RNA (1)...(19): siRNA sense strand
caaacaagcugcccacaua

SEQ ID NO: 567441 - RNA, 19 nt, Homo sapiens
  misc_RNA (1)...(19): siRNA sense strand
uaacuuaccuccaauaugu

SEQ ID NO: 567442 - RNA, 19 nt, Homo sapiens
  misc_RNA (1)...(19): siRNA sense strand
gcaauaacaugugcauuug

SEQ ID NO: 567443 - RNA, 19 nt, Homo sapiens
  misc_RNA (1)...(19): siRNA sense strand
gggcuuaggcuguuucuua

SEQ ID NO: 567444 - RNA, 19 nt, Homo sapiens
  misc_RNA (1)...(19): siRNA sense strand
caagauuacugucaaacaa

SEQ ID NO: 567445 - RNA, 19 nt, Homo sapiens
  misc_RNA (1)...(19): siRNA sense strand
gaaacaggagcuauuauug

SEQ ID NO: 567446 - RNA, 19 nt, Homo sapiens
  misc_RNA (1)...(19): siRNA sense strand
ggaccugacuguuccuuga

SEQ ID NO: 567447 - RNA, 19 nt, Homo sapiens
  misc_RNA (1)...(19): siRNA sense strand
gugcaaauguuuauguuga

SEQ ID NO: 567448 - RNA, 19 nt, Homo sapiens
  misc_RNA (1)...(19): siRNA sense strand
gaugcaaucuuucuaaugg

SEQ ID NO: 567449 - RNA, 19 nt, Homo sapiens
  misc_RNA (1)...(19): siRNA sense strand
guagaaacaggagcuauua

SEQ ID NO: 567450 - RNA, 19 nt, Homo sapiens
  misc_RNA (1)...(19): siRNA sense strand
gaaggaauuccacaagauu

SEQ ID NO: 567451 - RNA, 19 nt, Homo sapiens
  misc_RNA (1)...(19): siRNA sense strand
aagaagaggucaagaagga

SEQ ID NO: 567452 - RNA, 19 nt, Homo sapiens
  misc_RNA (1)...(19): siRNA sense strand
ggcaauaacaugugcauuu

SEQ ID NO: 567453 - RNA, 19 nt, Homo sapiens
  misc_RNA (1)...(19): siRNA sense strand
cuaguuggauucauuaaug

SEQ ID NO: 567454 - RNA, 19 nt, Homo sapiens
  misc_RNA (1)...(19): siRNA sense strand
gauugcaacuguccaucua

SEQ ID NO: 567455 - RNA, 19 nt, Homo sapiens
  misc_RNA (1)...(19): siRNA sense strand
uaugaaaucugaagagaag

SEQ ID NO: 567456 - RNA, 19 nt, Homo sapiens
  misc_RNA (1)...(19): siRNA sense strand
ccaacacacuuccaaagga

SEQ ID NO: 567457 - RNA, 19 nt, Homo sapiens
  misc_RNA (1)...(19): siRNA sense strand
guacaaaggaaguuaaauc

SEQ ID NO: 567458 - RNA, 19 nt, Homo sapiens
  misc_RNA (1)...(19): siRNA sense strand
ggcauuggaugugugguua

SEQ ID NO: 567459 - RNA, 19 nt, Homo sapiens
  misc_RNA (1)...(19): siRNA sense strand
ggaaauucaucugcaguuc

SEQ ID NO: 567460 - RNA, 19 nt, Homo sapiens
  misc_RNA (1)...(19): siRNA sense strand
gaagaggucaagaaggaaa

SEQ ID NO: 567461 - RNA, 19 nt, Homo sapiens
  misc_RNA (1)...(19): siRNA sense strand
gaaucuacaguuucaguuu

SEQ ID NO: 567462 - RNA, 19 nt, Homo sapiens
  misc_RNA (1)...(19): siRNA sense strand
ggcuuaggcuguuucuuaa

SEQ ID NO: 567463 - RNA, 19 nt, Homo sapiens
  misc_RNA (1)...(19): siRNA sense strand
ugagguguaugaaaucuga

SEQ ID NO: 567464 - RNA, 19 nt, Homo sapiens
  misc_RNA (1)...(19): siRNA sense strand
gaacgggaauaaacauggu

SEQ ID NO: 567465 - RNA, 19 nt, Homo sapiens
  misc_RNA (1)...(19): siRNA sense strand
aauggaagcuuugagauug

SEQ ID NO: 567466 - RNA, 19 nt, Homo sapiens
  misc_RNA (1)...(19): siRNA sense strand
ugguuuggcuuucugauuu

SEQ ID NO: 567467 - RNA, 19 nt, Homo sapiens
  misc_RNA (1)...(19): siRNA sense strand
ugaaggaauuccacaagau

SEQ ID NO: 567468 - RNA, 19 nt, Homo sapiens
  misc_RNA (1)...(19): siRNA sense strand
aaauaccucuuaugaagga

SEQ ID NO: 567469 - RNA, 19 nt, Homo sapiens
  misc_RNA (1)...(19): siRNA sense strand
aggaaggacuagagacuaa

SEQ ID NO: 567470 - RNA, 19 nt, Homo sapiens
  misc_RNA (1)...(19): siRNA sense strand
ggauauaugguucucuuga

SEQ ID NO: 567471 - RNA, 19 nt, Homo sapiens
  misc_RNA (1)...(19): siRNA sense strand
aauugcagcuguauucaaa

SEQ ID NO: 567472 - RNA, 19 nt, Homo sapiens
  misc_RNA (1)...(19): siRNA sense strand
caacuuguccucaaacagu

SEQ ID NO: 567473 - RNA, 19 nt, Homo sapiens
  misc_RNA (1)...(19): siRNA sense strand
cgacaaaggaccugacugu

SEQ ID NO: 567474 - RNA, 19 nt, Homo sapiens
  misc_RNA (1)...(19): siRNA sense strand
gcagcuguauucaaacauc

SEQ ID NO: 567475 - RNA, 19 nt, Homo sapiens
  misc_RNA (1)...(19): siRNA sense strand
acaaauagagagacaauuc

SEQ ID NO: 567476 - RNA, 19 nt, Homo sapiens
  misc_RNA (1)...(19): siRNA sense strand
ugauacaguucaaugcauu

SEQ ID NO: 567477 - RNA, 19 nt, Homo sapiens
  misc_RNA (1)...(19): siRNA sense strand
gagcuauuauugguccuuu

SEQ ID NO: 567478 - RNA, 19 nt, Homo sapiens
  misc_RNA (1)...(19): siRNA sense strand
aaacucccauccugccuuu

SEQ ID NO: 567479 - RNA, 19 nt, Homo sapiens
  misc_RNA (1)...(19): siRNA sense strand
gcaaauguuuauguugaca

SEQ ID NO: 567480 - RNA, 19 nt, Homo sapiens
  misc_RNA (1)...(19): siRNA sense strand
gauauaugguucucuugag

SEQ ID NO: 567481 - RNA, 19 nt, Homo sapiens
  misc_RNA (1)...(19): siRNA sense strand
ugucagcgaugagcaguuu

SEQ ID NO: 567482 - RNA, 19 nt, Homo sapiens
  misc_RNA (1)...(19): siRNA sense strand
ucaaacaucaggaaauuca

SEQ ID NO: 567483 - RNA, 19 nt, Homo sapiens
  misc_RNA (1)...(19): siRNA sense strand
guucaagauuacugucaaa

SEQ ID NO: 567484 - RNA, 19 nt, Homo sapiens
  misc_RNA (1)...(19): siRNA sense strand
agaaacaggagcuauuauu

SEQ ID NO: 567485 - RNA, 19 nt, Homo sapiens
  misc_RNA (1)...(19): siRNA sense strand
ggugugggauuacauacau

SEQ ID NO: 567486 - RNA, 19 nt, Homo sapiens
  misc_RNA (1)...(19): siRNA sense strand
cuucaugccuaaauaccua

SEQ ID NO: 567487 - RNA, 19 nt, Homo sapiens
  misc_RNA (1)...(19): siRNA sense strand
caacaucccaacaucucua

SEQ ID NO: 567488 - RNA, 19 nt, Homo sapiens
  misc_RNA (1)...(19): siRNA sense strand
ucacacaaauagagagaca

SEQ ID NO: 567489 - RNA, 19 nt, Homo sapiens
  misc_RNA (1)...(19): siRNA sense strand
aaauucaucugcaguucuu

SEQ ID NO: 567490 - RNA, 19 nt, Homo sapiens
  misc_RNA (1)...(19): siRNA sense strand
aaugacaucuuugcugauu

SEQ ID NO: 567491 - RNA, 19 nt, Homo sapiens
  misc_RNA (1)...(19): siRNA sense strand
uaauggaagcuuugagauu

SEQ ID NO: 567492 - RNA, 19 nt, Homo sapiens
  misc_RNA (1)...(19): siRNA sense strand
gcaauccaauuuauaugcu

SEQ ID NO: 567493 - RNA, 19 nt, Homo sapiens
  misc_RNA (1)...(19): siRNA sense strand
ugaauuccaugcucacaca

SEQ ID NO: 567494 - RNA, 19 nt, Homo sapiens
  misc_RNA (1)...(19): siRNA sense strand
caacgcaggauccaucaga

SEQ ID NO: 567495 - RNA, 19 nt, Homo sapiens
  misc_RNA (1)...(19): siRNA sense strand
caaauagagagacaauuca

SEQ ID NO: 567496 - RNA, 19 nt, Homo sapiens
  misc_RNA (1)...(19): siRNA sense strand
acaaaggaccugacuguuc

SEQ ID NO: 567497 - RNA, 19 nt, Homo sapiens
  misc_RNA (1)...(19): siRNA sense strand
gaaggacuagagacuaaug

SEQ ID NO: 567498 - RNA, 19 nt, Homo sapiens
  misc_RNA (1)...(19): siRNA sense strand
aauaugggauccugugugu

SEQ ID NO: 567499 - RNA, 19 nt, Homo sapiens
  misc_RNA (1)...(19): siRNA sense strand
guuaugggcuuaggcuguu

SEQ ID NO: 567500 - RNA, 19 nt, Homo sapiens
  misc_RNA (1)...(19): siRNA sense strand
acaguucaaugcauucguu

SEQ ID NO: 567501 - RNA, 19 nt, Homo sapiens
  misc_RNA (1)...(19): siRNA sense strand
gguauuuccuauauagaag

SEQ ID NO: 567502 - RNA, 19 nt, Homo sapiens
  misc_RNA (1)...(19): siRNA sense strand
caucagaguguacaaagga

SEQ ID NO: 567503 - RNA, 19 nt, Homo sapiens
  misc_RNA (1)...(19): siRNA sense strand
gcuauuauugguccuuuga

SEQ ID NO: 567504 - RNA, 19 nt, Homo sapiens
  misc_RNA (1)...(19): siRNA sense strand
guuccuugaugcuccagua

SEQ ID NO: 567505 - RNA, 19 nt, Homo sapiens
  misc_RNA (1)...(19): siRNA sense strand
gucuggaucuuauaugaau

SEQ ID NO: 567506 - RNA, 19 nt, Homo sapiens
  misc_RNA (1)...(19): siRNA sense strand
ucaggcaacuuguccucaa

SEQ ID NO: 567507 - RNA, 19 nt, Homo sapiens
  misc_RNA (1)...(19): siRNA sense strand
ggaauuccacaagauuuau

SEQ ID NO: 567508 - RNA, 19 nt, Homo sapiens
  misc_RNA (1)...(19): siRNA sense strand
ggguauuuccuauauagaa

SEQ ID NO: 567509 - RNA, 19 nt, Homo sapiens
  misc_RNA (1)...(19): siRNA sense strand
ccaaaggaaggacuagaga

SEQ ID NO: 567510 - RNA, 19 nt, Homo sapiens
  misc_RNA (1)...(19): siRNA sense strand
gaaauucaucugcaguucu

SEQ ID NO: 567511 - RNA, 19 nt, Homo sapiens
  misc_RNA (1)...(19): siRNA sense strand
gaaaauucuucaguuguug

SEQ ID NO: 567512 - RNA, 19 nt, Homo sapiens
  misc_RNA (1)...(19): siRNA sense strand
ggauauauaauuggugguu

SEQ ID NO: 567513 - RNA, 19 nt, Homo sapiens
  misc_RNA (1)...(19): siRNA sense strand
ucuccuucaugccuaaaua

SEQ ID NO: 567514 - RNA, 19 nt, Homo sapiens
  misc_RNA (1)...(19): siRNA sense strand
ucaaugcauucguuaacau

SEQ ID NO: 567515 - RNA, 19 nt, Homo sapiens
  misc_RNA (1)...(19): siRNA sense strand
uaagugugauacaguucaa

SEQ ID NO: 567516 - RNA, 19 nt, Homo sapiens
  misc_RNA (1)...(19): siRNA sense strand
caacuguccaucuaaaaua

SEQ ID NO: 567517 - RNA, 19 nt, Homo sapiens
  misc_RNA (1)...(19): siRNA sense strand
uguaugaaaucugaagaga

SEQ ID NO: 567518 - RNA, 19 nt, Homo sapiens
  misc_RNA (1)...(19): siRNA sense strand
ugagcaguuucauuuauuc

SEQ ID NO: 567519 - RNA, 19 nt, Homo sapiens
  misc_RNA (1)...(19): siRNA sense strand
caggcaacuuguccucaaa

SEQ ID NO: 567520 - RNA, 19 nt, Homo sapiens
  misc_RNA (1)...(19): siRNA sense strand
aggaauuccacaagauuua

SEQ ID NO: 567521 - RNA, 19 nt, Homo sapiens
  misc_RNA (1)...(19): siRNA sense strand
aaacaggagcuauuauugg

SEQ ID NO: 567522 - RNA, 19 nt, Homo sapiens
  misc_RNA (1)...(19): siRNA sense strand
caggauccaucagagugua

SEQ ID NO: 567523 - RNA, 19 nt, Homo sapiens
  misc_RNA (1)...(19): siRNA sense strand
aaucuacaguuucaguuuc

SEQ ID NO: 567524 - RNA, 19 nt, Homo sapiens
  misc_RNA (1)...(19): siRNA sense strand
gauccuguguguggaaaca

SEQ ID NO: 567525 - RNA, 19 nt, Homo sapiens
  misc_RNA (1)...(19): siRNA sense strand
gguuuggcuuucugauuug

SEQ ID NO: 567526 - RNA, 19 nt, Homo sapiens
  misc_RNA (1)...(19): siRNA sense strand
guacguggaaugggugaaa

SEQ ID NO: 567527 - RNA, 19 nt, Homo sapiens
  misc_RNA (1)...(19): siRNA sense strand
guaugaaaucugaagagaa

SEQ ID NO: 567528 - RNA, 19 nt, Homo sapiens
  misc_RNA (1)...(19): siRNA sense strand
caaaauugcagcuguauuc

SEQ ID NO: 567529 - RNA, 19 nt, Homo sapiens
  misc_RNA (1)...(19): siRNA sense strand
uugcaacuguccaucuaaa

SEQ ID NO: 567530 - RNA, 19 nt, Homo sapiens
  misc_RNA (1)...(19): siRNA sense strand
ugacaucuuugcugauugc

SEQ ID NO: 567531 - RNA, 19 nt, Homo sapiens
  misc_RNA (1)...(19): siRNA sense strand
aaacacugucuggaucuua

SEQ ID NO: 567532 - RNA, 19 nt, Homo sapiens
  misc_RNA (1)...(19): siRNA sense strand
cauccugccuuuggguauu

SEQ ID NO: 567533 - RNA, 19 nt, Homo sapiens
  misc_RNA (1)...(19): siRNA sense strand
aacaggagcuauuauuggu

SEQ ID NO: 567534 - RNA, 19 nt, Homo sapiens
  misc_RNA (1)...(19): siRNA sense strand
gacacuggauuugugaaca

SEQ ID NO: 567535 - RNA, 19 nt, Homo sapiens
  misc_RNA (1)...(19): siRNA sense strand
uaacaugugcauuuguauc

SEQ ID NO: 567536 - RNA, 19 nt, Homo sapiens
  misc_RNA (1)...(19): siRNA sense strand
ucucaugacuugugaaaau

SEQ ID NO: 567537 - RNA, 19 nt, Homo sapiens
  misc_RNA (1)...(19): siRNA sense strand
caaucuuucuaauggguau

SEQ ID NO: 567538 - RNA, 19 nt, Homo sapiens
  misc_RNA (1)...(19): siRNA sense strand
agaacagcaauauggaaua

SEQ ID NO: 567539 - RNA, 19 nt, Homo sapiens
  misc_RNA (1)...(19): siRNA sense strand
gugauacaguucaaugcau

SEQ ID NO: 567540 - RNA, 19 nt, Homo sapiens
  misc_RNA (1)...(19): siRNA sense strand
caaacaagcugcccacaua

SEQ ID NO: 567541 - RNA, 19 nt, Homo sapiens
  misc_RNA (1)...(19): siRNA sense strand
uaacuuaccuccaauaugu

SEQ ID NO: 567542 - RNA, 19 nt, Homo sapiens
  misc_RNA (1)...(19): siRNA sense strand
gcaauaacaugugcauuug

SEQ ID NO: 567543 - RNA, 19 nt, Homo sapiens
  misc_RNA (1)...(19): siRNA sense strand
gggcuuaggcuguuucuua

SEQ ID NO: 567544 - RNA, 19 nt, Homo sapiens
  misc_RNA (1)...(19): siRNA sense strand
caagauuacugucaaacaa

SEQ ID NO: 567545 - RNA, 19 nt, Homo sapiens
  misc_RNA (1)...(19): siRNA sense strand
gaaacaggagcuauuauug

SEQ ID NO: 567546 - RNA, 19 nt, Homo sapiens
  misc_RNA (1)...(19): siRNA sense strand
ggaccugacuguuccuuga

SEQ ID NO: 567547 - RNA, 19 nt, Homo sapiens
  misc_RNA (1)...(19): siRNA sense strand
gugcaaauguuuauguuga

SEQ ID NO: 567548 - RNA, 19 nt, Homo sapiens
  misc_RNA (1)...(19): siRNA sense strand
gaugcaaucuuucuaaugg

SEQ ID NO: 567549 - RNA, 19 nt, Homo sapiens
  misc_RNA (1)...(19): siRNA sense strand
guagaaacaggagcuauua

SEQ ID NO: 567550 - RNA, 19 nt, Homo sapiens
  misc_RNA (1)...(19): siRNA sense strand
gaaggaauuccacaagauu

SEQ ID NO: 567551 - RNA, 19 nt, Homo sapiens
  misc_RNA (1)...(19): siRNA sense strand
aagaagaggucaagaagga

SEQ ID NO: 567552 - RNA, 19 nt, Homo sapiens
  misc_RNA (1)...(19): siRNA sense strand
ggcaauaacaugugcauuu

SEQ ID NO: 567553 - RNA, 19 nt, Homo sapiens
  misc_RNA (1)...(19): siRNA sense strand
cuaguuggauucauuaaug

SEQ ID NO: 567554 - RNA, 19 nt, Homo sapiens
  misc_RNA (1)...(19): siRNA sense strand
gauugcaacuguccaucua

SEQ ID NO: 567555 - RNA, 19 nt, Homo sapiens
  misc_RNA (1)...(19): siRNA sense strand
uaugaaaucugaagagaag

SEQ ID NO: 567556 - RNA, 19 nt, Homo sapiens
  misc_RNA (1)...(19): siRNA sense strand
ccaacacacuuccaaagga

SEQ ID NO: 567557 - RNA, 19 nt, Homo sapiens
  misc_RNA (1)...(19): siRNA sense strand
guacaaaggaaguuaaauc

SEQ ID NO: 567558 - RNA, 19 nt, Homo sapiens
  misc_RNA (1)...(19): siRNA sense strand
ggcauuggaugugugguua

SEQ ID NO: 567559 - RNA, 19 nt, Homo sapiens
  misc_RNA (1)...(19): siRNA sense strand
ggaaauucaucugcaguuc

SEQ ID NO: 567560 - RNA, 19 nt, Homo sapiens
  misc_RNA (1)...(19): siRNA sense strand
gaagaggucaagaaggaaa

SEQ ID NO: 567561 - RNA, 19 nt, Homo sapiens
  misc_RNA (1)...(19): siRNA sense strand
gaaucuacaguuucaguuu

SEQ ID NO: 567562 - RNA, 19 nt, Homo sapiens
  misc_RNA (1)...(19): siRNA sense strand
ggcuuaggcuguuucuuaa

SEQ ID NO: 567563 - RNA, 19 nt, Homo sapiens
  misc_RNA (1)...(19): siRNA sense strand
ugagguguaugaaaucuga

SEQ ID NO: 567564 - RNA, 19 nt, Homo sapiens
  misc_RNA (1)...(19): siRNA sense strand
gaacgggaauaaacauggu

SEQ ID NO: 567565 - RNA, 19 nt, Homo sapiens
  misc_RNA (1)...(19): siRNA sense strand
aauggaagcuuugagauug

SEQ ID NO: 567566 - RNA, 19 nt, Homo sapiens
  misc_RNA (1)...(19): siRNA sense strand
ugguuuggcuuucugauuu

SEQ ID NO: 567567 - RNA, 19 nt, Homo sapiens
  misc_RNA (1)...(19): siRNA sense strand
ugaaggaauuccacaagau

SEQ ID NO: 567568 - RNA, 19 nt, Homo sapiens
  misc_RNA (1)...(19): siRNA sense strand
aaauaccucuuaugaagga

SEQ ID NO: 567569 - RNA, 19 nt, Homo sapiens
  misc_RNA (1)...(19): siRNA sense strand
aggaaggacuagagacuaa

SEQ ID NO: 567570 - RNA, 19 nt, Homo sapiens
  misc_RNA (1)...(19): siRNA sense strand
ggauauaugguucucuuga

SEQ ID NO: 567571 - RNA, 19 nt, Homo sapiens
  misc_RNA (1)...(19): siRNA sense strand
aauugcagcuguauucaaa

SEQ ID NO: 567572 - RNA, 19 nt, Homo sapiens
  misc_RNA (1)...(19): siRNA sense strand
caacuuguccucaaacagu

SEQ ID NO: 567573 - RNA, 19 nt, Homo sapiens
  misc_RNA (1)...(19): siRNA sense strand
cgacaaaggaccugacugu

SEQ ID NO: 567574 - RNA, 19 nt, Homo sapiens
  misc_RNA (1)...(19): siRNA sense strand
gcagcuguauucaaacauc

SEQ ID NO: 567575 - RNA, 19 nt, Homo sapiens
  misc_RNA (1)...(19): siRNA sense strand
acaaauagagagacaauuc

SEQ ID NO: 567576 - RNA, 19 nt, Homo sapiens
  misc_RNA (1)...(19): siRNA sense strand
ugauacaguucaaugcauu

SEQ ID NO: 567577 - RNA, 19 nt, Homo sapiens
  misc_RNA (1)...(19): siRNA sense strand
gagcuauuauugguccuuu

SEQ ID NO: 567578 - RNA, 19 nt, Homo sapiens
  misc_RNA (1)...(19): siRNA sense strand
aaacucccauccugccuuu

SEQ ID NO: 567579 - RNA, 19 nt, Homo sapiens
  misc_RNA (1)...(19): siRNA sense strand
gcaaauguuuauguugaca

SEQ ID NO: 567580 - RNA, 19 nt, Homo sapiens
  misc_RNA (1)...(19): siRNA sense strand
gauauaugguucucuugag

SEQ ID NO: 567581 - RNA, 19 nt, Homo sapiens
  misc_RNA (1)...(19): siRNA sense strand
ugucagcgaugagcaguuu

SEQ ID NO: 567582 - RNA, 19 nt, Homo sapiens
  misc_RNA (1)...(19): siRNA sense strand
ucaaacaucaggaaauuca

SEQ ID NO: 567583 - RNA, 19 nt, Homo sapiens
  misc_RNA (1)...(19): siRNA sense strand
guucaagauuacugucaaa

SEQ ID NO: 567584 - RNA, 19 nt, Homo sapiens
  misc_RNA (1)...(19): siRNA sense strand
agaaacaggagcuauuauu

SEQ ID NO: 567585 - RNA, 19 nt, Homo sapiens
  misc_RNA (1)...(19): siRNA sense strand
ggugugggauuacauacau

SEQ ID NO: 567586 - RNA, 19 nt, Homo sapiens
  misc_RNA (1)...(19): siRNA sense strand
cuucaugccuaaauaccua

SEQ ID NO: 567587 - RNA, 19 nt, Homo sapiens
  misc_RNA (1)...(19): siRNA sense strand
caacaucccaacaucucua

SEQ ID NO: 567588 - RNA, 19 nt, Homo sapiens
  misc_RNA (1)...(19): siRNA sense strand
ucacacaaauagagagaca

SEQ ID NO: 567589 - RNA, 19 nt, Homo sapiens
  misc_RNA (1)...(19): siRNA sense strand
aaauucaucugcaguucuu

SEQ ID NO: 567590 - RNA, 19 nt, Homo sapiens
  misc_RNA (1)...(19): siRNA sense strand
aaugacaucuuugcugauu

SEQ ID NO: 567591 - RNA, 19 nt, Homo sapiens
  misc_RNA (1)...(19): siRNA sense strand
uaauggaagcuuugagauu

SEQ ID NO: 567592 - RNA, 19 nt, Homo sapiens
  misc_RNA (1)...(19): siRNA sense strand
gcaauccaauuuauaugcu

SEQ ID NO: 567593 - RNA, 19 nt, Homo sapiens
  misc_RNA (1)...(19): siRNA sense strand
ugaauuccaugcucacaca

SEQ ID NO: 567594 - RNA, 19 nt, Homo sapiens
  misc_RNA (1)...(19): siRNA sense strand
caacgcaggauccaucaga

SEQ ID NO: 567595 - RNA, 19 nt, Homo sapiens
  misc_RNA (1)...(19): siRNA sense strand
caaauagagagacaauuca

SEQ ID NO: 567596 - RNA, 19 nt, Homo sapiens
  misc_RNA (1)...(19): siRNA sense strand
acaaaggaccugacuguuc

SEQ ID NO: 567597 - RNA, 19 nt, Homo sapiens
  misc_RNA (1)...(19): siRNA sense strand
gaaggacuagagacuaaug

SEQ ID NO: 567598 - RNA, 19 nt, Homo sapiens
  misc_RNA (1)...(19): siRNA sense strand
aauaugggauccugugugu

SEQ ID NO: 567599 - RNA, 19 nt, Homo sapiens
  misc_RNA (1)...(19): siRNA sense strand
guuaugggcuuaggcuguu

SEQ ID NO: 567600 - RNA, 19 nt, Homo sapiens
  misc_RNA (1)...(19): siRNA sense strand
acaguucaaugcauucguu

SEQ ID NO: 567601 - RNA, 19 nt, Homo sapiens
  misc_RNA (1)...(19): siRNA sense strand
gguauuuccuauauagaag

SEQ ID NO: 567602 - RNA, 19 nt, Homo sapiens
  misc_RNA (1)...(19): siRNA sense strand
caucagaguguacaaagga

SEQ ID NO: 567603 - RNA, 19 nt, Homo sapiens
  misc_RNA (1)...(19): siRNA sense strand
gcuauuauugguccuuuga

SEQ ID NO: 567604 - RNA, 19 nt, Homo sapiens
  misc_RNA (1)...(19): siRNA sense strand
guuccuugaugcuccagua

SEQ ID NO: 567605 - RNA, 19 nt, Homo sapiens
  misc_RNA (1)...(19): siRNA sense strand
gucuggaucuuauaugaau

SEQ ID NO: 567606 - RNA, 19 nt, Homo sapiens
  misc_RNA (1)...(19): siRNA sense strand
ucaggcaacuuguccucaa

SEQ ID NO: 567607 - RNA, 19 nt, Homo sapiens
  misc_RNA (1)...(19): siRNA sense strand
ggaauuccacaagauuuau

SEQ ID NO: 567608 - RNA, 19 nt, Homo sapiens
  misc_RNA (1)...(19): siRNA sense strand
ggguauuuccuauauagaa

SEQ ID NO: 567609 - RNA, 19 nt, Homo sapiens
  misc_RNA (1)...(19): siRNA sense strand
ccaaaggaaggacuagaga

SEQ ID NO: 567610 - RNA, 19 nt, Homo sapiens
  misc_RNA (1)...(19): siRNA sense strand
gaaauucaucugcaguucu

SEQ ID NO: 567611 - RNA, 19 nt, Homo sapiens
  misc_RNA (1)...(19): siRNA sense strand
gaaaauucuucaguuguug

SEQ ID NO: 567612 - RNA, 19 nt, Homo sapiens
  misc_RNA (1)...(19): siRNA sense strand
ggauauauaauuggugguu

SEQ ID NO: 567613 - RNA, 19 nt, Homo sapiens
  misc_RNA (1)...(19): siRNA sense strand
ucuccuucaugccuaaaua

SEQ ID NO: 567614 - RNA, 19 nt, Homo sapiens
  misc_RNA (1)...(19): siRNA sense strand
ucaaugcauucguuaacau

SEQ ID NO: 567615 - RNA, 19 nt, Homo sapiens
  misc_RNA (1)...(19): siRNA sense strand
uaagugugauacaguucaa

SEQ ID NO: 567616 - RNA, 19 nt, Homo sapiens
  misc_RNA (1)...(19): siRNA sense strand
caacuguccaucuaaaaua

SEQ ID NO: 567617 - RNA, 19 nt, Homo sapiens
  misc_RNA (1)...(19): siRNA sense strand
uguaugaaaucugaagaga

SEQ ID NO: 567618 - RNA, 19 nt, Homo sapiens
  misc_RNA (1)...(19): siRNA sense strand
ugagcaguuucauuuauuc

SEQ ID NO: 567619 - RNA, 19 nt, Homo sapiens
  misc_RNA (1)...(19): siRNA sense strand
caggcaacuuguccucaaa

SEQ ID NO: 567620 - RNA, 19 nt, Homo sapiens
  misc_RNA (1)...(19): siRNA sense strand
aggaauuccacaagauuua

SEQ ID NO: 567621 - RNA, 19 nt, Homo sapiens
  misc_RNA (1)...(19): siRNA sense strand
aaacaggagcuauuauugg

SEQ ID NO: 567622 - RNA, 19 nt, Homo sapiens
  misc_RNA (1)...(19): siRNA sense strand
caggauccaucagagugua

SEQ ID NO: 567623 - RNA, 19 nt, Homo sapiens
  misc_RNA (1)...(19): siRNA sense strand
aaucuacaguuucaguuuc

SEQ ID NO: 567624 - RNA, 19 nt, Homo sapiens
  misc_RNA (1)...(19): siRNA sense strand
gauccuguguguggaaaca

SEQ ID NO: 567625 - RNA, 19 nt, Homo sapiens
  misc_RNA (1)...(19): siRNA sense strand
gguuuggcuuucugauuug

SEQ ID NO: 567626 - RNA, 19 nt, Homo sapiens
  misc_RNA (1)...(19): siRNA sense strand
guacguggaaugggugaaa

SEQ ID NO: 567627 - RNA, 19 nt, Homo sapiens
  misc_RNA (1)...(19): siRNA sense strand
guaugaaaucugaagagaa

SEQ ID NO: 567628 - RNA, 19 nt, Homo sapiens
  misc_RNA (1)...(19): siRNA sense strand
caaaauugcagcuguauuc

SEQ ID NO: 567629 - RNA, 19 nt, Homo sapiens
  misc_RNA (1)...(19): siRNA sense strand
uugcaacuguccaucuaaa

SEQ ID NO: 567630 - RNA, 19 nt, Homo sapiens
  misc_RNA (1)...(19): siRNA sense strand
ugacaucuuugcugauugc

SEQ ID NO: 567631 - RNA, 19 nt, Homo sapiens
  misc_RNA (1)...(19): siRNA sense strand
aaacacugucuggaucuua

SEQ ID NO: 567632 - RNA, 19 nt, Homo sapiens
  misc_RNA (1)...(19): siRNA sense strand
cauccugccuuuggguauu

SEQ ID NO: 567633 - RNA, 19 nt, Homo sapiens
  misc_RNA (1)...(19): siRNA sense strand
aacaggagcuauuauuggu

SEQ ID NO: 567634 - RNA, 19 nt, Homo sapiens
  misc_RNA (1)...(19): siRNA sense strand
gacacuggauuugugaaca

SEQ ID NO: 567635 - RNA, 19 nt, Homo sapiens
  misc_RNA (1)...(19): siRNA sense strand
uaacaugugcauuuguauc

SEQ ID NO: 567636 - RNA, 19 nt, Homo sapiens
  misc_RNA (1)...(19): siRNA sense strand
ucucaugacuugugaaaau

SEQ ID NO: 567637 - RNA, 19 nt, Homo sapiens
  misc_RNA (1)...(19): siRNA sense strand
caaucuuucuaauggguau

SEQ ID NO: 567638 - RNA, 19 nt, Homo sapiens
  misc_RNA (1)...(19): siRNA sense strand
agaacagcaauauggaaua

SEQ ID NO: 567639 - RNA, 19 nt, Homo sapiens
  misc_RNA (1)...(19): siRNA sense strand
gugauacaguucaaugcau

SEQ ID NO: 567640 - RNA, 19 nt, Homo sapiens
  misc_RNA (1)...(19): siRNA sense strand
caaacaagcugcccacaua

SEQ ID NO: 567641 - RNA, 19 nt, Homo sapiens
  misc_RNA (1)...(19): siRNA sense strand
uaacuuaccuccaauaugu

SEQ ID NO: 567642 - RNA, 19 nt, Homo sapiens
  misc_RNA (1)...(19): siRNA sense strand
gcaauaacaugugcauuug

SEQ ID NO: 567643 - RNA, 19 nt, Homo sapiens
  misc_RNA (1)...(19): siRNA sense strand
gggcuuaggcuguuucuua

SEQ ID NO: 567644 - RNA, 19 nt, Homo sapiens
  misc_RNA (1)...(19): siRNA sense strand
caagauuacugucaaacaa

SEQ ID NO: 567645 - RNA, 19 nt, Homo sapiens
  misc_RNA (1)...(19): siRNA sense strand
gaaacaggagcuauuauug

SEQ ID NO: 567646 - RNA, 19 nt, Homo sapiens
  misc_RNA (1)...(19): siRNA sense strand
ggaccugacuguuccuuga

SEQ ID NO: 567647 - RNA, 19 nt, Homo sapiens
  misc_RNA (1)...(19): siRNA sense strand
gugcaaauguuuauguuga

SEQ ID NO: 567648 - RNA, 19 nt, Homo sapiens
  misc_RNA (1)...(19): siRNA sense strand
gaugcaaucuuucuaaugg

SEQ ID NO: 567649 - RNA, 19 nt, Homo sapiens
  misc_RNA (1)...(19): siRNA sense strand
guagaaacaggagcuauua

SEQ ID NO: 567650 - RNA, 19 nt, Homo sapiens
  misc_RNA (1)...(19): siRNA sense strand
gaaggaauuccacaagauu

SEQ ID NO: 567651 - RNA, 19 nt, Homo sapiens
  misc_RNA (1)...(19): siRNA sense strand
aagaagaggucaagaagga

SEQ ID NO: 567652 - RNA, 19 nt, Homo sapiens
  misc_RNA (1)...(19): siRNA sense strand
ggcaauaacaugugcauuu

SEQ ID NO: 567653 - RNA, 19 nt, Homo sapiens
  misc_RNA (1)...(19): siRNA sense strand
cuaguuggauucauuaaug

SEQ ID NO: 567654 - RNA, 19 nt, Homo sapiens
  misc_RNA (1)...(19): siRNA sense strand
gauugcaacuguccaucua

SEQ ID NO: 567655 - RNA, 19 nt, Homo sapiens
  misc_RNA (1)...(19): siRNA sense strand
uaugaaaucugaagagaag

SEQ ID NO: 567656 - RNA, 19 nt, Homo sapiens
  misc_RNA (1)...(19): siRNA sense strand
ccaacacacuuccaaagga

SEQ ID NO: 567657 - RNA, 19 nt, Homo sapiens
  misc_RNA (1)...(19): siRNA sense strand
guacaaaggaaguuaaauc

SEQ ID NO: 567658 - RNA, 19 nt, Homo sapiens
  misc_RNA (1)...(19): siRNA sense strand
ggcauuggaugugugguua

SEQ ID NO: 567659 - RNA, 19 nt, Homo sapiens
  misc_RNA (1)...(19): siRNA sense strand
ggaaauucaucugcaguuc

SEQ ID NO: 567660 - RNA, 19 nt, Homo sapiens
  misc_RNA (1)...(19): siRNA sense strand
gaagaggucaagaaggaaa

SEQ ID NO: 567661 - RNA, 19 nt, Homo sapiens
  misc_RNA (1)...(19): siRNA sense strand
gaaucuacaguuucaguuu

SEQ ID NO: 567662 - RNA, 19 nt, Homo sapiens
  misc_RNA (1)...(19): siRNA sense strand
ggcuuaggcuguuucuuaa

SEQ ID NO: 567663 - RNA, 19 nt, Homo sapiens
  misc_RNA (1)...(19): siRNA sense strand
ugagguguaugaaaucuga

SEQ ID NO: 567664 - RNA, 19 nt, Homo sapiens
  misc_RNA (1)...(19): siRNA sense strand
gaacgggaauaaacauggu

SEQ ID NO: 567665 - RNA, 19 nt, Homo sapiens
  misc_RNA (1)...(19): siRNA sense strand
aauggaagcuuugagauug

SEQ ID NO: 567666 - RNA, 19 nt, Homo sapiens
  misc_RNA (1)...(19): siRNA sense strand
ugguuuggcuuucugauuu

SEQ ID NO: 567667 - RNA, 19 nt, Homo sapiens
  misc_RNA (1)...(19): siRNA sense strand
ugaaggaauuccacaagau

SEQ ID NO: 567668 - RNA, 19 nt, Homo sapiens
  misc_RNA (1)...(19): siRNA sense strand
aaauaccucuuaugaagga

SEQ ID NO: 567669 - RNA, 19 nt, Homo sapiens
  misc_RNA (1)...(19): siRNA sense strand
aggaaggacuagagacuaa

SEQ ID NO: 567670 - RNA, 19 nt, Homo sapiens
  misc_RNA (1)...(19): siRNA sense strand
ggauauaugguucucuuga

SEQ ID NO: 567671 - RNA, 19 nt, Homo sapiens
  misc_RNA (1)...(19): siRNA sense strand
aauugcagcuguauucaaa

SEQ ID NO: 567672 - RNA, 19 nt, Homo sapiens
  misc_RNA (1)...(19): siRNA sense strand
caacuuguccucaaacagu

SEQ ID NO: 567673 - RNA, 19 nt, Homo sapiens
  misc_RNA (1)...(19): siRNA sense strand
cgacaaaggaccugacugu

SEQ ID NO: 567674 - RNA, 19 nt, Homo sapiens
  misc_RNA (1)...(19): siRNA sense strand
gcagcuguauucaaacauc

SEQ ID NO: 567675 - RNA, 19 nt, Homo sapiens
  misc_RNA (1)...(19): siRNA sense strand
acaaauagagagacaauuc

SEQ ID NO: 567676 - RNA, 19 nt, Homo sapiens
  misc_RNA (1)...(19): siRNA sense strand
ugauacaguucaaugcauu

SEQ ID NO: 567677 - RNA, 19 nt, Homo sapiens
  misc_RNA (1)...(19): siRNA sense strand
gagcuauuauugguccuuu

SEQ ID NO: 567678 - RNA, 19 nt, Homo sapiens
  misc_RNA (1)...(19): siRNA sense strand
aaacucccauccugccuuu

SEQ ID NO: 567679 - RNA, 19 nt, Homo sapiens
  misc_RNA (1)...(19): siRNA sense strand
gcaaauguuuauguugaca

SEQ ID NO: 567680 - RNA, 19 nt, Homo sapiens
  misc_RNA (1)...(19): siRNA sense strand
gauauaugguucucuugag

SEQ ID NO: 567681 - RNA, 19 nt, Homo sapiens
  misc_RNA (1)...(19): siRNA sense strand
ugucagcgaugagcaguuu

SEQ ID NO: 567682 - RNA, 19 nt, Homo sapiens
  misc_RNA (1)...(19): siRNA sense strand
ucaaacaucaggaaauuca

SEQ ID NO: 567683 - RNA, 19 nt, Homo sapiens
  misc_RNA (1)...(19): siRNA sense strand
guucaagauuacugucaaa

SEQ ID NO: 567684 - RNA, 19 nt, Homo sapiens
  misc_RNA (1)...(19): siRNA sense strand
agaaacaggagcuauuauu

SEQ ID NO: 567685 - RNA, 19 nt, Homo sapiens
  misc_RNA (1)...(19): siRNA sense strand
ggugugggauuacauacau

SEQ ID NO: 567686 - RNA, 19 nt, Homo sapiens
  misc_RNA (1)...(19): siRNA sense strand
cuucaugccuaaauaccua

SEQ ID NO: 567687 - RNA, 19 nt, Homo sapiens
  misc_RNA (1)...(19): siRNA sense strand
caacaucccaacaucucua

SEQ ID NO: 567688 - RNA, 19 nt, Homo sapiens
  misc_RNA (1)...(19): siRNA sense strand
ucacacaaauagagagaca

SEQ ID NO: 567689 - RNA, 19 nt, Homo sapiens
  misc_RNA (1)...(19): siRNA sense strand
aaauucaucugcaguucuu

SEQ ID NO: 567690 - RNA, 19 nt, Homo sapiens
  misc_RNA (1)...(19): siRNA sense strand
aaugacaucuuugcugauu

SEQ ID NO: 567691 - RNA, 19 nt, Homo sapiens
  misc_RNA (1)...(19): siRNA sense strand
uaauggaagcuuugagauu

SEQ ID NO: 567692 - RNA, 19 nt, Homo sapiens
  misc_RNA (1)...(19): siRNA sense strand
gcaauccaauuuauaugcu

SEQ ID NO: 567693 - RNA, 19 nt, Homo sapiens
  misc_RNA (1)...(19): siRNA sense strand
ugaauuccaugcucacaca

SEQ ID NO: 567694 - RNA, 19 nt, Homo sapiens
  misc_RNA (1)...(19): siRNA sense strand
caacgcaggauccaucaga

SEQ ID NO: 567695 - RNA, 19 nt, Homo sapiens
  misc_RNA (1)...(19): siRNA sense strand
caaauagagagacaauuca

SEQ ID NO: 567696 - RNA, 19 nt, Homo sapiens
  misc_RNA (1)...(19): siRNA sense strand
acaaaggaccugacuguuc

SEQ ID NO: 567697 - RNA, 19 nt, Homo sapiens
  misc_RNA (1)...(19): siRNA sense strand
gaaggacuagagacuaaug

SEQ ID NO: 567698 - RNA, 19 nt, Homo sapiens
  misc_RNA (1)...(19): siRNA sense strand
aauaugggauccugugugu

SEQ ID NO: 567699 - RNA, 19 nt, Homo sapiens
  misc_RNA (1)...(19): siRNA sense strand
guuaugggcuuaggcuguu

SEQ ID NO: 567700 - RNA, 19 nt, Homo sapiens
  misc_RNA (1)...(19): siRNA sense strand
acaguucaaugcauucguu

SEQ ID NO: 567701 - RNA, 19 nt, Homo sapiens
  misc_RNA (1)...(19): siRNA sense strand
gguauuuccuauauagaag

SEQ ID NO: 567702 - RNA, 19 nt, Homo sapiens
  misc_RNA (1)...(19): siRNA sense strand
caucagaguguacaaagga

SEQ ID NO: 567703 - RNA, 19 nt, Homo sapiens
  misc_RNA (1)...(19): siRNA sense strand
gcuauuauugguccuuuga

SEQ ID NO: 567704 - RNA, 19 nt, Homo sapiens
  misc_RNA (1)...(19): siRNA sense strand
guuccuugaugcuccagua

SEQ ID NO: 567705 - RNA, 19 nt, Homo sapiens
  misc_RNA (1)...(19): siRNA sense strand
gucuggaucuuauaugaau

SEQ ID NO: 567706 - RNA, 19 nt, Homo sapiens
  misc_RNA (1)...(19): siRNA sense strand
ucaggcaacuuguccucaa

SEQ ID NO: 567707 - RNA, 19 nt, Homo sapiens
  misc_RNA (1)...(19): siRNA sense strand
ggaauuccacaagauuuau

SEQ ID NO: 567708 - RNA, 19 nt, Homo sapiens
  misc_RNA (1)...(19): siRNA sense strand
ggguauuuccuauauagaa

SEQ ID NO: 567709 - RNA, 19 nt, Homo sapiens
  misc_RNA (1)...(19): siRNA sense strand
ccaaaggaaggacuagaga

SEQ ID NO: 567710 - RNA, 19 nt, Homo sapiens
  misc_RNA (1)...(19): siRNA sense strand
gaaauucaucugcaguucu

SEQ ID NO: 567711 - RNA, 19 nt, Homo sapiens
  misc_RNA (1)...(19): siRNA sense strand
gaaaauucuucaguuguug

SEQ ID NO: 567712 - RNA, 19 nt, Homo sapiens
  misc_RNA (1)...(19): siRNA sense strand
ggauauauaauuggugguu

SEQ ID NO: 567713 - RNA, 19 nt, Homo sapiens
  misc_RNA (1)...(19): siRNA sense strand
ucuccuucaugccuaaaua

SEQ ID NO: 567714 - RNA, 19 nt, Homo sapiens
  misc_RNA (1)...(19): siRNA sense strand
ucaaugcauucguuaacau

SEQ ID NO: 567715 - RNA, 19 nt, Homo sapiens
  misc_RNA (1)...(19): siRNA sense strand
uaagugugauacaguucaa

SEQ ID NO: 567716 - RNA, 19 nt, Homo sapiens
  misc_RNA (1)...(19): siRNA sense strand
caacuguccaucuaaaaua

SEQ ID NO: 567717 - RNA, 19 nt, Homo sapiens
  misc_RNA (1)...(19): siRNA sense strand
uguaugaaaucugaagaga

SEQ ID NO: 567718 - RNA, 19 nt, Homo sapiens
  misc_RNA (1)...(19): siRNA sense strand
ugagcaguuucauuuauuc

SEQ ID NO: 567719 - RNA, 19 nt, Homo sapiens
  misc_RNA (1)...(19): siRNA sense strand
caggcaacuuguccucaaa

SEQ ID NO: 567720 - RNA, 19 nt, Homo sapiens
  misc_RNA (1)...(19): siRNA sense strand
aggaauuccacaagauuua

SEQ ID NO: 567721 - RNA, 19 nt, Homo sapiens
  misc_RNA (1)...(19): siRNA sense strand
aaacaggagcuauuauugg

SEQ ID NO: 567722 - RNA, 19 nt, Homo sapiens
  misc_RNA (1)...(19): siRNA sense strand
caggauccaucagagugua

SEQ ID NO: 567723 - RNA, 19 nt, Homo sapiens
  misc_RNA (1)...(19): siRNA sense strand
aaucuacaguuucaguuuc

SEQ ID NO: 567724 - RNA, 19 nt, Homo sapiens
  misc_RNA (1)...(19): siRNA sense strand
gauccuguguguggaaaca

SEQ ID NO: 567725 - RNA, 19 nt, Homo sapiens
  misc_RNA (1)...(19): siRNA sense strand
gguuuggcuuucugauuug

SEQ ID NO: 567726 - RNA, 19 nt, Homo sapiens
  misc_RNA (1)...(19): siRNA sense strand
guacguggaaugggugaaa

SEQ ID NO: 567727 - RNA, 19 nt, Homo sapiens
  misc_RNA (1)...(19): siRNA sense strand
guaugaaaucugaagagaa

SEQ ID NO: 567728 - RNA, 19 nt, Homo sapiens
  misc_RNA (1)...(19): siRNA sense strand
caaaauugcagcuguauuc

SEQ ID NO: 567729 - RNA, 19 nt, Homo sapiens
  misc_RNA (1)...(19): siRNA sense strand
uugcaacuguccaucuaaa

SEQ ID NO: 567730 - RNA, 19 nt, Homo sapiens
  misc_RNA (1)...(19): siRNA sense strand
ugacaucuuugcugauugc

SEQ ID NO: 567731 - RNA, 19 nt, Homo sapiens
  misc_RNA (1)...(19): siRNA sense strand
aaacacugucuggaucuua

SEQ ID NO: 567732 - RNA, 19 nt, Homo sapiens
  misc_RNA (1)...(19): siRNA sense strand
cauccugccuuuggguauu

SEQ ID NO: 567733 - RNA, 19 nt, Homo sapiens
  misc_RNA (1)...(19): siRNA sense strand
aacaggagcuauuauuggu

SEQ ID NO: 567734 - RNA, 19 nt, Homo sapiens
  misc_RNA (1)...(19): siRNA sense strand
gacacuggauuugugaaca

SEQ ID NO: 567735 - RNA, 19 nt, Homo sapiens
  misc_RNA (1)...(19): siRNA sense strand
uaacaugugcauuuguauc

SEQ ID NO: 567736 - RNA, 19 nt, Homo sapiens
  misc_RNA (1)...(19): siRNA sense strand
ucucaugacuugugaaaau

SEQ ID NO: 567737 - RNA, 19 nt, Homo sapiens
  misc_RNA (1)...(19): siRNA sense strand
caaucuuucuaauggguau

SEQ ID NO: 567738 - RNA, 19 nt, Homo sapiens
  misc_RNA (1)...(19): siRNA sense strand
agaacagcaauauggaaua

SEQ ID NO: 567739 - RNA, 19 nt, Homo sapiens
  misc_RNA (1)...(19): siRNA sense strand
gugauacaguucaaugcau

SEQ ID NO: 567740 - RNA, 19 nt, Homo sapiens
  misc_RNA (1)...(19): siRNA sense strand
gaacagccucgaugucaaa

SEQ ID NO: 567741 - RNA, 19 nt, Homo sapiens
  misc_RNA (1)...(19): siRNA sense strand
ucaaggugauucuggauaa

SEQ ID NO: 567742 - RNA, 19 nt, Homo sapiens
  misc_RNA (1)...(19): siRNA sense strand
ccaagaucaucaucauuga

SEQ ID NO: 567743 - RNA, 19 nt, Homo sapiens
  misc_RNA (1)...(19): siRNA sense strand
ucaacuggaucuacaaugu

SEQ ID NO: 567744 - RNA, 19 nt, Homo sapiens
  misc_RNA (1)...(19): siRNA sense strand
gaggagcacugugucaaga

SEQ ID NO: 567745 - RNA, 19 nt, Homo sapiens
  misc_RNA (1)...(19): siRNA sense strand
ggaucuggauguuguugaa

SEQ ID NO: 567746 - RNA, 19 nt, Homo sapiens
  misc_RNA (1)...(19): siRNA sense strand
gccaagaucaucaucauug

SEQ ID NO: 567747 - RNA, 19 nt, Homo sapiens
  misc_RNA (1)...(19): siRNA sense strand
uuucagagcuguggagauu

SEQ ID NO: 567748 - RNA, 19 nt, Homo sapiens
  misc_RNA (1)...(19): siRNA sense strand
cgaggaagcagcuguguga

SEQ ID NO: 567749 - RNA, 19 nt, Homo sapiens
  misc_RNA (1)...(19): siRNA sense strand
cagcaaacccacuuucaga

SEQ ID NO: 567750 - RNA, 19 nt, Homo sapiens
  misc_RNA (1)...(19): siRNA sense strand
cagccuaucucaacuggau

SEQ ID NO: 567751 - RNA, 19 nt, Homo sapiens
  misc_RNA (1)...(19): siRNA sense strand
gaucaucaucauugaauuc

SEQ ID NO: 567752 - RNA, 19 nt, Homo sapiens
  misc_RNA (1)...(19): siRNA sense strand
ccauggagaccuucagaaa

SEQ ID NO: 567753 - RNA, 19 nt, Homo sapiens
  misc_RNA (1)...(19): siRNA sense strand
ugacaucgcccucaugaag

SEQ ID NO: 567754 - RNA, 19 nt, Homo sapiens
  misc_RNA (1)...(19): siRNA sense strand
caaggugauucuggauaaa

SEQ ID NO: 567755 - RNA, 19 nt, Homo sapiens
  misc_RNA (1)...(19): siRNA sense strand
cuggaaggcugagcuguaa

SEQ ID NO: 567756 - RNA, 19 nt, Homo sapiens
  misc_RNA (1)...(19): siRNA sense strand
ugucugcccuucuuugaug

SEQ ID NO: 567757 - RNA, 19 nt, Homo sapiens
  misc_RNA (1)...(19): siRNA sense strand
uaucucaacuggaucuaca

SEQ ID NO: 567758 - RNA, 19 nt, Homo sapiens
  misc_RNA (1)...(19): siRNA sense strand
ggauguuguugaaaucaca

SEQ ID NO: 567759 - RNA, 19 nt, Homo sapiens
  misc_RNA (1)...(19): siRNA sense strand
aggugauucuggauaaaua

SEQ ID NO: 567760 - RNA, 19 nt, Homo sapiens
  misc_RNA (1)...(19): siRNA sense strand
ugaacagccucgaugucaa

SEQ ID NO: 567761 - RNA, 19 nt, Homo sapiens
  misc_RNA (1)...(19): siRNA sense strand
ucagagcuguggagauugg

SEQ ID NO: 567762 - RNA, 19 nt, Homo sapiens
  misc_RNA (1)...(19): siRNA sense strand
gcaguucccacucacuuuc

SEQ ID NO: 567763 - RNA, 19 nt, Homo sapiens
  misc_RNA (1)...(19): siRNA sense strand
caagaucaucaucauugaa

SEQ ID NO: 567764 - RNA, 19 nt, Homo sapiens
  misc_RNA (1)...(19): siRNA sense strand
cagcauccaguacgacaaa

SEQ ID NO: 567765 - RNA, 19 nt, Homo sapiens
  misc_RNA (1)...(19): siRNA sense strand
ggucucagccuaucucaac

SEQ ID NO: 567766 - RNA, 19 nt, Homo sapiens
  misc_RNA (1)...(19): siRNA sense strand
gcgggcaggcucagacaaa

SEQ ID NO: 567767 - RNA, 19 nt, Homo sapiens
  misc_RNA (1)...(19): siRNA sense strand
cagacaaacugggcagcuu

SEQ ID NO: 567768 - RNA, 19 nt, Homo sapiens
  misc_RNA (1)...(19): siRNA sense strand
gauucuggauaaauacuac

SEQ ID NO: 567769 - RNA, 19 nt, Homo sapiens
  misc_RNA (1)...(19): siRNA sense strand
ggaggccucuguggauucu

SEQ ID NO: 567770 - RNA, 19 nt, Homo sapiens
  misc_RNA (1)...(19): siRNA sense strand
uggcgaguaucaucauugu

SEQ ID NO: 567771 - RNA, 19 nt, Homo sapiens
  misc_RNA (1)...(19): siRNA sense strand
aagcugcaguucccacuca

SEQ ID NO: 567772 - RNA, 19 nt, Homo sapiens
  misc_RNA (1)...(19): siRNA sense strand
ggaucuacaaugucuggaa

SEQ ID NO: 567773 - RNA, 19 nt, Homo sapiens
  misc_RNA (1)...(19): siRNA sense strand
gcagcaaacccacuuucag

SEQ ID NO: 567774 - RNA, 19 nt, Homo sapiens
  misc_RNA (1)...(19): siRNA sense strand
ccaucugucugcccuucuu

SEQ ID NO: 567775 - RNA, 19 nt, Homo sapiens
  misc_RNA (1)...(19): siRNA sense strand
auaccgauguguucaacug

SEQ ID NO: 567776 - RNA, 19 nt, Homo sapiens
  misc_RNA (1)...(19): siRNA sense strand
gagcuucgcaugcggaacu

SEQ ID NO: 567777 - RNA, 19 nt, Homo sapiens
  misc_RNA (1)...(19): siRNA sense strand
ccgauguguucaacuggaa

SEQ ID NO: 567778 - RNA, 19 nt, Homo sapiens
  misc_RNA (1)...(19): siRNA sense strand
gcccacugcuucaggaaac

SEQ ID NO: 567779 - RNA, 19 nt, Homo sapiens
  misc_RNA (1)...(19): siRNA sense strand
cauguggugggcaucguua

SEQ ID NO: 567780 - RNA, 19 nt, Homo sapiens
  misc_RNA (1)...(19): siRNA sense strand
uggccaagaucaucaucau

SEQ ID NO: 567781 - RNA, 19 nt, Homo sapiens
  misc_RNA (1)...(19): siRNA sense strand
caacuggaucuacaauguc

SEQ ID NO: 567782 - RNA, 19 nt, Homo sapiens
  misc_RNA (1)...(19): siRNA sense strand
gaucuggauguuguugaaa

SEQ ID NO: 567783 - RNA, 19 nt, Homo sapiens
  misc_RNA (1)...(19): siRNA sense strand
ucuggaaggcugagcugua

SEQ ID NO: 567784 - RNA, 19 nt, Homo sapiens
  misc_RNA (1)...(19): siRNA sense strand
gaugggcuacagcagcaaa

SEQ ID NO: 567785 - RNA, 19 nt, Homo sapiens
  misc_RNA (1)...(19): siRNA sense strand
ggccaagaucaucaucauu

SEQ ID NO: 567786 - RNA, 19 nt, Homo sapiens
  misc_RNA (1)...(19): siRNA sense strand
guuguugaaaucacagaaa

SEQ ID NO: 567787 - RNA, 19 nt, Homo sapiens
  misc_RNA (1)...(19): siRNA sense strand
cauugugguuguccucauc

SEQ ID NO: 567788 - RNA, 19 nt, Homo sapiens
  misc_RNA (1)...(19): siRNA sense strand
gacagugaucaaccucuga

SEQ ID NO: 567789 - RNA, 19 nt, Homo sapiens
  misc_RNA (1)...(19): siRNA sense strand
gagccuggcgaguaucauc

SEQ ID NO: 567790 - RNA, 19 nt, Homo sapiens
  misc_RNA (1)...(19): siRNA sense strand
ucaagugggcccugucucu

SEQ ID NO: 567791 - RNA, 19 nt, Homo sapiens
  misc_RNA (1)...(19): siRNA sense strand
ggcagccucuccacuucau

SEQ ID NO: 567792 - RNA, 19 nt, Homo sapiens
  misc_RNA (1)...(19): siRNA sense strand
gcauguggugggcaucguu

SEQ ID NO: 567793 - RNA, 19 nt, Homo sapiens
  misc_RNA (1)...(19): siRNA sense strand
cauggagaccuucagaaag

SEQ ID NO: 567794 - RNA, 19 nt, Homo sapiens
  misc_RNA (1)...(19): siRNA sense strand
cugguucucugccuguuuc

SEQ ID NO: 567795 - RNA, 19 nt, Homo sapiens
  misc_RNA (1)...(19): siRNA sense strand
gaacagccucgaugucaaa

SEQ ID NO: 567796 - RNA, 19 nt, Homo sapiens
  misc_RNA (1)...(19): siRNA sense strand
ucaaggugauucuggauaa

SEQ ID NO: 567797 - RNA, 19 nt, Homo sapiens
  misc_RNA (1)...(19): siRNA sense strand
ccaagaucaucaucauuga

SEQ ID NO: 567798 - RNA, 19 nt, Homo sapiens
  misc_RNA (1)...(19): siRNA sense strand
gaggagcacugugucaaga

SEQ ID NO: 567799 - RNA, 19 nt, Homo sapiens
  misc_RNA (1)...(19): siRNA sense strand
ggaucuggauguuguugaa

SEQ ID NO: 567800 - RNA, 19 nt, Homo sapiens
  misc_RNA (1)...(19): siRNA sense strand
gccaagaucaucaucauug

SEQ ID NO: 567801 - RNA, 19 nt, Homo sapiens
  misc_RNA (1)...(19): siRNA sense strand
uuucagagcuguggagauu

SEQ ID NO: 567802 - RNA, 19 nt, Homo sapiens
  misc_RNA (1)...(19): siRNA sense strand
cgaggaagcagcuguguga

SEQ ID NO: 567803 - RNA, 19 nt, Homo sapiens
  misc_RNA (1)...(19): siRNA sense strand
cagcaaacccacuuucaga

SEQ ID NO: 567804 - RNA, 19 nt, Homo sapiens
  misc_RNA (1)...(19): siRNA sense strand
gaucaucaucauugaauuc

SEQ ID NO: 567805 - RNA, 19 nt, Homo sapiens
  misc_RNA (1)...(19): siRNA sense strand
ccauggagaccuucagaaa

SEQ ID NO: 567806 - RNA, 19 nt, Homo sapiens
  misc_RNA (1)...(19): siRNA sense strand
ugacaucgcccucaugaag

SEQ ID NO: 567807 - RNA, 19 nt, Homo sapiens
  misc_RNA (1)...(19): siRNA sense strand
caaggugauucuggauaaa

SEQ ID NO: 567808 - RNA, 19 nt, Homo sapiens
  misc_RNA (1)...(19): siRNA sense strand
ugucugcccuucuuugaug

SEQ ID NO: 567809 - RNA, 19 nt, Homo sapiens
  misc_RNA (1)...(19): siRNA sense strand
ggauguuguugaaaucaca

SEQ ID NO: 567810 - RNA, 19 nt, Homo sapiens
  misc_RNA (1)...(19): siRNA sense strand
aggugauucuggauaaaua

SEQ ID NO: 567811 - RNA, 19 nt, Homo sapiens
  misc_RNA (1)...(19): siRNA sense strand
ugaacagccucgaugucaa

SEQ ID NO: 567812 - RNA, 19 nt, Homo sapiens
  misc_RNA (1)...(19): siRNA sense strand
ucagagcuguggagauugg

SEQ ID NO: 567813 - RNA, 19 nt, Homo sapiens
  misc_RNA (1)...(19): siRNA sense strand
gcaguucccacucacuuuc

SEQ ID NO: 567814 - RNA, 19 nt, Homo sapiens
  misc_RNA (1)...(19): siRNA sense strand
caagaucaucaucauugaa

SEQ ID NO: 567815 - RNA, 19 nt, Homo sapiens
  misc_RNA (1)...(19): siRNA sense strand
cagcauccaguacgacaaa

SEQ ID NO: 567816 - RNA, 19 nt, Homo sapiens
  misc_RNA (1)...(19): siRNA sense strand
gcgggcaggcucagacaaa

SEQ ID NO: 567817 - RNA, 19 nt, Homo sapiens
  misc_RNA (1)...(19): siRNA sense strand
cagacaaacugggcagcuu

SEQ ID NO: 567818 - RNA, 19 nt, Homo sapiens
  misc_RNA (1)...(19): siRNA sense strand
gauucuggauaaauacuac

SEQ ID NO: 567819 - RNA, 19 nt, Homo sapiens
  misc_RNA (1)...(19): siRNA sense strand
ggaggccucuguggauucu

SEQ ID NO: 567820 - RNA, 19 nt, Homo sapiens
  misc_RNA (1)...(19): siRNA sense strand
uggcgaguaucaucauugu

SEQ ID NO: 567821 - RNA, 19 nt, Homo sapiens
  misc_RNA (1)...(19): siRNA sense strand
aagcugcaguucccacuca

SEQ ID NO: 567822 - RNA, 19 nt, Homo sapiens
  misc_RNA (1)...(19): siRNA sense strand
gcagcaaacccacuuucag

SEQ ID NO: 567823 - RNA, 19 nt, Homo sapiens
  misc_RNA (1)...(19): siRNA sense strand
ccaucugucugcccuucuu

SEQ ID NO: 567824 - RNA, 19 nt, Homo sapiens
  misc_RNA (1)...(19): siRNA sense strand
auaccgauguguucaacug

SEQ ID NO: 567825 - RNA, 19 nt, Homo sapiens
  misc_RNA (1)...(19): siRNA sense strand
gagcuucgcaugcggaacu

SEQ ID NO: 567826 - RNA, 19 nt, Homo sapiens
  misc_RNA (1)...(19): siRNA sense strand
ccgauguguucaacuggaa

SEQ ID NO: 567827 - RNA, 19 nt, Homo sapiens
  misc_RNA (1)...(19): siRNA sense strand
gcccacugcuucaggaaac

SEQ ID NO: 567828 - RNA, 19 nt, Homo sapiens
  misc_RNA (1)...(19): siRNA sense strand
uggccaagaucaucaucau

SEQ ID NO: 567829 - RNA, 19 nt, Homo sapiens
  misc_RNA (1)...(19): siRNA sense strand
gaucuggauguuguugaaa

SEQ ID NO: 567830 - RNA, 19 nt, Homo sapiens
  misc_RNA (1)...(19): siRNA sense strand
gaugggcuacagcagcaaa

SEQ ID NO: 567831 - RNA, 19 nt, Homo sapiens
  misc_RNA (1)...(19): siRNA sense strand
ggccaagaucaucaucauu

SEQ ID NO: 567832 - RNA, 19 nt, Homo sapiens
  misc_RNA (1)...(19): siRNA sense strand
guuguugaaaucacagaaa

SEQ ID NO: 567833 - RNA, 19 nt, Homo sapiens
  misc_RNA (1)...(19): siRNA sense strand
cauugugguuguccucauc

SEQ ID NO: 567834 - RNA, 19 nt, Homo sapiens
  misc_RNA (1)...(19): siRNA sense strand
ucaagugggcccugucucu

SEQ ID NO: 567835 - RNA, 19 nt, Homo sapiens
  misc_RNA (1)...(19): siRNA sense strand
gacagugaucaaccucuga

SEQ ID NO: 567836 - RNA, 19 nt, Homo sapiens
  misc_RNA (1)...(19): siRNA sense strand
gagccuggcgaguaucauc

SEQ ID NO: 567837 - RNA, 19 nt, Homo sapiens
  misc_RNA (1)...(19): siRNA sense strand
ggcagccucuccacuucau

SEQ ID NO: 567838 - RNA, 19 nt, Homo sapiens
  misc_RNA (1)...(19): siRNA sense strand
cauggagaccuucagaaag

SEQ ID NO: 567839 - RNA, 19 nt, Homo sapiens
  misc_RNA (1)...(19): siRNA sense strand
cugguucucugccuguuuc

SEQ ID NO: 567840 - RNA, 19 nt, Homo sapiens
  misc_RNA (1)...(19): siRNA sense strand
uguggaaccugaucagaua

SEQ ID NO: 567841 - RNA, 19 nt, Homo sapiens
  misc_RNA (1)...(19): siRNA sense strand
ggacggagcgaguguggaa

SEQ ID NO: 567842 - RNA, 19 nt, Homo sapiens
  misc_RNA (1)...(19): siRNA sense strand
gcauugaagucaggugguu

SEQ ID NO: 567843 - RNA, 19 nt, Homo sapiens
  misc_RNA (1)...(19): siRNA sense strand
gcgcugacagugacauuga

SEQ ID NO: 567844 - RNA, 19 nt, Homo sapiens
  misc_RNA (1)...(19): siRNA sense strand
ggacaccuacugcagauac

SEQ ID NO: 567845 - RNA, 19 nt, Homo sapiens
  misc_RNA (1)...(19): siRNA sense strand
ggagugcacggucugaauc

SEQ ID NO: 567846 - RNA, 19 nt, Homo sapiens
  misc_RNA (1)...(19): siRNA sense strand
ucuauaaccaagaggagua

SEQ ID NO: 567847 - RNA, 19 nt, Homo sapiens
  misc_RNA (1)...(19): siRNA sense strand
guggacaccuacugcagau

SEQ ID NO: 567848 - RNA, 19 nt, Homo sapiens
  misc_RNA (1)...(19): siRNA sense strand
ggucugcucugugaauggu

SEQ ID NO: 567849 - RNA, 19 nt, Homo sapiens
  misc_RNA (1)...(19): siRNA sense strand
cuccuggucugcucuguga

SEQ ID NO: 567850 - RNA, 19 nt, Homo sapiens
  misc_RNA (1)...(19): siRNA sense strand
auacaucuauaaccaagag

SEQ ID NO: 567851 - RNA, 19 nt, Homo sapiens
  misc_RNA (1)...(19): siRNA sense strand
ggacacccaaccacguuuc

SEQ ID NO: 567852 - RNA, 19 nt, Homo sapiens
  misc_RNA (1)...(19): siRNA sense strand
gaaccugaucagauacauc

SEQ ID NO: 567853 - RNA, 19 nt, Homo sapiens
  misc_RNA (1)...(19): siRNA sense strand
uggagcaggcuaaguguga

SEQ ID NO: 567854 - RNA, 19 nt, Homo sapiens
  misc_RNA (1)...(19): siRNA sense strand
ggaaccugaucagauacau

SEQ ID NO: 567855 - RNA, 19 nt, Homo sapiens
  misc_RNA (1)...(19): siRNA sense strand
uaagugugagugucauuuc

SEQ ID NO: 567856 - RNA, 19 nt, Homo sapiens
  misc_RNA (1)...(19): siRNA sense strand
gguuuacaccugccaagug

SEQ ID NO: 567857 - RNA, 19 nt, Homo sapiens
  misc_RNA (1)...(19): siRNA sense strand
cagcggcgaguccaaccua

SEQ ID NO: 567858 - RNA, 19 nt, Homo sapiens
  misc_RNA (1)...(19): siRNA sense strand
ucugcucugugaaugguuu

SEQ ID NO: 567859 - RNA, 19 nt, Homo sapiens
  misc_RNA (1)...(19): siRNA sense strand
cacccaaccacguuucuug

SEQ ID NO: 567860 - RNA, 19 nt, Homo sapiens
  misc_RNA (1)...(19): siRNA sense strand
cuaagugugagugucauuu

SEQ ID NO: 567861 - RNA, 19 nt, Homo sapiens
  misc_RNA (1)...(19): siRNA sense strand
gcuaagugugagugucauu

SEQ ID NO: 567862 - RNA, 19 nt, Homo sapiens
  misc_RNA (1)...(19): siRNA sense strand
gacaccuacugcagauaca

SEQ ID NO: 567863 - RNA, 19 nt, Homo sapiens
  misc_RNA (1)...(19): siRNA sense strand
gaaagggcacucuggacuu

SEQ ID NO: 567864 - RNA, 19 nt, Homo sapiens
  misc_RNA (1)...(19): siRNA sense strand
gcauugaagucaggugguu

SEQ ID NO: 567865 - RNA, 19 nt, Homo sapiens
  misc_RNA (1)...(19): siRNA sense strand
aaagggcacucuggacuuc

SEQ ID NO: 567866 - RNA, 19 nt, Homo sapiens
  misc_RNA (1)...(19): siRNA sense strand
ucaucuacuucaagaauca

SEQ ID NO: 567867 - RNA, 19 nt, Homo sapiens
  misc_RNA (1)...(19): siRNA sense strand
cuccuggucugcucuguga

SEQ ID NO: 567868 - RNA, 19 nt, Homo sapiens
  misc_RNA (1)...(19): siRNA sense strand
ggucugcucugugaauggu

SEQ ID NO: 567869 - RNA, 19 nt, Homo sapiens
  misc_RNA (1)...(19): siRNA sense strand
cuacuucaagaaucagaaa

SEQ ID NO: 567870 - RNA, 19 nt, Homo sapiens
  misc_RNA (1)...(19): siRNA sense strand
guuccuacauggcaaagcu

SEQ ID NO: 567871 - RNA, 19 nt, Homo sapiens
  misc_RNA (1)...(19): siRNA sense strand
cccuggagguuccuacaug

SEQ ID NO: 567872 - RNA, 19 nt, Homo sapiens
  misc_RNA (1)...(19): siRNA sense strand
ucugcucugugaaugguuu

SEQ ID NO: 567873 - RNA, 19 nt, Homo sapiens
  misc_RNA (1)...(19): siRNA sense strand
ggaaauggaugacacagaa

SEQ ID NO: 567874 - RNA, 19 nt, Homo sapiens
  misc_RNA (1)...(19): siRNA sense strand
gcagaaguauucagaagaa

SEQ ID NO: 567875 - RNA, 19 nt, Homo sapiens
  misc_RNA (1)...(19): siRNA sense strand
caaagaaucugucaggaau

SEQ ID NO: 567876 - RNA, 19 nt, Homo sapiens
  misc_RNA (1)...(19): siRNA sense strand
gaacucagaugcacaaugc

SEQ ID NO: 567877 - RNA, 19 nt, Homo sapiens
  misc_RNA (1)...(19): siRNA sense strand
cagcaagccucacauguuu

SEQ ID NO: 567878 - RNA, 19 nt, Homo sapiens
  misc_RNA (1)...(19): siRNA sense strand
guaaauacaccacgaauuc

SEQ ID NO: 567879 - RNA, 19 nt, Homo sapiens
  misc_RNA (1)...(19): siRNA sense strand
gcacagagagcuaugaaau

SEQ ID NO: 567880 - RNA, 19 nt, Homo sapiens
  misc_RNA (1)...(19): siRNA sense strand
gcacaaugcuggauuuggu

SEQ ID NO: 567881 - RNA, 19 nt, Homo sapiens
  misc_RNA (1)...(19): siRNA sense strand
acagagagcuaugaaauga

SEQ ID NO: 567882 - RNA, 19 nt, Homo sapiens
  misc_RNA (1)...(19): siRNA sense strand
ccaaccagcuccugccuuu

SEQ ID NO: 567883 - RNA, 19 nt, Homo sapiens
  misc_RNA (1)...(19): siRNA sense strand
gccaccaagugcauuauua

SEQ ID NO: 567884 - RNA, 19 nt, Homo sapiens
  misc_RNA (1)...(19): siRNA sense strand
gaacaagacaccaugacuu

SEQ ID NO: 567885 - RNA, 19 nt, Homo sapiens
  misc_RNA (1)...(19): siRNA sense strand
ggaaugacaggaacaagaa

SEQ ID NO: 567886 - RNA, 19 nt, Homo sapiens
  misc_RNA (1)...(19): siRNA sense strand
gcacaguccuagcaucuca

SEQ ID NO: 567887 - RNA, 19 nt, Homo sapiens
  misc_RNA (1)...(19): siRNA sense strand
gaccaucgcagaccaaauu

SEQ ID NO: 567888 - RNA, 19 nt, Homo sapiens
  misc_RNA (1)...(19): siRNA sense strand
ccaagugcauuauuaagau

SEQ ID NO: 567889 - RNA, 19 nt, Homo sapiens
  misc_RNA (1)...(19): siRNA sense strand
aagaaaugcuggagaauuc

SEQ ID NO: 567890 - RNA, 19 nt, Homo sapiens
  misc_RNA (1)...(19): siRNA sense strand
gaugcacaaugcuggauuu

SEQ ID NO: 567891 - RNA, 19 nt, Homo sapiens
  misc_RNA (1)...(19): siRNA sense strand
cgagauaagaacuguguua

SEQ ID NO: 567892 - RNA, 19 nt, Homo sapiens
  misc_RNA (1)...(19): siRNA sense strand
uuaauaaagucaccaggaa

SEQ ID NO: 567893 - RNA, 19 nt, Homo sapiens
  misc_RNA (1)...(19): siRNA sense strand
guaauuaccuugaaaaugg

SEQ ID NO: 567894 - RNA, 19 nt, Homo sapiens
  misc_RNA (1)...(19): siRNA sense strand
ccucacauguuuccaaaga

SEQ ID NO: 567895 - RNA, 19 nt, Homo sapiens
  misc_RNA (1)...(19): siRNA sense strand
ggagaauucugaaggacau

SEQ ID NO: 567896 - RNA, 19 nt, Homo sapiens
  misc_RNA (1)...(19): siRNA sense strand
caagaaaugcuggagaauu

SEQ ID NO: 567897 - RNA, 19 nt, Homo sapiens
  misc_RNA (1)...(19): siRNA sense strand
ucacagagaagauccgaaa

SEQ ID NO: 567898 - RNA, 19 nt, Homo sapiens
  misc_RNA (1)...(19): siRNA sense strand
gaacacagcagagcacagu

SEQ ID NO: 567899 - RNA, 19 nt, Homo sapiens
  misc_RNA (1)...(19): siRNA sense strand
gaccuuguguucaccuuug

SEQ ID NO: 567900 - RNA, 19 nt, Homo sapiens
  misc_RNA (1)...(19): siRNA sense strand
agucaccacucgugcaaua

SEQ ID NO: 567901 - RNA, 19 nt, Homo sapiens
  misc_RNA (1)...(19): siRNA sense strand
ccaaagaaucugucaggaa

SEQ ID NO: 567902 - RNA, 19 nt, Homo sapiens
  misc_RNA (1)...(19): siRNA sense strand
ugaaaugacagcugaguug

SEQ ID NO: 567903 - RNA, 19 nt, Homo sapiens
  misc_RNA (1)...(19): siRNA sense strand
ccaccaagugcauuauuaa

SEQ ID NO: 567904 - RNA, 19 nt, Homo sapiens
  misc_RNA (1)...(19): siRNA sense strand
uuauuaagaucguggaguu

SEQ ID NO: 567905 - RNA, 19 nt, Homo sapiens
  misc_RNA (1)...(19): siRNA sense strand
aagaaucugucaggaauga

SEQ ID NO: 567906 - RNA, 19 nt, Homo sapiens
  misc_RNA (1)...(19): siRNA sense strand
ucacagaucuccguagcau

SEQ ID NO: 567907 - RNA, 19 nt, Homo sapiens
  misc_RNA (1)...(19): siRNA sense strand
ucacauguuuccaaagauc

SEQ ID NO: 567908 - RNA, 19 nt, Homo sapiens
  misc_RNA (1)...(19): siRNA sense strand
gaucguggaguuugcuaaa

SEQ ID NO: 567909 - RNA, 19 nt, Homo sapiens
  misc_RNA (1)...(19): siRNA sense strand
gcuggagaauucugaagga

SEQ ID NO: 567910 - RNA, 19 nt, Homo sapiens
  misc_RNA (1)...(19): siRNA sense strand
gaaauggaugacacagaaa

SEQ ID NO: 567911 - RNA, 19 nt, Homo sapiens
  misc_RNA (1)...(19): siRNA sense strand
ggccuuacccuaaaucgaa

SEQ ID NO: 567912 - RNA, 19 nt, Homo sapiens
  misc_RNA (1)...(19): siRNA sense strand
cuggacauccugauucuua

SEQ ID NO: 567913 - RNA, 19 nt, Homo sapiens
  misc_RNA (1)...(19): siRNA sense strand
aagcaagaaugcacagaga

SEQ ID NO: 567914 - RNA, 19 nt, Homo sapiens
  misc_RNA (1)...(19): siRNA sense strand
ccagcaagccucacauguu

SEQ ID NO: 567915 - RNA, 19 nt, Homo sapiens
  misc_RNA (1)...(19): siRNA sense strand
ucagacggccuuacccuaa

SEQ ID NO: 567916 - RNA, 19 nt, Homo sapiens
  misc_RNA (1)...(19): siRNA sense strand
ccgaaaagcucaccaggaa

SEQ ID NO: 567917 - RNA, 19 nt, Homo sapiens
  misc_RNA (1)...(19): siRNA sense strand
cagacggccuuacccuaaa

SEQ ID NO: 567918 - RNA, 19 nt, Homo sapiens
  misc_RNA (1)...(19): siRNA sense strand
gguaaauacaccacgaauu

SEQ ID NO: 567919 - RNA, 19 nt, Homo sapiens
  misc_RNA (1)...(19): siRNA sense strand
gugggaauguccaaagaau

SEQ ID NO: 567920 - RNA, 19 nt, Homo sapiens
  misc_RNA (1)...(19): siRNA sense strand
ucacccagcucaguggaaa

SEQ ID NO: 567921 - RNA, 19 nt, Homo sapiens
  misc_RNA (1)...(19): siRNA sense strand
gcuccugccuuuggaaaug

SEQ ID NO: 567922 - RNA, 19 nt, Homo sapiens
  misc_RNA (1)...(19): siRNA sense strand
gauuugguccucugacuga

SEQ ID NO: 567923 - RNA, 19 nt, Homo sapiens
  misc_RNA (1)...(19): siRNA sense strand
gaaucgaugccaauacugu

SEQ ID NO: 567924 - RNA, 19 nt, Homo sapiens
  misc_RNA (1)...(19): siRNA sense strand
gugcagagcguguaauuac

SEQ ID NO: 567925 - RNA, 19 nt, Homo sapiens
  misc_RNA (1)...(19): siRNA sense strand
ucugccagcuggguaaaua

SEQ ID NO: 567926 - RNA, 19 nt, Homo sapiens
  misc_RNA (1)...(19): siRNA sense strand
gaagugggaauguccaaag

SEQ ID NO: 567927 - RNA, 19 nt, Homo sapiens
  misc_RNA (1)...(19): siRNA sense strand
agagagcuaugaaaugaca

SEQ ID NO: 567928 - RNA, 19 nt, Homo sapiens
  misc_RNA (1)...(19): siRNA sense strand
aacaagacaccaugacuuu

SEQ ID NO: 567929 - RNA, 19 nt, Homo sapiens
  misc_RNA (1)...(19): siRNA sense strand
cagcugaguuggacgaucu

SEQ ID NO: 567930 - RNA, 19 nt, Homo sapiens
  misc_RNA (1)...(19): siRNA sense strand
gggaauguccaaagaaucu

SEQ ID NO: 567931 - RNA, 19 nt, Homo sapiens
  misc_RNA (1)...(19): siRNA sense strand
gcagagcacaguccuagca

SEQ ID NO: 567932 - RNA, 19 nt, Homo sapiens
  misc_RNA (1)...(19): siRNA sense strand
caagugcauuauuaagauc

SEQ ID NO: 567933 - RNA, 19 nt, Homo sapiens
  misc_RNA (1)...(19): siRNA sense strand
ccaccucucauucaagaaa

SEQ ID NO: 567934 - RNA, 19 nt, Homo sapiens
  misc_RNA (1)...(19): siRNA sense strand
gcguguaauuaccuugaaa

SEQ ID NO: 567935 - RNA, 19 nt, Homo sapiens
  misc_RNA (1)...(19): siRNA sense strand
ugacugaccuuguguucac

SEQ ID NO: 567936 - RNA, 19 nt, Homo sapiens
  misc_RNA (1)...(19): siRNA sense strand
agaauuugcaccagguaua

SEQ ID NO: 567937 - RNA, 19 nt, Homo sapiens
  misc_RNA (1)...(19): siRNA sense strand
gcuaaacgucugccugguu

SEQ ID NO: 567938 - RNA, 19 nt, Homo sapiens
  misc_RNA (1)...(19): siRNA sense strand
ccagaagugcuuugaagug

SEQ ID NO: 567939 - RNA, 19 nt, Homo sapiens
  misc_RNA (1)...(19): siRNA sense strand
gagcguguaauuaccuuga

SEQ ID NO: 567940 - RNA, 19 nt, Homo sapiens
  misc_RNA (1)...(19): siRNA sense strand
caagacaccaugacuuucu

SEQ ID NO: 567941 - RNA, 19 nt, Homo sapiens
  misc_RNA (1)...(19): siRNA sense strand
gaaugacaggaacaagaaa

SEQ ID NO: 567942 - RNA, 19 nt, Homo sapiens
  misc_RNA (1)...(19): siRNA sense strand
ccgcagaaguauucagaag

SEQ ID NO: 567943 - RNA, 19 nt, Homo sapiens
  misc_RNA (1)...(19): siRNA sense strand
gaaauuccuggaucaaugc

SEQ ID NO: 567944 - RNA, 19 nt, Homo sapiens
  misc_RNA (1)...(19): siRNA sense strand
ucucagugccaucugcuua

SEQ ID NO: 567945 - RNA, 19 nt, Homo sapiens
  misc_RNA (1)...(19): siRNA sense strand
ggacauccugauucuuaga

SEQ ID NO: 567946 - RNA, 19 nt, Homo sapiens
  misc_RNA (1)...(19): siRNA sense strand
ccaggaaucgaugccaaua

SEQ ID NO: 567947 - RNA, 19 nt, Homo sapiens
  misc_RNA (1)...(19): siRNA sense strand
gagcacaguccuagcaucu

SEQ ID NO: 567948 - RNA, 19 nt, Homo sapiens
  misc_RNA (1)...(19): siRNA sense strand
uucaagaaaugcuggagaa

SEQ ID NO: 567949 - RNA, 19 nt, Homo sapiens
  misc_RNA (1)...(19): siRNA sense strand
ugagggauguaagggcuuu

SEQ ID NO: 567950 - RNA, 19 nt, Homo sapiens
  misc_RNA (1)...(19): siRNA sense strand
acagaucuccguagcauca

SEQ ID NO: 567951 - RNA, 19 nt, Homo sapiens
  misc_RNA (1)...(19): siRNA sense strand
uaagcuacaagaaccauug

SEQ ID NO: 567952 - RNA, 19 nt, Homo sapiens
  misc_RNA (1)...(19): siRNA sense strand
ucaccgagauaagaacugu

SEQ ID NO: 567953 - RNA, 19 nt, Homo sapiens
  misc_RNA (1)...(19): siRNA sense strand
gaauuccagugcugaccau

SEQ ID NO: 567954 - RNA, 19 nt, Homo sapiens
  misc_RNA (1)...(19): siRNA sense strand
aagcucaccaggaaacuuu

SEQ ID NO: 567955 - RNA, 19 nt, Homo sapiens
  misc_RNA (1)...(19): siRNA sense strand
ggugcagagcguguaauua

SEQ ID NO: 567956 - RNA, 19 nt, Homo sapiens
  misc_RNA (1)...(19): siRNA sense strand
ugccaccucucauucaaga

SEQ ID NO: 567957 - RNA, 19 nt, Homo sapiens
  misc_RNA (1)...(19): siRNA sense strand
gaaaugcuggagaauucug

SEQ ID NO: 567958 - RNA, 19 nt, Homo sapiens
  misc_RNA (1)...(19): siRNA sense strand
ggaucaaugccaccucuca

SEQ ID NO: 567959 - RNA, 19 nt, Homo sapiens
  misc_RNA (1)...(19): siRNA sense strand
acacuugucaccgagauaa

SEQ ID NO: 567960 - RNA, 19 nt, Homo sapiens
  misc_RNA (1)...(19): siRNA sense strand
agacuucgaagcaagaaug

SEQ ID NO: 567961 - RNA, 19 nt, Homo sapiens
  misc_RNA (1)...(19): siRNA sense strand
uaaaggugcagagcgugua

SEQ ID NO: 567962 - RNA, 19 nt, Homo sapiens
  misc_RNA (1)...(19): siRNA sense strand
uaauaaagucaccaggaau

SEQ ID NO: 567963 - RNA, 19 nt, Homo sapiens
  misc_RNA (1)...(19): siRNA sense strand
ccagaacaagacaccauga

SEQ ID NO: 567964 - RNA, 19 nt, Homo sapiens
  misc_RNA (1)...(19): siRNA sense strand
gaauuugcaccagguauac

SEQ ID NO: 567965 - RNA, 19 nt, Homo sapiens
  misc_RNA (1)...(19): siRNA sense strand
cacagagagcuaugaaaug

SEQ ID NO: 567966 - RNA, 19 nt, Homo sapiens
  misc_RNA (1)...(19): siRNA sense strand
gaauucugaaggacaugaa

SEQ ID NO: 567967 - RNA, 19 nt, Homo sapiens
  misc_RNA (1)...(19): siRNA sense strand
gaauguccaaagaaucugu

SEQ ID NO: 567968 - RNA, 19 nt, Homo sapiens
  misc_RNA (1)...(19): siRNA sense strand
acaagaaccauugcuggaa

SEQ ID NO: 567969 - RNA, 19 nt, Homo sapiens
  misc_RNA (1)...(19): siRNA sense strand
agacggccuuacccuaaau

SEQ ID NO: 567970 - RNA, 19 nt, Homo sapiens
  misc_RNA (1)...(19): siRNA sense strand
aagugggaauguccaaaga

SEQ ID NO: 567971 - RNA, 19 nt, Homo sapiens
  misc_RNA (1)...(19): siRNA sense strand
ucagugccaucugcuuaau

SEQ ID NO: 567972 - RNA, 19 nt, Homo sapiens
  misc_RNA (1)...(19): siRNA sense strand
cuccagaagugcuuugaag

SEQ ID NO: 567973 - RNA, 19 nt, Homo sapiens
  misc_RNA (1)...(19): siRNA sense strand
ggaaauggaugacacagaa

SEQ ID NO: 567974 - RNA, 19 nt, Homo sapiens
  misc_RNA (1)...(19): siRNA sense strand
caaagaaucugucaggaau

SEQ ID NO: 567975 - RNA, 19 nt, Homo sapiens
  misc_RNA (1)...(19): siRNA sense strand
gaacucagaugcacaaugc

SEQ ID NO: 567976 - RNA, 19 nt, Homo sapiens
  misc_RNA (1)...(19): siRNA sense strand
cagcaagccucacauguuu

SEQ ID NO: 567977 - RNA, 19 nt, Homo sapiens
  misc_RNA (1)...(19): siRNA sense strand
guaaauacaccacgaauuc

SEQ ID NO: 567978 - RNA, 19 nt, Homo sapiens
  misc_RNA (1)...(19): siRNA sense strand
gcacagagagcuaugaaau

SEQ ID NO: 567979 - RNA, 19 nt, Homo sapiens
  misc_RNA (1)...(19): siRNA sense strand
gcacaaugcuggauuuggu

SEQ ID NO: 567980 - RNA, 19 nt, Homo sapiens
  misc_RNA (1)...(19): siRNA sense strand
acagagagcuaugaaauga

SEQ ID NO: 567981 - RNA, 19 nt, Homo sapiens
  misc_RNA (1)...(19): siRNA sense strand
ccaaccagcuccugccuuu

SEQ ID NO: 567982 - RNA, 19 nt, Homo sapiens
  misc_RNA (1)...(19): siRNA sense strand
gccaccaagugcauuauua

SEQ ID NO: 567983 - RNA, 19 nt, Homo sapiens
  misc_RNA (1)...(19): siRNA sense strand
gaacaagacaccaugacuu

SEQ ID NO: 567984 - RNA, 19 nt, Homo sapiens
  misc_RNA (1)...(19): siRNA sense strand
ggaaugacaggaacaagaa

SEQ ID NO: 567985 - RNA, 19 nt, Homo sapiens
  misc_RNA (1)...(19): siRNA sense strand
gcacaguccuagcaucuca

SEQ ID NO: 567986 - RNA, 19 nt, Homo sapiens
  misc_RNA (1)...(19): siRNA sense strand
gaccaucgcagaccaaauu

SEQ ID NO: 567987 - RNA, 19 nt, Homo sapiens
  misc_RNA (1)...(19): siRNA sense strand
ccaagugcauuauuaagau

SEQ ID NO: 567988 - RNA, 19 nt, Homo sapiens
  misc_RNA (1)...(19): siRNA sense strand
aagaaaugcuggagaauuc

SEQ ID NO: 567989 - RNA, 19 nt, Homo sapiens
  misc_RNA (1)...(19): siRNA sense strand
gaugcacaaugcuggauuu

SEQ ID NO: 567990 - RNA, 19 nt, Homo sapiens
  misc_RNA (1)...(19): siRNA sense strand
cgagauaagaacuguguua

SEQ ID NO: 567991 - RNA, 19 nt, Homo sapiens
  misc_RNA (1)...(19): siRNA sense strand
uuaauaaagucaccaggaa

SEQ ID NO: 567992 - RNA, 19 nt, Homo sapiens
  misc_RNA (1)...(19): siRNA sense strand
guaauuaccuugaaaaugg

SEQ ID NO: 567993 - RNA, 19 nt, Homo sapiens
  misc_RNA (1)...(19): siRNA sense strand
ccucacauguuuccaaaga

SEQ ID NO: 567994 - RNA, 19 nt, Homo sapiens
  misc_RNA (1)...(19): siRNA sense strand
ggagaauucugaaggacau

SEQ ID NO: 567995 - RNA, 19 nt, Homo sapiens
  misc_RNA (1)...(19): siRNA sense strand
caagaaaugcuggagaauu

SEQ ID NO: 567996 - RNA, 19 nt, Homo sapiens
  misc_RNA (1)...(19): siRNA sense strand
ucacagagaagauccgaaa

SEQ ID NO: 567997 - RNA, 19 nt, Homo sapiens
  misc_RNA (1)...(19): siRNA sense strand
gaacacagcagagcacagu

SEQ ID NO: 567998 - RNA, 19 nt, Homo sapiens
  misc_RNA (1)...(19): siRNA sense strand
gaccuuguguucaccuuug

SEQ ID NO: 567999 - RNA, 19 nt, Homo sapiens
  misc_RNA (1)...(19): siRNA sense strand
agucaccacucgugcaaua

SEQ ID NO: 568000 - RNA, 19 nt, Homo sapiens
  misc_RNA (1)...(19): siRNA sense strand
ccaaagaaucugucaggaa

SEQ ID NO: 568001 - RNA, 19 nt, Homo sapiens
  misc_RNA (1)...(19): siRNA sense strand
ugaaaugacagcugaguug

SEQ ID NO: 568002 - RNA, 19 nt, Homo sapiens
  misc_RNA (1)...(19): siRNA sense strand
ccaccaagugcauuauuaa

SEQ ID NO: 568003 - RNA, 19 nt, Homo sapiens
  misc_RNA (1)...(19): siRNA sense strand
uuauuaagaucguggaguu

SEQ ID NO: 568004 - RNA, 19 nt, Homo sapiens
  misc_RNA (1)...(19): siRNA sense strand
aagaaucugucaggaauga

SEQ ID NO: 568005 - RNA, 19 nt, Homo sapiens
  misc_RNA (1)...(19): siRNA sense strand
ucacagaucuccguagcau

SEQ ID NO: 568006 - RNA, 19 nt, Homo sapiens
  misc_RNA (1)...(19): siRNA sense strand
ucacauguuuccaaagauc

SEQ ID NO: 568007 - RNA, 19 nt, Homo sapiens
  misc_RNA (1)...(19): siRNA sense strand
gaucguggaguuugcuaaa

SEQ ID NO: 568008 - RNA, 19 nt, Homo sapiens
  misc_RNA (1)...(19): siRNA sense strand
gcuggagaauucugaagga

SEQ ID NO: 568009 - RNA, 19 nt, Homo sapiens
  misc_RNA (1)...(19): siRNA sense strand
gaaauggaugacacagaaa

SEQ ID NO: 568010 - RNA, 19 nt, Homo sapiens
  misc_RNA (1)...(19): siRNA sense strand
ggccuuacccuaaaucgaa

SEQ ID NO: 568011 - RNA, 19 nt, Homo sapiens
  misc_RNA (1)...(19): siRNA sense strand
cuggacauccugauucuua

SEQ ID NO: 568012 - RNA, 19 nt, Homo sapiens
  misc_RNA (1)...(19): siRNA sense strand
aagcaagaaugcacagaga

SEQ ID NO: 568013 - RNA, 19 nt, Homo sapiens
  misc_RNA (1)...(19): siRNA sense strand
ccagcaagccucacauguu

SEQ ID NO: 568014 - RNA, 19 nt, Homo sapiens
  misc_RNA (1)...(19): siRNA sense strand
ucagacggccuuacccuaa

SEQ ID NO: 568015 - RNA, 19 nt, Homo sapiens
  misc_RNA (1)...(19): siRNA sense strand
ccgaaaagcucaccaggaa

SEQ ID NO: 568016 - RNA, 19 nt, Homo sapiens
  misc_RNA (1)...(19): siRNA sense strand
cagacggccuuacccuaaa

SEQ ID NO: 568017 - RNA, 19 nt, Homo sapiens
  misc_RNA (1)...(19): siRNA sense strand
gguaaauacaccacgaauu

SEQ ID NO: 568018 - RNA, 19 nt, Homo sapiens
  misc_RNA (1)...(19): siRNA sense strand
gauuugguccucugacuga

SEQ ID NO: 568019 - RNA, 19 nt, Homo sapiens
  misc_RNA (1)...(19): siRNA sense strand
ucacccagcucaguggaaa

SEQ ID NO: 568020 - RNA, 19 nt, Homo sapiens
  misc_RNA (1)...(19): siRNA sense strand
gcuccugccuuuggaaaug

SEQ ID NO: 568021 - RNA, 19 nt, Homo sapiens
  misc_RNA (1)...(19): siRNA sense strand
gugggaauguccaaagaau

SEQ ID NO: 568022 - RNA, 19 nt, Homo sapiens
  misc_RNA (1)...(19): siRNA sense strand
gaaucgaugccaauacugu

SEQ ID NO: 568023 - RNA, 19 nt, Homo sapiens
  misc_RNA (1)...(19): siRNA sense strand
gugcagagcguguaauuac

SEQ ID NO: 568024 - RNA, 19 nt, Homo sapiens
  misc_RNA (1)...(19): siRNA sense strand
gaagugggaauguccaaag

SEQ ID NO: 568025 - RNA, 19 nt, Homo sapiens
  misc_RNA (1)...(19): siRNA sense strand
ucugccagcuggguaaaua

SEQ ID NO: 568026 - RNA, 19 nt, Homo sapiens
  misc_RNA (1)...(19): siRNA sense strand
agagagcuaugaaaugaca

SEQ ID NO: 568027 - RNA, 19 nt, Homo sapiens
  misc_RNA (1)...(19): siRNA sense strand
aacaagacaccaugacuuu

SEQ ID NO: 568028 - RNA, 19 nt, Homo sapiens
  misc_RNA (1)...(19): siRNA sense strand
cagcugaguuggacgaucu

SEQ ID NO: 568029 - RNA, 19 nt, Homo sapiens
  misc_RNA (1)...(19): siRNA sense strand
gggaauguccaaagaaucu

SEQ ID NO: 568030 - RNA, 19 nt, Homo sapiens
  misc_RNA (1)...(19): siRNA sense strand
gcagagcacaguccuagca

SEQ ID NO: 568031 - RNA, 19 nt, Homo sapiens
  misc_RNA (1)...(19): siRNA sense strand
caagugcauuauuaagauc

SEQ ID NO: 568032 - RNA, 19 nt, Homo sapiens
  misc_RNA (1)...(19): siRNA sense strand
ccaccucucauucaagaaa

SEQ ID NO: 568033 - RNA, 19 nt, Homo sapiens
  misc_RNA (1)...(19): siRNA sense strand
gcguguaauuaccuugaaa

SEQ ID NO: 568034 - RNA, 19 nt, Homo sapiens
  misc_RNA (1)...(19): siRNA sense strand
ugacugaccuuguguucac

SEQ ID NO: 568035 - RNA, 19 nt, Homo sapiens
  misc_RNA (1)...(19): siRNA sense strand
agaauuugcaccagguaua

SEQ ID NO: 568036 - RNA, 19 nt, Homo sapiens
  misc_RNA (1)...(19): siRNA sense strand
gcuaaacgucugccugguu

SEQ ID NO: 568037 - RNA, 19 nt, Homo sapiens
  misc_RNA (1)...(19): siRNA sense strand
caagacaccaugacuuucu

SEQ ID NO: 568038 - RNA, 19 nt, Homo sapiens
  misc_RNA (1)...(19): siRNA sense strand
gagcguguaauuaccuuga

SEQ ID NO: 568039 - RNA, 19 nt, Homo sapiens
  misc_RNA (1)...(19): siRNA sense strand
gaaugacaggaacaagaaa

SEQ ID NO: 568040 - RNA, 19 nt, Homo sapiens
  misc_RNA (1)...(19): siRNA sense strand
ccagaagugcuuugaagug

SEQ ID NO: 568041 - RNA, 19 nt, Homo sapiens
  misc_RNA (1)...(19): siRNA sense strand
ggacauccugauucuuaga

SEQ ID NO: 568042 - RNA, 19 nt, Homo sapiens
  misc_RNA (1)...(19): siRNA sense strand
gaaauuccuggaucaaugc

SEQ ID NO: 568043 - RNA, 19 nt, Homo sapiens
  misc_RNA (1)...(19): siRNA sense strand
ucucagugccaucugcuua

SEQ ID NO: 568044 - RNA, 19 nt, Homo sapiens
  misc_RNA (1)...(19): siRNA sense strand
uucaagaaaugcuggagaa

SEQ ID NO: 568045 - RNA, 19 nt, Homo sapiens
  misc_RNA (1)...(19): siRNA sense strand
gagcacaguccuagcaucu

SEQ ID NO: 568046 - RNA, 19 nt, Homo sapiens
  misc_RNA (1)...(19): siRNA sense strand
ccaggaaucgaugccaaua

SEQ ID NO: 568047 - RNA, 19 nt, Homo sapiens
  misc_RNA (1)...(19): siRNA sense strand
gaauuccagugcugaccau

SEQ ID NO: 568048 - RNA, 19 nt, Homo sapiens
  misc_RNA (1)...(19): siRNA sense strand
acagaucuccguagcauca

SEQ ID NO: 568049 - RNA, 19 nt, Homo sapiens
  misc_RNA (1)...(19): siRNA sense strand
uaagcuacaagaaccauug

SEQ ID NO: 568050 - RNA, 19 nt, Homo sapiens
  misc_RNA (1)...(19): siRNA sense strand
ucaccgagauaagaacugu

SEQ ID NO: 568051 - RNA, 19 nt, Homo sapiens
  misc_RNA (1)...(19): siRNA sense strand
aagcucaccaggaaacuuu

SEQ ID NO: 568052 - RNA, 19 nt, Homo sapiens
  misc_RNA (1)...(19): siRNA sense strand
ggugcagagcguguaauua

SEQ ID NO: 568053 - RNA, 19 nt, Homo sapiens
  misc_RNA (1)...(19): siRNA sense strand
ugccaccucucauucaaga

SEQ ID NO: 568054 - RNA, 19 nt, Homo sapiens
  misc_RNA (1)...(19): siRNA sense strand
gaaaugcuggagaauucug

SEQ ID NO: 568055 - RNA, 19 nt, Homo sapiens
  misc_RNA (1)...(19): siRNA sense strand
ggaucaaugccaccucuca

SEQ ID NO: 568056 - RNA, 19 nt, Homo sapiens
  misc_RNA (1)...(19): siRNA sense strand
acacuugucaccgagauaa

SEQ ID NO: 568057 - RNA, 19 nt, Homo sapiens
  misc_RNA (1)...(19): siRNA sense strand
gaauuugcaccagguauac

SEQ ID NO: 568058 - RNA, 19 nt, Homo sapiens
  misc_RNA (1)...(19): siRNA sense strand
uaauaaagucaccaggaau

SEQ ID NO: 568059 - RNA, 19 nt, Homo sapiens
  misc_RNA (1)...(19): siRNA sense strand
uaaaggugcagagcgugua

SEQ ID NO: 568060 - RNA, 19 nt, Homo sapiens
  misc_RNA (1)...(19): siRNA sense strand
agacuucgaagcaagaaug

SEQ ID NO: 568061 - RNA, 19 nt, Homo sapiens
  misc_RNA (1)...(19): siRNA sense strand
ccagaacaagacaccauga

SEQ ID NO: 568062 - RNA, 19 nt, Homo sapiens
  misc_RNA (1)...(19): siRNA sense strand
gaauguccaaagaaucugu

SEQ ID NO: 568063 - RNA, 19 nt, Homo sapiens
  misc_RNA (1)...(19): siRNA sense strand
gaauucugaaggacaugaa

SEQ ID NO: 568064 - RNA, 19 nt, Homo sapiens
  misc_RNA (1)...(19): siRNA sense strand
acaagaaccauugcuggaa

SEQ ID NO: 568065 - RNA, 19 nt, Homo sapiens
  misc_RNA (1)...(19): siRNA sense strand
agacggccuuacccuaaau

SEQ ID NO: 568066 - RNA, 19 nt, Homo sapiens
  misc_RNA (1)...(19): siRNA sense strand
cacagagagcuaugaaaug

SEQ ID NO: 568067 - RNA, 19 nt, Homo sapiens
  misc_RNA (1)...(19): siRNA sense strand
ucagugccaucugcuuaau

SEQ ID NO: 568068 - RNA, 19 nt, Homo sapiens
  misc_RNA (1)...(19): siRNA sense strand
cuccagaagugcuuugaag

SEQ ID NO: 568069 - RNA, 19 nt, Homo sapiens
  misc_RNA (1)...(19): siRNA sense strand
aagugggaauguccaaaga

SEQ ID NO: 568070 - RNA, 19 nt, Homo sapiens
  misc_RNA (1)...(19): siRNA sense strand
aggaaucgaugccaauacu

SEQ ID NO: 568071 - RNA, 19 nt, Homo sapiens
  misc_RNA (1)...(19): siRNA sense strand
gacaaaaguagauaagcua

SEQ ID NO: 568072 - RNA, 19 nt, Homo sapiens
  misc_RNA (1)...(19): siRNA sense strand
gaucaaugccaccucucau

SEQ ID NO: 568073 - RNA, 19 nt, Homo sapiens
  misc_RNA (1)...(19): siRNA sense strand
ugacaggacuuauuucuuu

SEQ ID NO: 568074 - RNA, 19 nt, Homo sapiens
  misc_RNA (1)...(19): siRNA sense strand
gacaggacuuauuucuuua

SEQ ID NO: 568075 - RNA, 19 nt, Homo sapiens
  misc_RNA (1)...(19): siRNA sense strand
ucacagccaugcagcaguu

SEQ ID NO: 568076 - RNA, 19 nt, Homo sapiens
  misc_RNA (1)...(19): siRNA sense strand
acaaugacaggacuuauuu

SEQ ID NO: 568077 - RNA, 19 nt, Homo sapiens
  misc_RNA (1)...(19): siRNA sense strand
ggacaauaacguagaggaa

SEQ ID NO: 568078 - RNA, 19 nt, Homo sapiens
  misc_RNA (1)...(19): siRNA sense strand
gguacuggguguucaagga

SEQ ID NO: 568079 - RNA, 19 nt, Homo sapiens
  misc_RNA (1)...(19): siRNA sense strand
ggaguggaguggcuaagca

SEQ ID NO: 568080 - RNA, 19 nt, Homo sapiens
  misc_RNA (1)...(19): siRNA sense strand
gauccgcggugaagcuuuc

SEQ ID NO: 568081 - RNA, 19 nt, Homo sapiens
  misc_RNA (1)...(19): siRNA sense strand
guucaaggacaauaacgua

SEQ ID NO: 568082 - RNA, 19 nt, Homo sapiens
  misc_RNA (1)...(19): siRNA sense strand
uaacguagaggaaggauac

SEQ ID NO: 568083 - RNA, 19 nt, Homo sapiens
  misc_RNA (1)...(19): siRNA sense strand
gaucgucuucuuuaaagga

SEQ ID NO: 568084 - RNA, 19 nt, Homo sapiens
  misc_RNA (1)...(19): siRNA sense strand
caaggacaauaacguagag

SEQ ID NO: 568085 - RNA, 19 nt, Homo sapiens
  misc_RNA (1)...(19): siRNA sense strand
ccaaguggaacaagaggaa

SEQ ID NO: 568086 - RNA, 19 nt, Homo sapiens
  misc_RNA (1)...(19): siRNA sense strand
gcugguguguggagacuca

SEQ ID NO: 568087 - RNA, 19 nt, Homo sapiens
  misc_RNA (1)...(19): siRNA sense strand
cgcaagaggagcugucuaa

SEQ ID NO: 568088 - RNA, 19 nt, Homo sapiens
  misc_RNA (1)...(19): siRNA sense strand
cacaaugacaggacuuauu

SEQ ID NO: 568089 - RNA, 19 nt, Homo sapiens
  misc_RNA (1)...(19): siRNA sense strand
ggacacccacuuugacgau

SEQ ID NO: 568090 - RNA, 19 nt, Homo sapiens
  misc_RNA (1)...(19): siRNA sense strand
cgacggugccuccuacuuc

SEQ ID NO: 568091 - RNA, 19 nt, Homo sapiens
  misc_RNA (1)...(19): siRNA sense strand
gcacagaugcaccgcuucu

SEQ ID NO: 568092 - RNA, 19 nt, Homo sapiens
  misc_RNA (1)...(19): siRNA sense strand
ugcgugcacucauguacua

SEQ ID NO: 568093 - RNA, 19 nt, Homo sapiens
  misc_RNA (1)...(19): siRNA sense strand
guuacgaggucugcucaug

SEQ ID NO: 568094 - RNA, 19 nt, Homo sapiens
  misc_RNA (1)...(19): siRNA sense strand
ucuccaaggccgaccauaa

SEQ ID NO: 568095 - RNA, 19 nt, Homo sapiens
  misc_RNA (1)...(19): siRNA sense strand
caagaggagcugucuaagg

SEQ ID NO: 568096 - RNA, 19 nt, Homo sapiens
  misc_RNA (1)...(19): siRNA sense strand
acacccacuuugacgauga

SEQ ID NO: 568097 - RNA, 19 nt, Homo sapiens
  misc_RNA (1)...(19): siRNA sense strand
gaugcagcacucacuuuga

SEQ ID NO: 568098 - RNA, 19 nt, Homo sapiens
  misc_RNA (1)...(19): siRNA sense strand
ucaaggacaauaacguaga

SEQ ID NO: 568099 - RNA, 19 nt, Homo sapiens
  misc_RNA (1)...(19): siRNA sense strand
cagaugcagcacucacuuu

SEQ ID NO: 568100 - RNA, 19 nt, Homo sapiens
  misc_RNA (1)...(19): siRNA sense strand
gacggugccuccuacuucu

SEQ ID NO: 568101 - RNA, 19 nt, Homo sapiens
  misc_RNA (1)...(19): siRNA sense strand
ccacgggauggaccuguuu

SEQ ID NO: 568102 - RNA, 19 nt, Homo sapiens
  misc_RNA (1)...(19): siRNA sense strand
gacagguacuggguguuca

SEQ ID NO: 568103 - RNA, 19 nt, Homo sapiens
  misc_RNA (1)...(19): siRNA sense strand
cgacauccagaucgacuuc

SEQ ID NO: 568104 - RNA, 19 nt, Homo sapiens
  misc_RNA (1)...(19): siRNA sense strand
uuaaggaccagcuguacug

SEQ ID NO: 568105 - RNA, 19 nt, Homo sapiens
  misc_RNA (1)...(19): siRNA sense strand
uggaguggcuaagcagguu

SEQ ID NO: 568106 - RNA, 19 nt, Homo sapiens
  misc_RNA (1)...(19): siRNA sense strand
gcaccagcgaccacaagau

SEQ ID NO: 568107 - RNA, 19 nt, Homo sapiens
  misc_RNA (1)...(19): siRNA sense strand
caaggucuggagcgacauu

SEQ ID NO: 568108 - RNA, 19 nt, Homo sapiens
  misc_RNA (1)...(19): siRNA sense strand
uacgaggucugcucaugca

SEQ ID NO: 568109 - RNA, 19 nt, Homo sapiens
  misc_RNA (1)...(19): siRNA sense strand
caccagcgaccacaagauc

SEQ ID NO: 568110 - RNA, 19 nt, Homo sapiens
  misc_RNA (1)...(19): siRNA sense strand
ggcuaagcagguucgguua

SEQ ID NO: 568111 - RNA, 19 nt, Homo sapiens
  misc_RNA (1)...(19): siRNA sense strand
ggaaggagaugaccaugca

SEQ ID NO: 568112 - RNA, 19 nt, Homo sapiens
  misc_RNA (1)...(19): siRNA sense strand
gcacacagggcaaggacua

SEQ ID NO: 568113 - RNA, 19 nt, Homo sapiens
  misc_RNA (1)...(19): siRNA sense strand
acgaggcccuggagaguua

SEQ ID NO: 568114 - RNA, 19 nt, Homo sapiens
  misc_RNA (1)...(19): siRNA sense strand
gcaagcaccuggccaagcu

SEQ ID NO: 568115 - RNA, 19 nt, Homo sapiens
  misc_RNA (1)...(19): siRNA sense strand
gcaccucacucaucaugca

SEQ ID NO: 568116 - RNA, 19 nt, Homo sapiens
  misc_RNA (1)...(19): siRNA sense strand
agaguuaccugcccaagau

SEQ ID NO: 568117 - RNA, 19 nt, Homo sapiens
  misc_RNA (1)...(19): siRNA sense strand
gcugagcgccacagucuaa

SEQ ID NO: 568118 - RNA, 19 nt, Homo sapiens
  misc_RNA (1)...(19): siRNA sense strand
gcaaggagcacgggaagga

SEQ ID NO: 568119 - RNA, 19 nt, Homo sapiens
  misc_RNA (1)...(19): siRNA sense strand
uggagaagcugcgggauga

SEQ ID NO: 568120 - RNA, 19 nt, Homo sapiens
  misc_RNA (1)...(19): siRNA sense strand
cccaaaggcuggaguguca

SEQ ID NO: 568121 - RNA, 19 nt, Homo sapiens
  misc_RNA (1)...(19): siRNA sense strand
gcuggagugucauguauag

SEQ ID NO: 568122 - RNA, 19 nt, Homo sapiens
  misc_RNA (1)...(19): siRNA sense strand
gcaacaagcgcaaggucuu

SEQ ID NO: 568123 - RNA, 19 nt, Homo sapiens
  misc_RNA (1)...(19): siRNA sense strand
ccuucgagcuugaugguuu

SEQ ID NO: 568124 - RNA, 19 nt, Homo sapiens
  misc_RNA (1)...(19): siRNA sense strand
gccagcaccucacucauca

SEQ ID NO: 568125 - RNA, 19 nt, Homo sapiens
  misc_RNA (1)...(19): siRNA sense strand
guucaagacgcauuuguug

SEQ ID NO: 568126 - RNA, 19 nt, Homo sapiens
  misc_RNA (1)...(19): siRNA sense strand
uggccaagcuguuccugaa

SEQ ID NO: 568127 - RNA, 19 nt, Homo sapiens
  misc_RNA (1)...(19): siRNA sense strand
gcggagaacgugcgcaaga

SEQ ID NO: 568128 - RNA, 19 nt, Homo sapiens
  misc_RNA (1)...(19): siRNA sense strand
ccacugugcuggagaagcu

SEQ ID NO: 568129 - RNA, 19 nt, Homo sapiens
  misc_RNA (1)...(19): siRNA sense strand
gaaguauggcaacguguuc

SEQ ID NO: 568130 - RNA, 19 nt, Homo sapiens
  misc_RNA (1)...(19): siRNA sense strand
gagaguuaccugcccaaga

SEQ ID NO: 568131 - RNA, 19 nt, Homo sapiens
  misc_RNA (1)...(19): siRNA sense strand
ggaccuugggcaccucuuu

SEQ ID NO: 568132 - RNA, 19 nt, Homo sapiens
  misc_RNA (1)...(19): siRNA sense strand
ggagugucauguauagcau

SEQ ID NO: 568133 - RNA, 19 nt, Homo sapiens
  misc_RNA (1)...(19): siRNA sense strand
ccgaggccaucaacgugua

SEQ ID NO: 568134 - RNA, 19 nt, Homo sapiens
  misc_RNA (1)...(19): siRNA sense strand
gcccuggaccuccucauug

SEQ ID NO: 568135 - RNA, 19 nt, Homo sapiens
  misc_RNA (1)...(19): siRNA sense strand
cccuggaccuccucauuga

SEQ ID NO: 568136 - RNA, 19 nt, Homo sapiens
  misc_RNA (1)...(19): siRNA sense strand
ggagaacgugcgcaagauc

SEQ ID NO: 568137 - RNA, 19 nt, Homo sapiens
  misc_RNA (1)...(19): siRNA sense strand
ucgcagcacccgcauguug

SEQ ID NO: 568138 - RNA, 19 nt, Homo sapiens
  misc_RNA (1)...(19): siRNA sense strand
gcaccuggccaagcuguuc

SEQ ID NO: 568139 - RNA, 19 nt, Homo sapiens
  misc_RNA (1)...(19): siRNA sense strand
cgacauccaccgcaacaag

SEQ ID NO: 568140 - RNA, 19 nt, Homo sapiens
  misc_RNA (1)...(19): siRNA sense strand
aggcuggagugucauguau

SEQ ID NO: 568141 - RNA, 19 nt, Homo sapiens
  misc_RNA (1)...(19): siRNA sense strand
gcuagcaccagccgcuuug

SEQ ID NO: 568142 - RNA, 19 nt, Homo sapiens
  misc_RNA (1)...(19): siRNA sense strand
caacaagcgcaaggucuuc

SEQ ID NO: 568143 - RNA, 19 nt, Homo sapiens
  misc_RNA (1)...(19): siRNA sense strand
gaccuugggcaccucuuug

SEQ ID NO: 568144 - RNA, 19 nt, Homo sapiens
  misc_RNA (1)...(19): siRNA sense strand
gcuugaugguuuccagauc

SEQ ID NO: 568145 - RNA, 19 nt, Homo sapiens
  misc_RNA (1)...(19): siRNA sense strand
agaaggccauccgggagaa

SEQ ID NO: 568146 - RNA, 19 nt, Homo sapiens
  misc_RNA (1)...(19): siRNA sense strand
cggagaacgugcgcaagau

SEQ ID NO: 568147 - RNA, 19 nt, Homo sapiens
  misc_RNA (1)...(19): siRNA sense strand
caaaggcuggagugucaug

SEQ ID NO: 568148 - RNA, 19 nt, Homo sapiens
  misc_RNA (1)...(19): siRNA sense strand
cagcaccucacucaucaug

SEQ ID NO: 568149 - RNA, 19 nt, Homo sapiens
  misc_RNA (1)...(19): siRNA sense strand
gcugaucuuugcggccuau

SEQ ID NO: 568150 - RNA, 19 nt, Homo sapiens
  misc_RNA (1)...(19): siRNA sense strand
uaccuggacugcgucauca

SEQ ID NO: 568151 - RNA, 19 nt, Homo sapiens
  misc_RNA (1)...(19): siRNA sense strand
agaaguauggcaacguguu

SEQ ID NO: 568152 - RNA, 19 nt, Homo sapiens
  misc_RNA (1)...(19): siRNA sense strand
ugaggucuaccagcaguuu

SEQ ID NO: 568153 - RNA, 19 nt, Homo sapiens
  misc_RNA (1)...(19): siRNA sense strand
ccaagcuguuccugaaggu

SEQ ID NO: 568154 - RNA, 19 nt, Homo sapiens
  misc_RNA (1)...(19): siRNA sense strand
gaggucaugcgccuguuca

SEQ ID NO: 568155 - RNA, 19 nt, Homo sapiens
  misc_RNA (1)...(19): siRNA sense strand
gagcugagaugacuucaaa

SEQ ID NO: 568156 - RNA, 19 nt, Homo sapiens
  misc_RNA (1)...(19): siRNA sense strand
cagcguaacuucauucuuc

SEQ ID NO: 568157 - RNA, 19 nt, Homo sapiens
  misc_RNA (1)...(19): siRNA sense strand
uaacuucauucuucaggua

SEQ ID NO: 568158 - RNA, 19 nt, Homo sapiens
  misc_RNA (1)...(19): siRNA sense strand
gcagaucaggccucuauaa

SEQ ID NO: 568159 - RNA, 19 nt, Homo sapiens
  misc_RNA (1)...(19): siRNA sense strand
uagaagagcuccgucagaa

SEQ ID NO: 568160 - RNA, 19 nt, Homo sapiens
  misc_RNA (1)...(19): siRNA sense strand
gauaagaccauggcacaaa

SEQ ID NO: 568161 - RNA, 19 nt, Homo sapiens
  misc_RNA (1)...(19): siRNA sense strand
ccgacaauauacaaguuua

SEQ ID NO: 568162 - RNA, 19 nt, Homo sapiens
  misc_RNA (1)...(19): siRNA sense strand
guacagacaguguuugugu

SEQ ID NO: 568163 - RNA, 19 nt, Homo sapiens
  misc_RNA (1)...(19): siRNA sense strand
gcgcagaucaggccucuau

SEQ ID NO: 568164 - RNA, 19 nt, Homo sapiens
  misc_RNA (1)...(19): siRNA sense strand
acgauuggcuuuggaguaa

SEQ ID NO: 568165 - RNA, 19 nt, Homo sapiens
  misc_RNA (1)...(19): siRNA sense strand
gaagagcuccgucagaaaa

SEQ ID NO: 568166 - RNA, 19 nt, Homo sapiens
  misc_RNA (1)...(19): siRNA sense strand
uaccuuaacuucucuuuac

SEQ ID NO: 568167 - RNA, 19 nt, Homo sapiens
  misc_RNA (1)...(19): siRNA sense strand
ggaaaccacuuggaugacu

SEQ ID NO: 568168 - RNA, 19 nt, Homo sapiens
  misc_RNA (1)...(19): siRNA sense strand
gaagcugcauaucaaacug

SEQ ID NO: 568169 - RNA, 19 nt, Homo sapiens
  misc_RNA (1)...(19): siRNA sense strand
gcaguuggucuuucagaga

SEQ ID NO: 568170 - RNA, 19 nt, Homo sapiens
  misc_RNA (1)...(19): siRNA sense strand
agacaguguuuguguguuc

SEQ ID NO: 568171 - RNA, 19 nt, Homo sapiens
  misc_RNA (1)...(19): siRNA sense strand
guuuauaccuuaacuucuc

SEQ ID NO: 568172 - RNA, 19 nt, Homo sapiens
  misc_RNA (1)...(19): siRNA sense strand
cagaagcacagauagaaga

SEQ ID NO: 568173 - RNA, 19 nt, Homo sapiens
  misc_RNA (1)...(19): siRNA sense strand
gacgauuggcuuuggagua

SEQ ID NO: 568174 - RNA, 19 nt, Homo sapiens
  misc_RNA (1)...(19): siRNA sense strand
gcuggcagaagcacagaua

SEQ ID NO: 568175 - RNA, 19 nt, Homo sapiens
  misc_RNA (1)...(19): siRNA sense strand
ggcagaagcacagauagaa

SEQ ID NO: 568176 - RNA, 19 nt, Homo sapiens
  misc_RNA (1)...(19): siRNA sense strand
ucucuuuaccgacaauaua

SEQ ID NO: 568177 - RNA, 19 nt, Homo sapiens
  misc_RNA (1)...(19): siRNA sense strand
caccagcucucccggaaag

SEQ ID NO: 568178 - RNA, 19 nt, Homo sapiens
  misc_RNA (1)...(19): siRNA sense strand
uaccgacaauauacaaguu

SEQ ID NO: 568179 - RNA, 19 nt, Homo sapiens
  misc_RNA (1)...(19): siRNA sense strand
caguuggucuuucagagau

SEQ ID NO: 568180 - RNA, 19 nt, Homo sapiens
  misc_RNA (1)...(19): siRNA sense strand
gcagaagcacagauagaag

SEQ ID NO: 568181 - RNA, 19 nt, Homo sapiens
  misc_RNA (1)...(19): siRNA sense strand
gacugcaguuggucuuuca

SEQ ID NO: 568182 - RNA, 19 nt, Homo sapiens
  misc_RNA (1)...(19): siRNA sense strand
ucagguacagacaguguuu

SEQ ID NO: 568183 - RNA, 19 nt, Homo sapiens
  misc_RNA (1)...(19): siRNA sense strand
gaauucagaggaggaagau

SEQ ID NO: 568184 - RNA, 19 nt, Homo sapiens
  misc_RNA (1)...(19): siRNA sense strand
ugaaacugcagguggaaga

SEQ ID NO: 568185 - RNA, 19 nt, Homo sapiens
  misc_RNA (1)...(19): siRNA sense strand
ugacugcaguuggucuuuc

SEQ ID NO: 568186 - RNA, 19 nt, Homo sapiens
  misc_RNA (1)...(19): siRNA sense strand
cuggaaaccacuuggauga

SEQ ID NO: 568187 - RNA, 19 nt, Homo sapiens
  misc_RNA (1)...(19): siRNA sense strand
ugaauucagaggaggaaga

SEQ ID NO: 568188 - RNA, 19 nt, Homo sapiens
  misc_RNA (1)...(19): siRNA sense strand
cuaccugcgugaggauuga

SEQ ID NO: 568189 - RNA, 19 nt, Homo sapiens
  misc_RNA (1)...(19): siRNA sense strand
gcaccagcucucccggaaa

SEQ ID NO: 568190 - RNA, 19 nt, Homo sapiens
  misc_RNA (1)...(19): siRNA sense strand
ccagagcugagaugacuuc

SEQ ID NO: 568191 - RNA, 19 nt, Homo sapiens
  misc_RNA (1)...(19): siRNA sense strand
auucagaggaggaagauga

SEQ ID NO: 568192 - RNA, 19 nt, Homo sapiens
  misc_RNA (1)...(19): siRNA sense strand
ggagccagagcugagauga

SEQ ID NO: 568193 - RNA, 19 nt, Homo sapiens
  misc_RNA (1)...(19): siRNA sense strand
gaaaccaagcuggcagaag

SEQ ID NO: 568194 - RNA, 19 nt, Homo sapiens
  misc_RNA (1)...(19): siRNA sense strand
ccuguuguggcuaacuuua

SEQ ID NO: 568195 - RNA, 19 nt, Homo sapiens
  misc_RNA (1)...(19): siRNA sense strand
ggaaagcagaaaccaagcu

SEQ ID NO: 568196 - RNA, 19 nt, Homo sapiens
  misc_RNA (1)...(19): siRNA sense strand
guguuccuguuguggcuaa

SEQ ID NO: 568197 - RNA, 19 nt, Homo sapiens
  misc_RNA (1)...(19): siRNA sense strand
agaagagcuccgucagaaa

SEQ ID NO: 568198 - RNA, 19 nt, Homo sapiens
  misc_RNA (1)...(19): siRNA sense strand
gaaguguggcaggugauca

SEQ ID NO: 568199 - RNA, 19 nt, Homo sapiens
  misc_RNA (1)...(19): siRNA sense strand
gcgcagcguaacuucauuc

SEQ ID NO: 568200 - RNA, 19 nt, Homo sapiens
  misc_RNA (1)...(19): siRNA sense strand
uggcagaagcacagauaga

SEQ ID NO: 568201 - RNA, 19 nt, Homo sapiens
  misc_RNA (1)...(19): siRNA sense strand
guguuuguguguuccuguu

SEQ ID NO: 568202 - RNA, 19 nt, Homo sapiens
  misc_RNA (1)...(19): siRNA sense strand
caaaacaccaagaguacuu

SEQ ID NO: 568203 - RNA, 19 nt, Homo sapiens
  misc_RNA (1)...(19): siRNA sense strand
gagcugagaugacuucaaa

SEQ ID NO: 568204 - RNA, 19 nt, Homo sapiens
  misc_RNA (1)...(19): siRNA sense strand
cagcguaacuucauucuuc

SEQ ID NO: 568205 - RNA, 19 nt, Homo sapiens
  misc_RNA (1)...(19): siRNA sense strand
uaacuucauucuucaggua

SEQ ID NO: 568206 - RNA, 19 nt, Homo sapiens
  misc_RNA (1)...(19): siRNA sense strand
gcagaucaggccucuauaa

SEQ ID NO: 568207 - RNA, 19 nt, Homo sapiens
  misc_RNA (1)...(19): siRNA sense strand
uagaagagcuccgucagaa

SEQ ID NO: 568208 - RNA, 19 nt, Homo sapiens
  misc_RNA (1)...(19): siRNA sense strand
gauaagaccauggcacaaa

SEQ ID NO: 568209 - RNA, 19 nt, Homo sapiens
  misc_RNA (1)...(19): siRNA sense strand
ccgacaauauacaaguuua

SEQ ID NO: 568210 - RNA, 19 nt, Homo sapiens
  misc_RNA (1)...(19): siRNA sense strand
guacagacaguguuugugu

SEQ ID NO: 568211 - RNA, 19 nt, Homo sapiens
  misc_RNA (1)...(19): siRNA sense strand
gcgcagaucaggccucuau

SEQ ID NO: 568212 - RNA, 19 nt, Homo sapiens
  misc_RNA (1)...(19): siRNA sense strand
acgauuggcuuuggaguaa

SEQ ID NO: 568213 - RNA, 19 nt, Homo sapiens
  misc_RNA (1)...(19): siRNA sense strand
gaagagcuccgucagaaaa

SEQ ID NO: 568214 - RNA, 19 nt, Homo sapiens
  misc_RNA (1)...(19): siRNA sense strand
uaccuuaacuucucuuuac

SEQ ID NO: 568215 - RNA, 19 nt, Homo sapiens
  misc_RNA (1)...(19): siRNA sense strand
ggaaaccacuuggaugacu

SEQ ID NO: 568216 - RNA, 19 nt, Homo sapiens
  misc_RNA (1)...(19): siRNA sense strand
gaagcugcauaucaaacug

SEQ ID NO: 568217 - RNA, 19 nt, Homo sapiens
  misc_RNA (1)...(19): siRNA sense strand
gcaguuggucuuucagaga

SEQ ID NO: 568218 - RNA, 19 nt, Homo sapiens
  misc_RNA (1)...(19): siRNA sense strand
agacaguguuuguguguuc

SEQ ID NO: 568219 - RNA, 19 nt, Homo sapiens
  misc_RNA (1)...(19): siRNA sense strand
guuuauaccuuaacuucuc

SEQ ID NO: 568220 - RNA, 19 nt, Homo sapiens
  misc_RNA (1)...(19): siRNA sense strand
cagaagcacagauagaaga

SEQ ID NO: 568221 - RNA, 19 nt, Homo sapiens
  misc_RNA (1)...(19): siRNA sense strand
gacgauuggcuuuggagua

SEQ ID NO: 568222 - RNA, 19 nt, Homo sapiens
  misc_RNA (1)...(19): siRNA sense strand
gcuggcagaagcacagaua

SEQ ID NO: 568223 - RNA, 19 nt, Homo sapiens
  misc_RNA (1)...(19): siRNA sense strand
ggcagaagcacagauagaa

SEQ ID NO: 568224 - RNA, 19 nt, Homo sapiens
  misc_RNA (1)...(19): siRNA sense strand
ucucuuuaccgacaauaua

SEQ ID NO: 568225 - RNA, 19 nt, Homo sapiens
  misc_RNA (1)...(19): siRNA sense strand
caccagcucucccggaaag

SEQ ID NO: 568226 - RNA, 19 nt, Homo sapiens
  misc_RNA (1)...(19): siRNA sense strand
uaccgacaauauacaaguu

SEQ ID NO: 568227 - RNA, 19 nt, Homo sapiens
  misc_RNA (1)...(19): siRNA sense strand
caguuggucuuucagagau

SEQ ID NO: 568228 - RNA, 19 nt, Homo sapiens
  misc_RNA (1)...(19): siRNA sense strand
gcagaagcacagauagaag

SEQ ID NO: 568229 - RNA, 19 nt, Homo sapiens
  misc_RNA (1)...(19): siRNA sense strand
gacugcaguuggucuuuca

SEQ ID NO: 568230 - RNA, 19 nt, Homo sapiens
  misc_RNA (1)...(19): siRNA sense strand
ucagguacagacaguguuu

SEQ ID NO: 568231 - RNA, 19 nt, Homo sapiens
  misc_RNA (1)...(19): siRNA sense strand
gaauucagaggaggaagau

SEQ ID NO: 568232 - RNA, 19 nt, Homo sapiens
  misc_RNA (1)...(19): siRNA sense strand
ugaaacugcagguggaaga

SEQ ID NO: 568233 - RNA, 19 nt, Homo sapiens
  misc_RNA (1)...(19): siRNA sense strand
ugacugcaguuggucuuuc

SEQ ID NO: 568234 - RNA, 19 nt, Homo sapiens
  misc_RNA (1)...(19): siRNA sense strand
cuggaaaccacuuggauga

SEQ ID NO: 568235 - RNA, 19 nt, Homo sapiens
  misc_RNA (1)...(19): siRNA sense strand
ugaauucagaggaggaaga

SEQ ID NO: 568236 - RNA, 19 nt, Homo sapiens
  misc_RNA (1)...(19): siRNA sense strand
cuaccugcgugaggauuga

SEQ ID NO: 568237 - RNA, 19 nt, Homo sapiens
  misc_RNA (1)...(19): siRNA sense strand
gcaccagcucucccggaaa

SEQ ID NO: 568238 - RNA, 19 nt, Homo sapiens
  misc_RNA (1)...(19): siRNA sense strand
ccagagcugagaugacuuc

SEQ ID NO: 568239 - RNA, 19 nt, Homo sapiens
  misc_RNA (1)...(19): siRNA sense strand
auucagaggaggaagauga

SEQ ID NO: 568240 - RNA, 19 nt, Homo sapiens
  misc_RNA (1)...(19): siRNA sense strand
ggagccagagcugagauga

SEQ ID NO: 568241 - RNA, 19 nt, Homo sapiens
  misc_RNA (1)...(19): siRNA sense strand
gaaaccaagcuggcagaag

SEQ ID NO: 568242 - RNA, 19 nt, Homo sapiens
  misc_RNA (1)...(19): siRNA sense strand
ccuguuguggcuaacuuua

SEQ ID NO: 568243 - RNA, 19 nt, Homo sapiens
  misc_RNA (1)...(19): siRNA sense strand
ggaaagcagaaaccaagcu

SEQ ID NO: 568244 - RNA, 19 nt, Homo sapiens
  misc_RNA (1)...(19): siRNA sense strand
guguuccuguuguggcuaa

SEQ ID NO: 568245 - RNA, 19 nt, Homo sapiens
  misc_RNA (1)...(19): siRNA sense strand
agaagagcuccgucagaaa

SEQ ID NO: 568246 - RNA, 19 nt, Homo sapiens
  misc_RNA (1)...(19): siRNA sense strand
gaaguguggcaggugauca

SEQ ID NO: 568247 - RNA, 19 nt, Homo sapiens
  misc_RNA (1)...(19): siRNA sense strand
gcgcagcguaacuucauuc

SEQ ID NO: 568248 - RNA, 19 nt, Homo sapiens
  misc_RNA (1)...(19): siRNA sense strand
uggcagaagcacagauaga

SEQ ID NO: 568249 - RNA, 19 nt, Homo sapiens
  misc_RNA (1)...(19): siRNA sense strand
guguuuguguguuccuguu

SEQ ID NO: 568250 - RNA, 19 nt, Homo sapiens
  misc_RNA (1)...(19): siRNA sense strand
caaaacaccaagaguacuu

SEQ ID NO: 568251 - RNA, 19 nt, Homo sapiens
  misc_RNA (1)...(19): siRNA sense strand
ccaguacacccaugaauuu

SEQ ID NO: 568252 - RNA, 19 nt, Homo sapiens
  misc_RNA (1)...(19): siRNA sense strand
guacacccaugaauuugau

SEQ ID NO: 568253 - RNA, 19 nt, Homo sapiens
  misc_RNA (1)...(19): siRNA sense strand
gccaguacacccaugaauu

SEQ ID NO: 568254 - RNA, 19 nt, Homo sapiens
  misc_RNA (1)...(19): siRNA sense strand
ugaauuugauggagaugag

SEQ ID NO: 568255 - RNA, 19 nt, Homo sapiens
  misc_RNA (1)...(19): siRNA sense strand
gagugaucauuccuucuuc

SEQ ID NO: 568256 - RNA, 19 nt, Homo sapiens
  misc_RNA (1)...(19): siRNA sense strand
acacugggagccugagauu

SEQ ID NO: 568257 - RNA, 19 nt, Homo sapiens
  misc_RNA (1)...(19): siRNA sense strand
agagugaucauuccuucuu

SEQ ID NO: 568258 - RNA, 19 nt, Homo sapiens
  misc_RNA (1)...(19): siRNA sense strand
ccaagagugaucauuccuu

SEQ ID NO: 568259 - RNA, 19 nt, Homo sapiens
  misc_RNA (1)...(19): siRNA sense strand
uuccugaggucacaguguu

SEQ ID NO: 568260 - RNA, 19 nt, Homo sapiens
  misc_RNA (1)...(19): siRNA sense strand
gagugaucauuccuucuuc

SEQ ID NO: 568261 - RNA, 19 nt, Homo sapiens
  misc_RNA (1)...(19): siRNA sense strand
acacugggagccugagauu

SEQ ID NO: 568262 - RNA, 19 nt, Homo sapiens
  misc_RNA (1)...(19): siRNA sense strand
agagugaucauuccuucuu

SEQ ID NO: 568263 - RNA, 19 nt, Homo sapiens
  misc_RNA (1)...(19): siRNA sense strand
ccaagagugaucauuccuu

SEQ ID NO: 568264 - RNA, 19 nt, Homo sapiens
  misc_RNA (1)...(19): siRNA sense strand
uuccugaggucacaguguu

SEQ ID NO: 568265 - RNA, 19 nt, Homo sapiens
  misc_RNA (1)...(19): siRNA sense strand
ccaccaaccugauccguaa

SEQ ID NO: 568266 - RNA, 19 nt, Homo sapiens
  misc_RNA (1)...(19): siRNA sense strand
gcaggaaugcuacgcguuu

SEQ ID NO: 568267 - RNA, 19 nt, Homo sapiens
  misc_RNA (1)...(19): siRNA sense strand
gggccacuccagagaauua

SEQ ID NO: 568268 - RNA, 19 nt, Homo sapiens
  misc_RNA (1)...(19): siRNA sense strand
ggaaggcacagucugauuc

SEQ ID NO: 568269 - RNA, 19 nt, Homo sapiens
  misc_RNA (1)...(19): siRNA sense strand
caggaaugcuacgcguuua

SEQ ID NO: 568270 - RNA, 19 nt, Homo sapiens
  misc_RNA (1)...(19): siRNA sense strand
ucaacgaggaucugcauaa

SEQ ID NO: 568271 - RNA, 19 nt, Homo sapiens
  misc_RNA (1)...(19): siRNA sense strand
gcacaggaggagcaagaaa

SEQ ID NO: 568272 - RNA, 19 nt, Homo sapiens
  misc_RNA (1)...(19): siRNA sense strand
gcauucaaguccgaugguu

SEQ ID NO: 568273 - RNA, 19 nt, Homo sapiens
  misc_RNA (1)...(19): siRNA sense strand
gcucugacggcguuacuga

SEQ ID NO: 568274 - RNA, 19 nt, Homo sapiens
  misc_RNA (1)...(19): siRNA sense strand
gagcaagaaaguucaacga

SEQ ID NO: 568275 - RNA, 19 nt, Homo sapiens
  misc_RNA (1)...(19): siRNA sense strand
gcagggccacuccagagaa

SEQ ID NO: 568276 - RNA, 19 nt, Homo sapiens
  misc_RNA (1)...(19): siRNA sense strand
ggaaugcuacgcguuuaau

SEQ ID NO: 568277 - RNA, 19 nt, Homo sapiens
  misc_RNA (1)...(19): siRNA sense strand
gaaugcuacgcguuuaaug

SEQ ID NO: 568278 - RNA, 19 nt, Homo sapiens
  misc_RNA (1)...(19): siRNA sense strand
gaaggcacagucugauucu

SEQ ID NO: 568279 - RNA, 19 nt, Homo sapiens
  misc_RNA (1)...(19): siRNA sense strand
gaaaguucaacgaggaucu

SEQ ID NO: 568280 - RNA, 19 nt, Homo sapiens
  misc_RNA (1)...(19): siRNA sense strand
cagggccacuccagagaau

SEQ ID NO: 568281 - RNA, 19 nt, Homo sapiens
  misc_RNA (1)...(19): siRNA sense strand
gaauggacaggaggaaaca

SEQ ID NO: 568282 - RNA, 19 nt, Homo sapiens
  misc_RNA (1)...(19): siRNA sense strand
ggaggagcaagaaaguuca

SEQ ID NO: 568283 - RNA, 19 nt, Homo sapiens
  misc_RNA (1)...(19): siRNA sense strand
guccgaugguuccugaaug

SEQ ID NO: 568284 - RNA, 19 nt, Homo sapiens
  misc_RNA (1)...(19): siRNA sense strand
caaccugauccguaaugga

SEQ ID NO: 568285 - RNA, 19 nt, Homo sapiens
  misc_RNA (1)...(19): siRNA sense strand
gaggagcaagaaaguucaa

SEQ ID NO: 568286 - RNA, 19 nt, Homo sapiens
  misc_RNA (1)...(19): siRNA sense strand
uuucuggccuugucucuuc

SEQ ID NO: 568287 - RNA, 19 nt, Homo sapiens
  misc_RNA (1)...(19): siRNA sense strand
acaaaacagugccuucuag

SEQ ID NO: 568288 - RNA, 19 nt, Homo sapiens
  misc_RNA (1)...(19): siRNA sense strand
acagaaggguguucauuua

SEQ ID NO: 568289 - RNA, 19 nt, Homo sapiens
  misc_RNA (1)...(19): siRNA sense strand
gaaggguguucauuuagaa

SEQ ID NO: 568290 - RNA, 19 nt, Homo sapiens
  misc_RNA (1)...(19): siRNA sense strand
gccuuuggcuagagauuua

SEQ ID NO: 568291 - RNA, 19 nt, Homo sapiens
  misc_RNA (1)...(19): siRNA sense strand
guacaaaguccaaauucuu

SEQ ID NO: 568292 - RNA, 19 nt, Homo sapiens
  misc_RNA (1)...(19): siRNA sense strand
gacagugguucuuugugua

SEQ ID NO: 568293 - RNA, 19 nt, Homo sapiens
  misc_RNA (1)...(19): siRNA sense strand
uagaagaaagcaacacuaa

SEQ ID NO: 568294 - RNA, 19 nt, Homo sapiens
  misc_RNA (1)...(19): siRNA sense strand
agaaggguguucauuuaga

SEQ ID NO: 568295 - RNA, 19 nt, Homo sapiens
  misc_RNA (1)...(19): siRNA sense strand
aaagaaacgccuaguacaa

SEQ ID NO: 568296 - RNA, 19 nt, Homo sapiens
  misc_RNA (1)...(19): siRNA sense strand
agacagugguucuuugugu

SEQ ID NO: 568297 - RNA, 19 nt, Homo sapiens
  misc_RNA (1)...(19): siRNA sense strand
ggcuagagauuuacuacau

SEQ ID NO: 568298 - RNA, 19 nt, Homo sapiens
  misc_RNA (1)...(19): siRNA sense strand
ccagguugcuacaagauca

SEQ ID NO: 568299 - RNA, 19 nt, Homo sapiens
  misc_RNA (1)...(19): siRNA sense strand
gcucagacagugguucuuu

SEQ ID NO: 568300 - RNA, 19 nt, Homo sapiens
  misc_RNA (1)...(19): siRNA sense strand
gcuagagauuuacuacauc

SEQ ID NO: 568301 - RNA, 19 nt, Homo sapiens
  misc_RNA (1)...(19): siRNA sense strand
aagaaacgccuaguacaaa

SEQ ID NO: 568302 - RNA, 19 nt, Homo sapiens
  misc_RNA (1)...(19): siRNA sense strand
uacaagaucaccacgguuu

SEQ ID NO: 568303 - RNA, 19 nt, Homo sapiens
  misc_RNA (1)...(19): siRNA sense strand
ccaaauucuuacuuuaugg

SEQ ID NO: 568304 - RNA, 19 nt, Homo sapiens
  misc_RNA (1)...(19): siRNA sense strand
gauguaaaauguccagguu

SEQ ID NO: 568305 - RNA, 19 nt, Homo sapiens
  misc_RNA (1)...(19): siRNA sense strand
gguguucauuuagaagaaa

SEQ ID NO: 568306 - RNA, 19 nt, Homo sapiens
  misc_RNA (1)...(19): siRNA sense strand
ggguguucauuuagaagaa

SEQ ID NO: 568307 - RNA, 19 nt, Homo sapiens
  misc_RNA (1)...(19): siRNA sense strand
agaaacgccuaguacaaag

SEQ ID NO: 568308 - RNA, 19 nt, Homo sapiens
  misc_RNA (1)...(19): siRNA sense strand
gaaacgccuaguacaaagu

SEQ ID NO: 568309 - RNA, 19 nt, Homo sapiens
  misc_RNA (1)...(19): siRNA sense strand
cuaguacaaaguccaaauu

SEQ ID NO: 568310 - RNA, 19 nt, Homo sapiens
  misc_RNA (1)...(19): siRNA sense strand
cagaaggguguucauuuag

SEQ ID NO: 568311 - RNA, 19 nt, Homo sapiens
  misc_RNA (1)...(19): siRNA sense strand
uuagaagaaagcaacacua

SEQ ID NO: 568312 - RNA, 19 nt, Homo sapiens
  misc_RNA (1)...(19): siRNA sense strand
uguccagguugcuacaaga

SEQ ID NO: 568313 - RNA, 19 nt, Homo sapiens
  misc_RNA (1)...(19): siRNA sense strand
aguacaaaguccaaauucu

SEQ ID NO: 568314 - RNA, 19 nt, Homo sapiens
  misc_RNA (1)...(19): siRNA sense strand
ucagacagugguucuuugu

SEQ ID NO: 568315 - RNA, 19 nt, Homo sapiens
  misc_RNA (1)...(19): siRNA sense strand
uuucagccaugcucagaca

SEQ ID NO: 568316 - RNA, 19 nt, Homo sapiens
  misc_RNA (1)...(19): siRNA sense strand
gacacaagcuacauuaaua

SEQ ID NO: 568317 - RNA, 19 nt, Homo sapiens
  misc_RNA (1)...(19): siRNA sense strand
gaacuaaagcaaaugguua

SEQ ID NO: 568318 - RNA, 19 nt, Homo sapiens
  misc_RNA (1)...(19): siRNA sense strand
uaagaaggcuccauaugaa

SEQ ID NO: 568319 - RNA, 19 nt, Homo sapiens
  misc_RNA (1)...(19): siRNA sense strand
guuaugagccuuagaguuu

SEQ ID NO: 568320 - RNA, 19 nt, Homo sapiens
  misc_RNA (1)...(19): siRNA sense strand
ccacaucaccacuaaauaa

SEQ ID NO: 568321 - RNA, 19 nt, Homo sapiens
  misc_RNA (1)...(19): siRNA sense strand
ugacgcaacucuuuacauu

SEQ ID NO: 568322 - RNA, 19 nt, Homo sapiens
  misc_RNA (1)...(19): siRNA sense strand
cgacccagccgaccaauua

SEQ ID NO: 568323 - RNA, 19 nt, Homo sapiens
  misc_RNA (1)...(19): siRNA sense strand
ucacagauguuucuugauc

SEQ ID NO: 568324 - RNA, 19 nt, Homo sapiens
  misc_RNA (1)...(19): siRNA sense strand
guucucaucuacaauguuu

SEQ ID NO: 568325 - RNA, 19 nt, Homo sapiens
  misc_RNA (1)...(19): siRNA sense strand
gauguuucuugaucaguua

SEQ ID NO: 568326 - RNA, 19 nt, Homo sapiens
  misc_RNA (1)...(19): siRNA sense strand
gaagagccaucugccaaga

SEQ ID NO: 568327 - RNA, 19 nt, Homo sapiens
  misc_RNA (1)...(19): siRNA sense strand
cagcagcaguuucagauga

SEQ ID NO: 568328 - RNA, 19 nt, Homo sapiens
  misc_RNA (1)...(19): siRNA sense strand
gcuaaaggcuggcuguagu

SEQ ID NO: 568329 - RNA, 19 nt, Homo sapiens
  misc_RNA (1)...(19): siRNA sense strand
caucauaccagacauuauu

SEQ ID NO: 568330 - RNA, 19 nt, Homo sapiens
  misc_RNA (1)...(19): siRNA sense strand
caagaaaguagaagugauu

SEQ ID NO: 568331 - RNA, 19 nt, Homo sapiens
  misc_RNA (1)...(19): siRNA sense strand
caucaagcaucuccaguau

SEQ ID NO: 568332 - RNA, 19 nt, Homo sapiens
  misc_RNA (1)...(19): siRNA sense strand
ccuaaggguuucucuacua

SEQ ID NO: 568333 - RNA, 19 nt, Homo sapiens
  misc_RNA (1)...(19): siRNA sense strand
ccucacagauguuucuuga

SEQ ID NO: 568334 - RNA, 19 nt, Homo sapiens
  misc_RNA (1)...(19): siRNA sense strand
acccaugccuuacgacuua

SEQ ID NO: 568335 - RNA, 19 nt, Homo sapiens
  misc_RNA (1)...(19): siRNA sense strand
guaguuccauggauauuuc

SEQ ID NO: 568336 - RNA, 19 nt, Homo sapiens
  misc_RNA (1)...(19): siRNA sense strand
caccaccaguccucaaaua

SEQ ID NO: 568337 - RNA, 19 nt, Homo sapiens
  misc_RNA (1)...(19): siRNA sense strand
gcaaagggaauaaggaauc

SEQ ID NO: 568338 - RNA, 19 nt, Homo sapiens
  misc_RNA (1)...(19): siRNA sense strand
ccauaugaacaccuuauua

SEQ ID NO: 568339 - RNA, 19 nt, Homo sapiens
  misc_RNA (1)...(19): siRNA sense strand
gcaacuuugucuccaucua

SEQ ID NO: 568340 - RNA, 19 nt, Homo sapiens
  misc_RNA (1)...(19): siRNA sense strand
caggagacaaucagcauua

SEQ ID NO: 568341 - RNA, 19 nt, Homo sapiens
  misc_RNA (1)...(19): siRNA sense strand
ggaucauucuagagcuuua

SEQ ID NO: 568342 - RNA, 19 nt, Homo sapiens
  misc_RNA (1)...(19): siRNA sense strand
gagcaaagggaauaaggaa

SEQ ID NO: 568343 - RNA, 19 nt, Homo sapiens
  misc_RNA (1)...(19): siRNA sense strand
gauaagaaggcuccauaug

SEQ ID NO: 568344 - RNA, 19 nt, Homo sapiens
  misc_RNA (1)...(19): siRNA sense strand
ggaaguuucugccucuuac

SEQ ID NO: 568345 - RNA, 19 nt, Homo sapiens
  misc_RNA (1)...(19): siRNA sense strand
ggacagugcggaacuaaag

SEQ ID NO: 568346 - RNA, 19 nt, Homo sapiens
  misc_RNA (1)...(19): siRNA sense strand
gaauaaggaauccggauca

SEQ ID NO: 568347 - RNA, 19 nt, Homo sapiens
  misc_RNA (1)...(19): siRNA sense strand
gugcggaacuaaagcaaau

SEQ ID NO: 568348 - RNA, 19 nt, Homo sapiens
  misc_RNA (1)...(19): siRNA sense strand
auaagaaggcuccauauga

SEQ ID NO: 568349 - RNA, 19 nt, Homo sapiens
  misc_RNA (1)...(19): siRNA sense strand
caacaagugcagcaaauca

SEQ ID NO: 568350 - RNA, 19 nt, Homo sapiens
  misc_RNA (1)...(19): siRNA sense strand
caaaugguuaugagccuua

SEQ ID NO: 568351 - RNA, 19 nt, Homo sapiens
  misc_RNA (1)...(19): siRNA sense strand
gaacuggaacucccacauc

SEQ ID NO: 568352 - RNA, 19 nt, Homo sapiens
  misc_RNA (1)...(19): siRNA sense strand
ggaacuaaagcaaaugguu

SEQ ID NO: 568353 - RNA, 19 nt, Homo sapiens
  misc_RNA (1)...(19): siRNA sense strand
gagacaaucagcauuacaa

SEQ ID NO: 568354 - RNA, 19 nt, Homo sapiens
  misc_RNA (1)...(19): siRNA sense strand
gggcaccgaugagaucaaa

SEQ ID NO: 568355 - RNA, 19 nt, Homo sapiens
  misc_RNA (1)...(19): siRNA sense strand
gugugaaagugaauacaaa

SEQ ID NO: 568356 - RNA, 19 nt, Homo sapiens
  misc_RNA (1)...(19): siRNA sense strand
ggauauuucugggaccaaa

SEQ ID NO: 568357 - RNA, 19 nt, Homo sapiens
  misc_RNA (1)...(19): siRNA sense strand
ggauccagacagugaaaua

SEQ ID NO: 568358 - RNA, 19 nt, Homo sapiens
  misc_RNA (1)...(19): siRNA sense strand
uaaagcaaaugguuaugag

SEQ ID NO: 568359 - RNA, 19 nt, Homo sapiens
  misc_RNA (1)...(19): siRNA sense strand
agacugugaugaaauacaa

SEQ ID NO: 568360 - RNA, 19 nt, Homo sapiens
  misc_RNA (1)...(19): siRNA sense strand
gaacaccuuauuauugaug

SEQ ID NO: 568361 - RNA, 19 nt, Homo sapiens
  misc_RNA (1)...(19): siRNA sense strand
gcaacucuuuacauucaga

SEQ ID NO: 568362 - RNA, 19 nt, Homo sapiens
  misc_RNA (1)...(19): siRNA sense strand
caugacgccugcagacuug

SEQ ID NO: 568363 - RNA, 19 nt, Homo sapiens
  misc_RNA (1)...(19): siRNA sense strand
ugauugaccuaaccauaga

SEQ ID NO: 568364 - RNA, 19 nt, Homo sapiens
  misc_RNA (1)...(19): siRNA sense strand
acgcaacucuuuacauuca

SEQ ID NO: 568365 - RNA, 19 nt, Homo sapiens
  misc_RNA (1)...(19): siRNA sense strand
cuucagagguuacgagcaa

SEQ ID NO: 568366 - RNA, 19 nt, Homo sapiens
  misc_RNA (1)...(19): siRNA sense strand
aacacgaacuucucacaaa

SEQ ID NO: 568367 - RNA, 19 nt, Homo sapiens
  misc_RNA (1)...(19): siRNA sense strand
ccguauaccuccucacaga

SEQ ID NO: 568368 - RNA, 19 nt, Homo sapiens
  misc_RNA (1)...(19): siRNA sense strand
ccaccaguccucaaauaaa

SEQ ID NO: 568369 - RNA, 19 nt, Homo sapiens
  misc_RNA (1)...(19): siRNA sense strand
gugauaagaaggcuccaua

SEQ ID NO: 568370 - RNA, 19 nt, Homo sapiens
  misc_RNA (1)...(19): siRNA sense strand
gcacggacgcaaacacgaa

SEQ ID NO: 568371 - RNA, 19 nt, Homo sapiens
  misc_RNA (1)...(19): siRNA sense strand
caauuaauaucaccucacu

SEQ ID NO: 568372 - RNA, 19 nt, Homo sapiens
  misc_RNA (1)...(19): siRNA sense strand
ggauuagauuucuuuccuu

SEQ ID NO: 568373 - RNA, 19 nt, Homo sapiens
  misc_RNA (1)...(19): siRNA sense strand
gcccuuacauguucucauc

SEQ ID NO: 568374 - RNA, 19 nt, Homo sapiens
  misc_RNA (1)...(19): siRNA sense strand
caucuuacaucagcucuuc

SEQ ID NO: 568375 - RNA, 19 nt, Homo sapiens
  misc_RNA (1)...(19): siRNA sense strand
cuaaggguuucucuacuau

SEQ ID NO: 568376 - RNA, 19 nt, Homo sapiens
  misc_RNA (1)...(19): siRNA sense strand
ggcaguauaucuuguaaaa

SEQ ID NO: 568377 - RNA, 19 nt, Homo sapiens
  misc_RNA (1)...(19): siRNA sense strand
ccaccagucuagcaucaga

SEQ ID NO: 568378 - RNA, 19 nt, Homo sapiens
  misc_RNA (1)...(19): siRNA sense strand
uuuacuggaugaacugaua

SEQ ID NO: 568379 - RNA, 19 nt, Homo sapiens
  misc_RNA (1)...(19): siRNA sense strand
agacaacagucagcgcuuu

SEQ ID NO: 568380 - RNA, 19 nt, Homo sapiens
  misc_RNA (1)...(19): siRNA sense strand
ggaaguacaggaaguuucu

SEQ ID NO: 568381 - RNA, 19 nt, Homo sapiens
  misc_RNA (1)...(19): siRNA sense strand
gaaauccuaaaguacugua

SEQ ID NO: 568382 - RNA, 19 nt, Homo sapiens
  misc_RNA (1)...(19): siRNA sense strand
cugcagaaauuggaagaaa

SEQ ID NO: 568383 - RNA, 19 nt, Homo sapiens
  misc_RNA (1)...(19): siRNA sense strand
acacgauuguuguuucuug

SEQ ID NO: 568384 - RNA, 19 nt, Homo sapiens
  misc_RNA (1)...(19): siRNA sense strand
cuggaacucccacaucuua

SEQ ID NO: 568385 - RNA, 19 nt, Homo sapiens
  misc_RNA (1)...(19): siRNA sense strand
gaaguugacugcggaucca

SEQ ID NO: 568386 - RNA, 19 nt, Homo sapiens
  misc_RNA (1)...(19): siRNA sense strand
cacaguacagguccaguua

SEQ ID NO: 568387 - RNA, 19 nt, Homo sapiens
  misc_RNA (1)...(19): siRNA sense strand
cacaacaagugcagcaaau

SEQ ID NO: 568388 - RNA, 19 nt, Homo sapiens
  misc_RNA (1)...(19): siRNA sense strand
gaucaagaccuccuacacu

SEQ ID NO: 568389 - RNA, 19 nt, Homo sapiens
  misc_RNA (1)...(19): siRNA sense strand
caagugcagcaaaucagua

SEQ ID NO: 568390 - RNA, 19 nt, Homo sapiens
  misc_RNA (1)...(19): siRNA sense strand
aaacaagcacggacgcaaa

SEQ ID NO: 568391 - RNA, 19 nt, Homo sapiens
  misc_RNA (1)...(19): siRNA sense strand
ucaagcaucuccaguaucc

SEQ ID NO: 568392 - RNA, 19 nt, Homo sapiens
  misc_RNA (1)...(19): siRNA sense strand
gaccuguccuucccuaucu

SEQ ID NO: 568393 - RNA, 19 nt, Homo sapiens
  misc_RNA (1)...(19): siRNA sense strand
ucucuacuauguccacuug

SEQ ID NO: 568394 - RNA, 19 nt, Homo sapiens
  misc_RNA (1)...(19): siRNA sense strand
ccucaacaguucuucuuca

SEQ ID NO: 568395 - RNA, 19 nt, Homo sapiens
  misc_RNA (1)...(19): siRNA sense strand
acuauuccauggcaguaua

SEQ ID NO: 568396 - RNA, 19 nt, Homo sapiens
  misc_RNA (1)...(19): siRNA sense strand
guacagguccaguuaaggu

SEQ ID NO: 568397 - RNA, 19 nt, Homo sapiens
  misc_RNA (1)...(19): siRNA sense strand
cgacuuacaaggauuagau

SEQ ID NO: 568398 - RNA, 19 nt, Homo sapiens
  misc_RNA (1)...(19): siRNA sense strand
ccauagacaguucaucuga

SEQ ID NO: 568399 - RNA, 19 nt, Homo sapiens
  misc_RNA (1)...(19): siRNA sense strand
aaacaagaaaguagaagug

SEQ ID NO: 568400 - RNA, 19 nt, Homo sapiens
  misc_RNA (1)...(19): siRNA sense strand
ccacaacaagugcagcaaa

SEQ ID NO: 568401 - RNA, 19 nt, Homo sapiens
  misc_RNA (1)...(19): siRNA sense strand
ugacacccaugccuuacga

SEQ ID NO: 568402 - RNA, 19 nt, Homo sapiens
  misc_RNA (1)...(19): siRNA sense strand
gaaaguagaagugauugac

SEQ ID NO: 568403 - RNA, 19 nt, Homo sapiens
  misc_RNA (1)...(19): siRNA sense strand
gauggcuuguuuauggaaa

SEQ ID NO: 568404 - RNA, 19 nt, Homo sapiens
  misc_RNA (1)...(19): siRNA sense strand
gcagaaauuggaagaaacu

SEQ ID NO: 568405 - RNA, 19 nt, Homo sapiens
  misc_RNA (1)...(19): siRNA sense strand
ucugggaccuaaacaugaa

SEQ ID NO: 568406 - RNA, 19 nt, Homo sapiens
  misc_RNA (1)...(19): siRNA sense strand
ggcaucauaccagacauua

SEQ ID NO: 568407 - RNA, 19 nt, Homo sapiens
  misc_RNA (1)...(19): siRNA sense strand
ggaagcaguaguggcagua

SEQ ID NO: 568408 - RNA, 19 nt, Homo sapiens
  misc_RNA (1)...(19): siRNA sense strand
auugauggcuuguuuaugg

SEQ ID NO: 568409 - RNA, 19 nt, Homo sapiens
  misc_RNA (1)...(19): siRNA sense strand
uacauguucucaucuacaa

SEQ ID NO: 568410 - RNA, 19 nt, Homo sapiens
  misc_RNA (1)...(19): siRNA sense strand
ccuuacauguucucaucua

SEQ ID NO: 568411 - RNA, 19 nt, Homo sapiens
  misc_RNA (1)...(19): siRNA sense strand
agacacaagcuacauuaau

SEQ ID NO: 568412 - RNA, 19 nt, Homo sapiens
  misc_RNA (1)...(19): siRNA sense strand
caacaguaccaaacacgau

SEQ ID NO: 568413 - RNA, 19 nt, Homo sapiens
  misc_RNA (1)...(19): siRNA sense strand
ucucccacaucaccacuaa

SEQ ID NO: 568414 - RNA, 19 nt, Homo sapiens
  misc_RNA (1)...(19): siRNA sense strand
cauagacaguucaucugau

SEQ ID NO: 568415 - RNA, 19 nt, Homo sapiens
  misc_RNA (1)...(19): siRNA sense strand
acaagaaaguagaagugau

SEQ ID NO: 568416 - RNA, 19 nt, Homo sapiens
  misc_RNA (1)...(19): siRNA sense strand
gcaaacacgucaagucuga

SEQ ID NO: 568417 - RNA, 19 nt, Homo sapiens
  misc_RNA (1)...(19): siRNA sense strand
ugacagagcugauguucga

SEQ ID NO: 568418 - RNA, 19 nt, Homo sapiens
  misc_RNA (1)...(19): siRNA sense strand
caacauuccugccuucuuc

SEQ ID NO: 568419 - RNA, 19 nt, Homo sapiens
  misc_RNA (1)...(19): siRNA sense strand
acagguggcugcacaaaug

SEQ ID NO: 568420 - RNA, 19 nt, Homo sapiens
  misc_RNA (1)...(19): siRNA sense strand
gcgcuggucuuugacauug

SEQ ID NO: 568421 - RNA, 19 nt, Homo sapiens
  misc_RNA (1)...(19): siRNA sense strand
gaucacaccuacagcaaac

SEQ ID NO: 568422 - RNA, 19 nt, Homo sapiens
  misc_RNA (1)...(19): siRNA sense strand
gaacagguggcugcacaaa

SEQ ID NO: 568423 - RNA, 19 nt, Homo sapiens
  misc_RNA (1)...(19): siRNA sense strand
ccaccgagcaugcgacuga

SEQ ID NO: 568424 - RNA, 19 nt, Homo sapiens
  misc_RNA (1)...(19): siRNA sense strand
gaagaagaaggagaagcua

SEQ ID NO: 568425 - RNA, 19 nt, Homo sapiens
  misc_RNA (1)...(19): siRNA sense strand
cgagagcuuucccagaaga

SEQ ID NO: 568426 - RNA, 19 nt, Homo sapiens
  misc_RNA (1)...(19): siRNA sense strand
uccaggagauggccauuga

SEQ ID NO: 568427 - RNA, 19 nt, Homo sapiens
  misc_RNA (1)...(19): siRNA sense strand
gagaagaaagggaagaucu

SEQ ID NO: 568428 - RNA, 19 nt, Homo sapiens
  misc_RNA (1)...(19): siRNA sense strand
guacgggagugucauuguc

SEQ ID NO: 568429 - RNA, 19 nt, Homo sapiens
  misc_RNA (1)...(19): siRNA sense strand
ggaagaagaaggagaagcu

SEQ ID NO: 568430 - RNA, 19 nt, Homo sapiens
  misc_RNA (1)...(19): siRNA sense strand
cugcagggcuucacugaca

SEQ ID NO: 568431 - RNA, 19 nt, Homo sapiens
  misc_RNA (1)...(19): siRNA sense strand
caucccaccuuacaugauc

SEQ ID NO: 568432 - RNA, 19 nt, Homo sapiens
  misc_RNA (1)...(19): siRNA sense strand
ucuccaagcaggaauauga

SEQ ID NO: 568433 - RNA, 19 nt, Homo sapiens
  misc_RNA (1)...(19): siRNA sense strand
ccucaagaauggcaugauc

SEQ ID NO: 568434 - RNA, 19 nt, Homo sapiens
  misc_RNA (1)...(19): siRNA sense strand
caaacuggaagaagaagga

SEQ ID NO: 568435 - RNA, 19 nt, Homo sapiens
  misc_RNA (1)...(19): siRNA sense strand
caucaucccaccuuacaug

SEQ ID NO: 568436 - RNA, 19 nt, Homo sapiens
  misc_RNA (1)...(19): siRNA sense strand
ggaucacaccuacagcaaa

SEQ ID NO: 568437 - RNA, 19 nt, Homo sapiens
  misc_RNA (1)...(19): siRNA sense strand
ccacggccauuccaguaca

SEQ ID NO: 568438 - RNA, 19 nt, Homo sapiens
  misc_RNA (1)...(19): siRNA sense strand
aucgagagcuuucccagaa

SEQ ID NO: 568439 - RNA, 19 nt, Homo sapiens
  misc_RNA (1)...(19): siRNA sense strand
gacaucaucccaccuuaca

SEQ ID NO: 568440 - RNA, 19 nt, Homo sapiens
  misc_RNA (1)...(19): siRNA sense strand
ugacauuggcuccuucuca

SEQ ID NO: 568441 - RNA, 19 nt, Homo sapiens
  misc_RNA (1)...(19): siRNA sense strand
ggauggagcggaggucaug

SEQ ID NO: 568442 - RNA, 19 nt, Homo sapiens
  misc_RNA (1)...(19): siRNA sense strand
cagcaaacacgucaagucu

SEQ ID NO: 568443 - RNA, 19 nt, Homo sapiens
  misc_RNA (1)...(19): siRNA sense strand
gcacuuuccagcagaugug

SEQ ID NO: 568444 - RNA, 19 nt, Homo sapiens
  misc_RNA (1)...(19): siRNA sense strand
ggaucuccaagcaggaaua

SEQ ID NO: 568445 - RNA, 19 nt, Homo sapiens
  misc_RNA (1)...(19): siRNA sense strand
ccacagugcacuacgagau

SEQ ID NO: 568446 - RNA, 19 nt, Homo sapiens
  misc_RNA (1)...(19): siRNA sense strand
caccacggccauuccagua

SEQ ID NO: 568447 - RNA, 19 nt, Homo sapiens
  misc_RNA (1)...(19): siRNA sense strand
gcaugcgacugaaacucau

SEQ ID NO: 568448 - RNA, 19 nt, Homo sapiens
  misc_RNA (1)...(19): siRNA sense strand
ccaaguccuggcauaacua

SEQ ID NO: 568449 - RNA, 19 nt, Homo sapiens
  misc_RNA (1)...(19): siRNA sense strand
gcucaccgccuuugcaaac

SEQ ID NO: 568450 - RNA, 19 nt, Homo sapiens
  misc_RNA (1)...(19): siRNA sense strand
cccaauggcuacaauacag

SEQ ID NO: 568451 - RNA, 19 nt, Homo sapiens
  misc_RNA (1)...(19): siRNA sense strand
gaugcccaauggcuacaau

SEQ ID NO: 568452 - RNA, 19 nt, Homo sapiens
  misc_RNA (1)...(19): siRNA sense strand
acuacgagaugcccaaugg

SEQ ID NO: 568453 - RNA, 19 nt, Homo sapiens
  misc_RNA (1)...(19): siRNA sense strand
gcagcaaggcaucgucaag

SEQ ID NO: 568454 - RNA, 19 nt, Homo sapiens
  misc_RNA (1)...(19): siRNA sense strand
ccugagggccuguuugauc

SEQ ID NO: 568455 - RNA, 19 nt, Homo sapiens
  misc_RNA (1)...(19): siRNA sense strand
uggccucacugggcacuuu

SEQ ID NO: 568456 - RNA, 19 nt, Homo sapiens
  misc_RNA (1)...(19): siRNA sense strand
guucgagcaguacaacauu

SEQ ID NO: 568457 - RNA, 19 nt, Homo sapiens
  misc_RNA (1)...(19): siRNA sense strand
cauuccugccuucuucuua

SEQ ID NO: 568458 - RNA, 19 nt, Homo sapiens
  misc_RNA (1)...(19): siRNA sense strand
cgucaagucugagccaaac

SEQ ID NO: 568459 - RNA, 19 nt, Homo sapiens
  misc_RNA (1)...(19): siRNA sense strand
ccaauggcuacaauacaga

SEQ ID NO: 568460 - RNA, 19 nt, Homo sapiens
  misc_RNA (1)...(19): siRNA sense strand
ucaagaauggcaugaucga

SEQ ID NO: 568461 - RNA, 19 nt, Homo sapiens
  misc_RNA (1)...(19): siRNA sense strand
gaucuccaagcaggaauau

SEQ ID NO: 568462 - RNA, 19 nt, Homo sapiens
  misc_RNA (1)...(19): siRNA sense strand
cugcacaaaugcccacagu

SEQ ID NO: 568463 - RNA, 19 nt, Homo sapiens
  misc_RNA (1)...(19): siRNA sense strand
guccuggcauaacuacaug

SEQ ID NO: 568464 - RNA, 19 nt, Homo sapiens
  misc_RNA (1)...(19): siRNA sense strand
gcccaauggcuacaauaca

SEQ ID NO: 568465 - RNA, 19 nt, Homo sapiens
  misc_RNA (1)...(19): siRNA sense strand
caccauggagcgcaaguuc

SEQ ID NO: 568466 - RNA, 19 nt, Homo sapiens
  misc_RNA (1)...(19): siRNA sense strand
ugugugacauugauauucg

SEQ ID NO: 568467 - RNA, 19 nt, Homo sapiens
  misc_RNA (1)...(19): siRNA sense strand
ugagagaguccacuacuua

SEQ ID NO: 568468 - RNA, 19 nt, Homo sapiens
  misc_RNA (1)...(19): siRNA sense strand
gagcagagccguuggacuu

SEQ ID NO: 568469 - RNA, 19 nt, Homo sapiens
  misc_RNA (1)...(19): siRNA sense strand
ggacuuccuuugggacuaa

SEQ ID NO: 568470 - RNA, 19 nt, Homo sapiens
  misc_RNA (1)...(19): siRNA sense strand
gggaggagaucaccaccuu

SEQ ID NO: 568471 - RNA, 19 nt, Homo sapiens
  misc_RNA (1)...(19): siRNA sense strand
agacaaacaucuucucuac

SEQ ID NO: 568472 - RNA, 19 nt, Homo sapiens
  misc_RNA (1)...(19): siRNA sense strand
gggccgaguuugcaaaguu

SEQ ID NO: 568473 - RNA, 19 nt, Homo sapiens
  misc_RNA (1)...(19): siRNA sense strand
ggacgaggaggacgaggaa

SEQ ID NO: 568474 - RNA, 19 nt, Homo sapiens
  misc_RNA (1)...(19): siRNA sense strand
gaggagaucaccaccuuca

SEQ ID NO: 568475 - RNA, 19 nt, Homo sapiens
  misc_RNA (1)...(19): siRNA sense strand
ggagaucaccaccuucauc

SEQ ID NO: 568476 - RNA, 19 nt, Homo sapiens
  misc_RNA (1)...(19): siRNA sense strand
caucaugucugaggaggau

SEQ ID NO: 568477 - RNA, 19 nt, Homo sapiens
  misc_RNA (1)...(19): siRNA sense strand
gaucaccaccuucaucgau

SEQ ID NO: 568478 - RNA, 19 nt, Homo sapiens
  misc_RNA (1)...(19): siRNA sense strand
gcucuucccuccucuugag

SEQ ID NO: 568479 - RNA, 19 nt, Homo sapiens
  misc_RNA (1)...(19): siRNA sense strand
ggccagccuucgccaauuc

SEQ ID NO: 568480 - RNA, 19 nt, Homo sapiens
  misc_RNA (1)...(19): siRNA sense strand
gcaaugcguggccaucaug

SEQ ID NO: 568481 - RNA, 19 nt, Homo sapiens
  misc_RNA (1)...(19): siRNA sense strand
gcguggccaucaugucuga

SEQ ID NO: 568482 - RNA, 19 nt, Homo sapiens
  misc_RNA (1)...(19): siRNA sense strand
gcuccuuccugcacaagug

SEQ ID NO: 568483 - RNA, 19 nt, Homo sapiens
  misc_RNA (1)...(19): siRNA sense strand
gcagagggccgaguuugca

SEQ ID NO: 568484 - RNA, 19 nt, Homo sapiens
  misc_RNA (1)...(19): siRNA sense strand
ggccgaguuugcaaaguuc

SEQ ID NO: 568485 - RNA, 19 nt, Homo sapiens
  misc_RNA (1)...(19): siRNA sense strand
cggcgucugucccaugaug

SEQ ID NO: 568486 - RNA, 19 nt, Homo sapiens
  misc_RNA (1)...(19): siRNA sense strand
gagcaaugcguggccauca

SEQ ID NO: 568487 - RNA, 19 nt, Homo sapiens
  misc_RNA (1)...(19): siRNA sense strand
gugaagcugcugccuggaa

SEQ ID NO: 568488 - RNA, 19 nt, Homo sapiens
  misc_RNA (1)...(19): siRNA sense strand
ggacgaggaagaggcugaa

SEQ ID NO: 568489 - RNA, 19 nt, Homo sapiens
  misc_RNA (1)...(19): siRNA sense strand
gagagaguccacuacuuac

SEQ ID NO: 568490 - RNA, 19 nt, Homo sapiens
  misc_RNA (1)...(19): siRNA sense strand
gagaguccacuacuuacag

SEQ ID NO: 568491 - RNA, 19 nt, Homo sapiens
  misc_RNA (1)...(19): siRNA sense strand
cgaggaagaggcugaaggu

SEQ ID NO: 568492 - RNA, 19 nt, Homo sapiens
  misc_RNA (1)...(19): siRNA sense strand
ugagacaccucugccuucu

SEQ ID NO: 568493 - RNA, 19 nt, Homo sapiens
  misc_RNA (1)...(19): siRNA sense strand
ugaggaggauggagaugac

SEQ ID NO: 568494 - RNA, 19 nt, Homo sapiens
  misc_RNA (1)...(19): siRNA sense strand
uugagagaguccacuacuu

SEQ ID NO: 568495 - RNA, 19 nt, Homo sapiens
  misc_RNA (1)...(19): siRNA sense strand
gacaaagacacagguugga

SEQ ID NO: 568496 - RNA, 19 nt, Homo sapiens
  misc_RNA (1)...(19): siRNA sense strand
caaguggucauccucugau

SEQ ID NO: 568497 - RNA, 19 nt, Homo sapiens
  misc_RNA (1)...(19): siRNA sense strand
acaaguggucauccucuga

SEQ ID NO: 568498 - RNA, 19 nt, Homo sapiens
  misc_RNA (1)...(19): siRNA sense strand
cugaguaccugggacaaag

SEQ ID NO: 568499 - RNA, 19 nt, Homo sapiens
  misc_RNA (1)...(19): siRNA sense strand
cugcugcccuccuucaucu

SEQ ID NO: 568500 - RNA, 19 nt, Homo sapiens
  misc_RNA (1)...(19): siRNA sense strand
gagcuucuucucccucaag

SEQ ID NO: 568501 - RNA, 19 nt, Homo sapiens
  misc_RNA (1)...(19): siRNA sense strand
ugagagaguccacuacuua

SEQ ID NO: 568502 - RNA, 19 nt, Homo sapiens
  misc_RNA (1)...(19): siRNA sense strand
gagcagagccguuggacuu

SEQ ID NO: 568503 - RNA, 19 nt, Homo sapiens
  misc_RNA (1)...(19): siRNA sense strand
ggacuuccuuugggacuaa

SEQ ID NO: 568504 - RNA, 19 nt, Homo sapiens
  misc_RNA (1)...(19): siRNA sense strand
gggaggagaucaccaccuu

SEQ ID NO: 568505 - RNA, 19 nt, Homo sapiens
  misc_RNA (1)...(19): siRNA sense strand
agacaaacaucuucucuac

SEQ ID NO: 568506 - RNA, 19 nt, Homo sapiens
  misc_RNA (1)...(19): siRNA sense strand
gggccgaguuugcaaaguu

SEQ ID NO: 568507 - RNA, 19 nt, Homo sapiens
  misc_RNA (1)...(19): siRNA sense strand
ggacgaggaggacgaggaa

SEQ ID NO: 568508 - RNA, 19 nt, Homo sapiens
  misc_RNA (1)...(19): siRNA sense strand
gaggagaucaccaccuuca

SEQ ID NO: 568509 - RNA, 19 nt, Homo sapiens
  misc_RNA (1)...(19): siRNA sense strand
ggagaucaccaccuucauc

SEQ ID NO: 568510 - RNA, 19 nt, Homo sapiens
  misc_RNA (1)...(19): siRNA sense strand
caucaugucugaggaggau

SEQ ID NO: 568511 - RNA, 19 nt, Homo sapiens
  misc_RNA (1)...(19): siRNA sense strand
gaucaccaccuucaucgau

SEQ ID NO: 568512 - RNA, 19 nt, Homo sapiens
  misc_RNA (1)...(19): siRNA sense strand
gcucuucccuccucuugag

SEQ ID NO: 568513 - RNA, 19 nt, Homo sapiens
  misc_RNA (1)...(19): siRNA sense strand
ggccagccuucgccaauuc

SEQ ID NO: 568514 - RNA, 19 nt, Homo sapiens
  misc_RNA (1)...(19): siRNA sense strand
gcaaugcguggccaucaug

SEQ ID NO: 568515 - RNA, 19 nt, Homo sapiens
  misc_RNA (1)...(19): siRNA sense strand
gcguggccaucaugucuga

SEQ ID NO: 568516 - RNA, 19 nt, Homo sapiens
  misc_RNA (1)...(19): siRNA sense strand
gcuccuuccugcacaagug

SEQ ID NO: 568517 - RNA, 19 nt, Homo sapiens
  misc_RNA (1)...(19): siRNA sense strand
gcagagggccgaguuugca

SEQ ID NO: 568518 - RNA, 19 nt, Homo sapiens
  misc_RNA (1)...(19): siRNA sense strand
ggccgaguuugcaaaguuc

SEQ ID NO: 568519 - RNA, 19 nt, Homo sapiens
  misc_RNA (1)...(19): siRNA sense strand
cggcgucugucccaugaug

SEQ ID NO: 568520 - RNA, 19 nt, Homo sapiens
  misc_RNA (1)...(19): siRNA sense strand
gagcaaugcguggccauca

SEQ ID NO: 568521 - RNA, 19 nt, Homo sapiens
  misc_RNA (1)...(19): siRNA sense strand
gugaagcugcugccuggaa

SEQ ID NO: 568522 - RNA, 19 nt, Homo sapiens
  misc_RNA (1)...(19): siRNA sense strand
ggacgaggaagaggcugaa

SEQ ID NO: 568523 - RNA, 19 nt, Homo sapiens
  misc_RNA (1)...(19): siRNA sense strand
gagagaguccacuacuuac

SEQ ID NO: 568524 - RNA, 19 nt, Homo sapiens
  misc_RNA (1)...(19): siRNA sense strand
gagaguccacuacuuacag

SEQ ID NO: 568525 - RNA, 19 nt, Homo sapiens
  misc_RNA (1)...(19): siRNA sense strand
cgaggaagaggcugaaggu

SEQ ID NO: 568526 - RNA, 19 nt, Homo sapiens
  misc_RNA (1)...(19): siRNA sense strand
ugagacaccucugccuucu

SEQ ID NO: 568527 - RNA, 19 nt, Homo sapiens
  misc_RNA (1)...(19): siRNA sense strand
ugaggaggauggagaugac

SEQ ID NO: 568528 - RNA, 19 nt, Homo sapiens
  misc_RNA (1)...(19): siRNA sense strand
uugagagaguccacuacuu

SEQ ID NO: 568529 - RNA, 19 nt, Homo sapiens
  misc_RNA (1)...(19): siRNA sense strand
gacaaagacacagguugga

SEQ ID NO: 568530 - RNA, 19 nt, Homo sapiens
  misc_RNA (1)...(19): siRNA sense strand
caaguggucauccucugau

SEQ ID NO: 568531 - RNA, 19 nt, Homo sapiens
  misc_RNA (1)...(19): siRNA sense strand
acaaguggucauccucuga

SEQ ID NO: 568532 - RNA, 19 nt, Homo sapiens
  misc_RNA (1)...(19): siRNA sense strand
cugaguaccugggacaaag

SEQ ID NO: 568533 - RNA, 19 nt, Homo sapiens
  misc_RNA (1)...(19): siRNA sense strand
cugcugcccuccuucaucu

SEQ ID NO: 568534 - RNA, 19 nt, Homo sapiens
  misc_RNA (1)...(19): siRNA sense strand
gagcuucuucucccucaag

SEQ ID NO: 568535 - RNA, 19 nt, Homo sapiens
  misc_RNA (1)...(19): siRNA sense strand
ggaaaugcauggcgaagau

SEQ ID NO: 568536 - RNA, 19 nt, Homo sapiens
  misc_RNA (1)...(19): siRNA sense strand
uaugcaaacucucucauua

SEQ ID NO: 568537 - RNA, 19 nt, Homo sapiens
  misc_RNA (1)...(19): siRNA sense strand
gauaaggugugcuugauca

SEQ ID NO: 568538 - RNA, 19 nt, Homo sapiens
  misc_RNA (1)...(19): siRNA sense strand
caccuuaccuccacucuuu

SEQ ID NO: 568539 - RNA, 19 nt, Homo sapiens
  misc_RNA (1)...(19): siRNA sense strand
ggaagagugugcaaaccuu

SEQ ID NO: 568540 - RNA, 19 nt, Homo sapiens
  misc_RNA (1)...(19): siRNA sense strand
gacuuuggcuauacgauuu

SEQ ID NO: 568541 - RNA, 19 nt, Homo sapiens
  misc_RNA (1)...(19): siRNA sense strand
gaagagugcugccaaacac

SEQ ID NO: 568542 - RNA, 19 nt, Homo sapiens
  misc_RNA (1)...(19): siRNA sense strand
gcuauacgauuuacucuac

SEQ ID NO: 568543 - RNA, 19 nt, Homo sapiens
  misc_RNA (1)...(19): siRNA sense strand
ggacuuuggcuauacgauu

SEQ ID NO: 568544 - RNA, 19 nt, Homo sapiens
  misc_RNA (1)...(19): siRNA sense strand
gugcaaaccuuucgagacu

SEQ ID NO: 568545 - RNA, 19 nt, Homo sapiens
  misc_RNA (1)...(19): siRNA sense strand
uagugaagcuccagaagga

SEQ ID NO: 568546 - RNA, 19 nt, Homo sapiens
  misc_RNA (1)...(19): siRNA sense strand
gggcucagaauguaaauga

SEQ ID NO: 568547 - RNA, 19 nt, Homo sapiens
  misc_RNA (1)...(19): siRNA sense strand
gaagagugugcaaaccuuu

SEQ ID NO: 568548 - RNA, 19 nt, Homo sapiens
  misc_RNA (1)...(19): siRNA sense strand
ccucaagcaugaaaggaaa

SEQ ID NO: 568549 - RNA, 19 nt, Homo sapiens
  misc_RNA (1)...(19): siRNA sense strand
cgagacuccucaagcauga

SEQ ID NO: 568550 - RNA, 19 nt, Homo sapiens
  misc_RNA (1)...(19): siRNA sense strand
gcaacugccugguggugau

SEQ ID NO: 568551 - RNA, 19 nt, Homo sapiens
  misc_RNA (1)...(19): siRNA sense strand
guggaucuuuggacacuuu

SEQ ID NO: 568552 - RNA, 19 nt, Homo sapiens
  misc_RNA (1)...(19): siRNA sense strand
gaugauaaggugugcuuga

SEQ ID NO: 568553 - RNA, 19 nt, Homo sapiens
  misc_RNA (1)...(19): siRNA sense strand
uggaugggcucagaaugua

SEQ ID NO: 568554 - RNA, 19 nt, Homo sapiens
  misc_RNA (1)...(19): siRNA sense strand
ggaagagugcugccaaaca

SEQ ID NO: 568555 - RNA, 19 nt, Homo sapiens
  misc_RNA (1)...(19): siRNA sense strand
caggaagagugcugccaaa

SEQ ID NO: 568556 - RNA, 19 nt, Homo sapiens
  misc_RNA (1)...(19): siRNA sense strand
agagagaccugaguuugug

SEQ ID NO: 568557 - RNA, 19 nt, Homo sapiens
  misc_RNA (1)...(19): siRNA sense strand
ucacaaggccccucacaua

SEQ ID NO: 568558 - RNA, 19 nt, Homo sapiens
  misc_RNA (1)...(19): siRNA sense strand
gcucagaauguaaaugaug

SEQ ID NO: 568559 - RNA, 19 nt, Homo sapiens
  misc_RNA (1)...(19): siRNA sense strand
gcuaggcuaugcaaacucu

SEQ ID NO: 568560 - RNA, 19 nt, Homo sapiens
  misc_RNA (1)...(19): siRNA sense strand
gaugggcucagaauguaaa

SEQ ID NO: 568561 - RNA, 19 nt, Homo sapiens
  misc_RNA (1)...(19): siRNA sense strand
ccagagagaccugaguuug

SEQ ID NO: 568562 - RNA, 19 nt, Homo sapiens
  misc_RNA (1)...(19): siRNA sense strand
aaacaucuccaucuuuaag

SEQ ID NO: 568563 - RNA, 19 nt, Homo sapiens
  misc_RNA (1)...(19): siRNA sense strand
gaaggagguggaagagugu

SEQ ID NO: 568564 - RNA, 19 nt, Homo sapiens
  misc_RNA (1)...(19): siRNA sense strand
ucauguacuaccagauuua

SEQ ID NO: 568565 - RNA, 19 nt, Homo sapiens
  misc_RNA (1)...(19): siRNA sense strand
ugaucagcauugacaggua

SEQ ID NO: 568566 - RNA, 19 nt, Homo sapiens
  misc_RNA (1)...(19): siRNA sense strand
cucagaauguaaaugauga

SEQ ID NO: 568567 - RNA, 19 nt, Homo sapiens
  misc_RNA (1)...(19): siRNA sense strand
cagagagaccugaguuugu

SEQ ID NO: 568568 - RNA, 19 nt, Homo sapiens
  misc_RNA (1)...(19): siRNA sense strand
acaaaaugcugacuacugu

SEQ ID NO: 568569 - RNA, 19 nt, Homo sapiens
  misc_RNA (1)...(19): siRNA sense strand
gcauagugaagcuccagaa

SEQ ID NO: 568570 - RNA, 19 nt, Homo sapiens
  misc_RNA (1)...(19): siRNA sense strand
guggagaggacauuucugu

SEQ ID NO: 568571 - RNA, 19 nt, Homo sapiens
  misc_RNA (1)...(19): siRNA sense strand
gccaguaccggaauaucaa

SEQ ID NO: 568572 - RNA, 19 nt, Homo sapiens
  misc_RNA (1)...(19): siRNA sense strand
gaaaugcauggcgaagaug

SEQ ID NO: 568573 - RNA, 19 nt, Homo sapiens
  misc_RNA (1)...(19): siRNA sense strand
ggaugggcucagaauguaa

SEQ ID NO: 568574 - RNA, 19 nt, Homo sapiens
  misc_RNA (1)...(19): siRNA sense strand
gcaccuccgcucuuuccuu

SEQ ID NO: 568575 - RNA, 19 nt, Homo sapiens
  misc_RNA (1)...(19): siRNA sense strand
cuaccgcaguggcauuuua

SEQ ID NO: 568576 - RNA, 19 nt, Homo sapiens
  misc_RNA (1)...(19): siRNA sense strand
ugcaaacucucucauuaac

SEQ ID NO: 568577 - RNA, 19 nt, Homo sapiens
  misc_RNA (1)...(19): siRNA sense strand
ucaucacgcugcugacgau

SEQ ID NO: 568578 - RNA, 19 nt, Homo sapiens
  misc_RNA (1)...(19): siRNA sense strand
ggccagagagaccugaguu

SEQ ID NO: 568579 - RNA, 19 nt, Homo sapiens
  misc_RNA (1)...(19): siRNA sense strand
cggcagagucgagaaaguu

SEQ ID NO: 568580 - RNA, 19 nt, Homo sapiens
  misc_RNA (1)...(19): siRNA sense strand
augcaaacucucucauuaa

SEQ ID NO: 568581 - RNA, 19 nt, Homo sapiens
  misc_RNA (1)...(19): siRNA sense strand
gggaaaugcauggcgaaga

SEQ ID NO: 568582 - RNA, 19 nt, Homo sapiens
  misc_RNA (1)...(19): siRNA sense strand
gccagagagaccugaguuu

SEQ ID NO: 568583 - RNA, 19 nt, Homo sapiens
  misc_RNA (1)...(19): siRNA sense strand
ugcacggccucgaucauga

SEQ ID NO: 568584 - RNA, 19 nt, Homo sapiens
  misc_RNA (1)...(19): siRNA sense strand
uuucauguacuaccagauu

SEQ ID NO: 568585 - RNA, 19 nt, Homo sapiens
  misc_RNA (1)...(19): siRNA sense strand
ugaauggcauagugaagcu

SEQ ID NO: 568586 - RNA, 19 nt, Homo sapiens
  misc_RNA (1)...(19): siRNA sense strand
uuucgagacuccucaagca

SEQ ID NO: 568587 - RNA, 19 nt, Homo sapiens
  misc_RNA (1)...(19): siRNA sense strand
gcccugaauggcauaguga

SEQ ID NO: 568588 - RNA, 19 nt, Homo sapiens
  misc_RNA (1)...(19): siRNA sense strand
cagcgucaccgaccucauc

SEQ ID NO: 568589 - RNA, 19 nt, Homo sapiens
  misc_RNA (1)...(19): siRNA sense strand
cagugccaguaccggaaua

SEQ ID NO: 568590 - RNA, 19 nt, Homo sapiens
  misc_RNA (1)...(19): siRNA sense strand
gaccugaggaccaccuauc

SEQ ID NO: 568591 - RNA, 19 nt, Homo sapiens
  misc_RNA (1)...(19): siRNA sense strand
gcauggcgaagaugauucu

SEQ ID NO: 568592 - RNA, 19 nt, Homo sapiens
  misc_RNA (1)...(19): siRNA sense strand
cuacggcagagucgagaaa

SEQ ID NO: 568593 - RNA, 19 nt, Homo sapiens
  misc_RNA (1)...(19): siRNA sense strand
ggcagagucgagaaaguug

SEQ ID NO: 568594 - RNA, 19 nt, Homo sapiens
  misc_RNA (1)...(19): siRNA sense strand
uucauguacuaccagauuu

SEQ ID NO: 568595 - RNA, 19 nt, Homo sapiens
  misc_RNA (1)...(19): siRNA sense strand
gcagagucgagaaaguugu

SEQ ID NO: 568596 - RNA, 19 nt, Homo sapiens
  misc_RNA (1)...(19): siRNA sense strand
cuaugcaaacucucucauu

SEQ ID NO: 568597 - RNA, 19 nt, Homo sapiens
  misc_RNA (1)...(19): siRNA sense strand
uauauaugccuucuucaac

SEQ ID NO: 568598 - RNA, 19 nt, Homo sapiens
  misc_RNA (1)...(19): siRNA sense strand
ggaaaugcauggcgaagau

SEQ ID NO: 568599 - RNA, 19 nt, Homo sapiens
  misc_RNA (1)...(19): siRNA sense strand
uaugcaaacucucucauua

SEQ ID NO: 568600 - RNA, 19 nt, Homo sapiens
  misc_RNA (1)...(19): siRNA sense strand
gauaaggugugcuugauca

SEQ ID NO: 568601 - RNA, 19 nt, Homo sapiens
  misc_RNA (1)...(19): siRNA sense strand
caccuuaccuccacucuuu

SEQ ID NO: 568602 - RNA, 19 nt, Homo sapiens
  misc_RNA (1)...(19): siRNA sense strand
ggaagagugugcaaaccuu

SEQ ID NO: 568603 - RNA, 19 nt, Homo sapiens
  misc_RNA (1)...(19): siRNA sense strand
gacuuuggcuauacgauuu

SEQ ID NO: 568604 - RNA, 19 nt, Homo sapiens
  misc_RNA (1)...(19): siRNA sense strand
gaagagugcugccaaacac

SEQ ID NO: 568605 - RNA, 19 nt, Homo sapiens
  misc_RNA (1)...(19): siRNA sense strand
gcuauacgauuuacucuac

SEQ ID NO: 568606 - RNA, 19 nt, Homo sapiens
  misc_RNA (1)...(19): siRNA sense strand
ggacuuuggcuauacgauu

SEQ ID NO: 568607 - RNA, 19 nt, Homo sapiens
  misc_RNA (1)...(19): siRNA sense strand
gugcaaaccuuucgagacu

SEQ ID NO: 568608 - RNA, 19 nt, Homo sapiens
  misc_RNA (1)...(19): siRNA sense strand
uagugaagcuccagaagga

SEQ ID NO: 568609 - RNA, 19 nt, Homo sapiens
  misc_RNA (1)...(19): siRNA sense strand
gggcucagaauguaaauga

SEQ ID NO: 568610 - RNA, 19 nt, Homo sapiens
  misc_RNA (1)...(19): siRNA sense strand
gaagagugugcaaaccuuu

SEQ ID NO: 568611 - RNA, 19 nt, Homo sapiens
  misc_RNA (1)...(19): siRNA sense strand
ccucaagcaugaaaggaaa

SEQ ID NO: 568612 - RNA, 19 nt, Homo sapiens
  misc_RNA (1)...(19): siRNA sense strand
cgagacuccucaagcauga

SEQ ID NO: 568613 - RNA, 19 nt, Homo sapiens
  misc_RNA (1)...(19): siRNA sense strand
gcaacugccugguggugau

SEQ ID NO: 568614 - RNA, 19 nt, Homo sapiens
  misc_RNA (1)...(19): siRNA sense strand
guggaucuuuggacacuuu

SEQ ID NO: 568615 - RNA, 19 nt, Homo sapiens
  misc_RNA (1)...(19): siRNA sense strand
gaugauaaggugugcuuga

SEQ ID NO: 568616 - RNA, 19 nt, Homo sapiens
  misc_RNA (1)...(19): siRNA sense strand
uggaugggcucagaaugua

SEQ ID NO: 568617 - RNA, 19 nt, Homo sapiens
  misc_RNA (1)...(19): siRNA sense strand
ggaagagugcugccaaaca

SEQ ID NO: 568618 - RNA, 19 nt, Homo sapiens
  misc_RNA (1)...(19): siRNA sense strand
caggaagagugcugccaaa

SEQ ID NO: 568619 - RNA, 19 nt, Homo sapiens
  misc_RNA (1)...(19): siRNA sense strand
agagagaccugaguuugug

SEQ ID NO: 568620 - RNA, 19 nt, Homo sapiens
  misc_RNA (1)...(19): siRNA sense strand
ucacaaggccccucacaua

SEQ ID NO: 568621 - RNA, 19 nt, Homo sapiens
  misc_RNA (1)...(19): siRNA sense strand
gcucagaauguaaaugaug

SEQ ID NO: 568622 - RNA, 19 nt, Homo sapiens
  misc_RNA (1)...(19): siRNA sense strand
gcuaggcuaugcaaacucu

SEQ ID NO: 568623 - RNA, 19 nt, Homo sapiens
  misc_RNA (1)...(19): siRNA sense strand
gaugggcucagaauguaaa

SEQ ID NO: 568624 - RNA, 19 nt, Homo sapiens
  misc_RNA (1)...(19): siRNA sense strand
ccagagagaccugaguuug

SEQ ID NO: 568625 - RNA, 19 nt, Homo sapiens
  misc_RNA (1)...(19): siRNA sense strand
aaacaucuccaucuuuaag

SEQ ID NO: 568626 - RNA, 19 nt, Homo sapiens
  misc_RNA (1)...(19): siRNA sense strand
gaaggagguggaagagugu

SEQ ID NO: 568627 - RNA, 19 nt, Homo sapiens
  misc_RNA (1)...(19): siRNA sense strand
ucauguacuaccagauuua

SEQ ID NO: 568628 - RNA, 19 nt, Homo sapiens
  misc_RNA (1)...(19): siRNA sense strand
ugaucagcauugacaggua

SEQ ID NO: 568629 - RNA, 19 nt, Homo sapiens
  misc_RNA (1)...(19): siRNA sense strand
cucagaauguaaaugauga

SEQ ID NO: 568630 - RNA, 19 nt, Homo sapiens
  misc_RNA (1)...(19): siRNA sense strand
cagagagaccugaguuugu

SEQ ID NO: 568631 - RNA, 19 nt, Homo sapiens
  misc_RNA (1)...(19): siRNA sense strand
acaaaaugcugacuacugu

SEQ ID NO: 568632 - RNA, 19 nt, Homo sapiens
  misc_RNA (1)...(19): siRNA sense strand
gcauagugaagcuccagaa

SEQ ID NO: 568633 - RNA, 19 nt, Homo sapiens
  misc_RNA (1)...(19): siRNA sense strand
guggagaggacauuucugu

SEQ ID NO: 568634 - RNA, 19 nt, Homo sapiens
  misc_RNA (1)...(19): siRNA sense strand
gccaguaccggaauaucaa

SEQ ID NO: 568635 - RNA, 19 nt, Homo sapiens
  misc_RNA (1)...(19): siRNA sense strand
gaaaugcauggcgaagaug

SEQ ID NO: 568636 - RNA, 19 nt, Homo sapiens
  misc_RNA (1)...(19): siRNA sense strand
ggaugggcucagaauguaa

SEQ ID NO: 568637 - RNA, 19 nt, Homo sapiens
  misc_RNA (1)...(19): siRNA sense strand
gcaccuccgcucuuuccuu

SEQ ID NO: 568638 - RNA, 19 nt, Homo sapiens
  misc_RNA (1)...(19): siRNA sense strand
cuaccgcaguggcauuuua

SEQ ID NO: 568639 - RNA, 19 nt, Homo sapiens
  misc_RNA (1)...(19): siRNA sense strand
ugcaaacucucucauuaac

SEQ ID NO: 568640 - RNA, 19 nt, Homo sapiens
  misc_RNA (1)...(19): siRNA sense strand
ucaucacgcugcugacgau

SEQ ID NO: 568641 - RNA, 19 nt, Homo sapiens
  misc_RNA (1)...(19): siRNA sense strand
ggccagagagaccugaguu

SEQ ID NO: 568642 - RNA, 19 nt, Homo sapiens
  misc_RNA (1)...(19): siRNA sense strand
cggcagagucgagaaaguu

SEQ ID NO: 568643 - RNA, 19 nt, Homo sapiens
  misc_RNA (1)...(19): siRNA sense strand
augcaaacucucucauuaa

SEQ ID NO: 568644 - RNA, 19 nt, Homo sapiens
  misc_RNA (1)...(19): siRNA sense strand
gggaaaugcauggcgaaga

SEQ ID NO: 568645 - RNA, 19 nt, Homo sapiens
  misc_RNA (1)...(19): siRNA sense strand
gccagagagaccugaguuu

SEQ ID NO: 568646 - RNA, 19 nt, Homo sapiens
  misc_RNA (1)...(19): siRNA sense strand
ugcacggccucgaucauga

SEQ ID NO: 568647 - RNA, 19 nt, Homo sapiens
  misc_RNA (1)...(19): siRNA sense strand
uuucauguacuaccagauu

SEQ ID NO: 568648 - RNA, 19 nt, Homo sapiens
  misc_RNA (1)...(19): siRNA sense strand
ugaauggcauagugaagcu

SEQ ID NO: 568649 - RNA, 19 nt, Homo sapiens
  misc_RNA (1)...(19): siRNA sense strand
uuucgagacuccucaagca

SEQ ID NO: 568650 - RNA, 19 nt, Homo sapiens
  misc_RNA (1)...(19): siRNA sense strand
gcccugaauggcauaguga

SEQ ID NO: 568651 - RNA, 19 nt, Homo sapiens
  misc_RNA (1)...(19): siRNA sense strand
cagcgucaccgaccucauc

SEQ ID NO: 568652 - RNA, 19 nt, Homo sapiens
  misc_RNA (1)...(19): siRNA sense strand
cagugccaguaccggaaua

SEQ ID NO: 568653 - RNA, 19 nt, Homo sapiens
  misc_RNA (1)...(19): siRNA sense strand
gaccugaggaccaccuauc

SEQ ID NO: 568654 - RNA, 19 nt, Homo sapiens
  misc_RNA (1)...(19): siRNA sense strand
gcauggcgaagaugauucu

SEQ ID NO: 568655 - RNA, 19 nt, Homo sapiens
  misc_RNA (1)...(19): siRNA sense strand
cuacggcagagucgagaaa

SEQ ID NO: 568656 - RNA, 19 nt, Homo sapiens
  misc_RNA (1)...(19): siRNA sense strand
ggcagagucgagaaaguug

SEQ ID NO: 568657 - RNA, 19 nt, Homo sapiens
  misc_RNA (1)...(19): siRNA sense strand
uucauguacuaccagauuu

SEQ ID NO: 568658 - RNA, 19 nt, Homo sapiens
  misc_RNA (1)...(19): siRNA sense strand
gcagagucgagaaaguugu

SEQ ID NO: 568659 - RNA, 19 nt, Homo sapiens
  misc_RNA (1)...(19): siRNA sense strand
cuaugcaaacucucucauu

SEQ ID NO: 568660 - RNA, 19 nt, Homo sapiens
  misc_RNA (1)...(19): siRNA sense strand
uauauaugccuucuucaac

SEQ ID NO: 568661 - RNA, 19 nt, Homo sapiens
  misc_RNA (1)...(19): siRNA sense strand
ggaaaugcauggcgaagau

SEQ ID NO: 568662 - RNA, 19 nt, Homo sapiens
  misc_RNA (1)...(19): siRNA sense strand
uaugcaaacucucucauua

SEQ ID NO: 568663 - RNA, 19 nt, Homo sapiens
  misc_RNA (1)...(19): siRNA sense strand
gauaaggugugcuugauca

SEQ ID NO: 568664 - RNA, 19 nt, Homo sapiens
  misc_RNA (1)...(19): siRNA sense strand
caccuuaccuccacucuuu

SEQ ID NO: 568665 - RNA, 19 nt, Homo sapiens
  misc_RNA (1)...(19): siRNA sense strand
ggaagagugugcaaaccuu

SEQ ID NO: 568666 - RNA, 19 nt, Homo sapiens
  misc_RNA (1)...(19): siRNA sense strand
gacuuuggcuauacgauuu

SEQ ID NO: 568667 - RNA, 19 nt, Homo sapiens
  misc_RNA (1)...(19): siRNA sense strand
gaagagugcugccaaacac

SEQ ID NO: 568668 - RNA, 19 nt, Homo sapiens
  misc_RNA (1)...(19): siRNA sense strand
gcuauacgauuuacucuac

SEQ ID NO: 568669 - RNA, 19 nt, Homo sapiens
  misc_RNA (1)...(19): siRNA sense strand
ggacuuuggcuauacgauu

SEQ ID NO: 568670 - RNA, 19 nt, Homo sapiens
  misc_RNA (1)...(19): siRNA sense strand
gugcaaaccuuucgagacu

SEQ ID NO: 568671 - RNA, 19 nt, Homo sapiens
  misc_RNA (1)...(19): siRNA sense strand
uagugaagcuccagaagga

SEQ ID NO: 568672 - RNA, 19 nt, Homo sapiens
  misc_RNA (1)...(19): siRNA sense strand
gggcucagaauguaaauga

SEQ ID NO: 568673 - RNA, 19 nt, Homo sapiens
  misc_RNA (1)...(19): siRNA sense strand
gaagagugugcaaaccuuu

SEQ ID NO: 568674 - RNA, 19 nt, Homo sapiens
  misc_RNA (1)...(19): siRNA sense strand
ccucaagcaugaaaggaaa

SEQ ID NO: 568675 - RNA, 19 nt, Homo sapiens
  misc_RNA (1)...(19): siRNA sense strand
cgagacuccucaagcauga

SEQ ID NO: 568676 - RNA, 19 nt, Homo sapiens
  misc_RNA (1)...(19): siRNA sense strand
gcaacugccugguggugau

SEQ ID NO: 568677 - RNA, 19 nt, Homo sapiens
  misc_RNA (1)...(19): siRNA sense strand
guggaucuuuggacacuuu

SEQ ID NO: 568678 - RNA, 19 nt, Homo sapiens
  misc_RNA (1)...(19): siRNA sense strand
gaugauaaggugugcuuga

SEQ ID NO: 568679 - RNA, 19 nt, Homo sapiens
  misc_RNA (1)...(19): siRNA sense strand
uggaugggcucagaaugua

SEQ ID NO: 568680 - RNA, 19 nt, Homo sapiens
  misc_RNA (1)...(19): siRNA sense strand
ggaagagugcugccaaaca

SEQ ID NO: 568681 - RNA, 19 nt, Homo sapiens
  misc_RNA (1)...(19): siRNA sense strand
caggaagagugcugccaaa

SEQ ID NO: 568682 - RNA, 19 nt, Homo sapiens
  misc_RNA (1)...(19): siRNA sense strand
agagagaccugaguuugug

SEQ ID NO: 568683 - RNA, 19 nt, Homo sapiens
  misc_RNA (1)...(19): siRNA sense strand
ucacaaggccccucacaua

SEQ ID NO: 568684 - RNA, 19 nt, Homo sapiens
  misc_RNA (1)...(19): siRNA sense strand
gcucagaauguaaaugaug

SEQ ID NO: 568685 - RNA, 19 nt, Homo sapiens
  misc_RNA (1)...(19): siRNA sense strand
gcuaggcuaugcaaacucu

SEQ ID NO: 568686 - RNA, 19 nt, Homo sapiens
  misc_RNA (1)...(19): siRNA sense strand
gaugggcucagaauguaaa

SEQ ID NO: 568687 - RNA, 19 nt, Homo sapiens
  misc_RNA (1)...(19): siRNA sense strand
ccagagagaccugaguuug

SEQ ID NO: 568688 - RNA, 19 nt, Homo sapiens
  misc_RNA (1)...(19): siRNA sense strand
aaacaucuccaucuuuaag

SEQ ID NO: 568689 - RNA, 19 nt, Homo sapiens
  misc_RNA (1)...(19): siRNA sense strand
gaaggagguggaagagugu

SEQ ID NO: 568690 - RNA, 19 nt, Homo sapiens
  misc_RNA (1)...(19): siRNA sense strand
ucauguacuaccagauuua

SEQ ID NO: 568691 - RNA, 19 nt, Homo sapiens
  misc_RNA (1)...(19): siRNA sense strand
ugaucagcauugacaggua

SEQ ID NO: 568692 - RNA, 19 nt, Homo sapiens
  misc_RNA (1)...(19): siRNA sense strand
cucagaauguaaaugauga

SEQ ID NO: 568693 - RNA, 19 nt, Homo sapiens
  misc_RNA (1)...(19): siRNA sense strand
cagagagaccugaguuugu

SEQ ID NO: 568694 - RNA, 19 nt, Homo sapiens
  misc_RNA (1)...(19): siRNA sense strand
gcauagugaagcuccagaa

SEQ ID NO: 568695 - RNA, 19 nt, Homo sapiens
  misc_RNA (1)...(19): siRNA sense strand
guggagaggacauuucugu

SEQ ID NO: 568696 - RNA, 19 nt, Homo sapiens
  misc_RNA (1)...(19): siRNA sense strand
gccaguaccggaauaucaa

SEQ ID NO: 568697 - RNA, 19 nt, Homo sapiens
  misc_RNA (1)...(19): siRNA sense strand
gaaaugcauggcgaagaug

SEQ ID NO: 568698 - RNA, 19 nt, Homo sapiens
  misc_RNA (1)...(19): siRNA sense strand
ggaugggcucagaauguaa

SEQ ID NO: 568699 - RNA, 19 nt, Homo sapiens
  misc_RNA (1)...(19): siRNA sense strand
gcaccuccgcucuuuccuu

SEQ ID NO: 568700 - RNA, 19 nt, Homo sapiens
  misc_RNA (1)...(19): siRNA sense strand
cuaccgcaguggcauuuua

SEQ ID NO: 568701 - RNA, 19 nt, Homo sapiens
  misc_RNA (1)...(19): siRNA sense strand
ugcaaacucucucauuaac

SEQ ID NO: 568702 - RNA, 19 nt, Homo sapiens
  misc_RNA (1)...(19): siRNA sense strand
ucaucacgcugcugacgau

SEQ ID NO: 568703 - RNA, 19 nt, Homo sapiens
  misc_RNA (1)...(19): siRNA sense strand
ggccagagagaccugaguu

SEQ ID NO: 568704 - RNA, 19 nt, Homo sapiens
  misc_RNA (1)...(19): siRNA sense strand
cggcagagucgagaaaguu

SEQ ID NO: 568705 - RNA, 19 nt, Homo sapiens
  misc_RNA (1)...(19): siRNA sense strand
augcaaacucucucauuaa

SEQ ID NO: 568706 - RNA, 19 nt, Homo sapiens
  misc_RNA (1)...(19): siRNA sense strand
gggaaaugcauggcgaaga

SEQ ID NO: 568707 - RNA, 19 nt, Homo sapiens
  misc_RNA (1)...(19): siRNA sense strand
gccagagagaccugaguuu

SEQ ID NO: 568708 - RNA, 19 nt, Homo sapiens
  misc_RNA (1)...(19): siRNA sense strand
ugcacggccucgaucauga

SEQ ID NO: 568709 - RNA, 19 nt, Homo sapiens
  misc_RNA (1)...(19): siRNA sense strand
uuucauguacuaccagauu

SEQ ID NO: 568710 - RNA, 19 nt, Homo sapiens
  misc_RNA (1)...(19): siRNA sense strand
ugaauggcauagugaagcu

SEQ ID NO: 568711 - RNA, 19 nt, Homo sapiens
  misc_RNA (1)...(19): siRNA sense strand
uuucgagacuccucaagca

SEQ ID NO: 568712 - RNA, 19 nt, Homo sapiens
  misc_RNA (1)...(19): siRNA sense strand
cagcgucaccgaccucauc

SEQ ID NO: 568713 - RNA, 19 nt, Homo sapiens
  misc_RNA (1)...(19): siRNA sense strand
cagugccaguaccggaaua

SEQ ID NO: 568714 - RNA, 19 nt, Homo sapiens
  misc_RNA (1)...(19): siRNA sense strand
gaccugaggaccaccuauc

SEQ ID NO: 568715 - RNA, 19 nt, Homo sapiens
  misc_RNA (1)...(19): siRNA sense strand
gcccugaauggcauaguga

SEQ ID NO: 568716 - RNA, 19 nt, Homo sapiens
  misc_RNA (1)...(19): siRNA sense strand
gcauggcgaagaugauucu

SEQ ID NO: 568717 - RNA, 19 nt, Homo sapiens
  misc_RNA (1)...(19): siRNA sense strand
cuacggcagagucgagaaa

SEQ ID NO: 568718 - RNA, 19 nt, Homo sapiens
  misc_RNA (1)...(19): siRNA sense strand
ggcagagucgagaaaguug

SEQ ID NO: 568719 - RNA, 19 nt, Homo sapiens
  misc_RNA (1)...(19): siRNA sense strand
uucauguacuaccagauuu

SEQ ID NO: 568720 - RNA, 19 nt, Homo sapiens
  misc_RNA (1)...(19): siRNA sense strand
gcagagucgagaaaguugu

SEQ ID NO: 568721 - RNA, 19 nt, Homo sapiens
  misc_RNA (1)...(19): siRNA sense strand
cuaugcaaacucucucauu

SEQ ID NO: 568722 - RNA, 19 nt, Homo sapiens
  misc_RNA (1)...(19): siRNA sense strand
uauauaugccuucuucaac

SEQ ID NO: 568723 - RNA, 19 nt, Homo sapiens
  misc_RNA (1)...(19): siRNA sense strand
ggaaaugcauggcgaagau

SEQ ID NO: 568724 - RNA, 19 nt, Homo sapiens
  misc_RNA (1)...(19): siRNA sense strand
uaugcaaacucucucauua

SEQ ID NO: 568725 - RNA, 19 nt, Homo sapiens
  misc_RNA (1)...(19): siRNA sense strand
gauaaggugugcuugauca

SEQ ID NO: 568726 - RNA, 19 nt, Homo sapiens
  misc_RNA (1)...(19): siRNA sense strand
caccuuaccuccacucuuu

SEQ ID NO: 568727 - RNA, 19 nt, Homo sapiens
  misc_RNA (1)...(19): siRNA sense strand
ggaagagugugcaaaccuu

SEQ ID NO: 568728 - RNA, 19 nt, Homo sapiens
  misc_RNA (1)...(19): siRNA sense strand
gacuuuggcuauacgauuu

SEQ ID NO: 568729 - RNA, 19 nt, Homo sapiens
  misc_RNA (1)...(19): siRNA sense strand
gaagagugcugccaaacac

SEQ ID NO: 568730 - RNA, 19 nt, Homo sapiens
  misc_RNA (1)...(19): siRNA sense strand
gcuauacgauuuacucuac

SEQ ID NO: 568731 - RNA, 19 nt, Homo sapiens
  misc_RNA (1)...(19): siRNA sense strand
ggacuuuggcuauacgauu

SEQ ID NO: 568732 - RNA, 19 nt, Homo sapiens
  misc_RNA (1)...(19): siRNA sense strand
gugcaaaccuuucgagacu

SEQ ID NO: 568733 - RNA, 19 nt, Homo sapiens
  misc_RNA (1)...(19): siRNA sense strand
uagugaagcuccagaagga

SEQ ID NO: 568734 - RNA, 19 nt, Homo sapiens
  misc_RNA (1)...(19): siRNA sense strand
gggcucagaauguaaauga

SEQ ID NO: 568735 - RNA, 19 nt, Homo sapiens
  misc_RNA (1)...(19): siRNA sense strand
gaagagugugcaaaccuuu

SEQ ID NO: 568736 - RNA, 19 nt, Homo sapiens
  misc_RNA (1)...(19): siRNA sense strand
ccucaagcaugaaaggaaa

SEQ ID NO: 568737 - RNA, 19 nt, Homo sapiens
  misc_RNA (1)...(19): siRNA sense strand
cgagacuccucaagcauga

SEQ ID NO: 568738 - RNA, 19 nt, Homo sapiens
  misc_RNA (1)...(19): siRNA sense strand
gcaacugccugguggugau

SEQ ID NO: 568739 - RNA, 19 nt, Homo sapiens
  misc_RNA (1)...(19): siRNA sense strand
guggaucuuuggacacuuu

SEQ ID NO: 568740 - RNA, 19 nt, Homo sapiens
  misc_RNA (1)...(19): siRNA sense strand
gaugauaaggugugcuuga

SEQ ID NO: 568741 - RNA, 19 nt, Homo sapiens
  misc_RNA (1)...(19): siRNA sense strand
uggaugggcucagaaugua

SEQ ID NO: 568742 - RNA, 19 nt, Homo sapiens
  misc_RNA (1)...(19): siRNA sense strand
ggaagagugcugccaaaca

SEQ ID NO: 568743 - RNA, 19 nt, Homo sapiens
  misc_RNA (1)...(19): siRNA sense strand
caggaagagugcugccaaa

SEQ ID NO: 568744 - RNA, 19 nt, Homo sapiens
  misc_RNA (1)...(19): siRNA sense strand
agagagaccugaguuugug

SEQ ID NO: 568745 - RNA, 19 nt, Homo sapiens
  misc_RNA (1)...(19): siRNA sense strand
ucacaaggccccucacaua

SEQ ID NO: 568746 - RNA, 19 nt, Homo sapiens
  misc_RNA (1)...(19): siRNA sense strand
gcucagaauguaaaugaug

SEQ ID NO: 568747 - RNA, 19 nt, Homo sapiens
  misc_RNA (1)...(19): siRNA sense strand
gcuaggcuaugcaaacucu

SEQ ID NO: 568748 - RNA, 19 nt, Homo sapiens
  misc_RNA (1)...(19): siRNA sense strand
gaugggcucagaauguaaa

SEQ ID NO: 568749 - RNA, 19 nt, Homo sapiens
  misc_RNA (1)...(19): siRNA sense strand
ccagagagaccugaguuug

SEQ ID NO: 568750 - RNA, 19 nt, Homo sapiens
  misc_RNA (1)...(19): siRNA sense strand
aaacaucuccaucuuuaag

SEQ ID NO: 568751 - RNA, 19 nt, Homo sapiens
  misc_RNA (1)...(19): siRNA sense strand
gaaggagguggaagagugu

SEQ ID NO: 568752 - RNA, 19 nt, Homo sapiens
  misc_RNA (1)...(19): siRNA sense strand
ucauguacuaccagauuua

SEQ ID NO: 568753 - RNA, 19 nt, Homo sapiens
  misc_RNA (1)...(19): siRNA sense strand
ugaucagcauugacaggua

SEQ ID NO: 568754 - RNA, 19 nt, Homo sapiens
  misc_RNA (1)...(19): siRNA sense strand
cucagaauguaaaugauga

SEQ ID NO: 568755 - RNA, 19 nt, Homo sapiens
  misc_RNA (1)...(19): siRNA sense strand
cagagagaccugaguuugu

SEQ ID NO: 568756 - RNA, 19 nt, Homo sapiens
  misc_RNA (1)...(19): siRNA sense strand
acaaaaugcugacuacugu

SEQ ID NO: 568757 - RNA, 19 nt, Homo sapiens
  misc_RNA (1)...(19): siRNA sense strand
gcauagugaagcuccagaa

SEQ ID NO: 568758 - RNA, 19 nt, Homo sapiens
  misc_RNA (1)...(19): siRNA sense strand
guggagaggacauuucugu

SEQ ID NO: 568759 - RNA, 19 nt, Homo sapiens
  misc_RNA (1)...(19): siRNA sense strand
gccaguaccggaauaucaa

SEQ ID NO: 568760 - RNA, 19 nt, Homo sapiens
  misc_RNA (1)...(19): siRNA sense strand
gaaaugcauggcgaagaug

SEQ ID NO: 568761 - RNA, 19 nt, Homo sapiens
  misc_RNA (1)...(19): siRNA sense strand
ggaugggcucagaauguaa

SEQ ID NO: 568762 - RNA, 19 nt, Homo sapiens
  misc_RNA (1)...(19): siRNA sense strand
gcaccuccgcucuuuccuu

SEQ ID NO: 568763 - RNA, 19 nt, Homo sapiens
  misc_RNA (1)...(19): siRNA sense strand
cuaccgcaguggcauuuua

SEQ ID NO: 568764 - RNA, 19 nt, Homo sapiens
  misc_RNA (1)...(19): siRNA sense strand
ugcaaacucucucauuaac

SEQ ID NO: 568765 - RNA, 19 nt, Homo sapiens
  misc_RNA (1)...(19): siRNA sense strand
ucaucacgcugcugacgau

SEQ ID NO: 568766 - RNA, 19 nt, Homo sapiens
  misc_RNA (1)...(19): siRNA sense strand
ggccagagagaccugaguu

SEQ ID NO: 568767 - RNA, 19 nt, Homo sapiens
  misc_RNA (1)...(19): siRNA sense strand
cggcagagucgagaaaguu

SEQ ID NO: 568768 - RNA, 19 nt, Homo sapiens
  misc_RNA (1)...(19): siRNA sense strand
augcaaacucucucauuaa

SEQ ID NO: 568769 - RNA, 19 nt, Homo sapiens
  misc_RNA (1)...(19): siRNA sense strand
gggaaaugcauggcgaaga

SEQ ID NO: 568770 - RNA, 19 nt, Homo sapiens
  misc_RNA (1)...(19): siRNA sense strand
gccagagagaccugaguuu

SEQ ID NO: 568771 - RNA, 19 nt, Homo sapiens
  misc_RNA (1)...(19): siRNA sense strand
ugcacggccucgaucauga

SEQ ID NO: 568772 - RNA, 19 nt, Homo sapiens
  misc_RNA (1)...(19): siRNA sense strand
uuucauguacuaccagauu

SEQ ID NO: 568773 - RNA, 19 nt, Homo sapiens
  misc_RNA (1)...(19): siRNA sense strand
ugaauggcauagugaagcu

SEQ ID NO: 568774 - RNA, 19 nt, Homo sapiens
  misc_RNA (1)...(19): siRNA sense strand
uuucgagacuccucaagca

SEQ ID NO: 568775 - RNA, 19 nt, Homo sapiens
  misc_RNA (1)...(19): siRNA sense strand
gcccugaauggcauaguga

SEQ ID NO: 568776 - RNA, 19 nt, Homo sapiens
  misc_RNA (1)...(19): siRNA sense strand
cagcgucaccgaccucauc

SEQ ID NO: 568777 - RNA, 19 nt, Homo sapiens
  misc_RNA (1)...(19): siRNA sense strand
cagugccaguaccggaaua

SEQ ID NO: 568778 - RNA, 19 nt, Homo sapiens
  misc_RNA (1)...(19): siRNA sense strand
gaccugaggaccaccuauc

SEQ ID NO: 568779 - RNA, 19 nt, Homo sapiens
  misc_RNA (1)...(19): siRNA sense strand
gcauggcgaagaugauucu

SEQ ID NO: 568780 - RNA, 19 nt, Homo sapiens
  misc_RNA (1)...(19): siRNA sense strand
cuacggcagagucgagaaa

SEQ ID NO: 568781 - RNA, 19 nt, Homo sapiens
  misc_RNA (1)...(19): siRNA sense strand
ggcagagucgagaaaguug

SEQ ID NO: 568782 - RNA, 19 nt, Homo sapiens
  misc_RNA (1)...(19): siRNA sense strand
uucauguacuaccagauuu

SEQ ID NO: 568783 - RNA, 19 nt, Homo sapiens
  misc_RNA (1)...(19): siRNA sense strand
gcagagucgagaaaguugu

SEQ ID NO: 568784 - RNA, 19 nt, Homo sapiens
  misc_RNA (1)...(19): siRNA sense strand
cuaugcaaacucucucauu

SEQ ID NO: 568785 - RNA, 19 nt, Homo sapiens
  misc_RNA (1)...(19): siRNA sense strand
uauauaugccuucuucaac

SEQ ID NO: 568786 - RNA, 19 nt, Homo sapiens
  misc_RNA (1)...(19): siRNA sense strand
ggaaaugcauggcgaagau

SEQ ID NO: 568787 - RNA, 19 nt, Homo sapiens
  misc_RNA (1)...(19): siRNA sense strand
uaugcaaacucucucauua

SEQ ID NO: 568788 - RNA, 19 nt, Homo sapiens
  misc_RNA (1)...(19): siRNA sense strand
gauaaggugugcuugauca

SEQ ID NO: 568789 - RNA, 19 nt, Homo sapiens
  misc_RNA (1)...(19): siRNA sense strand
caccuuaccuccacucuuu

SEQ ID NO: 568790 - RNA, 19 nt, Homo sapiens
  misc_RNA (1)...(19): siRNA sense strand
ggaagagugugcaaaccuu

SEQ ID NO: 568791 - RNA, 19 nt, Homo sapiens
  misc_RNA (1)...(19): siRNA sense strand
gacuuuggcuauacgauuu

SEQ ID NO: 568792 - RNA, 19 nt, Homo sapiens
  misc_RNA (1)...(19): siRNA sense strand
gaagagugcugccaaacac

SEQ ID NO: 568793 - RNA, 19 nt, Homo sapiens
  misc_RNA (1)...(19): siRNA sense strand
gcuauacgauuuacucuac

SEQ ID NO: 568794 - RNA, 19 nt, Homo sapiens
  misc_RNA (1)...(19): siRNA sense strand
ggacuuuggcuauacgauu

SEQ ID NO: 568795 - RNA, 19 nt, Homo sapiens
  misc_RNA (1)...(19): siRNA sense strand
gugcaaaccuuucgagacu

SEQ ID NO: 568796 - RNA, 19 nt, Homo sapiens
  misc_RNA (1)...(19): siRNA sense strand
uagugaagcuccagaagga

SEQ ID NO: 568797 - RNA, 19 nt, Homo sapiens
  misc_RNA (1)...(19): siRNA sense strand
gggcucagaauguaaauga

SEQ ID NO: 568798 - RNA, 19 nt, Homo sapiens
  misc_RNA (1)...(19): siRNA sense strand
gaagagugugcaaaccuuu

SEQ ID NO: 568799 - RNA, 19 nt, Homo sapiens
  misc_RNA (1)...(19): siRNA sense strand
ccucaagcaugaaaggaaa

SEQ ID NO: 568800 - RNA, 19 nt, Homo sapiens
  misc_RNA (1)...(19): siRNA sense strand
cgagacuccucaagcauga

SEQ ID NO: 568801 - RNA, 19 nt, Homo sapiens
  misc_RNA (1)...(19): siRNA sense strand
gcaacugccugguggugau

SEQ ID NO: 568802 - RNA, 19 nt, Homo sapiens
  misc_RNA (1)...(19): siRNA sense strand
guggaucuuuggacacuuu

SEQ ID NO: 568803 - RNA, 19 nt, Homo sapiens
  misc_RNA (1)...(19): siRNA sense strand
gaugauaaggugugcuuga

SEQ ID NO: 568804 - RNA, 19 nt, Homo sapiens
  misc_RNA (1)...(19): siRNA sense strand
uggaugggcucagaaugua

SEQ ID NO: 568805 - RNA, 19 nt, Homo sapiens
  misc_RNA (1)...(19): siRNA sense strand
ggaagagugcugccaaaca

SEQ ID NO: 568806 - RNA, 19 nt, Homo sapiens
  misc_RNA (1)...(19): siRNA sense strand
caggaagagugcugccaaa

SEQ ID NO: 568807 - RNA, 19 nt, Homo sapiens
  misc_RNA (1)...(19): siRNA sense strand
agagagaccugaguuugug

SEQ ID NO: 568808 - RNA, 19 nt, Homo sapiens
  misc_RNA (1)...(19): siRNA sense strand
ucacaaggccccucacaua

SEQ ID NO: 568809 - RNA, 19 nt, Homo sapiens
  misc_RNA (1)...(19): siRNA sense strand
gcucagaauguaaaugaug

SEQ ID NO: 568810 - RNA, 19 nt, Homo sapiens
  misc_RNA (1)...(19): siRNA sense strand
gcuaggcuaugcaaacucu

SEQ ID NO: 568811 - RNA, 19 nt, Homo sapiens
  misc_RNA (1)...(19): siRNA sense strand
gaugggcucagaauguaaa

SEQ ID NO: 568812 - RNA, 19 nt, Homo sapiens
  misc_RNA (1)...(19): siRNA sense strand
ccagagagaccugaguuug

SEQ ID NO: 568813 - RNA, 19 nt, Homo sapiens
  misc_RNA (1)...(19): siRNA sense strand
aaacaucuccaucuuuaag

SEQ ID NO: 568814 - RNA, 19 nt, Homo sapiens
  misc_RNA (1)...(19): siRNA sense strand
gaaggagguggaagagugu

SEQ ID NO: 568815 - RNA, 19 nt, Homo sapiens
  misc_RNA (1)...(19): siRNA sense strand
ucauguacuaccagauuua

SEQ ID NO: 568816 - RNA, 19 nt, Homo sapiens
  misc_RNA (1)...(19): siRNA sense strand
ugaucagcauugacaggua

SEQ ID NO: 568817 - RNA, 19 nt, Homo sapiens
  misc_RNA (1)...(19): siRNA sense strand
cucagaauguaaaugauga

SEQ ID NO: 568818 - RNA, 19 nt, Homo sapiens
  misc_RNA (1)...(19): siRNA sense strand
cagagagaccugaguuugu

SEQ ID NO: 568819 - RNA, 19 nt, Homo sapiens
  misc_RNA (1)...(19): siRNA sense strand
acaaaaugcugacuacugu

SEQ ID NO: 568820 - RNA, 19 nt, Homo sapiens
  misc_RNA (1)...(19): siRNA sense strand
gcauagugaagcuccagaa

SEQ ID NO: 568821 - RNA, 19 nt, Homo sapiens
  misc_RNA (1)...(19): siRNA sense strand
guggagaggacauuucugu

SEQ ID NO: 568822 - RNA, 19 nt, Homo sapiens
  misc_RNA (1)...(19): siRNA sense strand
gccaguaccggaauaucaa

SEQ ID NO: 568823 - RNA, 19 nt, Homo sapiens
  misc_RNA (1)...(19): siRNA sense strand
gaaaugcauggcgaagaug

SEQ ID NO: 568824 - RNA, 19 nt, Homo sapiens
  misc_RNA (1)...(19): siRNA sense strand
ggaugggcucagaauguaa

SEQ ID NO: 568825 - RNA, 19 nt, Homo sapiens
  misc_RNA (1)...(19): siRNA sense strand
gcaccuccgcucuuuccuu

SEQ ID NO: 568826 - RNA, 19 nt, Homo sapiens
  misc_RNA (1)...(19): siRNA sense strand
cuaccgcaguggcauuuua

SEQ ID NO: 568827 - RNA, 19 nt, Homo sapiens
  misc_RNA (1)...(19): siRNA sense strand
ugcaaacucucucauuaac

SEQ ID NO: 568828 - RNA, 19 nt, Homo sapiens
  misc_RNA (1)...(19): siRNA sense strand
ucaucacgcugcugacgau

SEQ ID NO: 568829 - RNA, 19 nt, Homo sapiens
  misc_RNA (1)...(19): siRNA sense strand
ggccagagagaccugaguu

SEQ ID NO: 568830 - RNA, 19 nt, Homo sapiens
  misc_RNA (1)...(19): siRNA sense strand
cggcagagucgagaaaguu

SEQ ID NO: 568831 - RNA, 19 nt, Homo sapiens
  misc_RNA (1)...(19): siRNA sense strand
augcaaacucucucauuaa

SEQ ID NO: 568832 - RNA, 19 nt, Homo sapiens
  misc_RNA (1)...(19): siRNA sense strand
gggaaaugcauggcgaaga

SEQ ID NO: 568833 - RNA, 19 nt, Homo sapiens
  misc_RNA (1)...(19): siRNA sense strand
gccagagagaccugaguuu

SEQ ID NO: 568834 - RNA, 19 nt, Homo sapiens
  misc_RNA (1)...(19): siRNA sense strand
ugcacggccucgaucauga

SEQ ID NO: 568835 - RNA, 19 nt, Homo sapiens
  misc_RNA (1)...(19): siRNA sense strand
uuucauguacuaccagauu

SEQ ID NO: 568836 - RNA, 19 nt, Homo sapiens
  misc_RNA (1)...(19): siRNA sense strand
ugaauggcauagugaagcu

SEQ ID NO: 568837 - RNA, 19 nt, Homo sapiens
  misc_RNA (1)...(19): siRNA sense strand
uuucgagacuccucaagca

SEQ ID NO: 568838 - RNA, 19 nt, Homo sapiens
  misc_RNA (1)...(19): siRNA sense strand
gcccugaauggcauaguga

SEQ ID NO: 568839 - RNA, 19 nt, Homo sapiens
  misc_RNA (1)...(19): siRNA sense strand
cagcgucaccgaccucauc

SEQ ID NO: 568840 - RNA, 19 nt, Homo sapiens
  misc_RNA (1)...(19): siRNA sense strand
cagugccaguaccggaaua

SEQ ID NO: 568841 - RNA, 19 nt, Homo sapiens
  misc_RNA (1)...(19): siRNA sense strand
gaccugaggaccaccuauc

SEQ ID NO: 568842 - RNA, 19 nt, Homo sapiens
  misc_RNA (1)...(19): siRNA sense strand
gcauggcgaagaugauucu

SEQ ID NO: 568843 - RNA, 19 nt, Homo sapiens
  misc_RNA (1)...(19): siRNA sense strand
cuacggcagagucgagaaa

SEQ ID NO: 568844 - RNA, 19 nt, Homo sapiens
  misc_RNA (1)...(19): siRNA sense strand
ggcagagucgagaaaguug

SEQ ID NO: 568845 - RNA, 19 nt, Homo sapiens
  misc_RNA (1)...(19): siRNA sense strand
uucauguacuaccagauuu

SEQ ID NO: 568846 - RNA, 19 nt, Homo sapiens
  misc_RNA (1)...(19): siRNA sense strand
gcagagucgagaaaguugu

SEQ ID NO: 568847 - RNA, 19 nt, Homo sapiens
  misc_RNA (1)...(19): siRNA sense strand
cuaugcaaacucucucauu

SEQ ID NO: 568848 - RNA, 19 nt, Homo sapiens
  misc_RNA (1)...(19): siRNA sense strand
uauauaugccuucuucaac

SEQ ID NO: 568849 - RNA, 19 nt, Homo sapiens
  misc_RNA (1)...(19): siRNA sense strand
ggaaaugcauggcgaagau

SEQ ID NO: 568850 - RNA, 19 nt, Homo sapiens
  misc_RNA (1)...(19): siRNA sense strand
uaugcaaacucucucauua

SEQ ID NO: 568851 - RNA, 19 nt, Homo sapiens
  misc_RNA (1)...(19): siRNA sense strand
gauaaggugugcuugauca

SEQ ID NO: 568852 - RNA, 19 nt, Homo sapiens
  misc_RNA (1)...(19): siRNA sense strand
caccuuaccuccacucuuu

SEQ ID NO: 568853 - RNA, 19 nt, Homo sapiens
  misc_RNA (1)...(19): siRNA sense strand
ggaagagugugcaaaccuu

SEQ ID NO: 568854 - RNA, 19 nt, Homo sapiens
  misc_RNA (1)...(19): siRNA sense strand
gacuuuggcuauacgauuu

SEQ ID NO: 568855 - RNA, 19 nt, Homo sapiens
  misc_RNA (1)...(19): siRNA sense strand
gaagagugcugccaaacac

SEQ ID NO: 568856 - RNA, 19 nt, Homo sapiens
  misc_RNA (1)...(19): siRNA sense strand
gcuauacgauuuacucuac

SEQ ID NO: 568857 - RNA, 19 nt, Homo sapiens
  misc_RNA (1)...(19): siRNA sense strand
ggacuuuggcuauacgauu

SEQ ID NO: 568858 - RNA, 19 nt, Homo sapiens
  misc_RNA (1)...(19): siRNA sense strand
gugcaaaccuuucgagacu

SEQ ID NO: 568859 - RNA, 19 nt, Homo sapiens
  misc_RNA (1)...(19): siRNA sense strand
uagugaagcuccagaagga

SEQ ID NO: 568860 - RNA, 19 nt, Homo sapiens
  misc_RNA (1)...(19): siRNA sense strand
gggcucagaauguaaauga

SEQ ID NO: 568861 - RNA, 19 nt, Homo sapiens
  misc_RNA (1)...(19): siRNA sense strand
gaagagugugcaaaccuuu

SEQ ID NO: 568862 - RNA, 19 nt, Homo sapiens
  misc_RNA (1)...(19): siRNA sense strand
ccucaagcaugaaaggaaa

SEQ ID NO: 568863 - RNA, 19 nt, Homo sapiens
  misc_RNA (1)...(19): siRNA sense strand
cgagacuccucaagcauga

SEQ ID NO: 568864 - RNA, 19 nt, Homo sapiens
  misc_RNA (1)...(19): siRNA sense strand
gcaacugccugguggugau

SEQ ID NO: 568865 - RNA, 19 nt, Homo sapiens
  misc_RNA (1)...(19): siRNA sense strand
guggaucuuuggacacuuu

SEQ ID NO: 568866 - RNA, 19 nt, Homo sapiens
  misc_RNA (1)...(19): siRNA sense strand
gaugauaaggugugcuuga

SEQ ID NO: 568867 - RNA, 19 nt, Homo sapiens
  misc_RNA (1)...(19): siRNA sense strand
uggaugggcucagaaugua

SEQ ID NO: 568868 - RNA, 19 nt, Homo sapiens
  misc_RNA (1)...(19): siRNA sense strand
ggaagagugcugccaaaca

SEQ ID NO: 568869 - RNA, 19 nt, Homo sapiens
  misc_RNA (1)...(19): siRNA sense strand
caggaagagugcugccaaa

SEQ ID NO: 568870 - RNA, 19 nt, Homo sapiens
  misc_RNA (1)...(19): siRNA sense strand
agagagaccugaguuugug

SEQ ID NO: 568871 - RNA, 19 nt, Homo sapiens
  misc_RNA (1)...(19): siRNA sense strand
ucacaaggccccucacaua

SEQ ID NO: 568872 - RNA, 19 nt, Homo sapiens
  misc_RNA (1)...(19): siRNA sense strand
gcucagaauguaaaugaug

SEQ ID NO: 568873 - RNA, 19 nt, Homo sapiens
  misc_RNA (1)...(19): siRNA sense strand
gcuaggcuaugcaaacucu

SEQ ID NO: 568874 - RNA, 19 nt, Homo sapiens
  misc_RNA (1)...(19): siRNA sense strand
gaugggcucagaauguaaa

SEQ ID NO: 568875 - RNA, 19 nt, Homo sapiens
  misc_RNA (1)...(19): siRNA sense strand
ccagagagaccugaguuug

SEQ ID NO: 568876 - RNA, 19 nt, Homo sapiens
  misc_RNA (1)...(19): siRNA sense strand
aaacaucuccaucuuuaag

SEQ ID NO: 568877 - RNA, 19 nt, Homo sapiens
  misc_RNA (1)...(19): siRNA sense strand
gaaggagguggaagagugu

SEQ ID NO: 568878 - RNA, 19 nt, Homo sapiens
  misc_RNA (1)...(19): siRNA sense strand
ucauguacuaccagauuua

SEQ ID NO: 568879 - RNA, 19 nt, Homo sapiens
  misc_RNA (1)...(19): siRNA sense strand
ugaucagcauugacaggua

SEQ ID NO: 568880 - RNA, 19 nt, Homo sapiens
  misc_RNA (1)...(19): siRNA sense strand
cucagaauguaaaugauga

SEQ ID NO: 568881 - RNA, 19 nt, Homo sapiens
  misc_RNA (1)...(19): siRNA sense strand
cagagagaccugaguuugu

SEQ ID NO: 568882 - RNA, 19 nt, Homo sapiens
  misc_RNA (1)...(19): siRNA sense strand
gcauagugaagcuccagaa

SEQ ID NO: 568883 - RNA, 19 nt, Homo sapiens
  misc_RNA (1)...(19): siRNA sense strand
guggagaggacauuucugu

SEQ ID NO: 568884 - RNA, 19 nt, Homo sapiens
  misc_RNA (1)...(19): siRNA sense strand
gccaguaccggaauaucaa

SEQ ID NO: 568885 - RNA, 19 nt, Homo sapiens
  misc_RNA (1)...(19): siRNA sense strand
gaaaugcauggcgaagaug

SEQ ID NO: 568886 - RNA, 19 nt, Homo sapiens
  misc_RNA (1)...(19): siRNA sense strand
ggaugggcucagaauguaa

SEQ ID NO: 568887 - RNA, 19 nt, Homo sapiens
  misc_RNA (1)...(19): siRNA sense strand
gcaccuccgcucuuuccuu

SEQ ID NO: 568888 - RNA, 19 nt, Homo sapiens
  misc_RNA (1)...(19): siRNA sense strand
cuaccgcaguggcauuuua

SEQ ID NO: 568889 - RNA, 19 nt, Homo sapiens
  misc_RNA (1)...(19): siRNA sense strand
ugcaaacucucucauuaac

SEQ ID NO: 568890 - RNA, 19 nt, Homo sapiens
  misc_RNA (1)...(19): siRNA sense strand
ucaucacgcugcugacgau

SEQ ID NO: 568891 - RNA, 19 nt, Homo sapiens
  misc_RNA (1)...(19): siRNA sense strand
ggccagagagaccugaguu

SEQ ID NO: 568892 - RNA, 19 nt, Homo sapiens
  misc_RNA (1)...(19): siRNA sense strand
cggcagagucgagaaaguu

SEQ ID NO: 568893 - RNA, 19 nt, Homo sapiens
  misc_RNA (1)...(19): siRNA sense strand
augcaaacucucucauuaa

SEQ ID NO: 568894 - RNA, 19 nt, Homo sapiens
  misc_RNA (1)...(19): siRNA sense strand
gggaaaugcauggcgaaga

SEQ ID NO: 568895 - RNA, 19 nt, Homo sapiens
  misc_RNA (1)...(19): siRNA sense strand
gccagagagaccugaguuu

SEQ ID NO: 568896 - RNA, 19 nt, Homo sapiens
  misc_RNA (1)...(19): siRNA sense strand
ugcacggccucgaucauga

SEQ ID NO: 568897 - RNA, 19 nt, Homo sapiens
  misc_RNA (1)...(19): siRNA sense strand
uuucauguacuaccagauu

SEQ ID NO: 568898 - RNA, 19 nt, Homo sapiens
  misc_RNA (1)...(19): siRNA sense strand
ugaauggcauagugaagcu

SEQ ID NO: 568899 - RNA, 19 nt, Homo sapiens
  misc_RNA (1)...(19): siRNA sense strand
uuucgagacuccucaagca

SEQ ID NO: 568900 - RNA, 19 nt, Homo sapiens
  misc_RNA (1)...(19): siRNA sense strand
cagcgucaccgaccucauc

SEQ ID NO: 568901 - RNA, 19 nt, Homo sapiens
  misc_RNA (1)...(19): siRNA sense strand
cagugccaguaccggaaua

SEQ ID NO: 568902 - RNA, 19 nt, Homo sapiens
  misc_RNA (1)...(19): siRNA sense strand
gaccugaggaccaccuauc

SEQ ID NO: 568903 - RNA, 19 nt, Homo sapiens
  misc_RNA (1)...(19): siRNA sense strand
gcccugaauggcauaguga

SEQ ID NO: 568904 - RNA, 19 nt, Homo sapiens
  misc_RNA (1)...(19): siRNA sense strand
gcauggcgaagaugauucu

SEQ ID NO: 568905 - RNA, 19 nt, Homo sapiens
  misc_RNA (1)...(19): siRNA sense strand
cuacggcagagucgagaaa

SEQ ID NO: 568906 - RNA, 19 nt, Homo sapiens
  misc_RNA (1)...(19): siRNA sense strand
ggcagagucgagaaaguug

SEQ ID NO: 568907 - RNA, 19 nt, Homo sapiens
  misc_RNA (1)...(19): siRNA sense strand
uucauguacuaccagauuu

SEQ ID NO: 568908 - RNA, 19 nt, Homo sapiens
  misc_RNA (1)...(19): siRNA sense strand
gcagagucgagaaaguugu

SEQ ID NO: 568909 - RNA, 19 nt, Homo sapiens
  misc_RNA (1)...(19): siRNA sense strand
cuaugcaaacucucucauu

SEQ ID NO: 568910 - RNA, 19 nt, Homo sapiens
  misc_RNA (1)...(19): siRNA sense strand
uauauaugccuucuucaac

SEQ ID NO: 568911 - RNA, 19 nt, Homo sapiens
  misc_RNA (1)...(19): siRNA sense strand
gaugacaccucucaacaaa

SEQ ID NO: 568912 - RNA, 19 nt, Homo sapiens
  misc_RNA (1)...(19): siRNA sense strand
uaaaguugcucaucaaguu

SEQ ID NO: 568913 - RNA, 19 nt, Homo sapiens
  misc_RNA (1)...(19): siRNA sense strand
ggaagcaacugcagagaca

SEQ ID NO: 568914 - RNA, 19 nt, Homo sapiens
  misc_RNA (1)...(19): siRNA sense strand
ccaaggagcuggacacagu

SEQ ID NO: 568915 - RNA, 19 nt, Homo sapiens
  misc_RNA (1)...(19): siRNA sense strand
caacgagucugccgaagga

SEQ ID NO: 568916 - RNA, 19 nt, Homo sapiens
  misc_RNA (1)...(19): siRNA sense strand
gaucaagaccgcugucauu

SEQ ID NO: 568917 - RNA, 19 nt, Homo sapiens
  misc_RNA (1)...(19): siRNA sense strand
caaagcaaauggagaaugg

SEQ ID NO: 568918 - RNA, 19 nt, Homo sapiens
  misc_RNA (1)...(19): siRNA sense strand
gggcagaccucuucuacuc

SEQ ID NO: 568919 - RNA, 19 nt, Homo sapiens
  misc_RNA (1)...(19): siRNA sense strand
ccacguacauuaacaugau

SEQ ID NO: 568920 - RNA, 19 nt, Homo sapiens
  misc_RNA (1)...(19): siRNA sense strand
gaccgaggcuacauucaga

SEQ ID NO: 568921 - RNA, 19 nt, Homo sapiens
  misc_RNA (1)...(19): siRNA sense strand
uggagaggcucaaggagua

SEQ ID NO: 568922 - RNA, 19 nt, Homo sapiens
  misc_RNA (1)...(19): siRNA sense strand
gcagaccucuucuacucuu

SEQ ID NO: 568923 - RNA, 19 nt, Homo sapiens
  misc_RNA (1)...(19): siRNA sense strand
gaaggaagcaaagcaaaug

SEQ ID NO: 568924 - RNA, 19 nt, Homo sapiens
  misc_RNA (1)...(19): siRNA sense strand
ggccgcagaucuuaaaguu

SEQ ID NO: 568925 - RNA, 19 nt, Homo sapiens
  misc_RNA (1)...(19): siRNA sense strand
gaccuccgcuucaagauca

SEQ ID NO: 568926 - RNA, 19 nt, Homo sapiens
  misc_RNA (1)...(19): siRNA sense strand
aaggagaaauccaggagua

SEQ ID NO: 568927 - RNA, 19 nt, Homo sapiens
  misc_RNA (1)...(19): siRNA sense strand
caucugaaauggaaaccaa

SEQ ID NO: 568928 - RNA, 19 nt, Homo sapiens
  misc_RNA (1)...(19): siRNA sense strand
gcaacugcaucguucuguu

SEQ ID NO: 568929 - RNA, 19 nt, Homo sapiens
  misc_RNA (1)...(19): siRNA sense strand
ggaaagaagucggggcaua

SEQ ID NO: 568930 - RNA, 19 nt, Homo sapiens
  misc_RNA (1)...(19): siRNA sense strand
ugaacgaaauucucaaugg

SEQ ID NO: 568931 - RNA, 19 nt, Homo sapiens
  misc_RNA (1)...(19): siRNA sense strand
caagcuagaccaugaaugu

SEQ ID NO: 568932 - RNA, 19 nt, Homo sapiens
  misc_RNA (1)...(19): siRNA sense strand
guacucggaugaagaaguc

SEQ ID NO: 568933 - RNA, 19 nt, Homo sapiens
  misc_RNA (1)...(19): siRNA sense strand
gagaggaccuggacuucgu

SEQ ID NO: 568934 - RNA, 19 nt, Homo sapiens
  misc_RNA (1)...(19): siRNA sense strand
caacugcaucguucuguuu

SEQ ID NO: 568935 - RNA, 19 nt, Homo sapiens
  misc_RNA (1)...(19): siRNA sense strand
ggacuuggccacguacauu

SEQ ID NO: 568936 - RNA, 19 nt, Homo sapiens
  misc_RNA (1)...(19): siRNA sense strand
caacagcaccgcagaacug

SEQ ID NO: 568937 - RNA, 19 nt, Homo sapiens
  misc_RNA (1)...(19): siRNA sense strand
ggaaggaagcaaagcaaau

SEQ ID NO: 568938 - RNA, 19 nt, Homo sapiens
  misc_RNA (1)...(19): siRNA sense strand
gaucaaagugcuaaagcuu

SEQ ID NO: 568939 - RNA, 19 nt, Homo sapiens
  misc_RNA (1)...(19): siRNA sense strand
ugaaggugcugaagaaguc

SEQ ID NO: 568940 - RNA, 19 nt, Homo sapiens
  misc_RNA (1)...(19): siRNA sense strand
gcagagaggucuuuucuac

SEQ ID NO: 568941 - RNA, 19 nt, Homo sapiens
  misc_RNA (1)...(19): siRNA sense strand
ggaucuuucucucccauga

SEQ ID NO: 568942 - RNA, 19 nt, Homo sapiens
  misc_RNA (1)...(19): siRNA sense strand
cgaugaagaccaagacgua

SEQ ID NO: 568943 - RNA, 19 nt, Homo sapiens
  misc_RNA (1)...(19): siRNA sense strand
gcaucaacaucgccaagau

SEQ ID NO: 568944 - RNA, 19 nt, Homo sapiens
  misc_RNA (1)...(19): siRNA sense strand
gcugguagcccuagugugu

SEQ ID NO: 568945 - RNA, 19 nt, Homo sapiens
  misc_RNA (1)...(19): siRNA sense strand
agaaccagaaggccuauua

SEQ ID NO: 568946 - RNA, 19 nt, Homo sapiens
  misc_RNA (1)...(19): siRNA sense strand
ggacucaggagcacacgaa

SEQ ID NO: 568947 - RNA, 19 nt, Homo sapiens
  misc_RNA (1)...(19): siRNA sense strand
ccugggagcuggcauucaa

SEQ ID NO: 568948 - RNA, 19 nt, Homo sapiens
  misc_RNA (1)...(19): siRNA sense strand
cgaaagagaguuccaaggu

SEQ ID NO: 568949 - RNA, 19 nt, Homo sapiens
  misc_RNA (1)...(19): siRNA sense strand
uggcugagauggacaaagu

SEQ ID NO: 568950 - RNA, 19 nt, Homo sapiens
  misc_RNA (1)...(19): siRNA sense strand
gaagucugccuaccuguca

SEQ ID NO: 568951 - RNA, 19 nt, Homo sapiens
  misc_RNA (1)...(19): siRNA sense strand
cauugcaggucaccacgua

SEQ ID NO: 568952 - RNA, 19 nt, Homo sapiens
  misc_RNA (1)...(19): siRNA sense strand
cugacaagcuagaccauga

SEQ ID NO: 568953 - RNA, 19 nt, Homo sapiens
  misc_RNA (1)...(19): siRNA sense strand
ucuguuugcugcccuguuu

SEQ ID NO: 568954 - RNA, 19 nt, Homo sapiens
  misc_RNA (1)...(19): siRNA sense strand
gaccuggacuucguucuca

SEQ ID NO: 568955 - RNA, 19 nt, Homo sapiens
  misc_RNA (1)...(19): siRNA sense strand
gcaaagacaaucggaucaa

SEQ ID NO: 568956 - RNA, 19 nt, Homo sapiens
  misc_RNA (1)...(19): siRNA sense strand
gaaauucucaaugggauca

SEQ ID NO: 568957 - RNA, 19 nt, Homo sapiens
  misc_RNA (1)...(19): siRNA sense strand
caaagacaaucggaucaag

SEQ ID NO: 568958 - RNA, 19 nt, Homo sapiens
  misc_RNA (1)...(19): siRNA sense strand
cucaugagcuucuucuuca

SEQ ID NO: 568959 - RNA, 19 nt, Homo sapiens
  misc_RNA (1)...(19): siRNA sense strand
aaggagagaucaucaucga

SEQ ID NO: 568960 - RNA, 19 nt, Homo sapiens
  misc_RNA (1)...(19): siRNA sense strand
gagcugaaggugcugaaga

SEQ ID NO: 568961 - RNA, 19 nt, Homo sapiens
  misc_RNA (1)...(19): siRNA sense strand
uggaaugucacguggaaua

SEQ ID NO: 568962 - RNA, 19 nt, Homo sapiens
  misc_RNA (1)...(19): siRNA sense strand
ggaaggcccuggugaucac

SEQ ID NO: 568963 - RNA, 19 nt, Homo sapiens
  misc_RNA (1)...(19): siRNA sense strand
ccacgcugcuugcuaccuu

SEQ ID NO: 568964 - RNA, 19 nt, Homo sapiens
  misc_RNA (1)...(19): siRNA sense strand
gcgagugucucccucaaac

SEQ ID NO: 568965 - RNA, 19 nt, Homo sapiens
  misc_RNA (1)...(19): siRNA sense strand
ggacacgucggaacaaguc

SEQ ID NO: 568966 - RNA, 19 nt, Homo sapiens
  misc_RNA (1)...(19): siRNA sense strand
gaguggaauuccggaacua

SEQ ID NO: 568967 - RNA, 19 nt, Homo sapiens
  misc_RNA (1)...(19): siRNA sense strand
caaggaguauucagagacu

SEQ ID NO: 568968 - RNA, 19 nt, Homo sapiens
  misc_RNA (1)...(19): siRNA sense strand
cacaagggaucgccguguu

SEQ ID NO: 568969 - RNA, 19 nt, Homo sapiens
  misc_RNA (1)...(19): siRNA sense strand
gcgcuggcuuccaacuauu

SEQ ID NO: 568970 - RNA, 19 nt, Homo sapiens
  misc_RNA (1)...(19): siRNA sense strand
guacugggacuacaugaag

SEQ ID NO: 568971 - RNA, 19 nt, Homo sapiens
  misc_RNA (1)...(19): siRNA sense strand
gcaaagcaaauggagaaug

SEQ ID NO: 568972 - RNA, 19 nt, Homo sapiens
  misc_RNA (1)...(19): siRNA sense strand
aagcaaagcaaauggagaa

SEQ ID NO: 568973 - RNA, 19 nt, Homo sapiens
  misc_RNA (1)...(19): siRNA sense strand
gcagguggacgucaucauc

SEQ ID NO: 568974 - RNA, 19 nt, Homo sapiens
  misc_RNA (1)...(19): siRNA sense strand
gacuuggccacguacauua

SEQ ID NO: 568975 - RNA, 19 nt, Homo sapiens
  misc_RNA (1)...(19): siRNA sense strand
ucauggacuuggccacgua

SEQ ID NO: 568976 - RNA, 19 nt, Homo sapiens
  misc_RNA (1)...(19): siRNA sense strand
gaaggaaugcgccaagacu

SEQ ID NO: 568977 - RNA, 19 nt, Homo sapiens
  misc_RNA (1)...(19): siRNA sense strand
cagggaucaugcucacuuu

SEQ ID NO: 568978 - RNA, 19 nt, Homo sapiens
  misc_RNA (1)...(19): siRNA sense strand
ccaguacucggaugaagaa

SEQ ID NO: 568979 - RNA, 19 nt, Homo sapiens
  misc_RNA (1)...(19): siRNA sense strand
ggucaagcuuuccguguac

SEQ ID NO: 568980 - RNA, 19 nt, Homo sapiens
  misc_RNA (1)...(19): siRNA sense strand
uaaagaacuggaagaagga

SEQ ID NO: 568981 - RNA, 19 nt, Homo sapiens
  misc_RNA (1)...(19): siRNA sense strand
cucagugucuuacucauug

SEQ ID NO: 568982 - RNA, 19 nt, Homo sapiens
  misc_RNA (1)...(19): siRNA sense strand
ucaagcugaugaacgaaau

SEQ ID NO: 568983 - RNA, 19 nt, Homo sapiens
  misc_RNA (1)...(19): siRNA sense strand
ggaucaugcucacuuucug

SEQ ID NO: 568984 - RNA, 19 nt, Homo sapiens
  misc_RNA (1)...(19): siRNA sense strand
cagcagcuccuccuccuau

SEQ ID NO: 568985 - RNA, 19 nt, Homo sapiens
  misc_RNA (1)...(19): siRNA sense strand
gcacagcaugagcuacuug

SEQ ID NO: 568986 - RNA, 19 nt, Homo sapiens
  misc_RNA (1)...(19): siRNA sense strand
ggaucaaagugcuaaagcu

SEQ ID NO: 568987 - RNA, 19 nt, Homo sapiens
  misc_RNA (1)...(19): siRNA sense strand
gaugaacgaaauucucaau

SEQ ID NO: 568988 - RNA, 19 nt, Homo sapiens
  misc_RNA (1)...(19): siRNA sense strand
gcccgucaaugcugugaug

SEQ ID NO: 568989 - RNA, 19 nt, Homo sapiens
  misc_RNA (1)...(19): siRNA sense strand
augaggagguggaggcuuu

SEQ ID NO: 568990 - RNA, 19 nt, Homo sapiens
  misc_RNA (1)...(19): siRNA sense strand
ccaagguggaugcgaauga

SEQ ID NO: 568991 - RNA, 19 nt, Homo sapiens
  misc_RNA (1)...(19): siRNA sense strand
ucaaacgccugaggaucuu

SEQ ID NO: 568992 - RNA, 19 nt, Homo sapiens
  misc_RNA (1)...(19): siRNA sense strand
ggucagcccaacucucuug

SEQ ID NO: 568993 - RNA, 19 nt, Homo sapiens
  misc_RNA (1)...(19): siRNA sense strand
gaccaugaaugugcagaag

SEQ ID NO: 568994 - RNA, 19 nt, Homo sapiens
  misc_RNA (1)...(19): siRNA sense strand
auuggugccugcaucguua

SEQ ID NO: 568995 - RNA, 19 nt, Homo sapiens
  misc_RNA (1)...(19): siRNA sense strand
gggaaggaagcaaagcaaa

SEQ ID NO: 568996 - RNA, 19 nt, Homo sapiens
  misc_RNA (1)...(19): siRNA sense strand
gggcccuacuuccucauga

SEQ ID NO: 568997 - RNA, 19 nt, Homo sapiens
  misc_RNA (1)...(19): siRNA sense strand
guucaugggcucccuguuc

SEQ ID NO: 568998 - RNA, 19 nt, Homo sapiens
  misc_RNA (1)...(19): siRNA sense strand
cagggcaggucaagcuuuc

SEQ ID NO: 568999 - RNA, 19 nt, Homo sapiens
  misc_RNA (1)...(19): siRNA sense strand
ugauggcgaugaagaccaa

SEQ ID NO: 569000 - RNA, 19 nt, Homo sapiens
  misc_RNA (1)...(19): siRNA sense strand
gagauugucaaccucaugu

SEQ ID NO: 569001 - RNA, 19 nt, Homo sapiens
  misc_RNA (1)...(19): siRNA sense strand
acaccgugcugcuguuugu

SEQ ID NO: 569002 - RNA, 19 nt, Homo sapiens
  misc_RNA (1)...(19): siRNA sense strand
ucuuaaaguugcucaucaa

SEQ ID NO: 569003 - RNA, 19 nt, Homo sapiens
  misc_RNA (1)...(19): siRNA sense strand
ucccggaggucaucaagau

SEQ ID NO: 569004 - RNA, 19 nt, Homo sapiens
  misc_RNA (1)...(19): siRNA sense strand
ggacagugcagggaagcaa

SEQ ID NO: 569005 - RNA, 19 nt, Homo sapiens
  misc_RNA (1)...(19): siRNA sense strand
ggagguggaggcuuugauc

SEQ ID NO: 569006 - RNA, 19 nt, Homo sapiens
  misc_RNA (1)...(19): siRNA sense strand
gcaggucaccacguacuug

SEQ ID NO: 569007 - RNA, 19 nt, Homo sapiens
  misc_RNA (1)...(19): siRNA sense strand
agaaggaggagaccuggaa

SEQ ID NO: 569008 - RNA, 19 nt, Homo sapiens
  misc_RNA (1)...(19): siRNA sense strand
ucgugugggugccuuguuu

SEQ ID NO: 569009 - RNA, 19 nt, Homo sapiens
  misc_RNA (1)...(19): siRNA sense strand
ccacaucugcuucgucagu

SEQ ID NO: 569010 - RNA, 19 nt, Homo sapiens
  misc_RNA (1)...(19): siRNA sense strand
gcaccaguacuuccacauc

SEQ ID NO: 569011 - RNA, 19 nt, Homo sapiens
  misc_RNA (1)...(19): siRNA sense strand
gaugacaccucucaacaaa

SEQ ID NO: 569012 - RNA, 19 nt, Homo sapiens
  misc_RNA (1)...(19): siRNA sense strand
uaaaguugcucaucaaguu

SEQ ID NO: 569013 - RNA, 19 nt, Homo sapiens
  misc_RNA (1)...(19): siRNA sense strand
ggaagcaacugcagagaca

SEQ ID NO: 569014 - RNA, 19 nt, Homo sapiens
  misc_RNA (1)...(19): siRNA sense strand
ccaaggagcuggacacagu

SEQ ID NO: 569015 - RNA, 19 nt, Homo sapiens
  misc_RNA (1)...(19): siRNA sense strand
caacgagucugccgaagga

SEQ ID NO: 569016 - RNA, 19 nt, Homo sapiens
  misc_RNA (1)...(19): siRNA sense strand
gaucaagaccgcugucauu

SEQ ID NO: 569017 - RNA, 19 nt, Homo sapiens
  misc_RNA (1)...(19): siRNA sense strand
caaagcaaauggagaaugg

SEQ ID NO: 569018 - RNA, 19 nt, Homo sapiens
  misc_RNA (1)...(19): siRNA sense strand
gggcagaccucuucuacuc

SEQ ID NO: 569019 - RNA, 19 nt, Homo sapiens
  misc_RNA (1)...(19): siRNA sense strand
ccacguacauuaacaugau

SEQ ID NO: 569020 - RNA, 19 nt, Homo sapiens
  misc_RNA (1)...(19): siRNA sense strand
gaccgaggcuacauucaga

SEQ ID NO: 569021 - RNA, 19 nt, Homo sapiens
  misc_RNA (1)...(19): siRNA sense strand
uggagaggcucaaggagua

SEQ ID NO: 569022 - RNA, 19 nt, Homo sapiens
  misc_RNA (1)...(19): siRNA sense strand
gcagaccucuucuacucuu

SEQ ID NO: 569023 - RNA, 19 nt, Homo sapiens
  misc_RNA (1)...(19): siRNA sense strand
gaaggaagcaaagcaaaug

SEQ ID NO: 569024 - RNA, 19 nt, Homo sapiens
  misc_RNA (1)...(19): siRNA sense strand
ggccgcagaucuuaaaguu

SEQ ID NO: 569025 - RNA, 19 nt, Homo sapiens
  misc_RNA (1)...(19): siRNA sense strand
gaccuccgcuucaagauca

SEQ ID NO: 569026 - RNA, 19 nt, Homo sapiens
  misc_RNA (1)...(19): siRNA sense strand
aaggagaaauccaggagua

SEQ ID NO: 569027 - RNA, 19 nt, Homo sapiens
  misc_RNA (1)...(19): siRNA sense strand
caucugaaauggaaaccaa

SEQ ID NO: 569028 - RNA, 19 nt, Homo sapiens
  misc_RNA (1)...(19): siRNA sense strand
gcaacugcaucguucuguu

SEQ ID NO: 569029 - RNA, 19 nt, Homo sapiens
  misc_RNA (1)...(19): siRNA sense strand
ggaaagaagucggggcaua

SEQ ID NO: 569030 - RNA, 19 nt, Homo sapiens
  misc_RNA (1)...(19): siRNA sense strand
ugaacgaaauucucaaugg

SEQ ID NO: 569031 - RNA, 19 nt, Homo sapiens
  misc_RNA (1)...(19): siRNA sense strand
caagcuagaccaugaaugu

SEQ ID NO: 569032 - RNA, 19 nt, Homo sapiens
  misc_RNA (1)...(19): siRNA sense strand
guacucggaugaagaaguc

SEQ ID NO: 569033 - RNA, 19 nt, Homo sapiens
  misc_RNA (1)...(19): siRNA sense strand
gagaggaccuggacuucgu

SEQ ID NO: 569034 - RNA, 19 nt, Homo sapiens
  misc_RNA (1)...(19): siRNA sense strand
caacugcaucguucuguuu

SEQ ID NO: 569035 - RNA, 19 nt, Homo sapiens
  misc_RNA (1)...(19): siRNA sense strand
ggacuuggccacguacauu

SEQ ID NO: 569036 - RNA, 19 nt, Homo sapiens
  misc_RNA (1)...(19): siRNA sense strand
caacagcaccgcagaacug

SEQ ID NO: 569037 - RNA, 19 nt, Homo sapiens
  misc_RNA (1)...(19): siRNA sense strand
ggaaggaagcaaagcaaau

SEQ ID NO: 569038 - RNA, 19 nt, Homo sapiens
  misc_RNA (1)...(19): siRNA sense strand
gaucaaagugcuaaagcuu

SEQ ID NO: 569039 - RNA, 19 nt, Homo sapiens
  misc_RNA (1)...(19): siRNA sense strand
ugaaggugcugaagaaguc

SEQ ID NO: 569040 - RNA, 19 nt, Homo sapiens
  misc_RNA (1)...(19): siRNA sense strand
gcagagaggucuuuucuac

SEQ ID NO: 569041 - RNA, 19 nt, Homo sapiens
  misc_RNA (1)...(19): siRNA sense strand
ggaucuuucucucccauga

SEQ ID NO: 569042 - RNA, 19 nt, Homo sapiens
  misc_RNA (1)...(19): siRNA sense strand
cgaugaagaccaagacgua

SEQ ID NO: 569043 - RNA, 19 nt, Homo sapiens
  misc_RNA (1)...(19): siRNA sense strand
gcaucaacaucgccaagau

SEQ ID NO: 569044 - RNA, 19 nt, Homo sapiens
  misc_RNA (1)...(19): siRNA sense strand
gcugguagcccuagugugu

SEQ ID NO: 569045 - RNA, 19 nt, Homo sapiens
  misc_RNA (1)...(19): siRNA sense strand
agaaccagaaggccuauua

SEQ ID NO: 569046 - RNA, 19 nt, Homo sapiens
  misc_RNA (1)...(19): siRNA sense strand
ggacucaggagcacacgaa

SEQ ID NO: 569047 - RNA, 19 nt, Homo sapiens
  misc_RNA (1)...(19): siRNA sense strand
ccugggagcuggcauucaa

SEQ ID NO: 569048 - RNA, 19 nt, Homo sapiens
  misc_RNA (1)...(19): siRNA sense strand
cgaaagagaguuccaaggu

SEQ ID NO: 569049 - RNA, 19 nt, Homo sapiens
  misc_RNA (1)...(19): siRNA sense strand
uggcugagauggacaaagu

SEQ ID NO: 569050 - RNA, 19 nt, Homo sapiens
  misc_RNA (1)...(19): siRNA sense strand
gaagucugccuaccuguca

SEQ ID NO: 569051 - RNA, 19 nt, Homo sapiens
  misc_RNA (1)...(19): siRNA sense strand
cauugcaggucaccacgua

SEQ ID NO: 569052 - RNA, 19 nt, Homo sapiens
  misc_RNA (1)...(19): siRNA sense strand
cugacaagcuagaccauga

SEQ ID NO: 569053 - RNA, 19 nt, Homo sapiens
  misc_RNA (1)...(19): siRNA sense strand
ucuguuugcugcccuguuu

SEQ ID NO: 569054 - RNA, 19 nt, Homo sapiens
  misc_RNA (1)...(19): siRNA sense strand
gaccuggacuucguucuca

SEQ ID NO: 569055 - RNA, 19 nt, Homo sapiens
  misc_RNA (1)...(19): siRNA sense strand
gcaaagacaaucggaucaa

SEQ ID NO: 569056 - RNA, 19 nt, Homo sapiens
  misc_RNA (1)...(19): siRNA sense strand
gaaauucucaaugggauca

SEQ ID NO: 569057 - RNA, 19 nt, Homo sapiens
  misc_RNA (1)...(19): siRNA sense strand
caaagacaaucggaucaag

SEQ ID NO: 569058 - RNA, 19 nt, Homo sapiens
  misc_RNA (1)...(19): siRNA sense strand
cucaugagcuucuucuuca

SEQ ID NO: 569059 - RNA, 19 nt, Homo sapiens
  misc_RNA (1)...(19): siRNA sense strand
aaggagagaucaucaucga

SEQ ID NO: 569060 - RNA, 19 nt, Homo sapiens
  misc_RNA (1)...(19): siRNA sense strand
gagcugaaggugcugaaga

SEQ ID NO: 569061 - RNA, 19 nt, Homo sapiens
  misc_RNA (1)...(19): siRNA sense strand
uggaaugucacguggaaua

SEQ ID NO: 569062 - RNA, 19 nt, Homo sapiens
  misc_RNA (1)...(19): siRNA sense strand
ggaaggcccuggugaucac

SEQ ID NO: 569063 - RNA, 19 nt, Homo sapiens
  misc_RNA (1)...(19): siRNA sense strand
ccacgcugcuugcuaccuu

SEQ ID NO: 569064 - RNA, 19 nt, Homo sapiens
  misc_RNA (1)...(19): siRNA sense strand
gcgagugucucccucaaac

SEQ ID NO: 569065 - RNA, 19 nt, Homo sapiens
  misc_RNA (1)...(19): siRNA sense strand
ggacacgucggaacaaguc

SEQ ID NO: 569066 - RNA, 19 nt, Homo sapiens
  misc_RNA (1)...(19): siRNA sense strand
gaguggaauuccggaacua

SEQ ID NO: 569067 - RNA, 19 nt, Homo sapiens
  misc_RNA (1)...(19): siRNA sense strand
caaggaguauucagagacu

SEQ ID NO: 569068 - RNA, 19 nt, Homo sapiens
  misc_RNA (1)...(19): siRNA sense strand
cacaagggaucgccguguu

SEQ ID NO: 569069 - RNA, 19 nt, Homo sapiens
  misc_RNA (1)...(19): siRNA sense strand
gcgcuggcuuccaacuauu

SEQ ID NO: 569070 - RNA, 19 nt, Homo sapiens
  misc_RNA (1)...(19): siRNA sense strand
guacugggacuacaugaag

SEQ ID NO: 569071 - RNA, 19 nt, Homo sapiens
  misc_RNA (1)...(19): siRNA sense strand
gcaaagcaaauggagaaug

SEQ ID NO: 569072 - RNA, 19 nt, Homo sapiens
  misc_RNA (1)...(19): siRNA sense strand
aagcaaagcaaauggagaa

SEQ ID NO: 569073 - RNA, 19 nt, Homo sapiens
  misc_RNA (1)...(19): siRNA sense strand
gcagguggacgucaucauc

SEQ ID NO: 569074 - RNA, 19 nt, Homo sapiens
  misc_RNA (1)...(19): siRNA sense strand
gacuuggccacguacauua

SEQ ID NO: 569075 - RNA, 19 nt, Homo sapiens
  misc_RNA (1)...(19): siRNA sense strand
ucauggacuuggccacgua

SEQ ID NO: 569076 - RNA, 19 nt, Homo sapiens
  misc_RNA (1)...(19): siRNA sense strand
gaaggaaugcgccaagacu

SEQ ID NO: 569077 - RNA, 19 nt, Homo sapiens
  misc_RNA (1)...(19): siRNA sense strand
cagggaucaugcucacuuu

SEQ ID NO: 569078 - RNA, 19 nt, Homo sapiens
  misc_RNA (1)...(19): siRNA sense strand
ccaguacucggaugaagaa

SEQ ID NO: 569079 - RNA, 19 nt, Homo sapiens
  misc_RNA (1)...(19): siRNA sense strand
ggucaagcuuuccguguac

SEQ ID NO: 569080 - RNA, 19 nt, Homo sapiens
  misc_RNA (1)...(19): siRNA sense strand
uaaagaacuggaagaagga

SEQ ID NO: 569081 - RNA, 19 nt, Homo sapiens
  misc_RNA (1)...(19): siRNA sense strand
cucagugucuuacucauug

SEQ ID NO: 569082 - RNA, 19 nt, Homo sapiens
  misc_RNA (1)...(19): siRNA sense strand
ucaagcugaugaacgaaau

SEQ ID NO: 569083 - RNA, 19 nt, Homo sapiens
  misc_RNA (1)...(19): siRNA sense strand
ggaucaugcucacuuucug

SEQ ID NO: 569084 - RNA, 19 nt, Homo sapiens
  misc_RNA (1)...(19): siRNA sense strand
cagcagcuccuccuccuau

SEQ ID NO: 569085 - RNA, 19 nt, Homo sapiens
  misc_RNA (1)...(19): siRNA sense strand
gcacagcaugagcuacuug

SEQ ID NO: 569086 - RNA, 19 nt, Homo sapiens
  misc_RNA (1)...(19): siRNA sense strand
ggaucaaagugcuaaagcu

SEQ ID NO: 569087 - RNA, 19 nt, Homo sapiens
  misc_RNA (1)...(19): siRNA sense strand
gaugaacgaaauucucaau

SEQ ID NO: 569088 - RNA, 19 nt, Homo sapiens
  misc_RNA (1)...(19): siRNA sense strand
gcccgucaaugcugugaug

SEQ ID NO: 569089 - RNA, 19 nt, Homo sapiens
  misc_RNA (1)...(19): siRNA sense strand
augaggagguggaggcuuu

SEQ ID NO: 569090 - RNA, 19 nt, Homo sapiens
  misc_RNA (1)...(19): siRNA sense strand
ccaagguggaugcgaauga

SEQ ID NO: 569091 - RNA, 19 nt, Homo sapiens
  misc_RNA (1)...(19): siRNA sense strand
ucaaacgccugaggaucuu

SEQ ID NO: 569092 - RNA, 19 nt, Homo sapiens
  misc_RNA (1)...(19): siRNA sense strand
ggucagcccaacucucuug

SEQ ID NO: 569093 - RNA, 19 nt, Homo sapiens
  misc_RNA (1)...(19): siRNA sense strand
gaccaugaaugugcagaag

SEQ ID NO: 569094 - RNA, 19 nt, Homo sapiens
  misc_RNA (1)...(19): siRNA sense strand
auuggugccugcaucguua

SEQ ID NO: 569095 - RNA, 19 nt, Homo sapiens
  misc_RNA (1)...(19): siRNA sense strand
gggaaggaagcaaagcaaa

SEQ ID NO: 569096 - RNA, 19 nt, Homo sapiens
  misc_RNA (1)...(19): siRNA sense strand
gggcccuacuuccucauga

SEQ ID NO: 569097 - RNA, 19 nt, Homo sapiens
  misc_RNA (1)...(19): siRNA sense strand
guucaugggcucccuguuc

SEQ ID NO: 569098 - RNA, 19 nt, Homo sapiens
  misc_RNA (1)...(19): siRNA sense strand
cagggcaggucaagcuuuc

SEQ ID NO: 569099 - RNA, 19 nt, Homo sapiens
  misc_RNA (1)...(19): siRNA sense strand
ugauggcgaugaagaccaa

SEQ ID NO: 569100 - RNA, 19 nt, Homo sapiens
  misc_RNA (1)...(19): siRNA sense strand
gagauugucaaccucaugu

SEQ ID NO: 569101 - RNA, 19 nt, Homo sapiens
  misc_RNA (1)...(19): siRNA sense strand
acaccgugcugcuguuugu

SEQ ID NO: 569102 - RNA, 19 nt, Homo sapiens
  misc_RNA (1)...(19): siRNA sense strand
ucuuaaaguugcucaucaa

SEQ ID NO: 569103 - RNA, 19 nt, Homo sapiens
  misc_RNA (1)...(19): siRNA sense strand
ucccggaggucaucaagau

SEQ ID NO: 569104 - RNA, 19 nt, Homo sapiens
  misc_RNA (1)...(19): siRNA sense strand
ggacagugcagggaagcaa

SEQ ID NO: 569105 - RNA, 19 nt, Homo sapiens
  misc_RNA (1)...(19): siRNA sense strand
ggagguggaggcuuugauc

SEQ ID NO: 569106 - RNA, 19 nt, Homo sapiens
  misc_RNA (1)...(19): siRNA sense strand
gcaggucaccacguacuug

SEQ ID NO: 569107 - RNA, 19 nt, Homo sapiens
  misc_RNA (1)...(19): siRNA sense strand
agaaggaggagaccuggaa

SEQ ID NO: 569108 - RNA, 19 nt, Homo sapiens
  misc_RNA (1)...(19): siRNA sense strand
ucgugugggugccuuguuu

SEQ ID NO: 569109 - RNA, 19 nt, Homo sapiens
  misc_RNA (1)...(19): siRNA sense strand
ccacaucugcuucgucagu

SEQ ID NO: 569110 - RNA, 19 nt, Homo sapiens
  misc_RNA (1)...(19): siRNA sense strand
gcaccaguacuuccacauc

SEQ ID NO: 569111 - RNA, 19 nt, Homo sapiens
  misc_RNA (1)...(19): siRNA sense strand
gaugacaccucucaacaaa

SEQ ID NO: 569112 - RNA, 19 nt, Homo sapiens
  misc_RNA (1)...(19): siRNA sense strand
uaaaguugcucaucaaguu

SEQ ID NO: 569113 - RNA, 19 nt, Homo sapiens
  misc_RNA (1)...(19): siRNA sense strand
ggaagcaacugcagagaca

SEQ ID NO: 569114 - RNA, 19 nt, Homo sapiens
  misc_RNA (1)...(19): siRNA sense strand
ccaaggagcuggacacagu

SEQ ID NO: 569115 - RNA, 19 nt, Homo sapiens
  misc_RNA (1)...(19): siRNA sense strand
caacgagucugccgaagga

SEQ ID NO: 569116 - RNA, 19 nt, Homo sapiens
  misc_RNA (1)...(19): siRNA sense strand
gaucaagaccgcugucauu

SEQ ID NO: 569117 - RNA, 19 nt, Homo sapiens
  misc_RNA (1)...(19): siRNA sense strand
caaagcaaauggagaaugg

SEQ ID NO: 569118 - RNA, 19 nt, Homo sapiens
  misc_RNA (1)...(19): siRNA sense strand
gggcagaccucuucuacuc

SEQ ID NO: 569119 - RNA, 19 nt, Homo sapiens
  misc_RNA (1)...(19): siRNA sense strand
ccacguacauuaacaugau

SEQ ID NO: 569120 - RNA, 19 nt, Homo sapiens
  misc_RNA (1)...(19): siRNA sense strand
gaccgaggcuacauucaga

SEQ ID NO: 569121 - RNA, 19 nt, Homo sapiens
  misc_RNA (1)...(19): siRNA sense strand
uggagaggcucaaggagua

SEQ ID NO: 569122 - RNA, 19 nt, Homo sapiens
  misc_RNA (1)...(19): siRNA sense strand
gcagaccucuucuacucuu

SEQ ID NO: 569123 - RNA, 19 nt, Homo sapiens
  misc_RNA (1)...(19): siRNA sense strand
gaaggaagcaaagcaaaug

SEQ ID NO: 569124 - RNA, 19 nt, Homo sapiens
  misc_RNA (1)...(19): siRNA sense strand
ggccgcagaucuuaaaguu

SEQ ID NO: 569125 - RNA, 19 nt, Homo sapiens
  misc_RNA (1)...(19): siRNA sense strand
gaccuccgcuucaagauca

SEQ ID NO: 569126 - RNA, 19 nt, Homo sapiens
  misc_RNA (1)...(19): siRNA sense strand
aaggagaaauccaggagua

SEQ ID NO: 569127 - RNA, 19 nt, Homo sapiens
  misc_RNA (1)...(19): siRNA sense strand
caucugaaauggaaaccaa

SEQ ID NO: 569128 - RNA, 19 nt, Homo sapiens
  misc_RNA (1)...(19): siRNA sense strand
gcaacugcaucguucuguu

SEQ ID NO: 569129 - RNA, 19 nt, Homo sapiens
  misc_RNA (1)...(19): siRNA sense strand
ggaaagaagucggggcaua

SEQ ID NO: 569130 - RNA, 19 nt, Homo sapiens
  misc_RNA (1)...(19): siRNA sense strand
ugaacgaaauucucaaugg

SEQ ID NO: 569131 - RNA, 19 nt, Homo sapiens
  misc_RNA (1)...(19): siRNA sense strand
caagcuagaccaugaaugu

SEQ ID NO: 569132 - RNA, 19 nt, Homo sapiens
  misc_RNA (1)...(19): siRNA sense strand
guacucggaugaagaaguc

SEQ ID NO: 569133 - RNA, 19 nt, Homo sapiens
  misc_RNA (1)...(19): siRNA sense strand
gagaggaccuggacuucgu

SEQ ID NO: 569134 - RNA, 19 nt, Homo sapiens
  misc_RNA (1)...(19): siRNA sense strand
caacugcaucguucuguuu

SEQ ID NO: 569135 - RNA, 19 nt, Homo sapiens
  misc_RNA (1)...(19): siRNA sense strand
ggacuuggccacguacauu

SEQ ID NO: 569136 - RNA, 19 nt, Homo sapiens
  misc_RNA (1)...(19): siRNA sense strand
caacagcaccgcagaacug

SEQ ID NO: 569137 - RNA, 19 nt, Homo sapiens
  misc_RNA (1)...(19): siRNA sense strand
ggaaggaagcaaagcaaau

SEQ ID NO: 569138 - RNA, 19 nt, Homo sapiens
  misc_RNA (1)...(19): siRNA sense strand
gaucaaagugcuaaagcuu

SEQ ID NO: 569139 - RNA, 19 nt, Homo sapiens
  misc_RNA (1)...(19): siRNA sense strand
ugaaggugcugaagaaguc

SEQ ID NO: 569140 - RNA, 19 nt, Homo sapiens
  misc_RNA (1)...(19): siRNA sense strand
gcagagaggucuuuucuac

SEQ ID NO: 569141 - RNA, 19 nt, Homo sapiens
  misc_RNA (1)...(19): siRNA sense strand
ggaucuuucucucccauga

SEQ ID NO: 569142 - RNA, 19 nt, Homo sapiens
  misc_RNA (1)...(19): siRNA sense strand
cgaugaagaccaagacgua

SEQ ID NO: 569143 - RNA, 19 nt, Homo sapiens
  misc_RNA (1)...(19): siRNA sense strand
gcaucaacaucgccaagau

SEQ ID NO: 569144 - RNA, 19 nt, Homo sapiens
  misc_RNA (1)...(19): siRNA sense strand
gcugguagcccuagugugu

SEQ ID NO: 569145 - RNA, 19 nt, Homo sapiens
  misc_RNA (1)...(19): siRNA sense strand
agaaccagaaggccuauua

SEQ ID NO: 569146 - RNA, 19 nt, Homo sapiens
  misc_RNA (1)...(19): siRNA sense strand
ggacucaggagcacacgaa

SEQ ID NO: 569147 - RNA, 19 nt, Homo sapiens
  misc_RNA (1)...(19): siRNA sense strand
ccugggagcuggcauucaa

SEQ ID NO: 569148 - RNA, 19 nt, Homo sapiens
  misc_RNA (1)...(19): siRNA sense strand
cgaaagagaguuccaaggu

SEQ ID NO: 569149 - RNA, 19 nt, Homo sapiens
  misc_RNA (1)...(19): siRNA sense strand
uggcugagauggacaaagu

SEQ ID NO: 569150 - RNA, 19 nt, Homo sapiens
  misc_RNA (1)...(19): siRNA sense strand
gaagucugccuaccuguca

SEQ ID NO: 569151 - RNA, 19 nt, Homo sapiens
  misc_RNA (1)...(19): siRNA sense strand
cauugcaggucaccacgua

SEQ ID NO: 569152 - RNA, 19 nt, Homo sapiens
  misc_RNA (1)...(19): siRNA sense strand
cugacaagcuagaccauga

SEQ ID NO: 569153 - RNA, 19 nt, Homo sapiens
  misc_RNA (1)...(19): siRNA sense strand
ucuguuugcugcccuguuu

SEQ ID NO: 569154 - RNA, 19 nt, Homo sapiens
  misc_RNA (1)...(19): siRNA sense strand
gaccuggacuucguucuca

SEQ ID NO: 569155 - RNA, 19 nt, Homo sapiens
  misc_RNA (1)...(19): siRNA sense strand
gcaaagacaaucggaucaa

SEQ ID NO: 569156 - RNA, 19 nt, Homo sapiens
  misc_RNA (1)...(19): siRNA sense strand
gaaauucucaaugggauca

SEQ ID NO: 569157 - RNA, 19 nt, Homo sapiens
  misc_RNA (1)...(19): siRNA sense strand
caaagacaaucggaucaag

SEQ ID NO: 569158 - RNA, 19 nt, Homo sapiens
  misc_RNA (1)...(19): siRNA sense strand
cucaugagcuucuucuuca

SEQ ID NO: 569159 - RNA, 19 nt, Homo sapiens
  misc_RNA (1)...(19): siRNA sense strand
aaggagagaucaucaucga

SEQ ID NO: 569160 - RNA, 19 nt, Homo sapiens
  misc_RNA (1)...(19): siRNA sense strand
gagcugaaggugcugaaga

SEQ ID NO: 569161 - RNA, 19 nt, Homo sapiens
  misc_RNA (1)...(19): siRNA sense strand
uggaaugucacguggaaua

SEQ ID NO: 569162 - RNA, 19 nt, Homo sapiens
  misc_RNA (1)...(19): siRNA sense strand
ggaaggcccuggugaucac

SEQ ID NO: 569163 - RNA, 19 nt, Homo sapiens
  misc_RNA (1)...(19): siRNA sense strand
ccacgcugcuugcuaccuu

SEQ ID NO: 569164 - RNA, 19 nt, Homo sapiens
  misc_RNA (1)...(19): siRNA sense strand
gcgagugucucccucaaac

SEQ ID NO: 569165 - RNA, 19 nt, Homo sapiens
  misc_RNA (1)...(19): siRNA sense strand
ggacacgucggaacaaguc

SEQ ID NO: 569166 - RNA, 19 nt, Homo sapiens
  misc_RNA (1)...(19): siRNA sense strand
gaguggaauuccggaacua

SEQ ID NO: 569167 - RNA, 19 nt, Homo sapiens
  misc_RNA (1)...(19): siRNA sense strand
caaggaguauucagagacu

SEQ ID NO: 569168 - RNA, 19 nt, Homo sapiens
  misc_RNA (1)...(19): siRNA sense strand
cacaagggaucgccguguu

SEQ ID NO: 569169 - RNA, 19 nt, Homo sapiens
  misc_RNA (1)...(19): siRNA sense strand
gcgcuggcuuccaacuauu

SEQ ID NO: 569170 - RNA, 19 nt, Homo sapiens
  misc_RNA (1)...(19): siRNA sense strand
guacugggacuacaugaag

SEQ ID NO: 569171 - RNA, 19 nt, Homo sapiens
  misc_RNA (1)...(19): siRNA sense strand
gcaaagcaaauggagaaug

SEQ ID NO: 569172 - RNA, 19 nt, Homo sapiens
  misc_RNA (1)...(19): siRNA sense strand
aagcaaagcaaauggagaa

SEQ ID NO: 569173 - RNA, 19 nt, Homo sapiens
  misc_RNA (1)...(19): siRNA sense strand
gcagguggacgucaucauc

SEQ ID NO: 569174 - RNA, 19 nt, Homo sapiens
  misc_RNA (1)...(19): siRNA sense strand
gacuuggccacguacauua

SEQ ID NO: 569175 - RNA, 19 nt, Homo sapiens
  misc_RNA (1)...(19): siRNA sense strand
ucauggacuuggccacgua

SEQ ID NO: 569176 - RNA, 19 nt, Homo sapiens
  misc_RNA (1)...(19): siRNA sense strand
gaaggaaugcgccaagacu

SEQ ID NO: 569177 - RNA, 19 nt, Homo sapiens
  misc_RNA (1)...(19): siRNA sense strand
cagggaucaugcucacuuu

SEQ ID NO: 569178 - RNA, 19 nt, Homo sapiens
  misc_RNA (1)...(19): siRNA sense strand
ccaguacucggaugaagaa

SEQ ID NO: 569179 - RNA, 19 nt, Homo sapiens
  misc_RNA (1)...(19): siRNA sense strand
ggucaagcuuuccguguac

SEQ ID NO: 569180 - RNA, 19 nt, Homo sapiens
  misc_RNA (1)...(19): siRNA sense strand
uaaagaacuggaagaagga

SEQ ID NO: 569181 - RNA, 19 nt, Homo sapiens
  misc_RNA (1)...(19): siRNA sense strand
cucagugucuuacucauug

SEQ ID NO: 569182 - RNA, 19 nt, Homo sapiens
  misc_RNA (1)...(19): siRNA sense strand
ucaagcugaugaacgaaau

SEQ ID NO: 569183 - RNA, 19 nt, Homo sapiens
  misc_RNA (1)...(19): siRNA sense strand
ggaucaugcucacuuucug

SEQ ID NO: 569184 - RNA, 19 nt, Homo sapiens
  misc_RNA (1)...(19): siRNA sense strand
cagcagcuccuccuccuau

SEQ ID NO: 569185 - RNA, 19 nt, Homo sapiens
  misc_RNA (1)...(19): siRNA sense strand
gcacagcaugagcuacuug

SEQ ID NO: 569186 - RNA, 19 nt, Homo sapiens
  misc_RNA (1)...(19): siRNA sense strand
ggaucaaagugcuaaagcu

SEQ ID NO: 569187 - RNA, 19 nt, Homo sapiens
  misc_RNA (1)...(19): siRNA sense strand
gaugaacgaaauucucaau

SEQ ID NO: 569188 - RNA, 19 nt, Homo sapiens
  misc_RNA (1)...(19): siRNA sense strand
gcccgucaaugcugugaug

SEQ ID NO: 569189 - RNA, 19 nt, Homo sapiens
  misc_RNA (1)...(19): siRNA sense strand
augaggagguggaggcuuu

SEQ ID NO: 569190 - RNA, 19 nt, Homo sapiens
  misc_RNA (1)...(19): siRNA sense strand
ccaagguggaugcgaauga

SEQ ID NO: 569191 - RNA, 19 nt, Homo sapiens
  misc_RNA (1)...(19): siRNA sense strand
ucaaacgccugaggaucuu

SEQ ID NO: 569192 - RNA, 19 nt, Homo sapiens
  misc_RNA (1)...(19): siRNA sense strand
ggucagcccaacucucuug

SEQ ID NO: 569193 - RNA, 19 nt, Homo sapiens
  misc_RNA (1)...(19): siRNA sense strand
gaccaugaaugugcagaag

SEQ ID NO: 569194 - RNA, 19 nt, Homo sapiens
  misc_RNA (1)...(19): siRNA sense strand
auuggugccugcaucguua

SEQ ID NO: 569195 - RNA, 19 nt, Homo sapiens
  misc_RNA (1)...(19): siRNA sense strand
gggaaggaagcaaagcaaa

SEQ ID NO: 569196 - RNA, 19 nt, Homo sapiens
  misc_RNA (1)...(19): siRNA sense strand
gggcccuacuuccucauga

SEQ ID NO: 569197 - RNA, 19 nt, Homo sapiens
  misc_RNA (1)...(19): siRNA sense strand
guucaugggcucccuguuc

SEQ ID NO: 569198 - RNA, 19 nt, Homo sapiens
  misc_RNA (1)...(19): siRNA sense strand
cagggcaggucaagcuuuc

SEQ ID NO: 569199 - RNA, 19 nt, Homo sapiens
  misc_RNA (1)...(19): siRNA sense strand
ugauggcgaugaagaccaa

SEQ ID NO: 569200 - RNA, 19 nt, Homo sapiens
  misc_RNA (1)...(19): siRNA sense strand
gagauugucaaccucaugu

SEQ ID NO: 569201 - RNA, 19 nt, Homo sapiens
  misc_RNA (1)...(19): siRNA sense strand
acaccgugcugcuguuugu

SEQ ID NO: 569202 - RNA, 19 nt, Homo sapiens
  misc_RNA (1)...(19): siRNA sense strand
ucuuaaaguugcucaucaa

SEQ ID NO: 569203 - RNA, 19 nt, Homo sapiens
  misc_RNA (1)...(19): siRNA sense strand
ucccggaggucaucaagau

SEQ ID NO: 569204 - RNA, 19 nt, Homo sapiens
  misc_RNA (1)...(19): siRNA sense strand
ggacagugcagggaagcaa

SEQ ID NO: 569205 - RNA, 19 nt, Homo sapiens
  misc_RNA (1)...(19): siRNA sense strand
ggagguggaggcuuugauc

SEQ ID NO: 569206 - RNA, 19 nt, Homo sapiens
  misc_RNA (1)...(19): siRNA sense strand
gcaggucaccacguacuug

SEQ ID NO: 569207 - RNA, 19 nt, Homo sapiens
  misc_RNA (1)...(19): siRNA sense strand
agaaggaggagaccuggaa

SEQ ID NO: 569208 - RNA, 19 nt, Homo sapiens
  misc_RNA (1)...(19): siRNA sense strand
ucgugugggugccuuguuu

SEQ ID NO: 569209 - RNA, 19 nt, Homo sapiens
  misc_RNA (1)...(19): siRNA sense strand
ccacaucugcuucgucagu

SEQ ID NO: 569210 - RNA, 19 nt, Homo sapiens
  misc_RNA (1)...(19): siRNA sense strand
gcaccaguacuuccacauc

SEQ ID NO: 569211 - RNA, 19 nt, Homo sapiens
  misc_RNA (1)...(19): siRNA sense strand
gaugacaccucucaacaaa

SEQ ID NO: 569212 - RNA, 19 nt, Homo sapiens
  misc_RNA (1)...(19): siRNA sense strand
uaaaguugcucaucaaguu

SEQ ID NO: 569213 - RNA, 19 nt, Homo sapiens
  misc_RNA (1)...(19): siRNA sense strand
ggaagcaacugcagagaca

SEQ ID NO: 569214 - RNA, 19 nt, Homo sapiens
  misc_RNA (1)...(19): siRNA sense strand
ccaaggagcuggacacagu

SEQ ID NO: 569215 - RNA, 19 nt, Homo sapiens
  misc_RNA (1)...(19): siRNA sense strand
caacgagucugccgaagga

SEQ ID NO: 569216 - RNA, 19 nt, Homo sapiens
  misc_RNA (1)...(19): siRNA sense strand
gaucaagaccgcugucauu

SEQ ID NO: 569217 - RNA, 19 nt, Homo sapiens
  misc_RNA (1)...(19): siRNA sense strand
caaagcaaauggagaaugg

SEQ ID NO: 569218 - RNA, 19 nt, Homo sapiens
  misc_RNA (1)...(19): siRNA sense strand
gggcagaccucuucuacuc

SEQ ID NO: 569219 - RNA, 19 nt, Homo sapiens
  misc_RNA (1)...(19): siRNA sense strand
ccacguacauuaacaugau

SEQ ID NO: 569220 - RNA, 19 nt, Homo sapiens
  misc_RNA (1)...(19): siRNA sense strand
gaccgaggcuacauucaga

SEQ ID NO: 569221 - RNA, 19 nt, Homo sapiens
  misc_RNA (1)...(19): siRNA sense strand
uggagaggcucaaggagua

SEQ ID NO: 569222 - RNA, 19 nt, Homo sapiens
  misc_RNA (1)...(19): siRNA sense strand
gcagaccucuucuacucuu

SEQ ID NO: 569223 - RNA, 19 nt, Homo sapiens
  misc_RNA (1)...(19): siRNA sense strand
gaaggaagcaaagcaaaug

SEQ ID NO: 569224 - RNA, 19 nt, Homo sapiens
  misc_RNA (1)...(19): siRNA sense strand
ggccgcagaucuuaaaguu

SEQ ID NO: 569225 - RNA, 19 nt, Homo sapiens
  misc_RNA (1)...(19): siRNA sense strand
gaccuccgcuucaagauca

SEQ ID NO: 569226 - RNA, 19 nt, Homo sapiens
  misc_RNA (1)...(19): siRNA sense strand
aaggagaaauccaggagua

SEQ ID NO: 569227 - RNA, 19 nt, Homo sapiens
  misc_RNA (1)...(19): siRNA sense strand
caucugaaauggaaaccaa

SEQ ID NO: 569228 - RNA, 19 nt, Homo sapiens
  misc_RNA (1)...(19): siRNA sense strand
gcaacugcaucguucuguu

SEQ ID NO: 569229 - RNA, 19 nt, Homo sapiens
  misc_RNA (1)...(19): siRNA sense strand
ggaaagaagucggggcaua

SEQ ID NO: 569230 - RNA, 19 nt, Homo sapiens
  misc_RNA (1)...(19): siRNA sense strand
ugaacgaaauucucaaugg

SEQ ID NO: 569231 - RNA, 19 nt, Homo sapiens
  misc_RNA (1)...(19): siRNA sense strand
caagcuagaccaugaaugu

SEQ ID NO: 569232 - RNA, 19 nt, Homo sapiens
  misc_RNA (1)...(19): siRNA sense strand
guacucggaugaagaaguc

SEQ ID NO: 569233 - RNA, 19 nt, Homo sapiens
  misc_RNA (1)...(19): siRNA sense strand
gagaggaccuggacuucgu

SEQ ID NO: 569234 - RNA, 19 nt, Homo sapiens
  misc_RNA (1)...(19): siRNA sense strand
caacugcaucguucuguuu

SEQ ID NO: 569235 - RNA, 19 nt, Homo sapiens
  misc_RNA (1)...(19): siRNA sense strand
ggacuuggccacguacauu

SEQ ID NO: 569236 - RNA, 19 nt, Homo sapiens
  misc_RNA (1)...(19): siRNA sense strand
caacagcaccgcagaacug

SEQ ID NO: 569237 - RNA, 19 nt, Homo sapiens
  misc_RNA (1)...(19): siRNA sense strand
ggaaggaagcaaagcaaau

SEQ ID NO: 569238 - RNA, 19 nt, Homo sapiens
  misc_RNA (1)...(19): siRNA sense strand
gaucaaagugcuaaagcuu

SEQ ID NO: 569239 - RNA, 19 nt, Homo sapiens
  misc_RNA (1)...(19): siRNA sense strand
ugaaggugcugaagaaguc

SEQ ID NO: 569240 - RNA, 19 nt, Homo sapiens
  misc_RNA (1)...(19): siRNA sense strand
gcagagaggucuuuucuac

SEQ ID NO: 569241 - RNA, 19 nt, Homo sapiens
  misc_RNA (1)...(19): siRNA sense strand
ggaucuuucucucccauga

SEQ ID NO: 569242 - RNA, 19 nt, Homo sapiens
  misc_RNA (1)...(19): siRNA sense strand
cgaugaagaccaagacgua

SEQ ID NO: 569243 - RNA, 19 nt, Homo sapiens
  misc_RNA (1)...(19): siRNA sense strand
gcaucaacaucgccaagau

SEQ ID NO: 569244 - RNA, 19 nt, Homo sapiens
  misc_RNA (1)...(19): siRNA sense strand
gcugguagcccuagugugu

SEQ ID NO: 569245 - RNA, 19 nt, Homo sapiens
  misc_RNA (1)...(19): siRNA sense strand
agaaccagaaggccuauua

SEQ ID NO: 569246 - RNA, 19 nt, Homo sapiens
  misc_RNA (1)...(19): siRNA sense strand
ggacucaggagcacacgaa

SEQ ID NO: 569247 - RNA, 19 nt, Homo sapiens
  misc_RNA (1)...(19): siRNA sense strand
ccugggagcuggcauucaa

SEQ ID NO: 569248 - RNA, 19 nt, Homo sapiens
  misc_RNA (1)...(19): siRNA sense strand
cgaaagagaguuccaaggu

SEQ ID NO: 569249 - RNA, 19 nt, Homo sapiens
  misc_RNA (1)...(19): siRNA sense strand
uggcugagauggacaaagu

SEQ ID NO: 569250 - RNA, 19 nt, Homo sapiens
  misc_RNA (1)...(19): siRNA sense strand
gaagucugccuaccuguca

SEQ ID NO: 569251 - RNA, 19 nt, Homo sapiens
  misc_RNA (1)...(19): siRNA sense strand
cauugcaggucaccacgua

SEQ ID NO: 569252 - RNA, 19 nt, Homo sapiens
  misc_RNA (1)...(19): siRNA sense strand
cugacaagcuagaccauga

SEQ ID NO: 569253 - RNA, 19 nt, Homo sapiens
  misc_RNA (1)...(19): siRNA sense strand
ucuguuugcugcccuguuu

SEQ ID NO: 569254 - RNA, 19 nt, Homo sapiens
  misc_RNA (1)...(19): siRNA sense strand
gaccuggacuucguucuca

SEQ ID NO: 569255 - RNA, 19 nt, Homo sapiens
  misc_RNA (1)...(19): siRNA sense strand
gcaaagacaaucggaucaa

SEQ ID NO: 569256 - RNA, 19 nt, Homo sapiens
  misc_RNA (1)...(19): siRNA sense strand
gaaauucucaaugggauca

SEQ ID NO: 569257 - RNA, 19 nt, Homo sapiens
  misc_RNA (1)...(19): siRNA sense strand
caaagacaaucggaucaag

SEQ ID NO: 569258 - RNA, 19 nt, Homo sapiens
  misc_RNA (1)...(19): siRNA sense strand
cucaugagcuucuucuuca

SEQ ID NO: 569259 - RNA, 19 nt, Homo sapiens
  misc_RNA (1)...(19): siRNA sense strand
aaggagagaucaucaucga

SEQ ID NO: 569260 - RNA, 19 nt, Homo sapiens
  misc_RNA (1)...(19): siRNA sense strand
gagcugaaggugcugaaga

SEQ ID NO: 569261 - RNA, 19 nt, Homo sapiens
  misc_RNA (1)...(19): siRNA sense strand
uggaaugucacguggaaua

SEQ ID NO: 569262 - RNA, 19 nt, Homo sapiens
  misc_RNA (1)...(19): siRNA sense strand
ggaaggcccuggugaucac

SEQ ID NO: 569263 - RNA, 19 nt, Homo sapiens
  misc_RNA (1)...(19): siRNA sense strand
ccacgcugcuugcuaccuu

SEQ ID NO: 569264 - RNA, 19 nt, Homo sapiens
  misc_RNA (1)...(19): siRNA sense strand
gcgagugucucccucaaac

SEQ ID NO: 569265 - RNA, 19 nt, Homo sapiens
  misc_RNA (1)...(19): siRNA sense strand
ggacacgucggaacaaguc

SEQ ID NO: 569266 - RNA, 19 nt, Homo sapiens
  misc_RNA (1)...(19): siRNA sense strand
gaguggaauuccggaacua

SEQ ID NO: 569267 - RNA, 19 nt, Homo sapiens
  misc_RNA (1)...(19): siRNA sense strand
caaggaguauucagagacu

SEQ ID NO: 569268 - RNA, 19 nt, Homo sapiens
  misc_RNA (1)...(19): siRNA sense strand
cacaagggaucgccguguu

SEQ ID NO: 569269 - RNA, 19 nt, Homo sapiens
  misc_RNA (1)...(19): siRNA sense strand
gcgcuggcuuccaacuauu

SEQ ID NO: 569270 - RNA, 19 nt, Homo sapiens
  misc_RNA (1)...(19): siRNA sense strand
guacugggacuacaugaag

SEQ ID NO: 569271 - RNA, 19 nt, Homo sapiens
  misc_RNA (1)...(19): siRNA sense strand
gcaaagcaaauggagaaug

SEQ ID NO: 569272 - RNA, 19 nt, Homo sapiens
  misc_RNA (1)...(19): siRNA sense strand
aagcaaagcaaauggagaa

SEQ ID NO: 569273 - RNA, 19 nt, Homo sapiens
  misc_RNA (1)...(19): siRNA sense strand
gcagguggacgucaucauc

SEQ ID NO: 569274 - RNA, 19 nt, Homo sapiens
  misc_RNA (1)...(19): siRNA sense strand
gacuuggccacguacauua

SEQ ID NO: 569275 - RNA, 19 nt, Homo sapiens
  misc_RNA (1)...(19): siRNA sense strand
ucauggacuuggccacgua

SEQ ID NO: 569276 - RNA, 19 nt, Homo sapiens
  misc_RNA (1)...(19): siRNA sense strand
gaaggaaugcgccaagacu

SEQ ID NO: 569277 - RNA, 19 nt, Homo sapiens
  misc_RNA (1)...(19): siRNA sense strand
cagggaucaugcucacuuu

SEQ ID NO: 569278 - RNA, 19 nt, Homo sapiens
  misc_RNA (1)...(19): siRNA sense strand
ccaguacucggaugaagaa

SEQ ID NO: 569279 - RNA, 19 nt, Homo sapiens
  misc_RNA (1)...(19): siRNA sense strand
ggucaagcuuuccguguac

SEQ ID NO: 569280 - RNA, 19 nt, Homo sapiens
  misc_RNA (1)...(19): siRNA sense strand
uaaagaacuggaagaagga

SEQ ID NO: 569281 - RNA, 19 nt, Homo sapiens
  misc_RNA (1)...(19): siRNA sense strand
cucagugucuuacucauug

SEQ ID NO: 569282 - RNA, 19 nt, Homo sapiens
  misc_RNA (1)...(19): siRNA sense strand
ucaagcugaugaacgaaau

SEQ ID NO: 569283 - RNA, 19 nt, Homo sapiens
  misc_RNA (1)...(19): siRNA sense strand
ggaucaugcucacuuucug

SEQ ID NO: 569284 - RNA, 19 nt, Homo sapiens
  misc_RNA (1)...(19): siRNA sense strand
cagcagcuccuccuccuau

SEQ ID NO: 569285 - RNA, 19 nt, Homo sapiens
  misc_RNA (1)...(19): siRNA sense strand
gcacagcaugagcuacuug

SEQ ID NO: 569286 - RNA, 19 nt, Homo sapiens
  misc_RNA (1)...(19): siRNA sense strand
ggaucaaagugcuaaagcu

SEQ ID NO: 569287 - RNA, 19 nt, Homo sapiens
  misc_RNA (1)...(19): siRNA sense strand
gaugaacgaaauucucaau

SEQ ID NO: 569288 - RNA, 19 nt, Homo sapiens
  misc_RNA (1)...(19): siRNA sense strand
gcccgucaaugcugugaug

SEQ ID NO: 569289 - RNA, 19 nt, Homo sapiens
  misc_RNA (1)...(19): siRNA sense strand
augaggagguggaggcuuu

SEQ ID NO: 569290 - RNA, 19 nt, Homo sapiens
  misc_RNA (1)...(19): siRNA sense strand
ccaagguggaugcgaauga

SEQ ID NO: 569291 - RNA, 19 nt, Homo sapiens
  misc_RNA (1)...(19): siRNA sense strand
ucaaacgccugaggaucuu

SEQ ID NO: 569292 - RNA, 19 nt, Homo sapiens
  misc_RNA (1)...(19): siRNA sense strand
ggucagcccaacucucuug

SEQ ID NO: 569293 - RNA, 19 nt, Homo sapiens
  misc_RNA (1)...(19): siRNA sense strand
gaccaugaaugugcagaag

SEQ ID NO: 569294 - RNA, 19 nt, Homo sapiens
  misc_RNA (1)...(19): siRNA sense strand
auuggugccugcaucguua

SEQ ID NO: 569295 - RNA, 19 nt, Homo sapiens
  misc_RNA (1)...(19): siRNA sense strand
gggaaggaagcaaagcaaa

SEQ ID NO: 569296 - RNA, 19 nt, Homo sapiens
  misc_RNA (1)...(19): siRNA sense strand
gggcccuacuuccucauga

SEQ ID NO: 569297 - RNA, 19 nt, Homo sapiens
  misc_RNA (1)...(19): siRNA sense strand
guucaugggcucccuguuc

SEQ ID NO: 569298 - RNA, 19 nt, Homo sapiens
  misc_RNA (1)...(19): siRNA sense strand
cagggcaggucaagcuuuc

SEQ ID NO: 569299 - RNA, 19 nt, Homo sapiens
  misc_RNA (1)...(19): siRNA sense strand
ugauggcgaugaagaccaa

SEQ ID NO: 569300 - RNA, 19 nt, Homo sapiens
  misc_RNA (1)...(19): siRNA sense strand
gagauugucaaccucaugu

SEQ ID NO: 569301 - RNA, 19 nt, Homo sapiens
  misc_RNA (1)...(19): siRNA sense strand
acaccgugcugcuguuugu

SEQ ID NO: 569302 - RNA, 19 nt, Homo sapiens
  misc_RNA (1)...(19): siRNA sense strand
ucuuaaaguugcucaucaa

SEQ ID NO: 569303 - RNA, 19 nt, Homo sapiens
  misc_RNA (1)...(19): siRNA sense strand
ucccggaggucaucaagau

SEQ ID NO: 569304 - RNA, 19 nt, Homo sapiens
  misc_RNA (1)...(19): siRNA sense strand
ggacagugcagggaagcaa

SEQ ID NO: 569305 - RNA, 19 nt, Homo sapiens
  misc_RNA (1)...(19): siRNA sense strand
ggagguggaggcuuugauc

SEQ ID NO: 569306 - RNA, 19 nt, Homo sapiens
  misc_RNA (1)...(19): siRNA sense strand
gcaggucaccacguacuug

SEQ ID NO: 569307 - RNA, 19 nt, Homo sapiens
  misc_RNA (1)...(19): siRNA sense strand
agaaggaggagaccuggaa

SEQ ID NO: 569308 - RNA, 19 nt, Homo sapiens
  misc_RNA (1)...(19): siRNA sense strand
ucgugugggugccuuguuu

SEQ ID NO: 569309 - RNA, 19 nt, Homo sapiens
  misc_RNA (1)...(19): siRNA sense strand
ccacaucugcuucgucagu

SEQ ID NO: 569310 - RNA, 19 nt, Homo sapiens
  misc_RNA (1)...(19): siRNA sense strand
gcaccaguacuuccacauc

SEQ ID NO: 569311 - RNA, 19 nt, Homo sapiens
  misc_RNA (1)...(19): siRNA sense strand
gaugacaccucucaacaaa

SEQ ID NO: 569312 - RNA, 19 nt, Homo sapiens
  misc_RNA (1)...(19): siRNA sense strand
uaaaguugcucaucaaguu

SEQ ID NO: 569313 - RNA, 19 nt, Homo sapiens
  misc_RNA (1)...(19): siRNA sense strand
ggaagcaacugcagagaca

SEQ ID NO: 569314 - RNA, 19 nt, Homo sapiens
  misc_RNA (1)...(19): siRNA sense strand
ccaaggagcuggacacagu

SEQ ID NO: 569315 - RNA, 19 nt, Homo sapiens
  misc_RNA (1)...(19): siRNA sense strand
caacgagucugccgaagga

SEQ ID NO: 569316 - RNA, 19 nt, Homo sapiens
  misc_RNA (1)...(19): siRNA sense strand
gaucaagaccgcugucauu

SEQ ID NO: 569317 - RNA, 19 nt, Homo sapiens
  misc_RNA (1)...(19): siRNA sense strand
caaagcaaauggagaaugg

SEQ ID NO: 569318 - RNA, 19 nt, Homo sapiens
  misc_RNA (1)...(19): siRNA sense strand
gggcagaccucuucuacuc

SEQ ID NO: 569319 - RNA, 19 nt, Homo sapiens
  misc_RNA (1)...(19): siRNA sense strand
ccacguacauuaacaugau

SEQ ID NO: 569320 - RNA, 19 nt, Homo sapiens
  misc_RNA (1)...(19): siRNA sense strand
gaccgaggcuacauucaga

SEQ ID NO: 569321 - RNA, 19 nt, Homo sapiens
  misc_RNA (1)...(19): siRNA sense strand
uggagaggcucaaggagua

SEQ ID NO: 569322 - RNA, 19 nt, Homo sapiens
  misc_RNA (1)...(19): siRNA sense strand
gcagaccucuucuacucuu

SEQ ID NO: 569323 - RNA, 19 nt, Homo sapiens
  misc_RNA (1)...(19): siRNA sense strand
gaaggaagcaaagcaaaug

SEQ ID NO: 569324 - RNA, 19 nt, Homo sapiens
  misc_RNA (1)...(19): siRNA sense strand
ggccgcagaucuuaaaguu

SEQ ID NO: 569325 - RNA, 19 nt, Homo sapiens
  misc_RNA (1)...(19): siRNA sense strand
gaccuccgcuucaagauca

SEQ ID NO: 569326 - RNA, 19 nt, Homo sapiens
  misc_RNA (1)...(19): siRNA sense strand
aaggagaaauccaggagua

SEQ ID NO: 569327 - RNA, 19 nt, Homo sapiens
  misc_RNA (1)...(19): siRNA sense strand
caucugaaauggaaaccaa

SEQ ID NO: 569328 - RNA, 19 nt, Homo sapiens
  misc_RNA (1)...(19): siRNA sense strand
gcaacugcaucguucuguu

SEQ ID NO: 569329 - RNA, 19 nt, Homo sapiens
  misc_RNA (1)...(19): siRNA sense strand
ggaaagaagucggggcaua

SEQ ID NO: 569330 - RNA, 19 nt, Homo sapiens
  misc_RNA (1)...(19): siRNA sense strand
ugaacgaaauucucaaugg

SEQ ID NO: 569331 - RNA, 19 nt, Homo sapiens
  misc_RNA (1)...(19): siRNA sense strand
caagcuagaccaugaaugu

SEQ ID NO: 569332 - RNA, 19 nt, Homo sapiens
  misc_RNA (1)...(19): siRNA sense strand
guacucggaugaagaaguc

SEQ ID NO: 569333 - RNA, 19 nt, Homo sapiens
  misc_RNA (1)...(19): siRNA sense strand
gagaggaccuggacuucgu

SEQ ID NO: 569334 - RNA, 19 nt, Homo sapiens
  misc_RNA (1)...(19): siRNA sense strand
caacugcaucguucuguuu

SEQ ID NO: 569335 - RNA, 19 nt, Homo sapiens
  misc_RNA (1)...(19): siRNA sense strand
ggacuuggccacguacauu

SEQ ID NO: 569336 - RNA, 19 nt, Homo sapiens
  misc_RNA (1)...(19): siRNA sense strand
caacagcaccgcagaacug

SEQ ID NO: 569337 - RNA, 19 nt, Homo sapiens
  misc_RNA (1)...(19): siRNA sense strand
ggaaggaagcaaagcaaau

SEQ ID NO: 569338 - RNA, 19 nt, Homo sapiens
  misc_RNA (1)...(19): siRNA sense strand
gaucaaagugcuaaagcuu

SEQ ID NO: 569339 - RNA, 19 nt, Homo sapiens
  misc_RNA (1)...(19): siRNA sense strand
ugaaggugcugaagaaguc

SEQ ID NO: 569340 - RNA, 19 nt, Homo sapiens
  misc_RNA (1)...(19): siRNA sense strand
gcagagaggucuuuucuac

SEQ ID NO: 569341 - RNA, 19 nt, Homo sapiens
  misc_RNA (1)...(19): siRNA sense strand
ggaucuuucucucccauga

SEQ ID NO: 569342 - RNA, 19 nt, Homo sapiens
  misc_RNA (1)...(19): siRNA sense strand
cgaugaagaccaagacgua

SEQ ID NO: 569343 - RNA, 19 nt, Homo sapiens
  misc_RNA (1)...(19): siRNA sense strand
gcaucaacaucgccaagau

SEQ ID NO: 569344 - RNA, 19 nt, Homo sapiens
  misc_RNA (1)...(19): siRNA sense strand
gcugguagcccuagugugu

SEQ ID NO: 569345 - RNA, 19 nt, Homo sapiens
  misc_RNA (1)...(19): siRNA sense strand
agaaccagaaggccuauua

SEQ ID NO: 569346 - RNA, 19 nt, Homo sapiens
  misc_RNA (1)...(19): siRNA sense strand
ggacucaggagcacacgaa

SEQ ID NO: 569347 - RNA, 19 nt, Homo sapiens
  misc_RNA (1)...(19): siRNA sense strand
ccugggagcuggcauucaa

SEQ ID NO: 569348 - RNA, 19 nt, Homo sapiens
  misc_RNA (1)...(19): siRNA sense strand
cgaaagagaguuccaaggu

SEQ ID NO: 569349 - RNA, 19 nt, Homo sapiens
  misc_RNA (1)...(19): siRNA sense strand
uggcugagauggacaaagu

SEQ ID NO: 569350 - RNA, 19 nt, Homo sapiens
  misc_RNA (1)...(19): siRNA sense strand
gaagucugccuaccuguca

SEQ ID NO: 569351 - RNA, 19 nt, Homo sapiens
  misc_RNA (1)...(19): siRNA sense strand
cauugcaggucaccacgua

SEQ ID NO: 569352 - RNA, 19 nt, Homo sapiens
  misc_RNA (1)...(19): siRNA sense strand
cugacaagcuagaccauga

SEQ ID NO: 569353 - RNA, 19 nt, Homo sapiens
  misc_RNA (1)...(19): siRNA sense strand
ucuguuugcugcccuguuu

SEQ ID NO: 569354 - RNA, 19 nt, Homo sapiens
  misc_RNA (1)...(19): siRNA sense strand
gaccuggacuucguucuca

SEQ ID NO: 569355 - RNA, 19 nt, Homo sapiens
  misc_RNA (1)...(19): siRNA sense strand
gcaaagacaaucggaucaa

SEQ ID NO: 569356 - RNA, 19 nt, Homo sapiens
  misc_RNA (1)...(19): siRNA sense strand
gaaauucucaaugggauca

SEQ ID NO: 569357 - RNA, 19 nt, Homo sapiens
  misc_RNA (1)...(19): siRNA sense strand
caaagacaaucggaucaag

SEQ ID NO: 569358 - RNA, 19 nt, Homo sapiens
  misc_RNA (1)...(19): siRNA sense strand
cucaugagcuucuucuuca

SEQ ID NO: 569359 - RNA, 19 nt, Homo sapiens
  misc_RNA (1)...(19): siRNA sense strand
aaggagagaucaucaucga

SEQ ID NO: 569360 - RNA, 19 nt, Homo sapiens
  misc_RNA (1)...(19): siRNA sense strand
gagcugaaggugcugaaga

SEQ ID NO: 569361 - RNA, 19 nt, Homo sapiens
  misc_RNA (1)...(19): siRNA sense strand
uggaaugucacguggaaua

SEQ ID NO: 569362 - RNA, 19 nt, Homo sapiens
  misc_RNA (1)...(19): siRNA sense strand
ggaaggcccuggugaucac

SEQ ID NO: 569363 - RNA, 19 nt, Homo sapiens
  misc_RNA (1)...(19): siRNA sense strand
ccacgcugcuugcuaccuu

SEQ ID NO: 569364 - RNA, 19 nt, Homo sapiens
  misc_RNA (1)...(19): siRNA sense strand
gcgagugucucccucaaac

SEQ ID NO: 569365 - RNA, 19 nt, Homo sapiens
  misc_RNA (1)...(19): siRNA sense strand
ggacacgucggaacaaguc

SEQ ID NO: 569366 - RNA, 19 nt, Homo sapiens
  misc_RNA (1)...(19): siRNA sense strand
gaguggaauuccggaacua

SEQ ID NO: 569367 - RNA, 19 nt, Homo sapiens
  misc_RNA (1)...(19): siRNA sense strand
caaggaguauucagagacu

SEQ ID NO: 569368 - RNA, 19 nt, Homo sapiens
  misc_RNA (1)...(19): siRNA sense strand
cacaagggaucgccguguu

SEQ ID NO: 569369 - RNA, 19 nt, Homo sapiens
  misc_RNA (1)...(19): siRNA sense strand
gcgcuggcuuccaacuauu

SEQ ID NO: 569370 - RNA, 19 nt, Homo sapiens
  misc_RNA (1)...(19): siRNA sense strand
guacugggacuacaugaag

SEQ ID NO: 569371 - RNA, 19 nt, Homo sapiens
  misc_RNA (1)...(19): siRNA sense strand
gcaaagcaaauggagaaug

SEQ ID NO: 569372 - RNA, 19 nt, Homo sapiens
  misc_RNA (1)...(19): siRNA sense strand
aagcaaagcaaauggagaa

SEQ ID NO: 569373 - RNA, 19 nt, Homo sapiens
  misc_RNA (1)...(19): siRNA sense strand
gcagguggacgucaucauc

SEQ ID NO: 569374 - RNA, 19 nt, Homo sapiens
  misc_RNA (1)...(19): siRNA sense strand
gacuuggccacguacauua

SEQ ID NO: 569375 - RNA, 19 nt, Homo sapiens
  misc_RNA (1)...(19): siRNA sense strand
ucauggacuuggccacgua

SEQ ID NO: 569376 - RNA, 19 nt, Homo sapiens
  misc_RNA (1)...(19): siRNA sense strand
gaaggaaugcgccaagacu

SEQ ID NO: 569377 - RNA, 19 nt, Homo sapiens
  misc_RNA (1)...(19): siRNA sense strand
cagggaucaugcucacuuu

SEQ ID NO: 569378 - RNA, 19 nt, Homo sapiens
  misc_RNA (1)...(19): siRNA sense strand
ccaguacucggaugaagaa

SEQ ID NO: 569379 - RNA, 19 nt, Homo sapiens
  misc_RNA (1)...(19): siRNA sense strand
ggucaagcuuuccguguac

SEQ ID NO: 569380 - RNA, 19 nt, Homo sapiens
  misc_RNA (1)...(19): siRNA sense strand
uaaagaacuggaagaagga

SEQ ID NO: 569381 - RNA, 19 nt, Homo sapiens
  misc_RNA (1)...(19): siRNA sense strand
cucagugucuuacucauug

SEQ ID NO: 569382 - RNA, 19 nt, Homo sapiens
  misc_RNA (1)...(19): siRNA sense strand
ucaagcugaugaacgaaau

SEQ ID NO: 569383 - RNA, 19 nt, Homo sapiens
  misc_RNA (1)...(19): siRNA sense strand
ggaucaugcucacuuucug

SEQ ID NO: 569384 - RNA, 19 nt, Homo sapiens
  misc_RNA (1)...(19): siRNA sense strand
cagcagcuccuccuccuau

SEQ ID NO: 569385 - RNA, 19 nt, Homo sapiens
  misc_RNA (1)...(19): siRNA sense strand
gcacagcaugagcuacuug

SEQ ID NO: 569386 - RNA, 19 nt, Homo sapiens
  misc_RNA (1)...(19): siRNA sense strand
ggaucaaagugcuaaagcu

SEQ ID NO: 569387 - RNA, 19 nt, Homo sapiens
  misc_RNA (1)...(19): siRNA sense strand
gaugaacgaaauucucaau

SEQ ID NO: 569388 - RNA, 19 nt, Homo sapiens
  misc_RNA (1)...(19): siRNA sense strand
gcccgucaaugcugugaug

SEQ ID NO: 569389 - RNA, 19 nt, Homo sapiens
  misc_RNA (1)...(19): siRNA sense strand
augaggagguggaggcuuu

SEQ ID NO: 569390 - RNA, 19 nt, Homo sapiens
  misc_RNA (1)...(19): siRNA sense strand
ccaagguggaugcgaauga

SEQ ID NO: 569391 - RNA, 19 nt, Homo sapiens
  misc_RNA (1)...(19): siRNA sense strand
ucaaacgccugaggaucuu

SEQ ID NO: 569392 - RNA, 19 nt, Homo sapiens
  misc_RNA (1)...(19): siRNA sense strand
ggucagcccaacucucuug

SEQ ID NO: 569393 - RNA, 19 nt, Homo sapiens
  misc_RNA (1)...(19): siRNA sense strand
gaccaugaaugugcagaag

SEQ ID NO: 569394 - RNA, 19 nt, Homo sapiens
  misc_RNA (1)...(19): siRNA sense strand
auuggugccugcaucguua

SEQ ID NO: 569395 - RNA, 19 nt, Homo sapiens
  misc_RNA (1)...(19): siRNA sense strand
gggaaggaagcaaagcaaa

SEQ ID NO: 569396 - RNA, 19 nt, Homo sapiens
  misc_RNA (1)...(19): siRNA sense strand
gggcccuacuuccucauga

SEQ ID NO: 569397 - RNA, 19 nt, Homo sapiens
  misc_RNA (1)...(19): siRNA sense strand
guucaugggcucccuguuc

SEQ ID NO: 569398 - RNA, 19 nt, Homo sapiens
  misc_RNA (1)...(19): siRNA sense strand
cagggcaggucaagcuuuc

SEQ ID NO: 569399 - RNA, 19 nt, Homo sapiens
  misc_RNA (1)...(19): siRNA sense strand
ugauggcgaugaagaccaa

SEQ ID NO: 569400 - RNA, 19 nt, Homo sapiens
  misc_RNA (1)...(19): siRNA sense strand
gagauugucaaccucaugu

SEQ ID NO: 569401 - RNA, 19 nt, Homo sapiens
  misc_RNA (1)...(19): siRNA sense strand
acaccgugcugcuguuugu

SEQ ID NO: 569402 - RNA, 19 nt, Homo sapiens
  misc_RNA (1)...(19): siRNA sense strand
ucuuaaaguugcucaucaa

SEQ ID NO: 569403 - RNA, 19 nt, Homo sapiens
  misc_RNA (1)...(19): siRNA sense strand
ucccggaggucaucaagau

SEQ ID NO: 569404 - RNA, 19 nt, Homo sapiens
  misc_RNA (1)...(19): siRNA sense strand
ggacagugcagggaagcaa

SEQ ID NO: 569405 - RNA, 19 nt, Homo sapiens
  misc_RNA (1)...(19): siRNA sense strand
ggagguggaggcuuugauc

SEQ ID NO: 569406 - RNA, 19 nt, Homo sapiens
  misc_RNA (1)...(19): siRNA sense strand
gcaggucaccacguacuug

SEQ ID NO: 569407 - RNA, 19 nt, Homo sapiens
  misc_RNA (1)...(19): siRNA sense strand
agaaggaggagaccuggaa

SEQ ID NO: 569408 - RNA, 19 nt, Homo sapiens
  misc_RNA (1)...(19): siRNA sense strand
ucgugugggugccuuguuu

SEQ ID NO: 569409 - RNA, 19 nt, Homo sapiens
  misc_RNA (1)...(19): siRNA sense strand
ccacaucugcuucgucagu

SEQ ID NO: 569410 - RNA, 19 nt, Homo sapiens
  misc_RNA (1)...(19): siRNA sense strand
gcaccaguacuuccacauc

SEQ ID NO: 569411 - RNA, 19 nt, Homo sapiens
  misc_RNA (1)...(19): siRNA sense strand
gaugacaccucucaacaaa

SEQ ID NO: 569412 - RNA, 19 nt, Homo sapiens
  misc_RNA (1)...(19): siRNA sense strand
uaaaguugcucaucaaguu

SEQ ID NO: 569413 - RNA, 19 nt, Homo sapiens
  misc_RNA (1)...(19): siRNA sense strand
ggaagcaacugcagagaca

SEQ ID NO: 569414 - RNA, 19 nt, Homo sapiens
  misc_RNA (1)...(19): siRNA sense strand
ccaaggagcuggacacagu

SEQ ID NO: 569415 - RNA, 19 nt, Homo sapiens
  misc_RNA (1)...(19): siRNA sense strand
caacgagucugccgaagga

SEQ ID NO: 569416 - RNA, 19 nt, Homo sapiens
  misc_RNA (1)...(19): siRNA sense strand
gaucaagaccgcugucauu

SEQ ID NO: 569417 - RNA, 19 nt, Homo sapiens
  misc_RNA (1)...(19): siRNA sense strand
caaagcaaauggagaaugg

SEQ ID NO: 569418 - RNA, 19 nt, Homo sapiens
  misc_RNA (1)...(19): siRNA sense strand
gggcagaccucuucuacuc

SEQ ID NO: 569419 - RNA, 19 nt, Homo sapiens
  misc_RNA (1)...(19): siRNA sense strand
ccacguacauuaacaugau

SEQ ID NO: 569420 - RNA, 19 nt, Homo sapiens
  misc_RNA (1)...(19): siRNA sense strand
gaccgaggcuacauucaga

SEQ ID NO: 569421 - RNA, 19 nt, Homo sapiens
  misc_RNA (1)...(19): siRNA sense strand
uggagaggcucaaggagua

SEQ ID NO: 569422 - RNA, 19 nt, Homo sapiens
  misc_RNA (1)...(19): siRNA sense strand
gcagaccucuucuacucuu

SEQ ID NO: 569423 - RNA, 19 nt, Homo sapiens
  misc_RNA (1)...(19): siRNA sense strand
gaaggaagcaaagcaaaug

SEQ ID NO: 569424 - RNA, 19 nt, Homo sapiens
  misc_RNA (1)...(19): siRNA sense strand
ggccgcagaucuuaaaguu

SEQ ID NO: 569425 - RNA, 19 nt, Homo sapiens
  misc_RNA (1)...(19): siRNA sense strand
gaccuccgcuucaagauca

SEQ ID NO: 569426 - RNA, 19 nt, Homo sapiens
  misc_RNA (1)...(19): siRNA sense strand
aaggagaaauccaggagua

SEQ ID NO: 569427 - RNA, 19 nt, Homo sapiens
  misc_RNA (1)...(19): siRNA sense strand
caucugaaauggaaaccaa

SEQ ID NO: 569428 - RNA, 19 nt, Homo sapiens
  misc_RNA (1)...(19): siRNA sense strand
gcaacugcaucguucuguu

SEQ ID NO: 569429 - RNA, 19 nt, Homo sapiens
  misc_RNA (1)...(19): siRNA sense strand
ggaaagaagucggggcaua

SEQ ID NO: 569430 - RNA, 19 nt, Homo sapiens
  misc_RNA (1)...(19): siRNA sense strand
ugaacgaaauucucaaugg

SEQ ID NO: 569431 - RNA, 19 nt, Homo sapiens
  misc_RNA (1)...(19): siRNA sense strand
caagcuagaccaugaaugu

SEQ ID NO: 569432 - RNA, 19 nt, Homo sapiens
  misc_RNA (1)...(19): siRNA sense strand
guacucggaugaagaaguc

SEQ ID NO: 569433 - RNA, 19 nt, Homo sapiens
  misc_RNA (1)...(19): siRNA sense strand
gagaggaccuggacuucgu

SEQ ID NO: 569434 - RNA, 19 nt, Homo sapiens
  misc_RNA (1)...(19): siRNA sense strand
caacugcaucguucuguuu

SEQ ID NO: 569435 - RNA, 19 nt, Homo sapiens
  misc_RNA (1)...(19): siRNA sense strand
ggacuuggccacguacauu

SEQ ID NO: 569436 - RNA, 19 nt, Homo sapiens
  misc_RNA (1)...(19): siRNA sense strand
caacagcaccgcagaacug

SEQ ID NO: 569437 - RNA, 19 nt, Homo sapiens
  misc_RNA (1)...(19): siRNA sense strand
ggaaggaagcaaagcaaau

SEQ ID NO: 569438 - RNA, 19 nt, Homo sapiens
  misc_RNA (1)...(19): siRNA sense strand
gaucaaagugcuaaagcuu

SEQ ID NO: 569439 - RNA, 19 nt, Homo sapiens
  misc_RNA (1)...(19): siRNA sense strand
ugaaggugcugaagaaguc

SEQ ID NO: 569440 - RNA, 19 nt, Homo sapiens
  misc_RNA (1)...(19): siRNA sense strand
gcagagaggucuuuucuac

SEQ ID NO: 569441 - RNA, 19 nt, Homo sapiens
  misc_RNA (1)...(19): siRNA sense strand
ggaucuuucucucccauga

SEQ ID NO: 569442 - RNA, 19 nt, Homo sapiens
  misc_RNA (1)...(19): siRNA sense strand
cgaugaagaccaagacgua

SEQ ID NO: 569443 - RNA, 19 nt, Homo sapiens
  misc_RNA (1)...(19): siRNA sense strand
gcaucaacaucgccaagau

SEQ ID NO: 569444 - RNA, 19 nt, Homo sapiens
  misc_RNA (1)...(19): siRNA sense strand
gcugguagcccuagugugu

SEQ ID NO: 569445 - RNA, 19 nt, Homo sapiens
  misc_RNA (1)...(19): siRNA sense strand
agaaccagaaggccuauua

SEQ ID NO: 569446 - RNA, 19 nt, Homo sapiens
  misc_RNA (1)...(19): siRNA sense strand
ggacucaggagcacacgaa

SEQ ID NO: 569447 - RNA, 19 nt, Homo sapiens
  misc_RNA (1)...(19): siRNA sense strand
ccugggagcuggcauucaa

SEQ ID NO: 569448 - RNA, 19 nt, Homo sapiens
  misc_RNA (1)...(19): siRNA sense strand
cgaaagagaguuccaaggu

SEQ ID NO: 569449 - RNA, 19 nt, Homo sapiens
  misc_RNA (1)...(19): siRNA sense strand
uggcugagauggacaaagu

SEQ ID NO: 569450 - RNA, 19 nt, Homo sapiens
  misc_RNA (1)...(19): siRNA sense strand
gaagucugccuaccuguca

SEQ ID NO: 569451 - RNA, 19 nt, Homo sapiens
  misc_RNA (1)...(19): siRNA sense strand
cauugcaggucaccacgua

SEQ ID NO: 569452 - RNA, 19 nt, Homo sapiens
  misc_RNA (1)...(19): siRNA sense strand
cugacaagcuagaccauga

SEQ ID NO: 569453 - RNA, 19 nt, Homo sapiens
  misc_RNA (1)...(19): siRNA sense strand
ucuguuugcugcccuguuu

SEQ ID NO: 569454 - RNA, 19 nt, Homo sapiens
  misc_RNA (1)...(19): siRNA sense strand
gaccuggacuucguucuca

SEQ ID NO: 569455 - RNA, 19 nt, Homo sapiens
  misc_RNA (1)...(19): siRNA sense strand
gcaaagacaaucggaucaa

SEQ ID NO: 569456 - RNA, 19 nt, Homo sapiens
  misc_RNA (1)...(19): siRNA sense strand
gaaauucucaaugggauca

SEQ ID NO: 569457 - RNA, 19 nt, Homo sapiens
  misc_RNA (1)...(19): siRNA sense strand
caaagacaaucggaucaag

SEQ ID NO: 569458 - RNA, 19 nt, Homo sapiens
  misc_RNA (1)...(19): siRNA sense strand
cucaugagcuucuucuuca

SEQ ID NO: 569459 - RNA, 19 nt, Homo sapiens
  misc_RNA (1)...(19): siRNA sense strand
aaggagagaucaucaucga

SEQ ID NO: 569460 - RNA, 19 nt, Homo sapiens
  misc_RNA (1)...(19): siRNA sense strand
gagcugaaggugcugaaga

SEQ ID NO: 569461 - RNA, 19 nt, Homo sapiens
  misc_RNA (1)...(19): siRNA sense strand
uggaaugucacguggaaua

SEQ ID NO: 569462 - RNA, 19 nt, Homo sapiens
  misc_RNA (1)...(19): siRNA sense strand
ggaaggcccuggugaucac

SEQ ID NO: 569463 - RNA, 19 nt, Homo sapiens
  misc_RNA (1)...(19): siRNA sense strand
ccacgcugcuugcuaccuu

SEQ ID NO: 569464 - RNA, 19 nt, Homo sapiens
  misc_RNA (1)...(19): siRNA sense strand
gcgagugucucccucaaac

SEQ ID NO: 569465 - RNA, 19 nt, Homo sapiens
  misc_RNA (1)...(19): siRNA sense strand
ggacacgucggaacaaguc

SEQ ID NO: 569466 - RNA, 19 nt, Homo sapiens
  misc_RNA (1)...(19): siRNA sense strand
gaguggaauuccggaacua

SEQ ID NO: 569467 - RNA, 19 nt, Homo sapiens
  misc_RNA (1)...(19): siRNA sense strand
caaggaguauucagagacu

SEQ ID NO: 569468 - RNA, 19 nt, Homo sapiens
  misc_RNA (1)...(19): siRNA sense strand
cacaagggaucgccguguu

SEQ ID NO: 569469 - RNA, 19 nt, Homo sapiens
  misc_RNA (1)...(19): siRNA sense strand
gcgcuggcuuccaacuauu

SEQ ID NO: 569470 - RNA, 19 nt, Homo sapiens
  misc_RNA (1)...(19): siRNA sense strand
guacugggacuacaugaag

SEQ ID NO: 569471 - RNA, 19 nt, Homo sapiens
  misc_RNA (1)...(19): siRNA sense strand
gcaaagcaaauggagaaug

SEQ ID NO: 569472 - RNA, 19 nt, Homo sapiens
  misc_RNA (1)...(19): siRNA sense strand
aagcaaagcaaauggagaa

SEQ ID NO: 569473 - RNA, 19 nt, Homo sapiens
  misc_RNA (1)...(19): siRNA sense strand
gcagguggacgucaucauc

SEQ ID NO: 569474 - RNA, 19 nt, Homo sapiens
  misc_RNA (1)...(19): siRNA sense strand
gacuuggccacguacauua

SEQ ID NO: 569475 - RNA, 19 nt, Homo sapiens
  misc_RNA (1)...(19): siRNA sense strand
ucauggacuuggccacgua

SEQ ID NO: 569476 - RNA, 19 nt, Homo sapiens
  misc_RNA (1)...(19): siRNA sense strand
gaaggaaugcgccaagacu

SEQ ID NO: 569477 - RNA, 19 nt, Homo sapiens
  misc_RNA (1)...(19): siRNA sense strand
cagggaucaugcucacuuu

SEQ ID NO: 569478 - RNA, 19 nt, Homo sapiens
  misc_RNA (1)...(19): siRNA sense strand
ccaguacucggaugaagaa

SEQ ID NO: 569479 - RNA, 19 nt, Homo sapiens
  misc_RNA (1)...(19): siRNA sense strand
ggucaagcuuuccguguac

SEQ ID NO: 569480 - RNA, 19 nt, Homo sapiens
  misc_RNA (1)...(19): siRNA sense strand
uaaagaacuggaagaagga

SEQ ID NO: 569481 - RNA, 19 nt, Homo sapiens
  misc_RNA (1)...(19): siRNA sense strand
cucagugucuuacucauug

SEQ ID NO: 569482 - RNA, 19 nt, Homo sapiens
  misc_RNA (1)...(19): siRNA sense strand
ucaagcugaugaacgaaau

SEQ ID NO: 569483 - RNA, 19 nt, Homo sapiens
  misc_RNA (1)...(19): siRNA sense strand
ggaucaugcucacuuucug

SEQ ID NO: 569484 - RNA, 19 nt, Homo sapiens
  misc_RNA (1)...(19): siRNA sense strand
cagcagcuccuccuccuau

SEQ ID NO: 569485 - RNA, 19 nt, Homo sapiens
  misc_RNA (1)...(19): siRNA sense strand
gcacagcaugagcuacuug

SEQ ID NO: 569486 - RNA, 19 nt, Homo sapiens
  misc_RNA (1)...(19): siRNA sense strand
ggaucaaagugcuaaagcu

SEQ ID NO: 569487 - RNA, 19 nt, Homo sapiens
  misc_RNA (1)...(19): siRNA sense strand
gaugaacgaaauucucaau

SEQ ID NO: 569488 - RNA, 19 nt, Homo sapiens
  misc_RNA (1)...(19): siRNA sense strand
gcccgucaaugcugugaug

SEQ ID NO: 569489 - RNA, 19 nt, Homo sapiens
  misc_RNA (1)...(19): siRNA sense strand
augaggagguggaggcuuu

SEQ ID NO: 569490 - RNA, 19 nt, Homo sapiens
  misc_RNA (1)...(19): siRNA sense strand
ccaagguggaugcgaauga

SEQ ID NO: 569491 - RNA, 19 nt, Homo sapiens
  misc_RNA (1)...(19): siRNA sense strand
ucaaacgccugaggaucuu

SEQ ID NO: 569492 - RNA, 19 nt, Homo sapiens
  misc_RNA (1)...(19): siRNA sense strand
ggucagcccaacucucuug

SEQ ID NO: 569493 - RNA, 19 nt, Homo sapiens
  misc_RNA (1)...(19): siRNA sense strand
gaccaugaaugugcagaag

SEQ ID NO: 569494 - RNA, 19 nt, Homo sapiens
  misc_RNA (1)...(19): siRNA sense strand
auuggugccugcaucguua

SEQ ID NO: 569495 - RNA, 19 nt, Homo sapiens
  misc_RNA (1)...(19): siRNA sense strand
gggaaggaagcaaagcaaa

SEQ ID NO: 569496 - RNA, 19 nt, Homo sapiens
  misc_RNA (1)...(19): siRNA sense strand
gggcccuacuuccucauga

SEQ ID NO: 569497 - RNA, 19 nt, Homo sapiens
  misc_RNA (1)...(19): siRNA sense strand
guucaugggcucccuguuc

SEQ ID NO: 569498 - RNA, 19 nt, Homo sapiens
  misc_RNA (1)...(19): siRNA sense strand
cagggcaggucaagcuuuc

SEQ ID NO: 569499 - RNA, 19 nt, Homo sapiens
  misc_RNA (1)...(19): siRNA sense strand
ugauggcgaugaagaccaa

SEQ ID NO: 569500 - RNA, 19 nt, Homo sapiens
  misc_RNA (1)...(19): siRNA sense strand
gagauugucaaccucaugu

SEQ ID NO: 569501 - RNA, 19 nt, Homo sapiens
  misc_RNA (1)...(19): siRNA sense strand
acaccgugcugcuguuugu

SEQ ID NO: 569502 - RNA, 19 nt, Homo sapiens
  misc_RNA (1)...(19): siRNA sense strand
ucuuaaaguugcucaucaa

SEQ ID NO: 569503 - RNA, 19 nt, Homo sapiens
  misc_RNA (1)...(19): siRNA sense strand
ucccggaggucaucaagau

SEQ ID NO: 569504 - RNA, 19 nt, Homo sapiens
  misc_RNA (1)...(19): siRNA sense strand
ggacagugcagggaagcaa

SEQ ID NO: 569505 - RNA, 19 nt, Homo sapiens
  misc_RNA (1)...(19): siRNA sense strand
ggagguggaggcuuugauc

SEQ ID NO: 569506 - RNA, 19 nt, Homo sapiens
  misc_RNA (1)...(19): siRNA sense strand
gcaggucaccacguacuug

SEQ ID NO: 569507 - RNA, 19 nt, Homo sapiens
  misc_RNA (1)...(19): siRNA sense strand
agaaggaggagaccuggaa

SEQ ID NO: 569508 - RNA, 19 nt, Homo sapiens
  misc_RNA (1)...(19): siRNA sense strand
ucgugugggugccuuguuu

SEQ ID NO: 569509 - RNA, 19 nt, Homo sapiens
  misc_RNA (1)...(19): siRNA sense strand
ccacaucugcuucgucagu

SEQ ID NO: 569510 - RNA, 19 nt, Homo sapiens
  misc_RNA (1)...(19): siRNA sense strand
gcaccaguacuuccacauc

SEQ ID NO: 569511 - RNA, 19 nt, Homo sapiens
  misc_RNA (1)...(19): siRNA sense strand
gaugacaccucucaacaaa

SEQ ID NO: 569512 - RNA, 19 nt, Homo sapiens
  misc_RNA (1)...(19): siRNA sense strand
uaaaguugcucaucaaguu

SEQ ID NO: 569513 - RNA, 19 nt, Homo sapiens
  misc_RNA (1)...(19): siRNA sense strand
ggaagcaacugcagagaca

SEQ ID NO: 569514 - RNA, 19 nt, Homo sapiens
  misc_RNA (1)...(19): siRNA sense strand
ccaaggagcuggacacagu

SEQ ID NO: 569515 - RNA, 19 nt, Homo sapiens
  misc_RNA (1)...(19): siRNA sense strand
caacgagucugccgaagga

SEQ ID NO: 569516 - RNA, 19 nt, Homo sapiens
  misc_RNA (1)...(19): siRNA sense strand
gaucaagaccgcugucauu

SEQ ID NO: 569517 - RNA, 19 nt, Homo sapiens
  misc_RNA (1)...(19): siRNA sense strand
caaagcaaauggagaaugg

SEQ ID NO: 569518 - RNA, 19 nt, Homo sapiens
  misc_RNA (1)...(19): siRNA sense strand
gggcagaccucuucuacuc

SEQ ID NO: 569519 - RNA, 19 nt, Homo sapiens
  misc_RNA (1)...(19): siRNA sense strand
ccacguacauuaacaugau

SEQ ID NO: 569520 - RNA, 19 nt, Homo sapiens
  misc_RNA (1)...(19): siRNA sense strand
gaccgaggcuacauucaga

SEQ ID NO: 569521 - RNA, 19 nt, Homo sapiens
  misc_RNA (1)...(19): siRNA sense strand
uggagaggcucaaggagua

SEQ ID NO: 569522 - RNA, 19 nt, Homo sapiens
  misc_RNA (1)...(19): siRNA sense strand
gcagaccucuucuacucuu

SEQ ID NO: 569523 - RNA, 19 nt, Homo sapiens
  misc_RNA (1)...(19): siRNA sense strand
gaaggaagcaaagcaaaug

SEQ ID NO: 569524 - RNA, 19 nt, Homo sapiens
  misc_RNA (1)...(19): siRNA sense strand
ggccgcagaucuuaaaguu

SEQ ID NO: 569525 - RNA, 19 nt, Homo sapiens
  misc_RNA (1)...(19): siRNA sense strand
gaccuccgcuucaagauca

SEQ ID NO: 569526 - RNA, 19 nt, Homo sapiens
  misc_RNA (1)...(19): siRNA sense strand
aaggagaaauccaggagua

SEQ ID NO: 569527 - RNA, 19 nt, Homo sapiens
  misc_RNA (1)...(19): siRNA sense strand
caucugaaauggaaaccaa

SEQ ID NO: 569528 - RNA, 19 nt, Homo sapiens
  misc_RNA (1)...(19): siRNA sense strand
gcaacugcaucguucuguu

SEQ ID NO: 569529 - RNA, 19 nt, Homo sapiens
  misc_RNA (1)...(19): siRNA sense strand
ggaaagaagucggggcaua

SEQ ID NO: 569530 - RNA, 19 nt, Homo sapiens
  misc_RNA (1)...(19): siRNA sense strand
ugaacgaaauucucaaugg

SEQ ID NO: 569531 - RNA, 19 nt, Homo sapiens
  misc_RNA (1)...(19): siRNA sense strand
caagcuagaccaugaaugu

SEQ ID NO: 569532 - RNA, 19 nt, Homo sapiens
  misc_RNA (1)...(19): siRNA sense strand
guacucggaugaagaaguc

SEQ ID NO: 569533 - RNA, 19 nt, Homo sapiens
  misc_RNA (1)...(19): siRNA sense strand
gagaggaccuggacuucgu

SEQ ID NO: 569534 - RNA, 19 nt, Homo sapiens
  misc_RNA (1)...(19): siRNA sense strand
caacugcaucguucuguuu

SEQ ID NO: 569535 - RNA, 19 nt, Homo sapiens
  misc_RNA (1)...(19): siRNA sense strand
ggacuuggccacguacauu

SEQ ID NO: 569536 - RNA, 19 nt, Homo sapiens
  misc_RNA (1)...(19): siRNA sense strand
caacagcaccgcagaacug

SEQ ID NO: 569537 - RNA, 19 nt, Homo sapiens
  misc_RNA (1)...(19): siRNA sense strand
ggaaggaagcaaagcaaau

SEQ ID NO: 569538 - RNA, 19 nt, Homo sapiens
  misc_RNA (1)...(19): siRNA sense strand
gaucaaagugcuaaagcuu

SEQ ID NO: 569539 - RNA, 19 nt, Homo sapiens
  misc_RNA (1)...(19): siRNA sense strand
ugaaggugcugaagaaguc

SEQ ID NO: 569540 - RNA, 19 nt, Homo sapiens
  misc_RNA (1)...(19): siRNA sense strand
gcagagaggucuuuucuac

SEQ ID NO: 569541 - RNA, 19 nt, Homo sapiens
  misc_RNA (1)...(19): siRNA sense strand
ggaucuuucucucccauga

SEQ ID NO: 569542 - RNA, 19 nt, Homo sapiens
  misc_RNA (1)...(19): siRNA sense strand
cgaugaagaccaagacgua

SEQ ID NO: 569543 - RNA, 19 nt, Homo sapiens
  misc_RNA (1)...(19): siRNA sense strand
gcaucaacaucgccaagau

SEQ ID NO: 569544 - RNA, 19 nt, Homo sapiens
  misc_RNA (1)...(19): siRNA sense strand
gcugguagcccuagugugu

SEQ ID NO: 569545 - RNA, 19 nt, Homo sapiens
  misc_RNA (1)...(19): siRNA sense strand
agaaccagaaggccuauua

SEQ ID NO: 569546 - RNA, 19 nt, Homo sapiens
  misc_RNA (1)...(19): siRNA sense strand
ggacucaggagcacacgaa

SEQ ID NO: 569547 - RNA, 19 nt, Homo sapiens
  misc_RNA (1)...(19): siRNA sense strand
ccugggagcuggcauucaa

SEQ ID NO: 569548 - RNA, 19 nt, Homo sapiens
  misc_RNA (1)...(19): siRNA sense strand
cgaaagagaguuccaaggu

SEQ ID NO: 569549 - RNA, 19 nt, Homo sapiens
  misc_RNA (1)...(19): siRNA sense strand
uggcugagauggacaaagu

SEQ ID NO: 569550 - RNA, 19 nt, Homo sapiens
  misc_RNA (1)...(19): siRNA sense strand
gaagucugccuaccuguca

SEQ ID NO: 569551 - RNA, 19 nt, Homo sapiens
  misc_RNA (1)...(19): siRNA sense strand
cauugcaggucaccacgua

SEQ ID NO: 569552 - RNA, 19 nt, Homo sapiens
  misc_RNA (1)...(19): siRNA sense strand
cugacaagcuagaccauga

SEQ ID NO: 569553 - RNA, 19 nt, Homo sapiens
  misc_RNA (1)...(19): siRNA sense strand
ucuguuugcugcccuguuu

SEQ ID NO: 569554 - RNA, 19 nt, Homo sapiens
  misc_RNA (1)...(19): siRNA sense strand
gaccuggacuucguucuca

SEQ ID NO: 569555 - RNA, 19 nt, Homo sapiens
  misc_RNA (1)...(19): siRNA sense strand
gcaaagacaaucggaucaa

SEQ ID NO: 569556 - RNA, 19 nt, Homo sapiens
  misc_RNA (1)...(19): siRNA sense strand
gaaauucucaaugggauca

SEQ ID NO: 569557 - RNA, 19 nt, Homo sapiens
  misc_RNA (1)...(19): siRNA sense strand
caaagacaaucggaucaag

SEQ ID NO: 569558 - RNA, 19 nt, Homo sapiens
  misc_RNA (1)...(19): siRNA sense strand
cucaugagcuucuucuuca

SEQ ID NO: 569559 - RNA, 19 nt, Homo sapiens
  misc_RNA (1)...(19): siRNA sense strand
aaggagagaucaucaucga

SEQ ID NO: 569560 - RNA, 19 nt, Homo sapiens
  misc_RNA (1)...(19): siRNA sense strand
gagcugaaggugcugaaga

SEQ ID NO: 569561 - RNA, 19 nt, Homo sapiens
  misc_RNA (1)...(19): siRNA sense strand
uggaaugucacguggaaua

SEQ ID NO: 569562 - RNA, 19 nt, Homo sapiens
  misc_RNA (1)...(19): siRNA sense strand
ggaaggcccuggugaucac

SEQ ID NO: 569563 - RNA, 19 nt, Homo sapiens
  misc_RNA (1)...(19): siRNA sense strand
ccacgcugcuugcuaccuu

SEQ ID NO: 569564 - RNA, 19 nt, Homo sapiens
  misc_RNA (1)...(19): siRNA sense strand
gcgagugucucccucaaac

SEQ ID NO: 569565 - RNA, 19 nt, Homo sapiens
  misc_RNA (1)...(19): siRNA sense strand
ggacacgucggaacaaguc

SEQ ID NO: 569566 - RNA, 19 nt, Homo sapiens
  misc_RNA (1)...(19): siRNA sense strand
gaguggaauuccggaacua

SEQ ID NO: 569567 - RNA, 19 nt, Homo sapiens
  misc_RNA (1)...(19): siRNA sense strand
caaggaguauucagagacu

SEQ ID NO: 569568 - RNA, 19 nt, Homo sapiens
  misc_RNA (1)...(19): siRNA sense strand
cacaagggaucgccguguu

SEQ ID NO: 569569 - RNA, 19 nt, Homo sapiens
  misc_RNA (1)...(19): siRNA sense strand
gcgcuggcuuccaacuauu

SEQ ID NO: 569570 - RNA, 19 nt, Homo sapiens
  misc_RNA (1)...(19): siRNA sense strand
guacugggacuacaugaag

SEQ ID NO: 569571 - RNA, 19 nt, Homo sapiens
  misc_RNA (1)...(19): siRNA sense strand
gcaaagcaaauggagaaug

SEQ ID NO: 569572 - RNA, 19 nt, Homo sapiens
  misc_RNA (1)...(19): siRNA sense strand
aagcaaagcaaauggagaa

SEQ ID NO: 569573 - RNA, 19 nt, Homo sapiens
  misc_RNA (1)...(19): siRNA sense strand
gcagguggacgucaucauc

SEQ ID NO: 569574 - RNA, 19 nt, Homo sapiens
  misc_RNA (1)...(19): siRNA sense strand
gacuuggccacguacauua

SEQ ID NO: 569575 - RNA, 19 nt, Homo sapiens
  misc_RNA (1)...(19): siRNA sense strand
ucauggacuuggccacgua

SEQ ID NO: 569576 - RNA, 19 nt, Homo sapiens
  misc_RNA (1)...(19): siRNA sense strand
gaaggaaugcgccaagacu

SEQ ID NO: 569577 - RNA, 19 nt, Homo sapiens
  misc_RNA (1)...(19): siRNA sense strand
cagggaucaugcucacuuu

SEQ ID NO: 569578 - RNA, 19 nt, Homo sapiens
  misc_RNA (1)...(19): siRNA sense strand
ccaguacucggaugaagaa

SEQ ID NO: 569579 - RNA, 19 nt, Homo sapiens
  misc_RNA (1)...(19): siRNA sense strand
ggucaagcuuuccguguac

SEQ ID NO: 569580 - RNA, 19 nt, Homo sapiens
  misc_RNA (1)...(19): siRNA sense strand
uaaagaacuggaagaagga

SEQ ID NO: 569581 - RNA, 19 nt, Homo sapiens
  misc_RNA (1)...(19): siRNA sense strand
cucagugucuuacucauug

SEQ ID NO: 569582 - RNA, 19 nt, Homo sapiens
  misc_RNA (1)...(19): siRNA sense strand
ucaagcugaugaacgaaau

SEQ ID NO: 569583 - RNA, 19 nt, Homo sapiens
  misc_RNA (1)...(19): siRNA sense strand
ggaucaugcucacuuucug

SEQ ID NO: 569584 - RNA, 19 nt, Homo sapiens
  misc_RNA (1)...(19): siRNA sense strand
cagcagcuccuccuccuau

SEQ ID NO: 569585 - RNA, 19 nt, Homo sapiens
  misc_RNA (1)...(19): siRNA sense strand
gcacagcaugagcuacuug

SEQ ID NO: 569586 - RNA, 19 nt, Homo sapiens
  misc_RNA (1)...(19): siRNA sense strand
ggaucaaagugcuaaagcu

SEQ ID NO: 569587 - RNA, 19 nt, Homo sapiens
  misc_RNA (1)...(19): siRNA sense strand
gaugaacgaaauucucaau

SEQ ID NO: 569588 - RNA, 19 nt, Homo sapiens
  misc_RNA (1)...(19): siRNA sense strand
gcccgucaaugcugugaug

SEQ ID NO: 569589 - RNA, 19 nt, Homo sapiens
  misc_RNA (1)...(19): siRNA sense strand
augaggagguggaggcuuu

SEQ ID NO: 569590 - RNA, 19 nt, Homo sapiens
  misc_RNA (1)...(19): siRNA sense strand
ccaagguggaugcgaauga

SEQ ID NO: 569591 - RNA, 19 nt, Homo sapiens
  misc_RNA (1)...(19): siRNA sense strand
ucaaacgccugaggaucuu

SEQ ID NO: 569592 - RNA, 19 nt, Homo sapiens
  misc_RNA (1)...(19): siRNA sense strand
ggucagcccaacucucuug

SEQ ID NO: 569593 - RNA, 19 nt, Homo sapiens
  misc_RNA (1)...(19): siRNA sense strand
gaccaugaaugugcagaag

SEQ ID NO: 569594 - RNA, 19 nt, Homo sapiens
  misc_RNA (1)...(19): siRNA sense strand
auuggugccugcaucguua

SEQ ID NO: 569595 - RNA, 19 nt, Homo sapiens
  misc_RNA (1)...(19): siRNA sense strand
gggaaggaagcaaagcaaa

SEQ ID NO: 569596 - RNA, 19 nt, Homo sapiens
  misc_RNA (1)...(19): siRNA sense strand
gggcccuacuuccucauga

SEQ ID NO: 569597 - RNA, 19 nt, Homo sapiens
  misc_RNA (1)...(19): siRNA sense strand
guucaugggcucccuguuc

SEQ ID NO: 569598 - RNA, 19 nt, Homo sapiens
  misc_RNA (1)...(19): siRNA sense strand
cagggcaggucaagcuuuc

SEQ ID NO: 569599 - RNA, 19 nt, Homo sapiens
  misc_RNA (1)...(19): siRNA sense strand
ugauggcgaugaagaccaa

SEQ ID NO: 569600 - RNA, 19 nt, Homo sapiens
  misc_RNA (1)...(19): siRNA sense strand
gagauugucaaccucaugu

SEQ ID NO: 569601 - RNA, 19 nt, Homo sapiens
  misc_RNA (1)...(19): siRNA sense strand
acaccgugcugcuguuugu

SEQ ID NO: 569602 - RNA, 19 nt, Homo sapiens
  misc_RNA (1)...(19): siRNA sense strand
ucuuaaaguugcucaucaa

SEQ ID NO: 569603 - RNA, 19 nt, Homo sapiens
  misc_RNA (1)...(19): siRNA sense strand
ucccggaggucaucaagau

SEQ ID NO: 569604 - RNA, 19 nt, Homo sapiens
  misc_RNA (1)...(19): siRNA sense strand
ggacagugcagggaagcaa

SEQ ID NO: 569605 - RNA, 19 nt, Homo sapiens
  misc_RNA (1)...(19): siRNA sense strand
ggagguggaggcuuugauc

SEQ ID NO: 569606 - RNA, 19 nt, Homo sapiens
  misc_RNA (1)...(19): siRNA sense strand
gcaggucaccacguacuug

SEQ ID NO: 569607 - RNA, 19 nt, Homo sapiens
  misc_RNA (1)...(19): siRNA sense strand
agaaggaggagaccuggaa

SEQ ID NO: 569608 - RNA, 19 nt, Homo sapiens
  misc_RNA (1)...(19): siRNA sense strand
ucgugugggugccuuguuu

SEQ ID NO: 569609 - RNA, 19 nt, Homo sapiens
  misc_RNA (1)...(19): siRNA sense strand
ccacaucugcuucgucagu

SEQ ID NO: 569610 - RNA, 19 nt, Homo sapiens
  misc_RNA (1)...(19): siRNA sense strand
gcaccaguacuuccacauc

SEQ ID NO: 569611 - RNA, 19 nt, Homo sapiens
  misc_RNA (1)...(19): siRNA sense strand
ggaguaaaaucucugcuua

SEQ ID NO: 569612 - RNA, 19 nt, Homo sapiens
  misc_RNA (1)...(19): siRNA sense strand
gcauguaugugaaggaguu

SEQ ID NO: 569613 - RNA, 19 nt, Homo sapiens
  misc_RNA (1)...(19): siRNA sense strand
gaugggcugugauuuaaau

SEQ ID NO: 569614 - RNA, 19 nt, Homo sapiens
  misc_RNA (1)...(19): siRNA sense strand
guugaugggcugugauuua

SEQ ID NO: 569615 - RNA, 19 nt, Homo sapiens
  misc_RNA (1)...(19): siRNA sense strand
aauaucagaugcacagauu

SEQ ID NO: 569616 - RNA, 19 nt, Homo sapiens
  misc_RNA (1)...(19): siRNA sense strand
gcugugauuuaaauaguug

SEQ ID NO: 569617 - RNA, 19 nt, Homo sapiens
  misc_RNA (1)...(19): siRNA sense strand
gaaagucacaggaguaacu

SEQ ID NO: 569618 - RNA, 19 nt, Homo sapiens
  misc_RNA (1)...(19): siRNA sense strand
gaauggagaguaaagcaau

SEQ ID NO: 569619 - RNA, 19 nt, Homo sapiens
  misc_RNA (1)...(19): siRNA sense strand
gcacccaacucauuauagc

SEQ ID NO: 569620 - RNA, 19 nt, Homo sapiens
  misc_RNA (1)...(19): siRNA sense strand
uugaugggcugugauuuaa

SEQ ID NO: 569621 - RNA, 19 nt, Homo sapiens
  misc_RNA (1)...(19): siRNA sense strand
gggcugugauuuaaauagu

SEQ ID NO: 569622 - RNA, 19 nt, Homo sapiens
  misc_RNA (1)...(19): siRNA sense strand
ggagaguaaagcaauauca

SEQ ID NO: 569623 - RNA, 19 nt, Homo sapiens
  misc_RNA (1)...(19): siRNA sense strand
gaguaaagcaauaucagau

SEQ ID NO: 569624 - RNA, 19 nt, Homo sapiens
  misc_RNA (1)...(19): siRNA sense strand
aauggagaguaaagcaaua

SEQ ID NO: 569625 - RNA, 19 nt, Homo sapiens
  misc_RNA (1)...(19): siRNA sense strand
ggaauggagaguaaagcaa

SEQ ID NO: 569626 - RNA, 19 nt, Homo sapiens
  misc_RNA (1)...(19): siRNA sense strand
ggauucaucugggauaaaa

SEQ ID NO: 569627 - RNA, 19 nt, Homo sapiens
  misc_RNA (1)...(19): siRNA sense strand
gaauggcaaaguaaagguu

SEQ ID NO: 569628 - RNA, 19 nt, Homo sapiens
  misc_RNA (1)...(19): siRNA sense strand
gcagcacucuucgcaugga

SEQ ID NO: 569629 - RNA, 19 nt, Homo sapiens
  misc_RNA (1)...(19): siRNA sense strand
ggucuucuuuggcaaugug

SEQ ID NO: 569630 - RNA, 19 nt, Homo sapiens
  misc_RNA (1)...(19): siRNA sense strand
ggaaaucaagacuccuuca

SEQ ID NO: 569631 - RNA, 19 nt, Homo sapiens
  misc_RNA (1)...(19): siRNA sense strand
guuacugacucgcuaccuu

SEQ ID NO: 569632 - RNA, 19 nt, Homo sapiens
  misc_RNA (1)...(19): siRNA sense strand
guuugcacccaacucauua

SEQ ID NO: 569633 - RNA, 19 nt, Homo sapiens
  misc_RNA (1)...(19): siRNA sense strand
ggccaucaguggacucucu

SEQ ID NO: 569634 - RNA, 19 nt, Homo sapiens
  misc_RNA (1)...(19): siRNA sense strand
aauuauugcucgauacauc

SEQ ID NO: 569635 - RNA, 19 nt, Homo sapiens
  misc_RNA (1)...(19): siRNA sense strand
guggauucaucugggauaa

SEQ ID NO: 569636 - RNA, 19 nt, Homo sapiens
  misc_RNA (1)...(19): siRNA sense strand
ccaacucauuauagcauuc

SEQ ID NO: 569637 - RNA, 19 nt, Homo sapiens
  misc_RNA (1)...(19): siRNA sense strand
gaguugaugggcugugauu

SEQ ID NO: 569638 - RNA, 19 nt, Homo sapiens
  misc_RNA (1)...(19): siRNA sense strand
ggcugugauuuaaauaguu

SEQ ID NO: 569639 - RNA, 19 nt, Homo sapiens
  misc_RNA (1)...(19): siRNA sense strand
agaguugggugcaccagau

SEQ ID NO: 569640 - RNA, 19 nt, Homo sapiens
  misc_RNA (1)...(19): siRNA sense strand
ccaccuggucuccuucaaa

SEQ ID NO: 569641 - RNA, 19 nt, Homo sapiens
  misc_RNA (1)...(19): siRNA sense strand
uuaccagcauguaugugaa

SEQ ID NO: 569642 - RNA, 19 nt, Homo sapiens
  misc_RNA (1)...(19): siRNA sense strand
gagaguaaagcaauaucag

SEQ ID NO: 569643 - RNA, 19 nt, Homo sapiens
  misc_RNA (1)...(19): siRNA sense strand
agaguaaagcaauaucaga

SEQ ID NO: 569644 - RNA, 19 nt, Homo sapiens
  misc_RNA (1)...(19): siRNA sense strand
gggaauggagaguaaagca

SEQ ID NO: 569645 - RNA, 19 nt, Homo sapiens
  misc_RNA (1)...(19): siRNA sense strand
ggcacaggaccucuacuga

SEQ ID NO: 569646 - RNA, 19 nt, Homo sapiens
  misc_RNA (1)...(19): siRNA sense strand
cugacucgcuaccuucgaa

SEQ ID NO: 569647 - RNA, 19 nt, Homo sapiens
  misc_RNA (1)...(19): siRNA sense strand
uuucagaauggcaaaguaa

SEQ ID NO: 569648 - RNA, 19 nt, Homo sapiens
  misc_RNA (1)...(19): siRNA sense strand
caccuggucuccuucaaaa

SEQ ID NO: 569649 - RNA, 19 nt, Homo sapiens
  misc_RNA (1)...(19): siRNA sense strand
uaucagaugcacagauuac

SEQ ID NO: 569650 - RNA, 19 nt, Homo sapiens
  misc_RNA (1)...(19): siRNA sense strand
gaaaucaagacuccuucac

SEQ ID NO: 569651 - RNA, 19 nt, Homo sapiens
  misc_RNA (1)...(19): siRNA sense strand
gcacagauuacugcuucau

SEQ ID NO: 569652 - RNA, 19 nt, Homo sapiens
  misc_RNA (1)...(19): siRNA sense strand
caauaucagaugcacagau

SEQ ID NO: 569653 - RNA, 19 nt, Homo sapiens
  misc_RNA (1)...(19): siRNA sense strand
aaaucaagacuccuucaca

SEQ ID NO: 569654 - RNA, 19 nt, Homo sapiens
  misc_RNA (1)...(19): siRNA sense strand
cuagacccaccguuacuga

SEQ ID NO: 569655 - RNA, 19 nt, Homo sapiens
  misc_RNA (1)...(19): siRNA sense strand
cuuaccagcauguauguga

SEQ ID NO: 569656 - RNA, 19 nt, Homo sapiens
  misc_RNA (1)...(19): siRNA sense strand
cccaacucauuauagcauu

SEQ ID NO: 569657 - RNA, 19 nt, Homo sapiens
  misc_RNA (1)...(19): siRNA sense strand
ggaguaaaaucucugcuua

SEQ ID NO: 569658 - RNA, 19 nt, Homo sapiens
  misc_RNA (1)...(19): siRNA sense strand
gcauguaugugaaggaguu

SEQ ID NO: 569659 - RNA, 19 nt, Homo sapiens
  misc_RNA (1)...(19): siRNA sense strand
gaugggcugugauuuaaau

SEQ ID NO: 569660 - RNA, 19 nt, Homo sapiens
  misc_RNA (1)...(19): siRNA sense strand
guugaugggcugugauuua

SEQ ID NO: 569661 - RNA, 19 nt, Homo sapiens
  misc_RNA (1)...(19): siRNA sense strand
aauaucagaugcacagauu

SEQ ID NO: 569662 - RNA, 19 nt, Homo sapiens
  misc_RNA (1)...(19): siRNA sense strand
gcugugauuuaaauaguug

SEQ ID NO: 569663 - RNA, 19 nt, Homo sapiens
  misc_RNA (1)...(19): siRNA sense strand
gaaagucacaggaguaacu

SEQ ID NO: 569664 - RNA, 19 nt, Homo sapiens
  misc_RNA (1)...(19): siRNA sense strand
gaauggagaguaaagcaau

SEQ ID NO: 569665 - RNA, 19 nt, Homo sapiens
  misc_RNA (1)...(19): siRNA sense strand
gcacccaacucauuauagc

SEQ ID NO: 569666 - RNA, 19 nt, Homo sapiens
  misc_RNA (1)...(19): siRNA sense strand
uugaugggcugugauuuaa

SEQ ID NO: 569667 - RNA, 19 nt, Homo sapiens
  misc_RNA (1)...(19): siRNA sense strand
gggcugugauuuaaauagu

SEQ ID NO: 569668 - RNA, 19 nt, Homo sapiens
  misc_RNA (1)...(19): siRNA sense strand
ggagaguaaagcaauauca

SEQ ID NO: 569669 - RNA, 19 nt, Homo sapiens
  misc_RNA (1)...(19): siRNA sense strand
gaguaaagcaauaucagau

SEQ ID NO: 569670 - RNA, 19 nt, Homo sapiens
  misc_RNA (1)...(19): siRNA sense strand
aauggagaguaaagcaaua

SEQ ID NO: 569671 - RNA, 19 nt, Homo sapiens
  misc_RNA (1)...(19): siRNA sense strand
ggaauggagaguaaagcaa

SEQ ID NO: 569672 - RNA, 19 nt, Homo sapiens
  misc_RNA (1)...(19): siRNA sense strand
ggauucaucugggauaaaa

SEQ ID NO: 569673 - RNA, 19 nt, Homo sapiens
  misc_RNA (1)...(19): siRNA sense strand
gaauggcaaaguaaagguu

SEQ ID NO: 569674 - RNA, 19 nt, Homo sapiens
  misc_RNA (1)...(19): siRNA sense strand
gcagcacucuucgcaugga

SEQ ID NO: 569675 - RNA, 19 nt, Homo sapiens
  misc_RNA (1)...(19): siRNA sense strand
ggucuucuuuggcaaugug

SEQ ID NO: 569676 - RNA, 19 nt, Homo sapiens
  misc_RNA (1)...(19): siRNA sense strand
ggaaaucaagacuccuuca

SEQ ID NO: 569677 - RNA, 19 nt, Homo sapiens
  misc_RNA (1)...(19): siRNA sense strand
guuacugacucgcuaccuu

SEQ ID NO: 569678 - RNA, 19 nt, Homo sapiens
  misc_RNA (1)...(19): siRNA sense strand
guuugcacccaacucauua

SEQ ID NO: 569679 - RNA, 19 nt, Homo sapiens
  misc_RNA (1)...(19): siRNA sense strand
ggccaucaguggacucucu

SEQ ID NO: 569680 - RNA, 19 nt, Homo sapiens
  misc_RNA (1)...(19): siRNA sense strand
aauuauugcucgauacauc

SEQ ID NO: 569681 - RNA, 19 nt, Homo sapiens
  misc_RNA (1)...(19): siRNA sense strand
guggauucaucugggauaa

SEQ ID NO: 569682 - RNA, 19 nt, Homo sapiens
  misc_RNA (1)...(19): siRNA sense strand
ccaacucauuauagcauuc

SEQ ID NO: 569683 - RNA, 19 nt, Homo sapiens
  misc_RNA (1)...(19): siRNA sense strand
gaguugaugggcugugauu

SEQ ID NO: 569684 - RNA, 19 nt, Homo sapiens
  misc_RNA (1)...(19): siRNA sense strand
ggcugugauuuaaauaguu

SEQ ID NO: 569685 - RNA, 19 nt, Homo sapiens
  misc_RNA (1)...(19): siRNA sense strand
agaguugggugcaccagau

SEQ ID NO: 569686 - RNA, 19 nt, Homo sapiens
  misc_RNA (1)...(19): siRNA sense strand
ccaccuggucuccuucaaa

SEQ ID NO: 569687 - RNA, 19 nt, Homo sapiens
  misc_RNA (1)...(19): siRNA sense strand
uuaccagcauguaugugaa

SEQ ID NO: 569688 - RNA, 19 nt, Homo sapiens
  misc_RNA (1)...(19): siRNA sense strand
gagaguaaagcaauaucag

SEQ ID NO: 569689 - RNA, 19 nt, Homo sapiens
  misc_RNA (1)...(19): siRNA sense strand
agaguaaagcaauaucaga

SEQ ID NO: 569690 - RNA, 19 nt, Homo sapiens
  misc_RNA (1)...(19): siRNA sense strand
gggaauggagaguaaagca

SEQ ID NO: 569691 - RNA, 19 nt, Homo sapiens
  misc_RNA (1)...(19): siRNA sense strand
ggcacaggaccucuacuga

SEQ ID NO: 569692 - RNA, 19 nt, Homo sapiens
  misc_RNA (1)...(19): siRNA sense strand
cugacucgcuaccuucgaa

SEQ ID NO: 569693 - RNA, 19 nt, Homo sapiens
  misc_RNA (1)...(19): siRNA sense strand
uuucagaauggcaaaguaa

SEQ ID NO: 569694 - RNA, 19 nt, Homo sapiens
  misc_RNA (1)...(19): siRNA sense strand
caccuggucuccuucaaaa

SEQ ID NO: 569695 - RNA, 19 nt, Homo sapiens
  misc_RNA (1)...(19): siRNA sense strand
uaucagaugcacagauuac

SEQ ID NO: 569696 - RNA, 19 nt, Homo sapiens
  misc_RNA (1)...(19): siRNA sense strand
gaaaucaagacuccuucac

SEQ ID NO: 569697 - RNA, 19 nt, Homo sapiens
  misc_RNA (1)...(19): siRNA sense strand
gcacagauuacugcuucau

SEQ ID NO: 569698 - RNA, 19 nt, Homo sapiens
  misc_RNA (1)...(19): siRNA sense strand
caauaucagaugcacagau

SEQ ID NO: 569699 - RNA, 19 nt, Homo sapiens
  misc_RNA (1)...(19): siRNA sense strand
aaaucaagacuccuucaca

SEQ ID NO: 569700 - RNA, 19 nt, Homo sapiens
  misc_RNA (1)...(19): siRNA sense strand
cuagacccaccguuacuga

SEQ ID NO: 569701 - RNA, 19 nt, Homo sapiens
  misc_RNA (1)...(19): siRNA sense strand
cuuaccagcauguauguga

SEQ ID NO: 569702 - RNA, 19 nt, Homo sapiens
  misc_RNA (1)...(19): siRNA sense strand
cccaacucauuauagcauu

SEQ ID NO: 569703 - RNA, 19 nt, Homo sapiens
  misc_RNA (1)...(19): siRNA sense strand
ggagggagauuuugucuuu

SEQ ID NO: 569704 - RNA, 19 nt, Homo sapiens
  misc_RNA (1)...(19): siRNA sense strand
gaauugcgcaacaccuuua

SEQ ID NO: 569705 - RNA, 19 nt, Homo sapiens
  misc_RNA (1)...(19): siRNA sense strand
gcacauggacaacaucuuc

SEQ ID NO: 569706 - RNA, 19 nt, Homo sapiens
  misc_RNA (1)...(19): siRNA sense strand
gugcacauguuccucuuug

SEQ ID NO: 569707 - RNA, 19 nt, Homo sapiens
  misc_RNA (1)...(19): siRNA sense strand
ggaauugcgcaacaccuuu

SEQ ID NO: 569708 - RNA, 19 nt, Homo sapiens
  misc_RNA (1)...(19): siRNA sense strand
gcgacuaccugaccuucga

SEQ ID NO: 569709 - RNA, 19 nt, Homo sapiens
  misc_RNA (1)...(19): siRNA sense strand
gugagcaggucuucaucaa

SEQ ID NO: 569710 - RNA, 19 nt, Homo sapiens
  misc_RNA (1)...(19): siRNA sense strand
ccaaugcccuggagaccau

SEQ ID NO: 569711 - RNA, 19 nt, Homo sapiens
  misc_RNA (1)...(19): siRNA sense strand
gaccuucgaggaccaguuu

SEQ ID NO: 569712 - RNA, 19 nt, Homo sapiens
  misc_RNA (1)...(19): siRNA sense strand
gcagucaccaucaccauuc

SEQ ID NO: 569713 - RNA, 19 nt, Homo sapiens
  misc_RNA (1)...(19): siRNA sense strand
gagcagcagcagcuuccua

SEQ ID NO: 569714 - RNA, 19 nt, Homo sapiens
  misc_RNA (1)...(19): siRNA sense strand
caacaccuuuagggagauu

SEQ ID NO: 569715 - RNA, 19 nt, Homo sapiens
  misc_RNA (1)...(19): siRNA sense strand
gagcagcagcgccuucugu

SEQ ID NO: 569716 - RNA, 19 nt, Homo sapiens
  misc_RNA (1)...(19): siRNA sense strand
gauuuugucuuuccuguga

SEQ ID NO: 569717 - RNA, 19 nt, Homo sapiens
  misc_RNA (1)...(19): siRNA sense strand
acagguacgucaccaucuu

SEQ ID NO: 569718 - RNA, 19 nt, Homo sapiens
  misc_RNA (1)...(19): siRNA sense strand
gcagcagcgccuucuguga

SEQ ID NO: 569719 - RNA, 19 nt, Homo sapiens
  misc_RNA (1)...(19): siRNA sense strand
cugcuacacugcccacuuc

SEQ ID NO: 569720 - RNA, 19 nt, Homo sapiens
  misc_RNA (1)...(19): siRNA sense strand
gcugguaaguguguccaau

SEQ ID NO: 569721 - RNA, 19 nt, Homo sapiens
  misc_RNA (1)...(19): siRNA sense strand
gucauugugugccucauca

SEQ ID NO: 569722 - RNA, 19 nt, Homo sapiens
  misc_RNA (1)...(19): siRNA sense strand
cagccaacacugccuaaug

SEQ ID NO: 569723 - RNA, 19 nt, Homo sapiens
  misc_RNA (1)...(19): siRNA sense strand
gcacgucaagcgcauagca

SEQ ID NO: 569724 - RNA, 19 nt, Homo sapiens
  misc_RNA (1)...(19): siRNA sense strand
ccaucgccgucgacaggua

SEQ ID NO: 569725 - RNA, 19 nt, Homo sapiens
  misc_RNA (1)...(19): siRNA sense strand
ccgacaugcugguaagugu

SEQ ID NO: 569726 - RNA, 19 nt, Homo sapiens
  misc_RNA (1)...(19): siRNA sense strand
caucgucagucugcuggaa

SEQ ID NO: 569727 - RNA, 19 nt, Homo sapiens
  misc_RNA (1)...(19): siRNA sense strand
caucuucgacuccaugauc

SEQ ID NO: 569728 - RNA, 19 nt, Homo sapiens
  misc_RNA (1)...(19): siRNA sense strand
agccaacacugccuaaugg

SEQ ID NO: 569729 - RNA, 19 nt, Homo sapiens
  misc_RNA (1)...(19): siRNA sense strand
gcaacaccuuuagggagau

SEQ ID NO: 569730 - RNA, 19 nt, Homo sapiens
  misc_RNA (1)...(19): siRNA sense strand
ccgauguacuucuuucucu

SEQ ID NO: 569731 - RNA, 19 nt, Homo sapiens
  misc_RNA (1)...(19): siRNA sense strand
acaccuaccugguccucau

SEQ ID NO: 569732 - RNA, 19 nt, Homo sapiens
  misc_RNA (1)...(19): siRNA sense strand
caccugguccucaucauca

SEQ ID NO: 569733 - RNA, 19 nt, Homo sapiens
  misc_RNA (1)...(19): siRNA sense strand
gcucggaucagcccuucug

SEQ ID NO: 569734 - RNA, 19 nt, Homo sapiens
  misc_RNA (1)...(19): siRNA sense strand
cgucaucgacccacucauc

SEQ ID NO: 569735 - RNA, 19 nt, Homo sapiens
  misc_RNA (1)...(19): siRNA sense strand
cagguacgucaccaucuuu

SEQ ID NO: 569736 - RNA, 19 nt, Homo sapiens
  misc_RNA (1)...(19): siRNA sense strand
ggcagucaccaucaccauu

SEQ ID NO: 569737 - RNA, 19 nt, Homo sapiens
  misc_RNA (1)...(19): siRNA sense strand
uggaaaacauccugguuau

SEQ ID NO: 569738 - RNA, 19 nt, Homo sapiens
  misc_RNA (1)...(19): siRNA sense strand
gacaugcugguaagugugu

SEQ ID NO: 569739 - RNA, 19 nt, Homo sapiens
  misc_RNA (1)...(19): siRNA sense strand
gcgagaagcagcacaucua

SEQ ID NO: 569740 - RNA, 19 nt, Homo sapiens
  misc_RNA (1)...(19): siRNA sense strand
gagcccauguggcaucuau

SEQ ID NO: 569741 - RNA, 19 nt, Homo sapiens
  misc_RNA (1)...(19): siRNA sense strand
gcacaacucgcgccucaag

SEQ ID NO: 569742 - RNA, 19 nt, Homo sapiens
  misc_RNA (1)...(19): siRNA sense strand
ggacuaacaaggucaucug

SEQ ID NO: 569743 - RNA, 19 nt, Homo sapiens
  misc_RNA (1)...(19): siRNA sense strand
agacgccgcuggagaugga

SEQ ID NO: 569744 - RNA, 19 nt, Homo sapiens
  misc_RNA (1)...(19): siRNA sense strand
caaguucgcgcugcuguug

SEQ ID NO: 569745 - RNA, 19 nt, Homo sapiens
  misc_RNA (1)...(19): siRNA sense strand
uguacacgcuggugcuguu

SEQ ID NO: 569746 - RNA, 19 nt, Homo sapiens
  misc_RNA (1)...(19): siRNA sense strand
ccggacacggccaaucuua

SEQ ID NO: 569747 - RNA, 19 nt, Homo sapiens
  misc_RNA (1)...(19): siRNA sense strand
gcaaguucgcgcugcuguu

SEQ ID NO: 569748 - RNA, 19 nt, Homo sapiens
  misc_RNA (1)...(19): siRNA sense strand
gcucuuccgcugcgacuuc

SEQ ID NO: 569749 - RNA, 19 nt, Homo sapiens
  misc_RNA (1)...(19): siRNA sense strand
ugaagguggugcagcuuuu

SEQ ID NO: 569750 - RNA, 19 nt, Homo sapiens
  misc_RNA (1)...(19): siRNA sense strand
ggacacggccaaucuuacc

SEQ ID NO: 569751 - RNA, 19 nt, Homo sapiens
  misc_RNA (1)...(19): siRNA sense strand
gaggccgagugccgaaagu

SEQ ID NO: 569752 - RNA, 19 nt, Homo sapiens
  misc_RNA (1)...(19): siRNA sense strand
ggaacaagauggacaguga

SEQ ID NO: 569753 - RNA, 19 nt, Homo sapiens
  misc_RNA (1)...(19): siRNA sense strand
gagaggagcugcccaccua

SEQ ID NO: 569754 - RNA, 19 nt, Homo sapiens
  misc_RNA (1)...(19): siRNA sense strand
ggagaaggcuggccgcauu

SEQ ID NO: 569755 - RNA, 19 nt, Homo sapiens
  misc_RNA (1)...(19): siRNA sense strand
gcaagaagcaggccuaugu

SEQ ID NO: 569756 - RNA, 19 nt, Homo sapiens
  misc_RNA (1)...(19): siRNA sense strand
ggagaaggaugcagugauc

SEQ ID NO: 569757 - RNA, 19 nt, Homo sapiens
  misc_RNA (1)...(19): siRNA sense strand
ucaguacccucauguugua

SEQ ID NO: 569758 - RNA, 19 nt, Homo sapiens
  misc_RNA (1)...(19): siRNA sense strand
caagggcucucuucuagug

SEQ ID NO: 569759 - RNA, 19 nt, Homo sapiens
  misc_RNA (1)...(19): siRNA sense strand
ggcaagggcucucuucuag

SEQ ID NO: 569760 - RNA, 19 nt, Homo sapiens
  misc_RNA (1)...(19): siRNA sense strand
gcagaaguauuuggaggaa

SEQ ID NO: 569761 - RNA, 19 nt, Homo sapiens
  misc_RNA (1)...(19): siRNA sense strand
ggagauggaaagcagguua

SEQ ID NO: 569762 - RNA, 19 nt, Homo sapiens
  misc_RNA (1)...(19): siRNA sense strand
gaacggcuccuucaguugu

SEQ ID NO: 569763 - RNA, 19 nt, Homo sapiens
  misc_RNA (1)...(19): siRNA sense strand
ccaagucggugccaucugu

SEQ ID NO: 569764 - RNA, 19 nt, Homo sapiens
  misc_RNA (1)...(19): siRNA sense strand
gaagaggagcugcgcaaga

SEQ ID NO: 569765 - RNA, 19 nt, Homo sapiens
  misc_RNA (1)...(19): siRNA sense strand
caagauggacagugaaaug

SEQ ID NO: 569766 - RNA, 19 nt, Homo sapiens
  misc_RNA (1)...(19): siRNA sense strand
aagaggagcugcgcaagaa

SEQ ID NO: 569767 - RNA, 19 nt, Homo sapiens
  misc_RNA (1)...(19): siRNA sense strand
ccaaagcccacucgcagua

SEQ ID NO: 569768 - RNA, 19 nt, Homo sapiens
  misc_RNA (1)...(19): siRNA sense strand
cagaacaacugcgagagaa

SEQ ID NO: 569769 - RNA, 19 nt, Homo sapiens
  misc_RNA (1)...(19): siRNA sense strand
gagaagaccaugcggaaca

SEQ ID NO: 569770 - RNA, 19 nt, Homo sapiens
  misc_RNA (1)...(19): siRNA sense strand
ccaagugggagcagaagua

SEQ ID NO: 569771 - RNA, 19 nt, Homo sapiens
  misc_RNA (1)...(19): siRNA sense strand
ugaggaggcugcaagacuu

SEQ ID NO: 569772 - RNA, 19 nt, Homo sapiens
  misc_RNA (1)...(19): siRNA sense strand
ggagagcucugcggagaag

SEQ ID NO: 569773 - RNA, 19 nt, Homo sapiens
  misc_RNA (1)...(19): siRNA sense strand
gaacaagauggacagugaa

SEQ ID NO: 569774 - RNA, 19 nt, Homo sapiens
  misc_RNA (1)...(19): siRNA sense strand
gcaggccuauguggagaaa

SEQ ID NO: 569775 - RNA, 19 nt, Homo sapiens
  misc_RNA (1)...(19): siRNA sense strand
gagauggaaagcagguuaa

SEQ ID NO: 569776 - RNA, 19 nt, Homo sapiens
  misc_RNA (1)...(19): siRNA sense strand
agaaccaccuggcagagaa

SEQ ID NO: 569777 - RNA, 19 nt, Homo sapiens
  misc_RNA (1)...(19): siRNA sense strand
agugggagcagaaguauuu

SEQ ID NO: 569778 - RNA, 19 nt, Homo sapiens
  misc_RNA (1)...(19): siRNA sense strand
gagagaaggaggagcagau

SEQ ID NO: 569779 - RNA, 19 nt, Homo sapiens
  misc_RNA (1)...(19): siRNA sense strand
cagccucucuggacucugu

SEQ ID NO: 569780 - RNA, 19 nt, Homo sapiens
  misc_RNA (1)...(19): siRNA sense strand
gaagcuggagcgagagaug

SEQ ID NO: 569781 - RNA, 19 nt, Homo sapiens
  misc_RNA (1)...(19): siRNA sense strand
gaccaccacugcugucacu

SEQ ID NO: 569782 - RNA, 19 nt, Homo sapiens
  misc_RNA (1)...(19): siRNA sense strand
gugcagcaguagccagaga

SEQ ID NO: 569783 - RNA, 19 nt, Homo sapiens
  misc_RNA (1)...(19): siRNA sense strand
gacuucaaccgggaucuua

SEQ ID NO: 569784 - RNA, 19 nt, Homo sapiens
  misc_RNA (1)...(19): siRNA sense strand
gcauugagaagcuggaaag

SEQ ID NO: 569785 - RNA, 19 nt, Homo sapiens
  misc_RNA (1)...(19): siRNA sense strand
gagaagcuggaaagcgaaa

SEQ ID NO: 569786 - RNA, 19 nt, Homo sapiens
  misc_RNA (1)...(19): siRNA sense strand
gagaaccaccuggcagaga

SEQ ID NO: 569787 - RNA, 19 nt, Homo sapiens
  misc_RNA (1)...(19): siRNA sense strand
ucucuggacucuguagcua

SEQ ID NO: 569788 - RNA, 19 nt, Homo sapiens
  misc_RNA (1)...(19): siRNA sense strand
gagaaggcuggccgcauug

SEQ ID NO: 569789 - RNA, 19 nt, Homo sapiens
  misc_RNA (1)...(19): siRNA sense strand
ucagaacaacugcgagaga

SEQ ID NO: 569790 - RNA, 19 nt, Homo sapiens
  misc_RNA (1)...(19): siRNA sense strand
gaagcuggaaagcgaaauc

SEQ ID NO: 569791 - RNA, 19 nt, Homo sapiens
  misc_RNA (1)...(19): siRNA sense strand
ccaccucaguacccucaug

SEQ ID NO: 569792 - RNA, 19 nt, Homo sapiens
  misc_RNA (1)...(19): siRNA sense strand
ccucaguacccucauguug

SEQ ID NO: 569793 - RNA, 19 nt, Homo sapiens
  misc_RNA (1)...(19): siRNA sense strand
ccaccacugcugucacuga

SEQ ID NO: 569794 - RNA, 19 nt, Homo sapiens
  misc_RNA (1)...(19): siRNA sense strand
uggcaagggcucucuucua

SEQ ID NO: 569795 - RNA, 19 nt, Homo sapiens
  misc_RNA (1)...(19): siRNA sense strand
agaagaccaugcggaacaa

SEQ ID NO: 569796 - RNA, 19 nt, Homo sapiens
  misc_RNA (1)...(19): siRNA sense strand
uccaacagcagcagcagua

SEQ ID NO: 569797 - RNA, 19 nt, Homo sapiens
  misc_RNA (1)...(19): siRNA sense strand
gggagcagaaguauuugga

SEQ ID NO: 569798 - RNA, 19 nt, Homo sapiens
  misc_RNA (1)...(19): siRNA sense strand
gcacgcugcuagccaucca

SEQ ID NO: 569799 - RNA, 19 nt, Homo sapiens
  misc_RNA (1)...(19): siRNA sense strand
gugaggcccuggagaagac

SEQ ID NO: 569800 - RNA, 19 nt, Homo sapiens
  misc_RNA (1)...(19): siRNA sense strand
aaacacgggagcagagaug

SEQ ID NO: 569801 - RNA, 19 nt, Homo sapiens
  misc_RNA (1)...(19): siRNA sense strand
gaaggaugcagugaucaag

SEQ ID NO: 569802 - RNA, 19 nt, Homo sapiens
  misc_RNA (1)...(19): siRNA sense strand
caagugggagcagaaguau

SEQ ID NO: 569803 - RNA, 19 nt, Homo sapiens
  misc_RNA (1)...(19): siRNA sense strand
caagaagcaggccuaugug

SEQ ID NO: 569804 - RNA, 19 nt, Homo sapiens
  misc_RNA (1)...(19): siRNA sense strand
gagaagcuggagcgagaga

SEQ ID NO: 569805 - RNA, 19 nt, Homo sapiens
  misc_RNA (1)...(19): siRNA sense strand
accaguaccugcagcaauc

SEQ ID NO: 569806 - RNA, 19 nt, Homo sapiens
  misc_RNA (1)...(19): siRNA sense strand
gaggagcugcccaccuaug

SEQ ID NO: 569807 - RNA, 19 nt, Homo sapiens
  misc_RNA (1)...(19): siRNA sense strand
gcaagggcucucuucuagu

SEQ ID NO: 569808 - RNA, 19 nt, Homo sapiens
  misc_RNA (1)...(19): siRNA sense strand
aagauggacagugaaauga

SEQ ID NO: 569809 - RNA, 19 nt, Homo sapiens
  misc_RNA (1)...(19): siRNA sense strand
gacaugguggagauacuga

SEQ ID NO: 569810 - RNA, 19 nt, Homo sapiens
  misc_RNA (1)...(19): siRNA sense strand
ccagcagcagcuucaauga

SEQ ID NO: 569811 - RNA, 19 nt, Homo sapiens
  misc_RNA (1)...(19): siRNA sense strand
cagcgugacaccacucuca

SEQ ID NO: 569812 - RNA, 19 nt, Homo sapiens
  misc_RNA (1)...(19): siRNA sense strand
aaauccagcggcucucuga

SEQ ID NO: 569813 - RNA, 19 nt, Homo sapiens
  misc_RNA (1)...(19): siRNA sense strand
aggccuauguggagaaagu

SEQ ID NO: 569814 - RNA, 19 nt, Homo sapiens
  misc_RNA (1)...(19): siRNA sense strand
ugaccaagugggagcagaa

SEQ ID NO: 569815 - RNA, 19 nt, Homo sapiens
  misc_RNA (1)...(19): siRNA sense strand
agaaggaugcagugaucaa

SEQ ID NO: 569816 - RNA, 19 nt, Homo sapiens
  misc_RNA (1)...(19): siRNA sense strand
ucaagaagcuguccaagga

SEQ ID NO: 569817 - RNA, 19 nt, Homo sapiens
  misc_RNA (1)...(19): siRNA sense strand
gaaaggaagcguggucauu

SEQ ID NO: 569818 - RNA, 19 nt, Homo sapiens
  misc_RNA (1)...(19): siRNA sense strand
aaggaagcguggucauuua

SEQ ID NO: 569819 - RNA, 19 nt, Homo sapiens
  misc_RNA (1)...(19): siRNA sense strand
gaucagccaugaacaagag

SEQ ID NO: 569820 - RNA, 19 nt, Homo sapiens
  misc_RNA (1)...(19): siRNA sense strand
gaacagaugccugggauag

SEQ ID NO: 569821 - RNA, 19 nt, Homo sapiens
  misc_RNA (1)...(19): siRNA sense strand
ugggacagcuggaucauug

SEQ ID NO: 569822 - RNA, 19 nt, Homo sapiens
  misc_RNA (1)...(19): siRNA sense strand
guaugaagccuacgagugu

SEQ ID NO: 569823 - RNA, 19 nt, Homo sapiens
  misc_RNA (1)...(19): siRNA sense strand
aaaggaagcguggucauuu

SEQ ID NO: 569824 - RNA, 19 nt, Homo sapiens
  misc_RNA (1)...(19): siRNA sense strand
cuacagagaccaagaccuu

SEQ ID NO: 569825 - RNA, 19 nt, Homo sapiens
  misc_RNA (1)...(19): siRNA sense strand
gaugaucagccaugaacaa

SEQ ID NO: 569826 - RNA, 19 nt, Homo sapiens
  misc_RNA (1)...(19): siRNA sense strand
gaaaccugcccuucuuugu

SEQ ID NO: 569827 - RNA, 19 nt, Homo sapiens
  misc_RNA (1)...(19): siRNA sense strand
cccaggacauucaggauga

SEQ ID NO: 569828 - RNA, 19 nt, Homo sapiens
  misc_RNA (1)...(19): siRNA sense strand
aaccugcccuucuuuguug

SEQ ID NO: 569829 - RNA, 19 nt, Homo sapiens
  misc_RNA (1)...(19): siRNA sense strand
gggagaugaucagccauga

SEQ ID NO: 569830 - RNA, 19 nt, Homo sapiens
  misc_RNA (1)...(19): siRNA sense strand
acagguacacguccgauaa

SEQ ID NO: 569831 - RNA, 19 nt, Homo sapiens
  misc_RNA (1)...(19): siRNA sense strand
uucaacaucuccauuccua

SEQ ID NO: 569832 - RNA, 19 nt, Homo sapiens
  misc_RNA (1)...(19): siRNA sense strand
gagcugagggagaugauca

SEQ ID NO: 569833 - RNA, 19 nt, Homo sapiens
  misc_RNA (1)...(19): siRNA sense strand
acagaugccugggauagug

SEQ ID NO: 569834 - RNA, 19 nt, Homo sapiens
  misc_RNA (1)...(19): siRNA sense strand
gagaugaucagccaugaac

SEQ ID NO: 569835 - RNA, 19 nt, Homo sapiens
  misc_RNA (1)...(19): siRNA sense strand
gaacgugaagguggauuuc

SEQ ID NO: 569836 - RNA, 19 nt, Homo sapiens
  misc_RNA (1)...(19): siRNA sense strand
ucucaugaccugaaaggaa

SEQ ID NO: 569837 - RNA, 19 nt, Homo sapiens
  misc_RNA (1)...(19): siRNA sense strand
aaaccugcccuucuuuguu

SEQ ID NO: 569838 - RNA, 19 nt, Homo sapiens
  misc_RNA (1)...(19): siRNA sense strand
gcccuucuuuguugucuuc

SEQ ID NO: 569839 - RNA, 19 nt, Homo sapiens
  misc_RNA (1)...(19): siRNA sense strand
ucauugcacccaaggagua

SEQ ID NO: 569840 - RNA, 19 nt, Homo sapiens
  misc_RNA (1)...(19): siRNA sense strand
ggaagcguggucauuuaug

SEQ ID NO: 569841 - RNA, 19 nt, Homo sapiens
  misc_RNA (1)...(19): siRNA sense strand
uaugaagccuacgagugua

SEQ ID NO: 569842 - RNA, 19 nt, Homo sapiens
  misc_RNA (1)...(19): siRNA sense strand
ggagaugaucagccaugaa

SEQ ID NO: 569843 - RNA, 19 nt, Homo sapiens
  misc_RNA (1)...(19): siRNA sense strand
ggaacagaugccugggaua

SEQ ID NO: 569844 - RNA, 19 nt, Homo sapiens
  misc_RNA (1)...(19): siRNA sense strand
gcugagcuccgacucuaug

SEQ ID NO: 569845 - RNA, 19 nt, Homo sapiens
  misc_RNA (1)...(19): siRNA sense strand
ugggagaccuuggaagugu

SEQ ID NO: 569846 - RNA, 19 nt, Homo sapiens
  misc_RNA (1)...(19): siRNA sense strand
gacucuaugucuccuguca

SEQ ID NO: 569847 - RNA, 19 nt, Homo sapiens
  misc_RNA (1)...(19): siRNA sense strand
ccaaggacggcuccacaga

SEQ ID NO: 569848 - RNA, 19 nt, Homo sapiens
  misc_RNA (1)...(19): siRNA sense strand
gcgacacgcuggacaucag

SEQ ID NO: 569849 - RNA, 19 nt, Homo sapiens
  misc_RNA (1)...(19): siRNA sense strand
gauuuccugcgcagccuua

SEQ ID NO: 569850 - RNA, 19 nt, Homo sapiens
  misc_RNA (1)...(19): siRNA sense strand
uuuguugucuucuccaaug

SEQ ID NO: 569851 - RNA, 19 nt, Homo sapiens
  misc_RNA (1)...(19): siRNA sense strand
gcugggagaccuuggaagu

SEQ ID NO: 569852 - RNA, 19 nt, Homo sapiens
  misc_RNA (1)...(19): siRNA sense strand
cucuaugucuccugucaaa

SEQ ID NO: 569853 - RNA, 19 nt, Homo sapiens
  misc_RNA (1)...(19): siRNA sense strand
gcucuucaacaucuccauu

SEQ ID NO: 569854 - RNA, 19 nt, Homo sapiens
  misc_RNA (1)...(19): siRNA sense strand
ccuggugcaucucaaguuc

SEQ ID NO: 569855 - RNA, 19 nt, Homo sapiens
  misc_RNA (1)...(19): siRNA sense strand
ggguaaacuucgaggacau

SEQ ID NO: 569856 - RNA, 19 nt, Homo sapiens
  misc_RNA (1)...(19): siRNA sense strand
gcacaucuugcucuucaac

SEQ ID NO: 569857 - RNA, 19 nt, Homo sapiens
  misc_RNA (1)...(19): siRNA sense strand
gcgcagccuuaaccugagu

SEQ ID NO: 569858 - RNA, 19 nt, Homo sapiens
  misc_RNA (1)...(19): siRNA sense strand
gagcuccgacucuaugucu

SEQ ID NO: 569859 - RNA, 19 nt, Homo sapiens
  misc_RNA (1)...(19): siRNA sense strand
ccaucuccguccucuacaa

SEQ ID NO: 569860 - RNA, 19 nt, Homo sapiens
  misc_RNA (1)...(19): siRNA sense strand
cauuuaugauguucuggau

SEQ ID NO: 569861 - RNA, 19 nt, Homo sapiens
  misc_RNA (1)...(19): siRNA sense strand
ggacagcuggaucauugca

SEQ ID NO: 569862 - RNA, 19 nt, Homo sapiens
  misc_RNA (1)...(19): siRNA sense strand
agaccucccugcggguaaa

SEQ ID NO: 569863 - RNA, 19 nt, Homo sapiens
  misc_RNA (1)...(19): siRNA sense strand
ggcuggagcugagggagau

SEQ ID NO: 569864 - RNA, 19 nt, Homo sapiens
  misc_RNA (1)...(19): siRNA sense strand
uaacugccacagaggacuu

SEQ ID NO: 569865 - RNA, 19 nt, Homo sapiens
  misc_RNA (1)...(19): siRNA sense strand
gaugugacgccgacgaaac

SEQ ID NO: 569866 - RNA, 19 nt, Homo sapiens
  misc_RNA (1)...(19): siRNA sense strand
ccacccucaaguaccauua

SEQ ID NO: 569867 - RNA, 19 nt, Homo sapiens
  misc_RNA (1)...(19): siRNA sense strand
gaaagaacauccaagacaa

SEQ ID NO: 569868 - RNA, 19 nt, Homo sapiens
  misc_RNA (1)...(19): siRNA sense strand
gggaggagauugacaaguu

SEQ ID NO: 569869 - RNA, 19 nt, Homo sapiens
  misc_RNA (1)...(19): siRNA sense strand
ggaggagauugacaaguuu

SEQ ID NO: 569870 - RNA, 19 nt, Homo sapiens
  misc_RNA (1)...(19): siRNA sense strand
gcaagucggugaagaaagg

SEQ ID NO: 569871 - RNA, 19 nt, Homo sapiens
  misc_RNA (1)...(19): siRNA sense strand
gcacaggccugcgguacaa

SEQ ID NO: 569872 - RNA, 19 nt, Homo sapiens
  misc_RNA (1)...(19): siRNA sense strand
gagcaguacuuccgugaug

SEQ ID NO: 569873 - RNA, 19 nt, Homo sapiens
  misc_RNA (1)...(19): siRNA sense strand
ggacgaggaugaggacuuc

SEQ ID NO: 569874 - RNA, 19 nt, Homo sapiens
  misc_RNA (1)...(19): siRNA sense strand
ggaagcccaucaccgacua

SEQ ID NO: 569875 - RNA, 19 nt, Homo sapiens
  misc_RNA (1)...(19): siRNA sense strand
cgaaagaacauccaagaca

SEQ ID NO: 569876 - RNA, 19 nt, Homo sapiens
  misc_RNA (1)...(19): siRNA sense strand
ggauguggguuucaugaag

SEQ ID NO: 569877 - RNA, 19 nt, Homo sapiens
  misc_RNA (1)...(19): siRNA sense strand
cgagugcacugcugccuau

SEQ ID NO: 569878 - RNA, 19 nt, Homo sapiens
  misc_RNA (1)...(19): siRNA sense strand
gcacugcugccuauacuuc

SEQ ID NO: 569879 - RNA, 19 nt, Homo sapiens
  misc_RNA (1)...(19): siRNA sense strand
gaugaaggaugaggaacug

SEQ ID NO: 569880 - RNA, 19 nt, Homo sapiens
  misc_RNA (1)...(19): siRNA sense strand
cgccaaagcugacugucuu

SEQ ID NO: 569881 - RNA, 19 nt, Homo sapiens
  misc_RNA (1)...(19): siRNA sense strand
cagaugaccagcaaacuga

SEQ ID NO: 569882 - RNA, 19 nt, Homo sapiens
  misc_RNA (1)...(19): siRNA sense strand
gcagaugcaggaccaguga

SEQ ID NO: 569883 - RNA, 19 nt, Homo sapiens
  misc_RNA (1)...(19): siRNA sense strand
ugaaggcauugcaugagaa

SEQ ID NO: 569884 - RNA, 19 nt, Homo sapiens
  misc_RNA (1)...(19): siRNA sense strand
gcagaugaccagcaaacug

SEQ ID NO: 569885 - RNA, 19 nt, Homo sapiens
  misc_RNA (1)...(19): siRNA sense strand
gagaagcuuaucaggauga

SEQ ID NO: 569886 - RNA, 19 nt, Homo sapiens
  misc_RNA (1)...(19): siRNA sense strand
agaagggagucaagcugaa

SEQ ID NO: 569887 - RNA, 19 nt, Homo sapiens
  misc_RNA (1)...(19): siRNA sense strand
ggaugaagcagcagaugca

SEQ ID NO: 569888 - RNA, 19 nt, Homo sapiens
  misc_RNA (1)...(19): siRNA sense strand
gagaugcugcagaggauga

SEQ ID NO: 569889 - RNA, 19 nt, Homo sapiens
  misc_RNA (1)...(19): siRNA sense strand
ggauccauguauaccaguu

SEQ ID NO: 569890 - RNA, 19 nt, Homo sapiens
  misc_RNA (1)...(19): siRNA sense strand
ggcuuugacuucacacuca

SEQ ID NO: 569891 - RNA, 19 nt, Homo sapiens
  misc_RNA (1)...(19): siRNA sense strand
caacaucgugccucucauc

SEQ ID NO: 569892 - RNA, 19 nt, Homo sapiens
  misc_RNA (1)...(19): siRNA sense strand
uuaucaggaugaaggauga

SEQ ID NO: 569893 - RNA, 19 nt, Homo sapiens
  misc_RNA (1)...(19): siRNA sense strand
aguuugggauccauguaua

SEQ ID NO: 569894 - RNA, 19 nt, Homo sapiens
  misc_RNA (1)...(19): siRNA sense strand
agagcggccucaaccgaaa

SEQ ID NO: 569895 - RNA, 19 nt, Homo sapiens
  misc_RNA (1)...(19): siRNA sense strand
cagcaggaccgggaacuga

SEQ ID NO: 569896 - RNA, 19 nt, Homo sapiens
  misc_RNA (1)...(19): siRNA sense strand
gcccaucaccgacuaugug

SEQ ID NO: 569897 - RNA, 19 nt, Homo sapiens
  misc_RNA (1)...(19): siRNA sense strand
guauaccaguucccugagu

SEQ ID NO: 569898 - RNA, 19 nt, Homo sapiens
  misc_RNA (1)...(19): siRNA sense strand
aacacacgguggacauuga

SEQ ID NO: 569899 - RNA, 19 nt, Homo sapiens
  misc_RNA (1)...(19): siRNA sense strand
gcauaugcacgaccucaag

SEQ ID NO: 569900 - RNA, 19 nt, Homo sapiens
  misc_RNA (1)...(19): siRNA sense strand
caaguuugggauccaugua

SEQ ID NO: 569901 - RNA, 19 nt, Homo sapiens
  misc_RNA (1)...(19): siRNA sense strand
cgguggacauugaggagaa

SEQ ID NO: 569902 - RNA, 19 nt, Homo sapiens
  misc_RNA (1)...(19): siRNA sense strand
gaggagauugacaaguuug

SEQ ID NO: 569903 - RNA, 19 nt, Homo sapiens
  misc_RNA (1)...(19): siRNA sense strand
ccagugagauccggaagcu

SEQ ID NO: 569904 - RNA, 19 nt, Homo sapiens
  misc_RNA (1)...(19): siRNA sense strand
gccagacgguagagauucu

SEQ ID NO: 569905 - RNA, 19 nt, Homo sapiens
  misc_RNA (1)...(19): siRNA sense strand
augaaggcauugcaugaga

SEQ ID NO: 569906 - RNA, 19 nt, Homo sapiens
  misc_RNA (1)...(19): siRNA sense strand
accagcaguuugagcagua

SEQ ID NO: 569907 - RNA, 19 nt, Homo sapiens
  misc_RNA (1)...(19): siRNA sense strand
aaacacacgguggacauug

SEQ ID NO: 569908 - RNA, 19 nt, Homo sapiens
  misc_RNA (1)...(19): siRNA sense strand
ggaugaaggaugaggaacu

SEQ ID NO: 569909 - RNA, 19 nt, Homo sapiens
  misc_RNA (1)...(19): siRNA sense strand
uggagaaccaggcgcauug

SEQ ID NO: 569910 - RNA, 19 nt, Homo sapiens
  misc_RNA (1)...(19): siRNA sense strand
gaaggcauugcaugagaag

SEQ ID NO: 569911 - RNA, 19 nt, Homo sapiens
  misc_RNA (1)...(19): siRNA sense strand
gccaguggauguggguuuc

SEQ ID NO: 569912 - RNA, 19 nt, Homo sapiens
  misc_RNA (1)...(19): siRNA sense strand
ggacaagcaggacauugac

SEQ ID NO: 569913 - RNA, 19 nt, Homo sapiens
  misc_RNA (1)...(19): siRNA sense strand
gugcacugcugccuauacu

SEQ ID NO: 569914 - RNA, 19 nt, Homo sapiens
  misc_RNA (1)...(19): siRNA sense strand
gaagggagucaagcugaag

SEQ ID NO: 569915 - RNA, 19 nt, Homo sapiens
  misc_RNA (1)...(19): siRNA sense strand
ggccucaaccgaaagaaca

SEQ ID NO: 569916 - RNA, 19 nt, Homo sapiens
  misc_RNA (1)...(19): siRNA sense strand
aggacaagcaggacauuga

SEQ ID NO: 569917 - RNA, 19 nt, Homo sapiens
  misc_RNA (1)...(19): siRNA sense strand
caaccgaaagaacauccaa

SEQ ID NO: 569918 - RNA, 19 nt, Homo sapiens
  misc_RNA (1)...(19): siRNA sense strand
cagccagacgguagagauu

SEQ ID NO: 569919 - RNA, 19 nt, Homo sapiens
  misc_RNA (1)...(19): siRNA sense strand
ggacauugacaagcaguac

SEQ ID NO: 569920 - RNA, 19 nt, Homo sapiens
  misc_RNA (1)...(19): siRNA sense strand
guggauguggguuucauga

SEQ ID NO: 569921 - RNA, 19 nt, Homo sapiens
  misc_RNA (1)...(19): siRNA sense strand
ccacagccucuuccugaca

SEQ ID NO: 569922 - RNA, 19 nt, Homo sapiens
  misc_RNA (1)...(19): siRNA sense strand
gaggacaagcaggacauug

SEQ ID NO: 569923 - RNA, 19 nt, Homo sapiens
  misc_RNA (1)...(19): siRNA sense strand
gccgagacugagaagcuua

SEQ ID NO: 569924 - RNA, 19 nt, Homo sapiens
  misc_RNA (1)...(19): siRNA sense strand
ggccaguggauguggguuu

SEQ ID NO: 569925 - RNA, 19 nt, Homo sapiens
  misc_RNA (1)...(19): siRNA sense strand
acaagcaggacauugacaa

SEQ ID NO: 569926 - RNA, 19 nt, Homo sapiens
  misc_RNA (1)...(19): siRNA sense strand
gagacugagaagcuuauca

SEQ ID NO: 569927 - RNA, 19 nt, Homo sapiens
  misc_RNA (1)...(19): siRNA sense strand
uccagcagaugaccagcaa

SEQ ID NO: 569928 - RNA, 19 nt, Homo sapiens
  misc_RNA (1)...(19): siRNA sense strand
ccgcaagucggugaagaaa

SEQ ID NO: 569929 - RNA, 19 nt, Homo sapiens
  misc_RNA (1)...(19): siRNA sense strand
aggagaugcugcagaggau

SEQ ID NO: 569930 - RNA, 19 nt, Homo sapiens
  misc_RNA (1)...(19): siRNA sense strand
caggaugaaggaugaggaa

SEQ ID NO: 569931 - RNA, 19 nt, Homo sapiens
  misc_RNA (1)...(19): siRNA sense strand
ugacaaguuugggauccau

SEQ ID NO: 569932 - RNA, 19 nt, Homo sapiens
  misc_RNA (1)...(19): siRNA sense strand
gucaacaucgugccucuca

SEQ ID NO: 569933 - RNA, 19 nt, Homo sapiens
  misc_RNA (1)...(19): siRNA sense strand
gagacaagcuucuuugaug

SEQ ID NO: 569934 - RNA, 19 nt, Homo sapiens
  misc_RNA (1)...(19): siRNA sense strand
gggaagagcuccuguguca

SEQ ID NO: 569935 - RNA, 19 nt, Homo sapiens
  misc_RNA (1)...(19): siRNA sense strand
ccaaagagguccagaaugc

SEQ ID NO: 569936 - RNA, 19 nt, Homo sapiens
  misc_RNA (1)...(19): siRNA sense strand
agacaagcuucuuugauga

SEQ ID NO: 569937 - RNA, 19 nt, Homo sapiens
  misc_RNA (1)...(19): siRNA sense strand
uguacaagcugaacaggaa

SEQ ID NO: 569938 - RNA, 19 nt, Homo sapiens
  misc_RNA (1)...(19): siRNA sense strand
gaagagcuccugugucaac

SEQ ID NO: 569939 - RNA, 19 nt, Homo sapiens
  misc_RNA (1)...(19): siRNA sense strand
gagaagguguucgaguuca

SEQ ID NO: 569940 - RNA, 19 nt, Homo sapiens
  misc_RNA (1)...(19): siRNA sense strand
gaccaucagugccaugaag

SEQ ID NO: 569941 - RNA, 19 nt, Homo sapiens
  misc_RNA (1)...(19): siRNA sense strand
cugagaagguguucgaguu

SEQ ID NO: 569942 - RNA, 19 nt, Homo sapiens
  misc_RNA (1)...(19): siRNA sense strand
ggagacaagcuucuuugau

SEQ ID NO: 569943 - RNA, 19 nt, Homo sapiens
  misc_RNA (1)...(19): siRNA sense strand
caacaucuacggcaaguac

SEQ ID NO: 569944 - RNA, 19 nt, Homo sapiens
  misc_RNA (1)...(19): siRNA sense strand
ggagcacgcgcaccucauu

SEQ ID NO: 569945 - RNA, 19 nt, Homo sapiens
  misc_RNA (1)...(19): siRNA sense strand
gagcuccugugucaacauc

SEQ ID NO: 569946 - RNA, 19 nt, Homo sapiens
  misc_RNA (1)...(19): siRNA sense strand
ucaacauccuggagaacuu

SEQ ID NO: 569947 - RNA, 19 nt, Homo sapiens
  misc_RNA (1)...(19): siRNA sense strand
ccacggccaucuaugucuu

SEQ ID NO: 569948 - RNA, 19 nt, Homo sapiens
  misc_RNA (1)...(19): siRNA sense strand
ggguggacuuugagaaugu

SEQ ID NO: 569949 - RNA, 19 nt, Homo sapiens
  misc_RNA (1)...(19): siRNA sense strand
guccggagcuucgccaaug

SEQ ID NO: 569950 - RNA, 19 nt, Homo sapiens
  misc_RNA (1)...(19): siRNA sense strand
agaccuuccugcccuacua

SEQ ID NO: 569951 - RNA, 19 nt, Homo sapiens
  misc_RNA (1)...(19): siRNA sense strand
gaggacauccgccacuuca

SEQ ID NO: 569952 - RNA, 19 nt, Homo sapiens
  misc_RNA (1)...(19): siRNA sense strand
gcacggcugucgucaucgu

SEQ ID NO: 569953 - RNA, 19 nt, Homo sapiens
  misc_RNA (1)...(19): siRNA sense strand
gccgagagcgaguaucuga

SEQ ID NO: 569954 - RNA, 19 nt, Homo sapiens
  misc_RNA (1)...(19): siRNA sense strand
ucacggauaacaucuccua

SEQ ID NO: 569955 - RNA, 19 nt, Homo sapiens
  misc_RNA (1)...(19): siRNA sense strand
ggacauccgccacuucaac

SEQ ID NO: 569956 - RNA, 19 nt, Homo sapiens
  misc_RNA (1)...(19): siRNA sense strand
gugguggucuucauguuca

SEQ ID NO: 569957 - RNA, 19 nt, Homo sapiens
  misc_RNA (1)...(19): siRNA sense strand
gcgccuacgaccacaagua

SEQ ID NO: 569958 - RNA, 19 nt, Homo sapiens
  misc_RNA (1)...(19): siRNA sense strand
cauggcagcucuccuuggu

SEQ ID NO: 569959 - RNA, 19 nt, Homo sapiens
  misc_RNA (1)...(19): siRNA sense strand
gaagcacacgguacucauc

SEQ ID NO: 569960 - RNA, 19 nt, Homo sapiens
  misc_RNA (1)...(19): siRNA sense strand
gcugucagguggccagaag

SEQ ID NO: 569961 - RNA, 19 nt, Homo sapiens
  misc_RNA (1)...(19): siRNA sense strand
ccaggagacaagcuucuuu

SEQ ID NO: 569962 - RNA, 19 nt, Homo sapiens
  misc_RNA (1)...(19): siRNA sense strand
cgucuacaguggccugaug

SEQ ID NO: 569963 - RNA, 19 nt, Homo sapiens
  misc_RNA (1)...(19): siRNA sense strand
cuucacagcuggccacaac

SEQ ID NO: 569964 - RNA, 19 nt, Homo sapiens
  misc_RNA (1)...(19): siRNA sense strand
ccacugugccuuucgagau

SEQ ID NO: 569965 - RNA, 19 nt, Homo sapiens
  misc_RNA (1)...(19): siRNA sense strand
guacuugcaccgugugauc

SEQ ID NO: 569966 - RNA, 19 nt, Homo sapiens
  misc_RNA (1)...(19): siRNA sense strand
gcacacgguacucaucauc

SEQ ID NO: 569967 - RNA, 19 nt, Homo sapiens
  misc_RNA (1)...(19): siRNA sense strand
aggcggugguggugacuuu

SEQ ID NO: 569968 - RNA, 19 nt, Homo sapiens
  misc_RNA (1)...(19): siRNA sense strand
ugaccacggccaucuaugu

SEQ ID NO: 569969 - RNA, 19 nt, Homo sapiens
  misc_RNA (1)...(19): siRNA sense strand
caggagacaagcuucuuug

SEQ ID NO: 569970 - RNA, 19 nt, Homo sapiens
  misc_RNA (1)...(19): siRNA sense strand
gagcacgcgcaccucauug

SEQ ID NO: 569971 - RNA, 19 nt, Homo sapiens
  misc_RNA (1)...(19): siRNA sense strand
cgagagcgaguaucugauc

SEQ ID NO: 569972 - RNA, 19 nt, Homo sapiens
  misc_RNA (1)...(19): siRNA sense strand
gcgugguggucuucauguu

SEQ ID NO: 569973 - RNA, 19 nt, Homo sapiens
  misc_RNA (1)...(19): siRNA sense strand
agaaaagcauggaucaguu

SEQ ID NO: 569974 - RNA, 19 nt, Homo sapiens
  misc_RNA (1)...(19): siRNA sense strand
uggugaagcugcugcucuu

SEQ ID NO: 569975 - RNA, 19 nt, Homo sapiens
  misc_RNA (1)...(19): siRNA sense strand
gcacgcgcaccucauugug

SEQ ID NO: 569976 - RNA, 19 nt, Homo sapiens
  misc_RNA (1)...(19): siRNA sense strand
ggaggacauccgccacuuc

SEQ ID NO: 569977 - RNA, 19 nt, Homo sapiens
  misc_RNA (1)...(19): siRNA sense strand
cacugugccuuucgagaug

SEQ ID NO: 569978 - RNA, 19 nt, Homo sapiens
  misc_RNA (1)...(19): siRNA sense strand
acaagcuucuuugaugaga

SEQ ID NO: 569979 - RNA, 19 nt, Homo sapiens
  misc_RNA (1)...(19): siRNA sense strand
gugucaacauccuggagaa

SEQ ID NO: 569980 - RNA, 19 nt, Homo sapiens
  misc_RNA (1)...(19): siRNA sense strand
gcagcugccuacauguacu

SEQ ID NO: 569981 - RNA, 19 nt, Homo sapiens
  misc_RNA (1)...(19): siRNA sense strand
ugaagacuguccggagcuu

SEQ ID NO: 569982 - RNA, 19 nt, Homo sapiens
  misc_RNA (1)...(19): siRNA sense strand
gagaccaucagugccauga

SEQ ID NO: 569983 - RNA, 19 nt, Homo sapiens
  misc_RNA (1)...(19): siRNA sense strand
gaaaagcauggaucaguuc

SEQ ID NO: 569984 - RNA, 19 nt, Homo sapiens
  misc_RNA (1)...(19): siRNA sense strand
gacuuuggccuucaugagu

SEQ ID NO: 569985 - RNA, 19 nt, Homo sapiens
  misc_RNA (1)...(19): siRNA sense strand
cggguggacuuugagaaug

SEQ ID NO: 569986 - RNA, 19 nt, Homo sapiens
  misc_RNA (1)...(19): siRNA sense strand
gcucauuugccgcagguau

SEQ ID NO: 569987 - RNA, 19 nt, Homo sapiens
  misc_RNA (1)...(19): siRNA sense strand
ggaggaggcagagguguac

SEQ ID NO: 569988 - RNA, 19 nt, Homo sapiens
  misc_RNA (1)...(19): siRNA sense strand
caacauccuggagaacuuc

SEQ ID NO: 569989 - RNA, 19 nt, Homo sapiens
  misc_RNA (1)...(19): siRNA sense strand
gaagguguucgaguucauc

SEQ ID NO: 569990 - RNA, 19 nt, Homo sapiens
  misc_RNA (1)...(19): siRNA sense strand
ugagaagguguucgaguuc

SEQ ID NO: 569991 - RNA, 19 nt, Homo sapiens
  misc_RNA (1)...(19): siRNA sense strand
ucucauggcagcucuccuu

SEQ ID NO: 569992 - RNA, 19 nt, Homo sapiens
  misc_RNA (1)...(19): siRNA sense strand
gacauccgccacuucaaca

SEQ ID NO: 569993 - RNA, 19 nt, Homo sapiens
  misc_RNA (1)...(19): siRNA sense strand
ucaugaugguguccaacau

SEQ ID NO: 569994 - RNA, 19 nt, Homo sapiens
  misc_RNA (1)...(19): siRNA sense strand
gcacagagacaggggagaa

SEQ ID NO: 569995 - RNA, 19 nt, Homo sapiens
  misc_RNA (1)...(19): siRNA sense strand
gaccacggccaucuauguc

SEQ ID NO: 569996 - RNA, 19 nt, Homo sapiens
  misc_RNA (1)...(19): siRNA sense strand
ccuacgaccacaaguacuu

SEQ ID NO: 569997 - RNA, 19 nt, Homo sapiens
  misc_RNA (1)...(19): siRNA sense strand
gagacaagcuucuuugaug

SEQ ID NO: 569998 - RNA, 19 nt, Homo sapiens
  misc_RNA (1)...(19): siRNA sense strand
gggaagagcuccuguguca

SEQ ID NO: 569999 - RNA, 19 nt, Homo sapiens
  misc_RNA (1)...(19): siRNA sense strand
ccaaagagguccagaaugc

SEQ ID NO: 570000 - RNA, 19 nt, Homo sapiens
  misc_RNA (1)...(19): siRNA sense strand
agacaagcuucuuugauga

SEQ ID NO: 570001 - RNA, 19 nt, Homo sapiens
  misc_RNA (1)...(19): siRNA sense strand
uguacaagcugaacaggaa

SEQ ID NO: 570002 - RNA, 19 nt, Homo sapiens
  misc_RNA (1)...(19): siRNA sense strand
gaagagcuccugugucaac

SEQ ID NO: 570003 - RNA, 19 nt, Homo sapiens
  misc_RNA (1)...(19): siRNA sense strand
gagaagguguucgaguuca

SEQ ID NO: 570004 - RNA, 19 nt, Homo sapiens
  misc_RNA (1)...(19): siRNA sense strand
gaccaucagugccaugaag

SEQ ID NO: 570005 - RNA, 19 nt, Homo sapiens
  misc_RNA (1)...(19): siRNA sense strand
cugagaagguguucgaguu

SEQ ID NO: 570006 - RNA, 19 nt, Homo sapiens
  misc_RNA (1)...(19): siRNA sense strand
ggagacaagcuucuuugau

SEQ ID NO: 570007 - RNA, 19 nt, Homo sapiens
  misc_RNA (1)...(19): siRNA sense strand
caacaucuacggcaaguac

SEQ ID NO: 570008 - RNA, 19 nt, Homo sapiens
  misc_RNA (1)...(19): siRNA sense strand
ggagcacgcgcaccucauu

SEQ ID NO: 570009 - RNA, 19 nt, Homo sapiens
  misc_RNA (1)...(19): siRNA sense strand
gagcuccugugucaacauc

SEQ ID NO: 570010 - RNA, 19 nt, Homo sapiens
  misc_RNA (1)...(19): siRNA sense strand
ucaacauccuggagaacuu

SEQ ID NO: 570011 - RNA, 19 nt, Homo sapiens
  misc_RNA (1)...(19): siRNA sense strand
ccacggccaucuaugucuu

SEQ ID NO: 570012 - RNA, 19 nt, Homo sapiens
  misc_RNA (1)...(19): siRNA sense strand
ggguggacuuugagaaugu

SEQ ID NO: 570013 - RNA, 19 nt, Homo sapiens
  misc_RNA (1)...(19): siRNA sense strand
guccggagcuucgccaaug

SEQ ID NO: 570014 - RNA, 19 nt, Homo sapiens
  misc_RNA (1)...(19): siRNA sense strand
agaccuuccugcccuacua

SEQ ID NO: 570015 - RNA, 19 nt, Homo sapiens
  misc_RNA (1)...(19): siRNA sense strand
gaggacauccgccacuuca

SEQ ID NO: 570016 - RNA, 19 nt, Homo sapiens
  misc_RNA (1)...(19): siRNA sense strand
gcacggcugucgucaucgu

SEQ ID NO: 570017 - RNA, 19 nt, Homo sapiens
  misc_RNA (1)...(19): siRNA sense strand
gccgagagcgaguaucuga

SEQ ID NO: 570018 - RNA, 19 nt, Homo sapiens
  misc_RNA (1)...(19): siRNA sense strand
ucacggauaacaucuccua

SEQ ID NO: 570019 - RNA, 19 nt, Homo sapiens
  misc_RNA (1)...(19): siRNA sense strand
ggacauccgccacuucaac

SEQ ID NO: 570020 - RNA, 19 nt, Homo sapiens
  misc_RNA (1)...(19): siRNA sense strand
gugguggucuucauguuca

SEQ ID NO: 570021 - RNA, 19 nt, Homo sapiens
  misc_RNA (1)...(19): siRNA sense strand
gcgccuacgaccacaagua

SEQ ID NO: 570022 - RNA, 19 nt, Homo sapiens
  misc_RNA (1)...(19): siRNA sense strand
cauggcagcucuccuuggu

SEQ ID NO: 570023 - RNA, 19 nt, Homo sapiens
  misc_RNA (1)...(19): siRNA sense strand
gaagcacacgguacucauc

SEQ ID NO: 570024 - RNA, 19 nt, Homo sapiens
  misc_RNA (1)...(19): siRNA sense strand
gcugucagguggccagaag

SEQ ID NO: 570025 - RNA, 19 nt, Homo sapiens
  misc_RNA (1)...(19): siRNA sense strand
ccaggagacaagcuucuuu

SEQ ID NO: 570026 - RNA, 19 nt, Homo sapiens
  misc_RNA (1)...(19): siRNA sense strand
cgucuacaguggccugaug

SEQ ID NO: 570027 - RNA, 19 nt, Homo sapiens
  misc_RNA (1)...(19): siRNA sense strand
cuucacagcuggccacaac

SEQ ID NO: 570028 - RNA, 19 nt, Homo sapiens
  misc_RNA (1)...(19): siRNA sense strand
ccacugugccuuucgagau

SEQ ID NO: 570029 - RNA, 19 nt, Homo sapiens
  misc_RNA (1)...(19): siRNA sense strand
guacuugcaccgugugauc

SEQ ID NO: 570030 - RNA, 19 nt, Homo sapiens
  misc_RNA (1)...(19): siRNA sense strand
gcacacgguacucaucauc

SEQ ID NO: 570031 - RNA, 19 nt, Homo sapiens
  misc_RNA (1)...(19): siRNA sense strand
aggcggugguggugacuuu

SEQ ID NO: 570032 - RNA, 19 nt, Homo sapiens
  misc_RNA (1)...(19): siRNA sense strand
ugaccacggccaucuaugu

SEQ ID NO: 570033 - RNA, 19 nt, Homo sapiens
  misc_RNA (1)...(19): siRNA sense strand
caggagacaagcuucuuug

SEQ ID NO: 570034 - RNA, 19 nt, Homo sapiens
  misc_RNA (1)...(19): siRNA sense strand
gagcacgcgcaccucauug

SEQ ID NO: 570035 - RNA, 19 nt, Homo sapiens
  misc_RNA (1)...(19): siRNA sense strand
cgagagcgaguaucugauc

SEQ ID NO: 570036 - RNA, 19 nt, Homo sapiens
  misc_RNA (1)...(19): siRNA sense strand
gcgugguggucuucauguu

SEQ ID NO: 570037 - RNA, 19 nt, Homo sapiens
  misc_RNA (1)...(19): siRNA sense strand
agaaaagcauggaucaguu

SEQ ID NO: 570038 - RNA, 19 nt, Homo sapiens
  misc_RNA (1)...(19): siRNA sense strand
uggugaagcugcugcucuu

SEQ ID NO: 570039 - RNA, 19 nt, Homo sapiens
  misc_RNA (1)...(19): siRNA sense strand
gcacgcgcaccucauugug

SEQ ID NO: 570040 - RNA, 19 nt, Homo sapiens
  misc_RNA (1)...(19): siRNA sense strand
ggaggacauccgccacuuc

SEQ ID NO: 570041 - RNA, 19 nt, Homo sapiens
  misc_RNA (1)...(19): siRNA sense strand
cacugugccuuucgagaug

SEQ ID NO: 570042 - RNA, 19 nt, Homo sapiens
  misc_RNA (1)...(19): siRNA sense strand
acaagcuucuuugaugaga

SEQ ID NO: 570043 - RNA, 19 nt, Homo sapiens
  misc_RNA (1)...(19): siRNA sense strand
gugucaacauccuggagaa

SEQ ID NO: 570044 - RNA, 19 nt, Homo sapiens
  misc_RNA (1)...(19): siRNA sense strand
gcagcugccuacauguacu

SEQ ID NO: 570045 - RNA, 19 nt, Homo sapiens
  misc_RNA (1)...(19): siRNA sense strand
ugaagacuguccggagcuu

SEQ ID NO: 570046 - RNA, 19 nt, Homo sapiens
  misc_RNA (1)...(19): siRNA sense strand
gagaccaucagugccauga

SEQ ID NO: 570047 - RNA, 19 nt, Homo sapiens
  misc_RNA (1)...(19): siRNA sense strand
gaaaagcauggaucaguuc

SEQ ID NO: 570048 - RNA, 19 nt, Homo sapiens
  misc_RNA (1)...(19): siRNA sense strand
gacuuuggccuucaugagu

SEQ ID NO: 570049 - RNA, 19 nt, Homo sapiens
  misc_RNA (1)...(19): siRNA sense strand
cggguggacuuugagaaug

SEQ ID NO: 570050 - RNA, 19 nt, Homo sapiens
  misc_RNA (1)...(19): siRNA sense strand
gcucauuugccgcagguau

SEQ ID NO: 570051 - RNA, 19 nt, Homo sapiens
  misc_RNA (1)...(19): siRNA sense strand
ggaggaggcagagguguac

SEQ ID NO: 570052 - RNA, 19 nt, Homo sapiens
  misc_RNA (1)...(19): siRNA sense strand
caacauccuggagaacuuc

SEQ ID NO: 570053 - RNA, 19 nt, Homo sapiens
  misc_RNA (1)...(19): siRNA sense strand
gaagguguucgaguucauc

SEQ ID NO: 570054 - RNA, 19 nt, Homo sapiens
  misc_RNA (1)...(19): siRNA sense strand
ugagaagguguucgaguuc

SEQ ID NO: 570055 - RNA, 19 nt, Homo sapiens
  misc_RNA (1)...(19): siRNA sense strand
ucucauggcagcucuccuu

SEQ ID NO: 570056 - RNA, 19 nt, Homo sapiens
  misc_RNA (1)...(19): siRNA sense strand
gacauccgccacuucaaca

SEQ ID NO: 570057 - RNA, 19 nt, Homo sapiens
  misc_RNA (1)...(19): siRNA sense strand
ucaugaugguguccaacau

SEQ ID NO: 570058 - RNA, 19 nt, Homo sapiens
  misc_RNA (1)...(19): siRNA sense strand
gcacagagacaggggagaa

SEQ ID NO: 570059 - RNA, 19 nt, Homo sapiens
  misc_RNA (1)...(19): siRNA sense strand
gaccacggccaucuauguc

SEQ ID NO: 570060 - RNA, 19 nt, Homo sapiens
  misc_RNA (1)...(19): siRNA sense strand
ccuacgaccacaaguacuu

SEQ ID NO: 570061 - RNA, 19 nt, Homo sapiens
  misc_RNA (1)...(19): siRNA sense strand
gaagagaacugguauaaca

SEQ ID NO: 570062 - RNA, 19 nt, Homo sapiens
  misc_RNA (1)...(19): siRNA sense strand
agaaagaguuccagaauug

SEQ ID NO: 570063 - RNA, 19 nt, Homo sapiens
  misc_RNA (1)...(19): siRNA sense strand
caagaggcaucagaaauuu

SEQ ID NO: 570064 - RNA, 19 nt, Homo sapiens
  misc_RNA (1)...(19): siRNA sense strand
gaacugguauaacaccuau

SEQ ID NO: 570065 - RNA, 19 nt, Homo sapiens
  misc_RNA (1)...(19): siRNA sense strand
ggacaguggucucuaucuu

SEQ ID NO: 570066 - RNA, 19 nt, Homo sapiens
  misc_RNA (1)...(19): siRNA sense strand
acaaggaccuacugaugua

SEQ ID NO: 570067 - RNA, 19 nt, Homo sapiens
  misc_RNA (1)...(19): siRNA sense strand
cagaaagaguuccagaauu

SEQ ID NO: 570068 - RNA, 19 nt, Homo sapiens
  misc_RNA (1)...(19): siRNA sense strand
ccaagaggcaucagaaauu

SEQ ID NO: 570069 - RNA, 19 nt, Homo sapiens
  misc_RNA (1)...(19): siRNA sense strand
gaaacuuacuuccgaaugc

SEQ ID NO: 570070 - RNA, 19 nt, Homo sapiens
  misc_RNA (1)...(19): siRNA sense strand
guacaaggaccuacugaug

SEQ ID NO: 570071 - RNA, 19 nt, Homo sapiens
  misc_RNA (1)...(19): siRNA sense strand
ugacaaaggagaacucuau

SEQ ID NO: 570072 - RNA, 19 nt, Homo sapiens
  misc_RNA (1)...(19): siRNA sense strand
gaucagagaaacuuacuuc

SEQ ID NO: 570073 - RNA, 19 nt, Homo sapiens
  misc_RNA (1)...(19): siRNA sense strand
gggagcaguuugaagagaa

SEQ ID NO: 570074 - RNA, 19 nt, Homo sapiens
  misc_RNA (1)...(19): siRNA sense strand
agacggaacuccaagagau

SEQ ID NO: 570075 - RNA, 19 nt, Homo sapiens
  misc_RNA (1)...(19): siRNA sense strand
caaaggagaacucuaugga

SEQ ID NO: 570076 - RNA, 19 nt, Homo sapiens
  misc_RNA (1)...(19): siRNA sense strand
gcagguggguucgcauuuc

SEQ ID NO: 570077 - RNA, 19 nt, Homo sapiens
  misc_RNA (1)...(19): siRNA sense strand
ccagaaagaguuccagaau

SEQ ID NO: 570078 - RNA, 19 nt, Homo sapiens
  misc_RNA (1)...(19): siRNA sense strand
uggaaugaaugacaaagga

SEQ ID NO: 570079 - RNA, 19 nt, Homo sapiens
  misc_RNA (1)...(19): siRNA sense strand
gguauaacaccuauucauc

SEQ ID NO: 570080 - RNA, 19 nt, Homo sapiens
  misc_RNA (1)...(19): siRNA sense strand
uaacaccuauucaucuaac

SEQ ID NO: 570081 - RNA, 19 nt, Homo sapiens
  misc_RNA (1)...(19): siRNA sense strand
aaagaguuccagaauugua

SEQ ID NO: 570082 - RNA, 19 nt, Homo sapiens
  misc_RNA (1)...(19): siRNA sense strand
gacaguggucucuaucuug

SEQ ID NO: 570083 - RNA, 19 nt, Homo sapiens
  misc_RNA (1)...(19): siRNA sense strand
gaaagaguuccagaauugu

SEQ ID NO: 570084 - RNA, 19 nt, Homo sapiens
  misc_RNA (1)...(19): siRNA sense strand
acacauuucuuaccuagac

SEQ ID NO: 570085 - RNA, 19 nt, Homo sapiens
  misc_RNA (1)...(19): siRNA sense strand
guauaacaccuauucaucu

SEQ ID NO: 570086 - RNA, 19 nt, Homo sapiens
  misc_RNA (1)...(19): siRNA sense strand
ccucuucgguaucuuggaa

SEQ ID NO: 570087 - RNA, 19 nt, Homo sapiens
  misc_RNA (1)...(19): siRNA sense strand
uuagggagcaguuugaaga

SEQ ID NO: 570088 - RNA, 19 nt, Homo sapiens
  misc_RNA (1)...(19): siRNA sense strand
caaagacggaacuccaaga

SEQ ID NO: 570089 - RNA, 19 nt, Homo sapiens
  misc_RNA (1)...(19): siRNA sense strand
gacacuggccgcagguauu

SEQ ID NO: 570090 - RNA, 19 nt, Homo sapiens
  misc_RNA (1)...(19): siRNA sense strand
ggagaacucuauggaucag

SEQ ID NO: 570091 - RNA, 19 nt, Homo sapiens
  misc_RNA (1)...(19): siRNA sense strand
uugaagagaacugguauaa

SEQ ID NO: 570092 - RNA, 19 nt, Homo sapiens
  misc_RNA (1)...(19): siRNA sense strand
caccuauucaucuaacaua

SEQ ID NO: 570093 - RNA, 19 nt, Homo sapiens
  misc_RNA (1)...(19): siRNA sense strand
gguccaagaggcaucagaa

SEQ ID NO: 570094 - RNA, 19 nt, Homo sapiens
  misc_RNA (1)...(19): siRNA sense strand
accaguggauccagaaaga

SEQ ID NO: 570095 - RNA, 19 nt, Homo sapiens
  misc_RNA (1)...(19): siRNA sense strand
aaacuuacuuccgaaugca

SEQ ID NO: 570096 - RNA, 19 nt, Homo sapiens
  misc_RNA (1)...(19): siRNA sense strand
uacaaggaccuacugaugu

SEQ ID NO: 570097 - RNA, 19 nt, Homo sapiens
  misc_RNA (1)...(19): siRNA sense strand
ggguucgcauuuccuguug

SEQ ID NO: 570098 - RNA, 19 nt, Homo sapiens
  misc_RNA (1)...(19): siRNA sense strand
acacuggccgcagguauuu

SEQ ID NO: 570099 - RNA, 19 nt, Homo sapiens
  misc_RNA (1)...(19): siRNA sense strand
gagaaacuuacuuccgaau

SEQ ID NO: 570100 - RNA, 19 nt, Homo sapiens
  misc_RNA (1)...(19): siRNA sense strand
gacaaaggagaacucuaug

SEQ ID NO: 570101 - RNA, 19 nt, Homo sapiens
  misc_RNA (1)...(19): siRNA sense strand
aagaggcaucagaaauuua

SEQ ID NO: 570102 - RNA, 19 nt, Homo sapiens
  misc_RNA (1)...(19): siRNA sense strand
uauuagagguguggacagu

SEQ ID NO: 570103 - RNA, 19 nt, Homo sapiens
  misc_RNA (1)...(19): siRNA sense strand
ggagcaguuugaagagaac

SEQ ID NO: 570104 - RNA, 19 nt, Homo sapiens
  misc_RNA (1)...(19): siRNA sense strand
uguggacaguggucucuau

SEQ ID NO: 570105 - RNA, 19 nt, Homo sapiens
  misc_RNA (1)...(19): siRNA sense strand
uuccagaauuguacaagga

SEQ ID NO: 570106 - RNA, 19 nt, Homo sapiens
  misc_RNA (1)...(19): siRNA sense strand
gcaggaccacagccucuuc

SEQ ID NO: 570107 - RNA, 19 nt, Homo sapiens
  misc_RNA (1)...(19): siRNA sense strand
gguauuuuguggcacuuaa

SEQ ID NO: 570108 - RNA, 19 nt, Homo sapiens
  misc_RNA (1)...(19): siRNA sense strand
gaaugacaaaggagaacuc

SEQ ID NO: 570109 - RNA, 19 nt, Homo sapiens
  misc_RNA (1)...(19): siRNA sense strand
gacggaacuccaagagaug

SEQ ID NO: 570110 - RNA, 19 nt, Homo sapiens
  misc_RNA (1)...(19): siRNA sense strand
auauaaacauggagacacu

SEQ ID NO: 570111 - RNA, 19 nt, Homo sapiens
  misc_RNA (1)...(19): siRNA sense strand
aguggucucuaucuuggaa

SEQ ID NO: 570112 - RNA, 19 nt, Homo sapiens
  misc_RNA (1)...(19): siRNA sense strand
cagcagguggguucgcauu

SEQ ID NO: 570113 - RNA, 19 nt, Homo sapiens
  misc_RNA (1)...(19): siRNA sense strand
uaucuuggaaugaaugaca

SEQ ID NO: 570114 - RNA, 19 nt, Homo sapiens
  misc_RNA (1)...(19): siRNA sense strand
aaaggagaacucuauggau

SEQ ID NO: 570115 - RNA, 19 nt, Homo sapiens
  misc_RNA (1)...(19): siRNA sense strand
guccaagaggcaucagaaa

SEQ ID NO: 570116 - RNA, 19 nt, Homo sapiens
  misc_RNA (1)...(19): siRNA sense strand
gaacuuggguggccgugua

SEQ ID NO: 570117 - RNA, 19 nt, Homo sapiens
  misc_RNA (1)...(19): siRNA sense strand
ggaaaggcauugcugagaa

SEQ ID NO: 570118 - RNA, 19 nt, Homo sapiens
  misc_RNA (1)...(19): siRNA sense strand
gaaaggcauugcugagaaa

SEQ ID NO: 570119 - RNA, 19 nt, Homo sapiens
  misc_RNA (1)...(19): siRNA sense strand
ggaagcauuucuugaguuc

SEQ ID NO: 570120 - RNA, 19 nt, Homo sapiens
  misc_RNA (1)...(19): siRNA sense strand
caaauugcuugcagaaaca

SEQ ID NO: 570121 - RNA, 19 nt, Homo sapiens
  misc_RNA (1)...(19): siRNA sense strand
ccaaauugcuugcagaaac

SEQ ID NO: 570122 - RNA, 19 nt, Homo sapiens
  misc_RNA (1)...(19): siRNA sense strand
guucaucucuuguaaggau

SEQ ID NO: 570123 - RNA, 19 nt, Homo sapiens
  misc_RNA (1)...(19): siRNA sense strand
gggaagcauuucuugaguu

SEQ ID NO: 570124 - RNA, 19 nt, Homo sapiens
  misc_RNA (1)...(19): siRNA sense strand
ccacggagauggaacugau

SEQ ID NO: 570125 - RNA, 19 nt, Homo sapiens
  misc_RNA (1)...(19): siRNA sense strand
gggacaagaugagauugaa

SEQ ID NO: 570126 - RNA, 19 nt, Homo sapiens
  misc_RNA (1)...(19): siRNA sense strand
ggagaucucugagguuguc

SEQ ID NO: 570127 - RNA, 19 nt, Homo sapiens
  misc_RNA (1)...(19): siRNA sense strand
agaaacagcugggaugauc

SEQ ID NO: 570128 - RNA, 19 nt, Homo sapiens
  misc_RNA (1)...(19): siRNA sense strand
ggaaagaccacugggacaa

SEQ ID NO: 570129 - RNA, 19 nt, Homo sapiens
  misc_RNA (1)...(19): siRNA sense strand
gacaagaugagauugaaga

SEQ ID NO: 570130 - RNA, 19 nt, Homo sapiens
  misc_RNA (1)...(19): siRNA sense strand
cggcacaguugacuuugaa

SEQ ID NO: 570131 - RNA, 19 nt, Homo sapiens
  misc_RNA (1)...(19): siRNA sense strand
gcagaaacagcugggauga

SEQ ID NO: 570132 - RNA, 19 nt, Homo sapiens
  misc_RNA (1)...(19): siRNA sense strand
gaagaguuugugaagauga

SEQ ID NO: 570133 - RNA, 19 nt, Homo sapiens
  misc_RNA (1)...(19): siRNA sense strand
uguagacuuugaugacuuu

SEQ ID NO: 570134 - RNA, 19 nt, Homo sapiens
  misc_RNA (1)...(19): siRNA sense strand
ggaggcugauguuaaugga

SEQ ID NO: 570135 - RNA, 19 nt, Homo sapiens
  misc_RNA (1)...(19): siRNA sense strand
gcaaauccgcaugaacuug

SEQ ID NO: 570136 - RNA, 19 nt, Homo sapiens
  misc_RNA (1)...(19): siRNA sense strand
uugaagaguuugugaagau

SEQ ID NO: 570137 - RNA, 19 nt, Homo sapiens
  misc_RNA (1)...(19): siRNA sense strand
gcacaguugacuuugaaga

SEQ ID NO: 570138 - RNA, 19 nt, Homo sapiens
  misc_RNA (1)...(19): siRNA sense strand
ggguggccguguagacuuu

SEQ ID NO: 570139 - RNA, 19 nt, Homo sapiens
  misc_RNA (1)...(19): siRNA sense strand
caaggaguuugacacgaau

SEQ ID NO: 570140 - RNA, 19 nt, Homo sapiens
  misc_RNA (1)...(19): siRNA sense strand
ucaugaggacgauggguua

SEQ ID NO: 570141 - RNA, 19 nt, Homo sapiens
  misc_RNA (1)...(19): siRNA sense strand
agacggcacaguugacuuu

SEQ ID NO: 570142 - RNA, 19 nt, Homo sapiens
  misc_RNA (1)...(19): siRNA sense strand
uaauggagacggcacaguu

SEQ ID NO: 570143 - RNA, 19 nt, Homo sapiens
  misc_RNA (1)...(19): siRNA sense strand
agacuuugaugacuuugug

SEQ ID NO: 570144 - RNA, 19 nt, Homo sapiens
  misc_RNA (1)...(19): siRNA sense strand
aaagaccacugggacaaga

SEQ ID NO: 570145 - RNA, 19 nt, Homo sapiens
  misc_RNA (1)...(19): siRNA sense strand
cagcaaauccgcaugaacu

SEQ ID NO: 570146 - RNA, 19 nt, Homo sapiens
  misc_RNA (1)...(19): siRNA sense strand
ggguucaucucuuguaagg

SEQ ID NO: 570147 - RNA, 19 nt, Homo sapiens
  misc_RNA (1)...(19): siRNA sense strand
gaugcgggaugccuucaag

SEQ ID NO: 570148 - RNA, 19 nt, Homo sapiens
  misc_RNA (1)...(19): siRNA sense strand
caguugacuuugaagaguu

SEQ ID NO: 570149 - RNA, 19 nt, Homo sapiens
  misc_RNA (1)...(19): siRNA sense strand
aagcauuucuugaguucga

SEQ ID NO: 570150 - RNA, 19 nt, Homo sapiens
  misc_RNA (1)...(19): siRNA sense strand
gaaagaccacugggacaag

SEQ ID NO: 570151 - RNA, 19 nt, Homo sapiens
  misc_RNA (1)...(19): siRNA sense strand
guguagacuuugaugacuu

SEQ ID NO: 570152 - RNA, 19 nt, Homo sapiens
  misc_RNA (1)...(19): siRNA sense strand
ugaagaguuugugaagaug

SEQ ID NO: 570153 - RNA, 19 nt, Homo sapiens
  misc_RNA (1)...(19): siRNA sense strand
guaaggaucuggggaaucu

SEQ ID NO: 570154 - RNA, 19 nt, Homo sapiens
  misc_RNA (1)...(19): siRNA sense strand
cgggaagcauuucuugagu

SEQ ID NO: 570155 - RNA, 19 nt, Homo sapiens
  misc_RNA (1)...(19): siRNA sense strand
acaguugacuuugaagagu

SEQ ID NO: 570156 - RNA, 19 nt, Homo sapiens
  misc_RNA (1)...(19): siRNA sense strand
gcgggaagcauuucuugag

SEQ ID NO: 570157 - RNA, 19 nt, Homo sapiens
  misc_RNA (1)...(19): siRNA sense strand
gccagcaaauccgcaugaa

SEQ ID NO: 570158 - RNA, 19 nt, Homo sapiens
  misc_RNA (1)...(19): siRNA sense strand
ggacaagaugagauugaag

SEQ ID NO: 570159 - RNA, 19 nt, Homo sapiens
  misc_RNA (1)...(19): siRNA sense strand
gaauggagauggggagauc

SEQ ID NO: 570160 - RNA, 19 nt, Homo sapiens
  misc_RNA (1)...(19): siRNA sense strand
ggaaucucaugaggacgau

SEQ ID NO: 570161 - RNA, 19 nt, Homo sapiens
  misc_RNA (1)...(19): siRNA sense strand
ugagaaacagcgggaaaga

SEQ ID NO: 570162 - RNA, 19 nt, Homo sapiens
  misc_RNA (1)...(19): siRNA sense strand
ggccagcaaauccgcauga

SEQ ID NO: 570163 - RNA, 19 nt, Homo sapiens
  misc_RNA (1)...(19): siRNA sense strand
ugaggacgauggguuacau

SEQ ID NO: 570164 - RNA, 19 nt, Homo sapiens
  misc_RNA (1)...(19): siRNA sense strand
gcauuucuugaguucgaua

SEQ ID NO: 570165 - RNA, 19 nt, Homo sapiens
  misc_RNA (1)...(19): siRNA sense strand
gaagagcugcgggaagcau

SEQ ID NO: 570166 - RNA, 19 nt, Homo sapiens
  misc_RNA (1)...(19): siRNA sense strand
ggagauggaacugauugag

SEQ ID NO: 570167 - RNA, 19 nt, Homo sapiens
  misc_RNA (1)...(19): siRNA sense strand
ccacugggacaagaugaga

SEQ ID NO: 570168 - RNA, 19 nt, Homo sapiens
  misc_RNA (1)...(19): siRNA sense strand
aguugacuuugaagaguuu

SEQ ID NO: 570169 - RNA, 19 nt, Homo sapiens
  misc_RNA (1)...(19): siRNA sense strand
gagacaagcuucuuugaug

SEQ ID NO: 570170 - RNA, 19 nt, Homo sapiens
  misc_RNA (1)...(19): siRNA sense strand
gggaagagcuccuguguca

SEQ ID NO: 570171 - RNA, 19 nt, Homo sapiens
  misc_RNA (1)...(19): siRNA sense strand
ccaaagagguccagaaugc

SEQ ID NO: 570172 - RNA, 19 nt, Homo sapiens
  misc_RNA (1)...(19): siRNA sense strand
agacaagcuucuuugauga

SEQ ID NO: 570173 - RNA, 19 nt, Homo sapiens
  misc_RNA (1)...(19): siRNA sense strand
uguacaagcugaacaggaa

SEQ ID NO: 570174 - RNA, 19 nt, Homo sapiens
  misc_RNA (1)...(19): siRNA sense strand
gaagagcuccugugucaac

SEQ ID NO: 570175 - RNA, 19 nt, Homo sapiens
  misc_RNA (1)...(19): siRNA sense strand
gagaagguguucgaguuca

SEQ ID NO: 570176 - RNA, 19 nt, Homo sapiens
  misc_RNA (1)...(19): siRNA sense strand
gaccaucagugccaugaag

SEQ ID NO: 570177 - RNA, 19 nt, Homo sapiens
  misc_RNA (1)...(19): siRNA sense strand
cugagaagguguucgaguu

SEQ ID NO: 570178 - RNA, 19 nt, Homo sapiens
  misc_RNA (1)...(19): siRNA sense strand
ggagacaagcuucuuugau

SEQ ID NO: 570179 - RNA, 19 nt, Homo sapiens
  misc_RNA (1)...(19): siRNA sense strand
caacaucuacggcaaguac

SEQ ID NO: 570180 - RNA, 19 nt, Homo sapiens
  misc_RNA (1)...(19): siRNA sense strand
ggagcacgcgcaccucauu

SEQ ID NO: 570181 - RNA, 19 nt, Homo sapiens
  misc_RNA (1)...(19): siRNA sense strand
gagcuccugugucaacauc

SEQ ID NO: 570182 - RNA, 19 nt, Homo sapiens
  misc_RNA (1)...(19): siRNA sense strand
ucaacauccuggagaacuu

SEQ ID NO: 570183 - RNA, 19 nt, Homo sapiens
  misc_RNA (1)...(19): siRNA sense strand
ccacggccaucuaugucuu

SEQ ID NO: 570184 - RNA, 19 nt, Homo sapiens
  misc_RNA (1)...(19): siRNA sense strand
ggguggacuuugagaaugu

SEQ ID NO: 570185 - RNA, 19 nt, Homo sapiens
  misc_RNA (1)...(19): siRNA sense strand
guccggagcuucgccaaug

SEQ ID NO: 570186 - RNA, 19 nt, Homo sapiens
  misc_RNA (1)...(19): siRNA sense strand
agaccuuccugcccuacua

SEQ ID NO: 570187 - RNA, 19 nt, Homo sapiens
  misc_RNA (1)...(19): siRNA sense strand
gaggacauccgccacuuca

SEQ ID NO: 570188 - RNA, 19 nt, Homo sapiens
  misc_RNA (1)...(19): siRNA sense strand
gcacggcugucgucaucgu

SEQ ID NO: 570189 - RNA, 19 nt, Homo sapiens
  misc_RNA (1)...(19): siRNA sense strand
gccgagagcgaguaucuga

SEQ ID NO: 570190 - RNA, 19 nt, Homo sapiens
  misc_RNA (1)...(19): siRNA sense strand
ucacggauaacaucuccua

SEQ ID NO: 570191 - RNA, 19 nt, Homo sapiens
  misc_RNA (1)...(19): siRNA sense strand
ggacauccgccacuucaac

SEQ ID NO: 570192 - RNA, 19 nt, Homo sapiens
  misc_RNA (1)...(19): siRNA sense strand
gugguggucuucauguuca

SEQ ID NO: 570193 - RNA, 19 nt, Homo sapiens
  misc_RNA (1)...(19): siRNA sense strand
gcgccuacgaccacaagua

SEQ ID NO: 570194 - RNA, 19 nt, Homo sapiens
  misc_RNA (1)...(19): siRNA sense strand
cauggcagcucuccuuggu

SEQ ID NO: 570195 - RNA, 19 nt, Homo sapiens
  misc_RNA (1)...(19): siRNA sense strand
gaagcacacgguacucauc

SEQ ID NO: 570196 - RNA, 19 nt, Homo sapiens
  misc_RNA (1)...(19): siRNA sense strand
gcugucagguggccagaag

SEQ ID NO: 570197 - RNA, 19 nt, Homo sapiens
  misc_RNA (1)...(19): siRNA sense strand
ccaggagacaagcuucuuu

SEQ ID NO: 570198 - RNA, 19 nt, Homo sapiens
  misc_RNA (1)...(19): siRNA sense strand
cgucuacaguggccugaug

SEQ ID NO: 570199 - RNA, 19 nt, Homo sapiens
  misc_RNA (1)...(19): siRNA sense strand
cuucacagcuggccacaac

SEQ ID NO: 570200 - RNA, 19 nt, Homo sapiens
  misc_RNA (1)...(19): siRNA sense strand
ccacugugccuuucgagau

SEQ ID NO: 570201 - RNA, 19 nt, Homo sapiens
  misc_RNA (1)...(19): siRNA sense strand
guacuugcaccgugugauc

SEQ ID NO: 570202 - RNA, 19 nt, Homo sapiens
  misc_RNA (1)...(19): siRNA sense strand
gcacacgguacucaucauc

SEQ ID NO: 570203 - RNA, 19 nt, Homo sapiens
  misc_RNA (1)...(19): siRNA sense strand
aggcggugguggugacuuu

SEQ ID NO: 570204 - RNA, 19 nt, Homo sapiens
  misc_RNA (1)...(19): siRNA sense strand
ugaccacggccaucuaugu

SEQ ID NO: 570205 - RNA, 19 nt, Homo sapiens
  misc_RNA (1)...(19): siRNA sense strand
caggagacaagcuucuuug

SEQ ID NO: 570206 - RNA, 19 nt, Homo sapiens
  misc_RNA (1)...(19): siRNA sense strand
gagcacgcgcaccucauug

SEQ ID NO: 570207 - RNA, 19 nt, Homo sapiens
  misc_RNA (1)...(19): siRNA sense strand
cgagagcgaguaucugauc

SEQ ID NO: 570208 - RNA, 19 nt, Homo sapiens
  misc_RNA (1)...(19): siRNA sense strand
gcgugguggucuucauguu

SEQ ID NO: 570209 - RNA, 19 nt, Homo sapiens
  misc_RNA (1)...(19): siRNA sense strand
agaaaagcauggaucaguu

SEQ ID NO: 570210 - RNA, 19 nt, Homo sapiens
  misc_RNA (1)...(19): siRNA sense strand
uggugaagcugcugcucuu

SEQ ID NO: 570211 - RNA, 19 nt, Homo sapiens
  misc_RNA (1)...(19): siRNA sense strand
gcacgcgcaccucauugug

SEQ ID NO: 570212 - RNA, 19 nt, Homo sapiens
  misc_RNA (1)...(19): siRNA sense strand
ggaggacauccgccacuuc

SEQ ID NO: 570213 - RNA, 19 nt, Homo sapiens
  misc_RNA (1)...(19): siRNA sense strand
cacugugccuuucgagaug

SEQ ID NO: 570214 - RNA, 19 nt, Homo sapiens
  misc_RNA (1)...(19): siRNA sense strand
acaagcuucuuugaugaga

SEQ ID NO: 570215 - RNA, 19 nt, Homo sapiens
  misc_RNA (1)...(19): siRNA sense strand
gugucaacauccuggagaa

SEQ ID NO: 570216 - RNA, 19 nt, Homo sapiens
  misc_RNA (1)...(19): siRNA sense strand
gcagcugccuacauguacu

SEQ ID NO: 570217 - RNA, 19 nt, Homo sapiens
  misc_RNA (1)...(19): siRNA sense strand
ugaagacuguccggagcuu

SEQ ID NO: 570218 - RNA, 19 nt, Homo sapiens
  misc_RNA (1)...(19): siRNA sense strand
gagaccaucagugccauga

SEQ ID NO: 570219 - RNA, 19 nt, Homo sapiens
  misc_RNA (1)...(19): siRNA sense strand
gaaaagcauggaucaguuc

SEQ ID NO: 570220 - RNA, 19 nt, Homo sapiens
  misc_RNA (1)...(19): siRNA sense strand
gacuuuggccuucaugagu

SEQ ID NO: 570221 - RNA, 19 nt, Homo sapiens
  misc_RNA (1)...(19): siRNA sense strand
cggguggacuuugagaaug

SEQ ID NO: 570222 - RNA, 19 nt, Homo sapiens
  misc_RNA (1)...(19): siRNA sense strand
gcucauuugccgcagguau

SEQ ID NO: 570223 - RNA, 19 nt, Homo sapiens
  misc_RNA (1)...(19): siRNA sense strand
ggaggaggcagagguguac

SEQ ID NO: 570224 - RNA, 19 nt, Homo sapiens
  misc_RNA (1)...(19): siRNA sense strand
caacauccuggagaacuuc

SEQ ID NO: 570225 - RNA, 19 nt, Homo sapiens
  misc_RNA (1)...(19): siRNA sense strand
gaagguguucgaguucauc

SEQ ID NO: 570226 - RNA, 19 nt, Homo sapiens
  misc_RNA (1)...(19): siRNA sense strand
ugagaagguguucgaguuc

SEQ ID NO: 570227 - RNA, 19 nt, Homo sapiens
  misc_RNA (1)...(19): siRNA sense strand
ucucauggcagcucuccuu

SEQ ID NO: 570228 - RNA, 19 nt, Homo sapiens
  misc_RNA (1)...(19): siRNA sense strand
gacauccgccacuucaaca

SEQ ID NO: 570229 - RNA, 19 nt, Homo sapiens
  misc_RNA (1)...(19): siRNA sense strand
ucaugaugguguccaacau

SEQ ID NO: 570230 - RNA, 19 nt, Homo sapiens
  misc_RNA (1)...(19): siRNA sense strand
gcacagagacaggggagaa

SEQ ID NO: 570231 - RNA, 19 nt, Homo sapiens
  misc_RNA (1)...(19): siRNA sense strand
gaccacggccaucuauguc

SEQ ID NO: 570232 - RNA, 19 nt, Homo sapiens
  misc_RNA (1)...(19): siRNA sense strand
ccuacgaccacaaguacuu

SEQ ID NO: 570233 - RNA, 19 nt, Homo sapiens
  misc_RNA (1)...(19): siRNA sense strand
gagacaagcuucuuugaug

SEQ ID NO: 570234 - RNA, 19 nt, Homo sapiens
  misc_RNA (1)...(19): siRNA sense strand
gggaagagcuccuguguca

SEQ ID NO: 570235 - RNA, 19 nt, Homo sapiens
  misc_RNA (1)...(19): siRNA sense strand
ccaaagagguccagaaugc

SEQ ID NO: 570236 - RNA, 19 nt, Homo sapiens
  misc_RNA (1)...(19): siRNA sense strand
agacaagcuucuuugauga

SEQ ID NO: 570237 - RNA, 19 nt, Homo sapiens
  misc_RNA (1)...(19): siRNA sense strand
uguacaagcugaacaggaa

SEQ ID NO: 570238 - RNA, 19 nt, Homo sapiens
  misc_RNA (1)...(19): siRNA sense strand
gaagagcuccugugucaac

SEQ ID NO: 570239 - RNA, 19 nt, Homo sapiens
  misc_RNA (1)...(19): siRNA sense strand
gagaagguguucgaguuca

SEQ ID NO: 570240 - RNA, 19 nt, Homo sapiens
  misc_RNA (1)...(19): siRNA sense strand
gaccaucagugccaugaag

SEQ ID NO: 570241 - RNA, 19 nt, Homo sapiens
  misc_RNA (1)...(19): siRNA sense strand
cugagaagguguucgaguu

SEQ ID NO: 570242 - RNA, 19 nt, Homo sapiens
  misc_RNA (1)...(19): siRNA sense strand
ggagacaagcuucuuugau

SEQ ID NO: 570243 - RNA, 19 nt, Homo sapiens
  misc_RNA (1)...(19): siRNA sense strand
caacaucuacggcaaguac

SEQ ID NO: 570244 - RNA, 19 nt, Homo sapiens
  misc_RNA (1)...(19): siRNA sense strand
ggagcacgcgcaccucauu

SEQ ID NO: 570245 - RNA, 19 nt, Homo sapiens
  misc_RNA (1)...(19): siRNA sense strand
gagcuccugugucaacauc

SEQ ID NO: 570246 - RNA, 19 nt, Homo sapiens
  misc_RNA (1)...(19): siRNA sense strand
ucaacauccuggagaacuu

SEQ ID NO: 570247 - RNA, 19 nt, Homo sapiens
  misc_RNA (1)...(19): siRNA sense strand
ccacggccaucuaugucuu

SEQ ID NO: 570248 - RNA, 19 nt, Homo sapiens
  misc_RNA (1)...(19): siRNA sense strand
ggguggacuuugagaaugu

SEQ ID NO: 570249 - RNA, 19 nt, Homo sapiens
  misc_RNA (1)...(19): siRNA sense strand
guccggagcuucgccaaug

SEQ ID NO: 570250 - RNA, 19 nt, Homo sapiens
  misc_RNA (1)...(19): siRNA sense strand
agaccuuccugcccuacua

SEQ ID NO: 570251 - RNA, 19 nt, Homo sapiens
  misc_RNA (1)...(19): siRNA sense strand
gaggacauccgccacuuca

SEQ ID NO: 570252 - RNA, 19 nt, Homo sapiens
  misc_RNA (1)...(19): siRNA sense strand
gcacggcugucgucaucgu

SEQ ID NO: 570253 - RNA, 19 nt, Homo sapiens
  misc_RNA (1)...(19): siRNA sense strand
gccgagagcgaguaucuga

SEQ ID NO: 570254 - RNA, 19 nt, Homo sapiens
  misc_RNA (1)...(19): siRNA sense strand
ucacggauaacaucuccua

SEQ ID NO: 570255 - RNA, 19 nt, Homo sapiens
  misc_RNA (1)...(19): siRNA sense strand
ggacauccgccacuucaac

SEQ ID NO: 570256 - RNA, 19 nt, Homo sapiens
  misc_RNA (1)...(19): siRNA sense strand
gugguggucuucauguuca

SEQ ID NO: 570257 - RNA, 19 nt, Homo sapiens
  misc_RNA (1)...(19): siRNA sense strand
gcgccuacgaccacaagua

SEQ ID NO: 570258 - RNA, 19 nt, Homo sapiens
  misc_RNA (1)...(19): siRNA sense strand
cauggcagcucuccuuggu

SEQ ID NO: 570259 - RNA, 19 nt, Homo sapiens
  misc_RNA (1)...(19): siRNA sense strand
gaagcacacgguacucauc

SEQ ID NO: 570260 - RNA, 19 nt, Homo sapiens
  misc_RNA (1)...(19): siRNA sense strand
gcugucagguggccagaag

SEQ ID NO: 570261 - RNA, 19 nt, Homo sapiens
  misc_RNA (1)...(19): siRNA sense strand
ccaggagacaagcuucuuu

SEQ ID NO: 570262 - RNA, 19 nt, Homo sapiens
  misc_RNA (1)...(19): siRNA sense strand
cgucuacaguggccugaug

SEQ ID NO: 570263 - RNA, 19 nt, Homo sapiens
  misc_RNA (1)...(19): siRNA sense strand
cuucacagcuggccacaac

SEQ ID NO: 570264 - RNA, 19 nt, Homo sapiens
  misc_RNA (1)...(19): siRNA sense strand
ccacugugccuuucgagau

SEQ ID NO: 570265 - RNA, 19 nt, Homo sapiens
  misc_RNA (1)...(19): siRNA sense strand
guacuugcaccgugugauc

SEQ ID NO: 570266 - RNA, 19 nt, Homo sapiens
  misc_RNA (1)...(19): siRNA sense strand
gcacacgguacucaucauc

SEQ ID NO: 570267 - RNA, 19 nt, Homo sapiens
  misc_RNA (1)...(19): siRNA sense strand
aggcggugguggugacuuu

SEQ ID NO: 570268 - RNA, 19 nt, Homo sapiens
  misc_RNA (1)...(19): siRNA sense strand
ugaccacggccaucuaugu

SEQ ID NO: 570269 - RNA, 19 nt, Homo sapiens
  misc_RNA (1)...(19): siRNA sense strand
caggagacaagcuucuuug

SEQ ID NO: 570270 - RNA, 19 nt, Homo sapiens
  misc_RNA (1)...(19): siRNA sense strand
gagcacgcgcaccucauug

SEQ ID NO: 570271 - RNA, 19 nt, Homo sapiens
  misc_RNA (1)...(19): siRNA sense strand
cgagagcgaguaucugauc

SEQ ID NO: 570272 - RNA, 19 nt, Homo sapiens
  misc_RNA (1)...(19): siRNA sense strand
gcgugguggucuucauguu

SEQ ID NO: 570273 - RNA, 19 nt, Homo sapiens
  misc_RNA (1)...(19): siRNA sense strand
agaaaagcauggaucaguu

SEQ ID NO: 570274 - RNA, 19 nt, Homo sapiens
  misc_RNA (1)...(19): siRNA sense strand
uggugaagcugcugcucuu

SEQ ID NO: 570275 - RNA, 19 nt, Homo sapiens
  misc_RNA (1)...(19): siRNA sense strand
gcacgcgcaccucauugug

SEQ ID NO: 570276 - RNA, 19 nt, Homo sapiens
  misc_RNA (1)...(19): siRNA sense strand
ggaggacauccgccacuuc

SEQ ID NO: 570277 - RNA, 19 nt, Homo sapiens
  misc_RNA (1)...(19): siRNA sense strand
cacugugccuuucgagaug

SEQ ID NO: 570278 - RNA, 19 nt, Homo sapiens
  misc_RNA (1)...(19): siRNA sense strand
acaagcuucuuugaugaga

SEQ ID NO: 570279 - RNA, 19 nt, Homo sapiens
  misc_RNA (1)...(19): siRNA sense strand
gugucaacauccuggagaa

SEQ ID NO: 570280 - RNA, 19 nt, Homo sapiens
  misc_RNA (1)...(19): siRNA sense strand
gcagcugccuacauguacu

SEQ ID NO: 570281 - RNA, 19 nt, Homo sapiens
  misc_RNA (1)...(19): siRNA sense strand
ugaagacuguccggagcuu

SEQ ID NO: 570282 - RNA, 19 nt, Homo sapiens
  misc_RNA (1)...(19): siRNA sense strand
gagaccaucagugccauga

SEQ ID NO: 570283 - RNA, 19 nt, Homo sapiens
  misc_RNA (1)...(19): siRNA sense strand
gaaaagcauggaucaguuc

SEQ ID NO: 570284 - RNA, 19 nt, Homo sapiens
  misc_RNA (1)...(19): siRNA sense strand
gacuuuggccuucaugagu

SEQ ID NO: 570285 - RNA, 19 nt, Homo sapiens
  misc_RNA (1)...(19): siRNA sense strand
cggguggacuuugagaaug

SEQ ID NO: 570286 - RNA, 19 nt, Homo sapiens
  misc_RNA (1)...(19): siRNA sense strand
gcucauuugccgcagguau

SEQ ID NO: 570287 - RNA, 19 nt, Homo sapiens
  misc_RNA (1)...(19): siRNA sense strand
ggaggaggcagagguguac

SEQ ID NO: 570288 - RNA, 19 nt, Homo sapiens
  misc_RNA (1)...(19): siRNA sense strand
caacauccuggagaacuuc

SEQ ID NO: 570289 - RNA, 19 nt, Homo sapiens
  misc_RNA (1)...(19): siRNA sense strand
gaagguguucgaguucauc

SEQ ID NO: 570290 - RNA, 19 nt, Homo sapiens
  misc_RNA (1)...(19): siRNA sense strand
ugagaagguguucgaguuc

SEQ ID NO: 570291 - RNA, 19 nt, Homo sapiens
  misc_RNA (1)...(19): siRNA sense strand
ucucauggcagcucuccuu

SEQ ID NO: 570292 - RNA, 19 nt, Homo sapiens
  misc_RNA (1)...(19): siRNA sense strand
gacauccgccacuucaaca

SEQ ID NO: 570293 - RNA, 19 nt, Homo sapiens
  misc_RNA (1)...(19): siRNA sense strand
ucaugaugguguccaacau

SEQ ID NO: 570294 - RNA, 19 nt, Homo sapiens
  misc_RNA (1)...(19): siRNA sense strand
gcacagagacaggggagaa

SEQ ID NO: 570295 - RNA, 19 nt, Homo sapiens
  misc_RNA (1)...(19): siRNA sense strand
gaccacggccaucuauguc

SEQ ID NO: 570296 - RNA, 19 nt, Homo sapiens
  misc_RNA (1)...(19): siRNA sense strand
ccuacgaccacaaguacuu

SEQ ID NO: 570297 - RNA, 19 nt, Homo sapiens
  misc_RNA (1)...(19): siRNA sense strand
gaaagaagaugacuuagau

SEQ ID NO: 570298 - RNA, 19 nt, Homo sapiens
  misc_RNA (1)...(19): siRNA sense strand
gaagaugacuuagauguug

SEQ ID NO: 570299 - RNA, 19 nt, Homo sapiens
  misc_RNA (1)...(19): siRNA sense strand
gaagaaagacggagacaug

SEQ ID NO: 570300 - RNA, 19 nt, Homo sapiens
  misc_RNA (1)...(19): siRNA sense strand
gaacaagauuaucgaccua

SEQ ID NO: 570301 - RNA, 19 nt, Homo sapiens
  misc_RNA (1)...(19): siRNA sense strand
ggaauuacuuugcuccuau

SEQ ID NO: 570302 - RNA, 19 nt, Homo sapiens
  misc_RNA (1)...(19): siRNA sense strand
gaauucaacucccuucaug

SEQ ID NO: 570303 - RNA, 19 nt, Homo sapiens
  misc_RNA (1)...(19): siRNA sense strand
gaaggaagguauaguagag

SEQ ID NO: 570304 - RNA, 19 nt, Homo sapiens
  misc_RNA (1)...(19): siRNA sense strand
gaaaugauucuuacacaga

SEQ ID NO: 570305 - RNA, 19 nt, Homo sapiens
  misc_RNA (1)...(19): siRNA sense strand
gaauuacuuugcuccuaua

SEQ ID NO: 570306 - RNA, 19 nt, Homo sapiens
  misc_RNA (1)...(19): siRNA sense strand
agaaagaguuggauacaga

SEQ ID NO: 570307 - RNA, 19 nt, Homo sapiens
  misc_RNA (1)...(19): siRNA sense strand
caggagacuuugacuuuaa

SEQ ID NO: 570308 - RNA, 19 nt, Homo sapiens
  misc_RNA (1)...(19): siRNA sense strand
guaaagaggauacucagaa

SEQ ID NO: 570309 - RNA, 19 nt, Homo sapiens
  misc_RNA (1)...(19): siRNA sense strand
ccaggagacuuugacuuua

SEQ ID NO: 570310 - RNA, 19 nt, Homo sapiens
  misc_RNA (1)...(19): siRNA sense strand
ggagagaguuuggagauag

SEQ ID NO: 570311 - RNA, 19 nt, Homo sapiens
  misc_RNA (1)...(19): siRNA sense strand
gagcguagaagaaaugauu

SEQ ID NO: 570312 - RNA, 19 nt, Homo sapiens
  misc_RNA (1)...(19): siRNA sense strand
uggaaagucugaagaaaga

SEQ ID NO: 570313 - RNA, 19 nt, Homo sapiens
  misc_RNA (1)...(19): siRNA sense strand
cacagcaucuuccaaguuu

SEQ ID NO: 570314 - RNA, 19 nt, Homo sapiens
  misc_RNA (1)...(19): siRNA sense strand
aaagaaagcucacauucag

SEQ ID NO: 570315 - RNA, 19 nt, Homo sapiens
  misc_RNA (1)...(19): siRNA sense strand
agaauaccaucaccaauug

SEQ ID NO: 570316 - RNA, 19 nt, Homo sapiens
  misc_RNA (1)...(19): siRNA sense strand
ggacagaaccagagaugga

SEQ ID NO: 570317 - RNA, 19 nt, Homo sapiens
  misc_RNA (1)...(19): siRNA sense strand
uuacagaggucuucguguu

SEQ ID NO: 570318 - RNA, 19 nt, Homo sapiens
  misc_RNA (1)...(19): siRNA sense strand
ugacuggcuuugaugauaa

SEQ ID NO: 570319 - RNA, 19 nt, Homo sapiens
  misc_RNA (1)...(19): siRNA sense strand
gcaacaggcagcuuuagaa

SEQ ID NO: 570320 - RNA, 19 nt, Homo sapiens
  misc_RNA (1)...(19): siRNA sense strand
ggacagaacucggggaauu

SEQ ID NO: 570321 - RNA, 19 nt, Homo sapiens
  misc_RNA (1)...(19): siRNA sense strand
gauuugaaaccucuucuuu

SEQ ID NO: 570322 - RNA, 19 nt, Homo sapiens
  misc_RNA (1)...(19): siRNA sense strand
agagauggauucagaaaca

SEQ ID NO: 570323 - RNA, 19 nt, Homo sapiens
  misc_RNA (1)...(19): siRNA sense strand
ugugaaagaagaugacuua

SEQ ID NO: 570324 - RNA, 19 nt, Homo sapiens
  misc_RNA (1)...(19): siRNA sense strand
uaaagaaagcucacauuca

SEQ ID NO: 570325 - RNA, 19 nt, Homo sapiens
  misc_RNA (1)...(19): siRNA sense strand
gagaaggaucaccgucuua

SEQ ID NO: 570326 - RNA, 19 nt, Homo sapiens
  misc_RNA (1)...(19): siRNA sense strand
gaaguccauuagagaaaga

SEQ ID NO: 570327 - RNA, 19 nt, Homo sapiens
  misc_RNA (1)...(19): siRNA sense strand
gaagaaagaguuggauaca

SEQ ID NO: 570328 - RNA, 19 nt, Homo sapiens
  misc_RNA (1)...(19): siRNA sense strand
caguguagaugaauuggaa

SEQ ID NO: 570329 - RNA, 19 nt, Homo sapiens
  misc_RNA (1)...(19): siRNA sense strand
gcuccaaacuggugugcuu

SEQ ID NO: 570330 - RNA, 19 nt, Homo sapiens
  misc_RNA (1)...(19): siRNA sense strand
aaccagagauggauucaga

SEQ ID NO: 570331 - RNA, 19 nt, Homo sapiens
  misc_RNA (1)...(19): siRNA sense strand
uggcuuugaugauaagaua

SEQ ID NO: 570332 - RNA, 19 nt, Homo sapiens
  misc_RNA (1)...(19): siRNA sense strand
gaacugacuggcuuugaug

SEQ ID NO: 570333 - RNA, 19 nt, Homo sapiens
  misc_RNA (1)...(19): siRNA sense strand
gggaauuacuuugcuccua

SEQ ID NO: 570334 - RNA, 19 nt, Homo sapiens
  misc_RNA (1)...(19): siRNA sense strand
gagagcgugugaaagaaga

SEQ ID NO: 570335 - RNA, 19 nt, Homo sapiens
  misc_RNA (1)...(19): siRNA sense strand
gcuagucacccucucuuaa

SEQ ID NO: 570336 - RNA, 19 nt, Homo sapiens
  misc_RNA (1)...(19): siRNA sense strand
uaaagaggauacucagaag

SEQ ID NO: 570337 - RNA, 19 nt, Homo sapiens
  misc_RNA (1)...(19): siRNA sense strand
gaucaccgucuuagcgaua

SEQ ID NO: 570338 - RNA, 19 nt, Homo sapiens
  misc_RNA (1)...(19): siRNA sense strand
ggaaguccauuagagaaag

SEQ ID NO: 570339 - RNA, 19 nt, Homo sapiens
  misc_RNA (1)...(19): siRNA sense strand
gcagaacaccuagaagaga

SEQ ID NO: 570340 - RNA, 19 nt, Homo sapiens
  misc_RNA (1)...(19): siRNA sense strand
gaagagcuagagagacuug

SEQ ID NO: 570341 - RNA, 19 nt, Homo sapiens
  misc_RNA (1)...(19): siRNA sense strand
ggccaaccguuacaccaaa

SEQ ID NO: 570342 - RNA, 19 nt, Homo sapiens
  misc_RNA (1)...(19): siRNA sense strand
aagaauaccaucaccaauu

SEQ ID NO: 570343 - RNA, 19 nt, Homo sapiens
  misc_RNA (1)...(19): siRNA sense strand
ugaaagaagaugacuuaga

SEQ ID NO: 570344 - RNA, 19 nt, Homo sapiens
  misc_RNA (1)...(19): siRNA sense strand
cagccuuucugcaaauaaa

SEQ ID NO: 570345 - RNA, 19 nt, Homo sapiens
  misc_RNA (1)...(19): siRNA sense strand
ucagaaggccagugaagaa

SEQ ID NO: 570346 - RNA, 19 nt, Homo sapiens
  misc_RNA (1)...(19): siRNA sense strand
ugacuuagauguuguuuuc

SEQ ID NO: 570347 - RNA, 19 nt, Homo sapiens
  misc_RNA (1)...(19): siRNA sense strand
caccaaagaacaagauuau

SEQ ID NO: 570348 - RNA, 19 nt, Homo sapiens
  misc_RNA (1)...(19): siRNA sense strand
cuaccucagugauucguaa

SEQ ID NO: 570349 - RNA, 19 nt, Homo sapiens
  misc_RNA (1)...(19): siRNA sense strand
ggaagaccaugcugaaaau

SEQ ID NO: 570350 - RNA, 19 nt, Homo sapiens
  misc_RNA (1)...(19): siRNA sense strand
cgaacugacuggcuuugau

SEQ ID NO: 570351 - RNA, 19 nt, Homo sapiens
  misc_RNA (1)...(19): siRNA sense strand
gcgcucaggaaguccauua

SEQ ID NO: 570352 - RNA, 19 nt, Homo sapiens
  misc_RNA (1)...(19): siRNA sense strand
gaagccuccugccuccaaa

SEQ ID NO: 570353 - RNA, 19 nt, Homo sapiens
  misc_RNA (1)...(19): siRNA sense strand
gaaguaugggugaaacaga

SEQ ID NO: 570354 - RNA, 19 nt, Homo sapiens
  misc_RNA (1)...(19): siRNA sense strand
gauaagauacuagaagaag

SEQ ID NO: 570355 - RNA, 19 nt, Homo sapiens
  misc_RNA (1)...(19): siRNA sense strand
ugagaaggaucaccgucuu

SEQ ID NO: 570356 - RNA, 19 nt, Homo sapiens
  misc_RNA (1)...(19): siRNA sense strand
gaauuggaauaccgacagu

SEQ ID NO: 570357 - RNA, 19 nt, Homo sapiens
  misc_RNA (1)...(19): siRNA sense strand
ccaagaauaccaucaccaa

SEQ ID NO: 570358 - RNA, 19 nt, Homo sapiens
  misc_RNA (1)...(19): siRNA sense strand
ggucaacaccacaugaaga

SEQ ID NO: 570359 - RNA, 19 nt, Homo sapiens
  misc_RNA (1)...(19): siRNA sense strand
gagagaguuuggagauagu

SEQ ID NO: 570360 - RNA, 19 nt, Homo sapiens
  misc_RNA (1)...(19): siRNA sense strand
cugacuggcuuugaugaua

SEQ ID NO: 570361 - RNA, 19 nt, Homo sapiens
  misc_RNA (1)...(19): siRNA sense strand
cgccaaaguuaucagugua

SEQ ID NO: 570362 - RNA, 19 nt, Homo sapiens
  misc_RNA (1)...(19): siRNA sense strand
gggaguacauccacagcau

SEQ ID NO: 570363 - RNA, 19 nt, Homo sapiens
  misc_RNA (1)...(19): siRNA sense strand
ccaaacagaggccuucaug

SEQ ID NO: 570364 - RNA, 19 nt, Homo sapiens
  misc_RNA (1)...(19): siRNA sense strand
gacuuugacuuuaaugagu

SEQ ID NO: 570365 - RNA, 19 nt, Homo sapiens
  misc_RNA (1)...(19): siRNA sense strand
gaugauaagauacuagaag

SEQ ID NO: 570366 - RNA, 19 nt, Homo sapiens
  misc_RNA (1)...(19): siRNA sense strand
ccacagcaucuuccaaguu

SEQ ID NO: 570367 - RNA, 19 nt, Homo sapiens
  misc_RNA (1)...(19): siRNA sense strand
caaagaacaagauuaucga

SEQ ID NO: 570368 - RNA, 19 nt, Homo sapiens
  misc_RNA (1)...(19): siRNA sense strand
cacaugaccuugcuguaca

SEQ ID NO: 570369 - RNA, 19 nt, Homo sapiens
  misc_RNA (1)...(19): siRNA sense strand
gguagaagcaggucugaag

SEQ ID NO: 570370 - RNA, 19 nt, Homo sapiens
  misc_RNA (1)...(19): siRNA sense strand
gaagaucacaaagggagaa

SEQ ID NO: 570371 - RNA, 19 nt, Homo sapiens
  misc_RNA (1)...(19): siRNA sense strand
gauaguaagcgugucuuug

SEQ ID NO: 570372 - RNA, 19 nt, Homo sapiens
  misc_RNA (1)...(19): siRNA sense strand
gauuaucgaccuaaagcaa

SEQ ID NO: 570373 - RNA, 19 nt, Homo sapiens
  misc_RNA (1)...(19): siRNA sense strand
ccaaagaacaagauuaucg

SEQ ID NO: 570374 - RNA, 19 nt, Homo sapiens
  misc_RNA (1)...(19): siRNA sense strand
guacgagagcaaagagaaa

SEQ ID NO: 570375 - RNA, 19 nt, Homo sapiens
  misc_RNA (1)...(19): siRNA sense strand
caacagcgagugaccaagu

SEQ ID NO: 570376 - RNA, 19 nt, Homo sapiens
  misc_RNA (1)...(19): siRNA sense strand
gaaagacggagacaugacu

SEQ ID NO: 570377 - RNA, 19 nt, Homo sapiens
  misc_RNA (1)...(19): siRNA sense strand
gaccagcaagugaagaauu

SEQ ID NO: 570378 - RNA, 19 nt, Homo sapiens
  misc_RNA (1)...(19): siRNA sense strand
ugaagggcuugaagguuga

SEQ ID NO: 570379 - RNA, 19 nt, Homo sapiens
  misc_RNA (1)...(19): siRNA sense strand
cccaggagacuuugacuuu

SEQ ID NO: 570380 - RNA, 19 nt, Homo sapiens
  misc_RNA (1)...(19): siRNA sense strand
ccucagagacggagcuuug

SEQ ID NO: 570381 - RNA, 19 nt, Homo sapiens
  misc_RNA (1)...(19): siRNA sense strand
acaagauuaucgaccuaaa

SEQ ID NO: 570382 - RNA, 19 nt, Homo sapiens
  misc_RNA (1)...(19): siRNA sense strand
ggagaaguaugggugaaac

SEQ ID NO: 570383 - RNA, 19 nt, Homo sapiens
  misc_RNA (1)...(19): siRNA sense strand
augcuuggcuucgaugaua

SEQ ID NO: 570384 - RNA, 19 nt, Homo sapiens
  misc_RNA (1)...(19): siRNA sense strand
gagagagggacuucaagga

SEQ ID NO: 570385 - RNA, 19 nt, Homo sapiens
  misc_RNA (1)...(19): siRNA sense strand
aaguaugggugaaacagaa

SEQ ID NO: 570386 - RNA, 19 nt, Homo sapiens
  misc_RNA (1)...(19): siRNA sense strand
guacauccacagcaucuuc

SEQ ID NO: 570387 - RNA, 19 nt, Homo sapiens
  misc_RNA (1)...(19): siRNA sense strand
ccagagauggauucagaaa

SEQ ID NO: 570388 - RNA, 19 nt, Homo sapiens
  misc_RNA (1)...(19): siRNA sense strand
gagaccugcuucuuccaau

SEQ ID NO: 570389 - RNA, 19 nt, Homo sapiens
  misc_RNA (1)...(19): siRNA sense strand
uuaaagaaagcucacauuc

SEQ ID NO: 570390 - RNA, 19 nt, Homo sapiens
  misc_RNA (1)...(19): siRNA sense strand
ccaaaguuaucaguguaga

SEQ ID NO: 570391 - RNA, 19 nt, Homo sapiens
  misc_RNA (1)...(19): siRNA sense strand
cuagucacccucucuuaaa

SEQ ID NO: 570392 - RNA, 19 nt, Homo sapiens
  misc_RNA (1)...(19): siRNA sense strand
acaccaaagaacaagauua

SEQ ID NO: 570393 - RNA, 19 nt, Homo sapiens
  misc_RNA (1)...(19): siRNA sense strand
acucggagauccauuccaa

SEQ ID NO: 570394 - RNA, 19 nt, Homo sapiens
  misc_RNA (1)...(19): siRNA sense strand
ugacuaccuucgcccaaga

SEQ ID NO: 570395 - RNA, 19 nt, Homo sapiens
  misc_RNA (1)...(19): siRNA sense strand
caaagucagccgaaaccuu

SEQ ID NO: 570396 - RNA, 19 nt, Homo sapiens
  misc_RNA (1)...(19): siRNA sense strand
caugcuuucuccuuccuuu

SEQ ID NO: 570397 - RNA, 19 nt, Homo sapiens
  misc_RNA (1)...(19): siRNA sense strand
cgaaagcccuucuguguua

SEQ ID NO: 570398 - RNA, 19 nt, Homo sapiens
  misc_RNA (1)...(19): siRNA sense strand
gggaggcacuuggaaauua

SEQ ID NO: 570399 - RNA, 19 nt, Homo sapiens
  misc_RNA (1)...(19): siRNA sense strand
gagaaacucuguugucugu

SEQ ID NO: 570400 - RNA, 19 nt, Homo sapiens
  misc_RNA (1)...(19): siRNA sense strand
gacauguuguguagaauua

SEQ ID NO: 570401 - RNA, 19 nt, Homo sapiens
  misc_RNA (1)...(19): siRNA sense strand
caacacaggugccaauuag

SEQ ID NO: 570402 - RNA, 19 nt, Homo sapiens
  misc_RNA (1)...(19): siRNA sense strand
gggcaaaucacaucagaua

SEQ ID NO: 570403 - RNA, 19 nt, Homo sapiens
  misc_RNA (1)...(19): siRNA sense strand
gcacugaugauguauauga

SEQ ID NO: 570404 - RNA, 19 nt, Homo sapiens
  misc_RNA (1)...(19): siRNA sense strand
uaacuuggcugggaagauu

SEQ ID NO: 570405 - RNA, 19 nt, Homo sapiens
  misc_RNA (1)...(19): siRNA sense strand
aaucacagcuugguacaua

SEQ ID NO: 570406 - RNA, 19 nt, Homo sapiens
  misc_RNA (1)...(19): siRNA sense strand
ggaaaaggaugccaauaaa

SEQ ID NO: 570407 - RNA, 19 nt, Homo sapiens
  misc_RNA (1)...(19): siRNA sense strand
uuacgcagcugaugagaaa

SEQ ID NO: 570408 - RNA, 19 nt, Homo sapiens
  misc_RNA (1)...(19): siRNA sense strand
caaaucacaucagauaaga

SEQ ID NO: 570409 - RNA, 19 nt, Homo sapiens
  misc_RNA (1)...(19): siRNA sense strand
gcaacacaggugccaauua

SEQ ID NO: 570410 - RNA, 19 nt, Homo sapiens
  misc_RNA (1)...(19): siRNA sense strand
cagcuugccucaugucaaa

SEQ ID NO: 570411 - RNA, 19 nt, Homo sapiens
  misc_RNA (1)...(19): siRNA sense strand
gagggaauccaaauuguuu

SEQ ID NO: 570412 - RNA, 19 nt, Homo sapiens
  misc_RNA (1)...(19): siRNA sense strand
ccagaaacacuuugagaaa

SEQ ID NO: 570413 - RNA, 19 nt, Homo sapiens
  misc_RNA (1)...(19): siRNA sense strand
gaaacucuguugucugucu

SEQ ID NO: 570414 - RNA, 19 nt, Homo sapiens
  misc_RNA (1)...(19): siRNA sense strand
gcagucagaagcuaaguuu

SEQ ID NO: 570415 - RNA, 19 nt, Homo sapiens
  misc_RNA (1)...(19): siRNA sense strand
gaacaacaccgccagaaac

SEQ ID NO: 570416 - RNA, 19 nt, Homo sapiens
  misc_RNA (1)...(19): siRNA sense strand
ggaacugaauauacaacuu

SEQ ID NO: 570417 - RNA, 19 nt, Homo sapiens
  misc_RNA (1)...(19): siRNA sense strand
agucaaaucucaccaagga

SEQ ID NO: 570418 - RNA, 19 nt, Homo sapiens
  misc_RNA (1)...(19): siRNA sense strand
gcaaaucacaucagauaag

SEQ ID NO: 570419 - RNA, 19 nt, Homo sapiens
  misc_RNA (1)...(19): siRNA sense strand
agacagagacagacacuuu

SEQ ID NO: 570420 - RNA, 19 nt, Homo sapiens
  misc_RNA (1)...(19): siRNA sense strand
caaggaagacugagguuug

SEQ ID NO: 570421 - RNA, 19 nt, Homo sapiens
  misc_RNA (1)...(19): siRNA sense strand
ggacauguuguguagaauu

SEQ ID NO: 570422 - RNA, 19 nt, Homo sapiens
  misc_RNA (1)...(19): siRNA sense strand
gcaucagacucucuaagga

SEQ ID NO: 570423 - RNA, 19 nt, Homo sapiens
  misc_RNA (1)...(19): siRNA sense strand
aaacauuacguccauauga

SEQ ID NO: 570424 - RNA, 19 nt, Homo sapiens
  misc_RNA (1)...(19): siRNA sense strand
gcccucagcuugccucaug

SEQ ID NO: 570425 - RNA, 19 nt, Homo sapiens
  misc_RNA (1)...(19): siRNA sense strand
ccgaggaacugaauauaca

SEQ ID NO: 570426 - RNA, 19 nt, Homo sapiens
  misc_RNA (1)...(19): siRNA sense strand
uauagaggauggcaaggaa

SEQ ID NO: 570427 - RNA, 19 nt, Homo sapiens
  misc_RNA (1)...(19): siRNA sense strand
guuuauaacugaugaagag

SEQ ID NO: 570428 - RNA, 19 nt, Homo sapiens
  misc_RNA (1)...(19): siRNA sense strand
gauaagaagagccgagaga

SEQ ID NO: 570429 - RNA, 19 nt, Homo sapiens
  misc_RNA (1)...(19): siRNA sense strand
ggaugccaauaaagaguuu

SEQ ID NO: 570430 - RNA, 19 nt, Homo sapiens
  misc_RNA (1)...(19): siRNA sense strand
ggaagccgcucucuuacac

SEQ ID NO: 570431 - RNA, 19 nt, Homo sapiens
  misc_RNA (1)...(19): siRNA sense strand
caacagguccuucggaaag

SEQ ID NO: 570432 - RNA, 19 nt, Homo sapiens
  misc_RNA (1)...(19): siRNA sense strand
ggaaacauuacguccauau

SEQ ID NO: 570433 - RNA, 19 nt, Homo sapiens
  misc_RNA (1)...(19): siRNA sense strand
cgagcuaucagaauuauga

SEQ ID NO: 570434 - RNA, 19 nt, Homo sapiens
  misc_RNA (1)...(19): siRNA sense strand
acacagcccuuggcacuga

SEQ ID NO: 570435 - RNA, 19 nt, Homo sapiens
  misc_RNA (1)...(19): siRNA sense strand
caacaccauugcaaaccaa

SEQ ID NO: 570436 - RNA, 19 nt, Homo sapiens
  misc_RNA (1)...(19): siRNA sense strand
agacugagguuugcucgaa

SEQ ID NO: 570437 - RNA, 19 nt, Homo sapiens
  misc_RNA (1)...(19): siRNA sense strand
guacagaugcccucagcuu

SEQ ID NO: 570438 - RNA, 19 nt, Homo sapiens
  misc_RNA (1)...(19): siRNA sense strand
ccacagacgaucucaguau

SEQ ID NO: 570439 - RNA, 19 nt, Homo sapiens
  misc_RNA (1)...(19): siRNA sense strand
uaagaagagccgagagaaa

SEQ ID NO: 570440 - RNA, 19 nt, Homo sapiens
  misc_RNA (1)...(19): siRNA sense strand
caucucagagcauuuguaa

SEQ ID NO: 570441 - RNA, 19 nt, Homo sapiens
  misc_RNA (1)...(19): siRNA sense strand
gcgcuuagcccuacuaugc

SEQ ID NO: 570442 - RNA, 19 nt, Homo sapiens
  misc_RNA (1)...(19): siRNA sense strand
ggccugcaguucauucuga

SEQ ID NO: 570443 - RNA, 19 nt, Homo sapiens
  misc_RNA (1)...(19): siRNA sense strand
gaaaauaacagcagaacau

SEQ ID NO: 570444 - RNA, 19 nt, Homo sapiens
  misc_RNA (1)...(19): siRNA sense strand
ggagggaauccaaauuguu

SEQ ID NO: 570445 - RNA, 19 nt, Homo sapiens
  misc_RNA (1)...(19): siRNA sense strand
gaucaucucagagcauuug

SEQ ID NO: 570446 - RNA, 19 nt, Homo sapiens
  misc_RNA (1)...(19): siRNA sense strand
cagggaagcugccuuugca

SEQ ID NO: 570447 - RNA, 19 nt, Homo sapiens
  misc_RNA (1)...(19): siRNA sense strand
gcaaggaagacugagguuu

SEQ ID NO: 570448 - RNA, 19 nt, Homo sapiens
  misc_RNA (1)...(19): siRNA sense strand
ggaagcugccuuugcauca

SEQ ID NO: 570449 - RNA, 19 nt, Homo sapiens
  misc_RNA (1)...(19): siRNA sense strand
gugcagaacuaccuguaca

SEQ ID NO: 570450 - RNA, 19 nt, Homo sapiens
  misc_RNA (1)...(19): siRNA sense strand
cgugaugauugucgucuuu

SEQ ID NO: 570451 - RNA, 19 nt, Homo sapiens
  misc_RNA (1)...(19): siRNA sense strand
gcucacagcaaggaauuaa

SEQ ID NO: 570452 - RNA, 19 nt, Homo sapiens
  misc_RNA (1)...(19): siRNA sense strand
guucuuaucgcuucaauag

SEQ ID NO: 570453 - RNA, 19 nt, Homo sapiens
  misc_RNA (1)...(19): siRNA sense strand
gaaagcccuucuguguuau

SEQ ID NO: 570454 - RNA, 19 nt, Homo sapiens
  misc_RNA (1)...(19): siRNA sense strand
cugaugauguauaugauga

SEQ ID NO: 570455 - RNA, 19 nt, Homo sapiens
  misc_RNA (1)...(19): siRNA sense strand
gaaggucacgaucaucuca

SEQ ID NO: 570456 - RNA, 19 nt, Homo sapiens
  misc_RNA (1)...(19): siRNA sense strand
gaagagacagagacagaca

SEQ ID NO: 570457 - RNA, 19 nt, Homo sapiens
  misc_RNA (1)...(19): siRNA sense strand
gcagcggcaugaaggaugu

SEQ ID NO: 570458 - RNA, 19 nt, Homo sapiens
  misc_RNA (1)...(19): siRNA sense strand
ggaggcacuuggaaauuac

SEQ ID NO: 570459 - RNA, 19 nt, Homo sapiens
  misc_RNA (1)...(19): siRNA sense strand
cccaacaacuuuacagauc

SEQ ID NO: 570460 - RNA, 19 nt, Homo sapiens
  misc_RNA (1)...(19): siRNA sense strand
caccauugcaaaccaaaua

SEQ ID NO: 570461 - RNA, 19 nt, Homo sapiens
  misc_RNA (1)...(19): siRNA sense strand
cgagaggccugcaguucau

SEQ ID NO: 570462 - RNA, 19 nt, Homo sapiens
  misc_RNA (1)...(19): siRNA sense strand
caagcuggacugccuacua

SEQ ID NO: 570463 - RNA, 19 nt, Homo sapiens
  misc_RNA (1)...(19): siRNA sense strand
gaaacauuacguccauaug

SEQ ID NO: 570464 - RNA, 19 nt, Homo sapiens
  misc_RNA (1)...(19): siRNA sense strand
ccaccaaagugcagaagag

SEQ ID NO: 570465 - RNA, 19 nt, Homo sapiens
  misc_RNA (1)...(19): siRNA sense strand
ugacaacuauuggcuaugg

SEQ ID NO: 570466 - RNA, 19 nt, Homo sapiens
  misc_RNA (1)...(19): siRNA sense strand
gcccuucuguguuauagau

SEQ ID NO: 570467 - RNA, 19 nt, Homo sapiens
  misc_RNA (1)...(19): siRNA sense strand
caaggaaaauguucagguu

SEQ ID NO: 570468 - RNA, 19 nt, Homo sapiens
  misc_RNA (1)...(19): siRNA sense strand
acaaaacaguggcugcuua

SEQ ID NO: 570469 - RNA, 19 nt, Homo sapiens
  misc_RNA (1)...(19): siRNA sense strand
guaguuacgcagcugauga

SEQ ID NO: 570470 - RNA, 19 nt, Homo sapiens
  misc_RNA (1)...(19): siRNA sense strand
cccuaacccugcaggcuua

SEQ ID NO: 570471 - RNA, 19 nt, Homo sapiens
  misc_RNA (1)...(19): siRNA sense strand
uggcacugaugauguauau

SEQ ID NO: 570472 - RNA, 19 nt, Homo sapiens
  misc_RNA (1)...(19): siRNA sense strand
ccuuggcacugaugaugua

SEQ ID NO: 570473 - RNA, 19 nt, Homo sapiens
  misc_RNA (1)...(19): siRNA sense strand
agaacuaccuguacaacgu

SEQ ID NO: 570474 - RNA, 19 nt, Homo sapiens
  misc_RNA (1)...(19): siRNA sense strand
ugucuuugguugcuugauu

SEQ ID NO: 570475 - RNA, 19 nt, Homo sapiens
  misc_RNA (1)...(19): siRNA sense strand
caaaaguucucagccaaaa

SEQ ID NO: 570476 - RNA, 19 nt, Homo sapiens
  misc_RNA (1)...(19): siRNA sense strand
cgagggcagucccaccaaa

SEQ ID NO: 570477 - RNA, 19 nt, Homo sapiens
  misc_RNA (1)...(19): siRNA sense strand
cugcagcccuaccaagaaa

SEQ ID NO: 570478 - RNA, 19 nt, Homo sapiens
  misc_RNA (1)...(19): siRNA sense strand
gccagaaacacuuugagaa

SEQ ID NO: 570479 - RNA, 19 nt, Homo sapiens
  misc_RNA (1)...(19): siRNA sense strand
ucuuaucgcuucaauagca

SEQ ID NO: 570480 - RNA, 19 nt, Homo sapiens
  misc_RNA (1)...(19): siRNA sense strand
ccagaggcagccaagauuu

SEQ ID NO: 570481 - RNA, 19 nt, Homo sapiens
  misc_RNA (1)...(19): siRNA sense strand
cgaaggacuugggcaaauc

SEQ ID NO: 570482 - RNA, 19 nt, Homo sapiens
  misc_RNA (1)...(19): siRNA sense strand
gcccuacuaugcacaguca

SEQ ID NO: 570483 - RNA, 19 nt, Homo sapiens
  misc_RNA (1)...(19): siRNA sense strand
agugauagaugcugacaca

SEQ ID NO: 570484 - RNA, 19 nt, Homo sapiens
  misc_RNA (1)...(19): siRNA sense strand
gguuuggaguucaucauuc

SEQ ID NO: 570485 - RNA, 19 nt, Homo sapiens
  misc_RNA (1)...(19): siRNA sense strand
gaucaggucgaccgaggaa

SEQ ID NO: 570486 - RNA, 19 nt, Homo sapiens
  misc_RNA (1)...(19): siRNA sense strand
gaggagaaacucuguuguc

SEQ ID NO: 570487 - RNA, 19 nt, Homo sapiens
  misc_RNA (1)...(19): siRNA sense strand
gggaggagaaacucuguug

SEQ ID NO: 570488 - RNA, 19 nt, Homo sapiens
  misc_RNA (1)...(19): siRNA sense strand
ccaccaacaccauugcaaa

SEQ ID NO: 570489 - RNA, 19 nt, Homo sapiens
  misc_RNA (1)...(19): siRNA sense strand
gaucccaccuuuugaaugu

SEQ ID NO: 570490 - RNA, 19 nt, Homo sapiens
  misc_RNA (1)...(19): siRNA sense strand
aagcuggacugccuacuag

SEQ ID NO: 570491 - RNA, 19 nt, Homo sapiens
  misc_RNA (1)...(19): siRNA sense strand
cacagacgaucucaguaug

SEQ ID NO: 570492 - RNA, 19 nt, Homo sapiens
  misc_RNA (1)...(19): siRNA sense strand
gagccgacaagccucagua

SEQ ID NO: 570493 - RNA, 19 nt, Homo sapiens
  misc_RNA (1)...(19): siRNA sense strand
ggguugcuguugucgauau

SEQ ID NO: 570494 - RNA, 19 nt, Homo sapiens
  misc_RNA (1)...(19): siRNA sense strand
cagguacaguccauagaau

SEQ ID NO: 570495 - RNA, 19 nt, Homo sapiens
  misc_RNA (1)...(19): siRNA sense strand
gaccgaggaacugaauaua

SEQ ID NO: 570496 - RNA, 19 nt, Homo sapiens
  misc_RNA (1)...(19): siRNA sense strand
ggaccguucuaugaggaaa

SEQ ID NO: 570497 - RNA, 19 nt, Homo sapiens
  misc_RNA (1)...(19): siRNA sense strand
gcaccugucuguuggauga

SEQ ID NO: 570498 - RNA, 19 nt, Homo sapiens
  misc_RNA (1)...(19): siRNA sense strand
ggaaagcaccugucuguug

SEQ ID NO: 570499 - RNA, 19 nt, Homo sapiens
  misc_RNA (1)...(19): siRNA sense strand
ucagaaggauggcacauuu

SEQ ID NO: 570500 - RNA, 19 nt, Homo sapiens
  misc_RNA (1)...(19): siRNA sense strand
gagcuggccacucuaguua

SEQ ID NO: 570501 - RNA, 19 nt, Homo sapiens
  misc_RNA (1)...(19): siRNA sense strand
caaaggauuucacauacug

SEQ ID NO: 570502 - RNA, 19 nt, Homo sapiens
  misc_RNA (1)...(19): siRNA sense strand
cugaauagcuuggcgaaug

SEQ ID NO: 570503 - RNA, 19 nt, Homo sapiens
  misc_RNA (1)...(19): siRNA sense strand
ucacagcaccucaaccaaa

SEQ ID NO: 570504 - RNA, 19 nt, Homo sapiens
  misc_RNA (1)...(19): siRNA sense strand
gaacgggaagcuugucaug

SEQ ID NO: 570505 - RNA, 19 nt, Homo sapiens
  misc_RNA (1)...(19): siRNA sense strand
ggacacggccaccaucugu

SEQ ID NO: 570506 - RNA, 19 nt, Homo sapiens
  misc_RNA (1)...(19): siRNA sense strand
ugaauagcuuggcgaaugu

SEQ ID NO: 570507 - RNA, 19 nt, Homo sapiens
  misc_RNA (1)...(19): siRNA sense strand
ccucucccauuuagccuua

SEQ ID NO: 570508 - RNA, 19 nt, Homo sapiens
  misc_RNA (1)...(19): siRNA sense strand
gccaccaucugugcaagua

SEQ ID NO: 570509 - RNA, 19 nt, Homo sapiens
  misc_RNA (1)...(19): siRNA sense strand
ccaaaggauuucacauacu

SEQ ID NO: 570510 - RNA, 19 nt, Homo sapiens
  misc_RNA (1)...(19): siRNA sense strand
ggaagaacgggaagcuugu

SEQ ID NO: 570511 - RNA, 19 nt, Homo sapiens
  misc_RNA (1)...(19): siRNA sense strand
gauggccccuugcgaauuu

SEQ ID NO: 570512 - RNA, 19 nt, Homo sapiens
  misc_RNA (1)...(19): siRNA sense strand
cuccaaaggauuucacaua

SEQ ID NO: 570513 - RNA, 19 nt, Homo sapiens
  misc_RNA (1)...(19): siRNA sense strand
ccagacccucucccauuua

SEQ ID NO: 570514 - RNA, 19 nt, Homo sapiens
  misc_RNA (1)...(19): siRNA sense strand
cucaucaucuucucucuug

SEQ ID NO: 570515 - RNA, 19 nt, Homo sapiens
  misc_RNA (1)...(19): siRNA sense strand
guggaaagcaccugucugu

SEQ ID NO: 570516 - RNA, 19 nt, Homo sapiens
  misc_RNA (1)...(19): siRNA sense strand
uaccagacccucucccauu

SEQ ID NO: 570517 - RNA, 19 nt, Homo sapiens
  misc_RNA (1)...(19): siRNA sense strand
accagacccucucccauuu

SEQ ID NO: 570518 - RNA, 19 nt, Homo sapiens
  misc_RNA (1)...(19): siRNA sense strand
gggauccagaggagaauaa

SEQ ID NO: 570519 - RNA, 19 nt, Homo sapiens
  misc_RNA (1)...(19): siRNA sense strand
guccaauuauucagaagga

SEQ ID NO: 570520 - RNA, 19 nt, Homo sapiens
  misc_RNA (1)...(19): siRNA sense strand
uccaaaggauuucacauac

SEQ ID NO: 570521 - RNA, 19 nt, Homo sapiens
  misc_RNA (1)...(19): siRNA sense strand
cuuccuggguccaauuauu

SEQ ID NO: 570522 - RNA, 19 nt, Homo sapiens
  misc_RNA (1)...(19): siRNA sense strand
gcuggccacucuaguuaca

SEQ ID NO: 570523 - RNA, 19 nt, Homo sapiens
  misc_RNA (1)...(19): siRNA sense strand
gaauuuggggugcugaaua

SEQ ID NO: 570524 - RNA, 19 nt, Homo sapiens
  misc_RNA (1)...(19): siRNA sense strand
cauacugcaucuccuucaa

SEQ ID NO: 570525 - RNA, 19 nt, Homo sapiens
  misc_RNA (1)...(19): siRNA sense strand
cgcaaugggcuucagaauu

SEQ ID NO: 570526 - RNA, 19 nt, Homo sapiens
  misc_RNA (1)...(19): siRNA sense strand
gaugcuggccugcuaugug

SEQ ID NO: 570527 - RNA, 19 nt, Homo sapiens
  misc_RNA (1)...(19): siRNA sense strand
augcagacccugaagguuu

SEQ ID NO: 570528 - RNA, 19 nt, Homo sapiens
  misc_RNA (1)...(19): siRNA sense strand
ccaauggagacuggacaua

SEQ ID NO: 570529 - RNA, 19 nt, Homo sapiens
  misc_RNA (1)...(19): siRNA sense strand
uggcgaauguccucucaca

SEQ ID NO: 570530 - RNA, 19 nt, Homo sapiens
  misc_RNA (1)...(19): siRNA sense strand
cagacccucucccauuuag

SEQ ID NO: 570531 - RNA, 19 nt, Homo sapiens
  misc_RNA (1)...(19): siRNA sense strand
gauuucacauacugcaucu

SEQ ID NO: 570532 - RNA, 19 nt, Homo sapiens
  misc_RNA (1)...(19): siRNA sense strand
ucacauacugcaucuccuu

SEQ ID NO: 570533 - RNA, 19 nt, Homo sapiens
  misc_RNA (1)...(19): siRNA sense strand
acuaucacguggaggaaga

SEQ ID NO: 570534 - RNA, 19 nt, Homo sapiens
  misc_RNA (1)...(19): siRNA sense strand
ccugaagguuucugugucu

SEQ ID NO: 570535 - RNA, 19 nt, Homo sapiens
  misc_RNA (1)...(19): siRNA sense strand
gauccagaggagaauaaga

SEQ ID NO: 570536 - RNA, 19 nt, Homo sapiens
  misc_RNA (1)...(19): siRNA sense strand
gcugggacuccaaaggauu

SEQ ID NO: 570537 - RNA, 19 nt, Homo sapiens
  misc_RNA (1)...(19): siRNA sense strand
cgagggagccugugaugcu

SEQ ID NO: 570538 - RNA, 19 nt, Homo sapiens
  misc_RNA (1)...(19): siRNA sense strand
gcgcaaugggcuucagaau

SEQ ID NO: 570539 - RNA, 19 nt, Homo sapiens
  misc_RNA (1)...(19): siRNA sense strand
cacagcaccucaaccaaaa

SEQ ID NO: 570540 - RNA, 19 nt, Homo sapiens
  misc_RNA (1)...(19): siRNA sense strand
cuucguggcccauguggaa

SEQ ID NO: 570541 - RNA, 19 nt, Homo sapiens
  misc_RNA (1)...(19): siRNA sense strand
caauggagacuggacauac

SEQ ID NO: 570542 - RNA, 19 nt, Homo sapiens
  misc_RNA (1)...(19): siRNA sense strand
gccugggccucaucaucuu

SEQ ID NO: 570543 - RNA, 19 nt, Homo sapiens
  misc_RNA (1)...(19): siRNA sense strand
ugcagacccugaagguuuc

SEQ ID NO: 570544 - RNA, 19 nt, Homo sapiens
  misc_RNA (1)...(19): siRNA sense strand
gaagaacgggaagcuuguc

SEQ ID NO: 570545 - RNA, 19 nt, Homo sapiens
  misc_RNA (1)...(19): siRNA sense strand
uggguccaauuauucagaa

SEQ ID NO: 570546 - RNA, 19 nt, Homo sapiens
  misc_RNA (1)...(19): siRNA sense strand
ugacagagcugguggagua

SEQ ID NO: 570547 - RNA, 19 nt, Homo sapiens
  misc_RNA (1)...(19): siRNA sense strand
gggaggaguuugagaguuu

SEQ ID NO: 570548 - RNA, 19 nt, Homo sapiens
  misc_RNA (1)...(19): siRNA sense strand
gcaagaaccgcuacaagaa

SEQ ID NO: 570549 - RNA, 19 nt, Homo sapiens
  misc_RNA (1)...(19): siRNA sense strand
gaacaaaugcgucccauac

SEQ ID NO: 570550 - RNA, 19 nt, Homo sapiens
  misc_RNA (1)...(19): siRNA sense strand
gagaaaggccggaacaaau

SEQ ID NO: 570551 - RNA, 19 nt, Homo sapiens
  misc_RNA (1)...(19): siRNA sense strand
ccaagggccuggacuguga

SEQ ID NO: 570552 - RNA, 19 nt, Homo sapiens
  misc_RNA (1)...(19): siRNA sense strand
gggaucaggugacccauau

SEQ ID NO: 570553 - RNA, 19 nt, Homo sapiens
  misc_RNA (1)...(19): siRNA sense strand
ugacacaaccgaauacaaa

SEQ ID NO: 570554 - RNA, 19 nt, Homo sapiens
  misc_RNA (1)...(19): siRNA sense strand
ggauuucuaugaccuguau

SEQ ID NO: 570555 - RNA, 19 nt, Homo sapiens
  misc_RNA (1)...(19): siRNA sense strand
ggagaaaggccggaacaaa

SEQ ID NO: 570556 - RNA, 19 nt, Homo sapiens
  misc_RNA (1)...(19): siRNA sense strand
ggacaauggagaccugauu

SEQ ID NO: 570557 - RNA, 19 nt, Homo sapiens
  misc_RNA (1)...(19): siRNA sense strand
gcacaggcaccaucauugu

SEQ ID NO: 570558 - RNA, 19 nt, Homo sapiens
  misc_RNA (1)...(19): siRNA sense strand
gaacaagagggaggagaaa

SEQ ID NO: 570559 - RNA, 19 nt, Homo sapiens
  misc_RNA (1)...(19): siRNA sense strand
augagaaccugcacacuaa

SEQ ID NO: 570560 - RNA, 19 nt, Homo sapiens
  misc_RNA (1)...(19): siRNA sense strand
ggcaagaaccgcuacaaga

SEQ ID NO: 570561 - RNA, 19 nt, Homo sapiens
  misc_RNA (1)...(19): siRNA sense strand
acaaggaggauguguauga

SEQ ID NO: 570562 - RNA, 19 nt, Homo sapiens
  misc_RNA (1)...(19): siRNA sense strand
gggagaaguuugcgacucu

SEQ ID NO: 570563 - RNA, 19 nt, Homo sapiens
  misc_RNA (1)...(19): siRNA sense strand
uaugagaaccugcacacua

SEQ ID NO: 570564 - RNA, 19 nt, Homo sapiens
  misc_RNA (1)...(19): siRNA sense strand
gcuccgaucccacuaguga

SEQ ID NO: 570565 - RNA, 19 nt, Homo sapiens
  misc_RNA (1)...(19): siRNA sense strand
gaucaggugacccauauuc

SEQ ID NO: 570566 - RNA, 19 nt, Homo sapiens
  misc_RNA (1)...(19): siRNA sense strand
cuacaucaaugccaacuac

SEQ ID NO: 570567 - RNA, 19 nt, Homo sapiens
  misc_RNA (1)...(19): siRNA sense strand
auacaaacuccguaccuua

SEQ ID NO: 570568 - RNA, 19 nt, Homo sapiens
  misc_RNA (1)...(19): siRNA sense strand
ggaacaaaugcgucccaua

SEQ ID NO: 570569 - RNA, 19 nt, Homo sapiens
  misc_RNA (1)...(19): siRNA sense strand
ccaacuacaucaagaacca

SEQ ID NO: 570570 - RNA, 19 nt, Homo sapiens
  misc_RNA (1)...(19): siRNA sense strand
acaaaugcgucccauacug

SEQ ID NO: 570571 - RNA, 19 nt, Homo sapiens
  misc_RNA (1)...(19): siRNA sense strand
gagcaugacacaaccgaau

SEQ ID NO: 570572 - RNA, 19 nt, Homo sapiens
  misc_RNA (1)...(19): siRNA sense strand
ucaaguacccgcugaacug

SEQ ID NO: 570573 - RNA, 19 nt, Homo sapiens
  misc_RNA (1)...(19): siRNA sense strand
gggaggagaaagugaagaa

SEQ ID NO: 570574 - RNA, 19 nt, Homo sapiens
  misc_RNA (1)...(19): siRNA sense strand
ggccuggacugugacauug

SEQ ID NO: 570575 - RNA, 19 nt, Homo sapiens
  misc_RNA (1)...(19): siRNA sense strand
agaaaggccggaacaaaug

SEQ ID NO: 570576 - RNA, 19 nt, Homo sapiens
  misc_RNA (1)...(19): siRNA sense strand
gcuaggcccugaugagaac

SEQ ID NO: 570577 - RNA, 19 nt, Homo sapiens
  misc_RNA (1)...(19): siRNA sense strand
cagagcugguggaguacua

SEQ ID NO: 570578 - RNA, 19 nt, Homo sapiens
  misc_RNA (1)...(19): siRNA sense strand
gcaagaaccagggugacuu

SEQ ID NO: 570579 - RNA, 19 nt, Homo sapiens
  misc_RNA (1)...(19): siRNA sense strand
ggaggaguuugagaguuug

SEQ ID NO: 570580 - RNA, 19 nt, Homo sapiens
  misc_RNA (1)...(19): siRNA sense strand
ggagaacagccgugucauc

SEQ ID NO: 570581 - RNA, 19 nt, Homo sapiens
  misc_RNA (1)...(19): siRNA sense strand
aggaggauguguaugagaa

SEQ ID NO: 570582 - RNA, 19 nt, Homo sapiens
  misc_RNA (1)...(19): siRNA sense strand
gacauugacauccagaaga

SEQ ID NO: 570583 - RNA, 19 nt, Homo sapiens
  misc_RNA (1)...(19): siRNA sense strand
ucauugaaaccacuaagaa

SEQ ID NO: 570584 - RNA, 19 nt, Homo sapiens
  misc_RNA (1)...(19): siRNA sense strand
ggccaucgcccaguucauu

SEQ ID NO: 570585 - RNA, 19 nt, Homo sapiens
  misc_RNA (1)...(19): siRNA sense strand
gcaugcagcgugcuuaugg

SEQ ID NO: 570586 - RNA, 19 nt, Homo sapiens
  misc_RNA (1)...(19): siRNA sense strand
gaacucaggggauuucuau

SEQ ID NO: 570587 - RNA, 19 nt, Homo sapiens
  misc_RNA (1)...(19): siRNA sense strand
gagaaccugcacacuaaga

SEQ ID NO: 570588 - RNA, 19 nt, Homo sapiens
  misc_RNA (1)...(19): siRNA sense strand
agacggaggcgcaguacaa

SEQ ID NO: 570589 - RNA, 19 nt, Homo sapiens
  misc_RNA (1)...(19): siRNA sense strand
uaugggcccuacucuguga

SEQ ID NO: 570590 - RNA, 19 nt, Homo sapiens
  misc_RNA (1)...(19): siRNA sense strand
aagaaccgcuacaagaaca

SEQ ID NO: 570591 - RNA, 19 nt, Homo sapiens
  misc_RNA (1)...(19): siRNA sense strand
gcaccaucauugucaucga

SEQ ID NO: 570592 - RNA, 19 nt, Homo sapiens
  misc_RNA (1)...(19): siRNA sense strand
aagcaggaguccgaggaua

SEQ ID NO: 570593 - RNA, 19 nt, Homo sapiens
  misc_RNA (1)...(19): siRNA sense strand
gaaccgcuacaagaacauu

SEQ ID NO: 570594 - RNA, 19 nt, Homo sapiens
  misc_RNA (1)...(19): siRNA sense strand
caagaaccagggugacuuc

SEQ ID NO: 570595 - RNA, 19 nt, Homo sapiens
  misc_RNA (1)...(19): siRNA sense strand
caaggaggauguguaugag

SEQ ID NO: 570596 - RNA, 19 nt, Homo sapiens
  misc_RNA (1)...(19): siRNA sense strand
gaaguuugcgacucugaca

SEQ ID NO: 570597 - RNA, 19 nt, Homo sapiens
  misc_RNA (1)...(19): siRNA sense strand
gcaccaucauccaccucaa

SEQ ID NO: 570598 - RNA, 19 nt, Homo sapiens
  misc_RNA (1)...(19): siRNA sense strand
gggccuggacugugacauu

SEQ ID NO: 570599 - RNA, 19 nt, Homo sapiens
  misc_RNA (1)...(19): siRNA sense strand
agcaggaggugaagaacuu

SEQ ID NO: 570600 - RNA, 19 nt, Homo sapiens
  misc_RNA (1)...(19): siRNA sense strand
gcuacacagugggugguuu

SEQ ID NO: 570601 - RNA, 19 nt, Homo sapiens
  misc_RNA (1)...(19): siRNA sense strand
caggagaacagccguguca

SEQ ID NO: 570602 - RNA, 19 nt, Homo sapiens
  misc_RNA (1)...(19): siRNA sense strand
ggacugugacauugacauc

SEQ ID NO: 570603 - RNA, 19 nt, Homo sapiens
  misc_RNA (1)...(19): siRNA sense strand
agaagcaggaggugaagaa

SEQ ID NO: 570604 - RNA, 19 nt, Homo sapiens
  misc_RNA (1)...(19): siRNA sense strand
ggucagcagacaaggagaa

SEQ ID NO: 570605 - RNA, 19 nt, Homo sapiens
  misc_RNA (1)...(19): siRNA sense strand
uucgggagaucuggcauua

SEQ ID NO: 570606 - RNA, 19 nt, Homo sapiens
  misc_RNA (1)...(19): siRNA sense strand
gacaauggagaccugauuc

SEQ ID NO: 570607 - RNA, 19 nt, Homo sapiens
  misc_RNA (1)...(19): siRNA sense strand
gcccugaugagaacgcuaa

SEQ ID NO: 570608 - RNA, 19 nt, Homo sapiens
  misc_RNA (1)...(19): siRNA sense strand
aggagaaagugaagaagca

SEQ ID NO: 570609 - RNA, 19 nt, Homo sapiens
  misc_RNA (1)...(19): siRNA sense strand
ugaaaccacuaagaagaag

SEQ ID NO: 570610 - RNA, 19 nt, Homo sapiens
  misc_RNA (1)...(19): siRNA sense strand
cggaggcgcaguacaaguu

SEQ ID NO: 570611 - RNA, 19 nt, Homo sapiens
  misc_RNA (1)...(19): siRNA sense strand
caucaaugccaacuacauc

SEQ ID NO: 570612 - RNA, 19 nt, Homo sapiens
  misc_RNA (1)...(19): siRNA sense strand
caagagggaggagaaagug

SEQ ID NO: 570613 - RNA, 19 nt, Homo sapiens
  misc_RNA (1)...(19): siRNA sense strand
gcaguacaaguucaucuac

SEQ ID NO: 570614 - RNA, 19 nt, Homo sapiens
  misc_RNA (1)...(19): siRNA sense strand
aauacaaacuccguaccuu

SEQ ID NO: 570615 - RNA, 19 nt, Homo sapiens
  misc_RNA (1)...(19): siRNA sense strand
gagaaguuugcgacucuga

SEQ ID NO: 570616 - RNA, 19 nt, Homo sapiens
  misc_RNA (1)...(19): siRNA sense strand
gaaaggccggaacaaaugc

SEQ ID NO: 570617 - RNA, 19 nt, Homo sapiens
  misc_RNA (1)...(19): siRNA sense strand
gaaccgaguguuggaacug

SEQ ID NO: 570618 - RNA, 19 nt, Homo sapiens
  misc_RNA (1)...(19): siRNA sense strand
guacgggaacaucaccuau

SEQ ID NO: 570619 - RNA, 19 nt, Homo sapiens
  misc_RNA (1)...(19): siRNA sense strand
cccgagagguggagaaagg

SEQ ID NO: 570620 - RNA, 19 nt, Homo sapiens
  misc_RNA (1)...(19): siRNA sense strand
caagaaccgcuacaagaac

SEQ ID NO: 570621 - RNA, 19 nt, Homo sapiens
  misc_RNA (1)...(19): siRNA sense strand
gaagcaggaguccgaggau

SEQ ID NO: 570622 - RNA, 19 nt, Homo sapiens
  misc_RNA (1)...(19): siRNA sense strand
caaacuccguaccuuacag

SEQ ID NO: 570623 - RNA, 19 nt, Homo sapiens
  misc_RNA (1)...(19): siRNA sense strand
gaauacaaacuccguaccu

SEQ ID NO: 570624 - RNA, 19 nt, Homo sapiens
  misc_RNA (1)...(19): siRNA sense strand
gcaggaguccgaggauaca

SEQ ID NO: 570625 - RNA, 19 nt, Homo sapiens
  misc_RNA (1)...(19): siRNA sense strand
agaacaagagggaggagaa

SEQ ID NO: 570626 - RNA, 19 nt, Homo sapiens
  misc_RNA (1)...(19): siRNA sense strand
ccgcacaggcaccaucauu

SEQ ID NO: 570627 - RNA, 19 nt, Homo sapiens
  misc_RNA (1)...(19): siRNA sense strand
gggcaagaaccgcuacaag

SEQ ID NO: 570628 - RNA, 19 nt, Homo sapiens
  misc_RNA (1)...(19): siRNA sense strand
caucaagaaccagcugcua

SEQ ID NO: 570629 - RNA, 19 nt, Homo sapiens
  misc_RNA (1)...(19): siRNA sense strand
uugaaaccacuaagaagaa

SEQ ID NO: 570630 - RNA, 19 nt, Homo sapiens
  misc_RNA (1)...(19): siRNA sense strand
caucauccaccucaaguac

SEQ ID NO: 570631 - RNA, 19 nt, Homo sapiens
  misc_RNA (1)...(19): siRNA sense strand
gggcaugcagcgugcuuau

SEQ ID NO: 570632 - RNA, 19 nt, Homo sapiens
  misc_RNA (1)...(19): siRNA sense strand
ccagagaacaagggcaaga

SEQ ID NO: 570633 - RNA, 19 nt, Homo sapiens
  misc_RNA (1)...(19): siRNA sense strand
cagcagacaaggagaagag

SEQ ID NO: 570634 - RNA, 19 nt, Homo sapiens
  misc_RNA (1)...(19): siRNA sense strand
gaaccugcacacuaagaac

SEQ ID NO: 570635 - RNA, 19 nt, Homo sapiens
  misc_RNA (1)...(19): siRNA sense strand
gaucaaccagcggcaggaa

SEQ ID NO: 570636 - RNA, 19 nt, Homo sapiens
  misc_RNA (1)...(19): siRNA sense strand
cuacacagugggugguuug

SEQ ID NO: 570637 - RNA, 19 nt, Homo sapiens
  misc_RNA (1)...(19): siRNA sense strand
aaugccaacuacaucaaga

SEQ ID NO: 570638 - RNA, 19 nt, Homo sapiens
  misc_RNA (1)...(19): siRNA sense strand
cuuaugggcccuacucugu

SEQ ID NO: 570639 - RNA, 19 nt, Homo sapiens
  misc_RNA (1)...(19): siRNA sense strand
aagcagcggucagcagaca

SEQ ID NO: 570640 - RNA, 19 nt, Homo sapiens
  misc_RNA (1)...(19): siRNA sense strand
gaggcgcaguacaaguuca

SEQ ID NO: 570641 - RNA, 19 nt, Homo sapiens
  misc_RNA (1)...(19): siRNA sense strand
gcaugacacaaccgaauac

SEQ ID NO: 570642 - RNA, 19 nt, Homo sapiens
  misc_RNA (1)...(19): siRNA sense strand
cagagaacaagggcaagaa

SEQ ID NO: 570643 - RNA, 19 nt, Homo sapiens
  misc_RNA (1)...(19): siRNA sense strand
cagacaaggagaagagcaa

SEQ ID NO: 570644 - RNA, 19 nt, Homo sapiens
  misc_RNA (1)...(19): siRNA sense strand
acauugacauccagaagac

SEQ ID NO: 570645 - RNA, 19 nt, Homo sapiens
  misc_RNA (1)...(19): siRNA sense strand
agagggaggagaaagugaa

SEQ ID NO: 570646 - RNA, 19 nt, Homo sapiens
  misc_RNA (1)...(19): siRNA sense strand
ugacagagcugguggagua

SEQ ID NO: 570647 - RNA, 19 nt, Homo sapiens
  misc_RNA (1)...(19): siRNA sense strand
gggaggaguuugagaguuu

SEQ ID NO: 570648 - RNA, 19 nt, Homo sapiens
  misc_RNA (1)...(19): siRNA sense strand
gcaagaaccgcuacaagaa

SEQ ID NO: 570649 - RNA, 19 nt, Homo sapiens
  misc_RNA (1)...(19): siRNA sense strand
gaacaaaugcgucccauac

SEQ ID NO: 570650 - RNA, 19 nt, Homo sapiens
  misc_RNA (1)...(19): siRNA sense strand
gagaaaggccggaacaaau

SEQ ID NO: 570651 - RNA, 19 nt, Homo sapiens
  misc_RNA (1)...(19): siRNA sense strand
ccaagggccuggacuguga

SEQ ID NO: 570652 - RNA, 19 nt, Homo sapiens
  misc_RNA (1)...(19): siRNA sense strand
gggaucaggugacccauau

SEQ ID NO: 570653 - RNA, 19 nt, Homo sapiens
  misc_RNA (1)...(19): siRNA sense strand
ugacacaaccgaauacaaa

SEQ ID NO: 570654 - RNA, 19 nt, Homo sapiens
  misc_RNA (1)...(19): siRNA sense strand
ggauuucuaugaccuguau

SEQ ID NO: 570655 - RNA, 19 nt, Homo sapiens
  misc_RNA (1)...(19): siRNA sense strand
ggagaaaggccggaacaaa

SEQ ID NO: 570656 - RNA, 19 nt, Homo sapiens
  misc_RNA (1)...(19): siRNA sense strand
ggacaauggagaccugauu

SEQ ID NO: 570657 - RNA, 19 nt, Homo sapiens
  misc_RNA (1)...(19): siRNA sense strand
gcacaggcaccaucauugu

SEQ ID NO: 570658 - RNA, 19 nt, Homo sapiens
  misc_RNA (1)...(19): siRNA sense strand
gaacaagagggaggagaaa

SEQ ID NO: 570659 - RNA, 19 nt, Homo sapiens
  misc_RNA (1)...(19): siRNA sense strand
augagaaccugcacacuaa

SEQ ID NO: 570660 - RNA, 19 nt, Homo sapiens
  misc_RNA (1)...(19): siRNA sense strand
ggcaagaaccgcuacaaga

SEQ ID NO: 570661 - RNA, 19 nt, Homo sapiens
  misc_RNA (1)...(19): siRNA sense strand
acaaggaggauguguauga

SEQ ID NO: 570662 - RNA, 19 nt, Homo sapiens
  misc_RNA (1)...(19): siRNA sense strand
gggagaaguuugcgacucu

SEQ ID NO: 570663 - RNA, 19 nt, Homo sapiens
  misc_RNA (1)...(19): siRNA sense strand
uaugagaaccugcacacua

SEQ ID NO: 570664 - RNA, 19 nt, Homo sapiens
  misc_RNA (1)...(19): siRNA sense strand
gcuccgaucccacuaguga

SEQ ID NO: 570665 - RNA, 19 nt, Homo sapiens
  misc_RNA (1)...(19): siRNA sense strand
gaucaggugacccauauuc

SEQ ID NO: 570666 - RNA, 19 nt, Homo sapiens
  misc_RNA (1)...(19): siRNA sense strand
cuacaucaaugccaacuac

SEQ ID NO: 570667 - RNA, 19 nt, Homo sapiens
  misc_RNA (1)...(19): siRNA sense strand
auacaaacuccguaccuua

SEQ ID NO: 570668 - RNA, 19 nt, Homo sapiens
  misc_RNA (1)...(19): siRNA sense strand
ggaacaaaugcgucccaua

SEQ ID NO: 570669 - RNA, 19 nt, Homo sapiens
  misc_RNA (1)...(19): siRNA sense strand
ccaacuacaucaagaacca

SEQ ID NO: 570670 - RNA, 19 nt, Homo sapiens
  misc_RNA (1)...(19): siRNA sense strand
acaaaugcgucccauacug

SEQ ID NO: 570671 - RNA, 19 nt, Homo sapiens
  misc_RNA (1)...(19): siRNA sense strand
gagcaugacacaaccgaau

SEQ ID NO: 570672 - RNA, 19 nt, Homo sapiens
  misc_RNA (1)...(19): siRNA sense strand
ucaaguacccgcugaacug

SEQ ID NO: 570673 - RNA, 19 nt, Homo sapiens
  misc_RNA (1)...(19): siRNA sense strand
gggaggagaaagugaagaa

SEQ ID NO: 570674 - RNA, 19 nt, Homo sapiens
  misc_RNA (1)...(19): siRNA sense strand
ggccuggacugugacauug

SEQ ID NO: 570675 - RNA, 19 nt, Homo sapiens
  misc_RNA (1)...(19): siRNA sense strand
agaaaggccggaacaaaug

SEQ ID NO: 570676 - RNA, 19 nt, Homo sapiens
  misc_RNA (1)...(19): siRNA sense strand
gcuaggcccugaugagaac

SEQ ID NO: 570677 - RNA, 19 nt, Homo sapiens
  misc_RNA (1)...(19): siRNA sense strand
cagagcugguggaguacua

SEQ ID NO: 570678 - RNA, 19 nt, Homo sapiens
  misc_RNA (1)...(19): siRNA sense strand
gcaagaaccagggugacuu

SEQ ID NO: 570679 - RNA, 19 nt, Homo sapiens
  misc_RNA (1)...(19): siRNA sense strand
ggaggaguuugagaguuug

SEQ ID NO: 570680 - RNA, 19 nt, Homo sapiens
  misc_RNA (1)...(19): siRNA sense strand
ggagaacagccgugucauc

SEQ ID NO: 570681 - RNA, 19 nt, Homo sapiens
  misc_RNA (1)...(19): siRNA sense strand
aggaggauguguaugagaa

SEQ ID NO: 570682 - RNA, 19 nt, Homo sapiens
  misc_RNA (1)...(19): siRNA sense strand
gacauugacauccagaaga

SEQ ID NO: 570683 - RNA, 19 nt, Homo sapiens
  misc_RNA (1)...(19): siRNA sense strand
ucauugaaaccacuaagaa

SEQ ID NO: 570684 - RNA, 19 nt, Homo sapiens
  misc_RNA (1)...(19): siRNA sense strand
ggccaucgcccaguucauu

SEQ ID NO: 570685 - RNA, 19 nt, Homo sapiens
  misc_RNA (1)...(19): siRNA sense strand
gcaugcagcgugcuuaugg

SEQ ID NO: 570686 - RNA, 19 nt, Homo sapiens
  misc_RNA (1)...(19): siRNA sense strand
gaacucaggggauuucuau

SEQ ID NO: 570687 - RNA, 19 nt, Homo sapiens
  misc_RNA (1)...(19): siRNA sense strand
gagaaccugcacacuaaga

SEQ ID NO: 570688 - RNA, 19 nt, Homo sapiens
  misc_RNA (1)...(19): siRNA sense strand
agacggaggcgcaguacaa

SEQ ID NO: 570689 - RNA, 19 nt, Homo sapiens
  misc_RNA (1)...(19): siRNA sense strand
uaugggcccuacucuguga

SEQ ID NO: 570690 - RNA, 19 nt, Homo sapiens
  misc_RNA (1)...(19): siRNA sense strand
aagaaccgcuacaagaaca

SEQ ID NO: 570691 - RNA, 19 nt, Homo sapiens
  misc_RNA (1)...(19): siRNA sense strand
gcaccaucauugucaucga

SEQ ID NO: 570692 - RNA, 19 nt, Homo sapiens
  misc_RNA (1)...(19): siRNA sense strand
aagcaggaguccgaggaua

SEQ ID NO: 570693 - RNA, 19 nt, Homo sapiens
  misc_RNA (1)...(19): siRNA sense strand
gaaccgcuacaagaacauu

SEQ ID NO: 570694 - RNA, 19 nt, Homo sapiens
  misc_RNA (1)...(19): siRNA sense strand
caagaaccagggugacuuc

SEQ ID NO: 570695 - RNA, 19 nt, Homo sapiens
  misc_RNA (1)...(19): siRNA sense strand
caaggaggauguguaugag

SEQ ID NO: 570696 - RNA, 19 nt, Homo sapiens
  misc_RNA (1)...(19): siRNA sense strand
gaaguuugcgacucugaca

SEQ ID NO: 570697 - RNA, 19 nt, Homo sapiens
  misc_RNA (1)...(19): siRNA sense strand
gcaccaucauccaccucaa

SEQ ID NO: 570698 - RNA, 19 nt, Homo sapiens
  misc_RNA (1)...(19): siRNA sense strand
gggccuggacugugacauu

SEQ ID NO: 570699 - RNA, 19 nt, Homo sapiens
  misc_RNA (1)...(19): siRNA sense strand
agcaggaggugaagaacuu

SEQ ID NO: 570700 - RNA, 19 nt, Homo sapiens
  misc_RNA (1)...(19): siRNA sense strand
gcuacacagugggugguuu

SEQ ID NO: 570701 - RNA, 19 nt, Homo sapiens
  misc_RNA (1)...(19): siRNA sense strand
caggagaacagccguguca

SEQ ID NO: 570702 - RNA, 19 nt, Homo sapiens
  misc_RNA (1)...(19): siRNA sense strand
ggacugugacauugacauc

SEQ ID NO: 570703 - RNA, 19 nt, Homo sapiens
  misc_RNA (1)...(19): siRNA sense strand
agaagcaggaggugaagaa

SEQ ID NO: 570704 - RNA, 19 nt, Homo sapiens
  misc_RNA (1)...(19): siRNA sense strand
ggucagcagacaaggagaa

SEQ ID NO: 570705 - RNA, 19 nt, Homo sapiens
  misc_RNA (1)...(19): siRNA sense strand
uucgggagaucuggcauua

SEQ ID NO: 570706 - RNA, 19 nt, Homo sapiens
  misc_RNA (1)...(19): siRNA sense strand
gacaauggagaccugauuc

SEQ ID NO: 570707 - RNA, 19 nt, Homo sapiens
  misc_RNA (1)...(19): siRNA sense strand
gcccugaugagaacgcuaa

SEQ ID NO: 570708 - RNA, 19 nt, Homo sapiens
  misc_RNA (1)...(19): siRNA sense strand
aggagaaagugaagaagca

SEQ ID NO: 570709 - RNA, 19 nt, Homo sapiens
  misc_RNA (1)...(19): siRNA sense strand
ugaaaccacuaagaagaag

SEQ ID NO: 570710 - RNA, 19 nt, Homo sapiens
  misc_RNA (1)...(19): siRNA sense strand
cggaggcgcaguacaaguu

SEQ ID NO: 570711 - RNA, 19 nt, Homo sapiens
  misc_RNA (1)...(19): siRNA sense strand
caucaaugccaacuacauc

SEQ ID NO: 570712 - RNA, 19 nt, Homo sapiens
  misc_RNA (1)...(19): siRNA sense strand
caagagggaggagaaagug

SEQ ID NO: 570713 - RNA, 19 nt, Homo sapiens
  misc_RNA (1)...(19): siRNA sense strand
gcaguacaaguucaucuac

SEQ ID NO: 570714 - RNA, 19 nt, Homo sapiens
  misc_RNA (1)...(19): siRNA sense strand
aauacaaacuccguaccuu

SEQ ID NO: 570715 - RNA, 19 nt, Homo sapiens
  misc_RNA (1)...(19): siRNA sense strand
gagaaguuugcgacucuga

SEQ ID NO: 570716 - RNA, 19 nt, Homo sapiens
  misc_RNA (1)...(19): siRNA sense strand
gaaaggccggaacaaaugc

SEQ ID NO: 570717 - RNA, 19 nt, Homo sapiens
  misc_RNA (1)...(19): siRNA sense strand
gaaccgaguguuggaacug

SEQ ID NO: 570718 - RNA, 19 nt, Homo sapiens
  misc_RNA (1)...(19): siRNA sense strand
guacgggaacaucaccuau

SEQ ID NO: 570719 - RNA, 19 nt, Homo sapiens
  misc_RNA (1)...(19): siRNA sense strand
cccgagagguggagaaagg

SEQ ID NO: 570720 - RNA, 19 nt, Homo sapiens
  misc_RNA (1)...(19): siRNA sense strand
caagaaccgcuacaagaac

SEQ ID NO: 570721 - RNA, 19 nt, Homo sapiens
  misc_RNA (1)...(19): siRNA sense strand
gaagcaggaguccgaggau

SEQ ID NO: 570722 - RNA, 19 nt, Homo sapiens
  misc_RNA (1)...(19): siRNA sense strand
caaacuccguaccuuacag

SEQ ID NO: 570723 - RNA, 19 nt, Homo sapiens
  misc_RNA (1)...(19): siRNA sense strand
gaauacaaacuccguaccu

SEQ ID NO: 570724 - RNA, 19 nt, Homo sapiens
  misc_RNA (1)...(19): siRNA sense strand
gcaggaguccgaggauaca

SEQ ID NO: 570725 - RNA, 19 nt, Homo sapiens
  misc_RNA (1)...(19): siRNA sense strand
agaacaagagggaggagaa

SEQ ID NO: 570726 - RNA, 19 nt, Homo sapiens
  misc_RNA (1)...(19): siRNA sense strand
ccgcacaggcaccaucauu

SEQ ID NO: 570727 - RNA, 19 nt, Homo sapiens
  misc_RNA (1)...(19): siRNA sense strand
gggcaagaaccgcuacaag

SEQ ID NO: 570728 - RNA, 19 nt, Homo sapiens
  misc_RNA (1)...(19): siRNA sense strand
caucaagaaccagcugcua

SEQ ID NO: 570729 - RNA, 19 nt, Homo sapiens
  misc_RNA (1)...(19): siRNA sense strand
uugaaaccacuaagaagaa

SEQ ID NO: 570730 - RNA, 19 nt, Homo sapiens
  misc_RNA (1)...(19): siRNA sense strand
caucauccaccucaaguac

SEQ ID NO: 570731 - RNA, 19 nt, Homo sapiens
  misc_RNA (1)...(19): siRNA sense strand
gggcaugcagcgugcuuau

SEQ ID NO: 570732 - RNA, 19 nt, Homo sapiens
  misc_RNA (1)...(19): siRNA sense strand
ccagagaacaagggcaaga

SEQ ID NO: 570733 - RNA, 19 nt, Homo sapiens
  misc_RNA (1)...(19): siRNA sense strand
cagcagacaaggagaagag

SEQ ID NO: 570734 - RNA, 19 nt, Homo sapiens
  misc_RNA (1)...(19): siRNA sense strand
gaaccugcacacuaagaac

SEQ ID NO: 570735 - RNA, 19 nt, Homo sapiens
  misc_RNA (1)...(19): siRNA sense strand
gaucaaccagcggcaggaa

SEQ ID NO: 570736 - RNA, 19 nt, Homo sapiens
  misc_RNA (1)...(19): siRNA sense strand
cuacacagugggugguuug

SEQ ID NO: 570737 - RNA, 19 nt, Homo sapiens
  misc_RNA (1)...(19): siRNA sense strand
aaugccaacuacaucaaga

SEQ ID NO: 570738 - RNA, 19 nt, Homo sapiens
  misc_RNA (1)...(19): siRNA sense strand
cuuaugggcccuacucugu

SEQ ID NO: 570739 - RNA, 19 nt, Homo sapiens
  misc_RNA (1)...(19): siRNA sense strand
aagcagcggucagcagaca

SEQ ID NO: 570740 - RNA, 19 nt, Homo sapiens
  misc_RNA (1)...(19): siRNA sense strand
gaggcgcaguacaaguuca

SEQ ID NO: 570741 - RNA, 19 nt, Homo sapiens
  misc_RNA (1)...(19): siRNA sense strand
gcaugacacaaccgaauac

SEQ ID NO: 570742 - RNA, 19 nt, Homo sapiens
  misc_RNA (1)...(19): siRNA sense strand
cagagaacaagggcaagaa

SEQ ID NO: 570743 - RNA, 19 nt, Homo sapiens
  misc_RNA (1)...(19): siRNA sense strand
cagacaaggagaagagcaa

SEQ ID NO: 570744 - RNA, 19 nt, Homo sapiens
  misc_RNA (1)...(19): siRNA sense strand
acauugacauccagaagac

SEQ ID NO: 570745 - RNA, 19 nt, Homo sapiens
  misc_RNA (1)...(19): siRNA sense strand
agagggaggagaaagugaa

SEQ ID NO: 570746 - RNA, 19 nt, Homo sapiens
  misc_RNA (1)...(19): siRNA sense strand
ugacagagcugguggagua

SEQ ID NO: 570747 - RNA, 19 nt, Homo sapiens
  misc_RNA (1)...(19): siRNA sense strand
gggaggaguuugagaguuu

SEQ ID NO: 570748 - RNA, 19 nt, Homo sapiens
  misc_RNA (1)...(19): siRNA sense strand
gcaagaaccgcuacaagaa

SEQ ID NO: 570749 - RNA, 19 nt, Homo sapiens
  misc_RNA (1)...(19): siRNA sense strand
gaacaaaugcgucccauac

SEQ ID NO: 570750 - RNA, 19 nt, Homo sapiens
  misc_RNA (1)...(19): siRNA sense strand
gagaaaggccggaacaaau

SEQ ID NO: 570751 - RNA, 19 nt, Homo sapiens
  misc_RNA (1)...(19): siRNA sense strand
ccaagggccuggacuguga

SEQ ID NO: 570752 - RNA, 19 nt, Homo sapiens
  misc_RNA (1)...(19): siRNA sense strand
gggaucaggugacccauau

SEQ ID NO: 570753 - RNA, 19 nt, Homo sapiens
  misc_RNA (1)...(19): siRNA sense strand
ugacacaaccgaauacaaa

SEQ ID NO: 570754 - RNA, 19 nt, Homo sapiens
  misc_RNA (1)...(19): siRNA sense strand
ggauuucuaugaccuguau

SEQ ID NO: 570755 - RNA, 19 nt, Homo sapiens
  misc_RNA (1)...(19): siRNA sense strand
ggagaaaggccggaacaaa

SEQ ID NO: 570756 - RNA, 19 nt, Homo sapiens
  misc_RNA (1)...(19): siRNA sense strand
ggacaauggagaccugauu

SEQ ID NO: 570757 - RNA, 19 nt, Homo sapiens
  misc_RNA (1)...(19): siRNA sense strand
gcacaggcaccaucauugu

SEQ ID NO: 570758 - RNA, 19 nt, Homo sapiens
  misc_RNA (1)...(19): siRNA sense strand
gaacaagagggaggagaaa

SEQ ID NO: 570759 - RNA, 19 nt, Homo sapiens
  misc_RNA (1)...(19): siRNA sense strand
augagaaccugcacacuaa

SEQ ID NO: 570760 - RNA, 19 nt, Homo sapiens
  misc_RNA (1)...(19): siRNA sense strand
ggcaagaaccgcuacaaga

SEQ ID NO: 570761 - RNA, 19 nt, Homo sapiens
  misc_RNA (1)...(19): siRNA sense strand
acaaggaggauguguauga

SEQ ID NO: 570762 - RNA, 19 nt, Homo sapiens
  misc_RNA (1)...(19): siRNA sense strand
gggagaaguuugcgacucu

SEQ ID NO: 570763 - RNA, 19 nt, Homo sapiens
  misc_RNA (1)...(19): siRNA sense strand
uaugagaaccugcacacua

SEQ ID NO: 570764 - RNA, 19 nt, Homo sapiens
  misc_RNA (1)...(19): siRNA sense strand
gcuccgaucccacuaguga

SEQ ID NO: 570765 - RNA, 19 nt, Homo sapiens
  misc_RNA (1)...(19): siRNA sense strand
gaucaggugacccauauuc

SEQ ID NO: 570766 - RNA, 19 nt, Homo sapiens
  misc_RNA (1)...(19): siRNA sense strand
cuacaucaaugccaacuac

SEQ ID NO: 570767 - RNA, 19 nt, Homo sapiens
  misc_RNA (1)...(19): siRNA sense strand
auacaaacuccguaccuua

SEQ ID NO: 570768 - RNA, 19 nt, Homo sapiens
  misc_RNA (1)...(19): siRNA sense strand
ggaacaaaugcgucccaua

SEQ ID NO: 570769 - RNA, 19 nt, Homo sapiens
  misc_RNA (1)...(19): siRNA sense strand
ccaacuacaucaagaacca

SEQ ID NO: 570770 - RNA, 19 nt, Homo sapiens
  misc_RNA (1)...(19): siRNA sense strand
acaaaugcgucccauacug

SEQ ID NO: 570771 - RNA, 19 nt, Homo sapiens
  misc_RNA (1)...(19): siRNA sense strand
gagcaugacacaaccgaau

SEQ ID NO: 570772 - RNA, 19 nt, Homo sapiens
  misc_RNA (1)...(19): siRNA sense strand
ucaaguacccgcugaacug

SEQ ID NO: 570773 - RNA, 19 nt, Homo sapiens
  misc_RNA (1)...(19): siRNA sense strand
ggccuggacugugacauug

SEQ ID NO: 570774 - RNA, 19 nt, Homo sapiens
  misc_RNA (1)...(19): siRNA sense strand
agaaaggccggaacaaaug

SEQ ID NO: 570775 - RNA, 19 nt, Homo sapiens
  misc_RNA (1)...(19): siRNA sense strand
gcuaggcccugaugagaac

SEQ ID NO: 570776 - RNA, 19 nt, Homo sapiens
  misc_RNA (1)...(19): siRNA sense strand
cagagcugguggaguacua

SEQ ID NO: 570777 - RNA, 19 nt, Homo sapiens
  misc_RNA (1)...(19): siRNA sense strand
gcaagaaccagggugacuu

SEQ ID NO: 570778 - RNA, 19 nt, Homo sapiens
  misc_RNA (1)...(19): siRNA sense strand
ggaggaguuugagaguuug

SEQ ID NO: 570779 - RNA, 19 nt, Homo sapiens
  misc_RNA (1)...(19): siRNA sense strand
ggagaacagccgugucauc

SEQ ID NO: 570780 - RNA, 19 nt, Homo sapiens
  misc_RNA (1)...(19): siRNA sense strand
aggaggauguguaugagaa

SEQ ID NO: 570781 - RNA, 19 nt, Homo sapiens
  misc_RNA (1)...(19): siRNA sense strand
gacauugacauccagaaga

SEQ ID NO: 570782 - RNA, 19 nt, Homo sapiens
  misc_RNA (1)...(19): siRNA sense strand
ucauugaaaccacuaagaa

SEQ ID NO: 570783 - RNA, 19 nt, Homo sapiens
  misc_RNA (1)...(19): siRNA sense strand
ggccaucgcccaguucauu

SEQ ID NO: 570784 - RNA, 19 nt, Homo sapiens
  misc_RNA (1)...(19): siRNA sense strand
gcaugcagcgugcuuaugg

SEQ ID NO: 570785 - RNA, 19 nt, Homo sapiens
  misc_RNA (1)...(19): siRNA sense strand
gagaaccugcacacuaaga

SEQ ID NO: 570786 - RNA, 19 nt, Homo sapiens
  misc_RNA (1)...(19): siRNA sense strand
agacggaggcgcaguacaa

SEQ ID NO: 570787 - RNA, 19 nt, Homo sapiens
  misc_RNA (1)...(19): siRNA sense strand
gaacucaggggauuucuau

SEQ ID NO: 570788 - RNA, 19 nt, Homo sapiens
  misc_RNA (1)...(19): siRNA sense strand
uaugggcccuacucuguga

SEQ ID NO: 570789 - RNA, 19 nt, Homo sapiens
  misc_RNA (1)...(19): siRNA sense strand
aagaaccgcuacaagaaca

SEQ ID NO: 570790 - RNA, 19 nt, Homo sapiens
  misc_RNA (1)...(19): siRNA sense strand
gcaccaucauugucaucga

SEQ ID NO: 570791 - RNA, 19 nt, Homo sapiens
  misc_RNA (1)...(19): siRNA sense strand
aagcaggaguccgaggaua

SEQ ID NO: 570792 - RNA, 19 nt, Homo sapiens
  misc_RNA (1)...(19): siRNA sense strand
gaaccgcuacaagaacauu

SEQ ID NO: 570793 - RNA, 19 nt, Homo sapiens
  misc_RNA (1)...(19): siRNA sense strand
gaaguuugcgacucugaca

SEQ ID NO: 570794 - RNA, 19 nt, Homo sapiens
  misc_RNA (1)...(19): siRNA sense strand
caaggaggauguguaugag

SEQ ID NO: 570795 - RNA, 19 nt, Homo sapiens
  misc_RNA (1)...(19): siRNA sense strand
caagaaccagggugacuuc

SEQ ID NO: 570796 - RNA, 19 nt, Homo sapiens
  misc_RNA (1)...(19): siRNA sense strand
gcaccaucauccaccucaa

SEQ ID NO: 570797 - RNA, 19 nt, Homo sapiens
  misc_RNA (1)...(19): siRNA sense strand
gggccuggacugugacauu

SEQ ID NO: 570798 - RNA, 19 nt, Homo sapiens
  misc_RNA (1)...(19): siRNA sense strand
agcaggaggugaagaacuu

SEQ ID NO: 570799 - RNA, 19 nt, Homo sapiens
  misc_RNA (1)...(19): siRNA sense strand
gcuacacagugggugguuu

SEQ ID NO: 570800 - RNA, 19 nt, Homo sapiens
  misc_RNA (1)...(19): siRNA sense strand
caggagaacagccguguca

SEQ ID NO: 570801 - RNA, 19 nt, Homo sapiens
  misc_RNA (1)...(19): siRNA sense strand
ggacugugacauugacauc

SEQ ID NO: 570802 - RNA, 19 nt, Homo sapiens
  misc_RNA (1)...(19): siRNA sense strand
agaagcaggaggugaagaa

SEQ ID NO: 570803 - RNA, 19 nt, Homo sapiens
  misc_RNA (1)...(19): siRNA sense strand
uucgggagaucuggcauua

SEQ ID NO: 570804 - RNA, 19 nt, Homo sapiens
  misc_RNA (1)...(19): siRNA sense strand
gacaauggagaccugauuc

SEQ ID NO: 570805 - RNA, 19 nt, Homo sapiens
  misc_RNA (1)...(19): siRNA sense strand
gcccugaugagaacgcuaa

SEQ ID NO: 570806 - RNA, 19 nt, Homo sapiens
  misc_RNA (1)...(19): siRNA sense strand
ugaaaccacuaagaagaag

SEQ ID NO: 570807 - RNA, 19 nt, Homo sapiens
  misc_RNA (1)...(19): siRNA sense strand
cggaggcgcaguacaaguu

SEQ ID NO: 570808 - RNA, 19 nt, Homo sapiens
  misc_RNA (1)...(19): siRNA sense strand
caucaaugccaacuacauc

SEQ ID NO: 570809 - RNA, 19 nt, Homo sapiens
  misc_RNA (1)...(19): siRNA sense strand
caagagggaggagaaagug

SEQ ID NO: 570810 - RNA, 19 nt, Homo sapiens
  misc_RNA (1)...(19): siRNA sense strand
gcaguacaaguucaucuac

SEQ ID NO: 570811 - RNA, 19 nt, Homo sapiens
  misc_RNA (1)...(19): siRNA sense strand
gagaaguuugcgacucuga

SEQ ID NO: 570812 - RNA, 19 nt, Homo sapiens
  misc_RNA (1)...(19): siRNA sense strand
aauacaaacuccguaccuu

SEQ ID NO: 570813 - RNA, 19 nt, Homo sapiens
  misc_RNA (1)...(19): siRNA sense strand
gaaaggccggaacaaaugc

SEQ ID NO: 570814 - RNA, 19 nt, Homo sapiens
  misc_RNA (1)...(19): siRNA sense strand
gaaccgaguguuggaacug

SEQ ID NO: 570815 - RNA, 19 nt, Homo sapiens
  misc_RNA (1)...(19): siRNA sense strand
guacgggaacaucaccuau

SEQ ID NO: 570816 - RNA, 19 nt, Homo sapiens
  misc_RNA (1)...(19): siRNA sense strand
cccgagagguggagaaagg

SEQ ID NO: 570817 - RNA, 19 nt, Homo sapiens
  misc_RNA (1)...(19): siRNA sense strand
caagaaccgcuacaagaac

SEQ ID NO: 570818 - RNA, 19 nt, Homo sapiens
  misc_RNA (1)...(19): siRNA sense strand
gaagcaggaguccgaggau

SEQ ID NO: 570819 - RNA, 19 nt, Homo sapiens
  misc_RNA (1)...(19): siRNA sense strand
caaacuccguaccuuacag

SEQ ID NO: 570820 - RNA, 19 nt, Homo sapiens
  misc_RNA (1)...(19): siRNA sense strand
gaauacaaacuccguaccu

SEQ ID NO: 570821 - RNA, 19 nt, Homo sapiens
  misc_RNA (1)...(19): siRNA sense strand
gcaggaguccgaggauaca

SEQ ID NO: 570822 - RNA, 19 nt, Homo sapiens
  misc_RNA (1)...(19): siRNA sense strand
agaacaagagggaggagaa

SEQ ID NO: 570823 - RNA, 19 nt, Homo sapiens
  misc_RNA (1)...(19): siRNA sense strand
ccgcacaggcaccaucauu

SEQ ID NO: 570824 - RNA, 19 nt, Homo sapiens
  misc_RNA (1)...(19): siRNA sense strand
gggcaagaaccgcuacaag

SEQ ID NO: 570825 - RNA, 19 nt, Homo sapiens
  misc_RNA (1)...(19): siRNA sense strand
caucaagaaccagcugcua

SEQ ID NO: 570826 - RNA, 19 nt, Homo sapiens
  misc_RNA (1)...(19): siRNA sense strand
caucauccaccucaaguac

SEQ ID NO: 570827 - RNA, 19 nt, Homo sapiens
  misc_RNA (1)...(19): siRNA sense strand
uugaaaccacuaagaagaa

SEQ ID NO: 570828 - RNA, 19 nt, Homo sapiens
  misc_RNA (1)...(19): siRNA sense strand
gggcaugcagcgugcuuau

SEQ ID NO: 570829 - RNA, 19 nt, Homo sapiens
  misc_RNA (1)...(19): siRNA sense strand
ccagagaacaagggcaaga

SEQ ID NO: 570830 - RNA, 19 nt, Homo sapiens
  misc_RNA (1)...(19): siRNA sense strand
gaaccugcacacuaagaac

SEQ ID NO: 570831 - RNA, 19 nt, Homo sapiens
  misc_RNA (1)...(19): siRNA sense strand
gaucaaccagcggcaggaa

SEQ ID NO: 570832 - RNA, 19 nt, Homo sapiens
  misc_RNA (1)...(19): siRNA sense strand
aaugccaacuacaucaaga

SEQ ID NO: 570833 - RNA, 19 nt, Homo sapiens
  misc_RNA (1)...(19): siRNA sense strand
cuacacagugggugguuug

SEQ ID NO: 570834 - RNA, 19 nt, Homo sapiens
  misc_RNA (1)...(19): siRNA sense strand
cuuaugggcccuacucugu

SEQ ID NO: 570835 - RNA, 19 nt, Homo sapiens
  misc_RNA (1)...(19): siRNA sense strand
gaggcgcaguacaaguuca

SEQ ID NO: 570836 - RNA, 19 nt, Homo sapiens
  misc_RNA (1)...(19): siRNA sense strand
gcaugacacaaccgaauac

SEQ ID NO: 570837 - RNA, 19 nt, Homo sapiens
  misc_RNA (1)...(19): siRNA sense strand
cagagaacaagggcaagaa

SEQ ID NO: 570838 - RNA, 19 nt, Homo sapiens
  misc_RNA (1)...(19): siRNA sense strand
acauugacauccagaagac

SEQ ID NO: 570839 - RNA, 19 nt, Homo sapiens
  misc_RNA (1)...(19): siRNA sense strand
ucaaugccaacuacaucaa

SEQ ID NO: 570840 - RNA, 19 nt, Homo sapiens
  misc_RNA (1)...(19): siRNA sense strand
acaagagggaggagaaagu

SEQ ID NO: 570841 - RNA, 19 nt, Homo sapiens
  misc_RNA (1)...(19): siRNA sense strand
ggaggcgcaguacaaguuc

SEQ ID NO: 570842 - RNA, 19 nt, Homo sapiens
  misc_RNA (1)...(19): siRNA sense strand
cgggagaucuggcauuacc

SEQ ID NO: 570843 - RNA, 19 nt, Homo sapiens
  misc_RNA (1)...(19): siRNA sense strand
uggaggccacggucaauga

SEQ ID NO: 570844 - RNA, 19 nt, Homo sapiens
  misc_RNA (1)...(19): siRNA sense strand
gaaaguaauugaacucuuc

SEQ ID NO: 570845 - RNA, 19 nt, Homo sapiens
  misc_RNA (1)...(19): siRNA sense strand
uaaaguaucugcaccaaga

SEQ ID NO: 570846 - RNA, 19 nt, Homo sapiens
  misc_RNA (1)...(19): siRNA sense strand
guaaauguguaccuaauga

SEQ ID NO: 570847 - RNA, 19 nt, Homo sapiens
  misc_RNA (1)...(19): siRNA sense strand
gacauaaagucuucaaaug

SEQ ID NO: 570848 - RNA, 19 nt, Homo sapiens
  misc_RNA (1)...(19): siRNA sense strand
ugacaaggcagacauauuu

SEQ ID NO: 570849 - RNA, 19 nt, Homo sapiens
  misc_RNA (1)...(19): siRNA sense strand
caagacaccaagcaaauua

SEQ ID NO: 570850 - RNA, 19 nt, Homo sapiens
  misc_RNA (1)...(19): siRNA sense strand
ccaagcaaauuaucagaaa

SEQ ID NO: 570851 - RNA, 19 nt, Homo sapiens
  misc_RNA (1)...(19): siRNA sense strand
gaauauggcaagaggguua

SEQ ID NO: 570852 - RNA, 19 nt, Homo sapiens
  misc_RNA (1)...(19): siRNA sense strand
ggaggagaaugguguuauu

SEQ ID NO: 570853 - RNA, 19 nt, Homo sapiens
  misc_RNA (1)...(19): siRNA sense strand
gcaagaggguuaaaguauc

SEQ ID NO: 570854 - RNA, 19 nt, Homo sapiens
  misc_RNA (1)...(19): siRNA sense strand
gaagggaucaguaauuuca

SEQ ID NO: 570855 - RNA, 19 nt, Homo sapiens
  misc_RNA (1)...(19): siRNA sense strand
uaauugaacucuucucugu

SEQ ID NO: 570856 - RNA, 19 nt, Homo sapiens
  misc_RNA (1)...(19): siRNA sense strand
ccaagagguuugucucauu

SEQ ID NO: 570857 - RNA, 19 nt, Homo sapiens
  misc_RNA (1)...(19): siRNA sense strand
caaaugaugaugaugauga

SEQ ID NO: 570858 - RNA, 19 nt, Homo sapiens
  misc_RNA (1)...(19): siRNA sense strand
agaaugguguuauuacuga

SEQ ID NO: 570859 - RNA, 19 nt, Homo sapiens
  misc_RNA (1)...(19): siRNA sense strand
gcagacauauuugccuuug

SEQ ID NO: 570860 - RNA, 19 nt, Homo sapiens
  misc_RNA (1)...(19): siRNA sense strand
caagagguuugucucauuc

SEQ ID NO: 570861 - RNA, 19 nt, Homo sapiens
  misc_RNA (1)...(19): siRNA sense strand
gaucaguaauuucaagaca

SEQ ID NO: 570862 - RNA, 19 nt, Homo sapiens
  misc_RNA (1)...(19): siRNA sense strand
gaggagaaugguguuauua

SEQ ID NO: 570863 - RNA, 19 nt, Homo sapiens
  misc_RNA (1)...(19): siRNA sense strand
gggaaaugaugacuuuauc

SEQ ID NO: 570864 - RNA, 19 nt, Homo sapiens
  misc_RNA (1)...(19): siRNA sense strand
uggaagaacuggaugaauc

SEQ ID NO: 570865 - RNA, 19 nt, Homo sapiens
  misc_RNA (1)...(19): siRNA sense strand
caagaggguuaaaguaucu

SEQ ID NO: 570866 - RNA, 19 nt, Homo sapiens
  misc_RNA (1)...(19): siRNA sense strand
gcacuaaugaagacccuaa

SEQ ID NO: 570867 - RNA, 19 nt, Homo sapiens
  misc_RNA (1)...(19): siRNA sense strand
ggagaaugguguuauuacu

SEQ ID NO: 570868 - RNA, 19 nt, Homo sapiens
  misc_RNA (1)...(19): siRNA sense strand
gaaaagaaacugcuucaug

SEQ ID NO: 570869 - RNA, 19 nt, Homo sapiens
  misc_RNA (1)...(19): siRNA sense strand
ggaagaacuggaugaauca

SEQ ID NO: 570870 - RNA, 19 nt, Homo sapiens
  misc_RNA (1)...(19): siRNA sense strand
ugugggaaaugaugacuuu

SEQ ID NO: 570871 - RNA, 19 nt, Homo sapiens
  misc_RNA (1)...(19): siRNA sense strand
ggcaagaggguuaaaguau

SEQ ID NO: 570872 - RNA, 19 nt, Homo sapiens
  misc_RNA (1)...(19): siRNA sense strand
guucaacuccaacuauaaa

SEQ ID NO: 570873 - RNA, 19 nt, Homo sapiens
  misc_RNA (1)...(19): siRNA sense strand
ggugaaaagucucuaaaug

SEQ ID NO: 570874 - RNA, 19 nt, Homo sapiens
  misc_RNA (1)...(19): siRNA sense strand
ggccuuacuuugugggaaa

SEQ ID NO: 570875 - RNA, 19 nt, Homo sapiens
  misc_RNA (1)...(19): siRNA sense strand
uaaaaucugugauguagga

SEQ ID NO: 570876 - RNA, 19 nt, Homo sapiens
  misc_RNA (1)...(19): siRNA sense strand
ggcagucugugucuugcua

SEQ ID NO: 570877 - RNA, 19 nt, Homo sapiens
  misc_RNA (1)...(19): siRNA sense strand
uaaugaagacccuaaagau

SEQ ID NO: 570878 - RNA, 19 nt, Homo sapiens
  misc_RNA (1)...(19): siRNA sense strand
gaaucauaccagaaaguaa

SEQ ID NO: 570879 - RNA, 19 nt, Homo sapiens
  misc_RNA (1)...(19): siRNA sense strand
uaaaggcgauuuugaaaca

SEQ ID NO: 570880 - RNA, 19 nt, Homo sapiens
  misc_RNA (1)...(19): siRNA sense strand
gauauaaagccagccaaga

SEQ ID NO: 570881 - RNA, 19 nt, Homo sapiens
  misc_RNA (1)...(19): siRNA sense strand
gaacucuucucuguaugca

SEQ ID NO: 570882 - RNA, 19 nt, Homo sapiens
  misc_RNA (1)...(19): siRNA sense strand
ugaaucauaccagaaagua

SEQ ID NO: 570883 - RNA, 19 nt, Homo sapiens
  misc_RNA (1)...(19): siRNA sense strand
aagaagcuguggaggagaa

SEQ ID NO: 570884 - RNA, 19 nt, Homo sapiens
  misc_RNA (1)...(19): siRNA sense strand
ggaugaagcuaagauuuug

SEQ ID NO: 570885 - RNA, 19 nt, Homo sapiens
  misc_RNA (1)...(19): siRNA sense strand
gagaaugguguuauuacug

SEQ ID NO: 570886 - RNA, 19 nt, Homo sapiens
  misc_RNA (1)...(19): siRNA sense strand
uauggaauauggaggugaa

SEQ ID NO: 570887 - RNA, 19 nt, Homo sapiens
  misc_RNA (1)...(19): siRNA sense strand
cuaaugaagacccuaaaga

SEQ ID NO: 570888 - RNA, 19 nt, Homo sapiens
  misc_RNA (1)...(19): siRNA sense strand
aaaagagacuaauggauga

SEQ ID NO: 570889 - RNA, 19 nt, Homo sapiens
  misc_RNA (1)...(19): siRNA sense strand
uaucgaaguguguaucaaa

SEQ ID NO: 570890 - RNA, 19 nt, Homo sapiens
  misc_RNA (1)...(19): siRNA sense strand
ggccaccuauuaauaugga

SEQ ID NO: 570891 - RNA, 19 nt, Homo sapiens
  misc_RNA (1)...(19): siRNA sense strand
gauggcagucugugucuug

SEQ ID NO: 570892 - RNA, 19 nt, Homo sapiens
  misc_RNA (1)...(19): siRNA sense strand
auugaacucuucucuguau

SEQ ID NO: 570893 - RNA, 19 nt, Homo sapiens
  misc_RNA (1)...(19): siRNA sense strand
guuaaaguaucugcaccaa

SEQ ID NO: 570894 - RNA, 19 nt, Homo sapiens
  misc_RNA (1)...(19): siRNA sense strand
guacugggguaaaugugua

SEQ ID NO: 570895 - RNA, 19 nt, Homo sapiens
  misc_RNA (1)...(19): siRNA sense strand
ccugaggcuuguuacauug

SEQ ID NO: 570896 - RNA, 19 nt, Homo sapiens
  misc_RNA (1)...(19): siRNA sense strand
cccugaggcuuguuacauu

SEQ ID NO: 570897 - RNA, 19 nt, Homo sapiens
  misc_RNA (1)...(19): siRNA sense strand
ucaagacaccaagcaaauu

SEQ ID NO: 570898 - RNA, 19 nt, Homo sapiens
  misc_RNA (1)...(19): siRNA sense strand
ggaagggaucaguaauuuc

SEQ ID NO: 570899 - RNA, 19 nt, Homo sapiens
  misc_RNA (1)...(19): siRNA sense strand
gaaagugauuuugaugaug

SEQ ID NO: 570900 - RNA, 19 nt, Homo sapiens
  misc_RNA (1)...(19): siRNA sense strand
auauuugccuuuggccuua

SEQ ID NO: 570901 - RNA, 19 nt, Homo sapiens
  misc_RNA (1)...(19): siRNA sense strand
gugaaaagucucuaaauga

SEQ ID NO: 570902 - RNA, 19 nt, Homo sapiens
  misc_RNA (1)...(19): siRNA sense strand
gcacagagccauggaaacc

SEQ ID NO: 570903 - RNA, 19 nt, Homo sapiens
  misc_RNA (1)...(19): siRNA sense strand
guauuauguucaacuccaa

SEQ ID NO: 570904 - RNA, 19 nt, Homo sapiens
  misc_RNA (1)...(19): siRNA sense strand
ugaugaugaugaugaagau

SEQ ID NO: 570905 - RNA, 19 nt, Homo sapiens
  misc_RNA (1)...(19): siRNA sense strand
aaagaucuccaagagguuu

SEQ ID NO: 570906 - RNA, 19 nt, Homo sapiens
  misc_RNA (1)...(19): siRNA sense strand
uggcaagaggguuaaagua

SEQ ID NO: 570907 - RNA, 19 nt, Homo sapiens
  misc_RNA (1)...(19): siRNA sense strand
gaucauuaucgaagugugu

SEQ ID NO: 570908 - RNA, 19 nt, Homo sapiens
  misc_RNA (1)...(19): siRNA sense strand
acuaauggaugaagcuaag

SEQ ID NO: 570909 - RNA, 19 nt, Homo sapiens
  misc_RNA (1)...(19): siRNA sense strand
gacaaggcagacauauuug

SEQ ID NO: 570910 - RNA, 19 nt, Homo sapiens
  misc_RNA (1)...(19): siRNA sense strand
cgaaguguguaucaaaaga

SEQ ID NO: 570911 - RNA, 19 nt, Homo sapiens
  misc_RNA (1)...(19): siRNA sense strand
ugaagacccuaaagaucgu

SEQ ID NO: 570912 - RNA, 19 nt, Homo sapiens
  misc_RNA (1)...(19): siRNA sense strand
ccucuccguuuaugcagaa

SEQ ID NO: 570913 - RNA, 19 nt, Homo sapiens
  misc_RNA (1)...(19): siRNA sense strand
cagcagccauaauuuuaaa

SEQ ID NO: 570914 - RNA, 19 nt, Homo sapiens
  misc_RNA (1)...(19): siRNA sense strand
gaaaagccuucaucaucca

SEQ ID NO: 570915 - RNA, 19 nt, Homo sapiens
  misc_RNA (1)...(19): siRNA sense strand
gaugaugaugaugaagaua

SEQ ID NO: 570916 - RNA, 19 nt, Homo sapiens
  misc_RNA (1)...(19): siRNA sense strand
uaauauggaagaacuggau

SEQ ID NO: 570917 - RNA, 19 nt, Homo sapiens
  misc_RNA (1)...(19): siRNA sense strand
uauaaagccagccaagauc

SEQ ID NO: 570918 - RNA, 19 nt, Homo sapiens
  misc_RNA (1)...(19): siRNA sense strand
auguucaacuccaacuaua

SEQ ID NO: 570919 - RNA, 19 nt, Homo sapiens
  misc_RNA (1)...(19): siRNA sense strand
ugacuuaauagaagaacga

SEQ ID NO: 570920 - RNA, 19 nt, Homo sapiens
  misc_RNA (1)...(19): siRNA sense strand
aaagaaacugcuucaugga

SEQ ID NO: 570921 - RNA, 19 nt, Homo sapiens
  misc_RNA (1)...(19): siRNA sense strand
auauaaagccagccaagau

SEQ ID NO: 570922 - RNA, 19 nt, Homo sapiens
  misc_RNA (1)...(19): siRNA sense strand
gacuaauggaugaagcuaa

SEQ ID NO: 570923 - RNA, 19 nt, Homo sapiens
  misc_RNA (1)...(19): siRNA sense strand
aaugaagacccuaaagauc

SEQ ID NO: 570924 - RNA, 19 nt, Homo sapiens
  misc_RNA (1)...(19): siRNA sense strand
uauguucaacuccaacuau

SEQ ID NO: 570925 - RNA, 19 nt, Homo sapiens
  misc_RNA (1)...(19): siRNA sense strand
ugggaaaugaugacuuuau

SEQ ID NO: 570926 - RNA, 19 nt, Homo sapiens
  misc_RNA (1)...(19): siRNA sense strand
ccuuuggccuuacuuugug

SEQ ID NO: 570927 - RNA, 19 nt, Homo sapiens
  misc_RNA (1)...(19): siRNA sense strand
ugaaaagucucuaaaugac

SEQ ID NO: 570928 - RNA, 19 nt, Homo sapiens
  misc_RNA (1)...(19): siRNA sense strand
cauaccagaaaguaauuga

SEQ ID NO: 570929 - RNA, 19 nt, Homo sapiens
  misc_RNA (1)...(19): siRNA sense strand
gacaccaagcaaauuauca

SEQ ID NO: 570930 - RNA, 19 nt, Homo sapiens
  misc_RNA (1)...(19): siRNA sense strand
uagaagaacgauauaaagc

SEQ ID NO: 570931 - RNA, 19 nt, Homo sapiens
  misc_RNA (1)...(19): siRNA sense strand
ugauguaggagucucucua

SEQ ID NO: 570932 - RNA, 19 nt, Homo sapiens
  misc_RNA (1)...(19): siRNA sense strand
gccuuuggccuuacuuugu

SEQ ID NO: 570933 - RNA, 19 nt, Homo sapiens
  misc_RNA (1)...(19): siRNA sense strand
gggaucaguaauuucaaga

SEQ ID NO: 570934 - RNA, 19 nt, Homo sapiens
  misc_RNA (1)...(19): siRNA sense strand
gccauggaaacccaaagaa

SEQ ID NO: 570935 - RNA, 19 nt, Homo sapiens
  misc_RNA (1)...(19): siRNA sense strand
gaugaaaauaugacuguga

SEQ ID NO: 570936 - RNA, 19 nt, Homo sapiens
  misc_RNA (1)...(19): siRNA sense strand
uguaugcacuaaugaagac

SEQ ID NO: 570937 - RNA, 19 nt, Homo sapiens
  misc_RNA (1)...(19): siRNA sense strand
cuucaucauccaaacauug

SEQ ID NO: 570938 - RNA, 19 nt, Homo sapiens
  misc_RNA (1)...(19): siRNA sense strand
ccagaaaguaauugaacuc

SEQ ID NO: 570939 - RNA, 19 nt, Homo sapiens
  misc_RNA (1)...(19): siRNA sense strand
uuccacacauuaaucuuuc

SEQ ID NO: 570940 - RNA, 19 nt, Homo sapiens
  misc_RNA (1)...(19): siRNA sense strand
ggaaaccgauguggaagac

SEQ ID NO: 570941 - RNA, 19 nt, Homo sapiens
  misc_RNA (1)...(19): siRNA sense strand
uccgagggcuuccugaugu

SEQ ID NO: 570942 - RNA, 19 nt, Homo sapiens
  misc_RNA (1)...(19): siRNA sense strand
ugaagaggcagcccuggau

SEQ ID NO: 570943 - RNA, 19 nt, Homo sapiens
  misc_RNA (1)...(19): siRNA sense strand
ggaaaccgauguggaagac

SEQ ID NO: 570944 - RNA, 19 nt, Homo sapiens
  misc_RNA (1)...(19): siRNA sense strand
uccgagggcuuccugaugu

SEQ ID NO: 570945 - RNA, 19 nt, Homo sapiens
  misc_RNA (1)...(19): siRNA sense strand
ugaagaggcagcccuggau

SEQ ID NO: 570946 - RNA, 19 nt, Homo sapiens
  misc_RNA (1)...(19): siRNA sense strand
gaucugaccuccuugaaua

SEQ ID NO: 570947 - RNA, 19 nt, Homo sapiens
  misc_RNA (1)...(19): siRNA sense strand
gaauaacucuuuccucauc

SEQ ID NO: 570948 - RNA, 19 nt, Homo sapiens
  misc_RNA (1)...(19): siRNA sense strand
acacaaagaugcagagaau

SEQ ID NO: 570949 - RNA, 19 nt, Homo sapiens
  misc_RNA (1)...(19): siRNA sense strand
ucacgaaucugcagcaaga

SEQ ID NO: 570950 - RNA, 19 nt, Homo sapiens
  misc_RNA (1)...(19): siRNA sense strand
ugaaagaccugcaggacuu

SEQ ID NO: 570951 - RNA, 19 nt, Homo sapiens
  misc_RNA (1)...(19): siRNA sense strand
gaacaucauuagcaauauc

SEQ ID NO: 570952 - RNA, 19 nt, Homo sapiens
  misc_RNA (1)...(19): siRNA sense strand
caucaccacuguaaacaaa

SEQ ID NO: 570953 - RNA, 19 nt, Homo sapiens
  misc_RNA (1)...(19): siRNA sense strand
gaccagcaaucuaaaugaa

SEQ ID NO: 570954 - RNA, 19 nt, Homo sapiens
  misc_RNA (1)...(19): siRNA sense strand
gcacagauacccuuaccaa

SEQ ID NO: 570955 - RNA, 19 nt, Homo sapiens
  misc_RNA (1)...(19): siRNA sense strand
guagccaacuuaucaguga

SEQ ID NO: 570956 - RNA, 19 nt, Homo sapiens
  misc_RNA (1)...(19): siRNA sense strand
ggaacacaauguaccaaau

SEQ ID NO: 570957 - RNA, 19 nt, Homo sapiens
  misc_RNA (1)...(19): siRNA sense strand
gagguuagacacugaagua

SEQ ID NO: 570958 - RNA, 19 nt, Homo sapiens
  misc_RNA (1)...(19): siRNA sense strand
gaacacaauguaccaaaug

SEQ ID NO: 570959 - RNA, 19 nt, Homo sapiens
  misc_RNA (1)...(19): siRNA sense strand
gcacugaaguuuucuauca

SEQ ID NO: 570960 - RNA, 19 nt, Homo sapiens
  misc_RNA (1)...(19): siRNA sense strand
cagagucaauugaaagaaa

SEQ ID NO: 570961 - RNA, 19 nt, Homo sapiens
  misc_RNA (1)...(19): siRNA sense strand
ggaaacaucucgccaaacc

SEQ ID NO: 570962 - RNA, 19 nt, Homo sapiens
  misc_RNA (1)...(19): siRNA sense strand
gaacaucaccacuaucucu

SEQ ID NO: 570963 - RNA, 19 nt, Homo sapiens
  misc_RNA (1)...(19): siRNA sense strand
gugaacaucauuagcaaua

SEQ ID NO: 570964 - RNA, 19 nt, Homo sapiens
  misc_RNA (1)...(19): siRNA sense strand
cagauacccuuaccaaaca

SEQ ID NO: 570965 - RNA, 19 nt, Homo sapiens
  misc_RNA (1)...(19): siRNA sense strand
ugaccaaacugggaagaaa

SEQ ID NO: 570966 - RNA, 19 nt, Homo sapiens
  misc_RNA (1)...(19): siRNA sense strand
gaacagccagcucaacuca

SEQ ID NO: 570967 - RNA, 19 nt, Homo sapiens
  misc_RNA (1)...(19): siRNA sense strand
cggauuggcugaaggagaa

SEQ ID NO: 570968 - RNA, 19 nt, Homo sapiens
  misc_RNA (1)...(19): siRNA sense strand
gaauagaacagccaucaag

SEQ ID NO: 570969 - RNA, 19 nt, Homo sapiens
  misc_RNA (1)...(19): siRNA sense strand
gaagaaaugaagcuaguag

SEQ ID NO: 570970 - RNA, 19 nt, Homo sapiens
  misc_RNA (1)...(19): siRNA sense strand
gaaagaccugcaggacuua

SEQ ID NO: 570971 - RNA, 19 nt, Homo sapiens
  misc_RNA (1)...(19): siRNA sense strand
ggucagcucaucaagaauu

SEQ ID NO: 570972 - RNA, 19 nt, Homo sapiens
  misc_RNA (1)...(19): siRNA sense strand
ucagaacucuccaccuuca

SEQ ID NO: 570973 - RNA, 19 nt, Homo sapiens
  misc_RNA (1)...(19): siRNA sense strand
ggugagagaggcccaauug

SEQ ID NO: 570974 - RNA, 19 nt, Homo sapiens
  misc_RNA (1)...(19): siRNA sense strand
ggacaggcagagucaauug

SEQ ID NO: 570975 - RNA, 19 nt, Homo sapiens
  misc_RNA (1)...(19): siRNA sense strand
aggauacgcuggagaaguu

SEQ ID NO: 570976 - RNA, 19 nt, Homo sapiens
  misc_RNA (1)...(19): siRNA sense strand
acagccagcucaacucauu

SEQ ID NO: 570977 - RNA, 19 nt, Homo sapiens
  misc_RNA (1)...(19): siRNA sense strand
ccaagaaggacacggauug

SEQ ID NO: 570978 - RNA, 19 nt, Homo sapiens
  misc_RNA (1)...(19): siRNA sense strand
aaacaucucgccaaaccua

SEQ ID NO: 570979 - RNA, 19 nt, Homo sapiens
  misc_RNA (1)...(19): siRNA sense strand
gagaacaucaccacuaucu

SEQ ID NO: 570980 - RNA, 19 nt, Homo sapiens
  misc_RNA (1)...(19): siRNA sense strand
cacaauguaccaaauguaa

SEQ ID NO: 570981 - RNA, 19 nt, Homo sapiens
  misc_RNA (1)...(19): siRNA sense strand
ggucgagguuagacacuga

SEQ ID NO: 570982 - RNA, 19 nt, Homo sapiens
  misc_RNA (1)...(19): siRNA sense strand
agacggauauugugaacau

SEQ ID NO: 570983 - RNA, 19 nt, Homo sapiens
  misc_RNA (1)...(19): siRNA sense strand
gagaauagaacagccauca

SEQ ID NO: 570984 - RNA, 19 nt, Homo sapiens
  misc_RNA (1)...(19): siRNA sense strand
ggacacggauuggcugaag

SEQ ID NO: 570985 - RNA, 19 nt, Homo sapiens
  misc_RNA (1)...(19): siRNA sense strand
ccaaaccuaugaugacaag

SEQ ID NO: 570986 - RNA, 19 nt, Homo sapiens
  misc_RNA (1)...(19): siRNA sense strand
cccaaaggcucccgugguu

SEQ ID NO: 570987 - RNA, 19 nt, Homo sapiens
  misc_RNA (1)...(19): siRNA sense strand
uggagaacaucaccacuau

SEQ ID NO: 570988 - RNA, 19 nt, Homo sapiens
  misc_RNA (1)...(19): siRNA sense strand
acucagaacucuccaccuu

SEQ ID NO: 570989 - RNA, 19 nt, Homo sapiens
  misc_RNA (1)...(19): siRNA sense strand
ugucacagguggcauggaa

SEQ ID NO: 570990 - RNA, 19 nt, Homo sapiens
  misc_RNA (1)...(19): siRNA sense strand
gaaucaagaacgacuuuca

SEQ ID NO: 570991 - RNA, 19 nt, Homo sapiens
  misc_RNA (1)...(19): siRNA sense strand
ccagcaaucuaaaugaagu

SEQ ID NO: 570992 - RNA, 19 nt, Homo sapiens
  misc_RNA (1)...(19): siRNA sense strand
ggaagaaaugaagcuagua

SEQ ID NO: 570993 - RNA, 19 nt, Homo sapiens
  misc_RNA (1)...(19): siRNA sense strand
gaaaugaagcuaguagacu

SEQ ID NO: 570994 - RNA, 19 nt, Homo sapiens
  misc_RNA (1)...(19): siRNA sense strand
ucagcaacuucgugagauu

SEQ ID NO: 570995 - RNA, 19 nt, Homo sapiens
  misc_RNA (1)...(19): siRNA sense strand
acaaagaugcagagaauag

SEQ ID NO: 570996 - RNA, 19 nt, Homo sapiens
  misc_RNA (1)...(19): siRNA sense strand
uacaagcgguuugguauuc

SEQ ID NO: 570997 - RNA, 19 nt, Homo sapiens
  misc_RNA (1)...(19): siRNA sense strand
ucacaggucagauggagaa

SEQ ID NO: 570998 - RNA, 19 nt, Homo sapiens
  misc_RNA (1)...(19): siRNA sense strand
ggauauaaaguuguagaga

SEQ ID NO: 570999 - RNA, 19 nt, Homo sapiens
  misc_RNA (1)...(19): siRNA sense strand
ugagagaggcccaauugga

SEQ ID NO: 571000 - RNA, 19 nt, Homo sapiens
  misc_RNA (1)...(19): siRNA sense strand
caacaagggacagaaagga

SEQ ID NO: 571001 - RNA, 19 nt, Homo sapiens
  misc_RNA (1)...(19): siRNA sense strand
ggacuuacacaaagaugca

SEQ ID NO: 571002 - RNA, 19 nt, Homo sapiens
  misc_RNA (1)...(19): siRNA sense strand
caggaaggaacacaaugua

SEQ ID NO: 571003 - RNA, 19 nt, Homo sapiens
  misc_RNA (1)...(19): siRNA sense strand
gcgaaucaagaacgacuuu

SEQ ID NO: 571004 - RNA, 19 nt, Homo sapiens
  misc_RNA (1)...(19): siRNA sense strand
gcaaucugcagaaccaaau

SEQ ID NO: 571005 - RNA, 19 nt, Homo sapiens
  misc_RNA (1)...(19): siRNA sense strand
gaaggaacacaauguacca

SEQ ID NO: 571006 - RNA, 19 nt, Homo sapiens
  misc_RNA (1)...(19): siRNA sense strand
cagcaacuucgugagauua

SEQ ID NO: 571007 - RNA, 19 nt, Homo sapiens
  misc_RNA (1)...(19): siRNA sense strand
ccaacgagcagaaccugaa

SEQ ID NO: 571008 - RNA, 19 nt, Homo sapiens
  misc_RNA (1)...(19): siRNA sense strand
caggcagagucaauugaaa

SEQ ID NO: 571009 - RNA, 19 nt, Homo sapiens
  misc_RNA (1)...(19): siRNA sense strand
uggaagaaaugaagcuagu

SEQ ID NO: 571010 - RNA, 19 nt, Homo sapiens
  misc_RNA (1)...(19): siRNA sense strand
aguggaaagugaccugaaa

SEQ ID NO: 571011 - RNA, 19 nt, Homo sapiens
  misc_RNA (1)...(19): siRNA sense strand
cuucagaucagacauucua

SEQ ID NO: 571012 - RNA, 19 nt, Homo sapiens
  misc_RNA (1)...(19): siRNA sense strand
aaaauuaggugaccaaacu

SEQ ID NO: 571013 - RNA, 19 nt, Homo sapiens
  misc_RNA (1)...(19): siRNA sense strand
auggucagcucaucaagaa

SEQ ID NO: 571014 - RNA, 19 nt, Homo sapiens
  misc_RNA (1)...(19): siRNA sense strand
gcuaguagacuccaagcau

SEQ ID NO: 571015 - RNA, 19 nt, Homo sapiens
  misc_RNA (1)...(19): siRNA sense strand
gaacgcuuccagcucuuug

SEQ ID NO: 571016 - RNA, 19 nt, Homo sapiens
  misc_RNA (1)...(19): siRNA sense strand
caaagaugcagagaauaga

SEQ ID NO: 571017 - RNA, 19 nt, Homo sapiens
  misc_RNA (1)...(19): siRNA sense strand
cugcaggacuuacacaaag

SEQ ID NO: 571018 - RNA, 19 nt, Homo sapiens
  misc_RNA (1)...(19): siRNA sense strand
caggucagauggagaacau

SEQ ID NO: 571019 - RNA, 19 nt, Homo sapiens
  misc_RNA (1)...(19): siRNA sense strand
aaacugggaagaaagcuau

SEQ ID NO: 571020 - RNA, 19 nt, Homo sapiens
  misc_RNA (1)...(19): siRNA sense strand
gagcguggcggcaaaggau

SEQ ID NO: 571021 - RNA, 19 nt, Homo sapiens
  misc_RNA (1)...(19): siRNA sense strand
gucagcucaucaagaauuu

SEQ ID NO: 571022 - RNA, 19 nt, Homo sapiens
  misc_RNA (1)...(19): siRNA sense strand
guuacaagcgguuugguau

SEQ ID NO: 571023 - RNA, 19 nt, Homo sapiens
  misc_RNA (1)...(19): siRNA sense strand
auaauacccuggccaacau

SEQ ID NO: 571024 - RNA, 19 nt, Homo sapiens
  misc_RNA (1)...(19): siRNA sense strand
cugaccuccuugaauaaua

SEQ ID NO: 571025 - RNA, 19 nt, Homo sapiens
  misc_RNA (1)...(19): siRNA sense strand
uuaccaaacacacagauga

SEQ ID NO: 571026 - RNA, 19 nt, Homo sapiens
  misc_RNA (1)...(19): siRNA sense strand
caucaccacuaucucucaa

SEQ ID NO: 571027 - RNA, 19 nt, Homo sapiens
  misc_RNA (1)...(19): siRNA sense strand
caagaacgacuuucaaaau

SEQ ID NO: 571028 - RNA, 19 nt, Homo sapiens
  misc_RNA (1)...(19): siRNA sense strand
uaauggcuaugucacgaau

SEQ ID NO: 571029 - RNA, 19 nt, Homo sapiens
  misc_RNA (1)...(19): siRNA sense strand
gguuacaagcgguuuggua

SEQ ID NO: 571030 - RNA, 19 nt, Homo sapiens
  misc_RNA (1)...(19): siRNA sense strand
acaaggauacgcuggagaa

SEQ ID NO: 571031 - RNA, 19 nt, Homo sapiens
  misc_RNA (1)...(19): siRNA sense strand
agaaagcuaucagcaccaa

SEQ ID NO: 571032 - RNA, 19 nt, Homo sapiens
  misc_RNA (1)...(19): siRNA sense strand
gaugaucugaccuccuuga

SEQ ID NO: 571033 - RNA, 19 nt, Homo sapiens
  misc_RNA (1)...(19): siRNA sense strand
caggaccacuugcacagau

SEQ ID NO: 571034 - RNA, 19 nt, Homo sapiens
  misc_RNA (1)...(19): siRNA sense strand
caacgagcagaaccugaaa

SEQ ID NO: 571035 - RNA, 19 nt, Homo sapiens
  misc_RNA (1)...(19): siRNA sense strand
uaucagcaccaacucagaa

SEQ ID NO: 571036 - RNA, 19 nt, Homo sapiens
  misc_RNA (1)...(19): siRNA sense strand
gcgguuugguauucaggaa

SEQ ID NO: 571037 - RNA, 19 nt, Homo sapiens
  misc_RNA (1)...(19): siRNA sense strand
ggaaccucaucacgaaucu

SEQ ID NO: 571038 - RNA, 19 nt, Homo sapiens
  misc_RNA (1)...(19): siRNA sense strand
gcucacagcaguggaaagu

SEQ ID NO: 571039 - RNA, 19 nt, Homo sapiens
  misc_RNA (1)...(19): siRNA sense strand
ugaccuccuugaauaauac

SEQ ID NO: 571040 - RNA, 19 nt, Homo sapiens
  misc_RNA (1)...(19): siRNA sense strand
gaacgacuuucaaaaucug

SEQ ID NO: 571041 - RNA, 19 nt, Homo sapiens
  misc_RNA (1)...(19): siRNA sense strand
cugcagaaccaaauguauu

SEQ ID NO: 571042 - RNA, 19 nt, Homo sapiens
  misc_RNA (1)...(19): siRNA sense strand
caaacugggaagaaagcua

SEQ ID NO: 571043 - RNA, 19 nt, Homo sapiens
  misc_RNA (1)...(19): siRNA sense strand
acagauacccuuaccaaac

SEQ ID NO: 571044 - RNA, 19 nt, Homo sapiens
  misc_RNA (1)...(19): siRNA sense strand
gauuauggaagaaaugaag

SEQ ID NO: 571045 - RNA, 19 nt, Homo sapiens
  misc_RNA (1)...(19): siRNA sense strand
gaugcaacaagauuugaug

SEQ ID NO: 571046 - RNA, 19 nt, Homo sapiens
  misc_RNA (1)...(19): siRNA sense strand
gaucugaccuccuugaaua

SEQ ID NO: 571047 - RNA, 19 nt, Homo sapiens
  misc_RNA (1)...(19): siRNA sense strand
gaauaacucuuuccucauc

SEQ ID NO: 571048 - RNA, 19 nt, Homo sapiens
  misc_RNA (1)...(19): siRNA sense strand
acacaaagaugcagagaau

SEQ ID NO: 571049 - RNA, 19 nt, Homo sapiens
  misc_RNA (1)...(19): siRNA sense strand
ucacgaaucugcagcaaga

SEQ ID NO: 571050 - RNA, 19 nt, Homo sapiens
  misc_RNA (1)...(19): siRNA sense strand
ugaaagaccugcaggacuu

SEQ ID NO: 571051 - RNA, 19 nt, Homo sapiens
  misc_RNA (1)...(19): siRNA sense strand
gaacaucauuagcaauauc

SEQ ID NO: 571052 - RNA, 19 nt, Homo sapiens
  misc_RNA (1)...(19): siRNA sense strand
caucaccacuguaaacaaa

SEQ ID NO: 571053 - RNA, 19 nt, Homo sapiens
  misc_RNA (1)...(19): siRNA sense strand
gaccagcaaucuaaaugaa

SEQ ID NO: 571054 - RNA, 19 nt, Homo sapiens
  misc_RNA (1)...(19): siRNA sense strand
gugaagacgucaauaacuu

SEQ ID NO: 571055 - RNA, 19 nt, Homo sapiens
  misc_RNA (1)...(19): siRNA sense strand
gcacagauacccuuaccaa

SEQ ID NO: 571056 - RNA, 19 nt, Homo sapiens
  misc_RNA (1)...(19): siRNA sense strand
guagccaacuuaucaguga

SEQ ID NO: 571057 - RNA, 19 nt, Homo sapiens
  misc_RNA (1)...(19): siRNA sense strand
ggaacacaauguaccaaau

SEQ ID NO: 571058 - RNA, 19 nt, Homo sapiens
  misc_RNA (1)...(19): siRNA sense strand
gagguuagacacugaagua

SEQ ID NO: 571059 - RNA, 19 nt, Homo sapiens
  misc_RNA (1)...(19): siRNA sense strand
gaacacaauguaccaaaug

SEQ ID NO: 571060 - RNA, 19 nt, Homo sapiens
  misc_RNA (1)...(19): siRNA sense strand
gcacugaaguuuucuauca

SEQ ID NO: 571061 - RNA, 19 nt, Homo sapiens
  misc_RNA (1)...(19): siRNA sense strand
cauaaacacuagagaggaa

SEQ ID NO: 571062 - RNA, 19 nt, Homo sapiens
  misc_RNA (1)...(19): siRNA sense strand
cagagucaauugaaagaaa

SEQ ID NO: 571063 - RNA, 19 nt, Homo sapiens
  misc_RNA (1)...(19): siRNA sense strand
ggaaacaucucgccaaacc

SEQ ID NO: 571064 - RNA, 19 nt, Homo sapiens
  misc_RNA (1)...(19): siRNA sense strand
ggacaucuccagacuacaa

SEQ ID NO: 571065 - RNA, 19 nt, Homo sapiens
  misc_RNA (1)...(19): siRNA sense strand
gaacaucaccacuaucucu

SEQ ID NO: 571066 - RNA, 19 nt, Homo sapiens
  misc_RNA (1)...(19): siRNA sense strand
gugaacaucauuagcaaua

SEQ ID NO: 571067 - RNA, 19 nt, Homo sapiens
  misc_RNA (1)...(19): siRNA sense strand
cagauacccuuaccaaaca

SEQ ID NO: 571068 - RNA, 19 nt, Homo sapiens
  misc_RNA (1)...(19): siRNA sense strand
acugucaucugcauuauaa

SEQ ID NO: 571069 - RNA, 19 nt, Homo sapiens
  misc_RNA (1)...(19): siRNA sense strand
ugaccaaacugggaagaaa

SEQ ID NO: 571070 - RNA, 19 nt, Homo sapiens
  misc_RNA (1)...(19): siRNA sense strand
gaacagccagcucaacuca

SEQ ID NO: 571071 - RNA, 19 nt, Homo sapiens
  misc_RNA (1)...(19): siRNA sense strand
cggauuggcugaaggagaa

SEQ ID NO: 571072 - RNA, 19 nt, Homo sapiens
  misc_RNA (1)...(19): siRNA sense strand
gaauagaacagccaucaag

SEQ ID NO: 571073 - RNA, 19 nt, Homo sapiens
  misc_RNA (1)...(19): siRNA sense strand
gaacuucacagacaaaugc

SEQ ID NO: 571074 - RNA, 19 nt, Homo sapiens
  misc_RNA (1)...(19): siRNA sense strand
gaagaaaugaagcuaguag

SEQ ID NO: 571075 - RNA, 19 nt, Homo sapiens
  misc_RNA (1)...(19): siRNA sense strand
gaaagaccugcaggacuua

SEQ ID NO: 571076 - RNA, 19 nt, Homo sapiens
  misc_RNA (1)...(19): siRNA sense strand
ggucagcucaucaagaauu

SEQ ID NO: 571077 - RNA, 19 nt, Homo sapiens
  misc_RNA (1)...(19): siRNA sense strand
ucagaacucuccaccuuca

SEQ ID NO: 571078 - RNA, 19 nt, Homo sapiens
  misc_RNA (1)...(19): siRNA sense strand
ggugagagaggcccaauug

SEQ ID NO: 571079 - RNA, 19 nt, Homo sapiens
  misc_RNA (1)...(19): siRNA sense strand
ggacaggcagagucaauug

SEQ ID NO: 571080 - RNA, 19 nt, Homo sapiens
  misc_RNA (1)...(19): siRNA sense strand
aggauacgcuggagaaguu

SEQ ID NO: 571081 - RNA, 19 nt, Homo sapiens
  misc_RNA (1)...(19): siRNA sense strand
acagacaaaugcuacuauu

SEQ ID NO: 571082 - RNA, 19 nt, Homo sapiens
  misc_RNA (1)...(19): siRNA sense strand
acagccagcucaacucauu

SEQ ID NO: 571083 - RNA, 19 nt, Homo sapiens
  misc_RNA (1)...(19): siRNA sense strand
ccaagaaggacacggauug

SEQ ID NO: 571084 - RNA, 19 nt, Homo sapiens
  misc_RNA (1)...(19): siRNA sense strand
aaacaucucgccaaaccua

SEQ ID NO: 571085 - RNA, 19 nt, Homo sapiens
  misc_RNA (1)...(19): siRNA sense strand
gagaacaucaccacuaucu

SEQ ID NO: 571086 - RNA, 19 nt, Homo sapiens
  misc_RNA (1)...(19): siRNA sense strand
gaggaacagcaauggauaa

SEQ ID NO: 571087 - RNA, 19 nt, Homo sapiens
  misc_RNA (1)...(19): siRNA sense strand
cacaauguaccaaauguaa

SEQ ID NO: 571088 - RNA, 19 nt, Homo sapiens
  misc_RNA (1)...(19): siRNA sense strand
agacgucaauaacuucauu

SEQ ID NO: 571089 - RNA, 19 nt, Homo sapiens
  misc_RNA (1)...(19): siRNA sense strand
ggucgagguuagacacuga

SEQ ID NO: 571090 - RNA, 19 nt, Homo sapiens
  misc_RNA (1)...(19): siRNA sense strand
agacggauauugugaacau

SEQ ID NO: 571091 - RNA, 19 nt, Homo sapiens
  misc_RNA (1)...(19): siRNA sense strand
gagaauagaacagccauca

SEQ ID NO: 571092 - RNA, 19 nt, Homo sapiens
  misc_RNA (1)...(19): siRNA sense strand
ggacacggauuggcugaag

SEQ ID NO: 571093 - RNA, 19 nt, Homo sapiens
  misc_RNA (1)...(19): siRNA sense strand
ccaaaccuaugaugacaag

SEQ ID NO: 571094 - RNA, 19 nt, Homo sapiens
  misc_RNA (1)...(19): siRNA sense strand
ggagagagagccacuggau

SEQ ID NO: 571095 - RNA, 19 nt, Homo sapiens
  misc_RNA (1)...(19): siRNA sense strand
cccaaaggcucccgugguu

SEQ ID NO: 571096 - RNA, 19 nt, Homo sapiens
  misc_RNA (1)...(19): siRNA sense strand
uggagaacaucaccacuau

SEQ ID NO: 571097 - RNA, 19 nt, Homo sapiens
  misc_RNA (1)...(19): siRNA sense strand
acucagaacucuccaccuu

SEQ ID NO: 571098 - RNA, 19 nt, Homo sapiens
  misc_RNA (1)...(19): siRNA sense strand
ugucacagguggcauggaa

SEQ ID NO: 571099 - RNA, 19 nt, Homo sapiens
  misc_RNA (1)...(19): siRNA sense strand
gaaucaagaacgacuuuca

SEQ ID NO: 571100 - RNA, 19 nt, Homo sapiens
  misc_RNA (1)...(19): siRNA sense strand
ccagcaaucuaaaugaagu

SEQ ID NO: 571101 - RNA, 19 nt, Homo sapiens
  misc_RNA (1)...(19): siRNA sense strand
ggaagaaaugaagcuagua

SEQ ID NO: 571102 - RNA, 19 nt, Homo sapiens
  misc_RNA (1)...(19): siRNA sense strand
gagaggaacagcaauggau

SEQ ID NO: 571103 - RNA, 19 nt, Homo sapiens
  misc_RNA (1)...(19): siRNA sense strand
gaaaugaagcuaguagacu

SEQ ID NO: 571104 - RNA, 19 nt, Homo sapiens
  misc_RNA (1)...(19): siRNA sense strand
agacugugcuggguugauu

SEQ ID NO: 571105 - RNA, 19 nt, Homo sapiens
  misc_RNA (1)...(19): siRNA sense strand
guacugucaucugcauuau

SEQ ID NO: 571106 - RNA, 19 nt, Homo sapiens
  misc_RNA (1)...(19): siRNA sense strand
ucagcaacuucgugagauu

SEQ ID NO: 571107 - RNA, 19 nt, Homo sapiens
  misc_RNA (1)...(19): siRNA sense strand
uacaagcgguuugguauuc

SEQ ID NO: 571108 - RNA, 19 nt, Homo sapiens
  misc_RNA (1)...(19): siRNA sense strand
acaaagaugcagagaauag

SEQ ID NO: 571109 - RNA, 19 nt, Homo sapiens
  misc_RNA (1)...(19): siRNA sense strand
ucacaggucagauggagaa

SEQ ID NO: 571110 - RNA, 19 nt, Homo sapiens
  misc_RNA (1)...(19): siRNA sense strand
ggauauaaaguuguagaga

SEQ ID NO: 571111 - RNA, 19 nt, Homo sapiens
  misc_RNA (1)...(19): siRNA sense strand
ugagagaggcccaauugga

SEQ ID NO: 571112 - RNA, 19 nt, Homo sapiens
  misc_RNA (1)...(19): siRNA sense strand
gaaggaacacaauguacca

SEQ ID NO: 571113 - RNA, 19 nt, Homo sapiens
  misc_RNA (1)...(19): siRNA sense strand
caacaagggacagaaagga

SEQ ID NO: 571114 - RNA, 19 nt, Homo sapiens
  misc_RNA (1)...(19): siRNA sense strand
caggaaggaacacaaugua

SEQ ID NO: 571115 - RNA, 19 nt, Homo sapiens
  misc_RNA (1)...(19): siRNA sense strand
ggacuuacacaaagaugca

SEQ ID NO: 571116 - RNA, 19 nt, Homo sapiens
  misc_RNA (1)...(19): siRNA sense strand
gcgaaucaagaacgacuuu

SEQ ID NO: 571117 - RNA, 19 nt, Homo sapiens
  misc_RNA (1)...(19): siRNA sense strand
gcaaucugcagaaccaaau

SEQ ID NO: 571118 - RNA, 19 nt, Homo sapiens
  misc_RNA (1)...(19): siRNA sense strand
cagcaacuucgugagauua

SEQ ID NO: 571119 - RNA, 19 nt, Homo sapiens
  misc_RNA (1)...(19): siRNA sense strand
gaacgauuuccaaugugaa

SEQ ID NO: 571120 - RNA, 19 nt, Homo sapiens
  misc_RNA (1)...(19): siRNA sense strand
gcugggcaguggaacgauu

SEQ ID NO: 571121 - RNA, 19 nt, Homo sapiens
  misc_RNA (1)...(19): siRNA sense strand
ccaacgagcagaaccugaa

SEQ ID NO: 571122 - RNA, 19 nt, Homo sapiens
  misc_RNA (1)...(19): siRNA sense strand
caggcagagucaauugaaa

SEQ ID NO: 571123 - RNA, 19 nt, Homo sapiens
  misc_RNA (1)...(19): siRNA sense strand
uggaagaaaugaagcuagu

SEQ ID NO: 571124 - RNA, 19 nt, Homo sapiens
  misc_RNA (1)...(19): siRNA sense strand
aguggaaagugaccugaaa

SEQ ID NO: 571125 - RNA, 19 nt, Homo sapiens
  misc_RNA (1)...(19): siRNA sense strand
cuucagaucagacauucua

SEQ ID NO: 571126 - RNA, 19 nt, Homo sapiens
  misc_RNA (1)...(19): siRNA sense strand
aaaauuaggugaccaaacu

SEQ ID NO: 571127 - RNA, 19 nt, Homo sapiens
  misc_RNA (1)...(19): siRNA sense strand
aaugugaagacgucaauaa

SEQ ID NO: 571128 - RNA, 19 nt, Homo sapiens
  misc_RNA (1)...(19): siRNA sense strand
augcaaagcuuuucuguga

SEQ ID NO: 571129 - RNA, 19 nt, Homo sapiens
  misc_RNA (1)...(19): siRNA sense strand
auggucagcucaucaagaa

SEQ ID NO: 571130 - RNA, 19 nt, Homo sapiens
  misc_RNA (1)...(19): siRNA sense strand
gcuaguagacuccaagcau

SEQ ID NO: 571131 - RNA, 19 nt, Homo sapiens
  misc_RNA (1)...(19): siRNA sense strand
gaacgcuuccagcucuuug

SEQ ID NO: 571132 - RNA, 19 nt, Homo sapiens
  misc_RNA (1)...(19): siRNA sense strand
caaagaugcagagaauaga

SEQ ID NO: 571133 - RNA, 19 nt, Homo sapiens
  misc_RNA (1)...(19): siRNA sense strand
cugcaggacuuacacaaag

SEQ ID NO: 571134 - RNA, 19 nt, Homo sapiens
  misc_RNA (1)...(19): siRNA sense strand
caggucagauggagaacau

SEQ ID NO: 571135 - RNA, 19 nt, Homo sapiens
  misc_RNA (1)...(19): siRNA sense strand
acaaggauacgcuggagaa

SEQ ID NO: 571136 - RNA, 19 nt, Homo sapiens
  misc_RNA (1)...(19): siRNA sense strand
guuacaagcgguuugguau

SEQ ID NO: 571137 - RNA, 19 nt, Homo sapiens
  misc_RNA (1)...(19): siRNA sense strand
gguuacaagcgguuuggua

SEQ ID NO: 571138 - RNA, 19 nt, Homo sapiens
  misc_RNA (1)...(19): siRNA sense strand
gagcguggcggcaaaggau

SEQ ID NO: 571139 - RNA, 19 nt, Homo sapiens
  misc_RNA (1)...(19): siRNA sense strand
gucagcucaucaagaauuu

SEQ ID NO: 571140 - RNA, 19 nt, Homo sapiens
  misc_RNA (1)...(19): siRNA sense strand
auaauacccuggccaacau

SEQ ID NO: 571141 - RNA, 19 nt, Homo sapiens
  misc_RNA (1)...(19): siRNA sense strand
cugaccuccuugaauaaua

SEQ ID NO: 571142 - RNA, 19 nt, Homo sapiens
  misc_RNA (1)...(19): siRNA sense strand
uuaccaaacacacagauga

SEQ ID NO: 571143 - RNA, 19 nt, Homo sapiens
  misc_RNA (1)...(19): siRNA sense strand
caucaccacuaucucucaa

SEQ ID NO: 571144 - RNA, 19 nt, Homo sapiens
  misc_RNA (1)...(19): siRNA sense strand
caagaacgacuuucaaaau

SEQ ID NO: 571145 - RNA, 19 nt, Homo sapiens
  misc_RNA (1)...(19): siRNA sense strand
uaauggcuaugucacgaau

SEQ ID NO: 571146 - RNA, 19 nt, Homo sapiens
  misc_RNA (1)...(19): siRNA sense strand
ggagaugccuugugcguua

SEQ ID NO: 571147 - RNA, 19 nt, Homo sapiens
  misc_RNA (1)...(19): siRNA sense strand
ggagaaauccuucgcaaug

SEQ ID NO: 571148 - RNA, 19 nt, Homo sapiens
  misc_RNA (1)...(19): siRNA sense strand
gaaccuaucuuugcacaca

SEQ ID NO: 571149 - RNA, 19 nt, Homo sapiens
  misc_RNA (1)...(19): siRNA sense strand
gaagagaacaugcaugauc

SEQ ID NO: 571150 - RNA, 19 nt, Homo sapiens
  misc_RNA (1)...(19): siRNA sense strand
gaacaugcaugaucuucag

SEQ ID NO: 571151 - RNA, 19 nt, Homo sapiens
  misc_RNA (1)...(19): siRNA sense strand
gaaauuggcaccaucuuca

SEQ ID NO: 571152 - RNA, 19 nt, Homo sapiens
  misc_RNA (1)...(19): siRNA sense strand
cgaaagcccugaacaacug

SEQ ID NO: 571153 - RNA, 19 nt, Homo sapiens
  misc_RNA (1)...(19): siRNA sense strand
gagaaauccuucgcaaugu

SEQ ID NO: 571154 - RNA, 19 nt, Homo sapiens
  misc_RNA (1)...(19): siRNA sense strand
gagaggcggucaagaacau

SEQ ID NO: 571155 - RNA, 19 nt, Homo sapiens
  misc_RNA (1)...(19): siRNA sense strand
gagcaugcacgaccuggua

SEQ ID NO: 571156 - RNA, 19 nt, Homo sapiens
  misc_RNA (1)...(19): siRNA sense strand
ggacacacagcauggagaa

SEQ ID NO: 571157 - RNA, 19 nt, Homo sapiens
  misc_RNA (1)...(19): siRNA sense strand
gaacuacacacggcucuuc

SEQ ID NO: 571158 - RNA, 19 nt, Homo sapiens
  misc_RNA (1)...(19): siRNA sense strand
caucggugcggauucuuua

SEQ ID NO: 571159 - RNA, 19 nt, Homo sapiens
  misc_RNA (1)...(19): siRNA sense strand
gaaauccuucgcaauguca

SEQ ID NO: 571160 - RNA, 19 nt, Homo sapiens
  misc_RNA (1)...(19): siRNA sense strand
ugacccagucuauuuauga

SEQ ID NO: 571161 - RNA, 19 nt, Homo sapiens
  misc_RNA (1)...(19): siRNA sense strand
guguuggccucucugguuu

SEQ ID NO: 571162 - RNA, 19 nt, Homo sapiens
  misc_RNA (1)...(19): siRNA sense strand
aggaggagcuggagggaau

SEQ ID NO: 571163 - RNA, 19 nt, Homo sapiens
  misc_RNA (1)...(19): siRNA sense strand
ucuacuaccugaacaaguc

SEQ ID NO: 571164 - RNA, 19 nt, Homo sapiens
  misc_RNA (1)...(19): siRNA sense strand
ugaaggcaguggacacaca

SEQ ID NO: 571165 - RNA, 19 nt, Homo sapiens
  misc_RNA (1)...(19): siRNA sense strand
uggauaacaucucguccuu

SEQ ID NO: 571166 - RNA, 19 nt, Homo sapiens
  misc_RNA (1)...(19): siRNA sense strand
aagagaacaugcaugaucu

SEQ ID NO: 571167 - RNA, 19 nt, Homo sapiens
  misc_RNA (1)...(19): siRNA sense strand
cugaacaacugcucuuucu

SEQ ID NO: 571168 - RNA, 19 nt, Homo sapiens
  misc_RNA (1)...(19): siRNA sense strand
guccggaaccucuccauga

SEQ ID NO: 571169 - RNA, 19 nt, Homo sapiens
  misc_RNA (1)...(19): siRNA sense strand
ccgaggagcucuacuaccu

SEQ ID NO: 571170 - RNA, 19 nt, Homo sapiens
  misc_RNA (1)...(19): siRNA sense strand
acgaagagaacaugcauga

SEQ ID NO: 571171 - RNA, 19 nt, Homo sapiens
  misc_RNA (1)...(19): siRNA sense strand
ggccuggaccucucucuga

SEQ ID NO: 571172 - RNA, 19 nt, Homo sapiens
  misc_RNA (1)...(19): siRNA sense strand
gccuggaccucucucugaa

SEQ ID NO: 571173 - RNA, 19 nt, Homo sapiens
  misc_RNA (1)...(19): siRNA sense strand
ggcaccaucuucaccaaca

SEQ ID NO: 571174 - RNA, 19 nt, Homo sapiens
  misc_RNA (1)...(19): siRNA sense strand
gcggauucuuuaccucuuc

SEQ ID NO: 571175 - RNA, 19 nt, Homo sapiens
  misc_RNA (1)...(19): siRNA sense strand
gagcucuacuaccugaaca

SEQ ID NO: 571176 - RNA, 19 nt, Homo sapiens
  misc_RNA (1)...(19): siRNA sense strand
gagcuggagggaauucaga

SEQ ID NO: 571177 - RNA, 19 nt, Homo sapiens
  misc_RNA (1)...(19): siRNA sense strand
ggagugcuacgaugucaag

SEQ ID NO: 571178 - RNA, 19 nt, Homo sapiens
  misc_RNA (1)...(19): siRNA sense strand
agaaauccuucgcaauguc

SEQ ID NO: 571179 - RNA, 19 nt, Homo sapiens
  misc_RNA (1)...(19): siRNA sense strand
ggauccagcggaagacaga

SEQ ID NO: 571180 - RNA, 19 nt, Homo sapiens
  misc_RNA (1)...(19): siRNA sense strand
uggacucucucuccgaaga

SEQ ID NO: 571181 - RNA, 19 nt, Homo sapiens
  misc_RNA (1)...(19): siRNA sense strand
gcacagcaugcucaaguac

SEQ ID NO: 571182 - RNA, 19 nt, Homo sapiens
  misc_RNA (1)...(19): siRNA sense strand
caucuucaccaacaucaau

SEQ ID NO: 571183 - RNA, 19 nt, Homo sapiens
  misc_RNA (1)...(19): siRNA sense strand
gcacuguggagagguuuga

SEQ ID NO: 571184 - RNA, 19 nt, Homo sapiens
  misc_RNA (1)...(19): siRNA sense strand
ugcaugaucuucaguacca

SEQ ID NO: 571185 - RNA, 19 nt, Homo sapiens
  misc_RNA (1)...(19): siRNA sense strand
ggagaggcggucaagaaca

SEQ ID NO: 571186 - RNA, 19 nt, Homo sapiens
  misc_RNA (1)...(19): siRNA sense strand
acacaucggugcggauucu

SEQ ID NO: 571187 - RNA, 19 nt, Homo sapiens
  misc_RNA (1)...(19): siRNA sense strand
ccgaagacaucuccuugac

SEQ ID NO: 571188 - RNA, 19 nt, Homo sapiens
  misc_RNA (1)...(19): siRNA sense strand
gugcacagcaugcucaagu

SEQ ID NO: 571189 - RNA, 19 nt, Homo sapiens
  misc_RNA (1)...(19): siRNA sense strand
gcaccaucuucaccaacau

SEQ ID NO: 571190 - RNA, 19 nt, Homo sapiens
  misc_RNA (1)...(19): siRNA sense strand
gagaacaugcaugaucuuc

SEQ ID NO: 571191 - RNA, 19 nt, Homo sapiens
  misc_RNA (1)...(19): siRNA sense strand
ccuugacccagucuauuua

SEQ ID NO: 571192 - RNA, 19 nt, Homo sapiens
  misc_RNA (1)...(19): siRNA sense strand
cccagucuauuuaugacaa

SEQ ID NO: 571193 - RNA, 19 nt, Homo sapiens
  misc_RNA (1)...(19): siRNA sense strand
acacacagcauggagaaau

SEQ ID NO: 571194 - RNA, 19 nt, Homo sapiens
  misc_RNA (1)...(19): siRNA sense strand
gaugaaggcaguggacaca

SEQ ID NO: 571195 - RNA, 19 nt, Homo sapiens
  misc_RNA (1)...(19): siRNA sense strand
acaagucugucuccaucau

SEQ ID NO: 571196 - RNA, 19 nt, Homo sapiens
  misc_RNA (1)...(19): siRNA sense strand
ugcacagcaugcucaagua

SEQ ID NO: 571197 - RNA, 19 nt, Homo sapiens
  misc_RNA (1)...(19): siRNA sense strand
ugaaauuggcaccaucuuc

SEQ ID NO: 571198 - RNA, 19 nt, Homo sapiens
  misc_RNA (1)...(19): siRNA sense strand
cuggagaggcggucaagaa

SEQ ID NO: 571199 - RNA, 19 nt, Homo sapiens
  misc_RNA (1)...(19): siRNA sense strand
ucucguccuuccuggauga

SEQ ID NO: 571200 - RNA, 19 nt, Homo sapiens
  misc_RNA (1)...(19): siRNA sense strand
caggagugcuacgauguca

SEQ ID NO: 571201 - RNA, 19 nt, Homo sapiens
  misc_RNA (1)...(19): siRNA sense strand
uggaugaccacgaagagaa

SEQ ID NO: 571202 - RNA, 19 nt, Homo sapiens
  misc_RNA (1)...(19): siRNA sense strand
cacacagcauggagaaauc

SEQ ID NO: 571203 - RNA, 19 nt, Homo sapiens
  misc_RNA (1)...(19): siRNA sense strand
caugaucuucaguaccaua

SEQ ID NO: 571204 - RNA, 19 nt, Homo sapiens
  misc_RNA (1)...(19): siRNA sense strand
gcaucagccagaacucaga

SEQ ID NO: 571205 - RNA, 19 nt, Homo sapiens
  misc_RNA (1)...(19): siRNA sense strand
gagguuugagucucuggaa

SEQ ID NO: 571206 - RNA, 19 nt, Homo sapiens
  misc_RNA (1)...(19): siRNA sense strand
cuuccuggaugaccacgaa

SEQ ID NO: 571207 - RNA, 19 nt, Homo sapiens
  misc_RNA (1)...(19): siRNA sense strand
gauccgaaagcccugaaca

SEQ ID NO: 571208 - RNA, 19 nt, Homo sapiens
  misc_RNA (1)...(19): siRNA sense strand
gcagugcaccagaucaacu

SEQ ID NO: 571209 - RNA, 19 nt, Homo sapiens
  misc_RNA (1)...(19): siRNA sense strand
guuugagucucuggaagga

SEQ ID NO: 571210 - RNA, 19 nt, Homo sapiens
  misc_RNA (1)...(19): siRNA sense strand
caaugucaccauccuacga

SEQ ID NO: 571211 - RNA, 19 nt, Homo sapiens
  misc_RNA (1)...(19): siRNA sense strand
acgaggacaugccgaccuu

SEQ ID NO: 571212 - RNA, 19 nt, Homo sapiens
  misc_RNA (1)...(19): siRNA sense strand
ccaccagguuaaccagucu

SEQ ID NO: 571213 - RNA, 19 nt, Homo sapiens
  misc_RNA (1)...(19): siRNA sense strand
gacccagucuauuuaugac

SEQ ID NO: 571214 - RNA, 19 nt, Homo sapiens
  misc_RNA (1)...(19): siRNA sense strand
ucaguaccauacccacuac

SEQ ID NO: 571215 - RNA, 19 nt, Homo sapiens
  misc_RNA (1)...(19): siRNA sense strand
uguguuggccucucugguu

SEQ ID NO: 571216 - RNA, 19 nt, Homo sapiens
  misc_RNA (1)...(19): siRNA sense strand
ccacgaagagaacaugcau

SEQ ID NO: 571217 - RNA, 19 nt, Homo sapiens
  misc_RNA (1)...(19): siRNA sense strand
ccuugugcguuacagaaga

SEQ ID NO: 571218 - RNA, 19 nt, Homo sapiens
  misc_RNA (1)...(19): siRNA sense strand
gcgcaucagccagaacuca

SEQ ID NO: 571219 - RNA, 19 nt, Homo sapiens
  misc_RNA (1)...(19): siRNA sense strand
cgcaccaccuccaccaaga

SEQ ID NO: 571220 - RNA, 19 nt, Homo sapiens
  misc_RNA (1)...(19): siRNA sense strand
ucaccgacuggcagaacua

SEQ ID NO: 571221 - RNA, 19 nt, Homo sapiens
  misc_RNA (1)...(19): siRNA sense strand
uccggaaccucuccaugau

SEQ ID NO: 571222 - RNA, 19 nt, Homo sapiens
  misc_RNA (1)...(19): siRNA sense strand
ucagaaaaguggacucucu

SEQ ID NO: 571223 - RNA, 19 nt, Homo sapiens
  misc_RNA (1)...(19): siRNA sense strand
ggagaugccuugugcguua

SEQ ID NO: 571224 - RNA, 19 nt, Homo sapiens
  misc_RNA (1)...(19): siRNA sense strand
ggagaaauccuucgcaaug

SEQ ID NO: 571225 - RNA, 19 nt, Homo sapiens
  misc_RNA (1)...(19): siRNA sense strand
gaaccuaucuuugcacaca

SEQ ID NO: 571226 - RNA, 19 nt, Homo sapiens
  misc_RNA (1)...(19): siRNA sense strand
gaagagaacaugcaugauc

SEQ ID NO: 571227 - RNA, 19 nt, Homo sapiens
  misc_RNA (1)...(19): siRNA sense strand
gaacaugcaugaucuucag

SEQ ID NO: 571228 - RNA, 19 nt, Homo sapiens
  misc_RNA (1)...(19): siRNA sense strand
gaaauuggcaccaucuuca

SEQ ID NO: 571229 - RNA, 19 nt, Homo sapiens
  misc_RNA (1)...(19): siRNA sense strand
cgaaagcccugaacaacug

SEQ ID NO: 571230 - RNA, 19 nt, Homo sapiens
  misc_RNA (1)...(19): siRNA sense strand
gagaaauccuucgcaaugu

SEQ ID NO: 571231 - RNA, 19 nt, Homo sapiens
  misc_RNA (1)...(19): siRNA sense strand
gagaggcggucaagaacau

SEQ ID NO: 571232 - RNA, 19 nt, Homo sapiens
  misc_RNA (1)...(19): siRNA sense strand
gagcaugcacgaccuggua

SEQ ID NO: 571233 - RNA, 19 nt, Homo sapiens
  misc_RNA (1)...(19): siRNA sense strand
ggacacacagcauggagaa

SEQ ID NO: 571234 - RNA, 19 nt, Homo sapiens
  misc_RNA (1)...(19): siRNA sense strand
gaacuacacacggcucuuc

SEQ ID NO: 571235 - RNA, 19 nt, Homo sapiens
  misc_RNA (1)...(19): siRNA sense strand
caucggugcggauucuuua

SEQ ID NO: 571236 - RNA, 19 nt, Homo sapiens
  misc_RNA (1)...(19): siRNA sense strand
gaaauccuucgcaauguca

SEQ ID NO: 571237 - RNA, 19 nt, Homo sapiens
  misc_RNA (1)...(19): siRNA sense strand
ugacccagucuauuuauga

SEQ ID NO: 571238 - RNA, 19 nt, Homo sapiens
  misc_RNA (1)...(19): siRNA sense strand
guguuggccucucugguuu

SEQ ID NO: 571239 - RNA, 19 nt, Homo sapiens
  misc_RNA (1)...(19): siRNA sense strand
aggaggagcuggagggaau

SEQ ID NO: 571240 - RNA, 19 nt, Homo sapiens
  misc_RNA (1)...(19): siRNA sense strand
ucuacuaccugaacaaguc

SEQ ID NO: 571241 - RNA, 19 nt, Homo sapiens
  misc_RNA (1)...(19): siRNA sense strand
ugaaggcaguggacacaca

SEQ ID NO: 571242 - RNA, 19 nt, Homo sapiens
  misc_RNA (1)...(19): siRNA sense strand
uggauaacaucucguccuu

SEQ ID NO: 571243 - RNA, 19 nt, Homo sapiens
  misc_RNA (1)...(19): siRNA sense strand
aagagaacaugcaugaucu

SEQ ID NO: 571244 - RNA, 19 nt, Homo sapiens
  misc_RNA (1)...(19): siRNA sense strand
cugaacaacugcucuuucu

SEQ ID NO: 571245 - RNA, 19 nt, Homo sapiens
  misc_RNA (1)...(19): siRNA sense strand
guccggaaccucuccauga

SEQ ID NO: 571246 - RNA, 19 nt, Homo sapiens
  misc_RNA (1)...(19): siRNA sense strand
ccgaggagcucuacuaccu

SEQ ID NO: 571247 - RNA, 19 nt, Homo sapiens
  misc_RNA (1)...(19): siRNA sense strand
acgaagagaacaugcauga

SEQ ID NO: 571248 - RNA, 19 nt, Homo sapiens
  misc_RNA (1)...(19): siRNA sense strand
ggccuggaccucucucuga

SEQ ID NO: 571249 - RNA, 19 nt, Homo sapiens
  misc_RNA (1)...(19): siRNA sense strand
gccuggaccucucucugaa

SEQ ID NO: 571250 - RNA, 19 nt, Homo sapiens
  misc_RNA (1)...(19): siRNA sense strand
ggcaccaucuucaccaaca

SEQ ID NO: 571251 - RNA, 19 nt, Homo sapiens
  misc_RNA (1)...(19): siRNA sense strand
gcggauucuuuaccucuuc

SEQ ID NO: 571252 - RNA, 19 nt, Homo sapiens
  misc_RNA (1)...(19): siRNA sense strand
gagcucuacuaccugaaca

SEQ ID NO: 571253 - RNA, 19 nt, Homo sapiens
  misc_RNA (1)...(19): siRNA sense strand
gagcuggagggaauucaga

SEQ ID NO: 571254 - RNA, 19 nt, Homo sapiens
  misc_RNA (1)...(19): siRNA sense strand
ggagugcuacgaugucaag

SEQ ID NO: 571255 - RNA, 19 nt, Homo sapiens
  misc_RNA (1)...(19): siRNA sense strand
agaaauccuucgcaauguc

SEQ ID NO: 571256 - RNA, 19 nt, Homo sapiens
  misc_RNA (1)...(19): siRNA sense strand
ggauccagcggaagacaga

SEQ ID NO: 571257 - RNA, 19 nt, Homo sapiens
  misc_RNA (1)...(19): siRNA sense strand
uggacucucucuccgaaga

SEQ ID NO: 571258 - RNA, 19 nt, Homo sapiens
  misc_RNA (1)...(19): siRNA sense strand
gcacagcaugcucaaguac

SEQ ID NO: 571259 - RNA, 19 nt, Homo sapiens
  misc_RNA (1)...(19): siRNA sense strand
caucuucaccaacaucaau

SEQ ID NO: 571260 - RNA, 19 nt, Homo sapiens
  misc_RNA (1)...(19): siRNA sense strand
gcacuguggagagguuuga

SEQ ID NO: 571261 - RNA, 19 nt, Homo sapiens
  misc_RNA (1)...(19): siRNA sense strand
ugcaugaucuucaguacca

SEQ ID NO: 571262 - RNA, 19 nt, Homo sapiens
  misc_RNA (1)...(19): siRNA sense strand
ggagaggcggucaagaaca

SEQ ID NO: 571263 - RNA, 19 nt, Homo sapiens
  misc_RNA (1)...(19): siRNA sense strand
acacaucggugcggauucu

SEQ ID NO: 571264 - RNA, 19 nt, Homo sapiens
  misc_RNA (1)...(19): siRNA sense strand
ccgaagacaucuccuugac

SEQ ID NO: 571265 - RNA, 19 nt, Homo sapiens
  misc_RNA (1)...(19): siRNA sense strand
gugcacagcaugcucaagu

SEQ ID NO: 571266 - RNA, 19 nt, Homo sapiens
  misc_RNA (1)...(19): siRNA sense strand
gcaccaucuucaccaacau

SEQ ID NO: 571267 - RNA, 19 nt, Homo sapiens
  misc_RNA (1)...(19): siRNA sense strand
gagaacaugcaugaucuuc

SEQ ID NO: 571268 - RNA, 19 nt, Homo sapiens
  misc_RNA (1)...(19): siRNA sense strand
ccuugacccagucuauuua

SEQ ID NO: 571269 - RNA, 19 nt, Homo sapiens
  misc_RNA (1)...(19): siRNA sense strand
cccagucuauuuaugacaa

SEQ ID NO: 571270 - RNA, 19 nt, Homo sapiens
  misc_RNA (1)...(19): siRNA sense strand
acacacagcauggagaaau

SEQ ID NO: 571271 - RNA, 19 nt, Homo sapiens
  misc_RNA (1)...(19): siRNA sense strand
gaugaaggcaguggacaca

SEQ ID NO: 571272 - RNA, 19 nt, Homo sapiens
  misc_RNA (1)...(19): siRNA sense strand
acaagucugucuccaucau

SEQ ID NO: 571273 - RNA, 19 nt, Homo sapiens
  misc_RNA (1)...(19): siRNA sense strand
ugcacagcaugcucaagua

SEQ ID NO: 571274 - RNA, 19 nt, Homo sapiens
  misc_RNA (1)...(19): siRNA sense strand
ugaaauuggcaccaucuuc

SEQ ID NO: 571275 - RNA, 19 nt, Homo sapiens
  misc_RNA (1)...(19): siRNA sense strand
cuggagaggcggucaagaa

SEQ ID NO: 571276 - RNA, 19 nt, Homo sapiens
  misc_RNA (1)...(19): siRNA sense strand
ucucguccuuccuggauga

SEQ ID NO: 571277 - RNA, 19 nt, Homo sapiens
  misc_RNA (1)...(19): siRNA sense strand
caggagugcuacgauguca

SEQ ID NO: 571278 - RNA, 19 nt, Homo sapiens
  misc_RNA (1)...(19): siRNA sense strand
uggaugaccacgaagagaa

SEQ ID NO: 571279 - RNA, 19 nt, Homo sapiens
  misc_RNA (1)...(19): siRNA sense strand
cacacagcauggagaaauc

SEQ ID NO: 571280 - RNA, 19 nt, Homo sapiens
  misc_RNA (1)...(19): siRNA sense strand
caugaucuucaguaccaua

SEQ ID NO: 571281 - RNA, 19 nt, Homo sapiens
  misc_RNA (1)...(19): siRNA sense strand
gcaucagccagaacucaga

SEQ ID NO: 571282 - RNA, 19 nt, Homo sapiens
  misc_RNA (1)...(19): siRNA sense strand
gagguuugagucucuggaa

SEQ ID NO: 571283 - RNA, 19 nt, Homo sapiens
  misc_RNA (1)...(19): siRNA sense strand
cuuccuggaugaccacgaa

SEQ ID NO: 571284 - RNA, 19 nt, Homo sapiens
  misc_RNA (1)...(19): siRNA sense strand
gauccgaaagcccugaaca

SEQ ID NO: 571285 - RNA, 19 nt, Homo sapiens
  misc_RNA (1)...(19): siRNA sense strand
gcagugcaccagaucaacu

SEQ ID NO: 571286 - RNA, 19 nt, Homo sapiens
  misc_RNA (1)...(19): siRNA sense strand
guuugagucucuggaagga

SEQ ID NO: 571287 - RNA, 19 nt, Homo sapiens
  misc_RNA (1)...(19): siRNA sense strand
caaugucaccauccuacga

SEQ ID NO: 571288 - RNA, 19 nt, Homo sapiens
  misc_RNA (1)...(19): siRNA sense strand
acgaggacaugccgaccuu

SEQ ID NO: 571289 - RNA, 19 nt, Homo sapiens
  misc_RNA (1)...(19): siRNA sense strand
ccaccagguuaaccagucu

SEQ ID NO: 571290 - RNA, 19 nt, Homo sapiens
  misc_RNA (1)...(19): siRNA sense strand
gacccagucuauuuaugac

SEQ ID NO: 571291 - RNA, 19 nt, Homo sapiens
  misc_RNA (1)...(19): siRNA sense strand
ucaguaccauacccacuac

SEQ ID NO: 571292 - RNA, 19 nt, Homo sapiens
  misc_RNA (1)...(19): siRNA sense strand
uguguuggccucucugguu

SEQ ID NO: 571293 - RNA, 19 nt, Homo sapiens
  misc_RNA (1)...(19): siRNA sense strand
ccacgaagagaacaugcau

SEQ ID NO: 571294 - RNA, 19 nt, Homo sapiens
  misc_RNA (1)...(19): siRNA sense strand
ccuugugcguuacagaaga

SEQ ID NO: 571295 - RNA, 19 nt, Homo sapiens
  misc_RNA (1)...(19): siRNA sense strand
gcgcaucagccagaacuca

SEQ ID NO: 571296 - RNA, 19 nt, Homo sapiens
  misc_RNA (1)...(19): siRNA sense strand
cgcaccaccuccaccaaga

SEQ ID NO: 571297 - RNA, 19 nt, Homo sapiens
  misc_RNA (1)...(19): siRNA sense strand
ucaccgacuggcagaacua

SEQ ID NO: 571298 - RNA, 19 nt, Homo sapiens
  misc_RNA (1)...(19): siRNA sense strand
uccggaaccucuccaugau

SEQ ID NO: 571299 - RNA, 19 nt, Homo sapiens
  misc_RNA (1)...(19): siRNA sense strand
ucagaaaaguggacucucu

SEQ ID NO: 571300 - RNA, 19 nt, Homo sapiens
  misc_RNA (1)...(19): siRNA sense strand
ccucgcugcucaaguccua

SEQ ID NO: 571301 - RNA, 19 nt, Homo sapiens
  misc_RNA (1)...(19): siRNA sense strand
gcacuaccccgacgccuuu

SEQ ID NO: 571302 - RNA, 19 nt, Homo sapiens
  misc_RNA (1)...(19): siRNA sense strand
gcguucaggucugguuuca

SEQ ID NO: 571303 - RNA, 19 nt, Homo sapiens
  misc_RNA (1)...(19): siRNA sense strand
ggaaugaaagggccaugcu

SEQ ID NO: 571304 - RNA, 19 nt, Homo sapiens
  misc_RNA (1)...(19): siRNA sense strand
gccgcaggauggugagugu

SEQ ID NO: 571305 - RNA, 19 nt, Homo sapiens
  misc_RNA (1)...(19): siRNA sense strand
cugccucgcugcucaaguc

SEQ ID NO: 571306 - RNA, 19 nt, Homo sapiens
  misc_RNA (1)...(19): siRNA sense strand
gcaaagagggugacaaguu

SEQ ID NO: 571307 - RNA, 19 nt, Homo sapiens
  misc_RNA (1)...(19): siRNA sense strand
caaagagggugacaaguuc

SEQ ID NO: 571308 - RNA, 19 nt, Homo sapiens
  misc_RNA (1)...(19): siRNA sense strand
caugauguguaacgaauuc

SEQ ID NO: 571309 - RNA, 19 nt, Homo sapiens
  misc_RNA (1)...(19): siRNA sense strand
gauaagcagcccaggaaga

SEQ ID NO: 571310 - RNA, 19 nt, Homo sapiens
  misc_RNA (1)...(19): siRNA sense strand
gccaugauguguaacgaau

SEQ ID NO: 571311 - RNA, 19 nt, Homo sapiens
  misc_RNA (1)...(19): siRNA sense strand
cagauaagcagcccaggaa

SEQ ID NO: 571312 - RNA, 19 nt, Homo sapiens
  misc_RNA (1)...(19): siRNA sense strand
uccagaagcugaugagcaa

SEQ ID NO: 571313 - RNA, 19 nt, Homo sapiens
  misc_RNA (1)...(19): siRNA sense strand
gauguguaacgaauucuuu

SEQ ID NO: 571314 - RNA, 19 nt, Homo sapiens
  misc_RNA (1)...(19): siRNA sense strand
ggacaacgagguggacuuc

SEQ ID NO: 571315 - RNA, 19 nt, Homo sapiens
  misc_RNA (1)...(19): siRNA sense strand
gggcaaagagggugacaag

SEQ ID NO: 571316 - RNA, 19 nt, Homo sapiens
  misc_RNA (1)...(19): siRNA sense strand
gugacaaguucaagcucaa

SEQ ID NO: 571317 - RNA, 19 nt, Homo sapiens
  misc_RNA (1)...(19): siRNA sense strand
uguccaccuuccacaagua

SEQ ID NO: 571318 - RNA, 19 nt, Homo sapiens
  misc_RNA (1)...(19): siRNA sense strand
ccacaaguacucgggcaaa

SEQ ID NO: 571319 - RNA, 19 nt, Homo sapiens
  misc_RNA (1)...(19): siRNA sense strand
uguaacgaauucuuugaag

SEQ ID NO: 571320 - RNA, 19 nt, Homo sapiens
  misc_RNA (1)...(19): siRNA sense strand
caaguacucgggcaaagag

SEQ ID NO: 571321 - RNA, 19 nt, Homo sapiens
  misc_RNA (1)...(19): siRNA sense strand
ggacuuccaagaguacugu

SEQ ID NO: 571322 - RNA, 19 nt, Homo sapiens
  misc_RNA (1)...(19): siRNA sense strand
auaagcagcccaggaagaa

SEQ ID NO: 571323 - RNA, 19 nt, Homo sapiens
  misc_RNA (1)...(19): siRNA sense strand
gaaaaggacagaugaagcu

SEQ ID NO: 571324 - RNA, 19 nt, Homo sapiens
  misc_RNA (1)...(19): siRNA sense strand
aguucaagcucaacaaguc

SEQ ID NO: 571325 - RNA, 19 nt, Homo sapiens
  misc_RNA (1)...(19): siRNA sense strand
caaguucaagcucaacaag

SEQ ID NO: 571326 - RNA, 19 nt, Homo sapiens
  misc_RNA (1)...(19): siRNA sense strand
guguaacgaauucuuugaa

SEQ ID NO: 571327 - RNA, 19 nt, Homo sapiens
  misc_RNA (1)...(19): siRNA sense strand
aagcagcccaggaagaaau

SEQ ID NO: 571328 - RNA, 19 nt, Homo sapiens
  misc_RNA (1)...(19): siRNA sense strand
gcaaagagggugacaaguu

SEQ ID NO: 571329 - RNA, 19 nt, Homo sapiens
  misc_RNA (1)...(19): siRNA sense strand
caaagagggugacaaguuc

SEQ ID NO: 571330 - RNA, 19 nt, Homo sapiens
  misc_RNA (1)...(19): siRNA sense strand
caugauguguaacgaauuc

SEQ ID NO: 571331 - RNA, 19 nt, Homo sapiens
  misc_RNA (1)...(19): siRNA sense strand
gauaagcagcccaggaaga

SEQ ID NO: 571332 - RNA, 19 nt, Homo sapiens
  misc_RNA (1)...(19): siRNA sense strand
gccaugauguguaacgaau

SEQ ID NO: 571333 - RNA, 19 nt, Homo sapiens
  misc_RNA (1)...(19): siRNA sense strand
cagauaagcagcccaggaa

SEQ ID NO: 571334 - RNA, 19 nt, Homo sapiens
  misc_RNA (1)...(19): siRNA sense strand
uccagaagcugaugagcaa

SEQ ID NO: 571335 - RNA, 19 nt, Homo sapiens
  misc_RNA (1)...(19): siRNA sense strand
gauguguaacgaauucuuu

SEQ ID NO: 571336 - RNA, 19 nt, Homo sapiens
  misc_RNA (1)...(19): siRNA sense strand
ggacaacgagguggacuuc

SEQ ID NO: 571337 - RNA, 19 nt, Homo sapiens
  misc_RNA (1)...(19): siRNA sense strand
gggcaaagagggugacaag

SEQ ID NO: 571338 - RNA, 19 nt, Homo sapiens
  misc_RNA (1)...(19): siRNA sense strand
gugacaaguucaagcucaa

SEQ ID NO: 571339 - RNA, 19 nt, Homo sapiens
  misc_RNA (1)...(19): siRNA sense strand
uguccaccuuccacaagua

SEQ ID NO: 571340 - RNA, 19 nt, Homo sapiens
  misc_RNA (1)...(19): siRNA sense strand
ccacaaguacucgggcaaa

SEQ ID NO: 571341 - RNA, 19 nt, Homo sapiens
  misc_RNA (1)...(19): siRNA sense strand
uguaacgaauucuuugaag

SEQ ID NO: 571342 - RNA, 19 nt, Homo sapiens
  misc_RNA (1)...(19): siRNA sense strand
caaguacucgggcaaagag

SEQ ID NO: 571343 - RNA, 19 nt, Homo sapiens
  misc_RNA (1)...(19): siRNA sense strand
ggacuuccaagaguacugu

SEQ ID NO: 571344 - RNA, 19 nt, Homo sapiens
  misc_RNA (1)...(19): siRNA sense strand
auaagcagcccaggaagaa

SEQ ID NO: 571345 - RNA, 19 nt, Homo sapiens
  misc_RNA (1)...(19): siRNA sense strand
gaaaaggacagaugaagcu

SEQ ID NO: 571346 - RNA, 19 nt, Homo sapiens
  misc_RNA (1)...(19): siRNA sense strand
aguucaagcucaacaaguc

SEQ ID NO: 571347 - RNA, 19 nt, Homo sapiens
  misc_RNA (1)...(19): siRNA sense strand
caaguucaagcucaacaag

SEQ ID NO: 571348 - RNA, 19 nt, Homo sapiens
  misc_RNA (1)...(19): siRNA sense strand
guguaacgaauucuuugaa

SEQ ID NO: 571349 - RNA, 19 nt, Homo sapiens
  misc_RNA (1)...(19): siRNA sense strand
aagcagcccaggaagaaau

SEQ ID NO: 571350 - RNA, 19 nt, Homo sapiens
  misc_RNA (1)...(19): siRNA sense strand
ggaagaagcuauaaauauc

SEQ ID NO: 571351 - RNA, 19 nt, Homo sapiens
  misc_RNA (1)...(19): siRNA sense strand
gaagaagacuugauagaag

SEQ ID NO: 571352 - RNA, 19 nt, Homo sapiens
  misc_RNA (1)...(19): siRNA sense strand
uuaaagcgcuucagucaaa

SEQ ID NO: 571353 - RNA, 19 nt, Homo sapiens
  misc_RNA (1)...(19): siRNA sense strand
cgacagcucucgagucuug

SEQ ID NO: 571354 - RNA, 19 nt, Homo sapiens
  misc_RNA (1)...(19): siRNA sense strand
caaugacacuuucaacaaa

SEQ ID NO: 571355 - RNA, 19 nt, Homo sapiens
  misc_RNA (1)...(19): siRNA sense strand
caaacuagaucucuggaau

SEQ ID NO: 571356 - RNA, 19 nt, Homo sapiens
  misc_RNA (1)...(19): siRNA sense strand
ccaagaagccgccugguaa

SEQ ID NO: 571357 - RNA, 19 nt, Homo sapiens
  misc_RNA (1)...(19): siRNA sense strand
cugaaacucuccauaauga

SEQ ID NO: 571358 - RNA, 19 nt, Homo sapiens
  misc_RNA (1)...(19): siRNA sense strand
gcacuuggaagaagcuaua

SEQ ID NO: 571359 - RNA, 19 nt, Homo sapiens
  misc_RNA (1)...(19): siRNA sense strand
cuacagcgauguuuagaau

SEQ ID NO: 571360 - RNA, 19 nt, Homo sapiens
  misc_RNA (1)...(19): siRNA sense strand
acacuggacucucuaauuc

SEQ ID NO: 571361 - RNA, 19 nt, Homo sapiens
  misc_RNA (1)...(19): siRNA sense strand
gaaugccgcuauuauaaag

SEQ ID NO: 571362 - RNA, 19 nt, Homo sapiens
  misc_RNA (1)...(19): siRNA sense strand
ugccucagcuccuaugaua

SEQ ID NO: 571363 - RNA, 19 nt, Homo sapiens
  misc_RNA (1)...(19): siRNA sense strand
gcagaaaucaacaccaaga

SEQ ID NO: 571364 - RNA, 19 nt, Homo sapiens
  misc_RNA (1)...(19): siRNA sense strand
ggagugagaccuucgaugu

SEQ ID NO: 571365 - RNA, 19 nt, Homo sapiens
  misc_RNA (1)...(19): siRNA sense strand
gcugaggagccuaguaaua

SEQ ID NO: 571366 - RNA, 19 nt, Homo sapiens
  misc_RNA (1)...(19): siRNA sense strand
gagaagaagacuugauaga

SEQ ID NO: 571367 - RNA, 19 nt, Homo sapiens
  misc_RNA (1)...(19): siRNA sense strand
gaggcgaucuuugagcuuu

SEQ ID NO: 571368 - RNA, 19 nt, Homo sapiens
  misc_RNA (1)...(19): siRNA sense strand
gaagccgccugguaaaaua

SEQ ID NO: 571369 - RNA, 19 nt, Homo sapiens
  misc_RNA (1)...(19): siRNA sense strand
augaagagcuccuuaguca

SEQ ID NO: 571370 - RNA, 19 nt, Homo sapiens
  misc_RNA (1)...(19): siRNA sense strand
ugaggagccuaguaauaaa

SEQ ID NO: 571371 - RNA, 19 nt, Homo sapiens
  misc_RNA (1)...(19): siRNA sense strand
gcacacaccaaaugauaau

SEQ ID NO: 571372 - RNA, 19 nt, Homo sapiens
  misc_RNA (1)...(19): siRNA sense strand
ccaaugacacuuucaacaa

SEQ ID NO: 571373 - RNA, 19 nt, Homo sapiens
  misc_RNA (1)...(19): siRNA sense strand
gaaucugaaugccgcuauu

SEQ ID NO: 571374 - RNA, 19 nt, Homo sapiens
  misc_RNA (1)...(19): siRNA sense strand
aagaagacuugauagaaga

SEQ ID NO: 571375 - RNA, 19 nt, Homo sapiens
  misc_RNA (1)...(19): siRNA sense strand
cagcaacaaugagagaauu

SEQ ID NO: 571376 - RNA, 19 nt, Homo sapiens
  misc_RNA (1)...(19): siRNA sense strand
gaagaaggccagaaagacu

SEQ ID NO: 571377 - RNA, 19 nt, Homo sapiens
  misc_RNA (1)...(19): siRNA sense strand
gcaacaaugagagaauuaa

SEQ ID NO: 571378 - RNA, 19 nt, Homo sapiens
  misc_RNA (1)...(19): siRNA sense strand
gaaacucuccauaaugaca

SEQ ID NO: 571379 - RNA, 19 nt, Homo sapiens
  misc_RNA (1)...(19): siRNA sense strand
aaacaaaacuugagcagau

SEQ ID NO: 571380 - RNA, 19 nt, Homo sapiens
  misc_RNA (1)...(19): siRNA sense strand
aaacagcaguggcuuaacu

SEQ ID NO: 571381 - RNA, 19 nt, Homo sapiens
  misc_RNA (1)...(19): siRNA sense strand
aacuagaucucuggaauuu

SEQ ID NO: 571382 - RNA, 19 nt, Homo sapiens
  misc_RNA (1)...(19): siRNA sense strand
caagacuggugaaucugaa

SEQ ID NO: 571383 - RNA, 19 nt, Homo sapiens
  misc_RNA (1)...(19): siRNA sense strand
cugaggagccuaguaauaa

SEQ ID NO: 571384 - RNA, 19 nt, Homo sapiens
  misc_RNA (1)...(19): siRNA sense strand
gcaggcacggugaaaguaa

SEQ ID NO: 571385 - RNA, 19 nt, Homo sapiens
  misc_RNA (1)...(19): siRNA sense strand
gcucucgagucuuguguug

SEQ ID NO: 571386 - RNA, 19 nt, Homo sapiens
  misc_RNA (1)...(19): siRNA sense strand
ucuaauuccucuacaugaa

SEQ ID NO: 571387 - RNA, 19 nt, Homo sapiens
  misc_RNA (1)...(19): siRNA sense strand
ugacagaacaagaguugaa

SEQ ID NO: 571388 - RNA, 19 nt, Homo sapiens
  misc_RNA (1)...(19): siRNA sense strand
ccagaaagacucccugauc

SEQ ID NO: 571389 - RNA, 19 nt, Homo sapiens
  misc_RNA (1)...(19): siRNA sense strand
uggcagaaaucaacaccaa

SEQ ID NO: 571390 - RNA, 19 nt, Homo sapiens
  misc_RNA (1)...(19): siRNA sense strand
gcacgaaacggagagauag

SEQ ID NO: 571391 - RNA, 19 nt, Homo sapiens
  misc_RNA (1)...(19): siRNA sense strand
ugaaugccgcuauuauaaa

SEQ ID NO: 571392 - RNA, 19 nt, Homo sapiens
  misc_RNA (1)...(19): siRNA sense strand
cugaaugccgcuauuauaa

SEQ ID NO: 571393 - RNA, 19 nt, Homo sapiens
  misc_RNA (1)...(19): siRNA sense strand
caagaagccgccugguaaa

SEQ ID NO: 571394 - RNA, 19 nt, Homo sapiens
  misc_RNA (1)...(19): siRNA sense strand
agaagaagacuugauagaa

SEQ ID NO: 571395 - RNA, 19 nt, Homo sapiens
  misc_RNA (1)...(19): siRNA sense strand
gaacugcagccuggagcua

SEQ ID NO: 571396 - RNA, 19 nt, Homo sapiens
  misc_RNA (1)...(19): siRNA sense strand
cgagggaucguuccuaaau

SEQ ID NO: 571397 - RNA, 19 nt, Homo sapiens
  misc_RNA (1)...(19): siRNA sense strand
gcugaaacucuccauaaug

SEQ ID NO: 571398 - RNA, 19 nt, Homo sapiens
  misc_RNA (1)...(19): siRNA sense strand
gauagcuacugcagcaauc

SEQ ID NO: 571399 - RNA, 19 nt, Homo sapiens
  misc_RNA (1)...(19): siRNA sense strand
gugaaggccacgccauuaa

SEQ ID NO: 571400 - RNA, 19 nt, Homo sapiens
  misc_RNA (1)...(19): siRNA sense strand
ucugaaugccgcuauuaua

SEQ ID NO: 571401 - RNA, 19 nt, Homo sapiens
  misc_RNA (1)...(19): siRNA sense strand
cauuaaagcgcuucaguca

SEQ ID NO: 571402 - RNA, 19 nt, Homo sapiens
  misc_RNA (1)...(19): siRNA sense strand
uaauuccucuacaugaaga

SEQ ID NO: 571403 - RNA, 19 nt, Homo sapiens
  misc_RNA (1)...(19): siRNA sense strand
gagggaucguuccuaaauc

SEQ ID NO: 571404 - RNA, 19 nt, Homo sapiens
  misc_RNA (1)...(19): siRNA sense strand
aggagaagaagacuugaua

SEQ ID NO: 571405 - RNA, 19 nt, Homo sapiens
  misc_RNA (1)...(19): siRNA sense strand
acaaacagcaguggcuuaa

SEQ ID NO: 571406 - RNA, 19 nt, Homo sapiens
  misc_RNA (1)...(19): siRNA sense strand
ggaacacuggacucucuaa

SEQ ID NO: 571407 - RNA, 19 nt, Homo sapiens
  misc_RNA (1)...(19): siRNA sense strand
gaaggccacgccauuaaag

SEQ ID NO: 571408 - RNA, 19 nt, Homo sapiens
  misc_RNA (1)...(19): siRNA sense strand
ggaauuguggcagaaauca

SEQ ID NO: 571409 - RNA, 19 nt, Homo sapiens
  misc_RNA (1)...(19): siRNA sense strand
cagcagcacuuggaagaag

SEQ ID NO: 571410 - RNA, 19 nt, Homo sapiens
  misc_RNA (1)...(19): siRNA sense strand
aaacuagaucucuggaauu

SEQ ID NO: 571411 - RNA, 19 nt, Homo sapiens
  misc_RNA (1)...(19): siRNA sense strand
gaucaccgaguccaggauu

SEQ ID NO: 571412 - RNA, 19 nt, Homo sapiens
  misc_RNA (1)...(19): siRNA sense strand
ucaaguagccgccaaagcu

SEQ ID NO: 571413 - RNA, 19 nt, Homo sapiens
  misc_RNA (1)...(19): siRNA sense strand
auagcaagcuguggaguga

SEQ ID NO: 571414 - RNA, 19 nt, Homo sapiens
  misc_RNA (1)...(19): siRNA sense strand
gaacacuggacucucuaau

SEQ ID NO: 571415 - RNA, 19 nt, Homo sapiens
  misc_RNA (1)...(19): siRNA sense strand
cagaacaagaguugaauca

SEQ ID NO: 571416 - RNA, 19 nt, Homo sapiens
  misc_RNA (1)...(19): siRNA sense strand
ggaagaaggccagaaagac

SEQ ID NO: 571417 - RNA, 19 nt, Homo sapiens
  misc_RNA (1)...(19): siRNA sense strand
ccaagacuggugaaucuga

SEQ ID NO: 571418 - RNA, 19 nt, Homo sapiens
  misc_RNA (1)...(19): siRNA sense strand
cuacaugaagagcuccuua

SEQ ID NO: 571419 - RNA, 19 nt, Homo sapiens
  misc_RNA (1)...(19): siRNA sense strand
gucaggaggcgaucuuuga

SEQ ID NO: 571420 - RNA, 19 nt, Homo sapiens
  misc_RNA (1)...(19): siRNA sense strand
cgagucacgucgcuagcaa

SEQ ID NO: 571421 - RNA, 19 nt, Homo sapiens
  misc_RNA (1)...(19): siRNA sense strand
uuagucagcuucgagaugu

SEQ ID NO: 571422 - RNA, 19 nt, Homo sapiens
  misc_RNA (1)...(19): siRNA sense strand
ugaaggccacgccauuaaa

SEQ ID NO: 571423 - RNA, 19 nt, Homo sapiens
  misc_RNA (1)...(19): siRNA sense strand
ccugauggcucgacugaac

SEQ ID NO: 571424 - RNA, 19 nt, Homo sapiens
  misc_RNA (1)...(19): siRNA sense strand
uccgagggaucguuccuaa

SEQ ID NO: 571425 - RNA, 19 nt, Homo sapiens
  misc_RNA (1)...(19): siRNA sense strand
gaaagaccuccugcuggaa

SEQ ID NO: 571426 - RNA, 19 nt, Homo sapiens
  misc_RNA (1)...(19): siRNA sense strand
gaugugugcgucaaucaga

SEQ ID NO: 571427 - RNA, 19 nt, Homo sapiens
  misc_RNA (1)...(19): siRNA sense strand
ggagaagaagacuugauag

SEQ ID NO: 571428 - RNA, 19 nt, Homo sapiens
  misc_RNA (1)...(19): siRNA sense strand
aggcacacaccaaaugaua

SEQ ID NO: 571429 - RNA, 19 nt, Homo sapiens
  misc_RNA (1)...(19): siRNA sense strand
gauguuaggaagccugaug

SEQ ID NO: 571430 - RNA, 19 nt, Homo sapiens
  misc_RNA (1)...(19): siRNA sense strand
cuugauagaagacuugaaa

SEQ ID NO: 571431 - RNA, 19 nt, Homo sapiens
  misc_RNA (1)...(19): siRNA sense strand
uagaagacuugaaauuagc

SEQ ID NO: 571432 - RNA, 19 nt, Homo sapiens
  misc_RNA (1)...(19): siRNA sense strand
auggugaacugaagaacaa

SEQ ID NO: 571433 - RNA, 19 nt, Homo sapiens
  misc_RNA (1)...(19): siRNA sense strand
gcaaacuagaucucuggaa

SEQ ID NO: 571434 - RNA, 19 nt, Homo sapiens
  misc_RNA (1)...(19): siRNA sense strand
cauaaugacagaacaagag

SEQ ID NO: 571435 - RNA, 19 nt, Homo sapiens
  misc_RNA (1)...(19): siRNA sense strand
ggcacacaccaaaugauaa

SEQ ID NO: 571436 - RNA, 19 nt, Homo sapiens
  misc_RNA (1)...(19): siRNA sense strand
uggcucgacugaacauguu

SEQ ID NO: 571437 - RNA, 19 nt, Homo sapiens
  misc_RNA (1)...(19): siRNA sense strand
augcuuacauccaaggaaa

SEQ ID NO: 571438 - RNA, 19 nt, Homo sapiens
  misc_RNA (1)...(19): siRNA sense strand
guaauaaacgggucaaacc

SEQ ID NO: 571439 - RNA, 19 nt, Homo sapiens
  misc_RNA (1)...(19): siRNA sense strand
cugcagcgcuccauuagcu

SEQ ID NO: 571440 - RNA, 19 nt, Homo sapiens
  misc_RNA (1)...(19): siRNA sense strand
ucacgucgcuagcaaaccu

SEQ ID NO: 571441 - RNA, 19 nt, Homo sapiens
  misc_RNA (1)...(19): siRNA sense strand
agugagaccuucgaugugu

SEQ ID NO: 571442 - RNA, 19 nt, Homo sapiens
  misc_RNA (1)...(19): siRNA sense strand
guaguauggacacgaguga

SEQ ID NO: 571443 - RNA, 19 nt, Homo sapiens
  misc_RNA (1)...(19): siRNA sense strand
gccaaugacacuuucaaca

SEQ ID NO: 571444 - RNA, 19 nt, Homo sapiens
  misc_RNA (1)...(19): siRNA sense strand
acaagccaaugacacuuuc

SEQ ID NO: 571445 - RNA, 19 nt, Homo sapiens
  misc_RNA (1)...(19): siRNA sense strand
cuucagagucaguuucaaa

SEQ ID NO: 571446 - RNA, 19 nt, Homo sapiens
  misc_RNA (1)...(19): siRNA sense strand
uggaagaaggccagaaaga

SEQ ID NO: 571447 - RNA, 19 nt, Homo sapiens
  misc_RNA (1)...(19): siRNA sense strand
aaucugaaugccgcuauua

SEQ ID NO: 571448 - RNA, 19 nt, Homo sapiens
  misc_RNA (1)...(19): siRNA sense strand
ucagggaauuguggcagaa

SEQ ID NO: 571449 - RNA, 19 nt, Homo sapiens
  misc_RNA (1)...(19): siRNA sense strand
cagaucagcagcacuugga

SEQ ID NO: 571450 - RNA, 19 nt, Homo sapiens
  misc_RNA (1)...(19): siRNA sense strand
ccgaaggccugacaaauua

SEQ ID NO: 571451 - RNA, 19 nt, Homo sapiens
  misc_RNA (1)...(19): siRNA sense strand
aaucagagcucgucuccuu

SEQ ID NO: 571452 - RNA, 19 nt, Homo sapiens
  misc_RNA (1)...(19): siRNA sense strand
uuacggauacgauaacuua

SEQ ID NO: 571453 - RNA, 19 nt, Homo sapiens
  misc_RNA (1)...(19): siRNA sense strand
ccagaccacuuaaaucaga

SEQ ID NO: 571454 - RNA, 19 nt, Homo sapiens
  misc_RNA (1)...(19): siRNA sense strand
cccaagagcuggaggaaga

SEQ ID NO: 571455 - RNA, 19 nt, Homo sapiens
  misc_RNA (1)...(19): siRNA sense strand
gcaagaggccgagcuggua

SEQ ID NO: 571456 - RNA, 19 nt, Homo sapiens
  misc_RNA (1)...(19): siRNA sense strand
aggccgagcugguacaaua

SEQ ID NO: 571457 - RNA, 19 nt, Homo sapiens
  misc_RNA (1)...(19): siRNA sense strand
acaagcagcuccugguaga

SEQ ID NO: 571458 - RNA, 19 nt, Homo sapiens
  misc_RNA (1)...(19): siRNA sense strand
ggacaaauuucccguuucc

SEQ ID NO: 571459 - RNA, 19 nt, Homo sapiens
  misc_RNA (1)...(19): siRNA sense strand
gguacaauauccugacugu

SEQ ID NO: 571460 - RNA, 19 nt, Homo sapiens
  misc_RNA (1)...(19): siRNA sense strand
gccgaaggccugacaaauu

SEQ ID NO: 571461 - RNA, 19 nt, Homo sapiens
  misc_RNA (1)...(19): siRNA sense strand
ggacccagaccacuuaaau

SEQ ID NO: 571462 - RNA, 19 nt, Homo sapiens
  misc_RNA (1)...(19): siRNA sense strand
uuacagagacagccgauuu

SEQ ID NO: 571463 - RNA, 19 nt, Homo sapiens
  misc_RNA (1)...(19): siRNA sense strand
acaauauccugacuguaaa

SEQ ID NO: 571464 - RNA, 19 nt, Homo sapiens
  misc_RNA (1)...(19): siRNA sense strand
aaagaagaaucgagguuuc

SEQ ID NO: 571465 - RNA, 19 nt, Homo sapiens
  misc_RNA (1)...(19): siRNA sense strand
cgaggacccagaccacuua

SEQ ID NO: 571466 - RNA, 19 nt, Homo sapiens
  misc_RNA (1)...(19): siRNA sense strand
gaagaggaagacaaaccua

SEQ ID NO: 571467 - RNA, 19 nt, Homo sapiens
  misc_RNA (1)...(19): siRNA sense strand
guaaaucguccagugguaa

SEQ ID NO: 571468 - RNA, 19 nt, Homo sapiens
  misc_RNA (1)...(19): siRNA sense strand
aaggacaaauuucccguuu

SEQ ID NO: 571469 - RNA, 19 nt, Homo sapiens
  misc_RNA (1)...(19): siRNA sense strand
gagcucgucuccuucucaa

SEQ ID NO: 571470 - RNA, 19 nt, Homo sapiens
  misc_RNA (1)...(19): siRNA sense strand
agacgaagaggaagacaaa

SEQ ID NO: 571471 - RNA, 19 nt, Homo sapiens
  misc_RNA (1)...(19): siRNA sense strand
ccaucaaucccacuuacua

SEQ ID NO: 571472 - RNA, 19 nt, Homo sapiens
  misc_RNA (1)...(19): siRNA sense strand
ccacaagcagcuccuggua

SEQ ID NO: 571473 - RNA, 19 nt, Homo sapiens
  misc_RNA (1)...(19): siRNA sense strand
acaggagaaugaaauggaa

SEQ ID NO: 571474 - RNA, 19 nt, Homo sapiens
  misc_RNA (1)...(19): siRNA sense strand
uguaaaucguccaguggua

SEQ ID NO: 571475 - RNA, 19 nt, Homo sapiens
  misc_RNA (1)...(19): siRNA sense strand
gcucgucuccuucucaaau

SEQ ID NO: 571476 - RNA, 19 nt, Homo sapiens
  misc_RNA (1)...(19): siRNA sense strand
ugaacccgcuguacuccaa

SEQ ID NO: 571477 - RNA, 19 nt, Homo sapiens
  misc_RNA (1)...(19): siRNA sense strand
cagaacaggagaaugaaau

SEQ ID NO: 571478 - RNA, 19 nt, Homo sapiens
  misc_RNA (1)...(19): siRNA sense strand
caaauguuuccguggauga

SEQ ID NO: 571479 - RNA, 19 nt, Homo sapiens
  misc_RNA (1)...(19): siRNA sense strand
gagccgaaggccugacaaa

SEQ ID NO: 571480 - RNA, 19 nt, Homo sapiens
  misc_RNA (1)...(19): siRNA sense strand
gaacaggagaaugaaaugg

SEQ ID NO: 571481 - RNA, 19 nt, Homo sapiens
  misc_RNA (1)...(19): siRNA sense strand
gaaaagaagaaucgagguu

SEQ ID NO: 571482 - RNA, 19 nt, Homo sapiens
  misc_RNA (1)...(19): siRNA sense strand
uacagucgcuuccaaacuc

SEQ ID NO: 571483 - RNA, 19 nt, Homo sapiens
  misc_RNA (1)...(19): siRNA sense strand
ggccaucaaucccacuuac

SEQ ID NO: 571484 - RNA, 19 nt, Homo sapiens
  misc_RNA (1)...(19): siRNA sense strand
uuacuacgacugucacuuc

SEQ ID NO: 571485 - RNA, 19 nt, Homo sapiens
  misc_RNA (1)...(19): siRNA sense strand
gcgaggacccagaccacuu

SEQ ID NO: 571486 - RNA, 19 nt, Homo sapiens
  misc_RNA (1)...(19): siRNA sense strand
ccagaacaggagaaugaaa

SEQ ID NO: 571487 - RNA, 19 nt, Homo sapiens
  misc_RNA (1)...(19): siRNA sense strand
ccgcgaaguuuuacggaua

SEQ ID NO: 571488 - RNA, 19 nt, Homo sapiens
  misc_RNA (1)...(19): siRNA sense strand
ccugguagacgaagaggaa

SEQ ID NO: 571489 - RNA, 19 nt, Homo sapiens
  misc_RNA (1)...(19): siRNA sense strand
uuccagaacaggagaauga

SEQ ID NO: 571490 - RNA, 19 nt, Homo sapiens
  misc_RNA (1)...(19): siRNA sense strand
ccacuuacuacgacuguca

SEQ ID NO: 571491 - RNA, 19 nt, Homo sapiens
  misc_RNA (1)...(19): siRNA sense strand
cgaaggccugacaaauuaa

SEQ ID NO: 571492 - RNA, 19 nt, Homo sapiens
  misc_RNA (1)...(19): siRNA sense strand
uaaaucguccagugguaau

SEQ ID NO: 571493 - RNA, 19 nt, Homo sapiens
  misc_RNA (1)...(19): siRNA sense strand
acccagaccacuuaaauca

SEQ ID NO: 571494 - RNA, 19 nt, Homo sapiens
  misc_RNA (1)...(19): siRNA sense strand
cggauacgauaacuuacag

SEQ ID NO: 571495 - RNA, 19 nt, Homo sapiens
  misc_RNA (1)...(19): siRNA sense strand
uauccugacuguaaaucgu

SEQ ID NO: 571496 - RNA, 19 nt, Homo sapiens
  misc_RNA (1)...(19): siRNA sense strand
gacccagaccacuuaaauc

SEQ ID NO: 571497 - RNA, 19 nt, Homo sapiens
  misc_RNA (1)...(19): siRNA sense strand
ucaccgagagacagguaaa

SEQ ID NO: 571498 - RNA, 19 nt, Homo sapiens
  misc_RNA (1)...(19): siRNA sense strand
gaaggacggggaaacgaaa

SEQ ID NO: 571499 - RNA, 19 nt, Homo sapiens
  misc_RNA (1)...(19): siRNA sense strand
gaaaacaacaaggacaaau

SEQ ID NO: 571500 - RNA, 19 nt, Homo sapiens
  misc_RNA (1)...(19): siRNA sense strand
gaagagaccucaauuacug

SEQ ID NO: 571501 - RNA, 19 nt, Homo sapiens
  misc_RNA (1)...(19): siRNA sense strand
gaaauuggcuuugaagaag

SEQ ID NO: 571502 - RNA, 19 nt, Homo sapiens
  misc_RNA (1)...(19): siRNA sense strand
gaagugaaauuggcuuuga

SEQ ID NO: 571503 - RNA, 19 nt, Homo sapiens
  misc_RNA (1)...(19): siRNA sense strand
ccacugagaaugauauuua

SEQ ID NO: 571504 - RNA, 19 nt, Homo sapiens
  misc_RNA (1)...(19): siRNA sense strand
ugaggcagauguugaauuu

SEQ ID NO: 571505 - RNA, 19 nt, Homo sapiens
  misc_RNA (1)...(19): siRNA sense strand
agacaaagcuaauaugcaa

SEQ ID NO: 571506 - RNA, 19 nt, Homo sapiens
  misc_RNA (1)...(19): siRNA sense strand
guggagcucuucuuaaauu

SEQ ID NO: 571507 - RNA, 19 nt, Homo sapiens
  misc_RNA (1)...(19): siRNA sense strand
gaaacacaaggaaagaaua

SEQ ID NO: 571508 - RNA, 19 nt, Homo sapiens
  misc_RNA (1)...(19): siRNA sense strand
gaucauagauacggagaug

SEQ ID NO: 571509 - RNA, 19 nt, Homo sapiens
  misc_RNA (1)...(19): siRNA sense strand
gagaaggccuuaaagaaac

SEQ ID NO: 571510 - RNA, 19 nt, Homo sapiens
  misc_RNA (1)...(19): siRNA sense strand
acacagauacguugaagua

SEQ ID NO: 571511 - RNA, 19 nt, Homo sapiens
  misc_RNA (1)...(19): siRNA sense strand
ggaagagauuguucaguuc

SEQ ID NO: 571512 - RNA, 19 nt, Homo sapiens
  misc_RNA (1)...(19): siRNA sense strand
ugagaaggccuuaaagaaa

SEQ ID NO: 571513 - RNA, 19 nt, Homo sapiens
  misc_RNA (1)...(19): siRNA sense strand
gcacaucagguauucguuu

SEQ ID NO: 571514 - RNA, 19 nt, Homo sapiens
  misc_RNA (1)...(19): siRNA sense strand
gaguggauaugaccaaguu

SEQ ID NO: 571515 - RNA, 19 nt, Homo sapiens
  misc_RNA (1)...(19): siRNA sense strand
ucacagcuauguagaacuu

SEQ ID NO: 571516 - RNA, 19 nt, Homo sapiens
  misc_RNA (1)...(19): siRNA sense strand
gagcucuucuuaaauucua

SEQ ID NO: 571517 - RNA, 19 nt, Homo sapiens
  misc_RNA (1)...(19): siRNA sense strand
ugaaauggauuggguguug

SEQ ID NO: 571518 - RNA, 19 nt, Homo sapiens
  misc_RNA (1)...(19): siRNA sense strand
gaaauggauuggguguuga

SEQ ID NO: 571519 - RNA, 19 nt, Homo sapiens
  misc_RNA (1)...(19): siRNA sense strand
cagaggagcuggguuugaa

SEQ ID NO: 571520 - RNA, 19 nt, Homo sapiens
  misc_RNA (1)...(19): siRNA sense strand
gaaugucugaucauagaua

SEQ ID NO: 571521 - RNA, 19 nt, Homo sapiens
  misc_RNA (1)...(19): siRNA sense strand
aggaagagauuguucaguu

SEQ ID NO: 571522 - RNA, 19 nt, Homo sapiens
  misc_RNA (1)...(19): siRNA sense strand
gggcacagguacauugaga

SEQ ID NO: 571523 - RNA, 19 nt, Homo sapiens
  misc_RNA (1)...(19): siRNA sense strand
gauuggguguugaagcaua

SEQ ID NO: 571524 - RNA, 19 nt, Homo sapiens
  misc_RNA (1)...(19): siRNA sense strand
ugaauuugcuacucaugaa

SEQ ID NO: 571525 - RNA, 19 nt, Homo sapiens
  misc_RNA (1)...(19): siRNA sense strand
ggacacagauacguugaag

SEQ ID NO: 571526 - RNA, 19 nt, Homo sapiens
  misc_RNA (1)...(19): siRNA sense strand
uauccaaccagucuaguua

SEQ ID NO: 571527 - RNA, 19 nt, Homo sapiens
  misc_RNA (1)...(19): siRNA sense strand
caaccagucuaguuaugga

SEQ ID NO: 571528 - RNA, 19 nt, Homo sapiens
  misc_RNA (1)...(19): siRNA sense strand
ugaaauuggcuuugaagaa

SEQ ID NO: 571529 - RNA, 19 nt, Homo sapiens
  misc_RNA (1)...(19): siRNA sense strand
gaucacagcuauguagaac

SEQ ID NO: 571530 - RNA, 19 nt, Homo sapiens
  misc_RNA (1)...(19): siRNA sense strand
gagcuggguuugaaaggau

SEQ ID NO: 571531 - RNA, 19 nt, Homo sapiens
  misc_RNA (1)...(19): siRNA sense strand
ggaagccuuugugcaguuu

SEQ ID NO: 571532 - RNA, 19 nt, Homo sapiens
  misc_RNA (1)...(19): siRNA sense strand
gcuggcagaggguauaaua

SEQ ID NO: 571533 - RNA, 19 nt, Homo sapiens
  misc_RNA (1)...(19): siRNA sense strand
gaguacauauugaaauugg

SEQ ID NO: 571534 - RNA, 19 nt, Homo sapiens
  misc_RNA (1)...(19): siRNA sense strand
aggaaugucugaucauaga

SEQ ID NO: 571535 - RNA, 19 nt, Homo sapiens
  misc_RNA (1)...(19): siRNA sense strand
gggaagccuuugugcaguu

SEQ ID NO: 571536 - RNA, 19 nt, Homo sapiens
  misc_RNA (1)...(19): siRNA sense strand
uaaagaaacacaaggaaag

SEQ ID NO: 571537 - RNA, 19 nt, Homo sapiens
  misc_RNA (1)...(19): siRNA sense strand
ugaagcauuuguugaacuu

SEQ ID NO: 571538 - RNA, 19 nt, Homo sapiens
  misc_RNA (1)...(19): siRNA sense strand
caaaauggcacaucaggua

SEQ ID NO: 571539 - RNA, 19 nt, Homo sapiens
  misc_RNA (1)...(19): siRNA sense strand
gcaaggaagagauuguuca

SEQ ID NO: 571540 - RNA, 19 nt, Homo sapiens
  misc_RNA (1)...(19): siRNA sense strand
ggacucccauuuggcugua

SEQ ID NO: 571541 - RNA, 19 nt, Homo sapiens
  misc_RNA (1)...(19): siRNA sense strand
gcuuagaggacucccauuu

SEQ ID NO: 571542 - RNA, 19 nt, Homo sapiens
  misc_RNA (1)...(19): siRNA sense strand
uaugguggcuauaaugaug

SEQ ID NO: 571543 - RNA, 19 nt, Homo sapiens
  misc_RNA (1)...(19): siRNA sense strand
ugacuaugguggcuauaau

SEQ ID NO: 571544 - RNA, 19 nt, Homo sapiens
  misc_RNA (1)...(19): siRNA sense strand
cacaggagauagcugagaa

SEQ ID NO: 571545 - RNA, 19 nt, Homo sapiens
  misc_RNA (1)...(19): siRNA sense strand
gcagcugaguggugguuau

SEQ ID NO: 571546 - RNA, 19 nt, Homo sapiens
  misc_RNA (1)...(19): siRNA sense strand
uuacagagccacugagaau

SEQ ID NO: 571547 - RNA, 19 nt, Homo sapiens
  misc_RNA (1)...(19): siRNA sense strand
ggaagagaccucaauuacu

SEQ ID NO: 571548 - RNA, 19 nt, Homo sapiens
  misc_RNA (1)...(19): siRNA sense strand
gauauggcuuugggucuga

SEQ ID NO: 571549 - RNA, 19 nt, Homo sapiens
  misc_RNA (1)...(19): siRNA sense strand
ggagcuggguuugaaagga

SEQ ID NO: 571550 - RNA, 19 nt, Homo sapiens
  misc_RNA (1)...(19): siRNA sense strand
gaagaggaagugaaauugg

SEQ ID NO: 571551 - RNA, 19 nt, Homo sapiens
  misc_RNA (1)...(19): siRNA sense strand
gaaguucgaacccacuaug

SEQ ID NO: 571552 - RNA, 19 nt, Homo sapiens
  misc_RNA (1)...(19): siRNA sense strand
aagcauacagguccgaaua

SEQ ID NO: 571553 - RNA, 19 nt, Homo sapiens
  misc_RNA (1)...(19): siRNA sense strand
gagaugguggguccaguuu

SEQ ID NO: 571554 - RNA, 19 nt, Homo sapiens
  misc_RNA (1)...(19): siRNA sense strand
gguauucguuucaucuaca

SEQ ID NO: 571555 - RNA, 19 nt, Homo sapiens
  misc_RNA (1)...(19): siRNA sense strand
cucgaaagcucauggcuau

SEQ ID NO: 571556 - RNA, 19 nt, Homo sapiens
  misc_RNA (1)...(19): siRNA sense strand
gcugagaaggccuuaaaga

SEQ ID NO: 571557 - RNA, 19 nt, Homo sapiens
  misc_RNA (1)...(19): siRNA sense strand
uagccgagcugaaguucga

SEQ ID NO: 571558 - RNA, 19 nt, Homo sapiens
  misc_RNA (1)...(19): siRNA sense strand
acagguacauugagaucuu

SEQ ID NO: 571559 - RNA, 19 nt, Homo sapiens
  misc_RNA (1)...(19): siRNA sense strand
gcacagguacauugagauc

SEQ ID NO: 571560 - RNA, 19 nt, Homo sapiens
  misc_RNA (1)...(19): siRNA sense strand
gaaagcucauggcuaugca

SEQ ID NO: 571561 - RNA, 19 nt, Homo sapiens
  misc_RNA (1)...(19): siRNA sense strand
acagauauguggagcucuu

SEQ ID NO: 571562 - RNA, 19 nt, Homo sapiens
  misc_RNA (1)...(19): siRNA sense strand
cagaggguauaauagcauu

SEQ ID NO: 571563 - RNA, 19 nt, Homo sapiens
  misc_RNA (1)...(19): siRNA sense strand
ccaugagaguacauauuga

SEQ ID NO: 571564 - RNA, 19 nt, Homo sapiens
  misc_RNA (1)...(19): siRNA sense strand
gcugaguggugguuaugga

SEQ ID NO: 571565 - RNA, 19 nt, Homo sapiens
  misc_RNA (1)...(19): siRNA sense strand
cuaauaugcaacacagaua

SEQ ID NO: 571566 - RNA, 19 nt, Homo sapiens
  misc_RNA (1)...(19): siRNA sense strand
uuguugaacuugaaucuga

SEQ ID NO: 571567 - RNA, 19 nt, Homo sapiens
  misc_RNA (1)...(19): siRNA sense strand
gcaaaagacaaagcuaaua

SEQ ID NO: 571568 - RNA, 19 nt, Homo sapiens
  misc_RNA (1)...(19): siRNA sense strand
gaagagauuguucaguucu

SEQ ID NO: 571569 - RNA, 19 nt, Homo sapiens
  misc_RNA (1)...(19): siRNA sense strand
gaaguauucaagucuaaca

SEQ ID NO: 571570 - RNA, 19 nt, Homo sapiens
  misc_RNA (1)...(19): siRNA sense strand
aagcauuuguugaacuuga

SEQ ID NO: 571571 - RNA, 19 nt, Homo sapiens
  misc_RNA (1)...(19): siRNA sense strand
cuuugggucugauagauuu

SEQ ID NO: 571572 - RNA, 19 nt, Homo sapiens
  misc_RNA (1)...(19): siRNA sense strand
gcagaggagcuggguuuga

SEQ ID NO: 571573 - RNA, 19 nt, Homo sapiens
  misc_RNA (1)...(19): siRNA sense strand
uagcugagaaggccuuaaa

SEQ ID NO: 571574 - RNA, 19 nt, Homo sapiens
  misc_RNA (1)...(19): siRNA sense strand
agagauuguucaguucuuu

SEQ ID NO: 571575 - RNA, 19 nt, Homo sapiens
  misc_RNA (1)...(19): siRNA sense strand
uuagaggacucccauuugg

SEQ ID NO: 571576 - RNA, 19 nt, Homo sapiens
  misc_RNA (1)...(19): siRNA sense strand
ggagaugguggguccaguu

SEQ ID NO: 571577 - RNA, 19 nt, Homo sapiens
  misc_RNA (1)...(19): siRNA sense strand
ggcaagugguggcgcuuau

SEQ ID NO: 571578 - RNA, 19 nt, Homo sapiens
  misc_RNA (1)...(19): siRNA sense strand
auguggagcucuucuuaaa

SEQ ID NO: 571579 - RNA, 19 nt, Homo sapiens
  misc_RNA (1)...(19): siRNA sense strand
gcuaauaugcaacacagau

SEQ ID NO: 571580 - RNA, 19 nt, Homo sapiens
  misc_RNA (1)...(19): siRNA sense strand
acagagccacugagaauga

SEQ ID NO: 571581 - RNA, 19 nt, Homo sapiens
  misc_RNA (1)...(19): siRNA sense strand
cugagaaggccuuaaagaa

SEQ ID NO: 571582 - RNA, 19 nt, Homo sapiens
  misc_RNA (1)...(19): siRNA sense strand
ggaaaacuccagugacuau

SEQ ID NO: 571583 - RNA, 19 nt, Homo sapiens
  misc_RNA (1)...(19): siRNA sense strand
caugagaguacauauugaa

SEQ ID NO: 571584 - RNA, 19 nt, Homo sapiens
  misc_RNA (1)...(19): siRNA sense strand
aauuucuucucaccucuua

SEQ ID NO: 571585 - RNA, 19 nt, Homo sapiens
  misc_RNA (1)...(19): siRNA sense strand
uggaggcuaugaugacuau

SEQ ID NO: 571586 - RNA, 19 nt, Homo sapiens
  misc_RNA (1)...(19): siRNA sense strand
gaauagggcacagguacau

SEQ ID NO: 571587 - RNA, 19 nt, Homo sapiens
  misc_RNA (1)...(19): siRNA sense strand
ugaccaaguucugcaggaa

SEQ ID NO: 571588 - RNA, 19 nt, Homo sapiens
  misc_RNA (1)...(19): siRNA sense strand
gcaguaugaguggauauga

SEQ ID NO: 571589 - RNA, 19 nt, Homo sapiens
  misc_RNA (1)...(19): siRNA sense strand
cccaugagaguacauauug

SEQ ID NO: 571590 - RNA, 19 nt, Homo sapiens
  misc_RNA (1)...(19): siRNA sense strand
ugaagaggaagugaaauug

SEQ ID NO: 571591 - RNA, 19 nt, Homo sapiens
  misc_RNA (1)...(19): siRNA sense strand
acuugaaucugaagaggaa

SEQ ID NO: 571592 - RNA, 19 nt, Homo sapiens
  misc_RNA (1)...(19): siRNA sense strand
gcagauguugaauuugcua

SEQ ID NO: 571593 - RNA, 19 nt, Homo sapiens
  misc_RNA (1)...(19): siRNA sense strand
aaagaaacacaaggaaaga

SEQ ID NO: 571594 - RNA, 19 nt, Homo sapiens
  misc_RNA (1)...(19): siRNA sense strand
cugaagaggaagugaaauu

SEQ ID NO: 571595 - RNA, 19 nt, Homo sapiens
  misc_RNA (1)...(19): siRNA sense strand
gguauggaggcuaugauga

SEQ ID NO: 571596 - RNA, 19 nt, Homo sapiens
  misc_RNA (1)...(19): siRNA sense strand
ggcagaggguauaauagca

SEQ ID NO: 571597 - RNA, 19 nt, Homo sapiens
  misc_RNA (1)...(19): siRNA sense strand
aaacacaaggaaagaauag

SEQ ID NO: 571598 - RNA, 19 nt, Homo sapiens
  misc_RNA (1)...(19): siRNA sense strand
ggacccgauggcagaguua

SEQ ID NO: 571599 - RNA, 19 nt, Homo sapiens
  misc_RNA (1)...(19): siRNA sense strand
gaugggagggaugggcuua

SEQ ID NO: 571600 - RNA, 19 nt, Homo sapiens
  misc_RNA (1)...(19): siRNA sense strand
gaacuucuuggaacuuuaa

SEQ ID NO: 571601 - RNA, 19 nt, Homo sapiens
  misc_RNA (1)...(19): siRNA sense strand
ggaacuucuuggaacuuua

SEQ ID NO: 571602 - RNA, 19 nt, Homo sapiens
  misc_RNA (1)...(19): siRNA sense strand
gggaacuucuuggaacuuu

SEQ ID NO: 571603 - RNA, 19 nt, Homo sapiens
  misc_RNA (1)...(19): siRNA sense strand
ggagucuacaccuauauuu

SEQ ID NO: 571604 - RNA, 19 nt, Homo sapiens
  misc_RNA (1)...(19): siRNA sense strand
gcagccacaccgaagauuu

SEQ ID NO: 571605 - RNA, 19 nt, Homo sapiens
  misc_RNA (1)...(19): siRNA sense strand
gagaaucacgagcaacaug

SEQ ID NO: 571606 - RNA, 19 nt, Homo sapiens
  misc_RNA (1)...(19): siRNA sense strand
ccuggagucuacaccuaua

SEQ ID NO: 571607 - RNA, 19 nt, Homo sapiens
  misc_RNA (1)...(19): siRNA sense strand
gagucuacaccuauauuug

SEQ ID NO: 571608 - RNA, 19 nt, Homo sapiens
  misc_RNA (1)...(19): siRNA sense strand
gggagaaucacgagcaaca

SEQ ID NO: 571609 - RNA, 19 nt, Homo sapiens
  misc_RNA (1)...(19): siRNA sense strand
uggcaucccuggagucuac

SEQ ID NO: 571610 - RNA, 19 nt, Homo sapiens
  misc_RNA (1)...(19): siRNA sense strand
caccgaagauuuucaaugg

SEQ ID NO: 571611 - RNA, 19 nt, Homo sapiens
  misc_RNA (1)...(19): siRNA sense strand
ucccuggagucuacaccua

SEQ ID NO: 571612 - RNA, 19 nt, Homo sapiens
  misc_RNA (1)...(19): siRNA sense strand
ggagucuacaccuauauuu

SEQ ID NO: 571613 - RNA, 19 nt, Homo sapiens
  misc_RNA (1)...(19): siRNA sense strand
gcagccacaccgaagauuu

SEQ ID NO: 571614 - RNA, 19 nt, Homo sapiens
  misc_RNA (1)...(19): siRNA sense strand
gagaaucacgagcaacaug

SEQ ID NO: 571615 - RNA, 19 nt, Homo sapiens
  misc_RNA (1)...(19): siRNA sense strand
ccuggagucuacaccuaua

SEQ ID NO: 571616 - RNA, 19 nt, Homo sapiens
  misc_RNA (1)...(19): siRNA sense strand
gagucuacaccuauauuug

SEQ ID NO: 571617 - RNA, 19 nt, Homo sapiens
  misc_RNA (1)...(19): siRNA sense strand
gggagaaucacgagcaaca

SEQ ID NO: 571618 - RNA, 19 nt, Homo sapiens
  misc_RNA (1)...(19): siRNA sense strand
uggcaucccuggagucuac

SEQ ID NO: 571619 - RNA, 19 nt, Homo sapiens
  misc_RNA (1)...(19): siRNA sense strand
caccgaagauuuucaaugg

SEQ ID NO: 571620 - RNA, 19 nt, Homo sapiens
  misc_RNA (1)...(19): siRNA sense strand
ucccuggagucuacaccua

SEQ ID NO: 571621 - RNA, 19 nt, Homo sapiens
  misc_RNA (1)...(19): siRNA sense strand
gcagccacaccgaagauuu

SEQ ID NO: 571622 - RNA, 19 nt, Homo sapiens
  misc_RNA (1)...(19): siRNA sense strand
gagaaucacgagcaacaug

SEQ ID NO: 571623 - RNA, 19 nt, Homo sapiens
  misc_RNA (1)...(19): siRNA sense strand
gggagaaucacgagcaaca

SEQ ID NO: 571624 - RNA, 19 nt, Homo sapiens
  misc_RNA (1)...(19): siRNA sense strand
caccgaagauuuucaaugg

SEQ ID NO: 571625 - RNA, 19 nt, Homo sapiens
  misc_RNA (1)...(19): siRNA sense strand
cagaagaaauuaccaguua

SEQ ID NO: 571626 - RNA, 19 nt, Homo sapiens
  misc_RNA (1)...(19): siRNA sense strand
ggacaacucauuaauguua

SEQ ID NO: 571627 - RNA, 19 nt, Homo sapiens
  misc_RNA (1)...(19): siRNA sense strand
gaacaaagaugauccugau

SEQ ID NO: 571628 - RNA, 19 nt, Homo sapiens
  misc_RNA (1)...(19): siRNA sense strand
gaucaaacgugacaaguug

SEQ ID NO: 571629 - RNA, 19 nt, Homo sapiens
  misc_RNA (1)...(19): siRNA sense strand
gacaggagcuucucaauca

SEQ ID NO: 571630 - RNA, 19 nt, Homo sapiens
  misc_RNA (1)...(19): siRNA sense strand
ggacagccauuaccacuga

SEQ ID NO: 571631 - RNA, 19 nt, Homo sapiens
  misc_RNA (1)...(19): siRNA sense strand
cacagaaggugaagaaaua

SEQ ID NO: 571632 - RNA, 19 nt, Homo sapiens
  misc_RNA (1)...(19): siRNA sense strand
ccaaacaugugggcuauua

SEQ ID NO: 571633 - RNA, 19 nt, Homo sapiens
  misc_RNA (1)...(19): siRNA sense strand
gaaggaaauugaaaggaaa

SEQ ID NO: 571634 - RNA, 19 nt, Homo sapiens
  misc_RNA (1)...(19): siRNA sense strand
caucuaagcugucagaaau

SEQ ID NO: 571635 - RNA, 19 nt, Homo sapiens
  misc_RNA (1)...(19): siRNA sense strand
aaacucagcuggcuacuau

SEQ ID NO: 571636 - RNA, 19 nt, Homo sapiens
  misc_RNA (1)...(19): siRNA sense strand
gaacaagaauggaagaaac

SEQ ID NO: 571637 - RNA, 19 nt, Homo sapiens
  misc_RNA (1)...(19): siRNA sense strand
aaagaaagauaaccacuug

SEQ ID NO: 571638 - RNA, 19 nt, Homo sapiens
  misc_RNA (1)...(19): siRNA sense strand
ggauaaggauacuuugaaa

SEQ ID NO: 571639 - RNA, 19 nt, Homo sapiens
  misc_RNA (1)...(19): siRNA sense strand
gaacagcuuuauaagauca

SEQ ID NO: 571640 - RNA, 19 nt, Homo sapiens
  misc_RNA (1)...(19): siRNA sense strand
gaauagagaacaagaagaa

SEQ ID NO: 571641 - RNA, 19 nt, Homo sapiens
  misc_RNA (1)...(19): siRNA sense strand
ccucaugggucaucuuaua

SEQ ID NO: 571642 - RNA, 19 nt, Homo sapiens
  misc_RNA (1)...(19): siRNA sense strand
caaacuaugucaaaccaaa

SEQ ID NO: 571643 - RNA, 19 nt, Homo sapiens
  misc_RNA (1)...(19): siRNA sense strand
guggauaucucucagguuu

SEQ ID NO: 571644 - RNA, 19 nt, Homo sapiens
  misc_RNA (1)...(19): siRNA sense strand
ggagauagaaguggaauuu

SEQ ID NO: 571645 - RNA, 19 nt, Homo sapiens
  misc_RNA (1)...(19): siRNA sense strand
gaauuaugccaaagacuua

SEQ ID NO: 571646 - RNA, 19 nt, Homo sapiens
  misc_RNA (1)...(19): siRNA sense strand
gaaagcaaauugauuccau

SEQ ID NO: 571647 - RNA, 19 nt, Homo sapiens
  misc_RNA (1)...(19): siRNA sense strand
ucagguaacuucagcauau

SEQ ID NO: 571648 - RNA, 19 nt, Homo sapiens
  misc_RNA (1)...(19): siRNA sense strand
agaagaaauugucagguua

SEQ ID NO: 571649 - RNA, 19 nt, Homo sapiens
  misc_RNA (1)...(19): siRNA sense strand
caagaguucuccauagcua

SEQ ID NO: 571650 - RNA, 19 nt, Homo sapiens
  misc_RNA (1)...(19): siRNA sense strand
ggaagaaacaacuugaauu

SEQ ID NO: 571651 - RNA, 19 nt, Homo sapiens
  misc_RNA (1)...(19): siRNA sense strand
ugaaggaaauugaaaggaa

SEQ ID NO: 571652 - RNA, 19 nt, Homo sapiens
  misc_RNA (1)...(19): siRNA sense strand
gaagaaauugucagguuaa

SEQ ID NO: 571653 - RNA, 19 nt, Homo sapiens
  misc_RNA (1)...(19): siRNA sense strand
aacaggaacuucaggaaua

SEQ ID NO: 571654 - RNA, 19 nt, Homo sapiens
  misc_RNA (1)...(19): siRNA sense strand
gagaaacaacguaaggaua

SEQ ID NO: 571655 - RNA, 19 nt, Homo sapiens
  misc_RNA (1)...(19): siRNA sense strand
gaacucugccuucauauca

SEQ ID NO: 571656 - RNA, 19 nt, Homo sapiens
  misc_RNA (1)...(19): siRNA sense strand
caaaggaucaagagaguuu

SEQ ID NO: 571657 - RNA, 19 nt, Homo sapiens
  misc_RNA (1)...(19): siRNA sense strand
uaucagaccuaaacaagga

SEQ ID NO: 571658 - RNA, 19 nt, Homo sapiens
  misc_RNA (1)...(19): siRNA sense strand
gaaccacuuucuucaaauc

SEQ ID NO: 571659 - RNA, 19 nt, Homo sapiens
  misc_RNA (1)...(19): siRNA sense strand
gaccaaccuuccucccuua

SEQ ID NO: 571660 - RNA, 19 nt, Homo sapiens
  misc_RNA (1)...(19): siRNA sense strand
gaagauggaucagcaagag

SEQ ID NO: 571661 - RNA, 19 nt, Homo sapiens
  misc_RNA (1)...(19): siRNA sense strand
agacagggcuauauucaug

SEQ ID NO: 571662 - RNA, 19 nt, Homo sapiens
  misc_RNA (1)...(19): siRNA sense strand
ggaagaaccagaagcuuug

SEQ ID NO: 571663 - RNA, 19 nt, Homo sapiens
  misc_RNA (1)...(19): siRNA sense strand
ggugaauuauagagcauua

SEQ ID NO: 571664 - RNA, 19 nt, Homo sapiens
  misc_RNA (1)...(19): siRNA sense strand
guaaggauaaggauacuuu

SEQ ID NO: 571665 - RNA, 19 nt, Homo sapiens
  misc_RNA (1)...(19): siRNA sense strand
ggacugcaaagaaagauaa

SEQ ID NO: 571666 - RNA, 19 nt, Homo sapiens
  misc_RNA (1)...(19): siRNA sense strand
ggagagugguggacaggaa

SEQ ID NO: 571667 - RNA, 19 nt, Homo sapiens
  misc_RNA (1)...(19): siRNA sense strand
gaugguuucccaaaucuua

SEQ ID NO: 571668 - RNA, 19 nt, Homo sapiens
  misc_RNA (1)...(19): siRNA sense strand
cagugugacuuggaaauua

SEQ ID NO: 571669 - RNA, 19 nt, Homo sapiens
  misc_RNA (1)...(19): siRNA sense strand
ucagggaacucacccaaga

SEQ ID NO: 571670 - RNA, 19 nt, Homo sapiens
  misc_RNA (1)...(19): siRNA sense strand
gggaagaaccagaagcuuu

SEQ ID NO: 571671 - RNA, 19 nt, Homo sapiens
  misc_RNA (1)...(19): siRNA sense strand
gaggaugguuucccaaauc

SEQ ID NO: 571672 - RNA, 19 nt, Homo sapiens
  misc_RNA (1)...(19): siRNA sense strand
acaguuagaugcucuugaa

SEQ ID NO: 571673 - RNA, 19 nt, Homo sapiens
  misc_RNA (1)...(19): siRNA sense strand
gccaaagacuuaaagaaca

SEQ ID NO: 571674 - RNA, 19 nt, Homo sapiens
  misc_RNA (1)...(19): siRNA sense strand
aagaagaaauugucagguu

SEQ ID NO: 571675 - RNA, 19 nt, Homo sapiens
  misc_RNA (1)...(19): siRNA sense strand
caaccuuccucccuuaaug

SEQ ID NO: 571676 - RNA, 19 nt, Homo sapiens
  misc_RNA (1)...(19): siRNA sense strand
gagauauaauucagguuga

SEQ ID NO: 571677 - RNA, 19 nt, Homo sapiens
  misc_RNA (1)...(19): siRNA sense strand
gaggaaagcaaauugauuc

SEQ ID NO: 571678 - RNA, 19 nt, Homo sapiens
  misc_RNA (1)...(19): siRNA sense strand
gaaauugucagguuaaacu

SEQ ID NO: 571679 - RNA, 19 nt, Homo sapiens
  misc_RNA (1)...(19): siRNA sense strand
ggaggugcauggaggaaga

SEQ ID NO: 571680 - RNA, 19 nt, Homo sapiens
  misc_RNA (1)...(19): siRNA sense strand
agaaacaacguaaggauaa

SEQ ID NO: 571681 - RNA, 19 nt, Homo sapiens
  misc_RNA (1)...(19): siRNA sense strand
gagagaaaccuacaacaca

SEQ ID NO: 571682 - RNA, 19 nt, Homo sapiens
  misc_RNA (1)...(19): siRNA sense strand
cauaacaggugaucaagca

SEQ ID NO: 571683 - RNA, 19 nt, Homo sapiens
  misc_RNA (1)...(19): siRNA sense strand
gcugaaauaugggcuuuau

SEQ ID NO: 571684 - RNA, 19 nt, Homo sapiens
  misc_RNA (1)...(19): siRNA sense strand
uagcaagucuggagcauca

SEQ ID NO: 571685 - RNA, 19 nt, Homo sapiens
  misc_RNA (1)...(19): siRNA sense strand
guaugcagcuguaaauaag

SEQ ID NO: 571686 - RNA, 19 nt, Homo sapiens
  misc_RNA (1)...(19): siRNA sense strand
gauaaccacuugaacuucu

SEQ ID NO: 571687 - RNA, 19 nt, Homo sapiens
  misc_RNA (1)...(19): siRNA sense strand
ggaagaauuaugccaaaga

SEQ ID NO: 571688 - RNA, 19 nt, Homo sapiens
  misc_RNA (1)...(19): siRNA sense strand
aaacaaggaugggaagaug

SEQ ID NO: 571689 - RNA, 19 nt, Homo sapiens
  misc_RNA (1)...(19): siRNA sense strand
gugguucucccuccuauua

SEQ ID NO: 571690 - RNA, 19 nt, Homo sapiens
  misc_RNA (1)...(19): siRNA sense strand
gcaaggaaaagaaaacuua

SEQ ID NO: 571691 - RNA, 19 nt, Homo sapiens
  misc_RNA (1)...(19): siRNA sense strand
gaagaauuaugccaaagac

SEQ ID NO: 571692 - RNA, 19 nt, Homo sapiens
  misc_RNA (1)...(19): siRNA sense strand
ggaggaaagcaaauugauu

SEQ ID NO: 571693 - RNA, 19 nt, Homo sapiens
  misc_RNA (1)...(19): siRNA sense strand
cgcagucucugauugauuu

SEQ ID NO: 571694 - RNA, 19 nt, Homo sapiens
  misc_RNA (1)...(19): siRNA sense strand
ggaaagcaaagcaaggaaa

SEQ ID NO: 571695 - RNA, 19 nt, Homo sapiens
  misc_RNA (1)...(19): siRNA sense strand
gcaaugcaccuuacugaca

SEQ ID NO: 571696 - RNA, 19 nt, Homo sapiens
  misc_RNA (1)...(19): siRNA sense strand
agacugagcuggaaguucu

SEQ ID NO: 571697 - RNA, 19 nt, Homo sapiens
  misc_RNA (1)...(19): siRNA sense strand
caaagaugauccugauugg

SEQ ID NO: 571698 - RNA, 19 nt, Homo sapiens
  misc_RNA (1)...(19): siRNA sense strand
caacguaaggauaaggaua

SEQ ID NO: 571699 - RNA, 19 nt, Homo sapiens
  misc_RNA (1)...(19): siRNA sense strand
gcaguuagcccuugaacag

SEQ ID NO: 571700 - RNA, 19 nt, Homo sapiens
  misc_RNA (1)...(19): siRNA sense strand
ugaaauaugggcuuuauca

SEQ ID NO: 571701 - RNA, 19 nt, Homo sapiens
  misc_RNA (1)...(19): siRNA sense strand
gcaccaggacaguuaauau

SEQ ID NO: 571702 - RNA, 19 nt, Homo sapiens
  misc_RNA (1)...(19): siRNA sense strand
cagcaaauaaugaagauga

SEQ ID NO: 571703 - RNA, 19 nt, Homo sapiens
  misc_RNA (1)...(19): siRNA sense strand
gcuaaaagcagaagaguuu

SEQ ID NO: 571704 - RNA, 19 nt, Homo sapiens
  misc_RNA (1)...(19): siRNA sense strand
ggaucuguaucaccuauuc

SEQ ID NO: 571705 - RNA, 19 nt, Homo sapiens
  misc_RNA (1)...(19): siRNA sense strand
gaaucuucaucuugaguug

SEQ ID NO: 571706 - RNA, 19 nt, Homo sapiens
  misc_RNA (1)...(19): siRNA sense strand
gaacguaaagcccagaaag

SEQ ID NO: 571707 - RNA, 19 nt, Homo sapiens
  misc_RNA (1)...(19): siRNA sense strand
cagcaagaguucuccauag

SEQ ID NO: 571708 - RNA, 19 nt, Homo sapiens
  misc_RNA (1)...(19): siRNA sense strand
gaaaagacagggcuauauu

SEQ ID NO: 571709 - RNA, 19 nt, Homo sapiens
  misc_RNA (1)...(19): siRNA sense strand
cuucaggaauaucagaaua

SEQ ID NO: 571710 - RNA, 19 nt, Homo sapiens
  misc_RNA (1)...(19): siRNA sense strand
caagcaacuucaacaggaa

SEQ ID NO: 571711 - RNA, 19 nt, Homo sapiens
  misc_RNA (1)...(19): siRNA sense strand
ggaaaucaagcaacuucaa

SEQ ID NO: 571712 - RNA, 19 nt, Homo sapiens
  misc_RNA (1)...(19): siRNA sense strand
ggagagacaacgagaggaa

SEQ ID NO: 571713 - RNA, 19 nt, Homo sapiens
  misc_RNA (1)...(19): siRNA sense strand
acagagagaauuacaagaa

SEQ ID NO: 571714 - RNA, 19 nt, Homo sapiens
  misc_RNA (1)...(19): siRNA sense strand
gaagaugagcucaguuucu

SEQ ID NO: 571715 - RNA, 19 nt, Homo sapiens
  misc_RNA (1)...(19): siRNA sense strand
uguggaaccuggagauuug

SEQ ID NO: 571716 - RNA, 19 nt, Homo sapiens
  misc_RNA (1)...(19): siRNA sense strand
gcaagaaaauuggugguuu

SEQ ID NO: 571717 - RNA, 19 nt, Homo sapiens
  misc_RNA (1)...(19): siRNA sense strand
gcaaggaaccaugaugaga

SEQ ID NO: 571718 - RNA, 19 nt, Homo sapiens
  misc_RNA (1)...(19): siRNA sense strand
gaaacaacguaaggauaag

SEQ ID NO: 571719 - RNA, 19 nt, Homo sapiens
  misc_RNA (1)...(19): siRNA sense strand
gaauggagggccaaacaug

SEQ ID NO: 571720 - RNA, 19 nt, Homo sapiens
  misc_RNA (1)...(19): siRNA sense strand
gaacuucaggaauaucaga

SEQ ID NO: 571721 - RNA, 19 nt, Homo sapiens
  misc_RNA (1)...(19): siRNA sense strand
uuugaaagcugaggagaaa

SEQ ID NO: 571722 - RNA, 19 nt, Homo sapiens
  misc_RNA (1)...(19): siRNA sense strand
ggaaagcugaggagaaaca

SEQ ID NO: 571723 - RNA, 19 nt, Homo sapiens
  misc_RNA (1)...(19): siRNA sense strand
cuacaacacacagcaguua

SEQ ID NO: 571724 - RNA, 19 nt, Homo sapiens
  misc_RNA (1)...(19): siRNA sense strand
gaacugagagaaaccuaca

SEQ ID NO: 571725 - RNA, 19 nt, Homo sapiens
  misc_RNA (1)...(19): siRNA sense strand
cagaagaaauuaccaguua

SEQ ID NO: 571726 - RNA, 19 nt, Homo sapiens
  misc_RNA (1)...(19): siRNA sense strand
ggacaacucauuaauguua

SEQ ID NO: 571727 - RNA, 19 nt, Homo sapiens
  misc_RNA (1)...(19): siRNA sense strand
gaacaaagaugauccugau

SEQ ID NO: 571728 - RNA, 19 nt, Homo sapiens
  misc_RNA (1)...(19): siRNA sense strand
gaucaaacgugacaaguug

SEQ ID NO: 571729 - RNA, 19 nt, Homo sapiens
  misc_RNA (1)...(19): siRNA sense strand
gacaggagcuucucaauca

SEQ ID NO: 571730 - RNA, 19 nt, Homo sapiens
  misc_RNA (1)...(19): siRNA sense strand
ggacagccauuaccacuga

SEQ ID NO: 571731 - RNA, 19 nt, Homo sapiens
  misc_RNA (1)...(19): siRNA sense strand
cacagaaggugaagaaaua

SEQ ID NO: 571732 - RNA, 19 nt, Homo sapiens
  misc_RNA (1)...(19): siRNA sense strand
ccaaacaugugggcuauua

SEQ ID NO: 571733 - RNA, 19 nt, Homo sapiens
  misc_RNA (1)...(19): siRNA sense strand
gaaggaaauugaaaggaaa

SEQ ID NO: 571734 - RNA, 19 nt, Homo sapiens
  misc_RNA (1)...(19): siRNA sense strand
caucuaagcugucagaaau

SEQ ID NO: 571735 - RNA, 19 nt, Homo sapiens
  misc_RNA (1)...(19): siRNA sense strand
aaacucagcuggcuacuau

SEQ ID NO: 571736 - RNA, 19 nt, Homo sapiens
  misc_RNA (1)...(19): siRNA sense strand
gaacaagaauggaagaaac

SEQ ID NO: 571737 - RNA, 19 nt, Homo sapiens
  misc_RNA (1)...(19): siRNA sense strand
aaagaaagauaaccacuug

SEQ ID NO: 571738 - RNA, 19 nt, Homo sapiens
  misc_RNA (1)...(19): siRNA sense strand
ggauaaggauacuuugaaa

SEQ ID NO: 571739 - RNA, 19 nt, Homo sapiens
  misc_RNA (1)...(19): siRNA sense strand
gaacagcuuuauaagauca

SEQ ID NO: 571740 - RNA, 19 nt, Homo sapiens
  misc_RNA (1)...(19): siRNA sense strand
gaauagagaacaagaagaa

SEQ ID NO: 571741 - RNA, 19 nt, Homo sapiens
  misc_RNA (1)...(19): siRNA sense strand
ccucaugggucaucuuaua

SEQ ID NO: 571742 - RNA, 19 nt, Homo sapiens
  misc_RNA (1)...(19): siRNA sense strand
caaacuaugucaaaccaaa

SEQ ID NO: 571743 - RNA, 19 nt, Homo sapiens
  misc_RNA (1)...(19): siRNA sense strand
guggauaucucucagguuu

SEQ ID NO: 571744 - RNA, 19 nt, Homo sapiens
  misc_RNA (1)...(19): siRNA sense strand
ggagauagaaguggaauuu

SEQ ID NO: 571745 - RNA, 19 nt, Homo sapiens
  misc_RNA (1)...(19): siRNA sense strand
gaauuaugccaaagacuua

SEQ ID NO: 571746 - RNA, 19 nt, Homo sapiens
  misc_RNA (1)...(19): siRNA sense strand
gaaagcaaauugauuccau

SEQ ID NO: 571747 - RNA, 19 nt, Homo sapiens
  misc_RNA (1)...(19): siRNA sense strand
ucagguaacuucagcauau

SEQ ID NO: 571748 - RNA, 19 nt, Homo sapiens
  misc_RNA (1)...(19): siRNA sense strand
agaagaaauugucagguua

SEQ ID NO: 571749 - RNA, 19 nt, Homo sapiens
  misc_RNA (1)...(19): siRNA sense strand
caagaguucuccauagcua

SEQ ID NO: 571750 - RNA, 19 nt, Homo sapiens
  misc_RNA (1)...(19): siRNA sense strand
ggaagaaacaacuugaauu

SEQ ID NO: 571751 - RNA, 19 nt, Homo sapiens
  misc_RNA (1)...(19): siRNA sense strand
ugaaggaaauugaaaggaa

SEQ ID NO: 571752 - RNA, 19 nt, Homo sapiens
  misc_RNA (1)...(19): siRNA sense strand
gaagaaauugucagguuaa

SEQ ID NO: 571753 - RNA, 19 nt, Homo sapiens
  misc_RNA (1)...(19): siRNA sense strand
aacaggaacuucaggaaua

SEQ ID NO: 571754 - RNA, 19 nt, Homo sapiens
  misc_RNA (1)...(19): siRNA sense strand
gagaaacaacguaaggaua

SEQ ID NO: 571755 - RNA, 19 nt, Homo sapiens
  misc_RNA (1)...(19): siRNA sense strand
gaacucugccuucauauca

SEQ ID NO: 571756 - RNA, 19 nt, Homo sapiens
  misc_RNA (1)...(19): siRNA sense strand
caaaggaucaagagaguuu

SEQ ID NO: 571757 - RNA, 19 nt, Homo sapiens
  misc_RNA (1)...(19): siRNA sense strand
uaucagaccuaaacaagga

SEQ ID NO: 571758 - RNA, 19 nt, Homo sapiens
  misc_RNA (1)...(19): siRNA sense strand
gaaccacuuucuucaaauc

SEQ ID NO: 571759 - RNA, 19 nt, Homo sapiens
  misc_RNA (1)...(19): siRNA sense strand
gaccaaccuuccucccuua

SEQ ID NO: 571760 - RNA, 19 nt, Homo sapiens
  misc_RNA (1)...(19): siRNA sense strand
gaagauggaucagcaagag

SEQ ID NO: 571761 - RNA, 19 nt, Homo sapiens
  misc_RNA (1)...(19): siRNA sense strand
agacagggcuauauucaug

SEQ ID NO: 571762 - RNA, 19 nt, Homo sapiens
  misc_RNA (1)...(19): siRNA sense strand
ggaagaaccagaagcuuug

SEQ ID NO: 571763 - RNA, 19 nt, Homo sapiens
  misc_RNA (1)...(19): siRNA sense strand
ggugaauuauagagcauua

SEQ ID NO: 571764 - RNA, 19 nt, Homo sapiens
  misc_RNA (1)...(19): siRNA sense strand
guaaggauaaggauacuuu

SEQ ID NO: 571765 - RNA, 19 nt, Homo sapiens
  misc_RNA (1)...(19): siRNA sense strand
ggacugcaaagaaagauaa

SEQ ID NO: 571766 - RNA, 19 nt, Homo sapiens
  misc_RNA (1)...(19): siRNA sense strand
ggagagugguggacaggaa

SEQ ID NO: 571767 - RNA, 19 nt, Homo sapiens
  misc_RNA (1)...(19): siRNA sense strand
gaugguuucccaaaucuua

SEQ ID NO: 571768 - RNA, 19 nt, Homo sapiens
  misc_RNA (1)...(19): siRNA sense strand
cagugugacuuggaaauua

SEQ ID NO: 571769 - RNA, 19 nt, Homo sapiens
  misc_RNA (1)...(19): siRNA sense strand
ucagggaacucacccaaga

SEQ ID NO: 571770 - RNA, 19 nt, Homo sapiens
  misc_RNA (1)...(19): siRNA sense strand
gggaagaaccagaagcuuu

SEQ ID NO: 571771 - RNA, 19 nt, Homo sapiens
  misc_RNA (1)...(19): siRNA sense strand
gaggaugguuucccaaauc

SEQ ID NO: 571772 - RNA, 19 nt, Homo sapiens
  misc_RNA (1)...(19): siRNA sense strand
acaguuagaugcucuugaa

SEQ ID NO: 571773 - RNA, 19 nt, Homo sapiens
  misc_RNA (1)...(19): siRNA sense strand
gccaaagacuuaaagaaca

SEQ ID NO: 571774 - RNA, 19 nt, Homo sapiens
  misc_RNA (1)...(19): siRNA sense strand
aagaagaaauugucagguu

SEQ ID NO: 571775 - RNA, 19 nt, Homo sapiens
  misc_RNA (1)...(19): siRNA sense strand
caaccuuccucccuuaaug

SEQ ID NO: 571776 - RNA, 19 nt, Homo sapiens
  misc_RNA (1)...(19): siRNA sense strand
gagauauaauucagguuga

SEQ ID NO: 571777 - RNA, 19 nt, Homo sapiens
  misc_RNA (1)...(19): siRNA sense strand
gaggaaagcaaauugauuc

SEQ ID NO: 571778 - RNA, 19 nt, Homo sapiens
  misc_RNA (1)...(19): siRNA sense strand
gaaauugucagguuaaacu

SEQ ID NO: 571779 - RNA, 19 nt, Homo sapiens
  misc_RNA (1)...(19): siRNA sense strand
ggaggugcauggaggaaga

SEQ ID NO: 571780 - RNA, 19 nt, Homo sapiens
  misc_RNA (1)...(19): siRNA sense strand
agaaacaacguaaggauaa

SEQ ID NO: 571781 - RNA, 19 nt, Homo sapiens
  misc_RNA (1)...(19): siRNA sense strand
gagagaaaccuacaacaca

SEQ ID NO: 571782 - RNA, 19 nt, Homo sapiens
  misc_RNA (1)...(19): siRNA sense strand
cauaacaggugaucaagca

SEQ ID NO: 571783 - RNA, 19 nt, Homo sapiens
  misc_RNA (1)...(19): siRNA sense strand
gcugaaauaugggcuuuau

SEQ ID NO: 571784 - RNA, 19 nt, Homo sapiens
  misc_RNA (1)...(19): siRNA sense strand
uagcaagucuggagcauca

SEQ ID NO: 571785 - RNA, 19 nt, Homo sapiens
  misc_RNA (1)...(19): siRNA sense strand
guaugcagcuguaaauaag

SEQ ID NO: 571786 - RNA, 19 nt, Homo sapiens
  misc_RNA (1)...(19): siRNA sense strand
gauaaccacuugaacuucu

SEQ ID NO: 571787 - RNA, 19 nt, Homo sapiens
  misc_RNA (1)...(19): siRNA sense strand
ggaagaauuaugccaaaga

SEQ ID NO: 571788 - RNA, 19 nt, Homo sapiens
  misc_RNA (1)...(19): siRNA sense strand
aaacaaggaugggaagaug

SEQ ID NO: 571789 - RNA, 19 nt, Homo sapiens
  misc_RNA (1)...(19): siRNA sense strand
gugguucucccuccuauua

SEQ ID NO: 571790 - RNA, 19 nt, Homo sapiens
  misc_RNA (1)...(19): siRNA sense strand
gcaaggaaaagaaaacuua

SEQ ID NO: 571791 - RNA, 19 nt, Homo sapiens
  misc_RNA (1)...(19): siRNA sense strand
gaagaauuaugccaaagac

SEQ ID NO: 571792 - RNA, 19 nt, Homo sapiens
  misc_RNA (1)...(19): siRNA sense strand
ggaggaaagcaaauugauu

SEQ ID NO: 571793 - RNA, 19 nt, Homo sapiens
  misc_RNA (1)...(19): siRNA sense strand
cgcagucucugauugauuu

SEQ ID NO: 571794 - RNA, 19 nt, Homo sapiens
  misc_RNA (1)...(19): siRNA sense strand
ggaaagcaaagcaaggaaa

SEQ ID NO: 571795 - RNA, 19 nt, Homo sapiens
  misc_RNA (1)...(19): siRNA sense strand
gcaaugcaccuuacugaca

SEQ ID NO: 571796 - RNA, 19 nt, Homo sapiens
  misc_RNA (1)...(19): siRNA sense strand
agacugagcuggaaguucu

SEQ ID NO: 571797 - RNA, 19 nt, Homo sapiens
  misc_RNA (1)...(19): siRNA sense strand
caaagaugauccugauugg

SEQ ID NO: 571798 - RNA, 19 nt, Homo sapiens
  misc_RNA (1)...(19): siRNA sense strand
caacguaaggauaaggaua

SEQ ID NO: 571799 - RNA, 19 nt, Homo sapiens
  misc_RNA (1)...(19): siRNA sense strand
gcaguuagcccuugaacag

SEQ ID NO: 571800 - RNA, 19 nt, Homo sapiens
  misc_RNA (1)...(19): siRNA sense strand
ugaaauaugggcuuuauca

SEQ ID NO: 571801 - RNA, 19 nt, Homo sapiens
  misc_RNA (1)...(19): siRNA sense strand
gcaccaggacaguuaauau

SEQ ID NO: 571802 - RNA, 19 nt, Homo sapiens
  misc_RNA (1)...(19): siRNA sense strand
cagcaaauaaugaagauga

SEQ ID NO: 571803 - RNA, 19 nt, Homo sapiens
  misc_RNA (1)...(19): siRNA sense strand
gcuaaaagcagaagaguuu

SEQ ID NO: 571804 - RNA, 19 nt, Homo sapiens
  misc_RNA (1)...(19): siRNA sense strand
ggaucuguaucaccuauuc

SEQ ID NO: 571805 - RNA, 19 nt, Homo sapiens
  misc_RNA (1)...(19): siRNA sense strand
gaaucuucaucuugaguug

SEQ ID NO: 571806 - RNA, 19 nt, Homo sapiens
  misc_RNA (1)...(19): siRNA sense strand
gaacguaaagcccagaaag

SEQ ID NO: 571807 - RNA, 19 nt, Homo sapiens
  misc_RNA (1)...(19): siRNA sense strand
cagcaagaguucuccauag

SEQ ID NO: 571808 - RNA, 19 nt, Homo sapiens
  misc_RNA (1)...(19): siRNA sense strand
gaaaagacagggcuauauu

SEQ ID NO: 571809 - RNA, 19 nt, Homo sapiens
  misc_RNA (1)...(19): siRNA sense strand
cuucaggaauaucagaaua

SEQ ID NO: 571810 - RNA, 19 nt, Homo sapiens
  misc_RNA (1)...(19): siRNA sense strand
caagcaacuucaacaggaa

SEQ ID NO: 571811 - RNA, 19 nt, Homo sapiens
  misc_RNA (1)...(19): siRNA sense strand
ggaaaucaagcaacuucaa

SEQ ID NO: 571812 - RNA, 19 nt, Homo sapiens
  misc_RNA (1)...(19): siRNA sense strand
ggagagacaacgagaggaa

SEQ ID NO: 571813 - RNA, 19 nt, Homo sapiens
  misc_RNA (1)...(19): siRNA sense strand
acagagagaauuacaagaa

SEQ ID NO: 571814 - RNA, 19 nt, Homo sapiens
  misc_RNA (1)...(19): siRNA sense strand
gaagaugagcucaguuucu

SEQ ID NO: 571815 - RNA, 19 nt, Homo sapiens
  misc_RNA (1)...(19): siRNA sense strand
uguggaaccuggagauuug

SEQ ID NO: 571816 - RNA, 19 nt, Homo sapiens
  misc_RNA (1)...(19): siRNA sense strand
gcaagaaaauuggugguuu

SEQ ID NO: 571817 - RNA, 19 nt, Homo sapiens
  misc_RNA (1)...(19): siRNA sense strand
gcaaggaaccaugaugaga

SEQ ID NO: 571818 - RNA, 19 nt, Homo sapiens
  misc_RNA (1)...(19): siRNA sense strand
gaaacaacguaaggauaag

SEQ ID NO: 571819 - RNA, 19 nt, Homo sapiens
  misc_RNA (1)...(19): siRNA sense strand
gaauggagggccaaacaug

SEQ ID NO: 571820 - RNA, 19 nt, Homo sapiens
  misc_RNA (1)...(19): siRNA sense strand
gaacuucaggaauaucaga

SEQ ID NO: 571821 - RNA, 19 nt, Homo sapiens
  misc_RNA (1)...(19): siRNA sense strand
uuugaaagcugaggagaaa

SEQ ID NO: 571822 - RNA, 19 nt, Homo sapiens
  misc_RNA (1)...(19): siRNA sense strand
ggaaagcugaggagaaaca

SEQ ID NO: 571823 - RNA, 19 nt, Homo sapiens
  misc_RNA (1)...(19): siRNA sense strand
cuacaacacacagcaguua

SEQ ID NO: 571824 - RNA, 19 nt, Homo sapiens
  misc_RNA (1)...(19): siRNA sense strand
gaacugagagaaaccuaca

SEQ ID NO: 571825 - RNA, 19 nt, Homo sapiens
  misc_RNA (1)...(19): siRNA sense strand
cagaagaaauuaccaguua

SEQ ID NO: 571826 - RNA, 19 nt, Homo sapiens
  misc_RNA (1)...(19): siRNA sense strand
ggacaacucauuaauguua

SEQ ID NO: 571827 - RNA, 19 nt, Homo sapiens
  misc_RNA (1)...(19): siRNA sense strand
gaacaaagaugauccugau

SEQ ID NO: 571828 - RNA, 19 nt, Homo sapiens
  misc_RNA (1)...(19): siRNA sense strand
gaucaaacgugacaaguug

SEQ ID NO: 571829 - RNA, 19 nt, Homo sapiens
  misc_RNA (1)...(19): siRNA sense strand
gacaggagcuucucaauca

SEQ ID NO: 571830 - RNA, 19 nt, Homo sapiens
  misc_RNA (1)...(19): siRNA sense strand
ggacagccauuaccacuga

SEQ ID NO: 571831 - RNA, 19 nt, Homo sapiens
  misc_RNA (1)...(19): siRNA sense strand
cacagaaggugaagaaaua

SEQ ID NO: 571832 - RNA, 19 nt, Homo sapiens
  misc_RNA (1)...(19): siRNA sense strand
ccaaacaugugggcuauua

SEQ ID NO: 571833 - RNA, 19 nt, Homo sapiens
  misc_RNA (1)...(19): siRNA sense strand
gaaggaaauugaaaggaaa

SEQ ID NO: 571834 - RNA, 19 nt, Homo sapiens
  misc_RNA (1)...(19): siRNA sense strand
caucuaagcugucagaaau

SEQ ID NO: 571835 - RNA, 19 nt, Homo sapiens
  misc_RNA (1)...(19): siRNA sense strand
aaacucagcuggcuacuau

SEQ ID NO: 571836 - RNA, 19 nt, Homo sapiens
  misc_RNA (1)...(19): siRNA sense strand
gaacaagaauggaagaaac

SEQ ID NO: 571837 - RNA, 19 nt, Homo sapiens
  misc_RNA (1)...(19): siRNA sense strand
aaagaaagauaaccacuug

SEQ ID NO: 571838 - RNA, 19 nt, Homo sapiens
  misc_RNA (1)...(19): siRNA sense strand
ggauaaggauacuuugaaa

SEQ ID NO: 571839 - RNA, 19 nt, Homo sapiens
  misc_RNA (1)...(19): siRNA sense strand
gaacagcuuuauaagauca

SEQ ID NO: 571840 - RNA, 19 nt, Homo sapiens
  misc_RNA (1)...(19): siRNA sense strand
gaauagagaacaagaagaa

SEQ ID NO: 571841 - RNA, 19 nt, Homo sapiens
  misc_RNA (1)...(19): siRNA sense strand
ccucaugggucaucuuaua

SEQ ID NO: 571842 - RNA, 19 nt, Homo sapiens
  misc_RNA (1)...(19): siRNA sense strand
caaacuaugucaaaccaaa

SEQ ID NO: 571843 - RNA, 19 nt, Homo sapiens
  misc_RNA (1)...(19): siRNA sense strand
guggauaucucucagguuu

SEQ ID NO: 571844 - RNA, 19 nt, Homo sapiens
  misc_RNA (1)...(19): siRNA sense strand
ggagauagaaguggaauuu

SEQ ID NO: 571845 - RNA, 19 nt, Homo sapiens
  misc_RNA (1)...(19): siRNA sense strand
gaauuaugccaaagacuua

SEQ ID NO: 571846 - RNA, 19 nt, Homo sapiens
  misc_RNA (1)...(19): siRNA sense strand
gaaagcaaauugauuccau

SEQ ID NO: 571847 - RNA, 19 nt, Homo sapiens
  misc_RNA (1)...(19): siRNA sense strand
ucagguaacuucagcauau

SEQ ID NO: 571848 - RNA, 19 nt, Homo sapiens
  misc_RNA (1)...(19): siRNA sense strand
agaagaaauugucagguua

SEQ ID NO: 571849 - RNA, 19 nt, Homo sapiens
  misc_RNA (1)...(19): siRNA sense strand
caagaguucuccauagcua

SEQ ID NO: 571850 - RNA, 19 nt, Homo sapiens
  misc_RNA (1)...(19): siRNA sense strand
ggaagaaacaacuugaauu

SEQ ID NO: 571851 - RNA, 19 nt, Homo sapiens
  misc_RNA (1)...(19): siRNA sense strand
ugaaggaaauugaaaggaa

SEQ ID NO: 571852 - RNA, 19 nt, Homo sapiens
  misc_RNA (1)...(19): siRNA sense strand
gaagaaauugucagguuaa

SEQ ID NO: 571853 - RNA, 19 nt, Homo sapiens
  misc_RNA (1)...(19): siRNA sense strand
aacaggaacuucaggaaua

SEQ ID NO: 571854 - RNA, 19 nt, Homo sapiens
  misc_RNA (1)...(19): siRNA sense strand
gagaaacaacguaaggaua

SEQ ID NO: 571855 - RNA, 19 nt, Homo sapiens
  misc_RNA (1)...(19): siRNA sense strand
gaacucugccuucauauca

SEQ ID NO: 571856 - RNA, 19 nt, Homo sapiens
  misc_RNA (1)...(19): siRNA sense strand
caaaggaucaagagaguuu

SEQ ID NO: 571857 - RNA, 19 nt, Homo sapiens
  misc_RNA (1)...(19): siRNA sense strand
uaucagaccuaaacaagga

SEQ ID NO: 571858 - RNA, 19 nt, Homo sapiens
  misc_RNA (1)...(19): siRNA sense strand
gaaccacuuucuucaaauc

SEQ ID NO: 571859 - RNA, 19 nt, Homo sapiens
  misc_RNA (1)...(19): siRNA sense strand
gaccaaccuuccucccuua

SEQ ID NO: 571860 - RNA, 19 nt, Homo sapiens
  misc_RNA (1)...(19): siRNA sense strand
gaagauggaucagcaagag

SEQ ID NO: 571861 - RNA, 19 nt, Homo sapiens
  misc_RNA (1)...(19): siRNA sense strand
agacagggcuauauucaug

SEQ ID NO: 571862 - RNA, 19 nt, Homo sapiens
  misc_RNA (1)...(19): siRNA sense strand
ggaagaaccagaagcuuug

SEQ ID NO: 571863 - RNA, 19 nt, Homo sapiens
  misc_RNA (1)...(19): siRNA sense strand
ggugaauuauagagcauua

SEQ ID NO: 571864 - RNA, 19 nt, Homo sapiens
  misc_RNA (1)...(19): siRNA sense strand
guaaggauaaggauacuuu

SEQ ID NO: 571865 - RNA, 19 nt, Homo sapiens
  misc_RNA (1)...(19): siRNA sense strand
ggacugcaaagaaagauaa

SEQ ID NO: 571866 - RNA, 19 nt, Homo sapiens
  misc_RNA (1)...(19): siRNA sense strand
ggagagugguggacaggaa

SEQ ID NO: 571867 - RNA, 19 nt, Homo sapiens
  misc_RNA (1)...(19): siRNA sense strand
gaugguuucccaaaucuua

SEQ ID NO: 571868 - RNA, 19 nt, Homo sapiens
  misc_RNA (1)...(19): siRNA sense strand
cagugugacuuggaaauua

SEQ ID NO: 571869 - RNA, 19 nt, Homo sapiens
  misc_RNA (1)...(19): siRNA sense strand
ucagggaacucacccaaga

SEQ ID NO: 571870 - RNA, 19 nt, Homo sapiens
  misc_RNA (1)...(19): siRNA sense strand
gggaagaaccagaagcuuu

SEQ ID NO: 571871 - RNA, 19 nt, Homo sapiens
  misc_RNA (1)...(19): siRNA sense strand
gaggaugguuucccaaauc

SEQ ID NO: 571872 - RNA, 19 nt, Homo sapiens
  misc_RNA (1)...(19): siRNA sense strand
acaguuagaugcucuugaa

SEQ ID NO: 571873 - RNA, 19 nt, Homo sapiens
  misc_RNA (1)...(19): siRNA sense strand
gccaaagacuuaaagaaca

SEQ ID NO: 571874 - RNA, 19 nt, Homo sapiens
  misc_RNA (1)...(19): siRNA sense strand
aagaagaaauugucagguu

SEQ ID NO: 571875 - RNA, 19 nt, Homo sapiens
  misc_RNA (1)...(19): siRNA sense strand
caaccuuccucccuuaaug

SEQ ID NO: 571876 - RNA, 19 nt, Homo sapiens
  misc_RNA (1)...(19): siRNA sense strand
gagauauaauucagguuga

SEQ ID NO: 571877 - RNA, 19 nt, Homo sapiens
  misc_RNA (1)...(19): siRNA sense strand
gaggaaagcaaauugauuc

SEQ ID NO: 571878 - RNA, 19 nt, Homo sapiens
  misc_RNA (1)...(19): siRNA sense strand
gaaauugucagguuaaacu

SEQ ID NO: 571879 - RNA, 19 nt, Homo sapiens
  misc_RNA (1)...(19): siRNA sense strand
ggaggugcauggaggaaga

SEQ ID NO: 571880 - RNA, 19 nt, Homo sapiens
  misc_RNA (1)...(19): siRNA sense strand
agaaacaacguaaggauaa

SEQ ID NO: 571881 - RNA, 19 nt, Homo sapiens
  misc_RNA (1)...(19): siRNA sense strand
gagagaaaccuacaacaca

SEQ ID NO: 571882 - RNA, 19 nt, Homo sapiens
  misc_RNA (1)...(19): siRNA sense strand
cauaacaggugaucaagca

SEQ ID NO: 571883 - RNA, 19 nt, Homo sapiens
  misc_RNA (1)...(19): siRNA sense strand
gcugaaauaugggcuuuau

SEQ ID NO: 571884 - RNA, 19 nt, Homo sapiens
  misc_RNA (1)...(19): siRNA sense strand
uagcaagucuggagcauca

SEQ ID NO: 571885 - RNA, 19 nt, Homo sapiens
  misc_RNA (1)...(19): siRNA sense strand
guaugcagcuguaaauaag

SEQ ID NO: 571886 - RNA, 19 nt, Homo sapiens
  misc_RNA (1)...(19): siRNA sense strand
gauaaccacuugaacuucu

SEQ ID NO: 571887 - RNA, 19 nt, Homo sapiens
  misc_RNA (1)...(19): siRNA sense strand
ggaagaauuaugccaaaga

SEQ ID NO: 571888 - RNA, 19 nt, Homo sapiens
  misc_RNA (1)...(19): siRNA sense strand
aaacaaggaugggaagaug

SEQ ID NO: 571889 - RNA, 19 nt, Homo sapiens
  misc_RNA (1)...(19): siRNA sense strand
gugguucucccuccuauua

SEQ ID NO: 571890 - RNA, 19 nt, Homo sapiens
  misc_RNA (1)...(19): siRNA sense strand
gcaaggaaaagaaaacuua

SEQ ID NO: 571891 - RNA, 19 nt, Homo sapiens
  misc_RNA (1)...(19): siRNA sense strand
gaagaauuaugccaaagac

SEQ ID NO: 571892 - RNA, 19 nt, Homo sapiens
  misc_RNA (1)...(19): siRNA sense strand
ggaggaaagcaaauugauu

SEQ ID NO: 571893 - RNA, 19 nt, Homo sapiens
  misc_RNA (1)...(19): siRNA sense strand
cgcagucucugauugauuu

SEQ ID NO: 571894 - RNA, 19 nt, Homo sapiens
  misc_RNA (1)...(19): siRNA sense strand
ggaaagcaaagcaaggaaa

SEQ ID NO: 571895 - RNA, 19 nt, Homo sapiens
  misc_RNA (1)...(19): siRNA sense strand
gcaaugcaccuuacugaca

SEQ ID NO: 571896 - RNA, 19 nt, Homo sapiens
  misc_RNA (1)...(19): siRNA sense strand
agacugagcuggaaguucu

SEQ ID NO: 571897 - RNA, 19 nt, Homo sapiens
  misc_RNA (1)...(19): siRNA sense strand
caaagaugauccugauugg

SEQ ID NO: 571898 - RNA, 19 nt, Homo sapiens
  misc_RNA (1)...(19): siRNA sense strand
caacguaaggauaaggaua

SEQ ID NO: 571899 - RNA, 19 nt, Homo sapiens
  misc_RNA (1)...(19): siRNA sense strand
gcaguuagcccuugaacag

SEQ ID NO: 571900 - RNA, 19 nt, Homo sapiens
  misc_RNA (1)...(19): siRNA sense strand
ugaaauaugggcuuuauca

SEQ ID NO: 571901 - RNA, 19 nt, Homo sapiens
  misc_RNA (1)...(19): siRNA sense strand
gcaccaggacaguuaauau

SEQ ID NO: 571902 - RNA, 19 nt, Homo sapiens
  misc_RNA (1)...(19): siRNA sense strand
cagcaaauaaugaagauga

SEQ ID NO: 571903 - RNA, 19 nt, Homo sapiens
  misc_RNA (1)...(19): siRNA sense strand
gcuaaaagcagaagaguuu

SEQ ID NO: 571904 - RNA, 19 nt, Homo sapiens
  misc_RNA (1)...(19): siRNA sense strand
ggaucuguaucaccuauuc

SEQ ID NO: 571905 - RNA, 19 nt, Homo sapiens
  misc_RNA (1)...(19): siRNA sense strand
gaaucuucaucuugaguug

SEQ ID NO: 571906 - RNA, 19 nt, Homo sapiens
  misc_RNA (1)...(19): siRNA sense strand
gaacguaaagcccagaaag

SEQ ID NO: 571907 - RNA, 19 nt, Homo sapiens
  misc_RNA (1)...(19): siRNA sense strand
cagcaagaguucuccauag

SEQ ID NO: 571908 - RNA, 19 nt, Homo sapiens
  misc_RNA (1)...(19): siRNA sense strand
gaaaagacagggcuauauu

SEQ ID NO: 571909 - RNA, 19 nt, Homo sapiens
  misc_RNA (1)...(19): siRNA sense strand
cuucaggaauaucagaaua

SEQ ID NO: 571910 - RNA, 19 nt, Homo sapiens
  misc_RNA (1)...(19): siRNA sense strand
caagcaacuucaacaggaa

SEQ ID NO: 571911 - RNA, 19 nt, Homo sapiens
  misc_RNA (1)...(19): siRNA sense strand
ggaaaucaagcaacuucaa

SEQ ID NO: 571912 - RNA, 19 nt, Homo sapiens
  misc_RNA (1)...(19): siRNA sense strand
ggagagacaacgagaggaa

SEQ ID NO: 571913 - RNA, 19 nt, Homo sapiens
  misc_RNA (1)...(19): siRNA sense strand
acagagagaauuacaagaa

SEQ ID NO: 571914 - RNA, 19 nt, Homo sapiens
  misc_RNA (1)...(19): siRNA sense strand
gaagaugagcucaguuucu

SEQ ID NO: 571915 - RNA, 19 nt, Homo sapiens
  misc_RNA (1)...(19): siRNA sense strand
uguggaaccuggagauuug

SEQ ID NO: 571916 - RNA, 19 nt, Homo sapiens
  misc_RNA (1)...(19): siRNA sense strand
gcaagaaaauuggugguuu

SEQ ID NO: 571917 - RNA, 19 nt, Homo sapiens
  misc_RNA (1)...(19): siRNA sense strand
gcaaggaaccaugaugaga

SEQ ID NO: 571918 - RNA, 19 nt, Homo sapiens
  misc_RNA (1)...(19): siRNA sense strand
gaaacaacguaaggauaag

SEQ ID NO: 571919 - RNA, 19 nt, Homo sapiens
  misc_RNA (1)...(19): siRNA sense strand
gaauggagggccaaacaug

SEQ ID NO: 571920 - RNA, 19 nt, Homo sapiens
  misc_RNA (1)...(19): siRNA sense strand
gaacuucaggaauaucaga

SEQ ID NO: 571921 - RNA, 19 nt, Homo sapiens
  misc_RNA (1)...(19): siRNA sense strand
uuugaaagcugaggagaaa

SEQ ID NO: 571922 - RNA, 19 nt, Homo sapiens
  misc_RNA (1)...(19): siRNA sense strand
ggaaagcugaggagaaaca

SEQ ID NO: 571923 - RNA, 19 nt, Homo sapiens
  misc_RNA (1)...(19): siRNA sense strand
cuacaacacacagcaguua

SEQ ID NO: 571924 - RNA, 19 nt, Homo sapiens
  misc_RNA (1)...(19): siRNA sense strand
gaacugagagaaaccuaca

SEQ ID NO: 571925 - RNA, 19 nt, Homo sapiens
  misc_RNA (1)...(19): siRNA sense strand
gcuagagucucaccucauu

SEQ ID NO: 571926 - RNA, 19 nt, Homo sapiens
  misc_RNA (1)...(19): siRNA sense strand
uagcaaauaugcaggguuu

SEQ ID NO: 571927 - RNA, 19 nt, Homo sapiens
  misc_RNA (1)...(19): siRNA sense strand
uggacacucucucaucuua

SEQ ID NO: 571928 - RNA, 19 nt, Homo sapiens
  misc_RNA (1)...(19): siRNA sense strand
gugauacaauuucuucuug

SEQ ID NO: 571929 - RNA, 19 nt, Homo sapiens
  misc_RNA (1)...(19): siRNA sense strand
gaagguucaucuuucuguu

SEQ ID NO: 571930 - RNA, 19 nt, Homo sapiens
  misc_RNA (1)...(19): siRNA sense strand
caucagaagguucaucuuu

SEQ ID NO: 571931 - RNA, 19 nt, Homo sapiens
  misc_RNA (1)...(19): siRNA sense strand
gaagauacacuggcuauac

SEQ ID NO: 571932 - RNA, 19 nt, Homo sapiens
  misc_RNA (1)...(19): siRNA sense strand
gcaaauaugcaggguuuau

SEQ ID NO: 571933 - RNA, 19 nt, Homo sapiens
  misc_RNA (1)...(19): siRNA sense strand
gacacucucucaucuuaau

SEQ ID NO: 571934 - RNA, 19 nt, Homo sapiens
  misc_RNA (1)...(19): siRNA sense strand
gcagugauacaauuucuuc

SEQ ID NO: 571935 - RNA, 19 nt, Homo sapiens
  misc_RNA (1)...(19): siRNA sense strand
ucucuaaaguuucacauca

SEQ ID NO: 571936 - RNA, 19 nt, Homo sapiens
  misc_RNA (1)...(19): siRNA sense strand
caucauguguucugcgaau

SEQ ID NO: 571937 - RNA, 19 nt, Homo sapiens
  misc_RNA (1)...(19): siRNA sense strand
agucucaccucauuaucua

SEQ ID NO: 571938 - RNA, 19 nt, Homo sapiens
  misc_RNA (1)...(19): siRNA sense strand
uagaauucaucauguguuc

SEQ ID NO: 571939 - RNA, 19 nt, Homo sapiens
  misc_RNA (1)...(19): siRNA sense strand
ucauagaauucaucaugug

SEQ ID NO: 571940 - RNA, 19 nt, Homo sapiens
  misc_RNA (1)...(19): siRNA sense strand
ucucucuucucuaaaguuu

SEQ ID NO: 571941 - RNA, 19 nt, Homo sapiens
  misc_RNA (1)...(19): siRNA sense strand
caaaaugccacaauucaaa

SEQ ID NO: 571942 - RNA, 19 nt, Homo sapiens
  misc_RNA (1)...(19): siRNA sense strand
uacacuggcuauacagauu

SEQ ID NO: 571943 - RNA, 19 nt, Homo sapiens
  misc_RNA (1)...(19): siRNA sense strand
aagauacacuggcuauaca

SEQ ID NO: 571944 - RNA, 19 nt, Homo sapiens
  misc_RNA (1)...(19): siRNA sense strand
uuguucaucuucuacguua

SEQ ID NO: 571945 - RNA, 19 nt, Homo sapiens
  misc_RNA (1)...(19): siRNA sense strand
ucuaaaguuucacaucaga

SEQ ID NO: 571946 - RNA, 19 nt, Homo sapiens
  misc_RNA (1)...(19): siRNA sense strand
ccacauggcucggcguuuu

SEQ ID NO: 571947 - RNA, 19 nt, Homo sapiens
  misc_RNA (1)...(19): siRNA sense strand
ucucuucucuaaaguuuca

SEQ ID NO: 571948 - RNA, 19 nt, Homo sapiens
  misc_RNA (1)...(19): siRNA sense strand
ggacacucucucaucuuaa

SEQ ID NO: 571949 - RNA, 19 nt, Homo sapiens
  misc_RNA (1)...(19): siRNA sense strand
ucagugccauugcuuaucu

SEQ ID NO: 571950 - RNA, 19 nt, Homo sapiens
  misc_RNA (1)...(19): siRNA sense strand
gaauucaucauguguucug

SEQ ID NO: 571951 - RNA, 19 nt, Homo sapiens
  misc_RNA (1)...(19): siRNA sense strand
ucuggcaguuucuagaauu

SEQ ID NO: 571952 - RNA, 19 nt, Homo sapiens
  misc_RNA (1)...(19): siRNA sense strand
caaauaugcaggguuuaug

SEQ ID NO: 571953 - RNA, 19 nt, Homo sapiens
  misc_RNA (1)...(19): siRNA sense strand
gguugaagaugaggauauc

SEQ ID NO: 571954 - RNA, 19 nt, Homo sapiens
  misc_RNA (1)...(19): siRNA sense strand
cuucauagaauucaucaug

SEQ ID NO: 571955 - RNA, 19 nt, Homo sapiens
  misc_RNA (1)...(19): siRNA sense strand
guucaucuuucuguucuuc

SEQ ID NO: 571956 - RNA, 19 nt, Homo sapiens
  misc_RNA (1)...(19): siRNA sense strand
cuucuacguuaaugugauu

SEQ ID NO: 571957 - RNA, 19 nt, Homo sapiens
  misc_RNA (1)...(19): siRNA sense strand
acaauuucuucuugggauu

SEQ ID NO: 571958 - RNA, 19 nt, Homo sapiens
  misc_RNA (1)...(19): siRNA sense strand
cagauuuucucuuuuguug

SEQ ID NO: 571959 - RNA, 19 nt, Homo sapiens
  misc_RNA (1)...(19): siRNA sense strand
uggaucuccuucuuucuug

SEQ ID NO: 571960 - RNA, 19 nt, Homo sapiens
  misc_RNA (1)...(19): siRNA sense strand
uagagucucaccucauuau

SEQ ID NO: 571961 - RNA, 19 nt, Homo sapiens
  misc_RNA (1)...(19): siRNA sense strand
ggucucugcuauauguauc

SEQ ID NO: 571962 - RNA, 19 nt, Homo sapiens
  misc_RNA (1)...(19): siRNA sense strand
aagcuggucccauggauga

SEQ ID NO: 571963 - RNA, 19 nt, Homo sapiens
  misc_RNA (1)...(19): siRNA sense strand
gauacacuggcuauacaga

SEQ ID NO: 571964 - RNA, 19 nt, Homo sapiens
  misc_RNA (1)...(19): siRNA sense strand
uuucuugucuggcaguuuc

SEQ ID NO: 571965 - RNA, 19 nt, Homo sapiens
  misc_RNA (1)...(19): siRNA sense strand
uaaaguuucacaucagaag

SEQ ID NO: 571966 - RNA, 19 nt, Homo sapiens
  misc_RNA (1)...(19): siRNA sense strand
ggaucuccuucuuucuugu

SEQ ID NO: 571967 - RNA, 19 nt, Homo sapiens
  misc_RNA (1)...(19): siRNA sense strand
ccaagcuggucccauggau

SEQ ID NO: 571968 - RNA, 19 nt, Homo sapiens
  misc_RNA (1)...(19): siRNA sense strand
cuacguuaaugugauuguu

SEQ ID NO: 571969 - RNA, 19 nt, Homo sapiens
  misc_RNA (1)...(19): siRNA sense strand
guucaucuucuacguuaau

SEQ ID NO: 571970 - RNA, 19 nt, Homo sapiens
  misc_RNA (1)...(19): siRNA sense strand
guucuucauccuugugauu

SEQ ID NO: 571971 - RNA, 19 nt, Homo sapiens
  misc_RNA (1)...(19): siRNA sense strand
caauuucuucuugggauuu

SEQ ID NO: 571972 - RNA, 19 nt, Homo sapiens
  misc_RNA (1)...(19): siRNA sense strand
caucuucuacguuaaugug

SEQ ID NO: 571973 - RNA, 19 nt, Homo sapiens
  misc_RNA (1)...(19): siRNA sense strand
cuggcaguuucuagaauuu

SEQ ID NO: 571974 - RNA, 19 nt, Homo sapiens
  misc_RNA (1)...(19): siRNA sense strand
caguaagugcugucaguga

SEQ ID NO: 571975 - RNA, 19 nt, Homo sapiens
  misc_RNA (1)...(19): siRNA sense strand
gcaucauugugguggugaa

SEQ ID NO: 571976 - RNA, 19 nt, Homo sapiens
  misc_RNA (1)...(19): siRNA sense strand
acacuggcuauacagauuu

SEQ ID NO: 571977 - RNA, 19 nt, Homo sapiens
  misc_RNA (1)...(19): siRNA sense strand
aagaagauacacuggcuau

SEQ ID NO: 571978 - RNA, 19 nt, Homo sapiens
  misc_RNA (1)...(19): siRNA sense strand
ucugcuauauguaucuaug

SEQ ID NO: 571979 - RNA, 19 nt, Homo sapiens
  misc_RNA (1)...(19): siRNA sense strand
cauagaauucaucaugugu

SEQ ID NO: 571980 - RNA, 19 nt, Homo sapiens
  misc_RNA (1)...(19): siRNA sense strand
cauguguucugcgaauugu

SEQ ID NO: 571981 - RNA, 19 nt, Homo sapiens
  misc_RNA (1)...(19): siRNA sense strand
ucuggacacucucucaucu

SEQ ID NO: 571982 - RNA, 19 nt, Homo sapiens
  misc_RNA (1)...(19): siRNA sense strand
aucagaagguucaucuuuc

SEQ ID NO: 571983 - RNA, 19 nt, Homo sapiens
  misc_RNA (1)...(19): siRNA sense strand
gagucucaccucauuaucu

SEQ ID NO: 571984 - RNA, 19 nt, Homo sapiens
  misc_RNA (1)...(19): siRNA sense strand
cuagagucucaccucauua

SEQ ID NO: 571985 - RNA, 19 nt, Homo sapiens
  misc_RNA (1)...(19): siRNA sense strand
ucucaccucauuaucuauu

SEQ ID NO: 571986 - RNA, 19 nt, Homo sapiens
  misc_RNA (1)...(19): siRNA sense strand
gccauugcuuaucuuccuu

SEQ ID NO: 571987 - RNA, 19 nt, Homo sapiens
  misc_RNA (1)...(19): siRNA sense strand
gcuccugccucuuaucuuu

SEQ ID NO: 571988 - RNA, 19 nt, Homo sapiens
  misc_RNA (1)...(19): siRNA sense strand
gcucugugauggaguuuga

SEQ ID NO: 571989 - RNA, 19 nt, Homo sapiens
  misc_RNA (1)...(19): siRNA sense strand
gaacgugagugcuauaacc

SEQ ID NO: 571990 - RNA, 19 nt, Homo sapiens
  misc_RNA (1)...(19): siRNA sense strand
gcacaggucccuuaagcau

SEQ ID NO: 571991 - RNA, 19 nt, Homo sapiens
  misc_RNA (1)...(19): siRNA sense strand
ggagagacuucugcaucaa

SEQ ID NO: 571992 - RNA, 19 nt, Homo sapiens
  misc_RNA (1)...(19): siRNA sense strand
acacagaggugcugaccau

SEQ ID NO: 571993 - RNA, 19 nt, Homo sapiens
  misc_RNA (1)...(19): siRNA sense strand
gcucugggccucaucauca

SEQ ID NO: 571994 - RNA, 19 nt, Homo sapiens
  misc_RNA (1)...(19): siRNA sense strand
ucaccucccuggacacaga

SEQ ID NO: 571995 - RNA, 19 nt, Homo sapiens
  misc_RNA (1)...(19): siRNA sense strand
caaaguggaacucgagguu

SEQ ID NO: 571996 - RNA, 19 nt, Homo sapiens
  misc_RNA (1)...(19): siRNA sense strand
cggagagacuucugcauca

SEQ ID NO: 571997 - RNA, 19 nt, Homo sapiens
  misc_RNA (1)...(19): siRNA sense strand
ucaagaacgugagugcuau

SEQ ID NO: 571998 - RNA, 19 nt, Homo sapiens
  misc_RNA (1)...(19): siRNA sense strand
cagaggugcugaccaucaa

SEQ ID NO: 571999 - RNA, 19 nt, Homo sapiens
  misc_RNA (1)...(19): siRNA sense strand
ccucuuaucuuugucaaca

SEQ ID NO: 572000 - RNA, 19 nt, Homo sapiens
  misc_RNA (1)...(19): siRNA sense strand
uaccugcuccugccucuua

SEQ ID NO: 572001 - RNA, 19 nt, Homo sapiens
  misc_RNA (1)...(19): siRNA sense strand
caagaacgugagugcuaua

SEQ ID NO: 572002 - RNA, 19 nt, Homo sapiens
  misc_RNA (1)...(19): siRNA sense strand
cuuguacgcuuuccucaug

SEQ ID NO: 572003 - RNA, 19 nt, Homo sapiens
  misc_RNA (1)...(19): siRNA sense strand
ggacagugagggcaucauc

SEQ ID NO: 572004 - RNA, 19 nt, Homo sapiens
  misc_RNA (1)...(19): siRNA sense strand
ggacccugcuguucauugc

SEQ ID NO: 572005 - RNA, 19 nt, Homo sapiens
  misc_RNA (1)...(19): siRNA sense strand
ggccgcuacuugagcauug

SEQ ID NO: 572006 - RNA, 19 nt, Homo sapiens
  misc_RNA (1)...(19): siRNA sense strand
gaugcuggccuuggucauu

SEQ ID NO: 572007 - RNA, 19 nt, Homo sapiens
  misc_RNA (1)...(19): siRNA sense strand
ugugauggaguuugaguuu

SEQ ID NO: 572008 - RNA, 19 nt, Homo sapiens
  misc_RNA (1)...(19): siRNA sense strand
ggucauuggccacuucauc

SEQ ID NO: 572009 - RNA, 19 nt, Homo sapiens
  misc_RNA (1)...(19): siRNA sense strand
ggcggacggucagcauuga

SEQ ID NO: 572010 - RNA, 19 nt, Homo sapiens
  misc_RNA (1)...(19): siRNA sense strand
uggcacaggucccuuaagc

SEQ ID NO: 572011 - RNA, 19 nt, Homo sapiens
  misc_RNA (1)...(19): siRNA sense strand
gugauggaguuugaguuuc

SEQ ID NO: 572012 - RNA, 19 nt, Homo sapiens
  misc_RNA (1)...(19): siRNA sense strand
gagauggcucugugaugga

SEQ ID NO: 572013 - RNA, 19 nt, Homo sapiens
  misc_RNA (1)...(19): siRNA sense strand
cuccaugacuuuccucucu

SEQ ID NO: 572014 - RNA, 19 nt, Homo sapiens
  misc_RNA (1)...(19): siRNA sense strand
gaggugcugaccaucaaga

SEQ ID NO: 572015 - RNA, 19 nt, Homo sapiens
  misc_RNA (1)...(19): siRNA sense strand
gagagacuucugcaucaag

SEQ ID NO: 572016 - RNA, 19 nt, Homo sapiens
  misc_RNA (1)...(19): siRNA sense strand
uccaugacuuuccucucua

SEQ ID NO: 572017 - RNA, 19 nt, Homo sapiens
  misc_RNA (1)...(19): siRNA sense strand
gacggucagcauugaggua

SEQ ID NO: 572018 - RNA, 19 nt, Homo sapiens
  misc_RNA (1)...(19): siRNA sense strand
ccaucguacugguggguau

SEQ ID NO: 572019 - RNA, 19 nt, Homo sapiens
  misc_RNA (1)...(19): siRNA sense strand
acagaggugcugaccauca

SEQ ID NO: 572020 - RNA, 19 nt, Homo sapiens
  misc_RNA (1)...(19): siRNA sense strand
ucauuggccacuucaucua

SEQ ID NO: 572021 - RNA, 19 nt, Homo sapiens
  misc_RNA (1)...(19): siRNA sense strand
ccgagaugcuggccuuggu

SEQ ID NO: 572022 - RNA, 19 nt, Homo sapiens
  misc_RNA (1)...(19): siRNA sense strand
ggacgaagcuguucuggau

SEQ ID NO: 572023 - RNA, 19 nt, Homo sapiens
  misc_RNA (1)...(19): siRNA sense strand
gaauggagcucaguugugu

SEQ ID NO: 572024 - RNA, 19 nt, Homo sapiens
  misc_RNA (1)...(19): siRNA sense strand
gcacacccacaguugaaua

SEQ ID NO: 572025 - RNA, 19 nt, Homo sapiens
  misc_RNA (1)...(19): siRNA sense strand
acgaagcuguucuggauuu

SEQ ID NO: 572026 - RNA, 19 nt, Homo sapiens
  misc_RNA (1)...(19): siRNA sense strand
ucaaguccaugccagaaug

SEQ ID NO: 572027 - RNA, 19 nt, Homo sapiens
  misc_RNA (1)...(19): siRNA sense strand
gaccagcuccaguccuaua

SEQ ID NO: 572028 - RNA, 19 nt, Homo sapiens
  misc_RNA (1)...(19): siRNA sense strand
acaccagggucucccagua

SEQ ID NO: 572029 - RNA, 19 nt, Homo sapiens
  misc_RNA (1)...(19): siRNA sense strand
ggaccagugugccucaagu

SEQ ID NO: 572030 - RNA, 19 nt, Homo sapiens
  misc_RNA (1)...(19): siRNA sense strand
gugagacgcacaaggauga

SEQ ID NO: 572031 - RNA, 19 nt, Homo sapiens
  misc_RNA (1)...(19): siRNA sense strand
ggcccacuguuucgacaaa

SEQ ID NO: 572032 - RNA, 19 nt, Homo sapiens
  misc_RNA (1)...(19): siRNA sense strand
gaccagcugaucuguguga

SEQ ID NO: 572033 - RNA, 19 nt, Homo sapiens
  misc_RNA (1)...(19): siRNA sense strand
cccgggagaucuucaagga

SEQ ID NO: 572034 - RNA, 19 nt, Homo sapiens
  misc_RNA (1)...(19): siRNA sense strand
gaacuggaggaaccugauc

SEQ ID NO: 572035 - RNA, 19 nt, Homo sapiens
  misc_RNA (1)...(19): siRNA sense strand
ccaaauaucacggaguaca

SEQ ID NO: 572036 - RNA, 19 nt, Homo sapiens
  misc_RNA (1)...(19): siRNA sense strand
aagcuguucuggauuucuu

SEQ ID NO: 572037 - RNA, 19 nt, Homo sapiens
  misc_RNA (1)...(19): siRNA sense strand
cagcuccaguccuauaucu

SEQ ID NO: 572038 - RNA, 19 nt, Homo sapiens
  misc_RNA (1)...(19): siRNA sense strand
guucuggauuucuuacagu

SEQ ID NO: 572039 - RNA, 19 nt, Homo sapiens
  misc_RNA (1)...(19): siRNA sense strand
ggacccugaucaacaccau

SEQ ID NO: 572040 - RNA, 19 nt, Homo sapiens
  misc_RNA (1)...(19): siRNA sense strand
caaauaucacggaguacau

SEQ ID NO: 572041 - RNA, 19 nt, Homo sapiens
  misc_RNA (1)...(19): siRNA sense strand
ccccaaauaucacggagua

SEQ ID NO: 572042 - RNA, 19 nt, Homo sapiens
  misc_RNA (1)...(19): siRNA sense strand
gcccacaugccacccacua

SEQ ID NO: 572043 - RNA, 19 nt, Homo sapiens
  misc_RNA (1)...(19): siRNA sense strand
ggugaauggagcucaguug

SEQ ID NO: 572044 - RNA, 19 nt, Homo sapiens
  misc_RNA (1)...(19): siRNA sense strand
ugaucugugugaacgagaa

SEQ ID NO: 572045 - RNA, 19 nt, Homo sapiens
  misc_RNA (1)...(19): siRNA sense strand
ggagaggacgaagcuguuc

SEQ ID NO: 572046 - RNA, 19 nt, Homo sapiens
  misc_RNA (1)...(19): siRNA sense strand
acaguugaauauccaugug

SEQ ID NO: 572047 - RNA, 19 nt, Homo sapiens
  misc_RNA (1)...(19): siRNA sense strand
ugaauggagcucaguugug

SEQ ID NO: 572048 - RNA, 19 nt, Homo sapiens
  misc_RNA (1)...(19): siRNA sense strand
gugaauggagcucaguugu

SEQ ID NO: 572049 - RNA, 19 nt, Homo sapiens
  misc_RNA (1)...(19): siRNA sense strand
uaucacggaguacauguuc

SEQ ID NO: 572050 - RNA, 19 nt, Homo sapiens
  misc_RNA (1)...(19): siRNA sense strand
agaggacgcuggccuucgu

SEQ ID NO: 572051 - RNA, 19 nt, Homo sapiens
  misc_RNA (1)...(19): siRNA sense strand
augaccagcugaucugugu

SEQ ID NO: 572052 - RNA, 19 nt, Homo sapiens
  misc_RNA (1)...(19): siRNA sense strand
ggacgaagcuguucuggau

SEQ ID NO: 572053 - RNA, 19 nt, Homo sapiens
  misc_RNA (1)...(19): siRNA sense strand
gaauggagcucaguugugu

SEQ ID NO: 572054 - RNA, 19 nt, Homo sapiens
  misc_RNA (1)...(19): siRNA sense strand
gcacacccacaguugaaua

SEQ ID NO: 572055 - RNA, 19 nt, Homo sapiens
  misc_RNA (1)...(19): siRNA sense strand
acgaagcuguucuggauuu

SEQ ID NO: 572056 - RNA, 19 nt, Homo sapiens
  misc_RNA (1)...(19): siRNA sense strand
ucaaguccaugccagaaug

SEQ ID NO: 572057 - RNA, 19 nt, Homo sapiens
  misc_RNA (1)...(19): siRNA sense strand
gaccagcuccaguccuaua

SEQ ID NO: 572058 - RNA, 19 nt, Homo sapiens
  misc_RNA (1)...(19): siRNA sense strand
acaccagggucucccagua

SEQ ID NO: 572059 - RNA, 19 nt, Homo sapiens
  misc_RNA (1)...(19): siRNA sense strand
ggaccagugugccucaagu

SEQ ID NO: 572060 - RNA, 19 nt, Homo sapiens
  misc_RNA (1)...(19): siRNA sense strand
gugagacgcacaaggauga

SEQ ID NO: 572061 - RNA, 19 nt, Homo sapiens
  misc_RNA (1)...(19): siRNA sense strand
ggcccacuguuucgacaaa

SEQ ID NO: 572062 - RNA, 19 nt, Homo sapiens
  misc_RNA (1)...(19): siRNA sense strand
gaccagcugaucuguguga

SEQ ID NO: 572063 - RNA, 19 nt, Homo sapiens
  misc_RNA (1)...(19): siRNA sense strand
cccgggagaucuucaagga

SEQ ID NO: 572064 - RNA, 19 nt, Homo sapiens
  misc_RNA (1)...(19): siRNA sense strand
gaacuggaggaaccugauc

SEQ ID NO: 572065 - RNA, 19 nt, Homo sapiens
  misc_RNA (1)...(19): siRNA sense strand
ccaaauaucacggaguaca

SEQ ID NO: 572066 - RNA, 19 nt, Homo sapiens
  misc_RNA (1)...(19): siRNA sense strand
aagcuguucuggauuucuu

SEQ ID NO: 572067 - RNA, 19 nt, Homo sapiens
  misc_RNA (1)...(19): siRNA sense strand
cagcuccaguccuauaucu

SEQ ID NO: 572068 - RNA, 19 nt, Homo sapiens
  misc_RNA (1)...(19): siRNA sense strand
guucuggauuucuuacagu

SEQ ID NO: 572069 - RNA, 19 nt, Homo sapiens
  misc_RNA (1)...(19): siRNA sense strand
ggacccugaucaacaccau

SEQ ID NO: 572070 - RNA, 19 nt, Homo sapiens
  misc_RNA (1)...(19): siRNA sense strand
caaauaucacggaguacau

SEQ ID NO: 572071 - RNA, 19 nt, Homo sapiens
  misc_RNA (1)...(19): siRNA sense strand
ccccaaauaucacggagua

SEQ ID NO: 572072 - RNA, 19 nt, Homo sapiens
  misc_RNA (1)...(19): siRNA sense strand
gcccacaugccacccacua

SEQ ID NO: 572073 - RNA, 19 nt, Homo sapiens
  misc_RNA (1)...(19): siRNA sense strand
ggugaauggagcucaguug

SEQ ID NO: 572074 - RNA, 19 nt, Homo sapiens
  misc_RNA (1)...(19): siRNA sense strand
ugaucugugugaacgagaa

SEQ ID NO: 572075 - RNA, 19 nt, Homo sapiens
  misc_RNA (1)...(19): siRNA sense strand
ggagaggacgaagcuguuc

SEQ ID NO: 572076 - RNA, 19 nt, Homo sapiens
  misc_RNA (1)...(19): siRNA sense strand
acaguugaauauccaugug

SEQ ID NO: 572077 - RNA, 19 nt, Homo sapiens
  misc_RNA (1)...(19): siRNA sense strand
ugaauggagcucaguugug

SEQ ID NO: 572078 - RNA, 19 nt, Homo sapiens
  misc_RNA (1)...(19): siRNA sense strand
gugaauggagcucaguugu

SEQ ID NO: 572079 - RNA, 19 nt, Homo sapiens
  misc_RNA (1)...(19): siRNA sense strand
uaucacggaguacauguuc

SEQ ID NO: 572080 - RNA, 19 nt, Homo sapiens
  misc_RNA (1)...(19): siRNA sense strand
agaggacgcuggccuucgu

SEQ ID NO: 572081 - RNA, 19 nt, Homo sapiens
  misc_RNA (1)...(19): siRNA sense strand
augaccagcugaucugugu

SEQ ID NO: 572082 - RNA, 19 nt, Homo sapiens
  misc_RNA (1)...(19): siRNA sense strand
cgccuucccugucgacaca

SEQ ID NO: 572083 - RNA, 19 nt, Homo sapiens
  misc_RNA (1)...(19): siRNA sense strand
ucacagagcucgcacacaa

SEQ ID NO: 572084 - RNA, 19 nt, Homo sapiens
  misc_RNA (1)...(19): siRNA sense strand
cuacagccauaagaaauuu

SEQ ID NO: 572085 - RNA, 19 nt, Homo sapiens
  misc_RNA (1)...(19): siRNA sense strand
gcacagacggguaccugaa

SEQ ID NO: 572086 - RNA, 19 nt, Homo sapiens
  misc_RNA (1)...(19): siRNA sense strand
ggcgcugugugcccuauua

SEQ ID NO: 572087 - RNA, 19 nt, Homo sapiens
  misc_RNA (1)...(19): siRNA sense strand
ucaccauccucaucaagaa

SEQ ID NO: 572088 - RNA, 19 nt, Homo sapiens
  misc_RNA (1)...(19): siRNA sense strand
gauccgcauugacgucauu

SEQ ID NO: 572089 - RNA, 19 nt, Homo sapiens
  misc_RNA (1)...(19): siRNA sense strand
cugauucccaccauuauua

SEQ ID NO: 572090 - RNA, 19 nt, Homo sapiens
  misc_RNA (1)...(19): siRNA sense strand
aacaaggucuacagccaua

SEQ ID NO: 572091 - RNA, 19 nt, Homo sapiens
  misc_RNA (1)...(19): siRNA sense strand
gacuggaucuugcuaacau

SEQ ID NO: 572092 - RNA, 19 nt, Homo sapiens
  misc_RNA (1)...(19): siRNA sense strand
gccaaauacuacaagauca

SEQ ID NO: 572093 - RNA, 19 nt, Homo sapiens
  misc_RNA (1)...(19): siRNA sense strand
ggcuacaacuucagguuug

SEQ ID NO: 572094 - RNA, 19 nt, Homo sapiens
  misc_RNA (1)...(19): siRNA sense strand
ggucuacagccauaagaaa

SEQ ID NO: 572095 - RNA, 19 nt, Homo sapiens
  misc_RNA (1)...(19): siRNA sense strand
ccacagaccccaaagguuu

SEQ ID NO: 572096 - RNA, 19 nt, Homo sapiens
  misc_RNA (1)...(19): siRNA sense strand
ucaagaacagcauccacua

SEQ ID NO: 572097 - RNA, 19 nt, Homo sapiens
  misc_RNA (1)...(19): siRNA sense strand
ccaaauacuacaagaucaa

SEQ ID NO: 572098 - RNA, 19 nt, Homo sapiens
  misc_RNA (1)...(19): siRNA sense strand
agguuuggcucaacucuga

SEQ ID NO: 572099 - RNA, 19 nt, Homo sapiens
  misc_RNA (1)...(19): siRNA sense strand
ccaaauuccacuucuccaa

SEQ ID NO: 572100 - RNA, 19 nt, Homo sapiens
  misc_RNA (1)...(19): siRNA sense strand
uugcuaacauucaugaaca

SEQ ID NO: 572101 - RNA, 19 nt, Homo sapiens
  misc_RNA (1)...(19): siRNA sense strand
gggccucugucagccaauu

SEQ ID NO: 572102 - RNA, 19 nt, Homo sapiens
  misc_RNA (1)...(19): siRNA sense strand
ggaucuugcuaacauucau

SEQ ID NO: 572103 - RNA, 19 nt, Homo sapiens
  misc_RNA (1)...(19): siRNA sense strand
guacgauggccccaaauuu

SEQ ID NO: 572104 - RNA, 19 nt, Homo sapiens
  misc_RNA (1)...(19): siRNA sense strand
gccauaagaaauuugacaa

SEQ ID NO: 572105 - RNA, 19 nt, Homo sapiens
  misc_RNA (1)...(19): siRNA sense strand
gccaauuucuggguacgau

SEQ ID NO: 572106 - RNA, 19 nt, Homo sapiens
  misc_RNA (1)...(19): siRNA sense strand
caagaacagcauccacuac

SEQ ID NO: 572107 - RNA, 19 nt, Homo sapiens
  misc_RNA (1)...(19): siRNA sense strand
ucuacagccauaagaaauu

SEQ ID NO: 572108 - RNA, 19 nt, Homo sapiens
  misc_RNA (1)...(19): siRNA sense strand
gcuaacauucaugaacaaa

SEQ ID NO: 572109 - RNA, 19 nt, Homo sapiens
  misc_RNA (1)...(19): siRNA sense strand
gcgacuggaucuugcuaac

SEQ ID NO: 572110 - RNA, 19 nt, Homo sapiens
  misc_RNA (1)...(19): siRNA sense strand
ccuacgggauccgcauuga

SEQ ID NO: 572111 - RNA, 19 nt, Homo sapiens
  misc_RNA (1)...(19): siRNA sense strand
gaagauggggccucuguca

SEQ ID NO: 572112 - RNA, 19 nt, Homo sapiens
  misc_RNA (1)...(19): siRNA sense strand
ugauucccaccauuauuaa

SEQ ID NO: 572113 - RNA, 19 nt, Homo sapiens
  misc_RNA (1)...(19): siRNA sense strand
cagccugauucccaccauu

SEQ ID NO: 572114 - RNA, 19 nt, Homo sapiens
  misc_RNA (1)...(19): siRNA sense strand
agccugauucccaccauua

SEQ ID NO: 572115 - RNA, 19 nt, Homo sapiens
  misc_RNA (1)...(19): siRNA sense strand
ugacgucauugugcaugga

SEQ ID NO: 572116 - RNA, 19 nt, Homo sapiens
  misc_RNA (1)...(19): siRNA sense strand
gaucuugcuaacauucaug

SEQ ID NO: 572117 - RNA, 19 nt, Homo sapiens
  misc_RNA (1)...(19): siRNA sense strand
ucacagagcucgcacacaa

SEQ ID NO: 572118 - RNA, 19 nt, Homo sapiens
  misc_RNA (1)...(19): siRNA sense strand
cuacagccauaagaaauuu

SEQ ID NO: 572119 - RNA, 19 nt, Homo sapiens
  misc_RNA (1)...(19): siRNA sense strand
gcacagacggguaccugaa

SEQ ID NO: 572120 - RNA, 19 nt, Homo sapiens
  misc_RNA (1)...(19): siRNA sense strand
ggcgcugugugcccuauua

SEQ ID NO: 572121 - RNA, 19 nt, Homo sapiens
  misc_RNA (1)...(19): siRNA sense strand
ucaccauccucaucaagaa

SEQ ID NO: 572122 - RNA, 19 nt, Homo sapiens
  misc_RNA (1)...(19): siRNA sense strand
gauccgcauugacgucauu

SEQ ID NO: 572123 - RNA, 19 nt, Homo sapiens
  misc_RNA (1)...(19): siRNA sense strand
cugauucccaccauuauua

SEQ ID NO: 572124 - RNA, 19 nt, Homo sapiens
  misc_RNA (1)...(19): siRNA sense strand
aacaaggucuacagccaua

SEQ ID NO: 572125 - RNA, 19 nt, Homo sapiens
  misc_RNA (1)...(19): siRNA sense strand
gacuggaucuugcuaacau

SEQ ID NO: 572126 - RNA, 19 nt, Homo sapiens
  misc_RNA (1)...(19): siRNA sense strand
gccaaauacuacaagauca

SEQ ID NO: 572127 - RNA, 19 nt, Homo sapiens
  misc_RNA (1)...(19): siRNA sense strand
ggcuacaacuucagguuug

SEQ ID NO: 572128 - RNA, 19 nt, Homo sapiens
  misc_RNA (1)...(19): siRNA sense strand
ggucuacagccauaagaaa

SEQ ID NO: 572129 - RNA, 19 nt, Homo sapiens
  misc_RNA (1)...(19): siRNA sense strand
ccacagaccccaaagguuu

SEQ ID NO: 572130 - RNA, 19 nt, Homo sapiens
  misc_RNA (1)...(19): siRNA sense strand
ucaagaacagcauccacua

SEQ ID NO: 572131 - RNA, 19 nt, Homo sapiens
  misc_RNA (1)...(19): siRNA sense strand
ccaaauacuacaagaucaa

SEQ ID NO: 572132 - RNA, 19 nt, Homo sapiens
  misc_RNA (1)...(19): siRNA sense strand
agguuuggcucaacucuga

SEQ ID NO: 572133 - RNA, 19 nt, Homo sapiens
  misc_RNA (1)...(19): siRNA sense strand
ccaaauuccacuucuccaa

SEQ ID NO: 572134 - RNA, 19 nt, Homo sapiens
  misc_RNA (1)...(19): siRNA sense strand
uugcuaacauucaugaaca

SEQ ID NO: 572135 - RNA, 19 nt, Homo sapiens
  misc_RNA (1)...(19): siRNA sense strand
gggccucugucagccaauu

SEQ ID NO: 572136 - RNA, 19 nt, Homo sapiens
  misc_RNA (1)...(19): siRNA sense strand
ggaucuugcuaacauucau

SEQ ID NO: 572137 - RNA, 19 nt, Homo sapiens
  misc_RNA (1)...(19): siRNA sense strand
guacgauggccccaaauuu

SEQ ID NO: 572138 - RNA, 19 nt, Homo sapiens
  misc_RNA (1)...(19): siRNA sense strand
gccauaagaaauuugacaa

SEQ ID NO: 572139 - RNA, 19 nt, Homo sapiens
  misc_RNA (1)...(19): siRNA sense strand
gccaauuucuggguacgau

SEQ ID NO: 572140 - RNA, 19 nt, Homo sapiens
  misc_RNA (1)...(19): siRNA sense strand
caagaacagcauccacuac

SEQ ID NO: 572141 - RNA, 19 nt, Homo sapiens
  misc_RNA (1)...(19): siRNA sense strand
ucuacagccauaagaaauu

SEQ ID NO: 572142 - RNA, 19 nt, Homo sapiens
  misc_RNA (1)...(19): siRNA sense strand
gcuaacauucaugaacaaa

SEQ ID NO: 572143 - RNA, 19 nt, Homo sapiens
  misc_RNA (1)...(19): siRNA sense strand
gcgacuggaucuugcuaac

SEQ ID NO: 572144 - RNA, 19 nt, Homo sapiens
  misc_RNA (1)...(19): siRNA sense strand
ccuacgggauccgcauuga

SEQ ID NO: 572145 - RNA, 19 nt, Homo sapiens
  misc_RNA (1)...(19): siRNA sense strand
gaagauggggccucuguca

SEQ ID NO: 572146 - RNA, 19 nt, Homo sapiens
  misc_RNA (1)...(19): siRNA sense strand
ugauucccaccauuauuaa

SEQ ID NO: 572147 - RNA, 19 nt, Homo sapiens
  misc_RNA (1)...(19): siRNA sense strand
cagccugauucccaccauu

SEQ ID NO: 572148 - RNA, 19 nt, Homo sapiens
  misc_RNA (1)...(19): siRNA sense strand
agccugauucccaccauua

SEQ ID NO: 572149 - RNA, 19 nt, Homo sapiens
  misc_RNA (1)...(19): siRNA sense strand
ugacgucauugugcaugga

SEQ ID NO: 572150 - RNA, 19 nt, Homo sapiens
  misc_RNA (1)...(19): siRNA sense strand
gaucuugcuaacauucaug

SEQ ID NO: 572151 - RNA, 19 nt, Homo sapiens
  misc_RNA (1)...(19): siRNA sense strand
ucacagagcucgcacacaa

SEQ ID NO: 572152 - RNA, 19 nt, Homo sapiens
  misc_RNA (1)...(19): siRNA sense strand
cuacagccauaagaaauuu

SEQ ID NO: 572153 - RNA, 19 nt, Homo sapiens
  misc_RNA (1)...(19): siRNA sense strand
gcacagacggguaccugaa

SEQ ID NO: 572154 - RNA, 19 nt, Homo sapiens
  misc_RNA (1)...(19): siRNA sense strand
ggcgcugugugcccuauua

SEQ ID NO: 572155 - RNA, 19 nt, Homo sapiens
  misc_RNA (1)...(19): siRNA sense strand
ucaccauccucaucaagaa

SEQ ID NO: 572156 - RNA, 19 nt, Homo sapiens
  misc_RNA (1)...(19): siRNA sense strand
gauccgcauugacgucauu

SEQ ID NO: 572157 - RNA, 19 nt, Homo sapiens
  misc_RNA (1)...(19): siRNA sense strand
cugauucccaccauuauua

SEQ ID NO: 572158 - RNA, 19 nt, Homo sapiens
  misc_RNA (1)...(19): siRNA sense strand
aacaaggucuacagccaua

SEQ ID NO: 572159 - RNA, 19 nt, Homo sapiens
  misc_RNA (1)...(19): siRNA sense strand
gacuggaucuugcuaacau

SEQ ID NO: 572160 - RNA, 19 nt, Homo sapiens
  misc_RNA (1)...(19): siRNA sense strand
gccaaauacuacaagauca

SEQ ID NO: 572161 - RNA, 19 nt, Homo sapiens
  misc_RNA (1)...(19): siRNA sense strand
ggcuacaacuucagguuug

SEQ ID NO: 572162 - RNA, 19 nt, Homo sapiens
  misc_RNA (1)...(19): siRNA sense strand
ggucuacagccauaagaaa

SEQ ID NO: 572163 - RNA, 19 nt, Homo sapiens
  misc_RNA (1)...(19): siRNA sense strand
ccacagaccccaaagguuu

SEQ ID NO: 572164 - RNA, 19 nt, Homo sapiens
  misc_RNA (1)...(19): siRNA sense strand
ucaagaacagcauccacua

SEQ ID NO: 572165 - RNA, 19 nt, Homo sapiens
  misc_RNA (1)...(19): siRNA sense strand
ccaaauacuacaagaucaa

SEQ ID NO: 572166 - RNA, 19 nt, Homo sapiens
  misc_RNA (1)...(19): siRNA sense strand
agguuuggcucaacucuga

SEQ ID NO: 572167 - RNA, 19 nt, Homo sapiens
  misc_RNA (1)...(19): siRNA sense strand
ccaaauuccacuucuccaa

SEQ ID NO: 572168 - RNA, 19 nt, Homo sapiens
  misc_RNA (1)...(19): siRNA sense strand
uugcuaacauucaugaaca

SEQ ID NO: 572169 - RNA, 19 nt, Homo sapiens
  misc_RNA (1)...(19): siRNA sense strand
gggccucugucagccaauu

SEQ ID NO: 572170 - RNA, 19 nt, Homo sapiens
  misc_RNA (1)...(19): siRNA sense strand
ggaucuugcuaacauucau

SEQ ID NO: 572171 - RNA, 19 nt, Homo sapiens
  misc_RNA (1)...(19): siRNA sense strand
guacgauggccccaaauuu

SEQ ID NO: 572172 - RNA, 19 nt, Homo sapiens
  misc_RNA (1)...(19): siRNA sense strand
gccauaagaaauuugacaa

SEQ ID NO: 572173 - RNA, 19 nt, Homo sapiens
  misc_RNA (1)...(19): siRNA sense strand
gccaauuucuggguacgau

SEQ ID NO: 572174 - RNA, 19 nt, Homo sapiens
  misc_RNA (1)...(19): siRNA sense strand
caagaacagcauccacuac

SEQ ID NO: 572175 - RNA, 19 nt, Homo sapiens
  misc_RNA (1)...(19): siRNA sense strand
ucuacagccauaagaaauu

SEQ ID NO: 572176 - RNA, 19 nt, Homo sapiens
  misc_RNA (1)...(19): siRNA sense strand
gcuaacauucaugaacaaa

SEQ ID NO: 572177 - RNA, 19 nt, Homo sapiens
  misc_RNA (1)...(19): siRNA sense strand
gcgacuggaucuugcuaac

SEQ ID NO: 572178 - RNA, 19 nt, Homo sapiens
  misc_RNA (1)...(19): siRNA sense strand
ccuacgggauccgcauuga

SEQ ID NO: 572179 - RNA, 19 nt, Homo sapiens
  misc_RNA (1)...(19): siRNA sense strand
gaagauggggccucuguca

SEQ ID NO: 572180 - RNA, 19 nt, Homo sapiens
  misc_RNA (1)...(19): siRNA sense strand
ugauucccaccauuauuaa

SEQ ID NO: 572181 - RNA, 19 nt, Homo sapiens
  misc_RNA (1)...(19): siRNA sense strand
cagccugauucccaccauu

SEQ ID NO: 572182 - RNA, 19 nt, Homo sapiens
  misc_RNA (1)...(19): siRNA sense strand
agccugauucccaccauua

SEQ ID NO: 572183 - RNA, 19 nt, Homo sapiens
  misc_RNA (1)...(19): siRNA sense strand
ugacgucauugugcaugga

SEQ ID NO: 572184 - RNA, 19 nt, Homo sapiens
  misc_RNA (1)...(19): siRNA sense strand
gaucuugcuaacauucaug

SEQ ID NO: 572185 - RNA, 19 nt, Homo sapiens
  misc_RNA (1)...(19): siRNA sense strand
ucacagagcucgcacacaa

SEQ ID NO: 572186 - RNA, 19 nt, Homo sapiens
  misc_RNA (1)...(19): siRNA sense strand
cuacagccauaagaaauuu

SEQ ID NO: 572187 - RNA, 19 nt, Homo sapiens
  misc_RNA (1)...(19): siRNA sense strand
gcacagacggguaccugaa

SEQ ID NO: 572188 - RNA, 19 nt, Homo sapiens
  misc_RNA (1)...(19): siRNA sense strand
ggcgcugugugcccuauua

SEQ ID NO: 572189 - RNA, 19 nt, Homo sapiens
  misc_RNA (1)...(19): siRNA sense strand
ucaccauccucaucaagaa

SEQ ID NO: 572190 - RNA, 19 nt, Homo sapiens
  misc_RNA (1)...(19): siRNA sense strand
gauccgcauugacgucauu

SEQ ID NO: 572191 - RNA, 19 nt, Homo sapiens
  misc_RNA (1)...(19): siRNA sense strand
cugauucccaccauuauua

SEQ ID NO: 572192 - RNA, 19 nt, Homo sapiens
  misc_RNA (1)...(19): siRNA sense strand
aacaaggucuacagccaua

SEQ ID NO: 572193 - RNA, 19 nt, Homo sapiens
  misc_RNA (1)...(19): siRNA sense strand
gacuggaucuugcuaacau

SEQ ID NO: 572194 - RNA, 19 nt, Homo sapiens
  misc_RNA (1)...(19): siRNA sense strand
gccaaauacuacaagauca

SEQ ID NO: 572195 - RNA, 19 nt, Homo sapiens
  misc_RNA (1)...(19): siRNA sense strand
ggcuacaacuucagguuug

SEQ ID NO: 572196 - RNA, 19 nt, Homo sapiens
  misc_RNA (1)...(19): siRNA sense strand
ggucuacagccauaagaaa

SEQ ID NO: 572197 - RNA, 19 nt, Homo sapiens
  misc_RNA (1)...(19): siRNA sense strand
ccacagaccccaaagguuu

SEQ ID NO: 572198 - RNA, 19 nt, Homo sapiens
  misc_RNA (1)...(19): siRNA sense strand
ucaagaacagcauccacua

SEQ ID NO: 572199 - RNA, 19 nt, Homo sapiens
  misc_RNA (1)...(19): siRNA sense strand
ccaaauacuacaagaucaa

SEQ ID NO: 572200 - RNA, 19 nt, Homo sapiens
  misc_RNA (1)...(19): siRNA sense strand
agguuuggcucaacucuga

SEQ ID NO: 572201 - RNA, 19 nt, Homo sapiens
  misc_RNA (1)...(19): siRNA sense strand
ccaaauuccacuucuccaa

SEQ ID NO: 572202 - RNA, 19 nt, Homo sapiens
  misc_RNA (1)...(19): siRNA sense strand
uugcuaacauucaugaaca

SEQ ID NO: 572203 - RNA, 19 nt, Homo sapiens
  misc_RNA (1)...(19): siRNA sense strand
gggccucugucagccaauu

SEQ ID NO: 572204 - RNA, 19 nt, Homo sapiens
  misc_RNA (1)...(19): siRNA sense strand
ggaucuugcuaacauucau

SEQ ID NO: 572205 - RNA, 19 nt, Homo sapiens
  misc_RNA (1)...(19): siRNA sense strand
guacgauggccccaaauuu

SEQ ID NO: 572206 - RNA, 19 nt, Homo sapiens
  misc_RNA (1)...(19): siRNA sense strand
gccauaagaaauuugacaa

SEQ ID NO: 572207 - RNA, 19 nt, Homo sapiens
  misc_RNA (1)...(19): siRNA sense strand
gccaauuucuggguacgau

SEQ ID NO: 572208 - RNA, 19 nt, Homo sapiens
  misc_RNA (1)...(19): siRNA sense strand
caagaacagcauccacuac

SEQ ID NO: 572209 - RNA, 19 nt, Homo sapiens
  misc_RNA (1)...(19): siRNA sense strand
ucuacagccauaagaaauu

SEQ ID NO: 572210 - RNA, 19 nt, Homo sapiens
  misc_RNA (1)...(19): siRNA sense strand
gcuaacauucaugaacaaa

SEQ ID NO: 572211 - RNA, 19 nt, Homo sapiens
  misc_RNA (1)...(19): siRNA sense strand
gcgacuggaucuugcuaac

SEQ ID NO: 572212 - RNA, 19 nt, Homo sapiens
  misc_RNA (1)...(19): siRNA sense strand
ccuacgggauccgcauuga

SEQ ID NO: 572213 - RNA, 19 nt, Homo sapiens
  misc_RNA (1)...(19): siRNA sense strand
gaagauggggccucuguca

SEQ ID NO: 572214 - RNA, 19 nt, Homo sapiens
  misc_RNA (1)...(19): siRNA sense strand
ugauucccaccauuauuaa

SEQ ID NO: 572215 - RNA, 19 nt, Homo sapiens
  misc_RNA (1)...(19): siRNA sense strand
cagccugauucccaccauu

SEQ ID NO: 572216 - RNA, 19 nt, Homo sapiens
  misc_RNA (1)...(19): siRNA sense strand
agccugauucccaccauua

SEQ ID NO: 572217 - RNA, 19 nt, Homo sapiens
  misc_RNA (1)...(19): siRNA sense strand
ugacgucauugugcaugga

SEQ ID NO: 572218 - RNA, 19 nt, Homo sapiens
  misc_RNA (1)...(19): siRNA sense strand
gaucuugcuaacauucaug

SEQ ID NO: 572219 - RNA, 19 nt, Homo sapiens
  misc_RNA (1)...(19): siRNA sense strand
ucacagagcucgcacacaa

SEQ ID NO: 572220 - RNA, 19 nt, Homo sapiens
  misc_RNA (1)...(19): siRNA sense strand
cuacagccauaagaaauuu

SEQ ID NO: 572221 - RNA, 19 nt, Homo sapiens
  misc_RNA (1)...(19): siRNA sense strand
gcacagacggguaccugaa

SEQ ID NO: 572222 - RNA, 19 nt, Homo sapiens
  misc_RNA (1)...(19): siRNA sense strand
ggcgcugugugcccuauua

SEQ ID NO: 572223 - RNA, 19 nt, Homo sapiens
  misc_RNA (1)...(19): siRNA sense strand
ucaccauccucaucaagaa

SEQ ID NO: 572224 - RNA, 19 nt, Homo sapiens
  misc_RNA (1)...(19): siRNA sense strand
gauccgcauugacgucauu

SEQ ID NO: 572225 - RNA, 19 nt, Homo sapiens
  misc_RNA (1)...(19): siRNA sense strand
cugauucccaccauuauua

SEQ ID NO: 572226 - RNA, 19 nt, Homo sapiens
  misc_RNA (1)...(19): siRNA sense strand
aacaaggucuacagccaua

SEQ ID NO: 572227 - RNA, 19 nt, Homo sapiens
  misc_RNA (1)...(19): siRNA sense strand
gacuggaucuugcuaacau

SEQ ID NO: 572228 - RNA, 19 nt, Homo sapiens
  misc_RNA (1)...(19): siRNA sense strand
gccaaauacuacaagauca

SEQ ID NO: 572229 - RNA, 19 nt, Homo sapiens
  misc_RNA (1)...(19): siRNA sense strand
ggcuacaacuucagguuug

SEQ ID NO: 572230 - RNA, 19 nt, Homo sapiens
  misc_RNA (1)...(19): siRNA sense strand
ggucuacagccauaagaaa

SEQ ID NO: 572231 - RNA, 19 nt, Homo sapiens
  misc_RNA (1)...(19): siRNA sense strand
ccacagaccccaaagguuu

SEQ ID NO: 572232 - RNA, 19 nt, Homo sapiens
  misc_RNA (1)...(19): siRNA sense strand
ucaagaacagcauccacua

SEQ ID NO: 572233 - RNA, 19 nt, Homo sapiens
  misc_RNA (1)...(19): siRNA sense strand
ccaaauacuacaagaucaa

SEQ ID NO: 572234 - RNA, 19 nt, Homo sapiens
  misc_RNA (1)...(19): siRNA sense strand
agguuuggcucaacucuga

SEQ ID NO: 572235 - RNA, 19 nt, Homo sapiens
  misc_RNA (1)...(19): siRNA sense strand
ccaaauuccacuucuccaa

SEQ ID NO: 572236 - RNA, 19 nt, Homo sapiens
  misc_RNA (1)...(19): siRNA sense strand
uugcuaacauucaugaaca

SEQ ID NO: 572237 - RNA, 19 nt, Homo sapiens
  misc_RNA (1)...(19): siRNA sense strand
gggccucugucagccaauu

SEQ ID NO: 572238 - RNA, 19 nt, Homo sapiens
  misc_RNA (1)...(19): siRNA sense strand
ggaucuugcuaacauucau

SEQ ID NO: 572239 - RNA, 19 nt, Homo sapiens
  misc_RNA (1)...(19): siRNA sense strand
guacgauggccccaaauuu

SEQ ID NO: 572240 - RNA, 19 nt, Homo sapiens
  misc_RNA (1)...(19): siRNA sense strand
gccauaagaaauuugacaa

SEQ ID NO: 572241 - RNA, 19 nt, Homo sapiens
  misc_RNA (1)...(19): siRNA sense strand
gccaauuucuggguacgau

SEQ ID NO: 572242 - RNA, 19 nt, Homo sapiens
  misc_RNA (1)...(19): siRNA sense strand
caagaacagcauccacuac

SEQ ID NO: 572243 - RNA, 19 nt, Homo sapiens
  misc_RNA (1)...(19): siRNA sense strand
ucuacagccauaagaaauu

SEQ ID NO: 572244 - RNA, 19 nt, Homo sapiens
  misc_RNA (1)...(19): siRNA sense strand
gcuaacauucaugaacaaa

SEQ ID NO: 572245 - RNA, 19 nt, Homo sapiens
  misc_RNA (1)...(19): siRNA sense strand
gcgacuggaucuugcuaac

SEQ ID NO: 572246 - RNA, 19 nt, Homo sapiens
  misc_RNA (1)...(19): siRNA sense strand
ccuacgggauccgcauuga

SEQ ID NO: 572247 - RNA, 19 nt, Homo sapiens
  misc_RNA (1)...(19): siRNA sense strand
gaagauggggccucuguca

SEQ ID NO: 572248 - RNA, 19 nt, Homo sapiens
  misc_RNA (1)...(19): siRNA sense strand
ugauucccaccauuauuaa

SEQ ID NO: 572249 - RNA, 19 nt, Homo sapiens
  misc_RNA (1)...(19): siRNA sense strand
cagccugauucccaccauu

SEQ ID NO: 572250 - RNA, 19 nt, Homo sapiens
  misc_RNA (1)...(19): siRNA sense strand
agccugauucccaccauua

SEQ ID NO: 572251 - RNA, 19 nt, Homo sapiens
  misc_RNA (1)...(19): siRNA sense strand
ugacgucauugugcaugga

SEQ ID NO: 572252 - RNA, 19 nt, Homo sapiens
  misc_RNA (1)...(19): siRNA sense strand
gaucuugcuaacauucaug

SEQ ID NO: 572253 - RNA, 19 nt, Homo sapiens
  misc_RNA (1)...(19): siRNA sense strand
ucacagagcucgcacacaa

SEQ ID NO: 572254 - RNA, 19 nt, Homo sapiens
  misc_RNA (1)...(19): siRNA sense strand
cuacagccauaagaaauuu

SEQ ID NO: 572255 - RNA, 19 nt, Homo sapiens
  misc_RNA (1)...(19): siRNA sense strand
gcacagacggguaccugaa

SEQ ID NO: 572256 - RNA, 19 nt, Homo sapiens
  misc_RNA (1)...(19): siRNA sense strand
ggcgcugugugcccuauua

SEQ ID NO: 572257 - RNA, 19 nt, Homo sapiens
  misc_RNA (1)...(19): siRNA sense strand
ucaccauccucaucaagaa

SEQ ID NO: 572258 - RNA, 19 nt, Homo sapiens
  misc_RNA (1)...(19): siRNA sense strand
gauccgcauugacgucauu

SEQ ID NO: 572259 - RNA, 19 nt, Homo sapiens
  misc_RNA (1)...(19): siRNA sense strand
cugauucccaccauuauua

SEQ ID NO: 572260 - RNA, 19 nt, Homo sapiens
  misc_RNA (1)...(19): siRNA sense strand
aacaaggucuacagccaua

SEQ ID NO: 572261 - RNA, 19 nt, Homo sapiens
  misc_RNA (1)...(19): siRNA sense strand
gacuggaucuugcuaacau

SEQ ID NO: 572262 - RNA, 19 nt, Homo sapiens
  misc_RNA (1)...(19): siRNA sense strand
gccaaauacuacaagauca

SEQ ID NO: 572263 - RNA, 19 nt, Homo sapiens
  misc_RNA (1)...(19): siRNA sense strand
ggcuacaacuucagguuug

SEQ ID NO: 572264 - RNA, 19 nt, Homo sapiens
  misc_RNA (1)...(19): siRNA sense strand
ggucuacagccauaagaaa

SEQ ID NO: 572265 - RNA, 19 nt, Homo sapiens
  misc_RNA (1)...(19): siRNA sense strand
ccacagaccccaaagguuu

SEQ ID NO: 572266 - RNA, 19 nt, Homo sapiens
  misc_RNA (1)...(19): siRNA sense strand
ucaagaacagcauccacua

SEQ ID NO: 572267 - RNA, 19 nt, Homo sapiens
  misc_RNA (1)...(19): siRNA sense strand
ccaaauacuacaagaucaa

SEQ ID NO: 572268 - RNA, 19 nt, Homo sapiens
  misc_RNA (1)...(19): siRNA sense strand
agguuuggcucaacucuga

SEQ ID NO: 572269 - RNA, 19 nt, Homo sapiens
  misc_RNA (1)...(19): siRNA sense strand
ccaaauuccacuucuccaa

SEQ ID NO: 572270 - RNA, 19 nt, Homo sapiens
  misc_RNA (1)...(19): siRNA sense strand
uugcuaacauucaugaaca

SEQ ID NO: 572271 - RNA, 19 nt, Homo sapiens
  misc_RNA (1)...(19): siRNA sense strand
gggccucugucagccaauu

SEQ ID NO: 572272 - RNA, 19 nt, Homo sapiens
  misc_RNA (1)...(19): siRNA sense strand
ggaucuugcuaacauucau

SEQ ID NO: 572273 - RNA, 19 nt, Homo sapiens
  misc_RNA (1)...(19): siRNA sense strand
guacgauggccccaaauuu

SEQ ID NO: 572274 - RNA, 19 nt, Homo sapiens
  misc_RNA (1)...(19): siRNA sense strand
gccauaagaaauuugacaa

SEQ ID NO: 572275 - RNA, 19 nt, Homo sapiens
  misc_RNA (1)...(19): siRNA sense strand
gccaauuucuggguacgau

SEQ ID NO: 572276 - RNA, 19 nt, Homo sapiens
  misc_RNA (1)...(19): siRNA sense strand
caagaacagcauccacuac

SEQ ID NO: 572277 - RNA, 19 nt, Homo sapiens
  misc_RNA (1)...(19): siRNA sense strand
ucuacagccauaagaaauu

SEQ ID NO: 572278 - RNA, 19 nt, Homo sapiens
  misc_RNA (1)...(19): siRNA sense strand
gcuaacauucaugaacaaa

SEQ ID NO: 572279 - RNA, 19 nt, Homo sapiens
  misc_RNA (1)...(19): siRNA sense strand
gcgacuggaucuugcuaac

SEQ ID NO: 572280 - RNA, 19 nt, Homo sapiens
  misc_RNA (1)...(19): siRNA sense strand
ccuacgggauccgcauuga

SEQ ID NO: 572281 - RNA, 19 nt, Homo sapiens
  misc_RNA (1)...(19): siRNA sense strand
gaagauggggccucuguca

SEQ ID NO: 572282 - RNA, 19 nt, Homo sapiens
  misc_RNA (1)...(19): siRNA sense strand
ugauucccaccauuauuaa

SEQ ID NO: 572283 - RNA, 19 nt, Homo sapiens
  misc_RNA (1)...(19): siRNA sense strand
cagccugauucccaccauu

SEQ ID NO: 572284 - RNA, 19 nt, Homo sapiens
  misc_RNA (1)...(19): siRNA sense strand
agccugauucccaccauua

SEQ ID NO: 572285 - RNA, 19 nt, Homo sapiens
  misc_RNA (1)...(19): siRNA sense strand
ugacgucauugugcaugga

SEQ ID NO: 572286 - RNA, 19 nt, Homo sapiens
  misc_RNA (1)...(19): siRNA sense strand
gaucuugcuaacauucaug

SEQ ID NO: 572287 - RNA, 19 nt, Homo sapiens
  misc_RNA (1)...(19): siRNA sense strand
gaagagagauugaaaccaa

SEQ ID NO: 572288 - RNA, 19 nt, Homo sapiens
  misc_RNA (1)...(19): siRNA sense strand
ggaaagaaguaguugucua

SEQ ID NO: 572289 - RNA, 19 nt, Homo sapiens
  misc_RNA (1)...(19): siRNA sense strand
ggacaggcaucuuuguuug

SEQ ID NO: 572290 - RNA, 19 nt, Homo sapiens
  misc_RNA (1)...(19): siRNA sense strand
acagggagcucaauucaaa

SEQ ID NO: 572291 - RNA, 19 nt, Homo sapiens
  misc_RNA (1)...(19): siRNA sense strand
agaaagugcuggaaauaaa

SEQ ID NO: 572292 - RNA, 19 nt, Homo sapiens
  misc_RNA (1)...(19): siRNA sense strand
gcacaucaauagucuaaca

SEQ ID NO: 572293 - RNA, 19 nt, Homo sapiens
  misc_RNA (1)...(19): siRNA sense strand
gcaaaccuguugaugagaa

SEQ ID NO: 572294 - RNA, 19 nt, Homo sapiens
  misc_RNA (1)...(19): siRNA sense strand
ccacaaauaccaccucuaa

SEQ ID NO: 572295 - RNA, 19 nt, Homo sapiens
  misc_RNA (1)...(19): siRNA sense strand
gaacuucguuuagaggauu

SEQ ID NO: 572296 - RNA, 19 nt, Homo sapiens
  misc_RNA (1)...(19): siRNA sense strand
gaugaagauucccuuguuu

SEQ ID NO: 572297 - RNA, 19 nt, Homo sapiens
  misc_RNA (1)...(19): siRNA sense strand
gaacaaccaaccuaagauu

SEQ ID NO: 572298 - RNA, 19 nt, Homo sapiens
  misc_RNA (1)...(19): siRNA sense strand
ucacuaagguugguuacua

SEQ ID NO: 572299 - RNA, 19 nt, Homo sapiens
  misc_RNA (1)...(19): siRNA sense strand
uggcacaacuucaacauuu

SEQ ID NO: 572300 - RNA, 19 nt, Homo sapiens
  misc_RNA (1)...(19): siRNA sense strand
gaaggaagcagugaagaaa

SEQ ID NO: 572301 - RNA, 19 nt, Homo sapiens
  misc_RNA (1)...(19): siRNA sense strand
gcagaccaauacuggauuu

SEQ ID NO: 572302 - RNA, 19 nt, Homo sapiens
  misc_RNA (1)...(19): siRNA sense strand
cuacuuagaugauaaccaa

SEQ ID NO: 572303 - RNA, 19 nt, Homo sapiens
  misc_RNA (1)...(19): siRNA sense strand
ggagagagauuuaguuucc

SEQ ID NO: 572304 - RNA, 19 nt, Homo sapiens
  misc_RNA (1)...(19): siRNA sense strand
gaaggaagagagauugaaa

SEQ ID NO: 572305 - RNA, 19 nt, Homo sapiens
  misc_RNA (1)...(19): siRNA sense strand
ugaaggagaugugaauuug

SEQ ID NO: 572306 - RNA, 19 nt, Homo sapiens
  misc_RNA (1)...(19): siRNA sense strand
gaaagguuaugguucaauc

SEQ ID NO: 572307 - RNA, 19 nt, Homo sapiens
  misc_RNA (1)...(19): siRNA sense strand
ggucaaagcuggaguuagc

SEQ ID NO: 572308 - RNA, 19 nt, Homo sapiens
  misc_RNA (1)...(19): siRNA sense strand
gugaagggcuaaauaggaa

SEQ ID NO: 572309 - RNA, 19 nt, Homo sapiens
  misc_RNA (1)...(19): siRNA sense strand
caacuggcuuuggcaauuu

SEQ ID NO: 572310 - RNA, 19 nt, Homo sapiens
  misc_RNA (1)...(19): siRNA sense strand
uuacuacaccuacucauua

SEQ ID NO: 572311 - RNA, 19 nt, Homo sapiens
  misc_RNA (1)...(19): siRNA sense strand
ggaggccucuuuggaaauu

SEQ ID NO: 572312 - RNA, 19 nt, Homo sapiens
  misc_RNA (1)...(19): siRNA sense strand
ggaccagucucuucucauc

SEQ ID NO: 572313 - RNA, 19 nt, Homo sapiens
  misc_RNA (1)...(19): siRNA sense strand
ccagaaggcucuuacuaca

SEQ ID NO: 572314 - RNA, 19 nt, Homo sapiens
  misc_RNA (1)...(19): siRNA sense strand
ccaagaagagcauuaagaa

SEQ ID NO: 572315 - RNA, 19 nt, Homo sapiens
  misc_RNA (1)...(19): siRNA sense strand
gaagagcauuaagaaguug

SEQ ID NO: 572316 - RNA, 19 nt, Homo sapiens
  misc_RNA (1)...(19): siRNA sense strand
ggaaggaagcagugaagaa

SEQ ID NO: 572317 - RNA, 19 nt, Homo sapiens
  misc_RNA (1)...(19): siRNA sense strand
aaacaugcgugcugcuuug

SEQ ID NO: 572318 - RNA, 19 nt, Homo sapiens
  misc_RNA (1)...(19): siRNA sense strand
ccaggaggauuguuuggaa

SEQ ID NO: 572319 - RNA, 19 nt, Homo sapiens
  misc_RNA (1)...(19): siRNA sense strand
gauaucaacuaugaaggaa

SEQ ID NO: 572320 - RNA, 19 nt, Homo sapiens
  misc_RNA (1)...(19): siRNA sense strand
ggaguuuggccaacagaua

SEQ ID NO: 572321 - RNA, 19 nt, Homo sapiens
  misc_RNA (1)...(19): siRNA sense strand
gcacccagcagguauuauu

SEQ ID NO: 572322 - RNA, 19 nt, Homo sapiens
  misc_RNA (1)...(19): siRNA sense strand
ggaaauaaacacagcaaca

SEQ ID NO: 572323 - RNA, 19 nt, Homo sapiens
  misc_RNA (1)...(19): siRNA sense strand
agaagagcauuaagaaguu

SEQ ID NO: 572324 - RNA, 19 nt, Homo sapiens
  misc_RNA (1)...(19): siRNA sense strand
gcacuaacauaaguaccaa

SEQ ID NO: 572325 - RNA, 19 nt, Homo sapiens
  misc_RNA (1)...(19): siRNA sense strand
ggaaacagggagcucaauu

SEQ ID NO: 572326 - RNA, 19 nt, Homo sapiens
  misc_RNA (1)...(19): siRNA sense strand
uaucaacuaugaaggaaga

SEQ ID NO: 572327 - RNA, 19 nt, Homo sapiens
  misc_RNA (1)...(19): siRNA sense strand
ccagaucgccuugcugaua

SEQ ID NO: 572328 - RNA, 19 nt, Homo sapiens
  misc_RNA (1)...(19): siRNA sense strand
gaacuaguacaacuggauu

SEQ ID NO: 572329 - RNA, 19 nt, Homo sapiens
  misc_RNA (1)...(19): siRNA sense strand
gaaacagggagcucaauuc

SEQ ID NO: 572330 - RNA, 19 nt, Homo sapiens
  misc_RNA (1)...(19): siRNA sense strand
gaagaaggaagagagauug

SEQ ID NO: 572331 - RNA, 19 nt, Homo sapiens
  misc_RNA (1)...(19): siRNA sense strand
guaccaagcaccaguguau

SEQ ID NO: 572332 - RNA, 19 nt, Homo sapiens
  misc_RNA (1)...(19): siRNA sense strand
uaagcaaaccuguugauga

SEQ ID NO: 572333 - RNA, 19 nt, Homo sapiens
  misc_RNA (1)...(19): siRNA sense strand
cuacugggacuacuauuaa

SEQ ID NO: 572334 - RNA, 19 nt, Homo sapiens
  misc_RNA (1)...(19): siRNA sense strand
gcaagucacuagaggaacu

SEQ ID NO: 572335 - RNA, 19 nt, Homo sapiens
  misc_RNA (1)...(19): siRNA sense strand
guugaagacugcuccuuug

SEQ ID NO: 572336 - RNA, 19 nt, Homo sapiens
  misc_RNA (1)...(19): siRNA sense strand
uugcugauaucaacuauga

SEQ ID NO: 572337 - RNA, 19 nt, Homo sapiens
  misc_RNA (1)...(19): siRNA sense strand
uaggaaggcugaaguuaca

SEQ ID NO: 572338 - RNA, 19 nt, Homo sapiens
  misc_RNA (1)...(19): siRNA sense strand
ugauaccauuguugcauua

SEQ ID NO: 572339 - RNA, 19 nt, Homo sapiens
  misc_RNA (1)...(19): siRNA sense strand
cuacaccuacucauuauaa

SEQ ID NO: 572340 - RNA, 19 nt, Homo sapiens
  misc_RNA (1)...(19): siRNA sense strand
acaaauaccagugggaaua

SEQ ID NO: 572341 - RNA, 19 nt, Homo sapiens
  misc_RNA (1)...(19): siRNA sense strand
guacagauacuauggucaa

SEQ ID NO: 572342 - RNA, 19 nt, Homo sapiens
  misc_RNA (1)...(19): siRNA sense strand
gagcauccgucuaaaacua

SEQ ID NO: 572343 - RNA, 19 nt, Homo sapiens
  misc_RNA (1)...(19): siRNA sense strand
uagaggaacuucguuuaga

SEQ ID NO: 572344 - RNA, 19 nt, Homo sapiens
  misc_RNA (1)...(19): siRNA sense strand
caacagaaucagcagacua

SEQ ID NO: 572345 - RNA, 19 nt, Homo sapiens
  misc_RNA (1)...(19): siRNA sense strand
uguuuaaggucucccauuu

SEQ ID NO: 572346 - RNA, 19 nt, Homo sapiens
  misc_RNA (1)...(19): siRNA sense strand
gaguuuggccaacagauaa

SEQ ID NO: 572347 - RNA, 19 nt, Homo sapiens
  misc_RNA (1)...(19): siRNA sense strand
gguuaugguucaaucuauu

SEQ ID NO: 572348 - RNA, 19 nt, Homo sapiens
  misc_RNA (1)...(19): siRNA sense strand
ggaugaccgagaagaaaua

SEQ ID NO: 572349 - RNA, 19 nt, Homo sapiens
  misc_RNA (1)...(19): siRNA sense strand
gcaacaguguggaugauac

SEQ ID NO: 572350 - RNA, 19 nt, Homo sapiens
  misc_RNA (1)...(19): siRNA sense strand
caagucacaucucuuugau

SEQ ID NO: 572351 - RNA, 19 nt, Homo sapiens
  misc_RNA (1)...(19): siRNA sense strand
ugucagacccuaagaagaa

SEQ ID NO: 572352 - RNA, 19 nt, Homo sapiens
  misc_RNA (1)...(19): siRNA sense strand
caacaccaugggauuauuu

SEQ ID NO: 572353 - RNA, 19 nt, Homo sapiens
  misc_RNA (1)...(19): siRNA sense strand
ggcaauaacaagcuuacua

SEQ ID NO: 572354 - RNA, 19 nt, Homo sapiens
  misc_RNA (1)...(19): siRNA sense strand
cagaucgccuugcugauau

SEQ ID NO: 572355 - RNA, 19 nt, Homo sapiens
  misc_RNA (1)...(19): siRNA sense strand
gggaacaaccaaccuaaga

SEQ ID NO: 572356 - RNA, 19 nt, Homo sapiens
  misc_RNA (1)...(19): siRNA sense strand
acaaauaccaccucuaauc

SEQ ID NO: 572357 - RNA, 19 nt, Homo sapiens
  misc_RNA (1)...(19): siRNA sense strand
cagguauuauucucacuaa

SEQ ID NO: 572358 - RNA, 19 nt, Homo sapiens
  misc_RNA (1)...(19): siRNA sense strand
agaugaagauucccuuguu

SEQ ID NO: 572359 - RNA, 19 nt, Homo sapiens
  misc_RNA (1)...(19): siRNA sense strand
ccaagucacaucucuuuga

SEQ ID NO: 572360 - RNA, 19 nt, Homo sapiens
  misc_RNA (1)...(19): siRNA sense strand
gcaauaacaagcuuacuac

SEQ ID NO: 572361 - RNA, 19 nt, Homo sapiens
  misc_RNA (1)...(19): siRNA sense strand
gcaccaacaccaugggauu

SEQ ID NO: 572362 - RNA, 19 nt, Homo sapiens
  misc_RNA (1)...(19): siRNA sense strand
aaacaaugccuuugcacaa

SEQ ID NO: 572363 - RNA, 19 nt, Homo sapiens
  misc_RNA (1)...(19): siRNA sense strand
guacaaagaaguugaagac

SEQ ID NO: 572364 - RNA, 19 nt, Homo sapiens
  misc_RNA (1)...(19): siRNA sense strand
gaaggagaugugaauuuga

SEQ ID NO: 572365 - RNA, 19 nt, Homo sapiens
  misc_RNA (1)...(19): siRNA sense strand
gcauuugguucuagcaaca

SEQ ID NO: 572366 - RNA, 19 nt, Homo sapiens
  misc_RNA (1)...(19): siRNA sense strand
aagcaaaccuguugaugag

SEQ ID NO: 572367 - RNA, 19 nt, Homo sapiens
  misc_RNA (1)...(19): siRNA sense strand
aaauccagguggucucuuu

SEQ ID NO: 572368 - RNA, 19 nt, Homo sapiens
  misc_RNA (1)...(19): siRNA sense strand
guguauuacugcuaugaaa

SEQ ID NO: 572369 - RNA, 19 nt, Homo sapiens
  misc_RNA (1)...(19): siRNA sense strand
gaaauaaacacagcaacag

SEQ ID NO: 572370 - RNA, 19 nt, Homo sapiens
  misc_RNA (1)...(19): siRNA sense strand
cagaaagugcuggaaauaa

SEQ ID NO: 572371 - RNA, 19 nt, Homo sapiens
  misc_RNA (1)...(19): siRNA sense strand
agagagauuuaguuuccua

SEQ ID NO: 572372 - RNA, 19 nt, Homo sapiens
  misc_RNA (1)...(19): siRNA sense strand
aaaucuagcuucaccaucu

SEQ ID NO: 572373 - RNA, 19 nt, Homo sapiens
  misc_RNA (1)...(19): siRNA sense strand
cagcacaucaauagucuaa

SEQ ID NO: 572374 - RNA, 19 nt, Homo sapiens
  misc_RNA (1)...(19): siRNA sense strand
ggauggagaugaagauucc

SEQ ID NO: 572375 - RNA, 19 nt, Homo sapiens
  misc_RNA (1)...(19): siRNA sense strand
ggaggagcauccgucuaaa

SEQ ID NO: 572376 - RNA, 19 nt, Homo sapiens
  misc_RNA (1)...(19): siRNA sense strand
caacuaugaaggaagauug

SEQ ID NO: 572377 - RNA, 19 nt, Homo sapiens
  misc_RNA (1)...(19): siRNA sense strand
gcagguauuauucucacua

SEQ ID NO: 572378 - RNA, 19 nt, Homo sapiens
  misc_RNA (1)...(19): siRNA sense strand
ccagcuaccuccacaagca

SEQ ID NO: 572379 - RNA, 19 nt, Homo sapiens
  misc_RNA (1)...(19): siRNA sense strand
ucggaaagguuaugguuca

SEQ ID NO: 572380 - RNA, 19 nt, Homo sapiens
  misc_RNA (1)...(19): siRNA sense strand
gaagaaccuuaauaauagc

SEQ ID NO: 572381 - RNA, 19 nt, Homo sapiens
  misc_RNA (1)...(19): siRNA sense strand
ucaauagucuaacauacuc

SEQ ID NO: 572382 - RNA, 19 nt, Homo sapiens
  misc_RNA (1)...(19): siRNA sense strand
caacugguacagauacuau

SEQ ID NO: 572383 - RNA, 19 nt, Homo sapiens
  misc_RNA (1)...(19): siRNA sense strand
guucuuggguguuuaaggu

SEQ ID NO: 572384 - RNA, 19 nt, Homo sapiens
  misc_RNA (1)...(19): siRNA sense strand
ggugaagggcuaaauagga

SEQ ID NO: 572385 - RNA, 19 nt, Homo sapiens
  misc_RNA (1)...(19): siRNA sense strand
ccagcaggauggagaugaa

SEQ ID NO: 572386 - RNA, 19 nt, Homo sapiens
  misc_RNA (1)...(19): siRNA sense strand
uggaagcaguuucaaggaa

SEQ ID NO: 572387 - RNA, 19 nt, Homo sapiens
  misc_RNA (1)...(19): siRNA sense strand
gaagagagauugaaaccaa

SEQ ID NO: 572388 - RNA, 19 nt, Homo sapiens
  misc_RNA (1)...(19): siRNA sense strand
ggaaagaaguaguugucua

SEQ ID NO: 572389 - RNA, 19 nt, Homo sapiens
  misc_RNA (1)...(19): siRNA sense strand
ggacaggcaucuuuguuug

SEQ ID NO: 572390 - RNA, 19 nt, Homo sapiens
  misc_RNA (1)...(19): siRNA sense strand
acagggagcucaauucaaa

SEQ ID NO: 572391 - RNA, 19 nt, Homo sapiens
  misc_RNA (1)...(19): siRNA sense strand
agaaagugcuggaaauaaa

SEQ ID NO: 572392 - RNA, 19 nt, Homo sapiens
  misc_RNA (1)...(19): siRNA sense strand
gcacaucaauagucuaaca

SEQ ID NO: 572393 - RNA, 19 nt, Homo sapiens
  misc_RNA (1)...(19): siRNA sense strand
gcaaaccuguugaugagaa

SEQ ID NO: 572394 - RNA, 19 nt, Homo sapiens
  misc_RNA (1)...(19): siRNA sense strand
ccacaaauaccaccucuaa

SEQ ID NO: 572395 - RNA, 19 nt, Homo sapiens
  misc_RNA (1)...(19): siRNA sense strand
gaacuucguuuagaggauu

SEQ ID NO: 572396 - RNA, 19 nt, Homo sapiens
  misc_RNA (1)...(19): siRNA sense strand
gaugaagauucccuuguuu

SEQ ID NO: 572397 - RNA, 19 nt, Homo sapiens
  misc_RNA (1)...(19): siRNA sense strand
gaacaaccaaccuaagauu

SEQ ID NO: 572398 - RNA, 19 nt, Homo sapiens
  misc_RNA (1)...(19): siRNA sense strand
ucacuaagguugguuacua

SEQ ID NO: 572399 - RNA, 19 nt, Homo sapiens
  misc_RNA (1)...(19): siRNA sense strand
uggcacaacuucaacauuu

SEQ ID NO: 572400 - RNA, 19 nt, Homo sapiens
  misc_RNA (1)...(19): siRNA sense strand
gaaggaagcagugaagaaa

SEQ ID NO: 572401 - RNA, 19 nt, Homo sapiens
  misc_RNA (1)...(19): siRNA sense strand
gcagaccaauacuggauuu

SEQ ID NO: 572402 - RNA, 19 nt, Homo sapiens
  misc_RNA (1)...(19): siRNA sense strand
cuacuuagaugauaaccaa

SEQ ID NO: 572403 - RNA, 19 nt, Homo sapiens
  misc_RNA (1)...(19): siRNA sense strand
ggagagagauuuaguuucc

SEQ ID NO: 572404 - RNA, 19 nt, Homo sapiens
  misc_RNA (1)...(19): siRNA sense strand
gaaggaagagagauugaaa

SEQ ID NO: 572405 - RNA, 19 nt, Homo sapiens
  misc_RNA (1)...(19): siRNA sense strand
ugaaggagaugugaauuug

SEQ ID NO: 572406 - RNA, 19 nt, Homo sapiens
  misc_RNA (1)...(19): siRNA sense strand
gaaagguuaugguucaauc

SEQ ID NO: 572407 - RNA, 19 nt, Homo sapiens
  misc_RNA (1)...(19): siRNA sense strand
ggucaaagcuggaguuagc

SEQ ID NO: 572408 - RNA, 19 nt, Homo sapiens
  misc_RNA (1)...(19): siRNA sense strand
gugaagggcuaaauaggaa

SEQ ID NO: 572409 - RNA, 19 nt, Homo sapiens
  misc_RNA (1)...(19): siRNA sense strand
caacuggcuuuggcaauuu

SEQ ID NO: 572410 - RNA, 19 nt, Homo sapiens
  misc_RNA (1)...(19): siRNA sense strand
uuacuacaccuacucauua

SEQ ID NO: 572411 - RNA, 19 nt, Homo sapiens
  misc_RNA (1)...(19): siRNA sense strand
ggaggccucuuuggaaauu

SEQ ID NO: 572412 - RNA, 19 nt, Homo sapiens
  misc_RNA (1)...(19): siRNA sense strand
ggaccagucucuucucauc

SEQ ID NO: 572413 - RNA, 19 nt, Homo sapiens
  misc_RNA (1)...(19): siRNA sense strand
ccagaaggcucuuacuaca

SEQ ID NO: 572414 - RNA, 19 nt, Homo sapiens
  misc_RNA (1)...(19): siRNA sense strand
ccaagaagagcauuaagaa

SEQ ID NO: 572415 - RNA, 19 nt, Homo sapiens
  misc_RNA (1)...(19): siRNA sense strand
gaagagcauuaagaaguug

SEQ ID NO: 572416 - RNA, 19 nt, Homo sapiens
  misc_RNA (1)...(19): siRNA sense strand
ggaaggaagcagugaagaa

SEQ ID NO: 572417 - RNA, 19 nt, Homo sapiens
  misc_RNA (1)...(19): siRNA sense strand
aaacaugcgugcugcuuug

SEQ ID NO: 572418 - RNA, 19 nt, Homo sapiens
  misc_RNA (1)...(19): siRNA sense strand
ccaggaggauuguuuggaa

SEQ ID NO: 572419 - RNA, 19 nt, Homo sapiens
  misc_RNA (1)...(19): siRNA sense strand
gauaucaacuaugaaggaa

SEQ ID NO: 572420 - RNA, 19 nt, Homo sapiens
  misc_RNA (1)...(19): siRNA sense strand
ggaguuuggccaacagaua

SEQ ID NO: 572421 - RNA, 19 nt, Homo sapiens
  misc_RNA (1)...(19): siRNA sense strand
gcacccagcagguauuauu

SEQ ID NO: 572422 - RNA, 19 nt, Homo sapiens
  misc_RNA (1)...(19): siRNA sense strand
ggaaauaaacacagcaaca

SEQ ID NO: 572423 - RNA, 19 nt, Homo sapiens
  misc_RNA (1)...(19): siRNA sense strand
agaagagcauuaagaaguu

SEQ ID NO: 572424 - RNA, 19 nt, Homo sapiens
  misc_RNA (1)...(19): siRNA sense strand
gcacuaacauaaguaccaa

SEQ ID NO: 572425 - RNA, 19 nt, Homo sapiens
  misc_RNA (1)...(19): siRNA sense strand
ggaaacagggagcucaauu

SEQ ID NO: 572426 - RNA, 19 nt, Homo sapiens
  misc_RNA (1)...(19): siRNA sense strand
uaucaacuaugaaggaaga

SEQ ID NO: 572427 - RNA, 19 nt, Homo sapiens
  misc_RNA (1)...(19): siRNA sense strand
ccagaucgccuugcugaua

SEQ ID NO: 572428 - RNA, 19 nt, Homo sapiens
  misc_RNA (1)...(19): siRNA sense strand
gaacuaguacaacuggauu

SEQ ID NO: 572429 - RNA, 19 nt, Homo sapiens
  misc_RNA (1)...(19): siRNA sense strand
gaaacagggagcucaauuc

SEQ ID NO: 572430 - RNA, 19 nt, Homo sapiens
  misc_RNA (1)...(19): siRNA sense strand
gaagaaggaagagagauug

SEQ ID NO: 572431 - RNA, 19 nt, Homo sapiens
  misc_RNA (1)...(19): siRNA sense strand
guaccaagcaccaguguau

SEQ ID NO: 572432 - RNA, 19 nt, Homo sapiens
  misc_RNA (1)...(19): siRNA sense strand
uaagcaaaccuguugauga

SEQ ID NO: 572433 - RNA, 19 nt, Homo sapiens
  misc_RNA (1)...(19): siRNA sense strand
cuacugggacuacuauuaa

SEQ ID NO: 572434 - RNA, 19 nt, Homo sapiens
  misc_RNA (1)...(19): siRNA sense strand
gcaagucacuagaggaacu

SEQ ID NO: 572435 - RNA, 19 nt, Homo sapiens
  misc_RNA (1)...(19): siRNA sense strand
guugaagacugcuccuuug

SEQ ID NO: 572436 - RNA, 19 nt, Homo sapiens
  misc_RNA (1)...(19): siRNA sense strand
uugcugauaucaacuauga

SEQ ID NO: 572437 - RNA, 19 nt, Homo sapiens
  misc_RNA (1)...(19): siRNA sense strand
uaggaaggcugaaguuaca

SEQ ID NO: 572438 - RNA, 19 nt, Homo sapiens
  misc_RNA (1)...(19): siRNA sense strand
ugauaccauuguugcauua

SEQ ID NO: 572439 - RNA, 19 nt, Homo sapiens
  misc_RNA (1)...(19): siRNA sense strand
cuacaccuacucauuauaa

SEQ ID NO: 572440 - RNA, 19 nt, Homo sapiens
  misc_RNA (1)...(19): siRNA sense strand
acaaauaccagugggaaua

SEQ ID NO: 572441 - RNA, 19 nt, Homo sapiens
  misc_RNA (1)...(19): siRNA sense strand
guacagauacuauggucaa

SEQ ID NO: 572442 - RNA, 19 nt, Homo sapiens
  misc_RNA (1)...(19): siRNA sense strand
gagcauccgucuaaaacua

SEQ ID NO: 572443 - RNA, 19 nt, Homo sapiens
  misc_RNA (1)...(19): siRNA sense strand
uagaggaacuucguuuaga

SEQ ID NO: 572444 - RNA, 19 nt, Homo sapiens
  misc_RNA (1)...(19): siRNA sense strand
caacagaaucagcagacua

SEQ ID NO: 572445 - RNA, 19 nt, Homo sapiens
  misc_RNA (1)...(19): siRNA sense strand
uguuuaaggucucccauuu

SEQ ID NO: 572446 - RNA, 19 nt, Homo sapiens
  misc_RNA (1)...(19): siRNA sense strand
gaguuuggccaacagauaa

SEQ ID NO: 572447 - RNA, 19 nt, Homo sapiens
  misc_RNA (1)...(19): siRNA sense strand
gguuaugguucaaucuauu

SEQ ID NO: 572448 - RNA, 19 nt, Homo sapiens
  misc_RNA (1)...(19): siRNA sense strand
ggaugaccgagaagaaaua

SEQ ID NO: 572449 - RNA, 19 nt, Homo sapiens
  misc_RNA (1)...(19): siRNA sense strand
gcaacaguguggaugauac

SEQ ID NO: 572450 - RNA, 19 nt, Homo sapiens
  misc_RNA (1)...(19): siRNA sense strand
caagucacaucucuuugau

SEQ ID NO: 572451 - RNA, 19 nt, Homo sapiens
  misc_RNA (1)...(19): siRNA sense strand
ugucagacccuaagaagaa

SEQ ID NO: 572452 - RNA, 19 nt, Homo sapiens
  misc_RNA (1)...(19): siRNA sense strand
caacaccaugggauuauuu

SEQ ID NO: 572453 - RNA, 19 nt, Homo sapiens
  misc_RNA (1)...(19): siRNA sense strand
ggcaauaacaagcuuacua

SEQ ID NO: 572454 - RNA, 19 nt, Homo sapiens
  misc_RNA (1)...(19): siRNA sense strand
cagaucgccuugcugauau

SEQ ID NO: 572455 - RNA, 19 nt, Homo sapiens
  misc_RNA (1)...(19): siRNA sense strand
gggaacaaccaaccuaaga

SEQ ID NO: 572456 - RNA, 19 nt, Homo sapiens
  misc_RNA (1)...(19): siRNA sense strand
acaaauaccaccucuaauc

SEQ ID NO: 572457 - RNA, 19 nt, Homo sapiens
  misc_RNA (1)...(19): siRNA sense strand
cagguauuauucucacuaa

SEQ ID NO: 572458 - RNA, 19 nt, Homo sapiens
  misc_RNA (1)...(19): siRNA sense strand
agaugaagauucccuuguu

SEQ ID NO: 572459 - RNA, 19 nt, Homo sapiens
  misc_RNA (1)...(19): siRNA sense strand
ccaagucacaucucuuuga

SEQ ID NO: 572460 - RNA, 19 nt, Homo sapiens
  misc_RNA (1)...(19): siRNA sense strand
gcaauaacaagcuuacuac

SEQ ID NO: 572461 - RNA, 19 nt, Homo sapiens
  misc_RNA (1)...(19): siRNA sense strand
gcaccaacaccaugggauu

SEQ ID NO: 572462 - RNA, 19 nt, Homo sapiens
  misc_RNA (1)...(19): siRNA sense strand
aaacaaugccuuugcacaa

SEQ ID NO: 572463 - RNA, 19 nt, Homo sapiens
  misc_RNA (1)...(19): siRNA sense strand
guacaaagaaguugaagac

SEQ ID NO: 572464 - RNA, 19 nt, Homo sapiens
  misc_RNA (1)...(19): siRNA sense strand
gaaggagaugugaauuuga

SEQ ID NO: 572465 - RNA, 19 nt, Homo sapiens
  misc_RNA (1)...(19): siRNA sense strand
gcauuugguucuagcaaca

SEQ ID NO: 572466 - RNA, 19 nt, Homo sapiens
  misc_RNA (1)...(19): siRNA sense strand
aagcaaaccuguugaugag

SEQ ID NO: 572467 - RNA, 19 nt, Homo sapiens
  misc_RNA (1)...(19): siRNA sense strand
aaauccagguggucucuuu

SEQ ID NO: 572468 - RNA, 19 nt, Homo sapiens
  misc_RNA (1)...(19): siRNA sense strand
guguauuacugcuaugaaa

SEQ ID NO: 572469 - RNA, 19 nt, Homo sapiens
  misc_RNA (1)...(19): siRNA sense strand
gaaauaaacacagcaacag

SEQ ID NO: 572470 - RNA, 19 nt, Homo sapiens
  misc_RNA (1)...(19): siRNA sense strand
cagaaagugcuggaaauaa

SEQ ID NO: 572471 - RNA, 19 nt, Homo sapiens
  misc_RNA (1)...(19): siRNA sense strand
agagagauuuaguuuccua

SEQ ID NO: 572472 - RNA, 19 nt, Homo sapiens
  misc_RNA (1)...(19): siRNA sense strand
aaaucuagcuucaccaucu

SEQ ID NO: 572473 - RNA, 19 nt, Homo sapiens
  misc_RNA (1)...(19): siRNA sense strand
cagcacaucaauagucuaa

SEQ ID NO: 572474 - RNA, 19 nt, Homo sapiens
  misc_RNA (1)...(19): siRNA sense strand
ggauggagaugaagauucc

SEQ ID NO: 572475 - RNA, 19 nt, Homo sapiens
  misc_RNA (1)...(19): siRNA sense strand
ggaggagcauccgucuaaa

SEQ ID NO: 572476 - RNA, 19 nt, Homo sapiens
  misc_RNA (1)...(19): siRNA sense strand
caacuaugaaggaagauug

SEQ ID NO: 572477 - RNA, 19 nt, Homo sapiens
  misc_RNA (1)...(19): siRNA sense strand
gcagguauuauucucacua

SEQ ID NO: 572478 - RNA, 19 nt, Homo sapiens
  misc_RNA (1)...(19): siRNA sense strand
ccagcuaccuccacaagca

SEQ ID NO: 572479 - RNA, 19 nt, Homo sapiens
  misc_RNA (1)...(19): siRNA sense strand
ucggaaagguuaugguuca

SEQ ID NO: 572480 - RNA, 19 nt, Homo sapiens
  misc_RNA (1)...(19): siRNA sense strand
gaagaaccuuaauaauagc

SEQ ID NO: 572481 - RNA, 19 nt, Homo sapiens
  misc_RNA (1)...(19): siRNA sense strand
ucaauagucuaacauacuc

SEQ ID NO: 572482 - RNA, 19 nt, Homo sapiens
  misc_RNA (1)...(19): siRNA sense strand
caacugguacagauacuau

SEQ ID NO: 572483 - RNA, 19 nt, Homo sapiens
  misc_RNA (1)...(19): siRNA sense strand
guucuuggguguuuaaggu

SEQ ID NO: 572484 - RNA, 19 nt, Homo sapiens
  misc_RNA (1)...(19): siRNA sense strand
ggugaagggcuaaauagga

SEQ ID NO: 572485 - RNA, 19 nt, Homo sapiens
  misc_RNA (1)...(19): siRNA sense strand
ccagcaggauggagaugaa

SEQ ID NO: 572486 - RNA, 19 nt, Homo sapiens
  misc_RNA (1)...(19): siRNA sense strand
uggaagcaguuucaaggaa

SEQ ID NO: 572487 - RNA, 19 nt, Homo sapiens
  misc_RNA (1)...(19): siRNA sense strand
gaagagagauugaaaccaa

SEQ ID NO: 572488 - RNA, 19 nt, Homo sapiens
  misc_RNA (1)...(19): siRNA sense strand
ggaaagaaguaguugucua

SEQ ID NO: 572489 - RNA, 19 nt, Homo sapiens
  misc_RNA (1)...(19): siRNA sense strand
ggacaggcaucuuuguuug

SEQ ID NO: 572490 - RNA, 19 nt, Homo sapiens
  misc_RNA (1)...(19): siRNA sense strand
acagggagcucaauucaaa

SEQ ID NO: 572491 - RNA, 19 nt, Homo sapiens
  misc_RNA (1)...(19): siRNA sense strand
agaaagugcuggaaauaaa

SEQ ID NO: 572492 - RNA, 19 nt, Homo sapiens
  misc_RNA (1)...(19): siRNA sense strand
gcacaucaauagucuaaca

SEQ ID NO: 572493 - RNA, 19 nt, Homo sapiens
  misc_RNA (1)...(19): siRNA sense strand
gcaaaccuguugaugagaa

SEQ ID NO: 572494 - RNA, 19 nt, Homo sapiens
  misc_RNA (1)...(19): siRNA sense strand
ccacaaauaccaccucuaa

SEQ ID NO: 572495 - RNA, 19 nt, Homo sapiens
  misc_RNA (1)...(19): siRNA sense strand
gaacuucguuuagaggauu

SEQ ID NO: 572496 - RNA, 19 nt, Homo sapiens
  misc_RNA (1)...(19): siRNA sense strand
gaugaagauucccuuguuu

SEQ ID NO: 572497 - RNA, 19 nt, Homo sapiens
  misc_RNA (1)...(19): siRNA sense strand
gaacaaccaaccuaagauu

SEQ ID NO: 572498 - RNA, 19 nt, Homo sapiens
  misc_RNA (1)...(19): siRNA sense strand
ucacuaagguugguuacua

SEQ ID NO: 572499 - RNA, 19 nt, Homo sapiens
  misc_RNA (1)...(19): siRNA sense strand
uggcacaacuucaacauuu

SEQ ID NO: 572500 - RNA, 19 nt, Homo sapiens
  misc_RNA (1)...(19): siRNA sense strand
gaaggaagcagugaagaaa

SEQ ID NO: 572501 - RNA, 19 nt, Homo sapiens
  misc_RNA (1)...(19): siRNA sense strand
gcagaccaauacuggauuu

SEQ ID NO: 572502 - RNA, 19 nt, Homo sapiens
  misc_RNA (1)...(19): siRNA sense strand
cuacuuagaugauaaccaa

SEQ ID NO: 572503 - RNA, 19 nt, Homo sapiens
  misc_RNA (1)...(19): siRNA sense strand
ggagagagauuuaguuucc

SEQ ID NO: 572504 - RNA, 19 nt, Homo sapiens
  misc_RNA (1)...(19): siRNA sense strand
gaaggaagagagauugaaa

SEQ ID NO: 572505 - RNA, 19 nt, Homo sapiens
  misc_RNA (1)...(19): siRNA sense strand
ugaaggagaugugaauuug

SEQ ID NO: 572506 - RNA, 19 nt, Homo sapiens
  misc_RNA (1)...(19): siRNA sense strand
gaaagguuaugguucaauc

SEQ ID NO: 572507 - RNA, 19 nt, Homo sapiens
  misc_RNA (1)...(19): siRNA sense strand
ggucaaagcuggaguuagc

SEQ ID NO: 572508 - RNA, 19 nt, Homo sapiens
  misc_RNA (1)...(19): siRNA sense strand
gugaagggcuaaauaggaa

SEQ ID NO: 572509 - RNA, 19 nt, Homo sapiens
  misc_RNA (1)...(19): siRNA sense strand
caacuggcuuuggcaauuu

SEQ ID NO: 572510 - RNA, 19 nt, Homo sapiens
  misc_RNA (1)...(19): siRNA sense strand
uuacuacaccuacucauua

SEQ ID NO: 572511 - RNA, 19 nt, Homo sapiens
  misc_RNA (1)...(19): siRNA sense strand
ggaggccucuuuggaaauu

SEQ ID NO: 572512 - RNA, 19 nt, Homo sapiens
  misc_RNA (1)...(19): siRNA sense strand
ggaccagucucuucucauc

SEQ ID NO: 572513 - RNA, 19 nt, Homo sapiens
  misc_RNA (1)...(19): siRNA sense strand
ccagaaggcucuuacuaca

SEQ ID NO: 572514 - RNA, 19 nt, Homo sapiens
  misc_RNA (1)...(19): siRNA sense strand
ccaagaagagcauuaagaa

SEQ ID NO: 572515 - RNA, 19 nt, Homo sapiens
  misc_RNA (1)...(19): siRNA sense strand
gaagagcauuaagaaguug

SEQ ID NO: 572516 - RNA, 19 nt, Homo sapiens
  misc_RNA (1)...(19): siRNA sense strand
ggaaggaagcagugaagaa

SEQ ID NO: 572517 - RNA, 19 nt, Homo sapiens
  misc_RNA (1)...(19): siRNA sense strand
aaacaugcgugcugcuuug

SEQ ID NO: 572518 - RNA, 19 nt, Homo sapiens
  misc_RNA (1)...(19): siRNA sense strand
ccaggaggauuguuuggaa

SEQ ID NO: 572519 - RNA, 19 nt, Homo sapiens
  misc_RNA (1)...(19): siRNA sense strand
gauaucaacuaugaaggaa

SEQ ID NO: 572520 - RNA, 19 nt, Homo sapiens
  misc_RNA (1)...(19): siRNA sense strand
ggaguuuggccaacagaua

SEQ ID NO: 572521 - RNA, 19 nt, Homo sapiens
  misc_RNA (1)...(19): siRNA sense strand
gcacccagcagguauuauu

SEQ ID NO: 572522 - RNA, 19 nt, Homo sapiens
  misc_RNA (1)...(19): siRNA sense strand
ggaaauaaacacagcaaca

SEQ ID NO: 572523 - RNA, 19 nt, Homo sapiens
  misc_RNA (1)...(19): siRNA sense strand
agaagagcauuaagaaguu

SEQ ID NO: 572524 - RNA, 19 nt, Homo sapiens
  misc_RNA (1)...(19): siRNA sense strand
gcacuaacauaaguaccaa

SEQ ID NO: 572525 - RNA, 19 nt, Homo sapiens
  misc_RNA (1)...(19): siRNA sense strand
ggaaacagggagcucaauu

SEQ ID NO: 572526 - RNA, 19 nt, Homo sapiens
  misc_RNA (1)...(19): siRNA sense strand
uaucaacuaugaaggaaga

SEQ ID NO: 572527 - RNA, 19 nt, Homo sapiens
  misc_RNA (1)...(19): siRNA sense strand
ccagaucgccuugcugaua

SEQ ID NO: 572528 - RNA, 19 nt, Homo sapiens
  misc_RNA (1)...(19): siRNA sense strand
gaacuaguacaacuggauu

SEQ ID NO: 572529 - RNA, 19 nt, Homo sapiens
  misc_RNA (1)...(19): siRNA sense strand
gaaacagggagcucaauuc

SEQ ID NO: 572530 - RNA, 19 nt, Homo sapiens
  misc_RNA (1)...(19): siRNA sense strand
gaagaaggaagagagauug

SEQ ID NO: 572531 - RNA, 19 nt, Homo sapiens
  misc_RNA (1)...(19): siRNA sense strand
guaccaagcaccaguguau

SEQ ID NO: 572532 - RNA, 19 nt, Homo sapiens
  misc_RNA (1)...(19): siRNA sense strand
uaagcaaaccuguugauga

SEQ ID NO: 572533 - RNA, 19 nt, Homo sapiens
  misc_RNA (1)...(19): siRNA sense strand
cuacugggacuacuauuaa

SEQ ID NO: 572534 - RNA, 19 nt, Homo sapiens
  misc_RNA (1)...(19): siRNA sense strand
gcaagucacuagaggaacu

SEQ ID NO: 572535 - RNA, 19 nt, Homo sapiens
  misc_RNA (1)...(19): siRNA sense strand
guugaagacugcuccuuug

SEQ ID NO: 572536 - RNA, 19 nt, Homo sapiens
  misc_RNA (1)...(19): siRNA sense strand
uugcugauaucaacuauga

SEQ ID NO: 572537 - RNA, 19 nt, Homo sapiens
  misc_RNA (1)...(19): siRNA sense strand
uaggaaggcugaaguuaca

SEQ ID NO: 572538 - RNA, 19 nt, Homo sapiens
  misc_RNA (1)...(19): siRNA sense strand
ugauaccauuguugcauua

SEQ ID NO: 572539 - RNA, 19 nt, Homo sapiens
  misc_RNA (1)...(19): siRNA sense strand
cuacaccuacucauuauaa

SEQ ID NO: 572540 - RNA, 19 nt, Homo sapiens
  misc_RNA (1)...(19): siRNA sense strand
acaaauaccagugggaaua

SEQ ID NO: 572541 - RNA, 19 nt, Homo sapiens
  misc_RNA (1)...(19): siRNA sense strand
guacagauacuauggucaa

SEQ ID NO: 572542 - RNA, 19 nt, Homo sapiens
  misc_RNA (1)...(19): siRNA sense strand
gagcauccgucuaaaacua

SEQ ID NO: 572543 - RNA, 19 nt, Homo sapiens
  misc_RNA (1)...(19): siRNA sense strand
uagaggaacuucguuuaga

SEQ ID NO: 572544 - RNA, 19 nt, Homo sapiens
  misc_RNA (1)...(19): siRNA sense strand
caacagaaucagcagacua

SEQ ID NO: 572545 - RNA, 19 nt, Homo sapiens
  misc_RNA (1)...(19): siRNA sense strand
uguuuaaggucucccauuu

SEQ ID NO: 572546 - RNA, 19 nt, Homo sapiens
  misc_RNA (1)...(19): siRNA sense strand
gaguuuggccaacagauaa

SEQ ID NO: 572547 - RNA, 19 nt, Homo sapiens
  misc_RNA (1)...(19): siRNA sense strand
gguuaugguucaaucuauu

SEQ ID NO: 572548 - RNA, 19 nt, Homo sapiens
  misc_RNA (1)...(19): siRNA sense strand
ggaugaccgagaagaaaua

SEQ ID NO: 572549 - RNA, 19 nt, Homo sapiens
  misc_RNA (1)...(19): siRNA sense strand
gcaacaguguggaugauac

SEQ ID NO: 572550 - RNA, 19 nt, Homo sapiens
  misc_RNA (1)...(19): siRNA sense strand
caagucacaucucuuugau

SEQ ID NO: 572551 - RNA, 19 nt, Homo sapiens
  misc_RNA (1)...(19): siRNA sense strand
ugucagacccuaagaagaa

SEQ ID NO: 572552 - RNA, 19 nt, Homo sapiens
  misc_RNA (1)...(19): siRNA sense strand
caacaccaugggauuauuu

SEQ ID NO: 572553 - RNA, 19 nt, Homo sapiens
  misc_RNA (1)...(19): siRNA sense strand
ggcaauaacaagcuuacua

SEQ ID NO: 572554 - RNA, 19 nt, Homo sapiens
  misc_RNA (1)...(19): siRNA sense strand
cagaucgccuugcugauau

SEQ ID NO: 572555 - RNA, 19 nt, Homo sapiens
  misc_RNA (1)...(19): siRNA sense strand
gggaacaaccaaccuaaga

SEQ ID NO: 572556 - RNA, 19 nt, Homo sapiens
  misc_RNA (1)...(19): siRNA sense strand
acaaauaccaccucuaauc

SEQ ID NO: 572557 - RNA, 19 nt, Homo sapiens
  misc_RNA (1)...(19): siRNA sense strand
cagguauuauucucacuaa

SEQ ID NO: 572558 - RNA, 19 nt, Homo sapiens
  misc_RNA (1)...(19): siRNA sense strand
agaugaagauucccuuguu

SEQ ID NO: 572559 - RNA, 19 nt, Homo sapiens
  misc_RNA (1)...(19): siRNA sense strand
ccaagucacaucucuuuga

SEQ ID NO: 572560 - RNA, 19 nt, Homo sapiens
  misc_RNA (1)...(19): siRNA sense strand
gcaauaacaagcuuacuac

SEQ ID NO: 572561 - RNA, 19 nt, Homo sapiens
  misc_RNA (1)...(19): siRNA sense strand
gcaccaacaccaugggauu

SEQ ID NO: 572562 - RNA, 19 nt, Homo sapiens
  misc_RNA (1)...(19): siRNA sense strand
aaacaaugccuuugcacaa

SEQ ID NO: 572563 - RNA, 19 nt, Homo sapiens
  misc_RNA (1)...(19): siRNA sense strand
guacaaagaaguugaagac

SEQ ID NO: 572564 - RNA, 19 nt, Homo sapiens
  misc_RNA (1)...(19): siRNA sense strand
gaaggagaugugaauuuga

SEQ ID NO: 572565 - RNA, 19 nt, Homo sapiens
  misc_RNA (1)...(19): siRNA sense strand
gcauuugguucuagcaaca

SEQ ID NO: 572566 - RNA, 19 nt, Homo sapiens
  misc_RNA (1)...(19): siRNA sense strand
aagcaaaccuguugaugag

SEQ ID NO: 572567 - RNA, 19 nt, Homo sapiens
  misc_RNA (1)...(19): siRNA sense strand
aaauccagguggucucuuu

SEQ ID NO: 572568 - RNA, 19 nt, Homo sapiens
  misc_RNA (1)...(19): siRNA sense strand
guguauuacugcuaugaaa

SEQ ID NO: 572569 - RNA, 19 nt, Homo sapiens
  misc_RNA (1)...(19): siRNA sense strand
gaaauaaacacagcaacag

SEQ ID NO: 572570 - RNA, 19 nt, Homo sapiens
  misc_RNA (1)...(19): siRNA sense strand
cagaaagugcuggaaauaa

SEQ ID NO: 572571 - RNA, 19 nt, Homo sapiens
  misc_RNA (1)...(19): siRNA sense strand
agagagauuuaguuuccua

SEQ ID NO: 572572 - RNA, 19 nt, Homo sapiens
  misc_RNA (1)...(19): siRNA sense strand
aaaucuagcuucaccaucu

SEQ ID NO: 572573 - RNA, 19 nt, Homo sapiens
  misc_RNA (1)...(19): siRNA sense strand
cagcacaucaauagucuaa

SEQ ID NO: 572574 - RNA, 19 nt, Homo sapiens
  misc_RNA (1)...(19): siRNA sense strand
ggauggagaugaagauucc

SEQ ID NO: 572575 - RNA, 19 nt, Homo sapiens
  misc_RNA (1)...(19): siRNA sense strand
ggaggagcauccgucuaaa

SEQ ID NO: 572576 - RNA, 19 nt, Homo sapiens
  misc_RNA (1)...(19): siRNA sense strand
caacuaugaaggaagauug

SEQ ID NO: 572577 - RNA, 19 nt, Homo sapiens
  misc_RNA (1)...(19): siRNA sense strand
gcagguauuauucucacua

SEQ ID NO: 572578 - RNA, 19 nt, Homo sapiens
  misc_RNA (1)...(19): siRNA sense strand
ccagcuaccuccacaagca

SEQ ID NO: 572579 - RNA, 19 nt, Homo sapiens
  misc_RNA (1)...(19): siRNA sense strand
ucggaaagguuaugguuca

SEQ ID NO: 572580 - RNA, 19 nt, Homo sapiens
  misc_RNA (1)...(19): siRNA sense strand
gaagaaccuuaauaauagc

SEQ ID NO: 572581 - RNA, 19 nt, Homo sapiens
  misc_RNA (1)...(19): siRNA sense strand
ucaauagucuaacauacuc

SEQ ID NO: 572582 - RNA, 19 nt, Homo sapiens
  misc_RNA (1)...(19): siRNA sense strand
caacugguacagauacuau

SEQ ID NO: 572583 - RNA, 19 nt, Homo sapiens
  misc_RNA (1)...(19): siRNA sense strand
guucuuggguguuuaaggu

SEQ ID NO: 572584 - RNA, 19 nt, Homo sapiens
  misc_RNA (1)...(19): siRNA sense strand
ggugaagggcuaaauagga

SEQ ID NO: 572585 - RNA, 19 nt, Homo sapiens
  misc_RNA (1)...(19): siRNA sense strand
ccagcaggauggagaugaa

SEQ ID NO: 572586 - RNA, 19 nt, Homo sapiens
  misc_RNA (1)...(19): siRNA sense strand
uggaagcaguuucaaggaa

SEQ ID NO: 572587 - RNA, 19 nt, Homo sapiens
  misc_RNA (1)...(19): siRNA sense strand
gaagagagauugaaaccaa

SEQ ID NO: 572588 - RNA, 19 nt, Homo sapiens
  misc_RNA (1)...(19): siRNA sense strand
ggaaagaaguaguugucua

SEQ ID NO: 572589 - RNA, 19 nt, Homo sapiens
  misc_RNA (1)...(19): siRNA sense strand
ggacaggcaucuuuguuug

SEQ ID NO: 572590 - RNA, 19 nt, Homo sapiens
  misc_RNA (1)...(19): siRNA sense strand
acagggagcucaauucaaa

SEQ ID NO: 572591 - RNA, 19 nt, Homo sapiens
  misc_RNA (1)...(19): siRNA sense strand
agaaagugcuggaaauaaa

SEQ ID NO: 572592 - RNA, 19 nt, Homo sapiens
  misc_RNA (1)...(19): siRNA sense strand
gcacaucaauagucuaaca

SEQ ID NO: 572593 - RNA, 19 nt, Homo sapiens
  misc_RNA (1)...(19): siRNA sense strand
gcaaaccuguugaugagaa

SEQ ID NO: 572594 - RNA, 19 nt, Homo sapiens
  misc_RNA (1)...(19): siRNA sense strand
ccacaaauaccaccucuaa

SEQ ID NO: 572595 - RNA, 19 nt, Homo sapiens
  misc_RNA (1)...(19): siRNA sense strand
gaacuucguuuagaggauu

SEQ ID NO: 572596 - RNA, 19 nt, Homo sapiens
  misc_RNA (1)...(19): siRNA sense strand
gaugaagauucccuuguuu

SEQ ID NO: 572597 - RNA, 19 nt, Homo sapiens
  misc_RNA (1)...(19): siRNA sense strand
gaacaaccaaccuaagauu

SEQ ID NO: 572598 - RNA, 19 nt, Homo sapiens
  misc_RNA (1)...(19): siRNA sense strand
ucacuaagguugguuacua

SEQ ID NO: 572599 - RNA, 19 nt, Homo sapiens
  misc_RNA (1)...(19): siRNA sense strand
uggcacaacuucaacauuu

SEQ ID NO: 572600 - RNA, 19 nt, Homo sapiens
  misc_RNA (1)...(19): siRNA sense strand
gaaggaagcagugaagaaa

SEQ ID NO: 572601 - RNA, 19 nt, Homo sapiens
  misc_RNA (1)...(19): siRNA sense strand
gcagaccaauacuggauuu

SEQ ID NO: 572602 - RNA, 19 nt, Homo sapiens
  misc_RNA (1)...(19): siRNA sense strand
cuacuuagaugauaaccaa

SEQ ID NO: 572603 - RNA, 19 nt, Homo sapiens
  misc_RNA (1)...(19): siRNA sense strand
ggagagagauuuaguuucc

SEQ ID NO: 572604 - RNA, 19 nt, Homo sapiens
  misc_RNA (1)...(19): siRNA sense strand
gaaggaagagagauugaaa

SEQ ID NO: 572605 - RNA, 19 nt, Homo sapiens
  misc_RNA (1)...(19): siRNA sense strand
ugaaggagaugugaauuug

SEQ ID NO: 572606 - RNA, 19 nt, Homo sapiens
  misc_RNA (1)...(19): siRNA sense strand
gaaagguuaugguucaauc

SEQ ID NO: 572607 - RNA, 19 nt, Homo sapiens
  misc_RNA (1)...(19): siRNA sense strand
ggucaaagcuggaguuagc

SEQ ID NO: 572608 - RNA, 19 nt, Homo sapiens
  misc_RNA (1)...(19): siRNA sense strand
gugaagggcuaaauaggaa

SEQ ID NO: 572609 - RNA, 19 nt, Homo sapiens
  misc_RNA (1)...(19): siRNA sense strand
caacuggcuuuggcaauuu

SEQ ID NO: 572610 - RNA, 19 nt, Homo sapiens
  misc_RNA (1)...(19): siRNA sense strand
uuacuacaccuacucauua

SEQ ID NO: 572611 - RNA, 19 nt, Homo sapiens
  misc_RNA (1)...(19): siRNA sense strand
ggaggccucuuuggaaauu

SEQ ID NO: 572612 - RNA, 19 nt, Homo sapiens
  misc_RNA (1)...(19): siRNA sense strand
ggaccagucucuucucauc

SEQ ID NO: 572613 - RNA, 19 nt, Homo sapiens
  misc_RNA (1)...(19): siRNA sense strand
ccagaaggcucuuacuaca

SEQ ID NO: 572614 - RNA, 19 nt, Homo sapiens
  misc_RNA (1)...(19): siRNA sense strand
ccaagaagagcauuaagaa

SEQ ID NO: 572615 - RNA, 19 nt, Homo sapiens
  misc_RNA (1)...(19): siRNA sense strand
gaagagcauuaagaaguug

SEQ ID NO: 572616 - RNA, 19 nt, Homo sapiens
  misc_RNA (1)...(19): siRNA sense strand
ggaaggaagcagugaagaa

SEQ ID NO: 572617 - RNA, 19 nt, Homo sapiens
  misc_RNA (1)...(19): siRNA sense strand
aaacaugcgugcugcuuug

SEQ ID NO: 572618 - RNA, 19 nt, Homo sapiens
  misc_RNA (1)...(19): siRNA sense strand
ccaggaggauuguuuggaa

SEQ ID NO: 572619 - RNA, 19 nt, Homo sapiens
  misc_RNA (1)...(19): siRNA sense strand
gauaucaacuaugaaggaa

SEQ ID NO: 572620 - RNA, 19 nt, Homo sapiens
  misc_RNA (1)...(19): siRNA sense strand
ggaguuuggccaacagaua

SEQ ID NO: 572621 - RNA, 19 nt, Homo sapiens
  misc_RNA (1)...(19): siRNA sense strand
gcacccagcagguauuauu

SEQ ID NO: 572622 - RNA, 19 nt, Homo sapiens
  misc_RNA (1)...(19): siRNA sense strand
ggaaauaaacacagcaaca

SEQ ID NO: 572623 - RNA, 19 nt, Homo sapiens
  misc_RNA (1)...(19): siRNA sense strand
agaagagcauuaagaaguu

SEQ ID NO: 572624 - RNA, 19 nt, Homo sapiens
  misc_RNA (1)...(19): siRNA sense strand
gcacuaacauaaguaccaa

SEQ ID NO: 572625 - RNA, 19 nt, Homo sapiens
  misc_RNA (1)...(19): siRNA sense strand
ggaaacagggagcucaauu

SEQ ID NO: 572626 - RNA, 19 nt, Homo sapiens
  misc_RNA (1)...(19): siRNA sense strand
uaucaacuaugaaggaaga

SEQ ID NO: 572627 - RNA, 19 nt, Homo sapiens
  misc_RNA (1)...(19): siRNA sense strand
ccagaucgccuugcugaua

SEQ ID NO: 572628 - RNA, 19 nt, Homo sapiens
  misc_RNA (1)...(19): siRNA sense strand
gaacuaguacaacuggauu

SEQ ID NO: 572629 - RNA, 19 nt, Homo sapiens
  misc_RNA (1)...(19): siRNA sense strand
gaaacagggagcucaauuc

SEQ ID NO: 572630 - RNA, 19 nt, Homo sapiens
  misc_RNA (1)...(19): siRNA sense strand
gaagaaggaagagagauug

SEQ ID NO: 572631 - RNA, 19 nt, Homo sapiens
  misc_RNA (1)...(19): siRNA sense strand
guaccaagcaccaguguau

SEQ ID NO: 572632 - RNA, 19 nt, Homo sapiens
  misc_RNA (1)...(19): siRNA sense strand
uaagcaaaccuguugauga

SEQ ID NO: 572633 - RNA, 19 nt, Homo sapiens
  misc_RNA (1)...(19): siRNA sense strand
cuacugggacuacuauuaa

SEQ ID NO: 572634 - RNA, 19 nt, Homo sapiens
  misc_RNA (1)...(19): siRNA sense strand
gcaagucacuagaggaacu

SEQ ID NO: 572635 - RNA, 19 nt, Homo sapiens
  misc_RNA (1)...(19): siRNA sense strand
guugaagacugcuccuuug

SEQ ID NO: 572636 - RNA, 19 nt, Homo sapiens
  misc_RNA (1)...(19): siRNA sense strand
uugcugauaucaacuauga

SEQ ID NO: 572637 - RNA, 19 nt, Homo sapiens
  misc_RNA (1)...(19): siRNA sense strand
uaggaaggcugaaguuaca

SEQ ID NO: 572638 - RNA, 19 nt, Homo sapiens
  misc_RNA (1)...(19): siRNA sense strand
ugauaccauuguugcauua

SEQ ID NO: 572639 - RNA, 19 nt, Homo sapiens
  misc_RNA (1)...(19): siRNA sense strand
cuacaccuacucauuauaa

SEQ ID NO: 572640 - RNA, 19 nt, Homo sapiens
  misc_RNA (1)...(19): siRNA sense strand
acaaauaccagugggaaua

SEQ ID NO: 572641 - RNA, 19 nt, Homo sapiens
  misc_RNA (1)...(19): siRNA sense strand
guacagauacuauggucaa

SEQ ID NO: 572642 - RNA, 19 nt, Homo sapiens
  misc_RNA (1)...(19): siRNA sense strand
gagcauccgucuaaaacua

SEQ ID NO: 572643 - RNA, 19 nt, Homo sapiens
  misc_RNA (1)...(19): siRNA sense strand
uagaggaacuucguuuaga

SEQ ID NO: 572644 - RNA, 19 nt, Homo sapiens
  misc_RNA (1)...(19): siRNA sense strand
caacagaaucagcagacua

SEQ ID NO: 572645 - RNA, 19 nt, Homo sapiens
  misc_RNA (1)...(19): siRNA sense strand
uguuuaaggucucccauuu

SEQ ID NO: 572646 - RNA, 19 nt, Homo sapiens
  misc_RNA (1)...(19): siRNA sense strand
gaguuuggccaacagauaa

SEQ ID NO: 572647 - RNA, 19 nt, Homo sapiens
  misc_RNA (1)...(19): siRNA sense strand
gguuaugguucaaucuauu

SEQ ID NO: 572648 - RNA, 19 nt, Homo sapiens
  misc_RNA (1)...(19): siRNA sense strand
ggaugaccgagaagaaaua

SEQ ID NO: 572649 - RNA, 19 nt, Homo sapiens
  misc_RNA (1)...(19): siRNA sense strand
gcaacaguguggaugauac

SEQ ID NO: 572650 - RNA, 19 nt, Homo sapiens
  misc_RNA (1)...(19): siRNA sense strand
caagucacaucucuuugau

SEQ ID NO: 572651 - RNA, 19 nt, Homo sapiens
  misc_RNA (1)...(19): siRNA sense strand
ugucagacccuaagaagaa

SEQ ID NO: 572652 - RNA, 19 nt, Homo sapiens
  misc_RNA (1)...(19): siRNA sense strand
caacaccaugggauuauuu

SEQ ID NO: 572653 - RNA, 19 nt, Homo sapiens
  misc_RNA (1)...(19): siRNA sense strand
ggcaauaacaagcuuacua

SEQ ID NO: 572654 - RNA, 19 nt, Homo sapiens
  misc_RNA (1)...(19): siRNA sense strand
cagaucgccuugcugauau

SEQ ID NO: 572655 - RNA, 19 nt, Homo sapiens
  misc_RNA (1)...(19): siRNA sense strand
gggaacaaccaaccuaaga

SEQ ID NO: 572656 - RNA, 19 nt, Homo sapiens
  misc_RNA (1)...(19): siRNA sense strand
acaaauaccaccucuaauc

SEQ ID NO: 572657 - RNA, 19 nt, Homo sapiens
  misc_RNA (1)...(19): siRNA sense strand
cagguauuauucucacuaa

SEQ ID NO: 572658 - RNA, 19 nt, Homo sapiens
  misc_RNA (1)...(19): siRNA sense strand
agaugaagauucccuuguu

SEQ ID NO: 572659 - RNA, 19 nt, Homo sapiens
  misc_RNA (1)...(19): siRNA sense strand
ccaagucacaucucuuuga

SEQ ID NO: 572660 - RNA, 19 nt, Homo sapiens
  misc_RNA (1)...(19): siRNA sense strand
gcaauaacaagcuuacuac

SEQ ID NO: 572661 - RNA, 19 nt, Homo sapiens
  misc_RNA (1)...(19): siRNA sense strand
gcaccaacaccaugggauu

SEQ ID NO: 572662 - RNA, 19 nt, Homo sapiens
  misc_RNA (1)...(19): siRNA sense strand
aaacaaugccuuugcacaa

SEQ ID NO: 572663 - RNA, 19 nt, Homo sapiens
  misc_RNA (1)...(19): siRNA sense strand
guacaaagaaguugaagac

SEQ ID NO: 572664 - RNA, 19 nt, Homo sapiens
  misc_RNA (1)...(19): siRNA sense strand
gaaggagaugugaauuuga

SEQ ID NO: 572665 - RNA, 19 nt, Homo sapiens
  misc_RNA (1)...(19): siRNA sense strand
gcauuugguucuagcaaca

SEQ ID NO: 572666 - RNA, 19 nt, Homo sapiens
  misc_RNA (1)...(19): siRNA sense strand
aagcaaaccuguugaugag

SEQ ID NO: 572667 - RNA, 19 nt, Homo sapiens
  misc_RNA (1)...(19): siRNA sense strand
aaauccagguggucucuuu

SEQ ID NO: 572668 - RNA, 19 nt, Homo sapiens
  misc_RNA (1)...(19): siRNA sense strand
guguauuacugcuaugaaa

SEQ ID NO: 572669 - RNA, 19 nt, Homo sapiens
  misc_RNA (1)...(19): siRNA sense strand
gaaauaaacacagcaacag

SEQ ID NO: 572670 - RNA, 19 nt, Homo sapiens
  misc_RNA (1)...(19): siRNA sense strand
cagaaagugcuggaaauaa

SEQ ID NO: 572671 - RNA, 19 nt, Homo sapiens
  misc_RNA (1)...(19): siRNA sense strand
agagagauuuaguuuccua

SEQ ID NO: 572672 - RNA, 19 nt, Homo sapiens
  misc_RNA (1)...(19): siRNA sense strand
aaaucuagcuucaccaucu

SEQ ID NO: 572673 - RNA, 19 nt, Homo sapiens
  misc_RNA (1)...(19): siRNA sense strand
cagcacaucaauagucuaa

SEQ ID NO: 572674 - RNA, 19 nt, Homo sapiens
  misc_RNA (1)...(19): siRNA sense strand
ggauggagaugaagauucc

SEQ ID NO: 572675 - RNA, 19 nt, Homo sapiens
  misc_RNA (1)...(19): siRNA sense strand
ggaggagcauccgucuaaa

SEQ ID NO: 572676 - RNA, 19 nt, Homo sapiens
  misc_RNA (1)...(19): siRNA sense strand
caacuaugaaggaagauug

SEQ ID NO: 572677 - RNA, 19 nt, Homo sapiens
  misc_RNA (1)...(19): siRNA sense strand
gcagguauuauucucacua

SEQ ID NO: 572678 - RNA, 19 nt, Homo sapiens
  misc_RNA (1)...(19): siRNA sense strand
ccagcuaccuccacaagca

SEQ ID NO: 572679 - RNA, 19 nt, Homo sapiens
  misc_RNA (1)...(19): siRNA sense strand
ucggaaagguuaugguuca

SEQ ID NO: 572680 - RNA, 19 nt, Homo sapiens
  misc_RNA (1)...(19): siRNA sense strand
gaagaaccuuaauaauagc

SEQ ID NO: 572681 - RNA, 19 nt, Homo sapiens
  misc_RNA (1)...(19): siRNA sense strand
ucaauagucuaacauacuc

SEQ ID NO: 572682 - RNA, 19 nt, Homo sapiens
  misc_RNA (1)...(19): siRNA sense strand
caacugguacagauacuau

SEQ ID NO: 572683 - RNA, 19 nt, Homo sapiens
  misc_RNA (1)...(19): siRNA sense strand
guucuuggguguuuaaggu

SEQ ID NO: 572684 - RNA, 19 nt, Homo sapiens
  misc_RNA (1)...(19): siRNA sense strand
ggugaagggcuaaauagga

SEQ ID NO: 572685 - RNA, 19 nt, Homo sapiens
  misc_RNA (1)...(19): siRNA sense strand
ccagcaggauggagaugaa

SEQ ID NO: 572686 - RNA, 19 nt, Homo sapiens
  misc_RNA (1)...(19): siRNA sense strand
uggaagcaguuucaaggaa

SEQ ID NO: 572687 - RNA, 19 nt, Homo sapiens
  misc_RNA (1)...(19): siRNA sense strand
cgacaacucuccugccuuu

SEQ ID NO: 572688 - RNA, 19 nt, Homo sapiens
  misc_RNA (1)...(19): siRNA sense strand
caauauugaugccaggaua

SEQ ID NO: 572689 - RNA, 19 nt, Homo sapiens
  misc_RNA (1)...(19): siRNA sense strand
gaaccugauuauucucaaa

SEQ ID NO: 572690 - RNA, 19 nt, Homo sapiens
  misc_RNA (1)...(19): siRNA sense strand
ggagcgcgcuuucacauag

SEQ ID NO: 572691 - RNA, 19 nt, Homo sapiens
  misc_RNA (1)...(19): siRNA sense strand
ugagaucucugacaucaau

SEQ ID NO: 572692 - RNA, 19 nt, Homo sapiens
  misc_RNA (1)...(19): siRNA sense strand
acucugaaauuacccuuua

SEQ ID NO: 572693 - RNA, 19 nt, Homo sapiens
  misc_RNA (1)...(19): siRNA sense strand
ccacugagcagcacuguga

SEQ ID NO: 572694 - RNA, 19 nt, Homo sapiens
  misc_RNA (1)...(19): siRNA sense strand
ggacaucaacgacaacuca

SEQ ID NO: 572695 - RNA, 19 nt, Homo sapiens
  misc_RNA (1)...(19): siRNA sense strand
gagcucagguacuccuuga

SEQ ID NO: 572696 - RNA, 19 nt, Homo sapiens
  misc_RNA (1)...(19): siRNA sense strand
aaacaagccaacaacaaua

SEQ ID NO: 572697 - RNA, 19 nt, Homo sapiens
  misc_RNA (1)...(19): siRNA sense strand
ccaggaagaugggagauga

SEQ ID NO: 572698 - RNA, 19 nt, Homo sapiens
  misc_RNA (1)...(19): siRNA sense strand
ggagaacaguaaagugcuu

SEQ ID NO: 572699 - RNA, 19 nt, Homo sapiens
  misc_RNA (1)...(19): siRNA sense strand
caaacaagccaacaacaau

SEQ ID NO: 572700 - RNA, 19 nt, Homo sapiens
  misc_RNA (1)...(19): siRNA sense strand
cugcagaacuguacaaaca

SEQ ID NO: 572701 - RNA, 19 nt, Homo sapiens
  misc_RNA (1)...(19): siRNA sense strand
gcaaggugcugguggacau

SEQ ID NO: 572702 - RNA, 19 nt, Homo sapiens
  misc_RNA (1)...(19): siRNA sense strand
ggacauacucugaaauuac

SEQ ID NO: 572703 - RNA, 19 nt, Homo sapiens
  misc_RNA (1)...(19): siRNA sense strand
gcacauugguggugaagcu

SEQ ID NO: 572704 - RNA, 19 nt, Homo sapiens
  misc_RNA (1)...(19): siRNA sense strand
gcagaacuguacaaacaag

SEQ ID NO: 572705 - RNA, 19 nt, Homo sapiens
  misc_RNA (1)...(19): siRNA sense strand
ccuccuaugucuccauuaa

SEQ ID NO: 572706 - RNA, 19 nt, Homo sapiens
  misc_RNA (1)...(19): siRNA sense strand
gcugggaaccugauuauuc

SEQ ID NO: 572707 - RNA, 19 nt, Homo sapiens
  misc_RNA (1)...(19): siRNA sense strand
ucaccaaagucauagcuau

SEQ ID NO: 572708 - RNA, 19 nt, Homo sapiens
  misc_RNA (1)...(19): siRNA sense strand
guugagaucucugacauca

SEQ ID NO: 572709 - RNA, 19 nt, Homo sapiens
  misc_RNA (1)...(19): siRNA sense strand
ggacuccuauuccaucuac

SEQ ID NO: 572710 - RNA, 19 nt, Homo sapiens
  misc_RNA (1)...(19): siRNA sense strand
gaagaugggagaugagagu

SEQ ID NO: 572711 - RNA, 19 nt, Homo sapiens
  misc_RNA (1)...(19): siRNA sense strand
ccagguguguugcucugua

SEQ ID NO: 572712 - RNA, 19 nt, Homo sapiens
  misc_RNA (1)...(19): siRNA sense strand
ggaggcuucuguggaguaa

SEQ ID NO: 572713 - RNA, 19 nt, Homo sapiens
  misc_RNA (1)...(19): siRNA sense strand
cggacauacucugaaauua

SEQ ID NO: 572714 - RNA, 19 nt, Homo sapiens
  misc_RNA (1)...(19): siRNA sense strand
gagagcggguggcugucua

SEQ ID NO: 572715 - RNA, 19 nt, Homo sapiens
  misc_RNA (1)...(19): siRNA sense strand
ccguugagguggaaauauu

SEQ ID NO: 572716 - RNA, 19 nt, Homo sapiens
  misc_RNA (1)...(19): siRNA sense strand
ggacaucguggacgugaau

SEQ ID NO: 572717 - RNA, 19 nt, Homo sapiens
  misc_RNA (1)...(19): siRNA sense strand
gauaccgcauggccucaaa

SEQ ID NO: 572718 - RNA, 19 nt, Homo sapiens
  misc_RNA (1)...(19): siRNA sense strand
ccucggacauacucugaaa

SEQ ID NO: 572719 - RNA, 19 nt, Homo sapiens
  misc_RNA (1)...(19): siRNA sense strand
ccagucaccuccuaugucu

SEQ ID NO: 572720 - RNA, 19 nt, Homo sapiens
  misc_RNA (1)...(19): siRNA sense strand
ggagagccaucacuaucag

SEQ ID NO: 572721 - RNA, 19 nt, Homo sapiens
  misc_RNA (1)...(19): siRNA sense strand
guggaaauauuggacauca

SEQ ID NO: 572722 - RNA, 19 nt, Homo sapiens
  misc_RNA (1)...(19): siRNA sense strand
ucaccaagaccuacugcua

SEQ ID NO: 572723 - RNA, 19 nt, Homo sapiens
  misc_RNA (1)...(19): siRNA sense strand
gcacacaggagaaauuagg

SEQ ID NO: 572724 - RNA, 19 nt, Homo sapiens
  misc_RNA (1)...(19): siRNA sense strand
guggagcgcucuucgucaa

SEQ ID NO: 572725 - RNA, 19 nt, Homo sapiens
  misc_RNA (1)...(19): siRNA sense strand
ggaaauauuggacaucaac

SEQ ID NO: 572726 - RNA, 19 nt, Homo sapiens
  misc_RNA (1)...(19): siRNA sense strand
acauacaggagaacaauuu

SEQ ID NO: 572727 - RNA, 19 nt, Homo sapiens
  misc_RNA (1)...(19): siRNA sense strand
gaauaccgcagcucacauc

SEQ ID NO: 572728 - RNA, 19 nt, Homo sapiens
  misc_RNA (1)...(19): siRNA sense strand
ggaaccugauuauucucaa

SEQ ID NO: 572729 - RNA, 19 nt, Homo sapiens
  misc_RNA (1)...(19): siRNA sense strand
uaagagcccucggacauac

SEQ ID NO: 572730 - RNA, 19 nt, Homo sapiens
  misc_RNA (1)...(19): siRNA sense strand
guuaagagcccucggacau

SEQ ID NO: 572731 - RNA, 19 nt, Homo sapiens
  misc_RNA (1)...(19): siRNA sense strand
ugacaucaaugacaaucca

SEQ ID NO: 572732 - RNA, 19 nt, Homo sapiens
  misc_RNA (1)...(19): siRNA sense strand
ucucugacaucaaugacaa

SEQ ID NO: 572733 - RNA, 19 nt, Homo sapiens
  misc_RNA (1)...(19): siRNA sense strand
ccaacucaguacagaccua

SEQ ID NO: 572734 - RNA, 19 nt, Homo sapiens
  misc_RNA (1)...(19): siRNA sense strand
gagcgcgcuuucacauaga

SEQ ID NO: 572735 - RNA, 19 nt, Homo sapiens
  misc_RNA (1)...(19): siRNA sense strand
gcggguggcugucuacaac

SEQ ID NO: 572736 - RNA, 19 nt, Homo sapiens
  misc_RNA (1)...(19): siRNA sense strand
acacugccuuuccgacuga

SEQ ID NO: 572737 - RNA, 19 nt, Homo sapiens
  misc_RNA (1)...(19): siRNA sense strand
aggcagcucuucagcauag

SEQ ID NO: 572738 - RNA, 19 nt, Homo sapiens
  misc_RNA (1)...(19): siRNA sense strand
caagccaacaacaauauug

SEQ ID NO: 572739 - RNA, 19 nt, Homo sapiens
  misc_RNA (1)...(19): siRNA sense strand
acaaacaagccaacaacaa

SEQ ID NO: 572740 - RNA, 19 nt, Homo sapiens
  misc_RNA (1)...(19): siRNA sense strand
ccuuugaccaguccacuua

SEQ ID NO: 572741 - RNA, 19 nt, Homo sapiens
  misc_RNA (1)...(19): siRNA sense strand
gacacucagaggcauguua

SEQ ID NO: 572742 - RNA, 19 nt, Homo sapiens
  misc_RNA (1)...(19): siRNA sense strand
cacugugacugccaacgua

SEQ ID NO: 572743 - RNA, 19 nt, Homo sapiens
  misc_RNA (1)...(19): siRNA sense strand
ccaauggugagcucaggua

SEQ ID NO: 572744 - RNA, 19 nt, Homo sapiens
  misc_RNA (1)...(19): siRNA sense strand
guacaaacaagccaacaac

SEQ ID NO: 572745 - RNA, 19 nt, Homo sapiens
  misc_RNA (1)...(19): siRNA sense strand
ggaaagguccccugcagaa

SEQ ID NO: 572746 - RNA, 19 nt, Homo sapiens
  misc_RNA (1)...(19): siRNA sense strand
caauuugccagguguguug

SEQ ID NO: 572747 - RNA, 19 nt, Homo sapiens
  misc_RNA (1)...(19): siRNA sense strand
ccuauuccaucuacauaca

SEQ ID NO: 572748 - RNA, 19 nt, Homo sapiens
  misc_RNA (1)...(19): siRNA sense strand
gacauacucugaaauuacc

SEQ ID NO: 572749 - RNA, 19 nt, Homo sapiens
  misc_RNA (1)...(19): siRNA sense strand
acacucagaggcauguuaa

SEQ ID NO: 572750 - RNA, 19 nt, Homo sapiens
  misc_RNA (1)...(19): siRNA sense strand
caggagaaauuaggacuac

SEQ ID NO: 572751 - RNA, 19 nt, Homo sapiens
  misc_RNA (1)...(19): siRNA sense strand
acuucgagcuggaccuuaa

SEQ ID NO: 572752 - RNA, 19 nt, Homo sapiens
  misc_RNA (1)...(19): siRNA sense strand
gagcugcacacaggagaaa

SEQ ID NO: 572753 - RNA, 19 nt, Homo sapiens
  misc_RNA (1)...(19): siRNA sense strand
gaaguuucgggaguucuuu

SEQ ID NO: 572754 - RNA, 19 nt, Homo sapiens
  misc_RNA (1)...(19): siRNA sense strand
gcaggagaacaguaaagug

SEQ ID NO: 572755 - RNA, 19 nt, Homo sapiens
  misc_RNA (1)...(19): siRNA sense strand
ccacagacccagaugaaaa

SEQ ID NO: 572756 - RNA, 19 nt, Homo sapiens
  misc_RNA (1)...(19): siRNA sense strand
uuaagagcccucggacaua

SEQ ID NO: 572757 - RNA, 19 nt, Homo sapiens
  misc_RNA (1)...(19): siRNA sense strand
ggauaggguuuccaaaauc

SEQ ID NO: 572758 - RNA, 19 nt, Homo sapiens
  misc_RNA (1)...(19): siRNA sense strand
acaacucuccugccuuuga

SEQ ID NO: 572759 - RNA, 19 nt, Homo sapiens
  misc_RNA (1)...(19): siRNA sense strand
gcacagugucuuuuauauu

SEQ ID NO: 572760 - RNA, 19 nt, Homo sapiens
  misc_RNA (1)...(19): siRNA sense strand
ggagaaauuaggacuacca

SEQ ID NO: 572761 - RNA, 19 nt, Homo sapiens
  misc_RNA (1)...(19): siRNA sense strand
ccaucuacauacaggagaa

SEQ ID NO: 572762 - RNA, 19 nt, Homo sapiens
  misc_RNA (1)...(19): siRNA sense strand
ucacaucccugcguacacu

SEQ ID NO: 572763 - RNA, 19 nt, Homo sapiens
  misc_RNA (1)...(19): siRNA sense strand
cgacugaauggcuuuggaa

SEQ ID NO: 572764 - RNA, 19 nt, Homo sapiens
  misc_RNA (1)...(19): siRNA sense strand
ggccaaaguggucagaaug

SEQ ID NO: 572765 - RNA, 19 nt, Homo sapiens
  misc_RNA (1)...(19): siRNA sense strand
ggaauggcucccucaccaa

SEQ ID NO: 572766 - RNA, 19 nt, Homo sapiens
  misc_RNA (1)...(19): siRNA sense strand
cauugaaguucgagggaau

SEQ ID NO: 572767 - RNA, 19 nt, Homo sapiens
  misc_RNA (1)...(19): siRNA sense strand
cuucugaccuggaccucuu

SEQ ID NO: 572768 - RNA, 19 nt, Homo sapiens
  misc_RNA (1)...(19): siRNA sense strand
uuucgggaguucuuuguga

SEQ ID NO: 572769 - RNA, 19 nt, Homo sapiens
  misc_RNA (1)...(19): siRNA sense strand
caacuccuuugacuaugag

SEQ ID NO: 572770 - RNA, 19 nt, Homo sapiens
  misc_RNA (1)...(19): siRNA sense strand
uauuggacaucaacgacaa

SEQ ID NO: 572771 - RNA, 19 nt, Homo sapiens
  misc_RNA (1)...(19): siRNA sense strand
cugaauggcuuuggaaacu

SEQ ID NO: 572772 - RNA, 19 nt, Homo sapiens
  misc_RNA (1)...(19): siRNA sense strand
gaccuggaccucuuuaagg

SEQ ID NO: 572773 - RNA, 19 nt, Homo sapiens
  misc_RNA (1)...(19): siRNA sense strand
cugggaaccugauuauucu

SEQ ID NO: 572774 - RNA, 19 nt, Homo sapiens
  misc_RNA (1)...(19): siRNA sense strand
gaaucucacaggccaaagu

SEQ ID NO: 572775 - RNA, 19 nt, Homo sapiens
  misc_RNA (1)...(19): siRNA sense strand
gccaacaacaauauugaug

SEQ ID NO: 572776 - RNA, 19 nt, Homo sapiens
  misc_RNA (1)...(19): siRNA sense strand
gcauuaagcacagugucuu

SEQ ID NO: 572777 - RNA, 19 nt, Homo sapiens
  misc_RNA (1)...(19): siRNA sense strand
ucggacauacucugaaauu

SEQ ID NO: 572778 - RNA, 19 nt, Homo sapiens
  misc_RNA (1)...(19): siRNA sense strand
caguagcugugguggauag

SEQ ID NO: 572779 - RNA, 19 nt, Homo sapiens
  misc_RNA (1)...(19): siRNA sense strand
aaauuaggacuaccaggaa

SEQ ID NO: 572780 - RNA, 19 nt, Homo sapiens
  misc_RNA (1)...(19): siRNA sense strand
gcugcacacaggagaaauu

SEQ ID NO: 572781 - RNA, 19 nt, Homo sapiens
  misc_RNA (1)...(19): siRNA sense strand
gagcgccguugagguggaa

SEQ ID NO: 572782 - RNA, 19 nt, Homo sapiens
  misc_RNA (1)...(19): siRNA sense strand
gagauggugccucgaacug

SEQ ID NO: 572783 - RNA, 19 nt, Homo sapiens
  misc_RNA (1)...(19): siRNA sense strand
gggaguucuuugugacugu

SEQ ID NO: 572784 - RNA, 19 nt, Homo sapiens
  misc_RNA (1)...(19): siRNA sense strand
gcaagccacagacccagau

SEQ ID NO: 572785 - RNA, 19 nt, Homo sapiens
  misc_RNA (1)...(19): siRNA sense strand
ccggguugcuugcgcauca

SEQ ID NO: 572786 - RNA, 19 nt, Homo sapiens
  misc_RNA (1)...(19): siRNA sense strand
cugcacacaggagaaauua

SEQ ID NO: 572787 - RNA, 19 nt, Homo sapiens
  misc_RNA (1)...(19): siRNA sense strand
cgacaacucuccugccuuu

SEQ ID NO: 572788 - RNA, 19 nt, Homo sapiens
  misc_RNA (1)...(19): siRNA sense strand
caauauugaugccaggaua

SEQ ID NO: 572789 - RNA, 19 nt, Homo sapiens
  misc_RNA (1)...(19): siRNA sense strand
gaaccugauuauucucaaa

SEQ ID NO: 572790 - RNA, 19 nt, Homo sapiens
  misc_RNA (1)...(19): siRNA sense strand
ggagcgcgcuuucacauag

SEQ ID NO: 572791 - RNA, 19 nt, Homo sapiens
  misc_RNA (1)...(19): siRNA sense strand
ugagaucucugacaucaau

SEQ ID NO: 572792 - RNA, 19 nt, Homo sapiens
  misc_RNA (1)...(19): siRNA sense strand
acucugaaauuacccuuua

SEQ ID NO: 572793 - RNA, 19 nt, Homo sapiens
  misc_RNA (1)...(19): siRNA sense strand
ccacugagcagcacuguga

SEQ ID NO: 572794 - RNA, 19 nt, Homo sapiens
  misc_RNA (1)...(19): siRNA sense strand
ggacaucaacgacaacuca

SEQ ID NO: 572795 - RNA, 19 nt, Homo sapiens
  misc_RNA (1)...(19): siRNA sense strand
gagcucagguacuccuuga

SEQ ID NO: 572796 - RNA, 19 nt, Homo sapiens
  misc_RNA (1)...(19): siRNA sense strand
aaacaagccaacaacaaua

SEQ ID NO: 572797 - RNA, 19 nt, Homo sapiens
  misc_RNA (1)...(19): siRNA sense strand
ccaggaagaugggagauga

SEQ ID NO: 572798 - RNA, 19 nt, Homo sapiens
  misc_RNA (1)...(19): siRNA sense strand
ggagaacaguaaagugcuu

SEQ ID NO: 572799 - RNA, 19 nt, Homo sapiens
  misc_RNA (1)...(19): siRNA sense strand
caaacaagccaacaacaau

SEQ ID NO: 572800 - RNA, 19 nt, Homo sapiens
  misc_RNA (1)...(19): siRNA sense strand
cugcagaacuguacaaaca

SEQ ID NO: 572801 - RNA, 19 nt, Homo sapiens
  misc_RNA (1)...(19): siRNA sense strand
gcaaggugcugguggacau

SEQ ID NO: 572802 - RNA, 19 nt, Homo sapiens
  misc_RNA (1)...(19): siRNA sense strand
ggacauacucugaaauuac

SEQ ID NO: 572803 - RNA, 19 nt, Homo sapiens
  misc_RNA (1)...(19): siRNA sense strand
gcacauugguggugaagcu

SEQ ID NO: 572804 - RNA, 19 nt, Homo sapiens
  misc_RNA (1)...(19): siRNA sense strand
gcagaacuguacaaacaag

SEQ ID NO: 572805 - RNA, 19 nt, Homo sapiens
  misc_RNA (1)...(19): siRNA sense strand
ccuccuaugucuccauuaa

SEQ ID NO: 572806 - RNA, 19 nt, Homo sapiens
  misc_RNA (1)...(19): siRNA sense strand
gcugggaaccugauuauuc

SEQ ID NO: 572807 - RNA, 19 nt, Homo sapiens
  misc_RNA (1)...(19): siRNA sense strand
ucaccaaagucauagcuau

SEQ ID NO: 572808 - RNA, 19 nt, Homo sapiens
  misc_RNA (1)...(19): siRNA sense strand
guugagaucucugacauca

SEQ ID NO: 572809 - RNA, 19 nt, Homo sapiens
  misc_RNA (1)...(19): siRNA sense strand
ggacuccuauuccaucuac

SEQ ID NO: 572810 - RNA, 19 nt, Homo sapiens
  misc_RNA (1)...(19): siRNA sense strand
gaagaugggagaugagagu

SEQ ID NO: 572811 - RNA, 19 nt, Homo sapiens
  misc_RNA (1)...(19): siRNA sense strand
ccagguguguugcucugua

SEQ ID NO: 572812 - RNA, 19 nt, Homo sapiens
  misc_RNA (1)...(19): siRNA sense strand
ggaggcuucuguggaguaa

SEQ ID NO: 572813 - RNA, 19 nt, Homo sapiens
  misc_RNA (1)...(19): siRNA sense strand
cggacauacucugaaauua

SEQ ID NO: 572814 - RNA, 19 nt, Homo sapiens
  misc_RNA (1)...(19): siRNA sense strand
gagagcggguggcugucua

SEQ ID NO: 572815 - RNA, 19 nt, Homo sapiens
  misc_RNA (1)...(19): siRNA sense strand
ccguugagguggaaauauu

SEQ ID NO: 572816 - RNA, 19 nt, Homo sapiens
  misc_RNA (1)...(19): siRNA sense strand
ggacaucguggacgugaau

SEQ ID NO: 572817 - RNA, 19 nt, Homo sapiens
  misc_RNA (1)...(19): siRNA sense strand
gauaccgcauggccucaaa

SEQ ID NO: 572818 - RNA, 19 nt, Homo sapiens
  misc_RNA (1)...(19): siRNA sense strand
ccucggacauacucugaaa

SEQ ID NO: 572819 - RNA, 19 nt, Homo sapiens
  misc_RNA (1)...(19): siRNA sense strand
ccagucaccuccuaugucu

SEQ ID NO: 572820 - RNA, 19 nt, Homo sapiens
  misc_RNA (1)...(19): siRNA sense strand
ggagagccaucacuaucag

SEQ ID NO: 572821 - RNA, 19 nt, Homo sapiens
  misc_RNA (1)...(19): siRNA sense strand
guggaaauauuggacauca

SEQ ID NO: 572822 - RNA, 19 nt, Homo sapiens
  misc_RNA (1)...(19): siRNA sense strand
ucaccaagaccuacugcua

SEQ ID NO: 572823 - RNA, 19 nt, Homo sapiens
  misc_RNA (1)...(19): siRNA sense strand
gcacacaggagaaauuagg

SEQ ID NO: 572824 - RNA, 19 nt, Homo sapiens
  misc_RNA (1)...(19): siRNA sense strand
guggagcgcucuucgucaa

SEQ ID NO: 572825 - RNA, 19 nt, Homo sapiens
  misc_RNA (1)...(19): siRNA sense strand
ggaaauauuggacaucaac

SEQ ID NO: 572826 - RNA, 19 nt, Homo sapiens
  misc_RNA (1)...(19): siRNA sense strand
acauacaggagaacaauuu

SEQ ID NO: 572827 - RNA, 19 nt, Homo sapiens
  misc_RNA (1)...(19): siRNA sense strand
gaauaccgcagcucacauc

SEQ ID NO: 572828 - RNA, 19 nt, Homo sapiens
  misc_RNA (1)...(19): siRNA sense strand
ggaaccugauuauucucaa

SEQ ID NO: 572829 - RNA, 19 nt, Homo sapiens
  misc_RNA (1)...(19): siRNA sense strand
uaagagcccucggacauac

SEQ ID NO: 572830 - RNA, 19 nt, Homo sapiens
  misc_RNA (1)...(19): siRNA sense strand
guuaagagcccucggacau

SEQ ID NO: 572831 - RNA, 19 nt, Homo sapiens
  misc_RNA (1)...(19): siRNA sense strand
ugacaucaaugacaaucca

SEQ ID NO: 572832 - RNA, 19 nt, Homo sapiens
  misc_RNA (1)...(19): siRNA sense strand
ucucugacaucaaugacaa

SEQ ID NO: 572833 - RNA, 19 nt, Homo sapiens
  misc_RNA (1)...(19): siRNA sense strand
ccaacucaguacagaccua

SEQ ID NO: 572834 - RNA, 19 nt, Homo sapiens
  misc_RNA (1)...(19): siRNA sense strand
gagcgcgcuuucacauaga

SEQ ID NO: 572835 - RNA, 19 nt, Homo sapiens
  misc_RNA (1)...(19): siRNA sense strand
gcggguggcugucuacaac

SEQ ID NO: 572836 - RNA, 19 nt, Homo sapiens
  misc_RNA (1)...(19): siRNA sense strand
acacugccuuuccgacuga

SEQ ID NO: 572837 - RNA, 19 nt, Homo sapiens
  misc_RNA (1)...(19): siRNA sense strand
aggcagcucuucagcauag

SEQ ID NO: 572838 - RNA, 19 nt, Homo sapiens
  misc_RNA (1)...(19): siRNA sense strand
caagccaacaacaauauug

SEQ ID NO: 572839 - RNA, 19 nt, Homo sapiens
  misc_RNA (1)...(19): siRNA sense strand
acaaacaagccaacaacaa

SEQ ID NO: 572840 - RNA, 19 nt, Homo sapiens
  misc_RNA (1)...(19): siRNA sense strand
ccuuugaccaguccacuua

SEQ ID NO: 572841 - RNA, 19 nt, Homo sapiens
  misc_RNA (1)...(19): siRNA sense strand
gacacucagaggcauguua

SEQ ID NO: 572842 - RNA, 19 nt, Homo sapiens
  misc_RNA (1)...(19): siRNA sense strand
cacugugacugccaacgua

SEQ ID NO: 572843 - RNA, 19 nt, Homo sapiens
  misc_RNA (1)...(19): siRNA sense strand
ccaauggugagcucaggua

SEQ ID NO: 572844 - RNA, 19 nt, Homo sapiens
  misc_RNA (1)...(19): siRNA sense strand
guacaaacaagccaacaac

SEQ ID NO: 572845 - RNA, 19 nt, Homo sapiens
  misc_RNA (1)...(19): siRNA sense strand
ggaaagguccccugcagaa

SEQ ID NO: 572846 - RNA, 19 nt, Homo sapiens
  misc_RNA (1)...(19): siRNA sense strand
caauuugccagguguguug

SEQ ID NO: 572847 - RNA, 19 nt, Homo sapiens
  misc_RNA (1)...(19): siRNA sense strand
ccuauuccaucuacauaca

SEQ ID NO: 572848 - RNA, 19 nt, Homo sapiens
  misc_RNA (1)...(19): siRNA sense strand
gacauacucugaaauuacc

SEQ ID NO: 572849 - RNA, 19 nt, Homo sapiens
  misc_RNA (1)...(19): siRNA sense strand
acacucagaggcauguuaa

SEQ ID NO: 572850 - RNA, 19 nt, Homo sapiens
  misc_RNA (1)...(19): siRNA sense strand
caggagaaauuaggacuac

SEQ ID NO: 572851 - RNA, 19 nt, Homo sapiens
  misc_RNA (1)...(19): siRNA sense strand
acuucgagcuggaccuuaa

SEQ ID NO: 572852 - RNA, 19 nt, Homo sapiens
  misc_RNA (1)...(19): siRNA sense strand
gagcugcacacaggagaaa

SEQ ID NO: 572853 - RNA, 19 nt, Homo sapiens
  misc_RNA (1)...(19): siRNA sense strand
gaaguuucgggaguucuuu

SEQ ID NO: 572854 - RNA, 19 nt, Homo sapiens
  misc_RNA (1)...(19): siRNA sense strand
gcaggagaacaguaaagug

SEQ ID NO: 572855 - RNA, 19 nt, Homo sapiens
  misc_RNA (1)...(19): siRNA sense strand
ccacagacccagaugaaaa

SEQ ID NO: 572856 - RNA, 19 nt, Homo sapiens
  misc_RNA (1)...(19): siRNA sense strand
uuaagagcccucggacaua

SEQ ID NO: 572857 - RNA, 19 nt, Homo sapiens
  misc_RNA (1)...(19): siRNA sense strand
ggauaggguuuccaaaauc

SEQ ID NO: 572858 - RNA, 19 nt, Homo sapiens
  misc_RNA (1)...(19): siRNA sense strand
acaacucuccugccuuuga

SEQ ID NO: 572859 - RNA, 19 nt, Homo sapiens
  misc_RNA (1)...(19): siRNA sense strand
gcacagugucuuuuauauu

SEQ ID NO: 572860 - RNA, 19 nt, Homo sapiens
  misc_RNA (1)...(19): siRNA sense strand
ggagaaauuaggacuacca

SEQ ID NO: 572861 - RNA, 19 nt, Homo sapiens
  misc_RNA (1)...(19): siRNA sense strand
ccaucuacauacaggagaa

SEQ ID NO: 572862 - RNA, 19 nt, Homo sapiens
  misc_RNA (1)...(19): siRNA sense strand
ucacaucccugcguacacu

SEQ ID NO: 572863 - RNA, 19 nt, Homo sapiens
  misc_RNA (1)...(19): siRNA sense strand
cgacugaauggcuuuggaa

SEQ ID NO: 572864 - RNA, 19 nt, Homo sapiens
  misc_RNA (1)...(19): siRNA sense strand
ggccaaaguggucagaaug

SEQ ID NO: 572865 - RNA, 19 nt, Homo sapiens
  misc_RNA (1)...(19): siRNA sense strand
ggaauggcucccucaccaa

SEQ ID NO: 572866 - RNA, 19 nt, Homo sapiens
  misc_RNA (1)...(19): siRNA sense strand
cauugaaguucgagggaau

SEQ ID NO: 572867 - RNA, 19 nt, Homo sapiens
  misc_RNA (1)...(19): siRNA sense strand
cuucugaccuggaccucuu

SEQ ID NO: 572868 - RNA, 19 nt, Homo sapiens
  misc_RNA (1)...(19): siRNA sense strand
uuucgggaguucuuuguga

SEQ ID NO: 572869 - RNA, 19 nt, Homo sapiens
  misc_RNA (1)...(19): siRNA sense strand
caacuccuuugacuaugag

SEQ ID NO: 572870 - RNA, 19 nt, Homo sapiens
  misc_RNA (1)...(19): siRNA sense strand
uauuggacaucaacgacaa

SEQ ID NO: 572871 - RNA, 19 nt, Homo sapiens
  misc_RNA (1)...(19): siRNA sense strand
cugaauggcuuuggaaacu

SEQ ID NO: 572872 - RNA, 19 nt, Homo sapiens
  misc_RNA (1)...(19): siRNA sense strand
gaccuggaccucuuuaagg

SEQ ID NO: 572873 - RNA, 19 nt, Homo sapiens
  misc_RNA (1)...(19): siRNA sense strand
cugggaaccugauuauucu

SEQ ID NO: 572874 - RNA, 19 nt, Homo sapiens
  misc_RNA (1)...(19): siRNA sense strand
gaaucucacaggccaaagu

SEQ ID NO: 572875 - RNA, 19 nt, Homo sapiens
  misc_RNA (1)...(19): siRNA sense strand
gccaacaacaauauugaug

SEQ ID NO: 572876 - RNA, 19 nt, Homo sapiens
  misc_RNA (1)...(19): siRNA sense strand
gcauuaagcacagugucuu

SEQ ID NO: 572877 - RNA, 19 nt, Homo sapiens
  misc_RNA (1)...(19): siRNA sense strand
ucggacauacucugaaauu

SEQ ID NO: 572878 - RNA, 19 nt, Homo sapiens
  misc_RNA (1)...(19): siRNA sense strand
caguagcugugguggauag

SEQ ID NO: 572879 - RNA, 19 nt, Homo sapiens
  misc_RNA (1)...(19): siRNA sense strand
aaauuaggacuaccaggaa

SEQ ID NO: 572880 - RNA, 19 nt, Homo sapiens
  misc_RNA (1)...(19): siRNA sense strand
gcugcacacaggagaaauu

SEQ ID NO: 572881 - RNA, 19 nt, Homo sapiens
  misc_RNA (1)...(19): siRNA sense strand
gagcgccguugagguggaa

SEQ ID NO: 572882 - RNA, 19 nt, Homo sapiens
  misc_RNA (1)...(19): siRNA sense strand
gagauggugccucgaacug

SEQ ID NO: 572883 - RNA, 19 nt, Homo sapiens
  misc_RNA (1)...(19): siRNA sense strand
gggaguucuuugugacugu

SEQ ID NO: 572884 - RNA, 19 nt, Homo sapiens
  misc_RNA (1)...(19): siRNA sense strand
gcaagccacagacccagau

SEQ ID NO: 572885 - RNA, 19 nt, Homo sapiens
  misc_RNA (1)...(19): siRNA sense strand
ccggguugcuugcgcauca

SEQ ID NO: 572886 - RNA, 19 nt, Homo sapiens
  misc_RNA (1)...(19): siRNA sense strand
cugcacacaggagaaauua

SEQ ID NO: 572887 - RNA, 19 nt, Homo sapiens
  misc_RNA (1)...(19): siRNA sense strand
gaaguaagaugguuucaaa

SEQ ID NO: 572888 - RNA, 19 nt, Homo sapiens
  misc_RNA (1)...(19): siRNA sense strand
gcaaguagcugcuucacua

SEQ ID NO: 572889 - RNA, 19 nt, Homo sapiens
  misc_RNA (1)...(19): siRNA sense strand
ggacugaauuugccaauau

SEQ ID NO: 572890 - RNA, 19 nt, Homo sapiens
  misc_RNA (1)...(19): siRNA sense strand
ggacuugguucugauaaua

SEQ ID NO: 572891 - RNA, 19 nt, Homo sapiens
  misc_RNA (1)...(19): siRNA sense strand
agaauggccuugucucuua

SEQ ID NO: 572892 - RNA, 19 nt, Homo sapiens
  misc_RNA (1)...(19): siRNA sense strand
gcaaugggauacuaagcua

SEQ ID NO: 572893 - RNA, 19 nt, Homo sapiens
  misc_RNA (1)...(19): siRNA sense strand
gaucugagguauggaagua

SEQ ID NO: 572894 - RNA, 19 nt, Homo sapiens
  misc_RNA (1)...(19): siRNA sense strand
gcccagaacuuguauuuag

SEQ ID NO: 572895 - RNA, 19 nt, Homo sapiens
  misc_RNA (1)...(19): siRNA sense strand
ggacgaaggugucuuuggu

SEQ ID NO: 572896 - RNA, 19 nt, Homo sapiens
  misc_RNA (1)...(19): siRNA sense strand
guaauugccuuggcuugua

SEQ ID NO: 572897 - RNA, 19 nt, Homo sapiens
  misc_RNA (1)...(19): siRNA sense strand
gcaauuugguggucagaga

SEQ ID NO: 572898 - RNA, 19 nt, Homo sapiens
  misc_RNA (1)...(19): siRNA sense strand
ugacaacgcgccuguauuu

SEQ ID NO: 572899 - RNA, 19 nt, Homo sapiens
  misc_RNA (1)...(19): siRNA sense strand
gcacaagucaccaucauug

SEQ ID NO: 572900 - RNA, 19 nt, Homo sapiens
  misc_RNA (1)...(19): siRNA sense strand
ggacaccaaugacaacuca

SEQ ID NO: 572901 - RNA, 19 nt, Homo sapiens
  misc_RNA (1)...(19): siRNA sense strand
gcagaucagugaauaccaa

SEQ ID NO: 572902 - RNA, 19 nt, Homo sapiens
  misc_RNA (1)...(19): siRNA sense strand
gaaggugucuuugguuuag

SEQ ID NO: 572903 - RNA, 19 nt, Homo sapiens
  misc_RNA (1)...(19): siRNA sense strand
auacuaagcuacagccuaa

SEQ ID NO: 572904 - RNA, 19 nt, Homo sapiens
  misc_RNA (1)...(19): siRNA sense strand
gggagcagaucagugaaua

SEQ ID NO: 572905 - RNA, 19 nt, Homo sapiens
  misc_RNA (1)...(19): siRNA sense strand
augaagaccucgauucuaa

SEQ ID NO: 572906 - RNA, 19 nt, Homo sapiens
  misc_RNA (1)...(19): siRNA sense strand
gcacagugauugcucucuu

SEQ ID NO: 572907 - RNA, 19 nt, Homo sapiens
  misc_RNA (1)...(19): siRNA sense strand
gugcaacagugacuauaaa

SEQ ID NO: 572908 - RNA, 19 nt, Homo sapiens
  misc_RNA (1)...(19): siRNA sense strand
ucaguuacuuccagacuuu

SEQ ID NO: 572909 - RNA, 19 nt, Homo sapiens
  misc_RNA (1)...(19): siRNA sense strand
gaaguccaguacucccuaa

SEQ ID NO: 572910 - RNA, 19 nt, Homo sapiens
  misc_RNA (1)...(19): siRNA sense strand
ugacugacgugaacgauca

SEQ ID NO: 572911 - RNA, 19 nt, Homo sapiens
  misc_RNA (1)...(19): siRNA sense strand
caacagugacuauaaacuu

SEQ ID NO: 572912 - RNA, 19 nt, Homo sapiens
  misc_RNA (1)...(19): siRNA sense strand
aaacuuccuuugacuuuga

SEQ ID NO: 572913 - RNA, 19 nt, Homo sapiens
  misc_RNA (1)...(19): siRNA sense strand
gggaagcaaugggauacua

SEQ ID NO: 572914 - RNA, 19 nt, Homo sapiens
  misc_RNA (1)...(19): siRNA sense strand
cuuaugagcuguuggaugu

SEQ ID NO: 572915 - RNA, 19 nt, Homo sapiens
  misc_RNA (1)...(19): siRNA sense strand
ugacaacucaccucucuuu

SEQ ID NO: 572916 - RNA, 19 nt, Homo sapiens
  misc_RNA (1)...(19): siRNA sense strand
uaugagcuguuggauguua

SEQ ID NO: 572917 - RNA, 19 nt, Homo sapiens
  misc_RNA (1)...(19): siRNA sense strand
ccaaugggacuguguuauu

SEQ ID NO: 572918 - RNA, 19 nt, Homo sapiens
  misc_RNA (1)...(19): siRNA sense strand
gcuccguacugcucgcuua

SEQ ID NO: 572919 - RNA, 19 nt, Homo sapiens
  misc_RNA (1)...(19): siRNA sense strand
ccacuuagcacccgaagga

SEQ ID NO: 572920 - RNA, 19 nt, Homo sapiens
  misc_RNA (1)...(19): siRNA sense strand
ggaagcaaugggauacuaa

SEQ ID NO: 572921 - RNA, 19 nt, Homo sapiens
  misc_RNA (1)...(19): siRNA sense strand
ggaucacgcuaaugucaau

SEQ ID NO: 572922 - RNA, 19 nt, Homo sapiens
  misc_RNA (1)...(19): siRNA sense strand
gaaccaggagggcagcuuu

SEQ ID NO: 572923 - RNA, 19 nt, Homo sapiens
  misc_RNA (1)...(19): siRNA sense strand
gaagaccucgauucuaaug

SEQ ID NO: 572924 - RNA, 19 nt, Homo sapiens
  misc_RNA (1)...(19): siRNA sense strand
caaugggacuguguuauuc

SEQ ID NO: 572925 - RNA, 19 nt, Homo sapiens
  misc_RNA (1)...(19): siRNA sense strand
ggaggugacugacgugaac

SEQ ID NO: 572926 - RNA, 19 nt, Homo sapiens
  misc_RNA (1)...(19): siRNA sense strand
caccauagaugucacuaca

SEQ ID NO: 572927 - RNA, 19 nt, Homo sapiens
  misc_RNA (1)...(19): siRNA sense strand
ccacuuuccuccucuguca

SEQ ID NO: 572928 - RNA, 19 nt, Homo sapiens
  misc_RNA (1)...(19): siRNA sense strand
gaauggccuugucucuuau

SEQ ID NO: 572929 - RNA, 19 nt, Homo sapiens
  misc_RNA (1)...(19): siRNA sense strand
ugacaauacaccaaacuuu

SEQ ID NO: 572930 - RNA, 19 nt, Homo sapiens
  misc_RNA (1)...(19): siRNA sense strand
gcuuaguucuucccacuga

SEQ ID NO: 572931 - RNA, 19 nt, Homo sapiens
  misc_RNA (1)...(19): siRNA sense strand
gacaauacaccaaacuuuc

SEQ ID NO: 572932 - RNA, 19 nt, Homo sapiens
  misc_RNA (1)...(19): siRNA sense strand
ccauagaugucacuacagu

SEQ ID NO: 572933 - RNA, 19 nt, Homo sapiens
  misc_RNA (1)...(19): siRNA sense strand
gaagggccaucagccucua

SEQ ID NO: 572934 - RNA, 19 nt, Homo sapiens
  misc_RNA (1)...(19): siRNA sense strand
gaagugcaacagugacuau

SEQ ID NO: 572935 - RNA, 19 nt, Homo sapiens
  misc_RNA (1)...(19): siRNA sense strand
gaaaggggaucacgcuaau

SEQ ID NO: 572936 - RNA, 19 nt, Homo sapiens
  misc_RNA (1)...(19): siRNA sense strand
gaccucgauucuaauggua

SEQ ID NO: 572937 - RNA, 19 nt, Homo sapiens
  misc_RNA (1)...(19): siRNA sense strand
ccagaacuuguauuuagua

SEQ ID NO: 572938 - RNA, 19 nt, Homo sapiens
  misc_RNA (1)...(19): siRNA sense strand
acaauuauccgguuaucuu

SEQ ID NO: 572939 - RNA, 19 nt, Homo sapiens
  misc_RNA (1)...(19): siRNA sense strand
gaucacggccucagauagu

SEQ ID NO: 572940 - RNA, 19 nt, Homo sapiens
  misc_RNA (1)...(19): siRNA sense strand
caacgcgccuguauuugag

SEQ ID NO: 572941 - RNA, 19 nt, Homo sapiens
  misc_RNA (1)...(19): siRNA sense strand
gggcguagccguaggcaau

SEQ ID NO: 572942 - RNA, 19 nt, Homo sapiens
  misc_RNA (1)...(19): siRNA sense strand
gcuguuggauguuaucucu

SEQ ID NO: 572943 - RNA, 19 nt, Homo sapiens
  misc_RNA (1)...(19): siRNA sense strand
gaagaauggccuugucucu

SEQ ID NO: 572944 - RNA, 19 nt, Homo sapiens
  misc_RNA (1)...(19): siRNA sense strand
gaugaagaccucgauucua

SEQ ID NO: 572945 - RNA, 19 nt, Homo sapiens
  misc_RNA (1)...(19): siRNA sense strand
ugauugcucucuuuagugu

SEQ ID NO: 572946 - RNA, 19 nt, Homo sapiens
  misc_RNA (1)...(19): siRNA sense strand
cgaaggugucuuugguuua

SEQ ID NO: 572947 - RNA, 19 nt, Homo sapiens
  misc_RNA (1)...(19): siRNA sense strand
gagggacgaaggugucuuu

SEQ ID NO: 572948 - RNA, 19 nt, Homo sapiens
  misc_RNA (1)...(19): siRNA sense strand
guaagaugguuucaaaucc

SEQ ID NO: 572949 - RNA, 19 nt, Homo sapiens
  misc_RNA (1)...(19): siRNA sense strand
caaagcugccugcgucuug

SEQ ID NO: 572950 - RNA, 19 nt, Homo sapiens
  misc_RNA (1)...(19): siRNA sense strand
acgaaggugucuuugguuu

SEQ ID NO: 572951 - RNA, 19 nt, Homo sapiens
  misc_RNA (1)...(19): siRNA sense strand
cacagugauugcucucuuu

SEQ ID NO: 572952 - RNA, 19 nt, Homo sapiens
  misc_RNA (1)...(19): siRNA sense strand
caacucaccucucuuuccu

SEQ ID NO: 572953 - RNA, 19 nt, Homo sapiens
  misc_RNA (1)...(19): siRNA sense strand
guagauaggaaugacaauu

SEQ ID NO: 572954 - RNA, 19 nt, Homo sapiens
  misc_RNA (1)...(19): siRNA sense strand
acaacgcgccuguauuuga

SEQ ID NO: 572955 - RNA, 19 nt, Homo sapiens
  misc_RNA (1)...(19): siRNA sense strand
aaugacaauuauccgguua

SEQ ID NO: 572956 - RNA, 19 nt, Homo sapiens
  misc_RNA (1)...(19): siRNA sense strand
ugaaugacaauacaccaaa

SEQ ID NO: 572957 - RNA, 19 nt, Homo sapiens
  misc_RNA (1)...(19): siRNA sense strand
gcucuuggaggcauacauu

SEQ ID NO: 572958 - RNA, 19 nt, Homo sapiens
  misc_RNA (1)...(19): siRNA sense strand
gcgaauacccggaguuggu

SEQ ID NO: 572959 - RNA, 19 nt, Homo sapiens
  misc_RNA (1)...(19): siRNA sense strand
caugacaucagccaccaua

SEQ ID NO: 572960 - RNA, 19 nt, Homo sapiens
  misc_RNA (1)...(19): siRNA sense strand
cauggagacccaccacuuu

SEQ ID NO: 572961 - RNA, 19 nt, Homo sapiens
  misc_RNA (1)...(19): siRNA sense strand
aacagugacuauaaacuug

SEQ ID NO: 572962 - RNA, 19 nt, Homo sapiens
  misc_RNA (1)...(19): siRNA sense strand
acaccaaacuuuccucaac

SEQ ID NO: 572963 - RNA, 19 nt, Homo sapiens
  misc_RNA (1)...(19): siRNA sense strand
gaaugacaauacaccaaac

SEQ ID NO: 572964 - RNA, 19 nt, Homo sapiens
  misc_RNA (1)...(19): siRNA sense strand
ggaugaagaccucgauucu

SEQ ID NO: 572965 - RNA, 19 nt, Homo sapiens
  misc_RNA (1)...(19): siRNA sense strand
gcuuucacgugcacccuaa

SEQ ID NO: 572966 - RNA, 19 nt, Homo sapiens
  misc_RNA (1)...(19): siRNA sense strand
cggcuuccuuugacaacua

SEQ ID NO: 572967 - RNA, 19 nt, Homo sapiens
  misc_RNA (1)...(19): siRNA sense strand
uaauugccuuggcuuguau

SEQ ID NO: 572968 - RNA, 19 nt, Homo sapiens
  misc_RNA (1)...(19): siRNA sense strand
ggaaguaagaugguuucaa

SEQ ID NO: 572969 - RNA, 19 nt, Homo sapiens
  misc_RNA (1)...(19): siRNA sense strand
gggacuugguucugauaau

SEQ ID NO: 572970 - RNA, 19 nt, Homo sapiens
  misc_RNA (1)...(19): siRNA sense strand
gacaucagccaccauagau

SEQ ID NO: 572971 - RNA, 19 nt, Homo sapiens
  misc_RNA (1)...(19): siRNA sense strand
ugacaucagccaccauaga

SEQ ID NO: 572972 - RNA, 19 nt, Homo sapiens
  misc_RNA (1)...(19): siRNA sense strand
cgagggaagcaaugggaua

SEQ ID NO: 572973 - RNA, 19 nt, Homo sapiens
  misc_RNA (1)...(19): siRNA sense strand
ucaaauccuugcaugacau

SEQ ID NO: 572974 - RNA, 19 nt, Homo sapiens
  misc_RNA (1)...(19): siRNA sense strand
uguuggauguuaucucuga

SEQ ID NO: 572975 - RNA, 19 nt, Homo sapiens
  misc_RNA (1)...(19): siRNA sense strand
ggucauuuguggcaugucu

SEQ ID NO: 572976 - RNA, 19 nt, Homo sapiens
  misc_RNA (1)...(19): siRNA sense strand
uauuugagcgcuccguaua

SEQ ID NO: 572977 - RNA, 19 nt, Homo sapiens
  misc_RNA (1)...(19): siRNA sense strand
aaugacaacucaccucucu

SEQ ID NO: 572978 - RNA, 19 nt, Homo sapiens
  misc_RNA (1)...(19): siRNA sense strand
ggaaaggggaucacgcuaa

SEQ ID NO: 572979 - RNA, 19 nt, Homo sapiens
  misc_RNA (1)...(19): siRNA sense strand
cgaaggacaaucacugugu

SEQ ID NO: 572980 - RNA, 19 nt, Homo sapiens
  misc_RNA (1)...(19): siRNA sense strand
cgggacagcucgaguacuc

SEQ ID NO: 572981 - RNA, 19 nt, Homo sapiens
  misc_RNA (1)...(19): siRNA sense strand
ucacuagguccgccugaaa

SEQ ID NO: 572982 - RNA, 19 nt, Homo sapiens
  misc_RNA (1)...(19): siRNA sense strand
gacuugguucugauaauaa

SEQ ID NO: 572983 - RNA, 19 nt, Homo sapiens
  misc_RNA (1)...(19): siRNA sense strand
guauggaaguaagaugguu

SEQ ID NO: 572984 - RNA, 19 nt, Homo sapiens
  misc_RNA (1)...(19): siRNA sense strand
gaggaucugagguauggaa

SEQ ID NO: 572985 - RNA, 19 nt, Homo sapiens
  misc_RNA (1)...(19): siRNA sense strand
gaauaccaaguccugauca

SEQ ID NO: 572986 - RNA, 19 nt, Homo sapiens
  misc_RNA (1)...(19): siRNA sense strand
gaucagugaauaccaaguc

SEQ ID NO: 572987 - RNA, 19 nt, Homo sapiens
  misc_RNA (1)...(19): siRNA sense strand
gaaguaagaugguuucaaa

SEQ ID NO: 572988 - RNA, 19 nt, Homo sapiens
  misc_RNA (1)...(19): siRNA sense strand
gcaaguagcugcuucacua

SEQ ID NO: 572989 - RNA, 19 nt, Homo sapiens
  misc_RNA (1)...(19): siRNA sense strand
ggacugaauuugccaauau

SEQ ID NO: 572990 - RNA, 19 nt, Homo sapiens
  misc_RNA (1)...(19): siRNA sense strand
ggacuugguucugauaaua

SEQ ID NO: 572991 - RNA, 19 nt, Homo sapiens
  misc_RNA (1)...(19): siRNA sense strand
agaauggccuugucucuua

SEQ ID NO: 572992 - RNA, 19 nt, Homo sapiens
  misc_RNA (1)...(19): siRNA sense strand
gcaaugggauacuaagcua

SEQ ID NO: 572993 - RNA, 19 nt, Homo sapiens
  misc_RNA (1)...(19): siRNA sense strand
gaucugagguauggaagua

SEQ ID NO: 572994 - RNA, 19 nt, Homo sapiens
  misc_RNA (1)...(19): siRNA sense strand
gcccagaacuuguauuuag

SEQ ID NO: 572995 - RNA, 19 nt, Homo sapiens
  misc_RNA (1)...(19): siRNA sense strand
ggacgaaggugucuuuggu

SEQ ID NO: 572996 - RNA, 19 nt, Homo sapiens
  misc_RNA (1)...(19): siRNA sense strand
guaauugccuuggcuugua

SEQ ID NO: 572997 - RNA, 19 nt, Homo sapiens
  misc_RNA (1)...(19): siRNA sense strand
gcaauuugguggucagaga

SEQ ID NO: 572998 - RNA, 19 nt, Homo sapiens
  misc_RNA (1)...(19): siRNA sense strand
ugacaacgcgccuguauuu

SEQ ID NO: 572999 - RNA, 19 nt, Homo sapiens
  misc_RNA (1)...(19): siRNA sense strand
gcacaagucaccaucauug

SEQ ID NO: 573000 - RNA, 19 nt, Homo sapiens
  misc_RNA (1)...(19): siRNA sense strand
ggacaccaaugacaacuca

SEQ ID NO: 573001 - RNA, 19 nt, Homo sapiens
  misc_RNA (1)...(19): siRNA sense strand
gcagaucagugaauaccaa

SEQ ID NO: 573002 - RNA, 19 nt, Homo sapiens
  misc_RNA (1)...(19): siRNA sense strand
gaaggugucuuugguuuag

SEQ ID NO: 573003 - RNA, 19 nt, Homo sapiens
  misc_RNA (1)...(19): siRNA sense strand
auacuaagcuacagccuaa

SEQ ID NO: 573004 - RNA, 19 nt, Homo sapiens
  misc_RNA (1)...(19): siRNA sense strand
gggagcagaucagugaaua

SEQ ID NO: 573005 - RNA, 19 nt, Homo sapiens
  misc_RNA (1)...(19): siRNA sense strand
augaagaccucgauucuaa

SEQ ID NO: 573006 - RNA, 19 nt, Homo sapiens
  misc_RNA (1)...(19): siRNA sense strand
gcacagugauugcucucuu

SEQ ID NO: 573007 - RNA, 19 nt, Homo sapiens
  misc_RNA (1)...(19): siRNA sense strand
gugcaacagugacuauaaa

SEQ ID NO: 573008 - RNA, 19 nt, Homo sapiens
  misc_RNA (1)...(19): siRNA sense strand
ucaguuacuuccagacuuu

SEQ ID NO: 573009 - RNA, 19 nt, Homo sapiens
  misc_RNA (1)...(19): siRNA sense strand
gaaguccaguacucccuaa

SEQ ID NO: 573010 - RNA, 19 nt, Homo sapiens
  misc_RNA (1)...(19): siRNA sense strand
ugacugacgugaacgauca

SEQ ID NO: 573011 - RNA, 19 nt, Homo sapiens
  misc_RNA (1)...(19): siRNA sense strand
caacagugacuauaaacuu

SEQ ID NO: 573012 - RNA, 19 nt, Homo sapiens
  misc_RNA (1)...(19): siRNA sense strand
aaacuuccuuugacuuuga

SEQ ID NO: 573013 - RNA, 19 nt, Homo sapiens
  misc_RNA (1)...(19): siRNA sense strand
gggaagcaaugggauacua

SEQ ID NO: 573014 - RNA, 19 nt, Homo sapiens
  misc_RNA (1)...(19): siRNA sense strand
cuuaugagcuguuggaugu

SEQ ID NO: 573015 - RNA, 19 nt, Homo sapiens
  misc_RNA (1)...(19): siRNA sense strand
ugacaacucaccucucuuu

SEQ ID NO: 573016 - RNA, 19 nt, Homo sapiens
  misc_RNA (1)...(19): siRNA sense strand
uaugagcuguuggauguua

SEQ ID NO: 573017 - RNA, 19 nt, Homo sapiens
  misc_RNA (1)...(19): siRNA sense strand
ccaaugggacuguguuauu

SEQ ID NO: 573018 - RNA, 19 nt, Homo sapiens
  misc_RNA (1)...(19): siRNA sense strand
gcuccguacugcucgcuua

SEQ ID NO: 573019 - RNA, 19 nt, Homo sapiens
  misc_RNA (1)...(19): siRNA sense strand
ccacuuagcacccgaagga

SEQ ID NO: 573020 - RNA, 19 nt, Homo sapiens
  misc_RNA (1)...(19): siRNA sense strand
ggaagcaaugggauacuaa

SEQ ID NO: 573021 - RNA, 19 nt, Homo sapiens
  misc_RNA (1)...(19): siRNA sense strand
ggaucacgcuaaugucaau

SEQ ID NO: 573022 - RNA, 19 nt, Homo sapiens
  misc_RNA (1)...(19): siRNA sense strand
gaaccaggagggcagcuuu

SEQ ID NO: 573023 - RNA, 19 nt, Homo sapiens
  misc_RNA (1)...(19): siRNA sense strand
gaagaccucgauucuaaug

SEQ ID NO: 573024 - RNA, 19 nt, Homo sapiens
  misc_RNA (1)...(19): siRNA sense strand
caaugggacuguguuauuc

SEQ ID NO: 573025 - RNA, 19 nt, Homo sapiens
  misc_RNA (1)...(19): siRNA sense strand
ggaggugacugacgugaac

SEQ ID NO: 573026 - RNA, 19 nt, Homo sapiens
  misc_RNA (1)...(19): siRNA sense strand
caccauagaugucacuaca

SEQ ID NO: 573027 - RNA, 19 nt, Homo sapiens
  misc_RNA (1)...(19): siRNA sense strand
ccacuuuccuccucuguca

SEQ ID NO: 573028 - RNA, 19 nt, Homo sapiens
  misc_RNA (1)...(19): siRNA sense strand
gaauggccuugucucuuau

SEQ ID NO: 573029 - RNA, 19 nt, Homo sapiens
  misc_RNA (1)...(19): siRNA sense strand
ugacaauacaccaaacuuu

SEQ ID NO: 573030 - RNA, 19 nt, Homo sapiens
  misc_RNA (1)...(19): siRNA sense strand
gcuuaguucuucccacuga

SEQ ID NO: 573031 - RNA, 19 nt, Homo sapiens
  misc_RNA (1)...(19): siRNA sense strand
gacaauacaccaaacuuuc

SEQ ID NO: 573032 - RNA, 19 nt, Homo sapiens
  misc_RNA (1)...(19): siRNA sense strand
ccauagaugucacuacagu

SEQ ID NO: 573033 - RNA, 19 nt, Homo sapiens
  misc_RNA (1)...(19): siRNA sense strand
gaagggccaucagccucua

SEQ ID NO: 573034 - RNA, 19 nt, Homo sapiens
  misc_RNA (1)...(19): siRNA sense strand
gaagugcaacagugacuau

SEQ ID NO: 573035 - RNA, 19 nt, Homo sapiens
  misc_RNA (1)...(19): siRNA sense strand
gaaaggggaucacgcuaau

SEQ ID NO: 573036 - RNA, 19 nt, Homo sapiens
  misc_RNA (1)...(19): siRNA sense strand
gaccucgauucuaauggua

SEQ ID NO: 573037 - RNA, 19 nt, Homo sapiens
  misc_RNA (1)...(19): siRNA sense strand
ccagaacuuguauuuagua

SEQ ID NO: 573038 - RNA, 19 nt, Homo sapiens
  misc_RNA (1)...(19): siRNA sense strand
acaauuauccgguuaucuu

SEQ ID NO: 573039 - RNA, 19 nt, Homo sapiens
  misc_RNA (1)...(19): siRNA sense strand
gaucacggccucagauagu

SEQ ID NO: 573040 - RNA, 19 nt, Homo sapiens
  misc_RNA (1)...(19): siRNA sense strand
caacgcgccuguauuugag

SEQ ID NO: 573041 - RNA, 19 nt, Homo sapiens
  misc_RNA (1)...(19): siRNA sense strand
gggcguagccguaggcaau

SEQ ID NO: 573042 - RNA, 19 nt, Homo sapiens
  misc_RNA (1)...(19): siRNA sense strand
gcuguuggauguuaucucu

SEQ ID NO: 573043 - RNA, 19 nt, Homo sapiens
  misc_RNA (1)...(19): siRNA sense strand
gaagaauggccuugucucu

SEQ ID NO: 573044 - RNA, 19 nt, Homo sapiens
  misc_RNA (1)...(19): siRNA sense strand
gaugaagaccucgauucua

SEQ ID NO: 573045 - RNA, 19 nt, Homo sapiens
  misc_RNA (1)...(19): siRNA sense strand
ugauugcucucuuuagugu

SEQ ID NO: 573046 - RNA, 19 nt, Homo sapiens
  misc_RNA (1)...(19): siRNA sense strand
cgaaggugucuuugguuua

SEQ ID NO: 573047 - RNA, 19 nt, Homo sapiens
  misc_RNA (1)...(19): siRNA sense strand
gagggacgaaggugucuuu

SEQ ID NO: 573048 - RNA, 19 nt, Homo sapiens
  misc_RNA (1)...(19): siRNA sense strand
guaagaugguuucaaaucc

SEQ ID NO: 573049 - RNA, 19 nt, Homo sapiens
  misc_RNA (1)...(19): siRNA sense strand
caaagcugccugcgucuug

SEQ ID NO: 573050 - RNA, 19 nt, Homo sapiens
  misc_RNA (1)...(19): siRNA sense strand
acgaaggugucuuugguuu

SEQ ID NO: 573051 - RNA, 19 nt, Homo sapiens
  misc_RNA (1)...(19): siRNA sense strand
cacagugauugcucucuuu

SEQ ID NO: 573052 - RNA, 19 nt, Homo sapiens
  misc_RNA (1)...(19): siRNA sense strand
caacucaccucucuuuccu

SEQ ID NO: 573053 - RNA, 19 nt, Homo sapiens
  misc_RNA (1)...(19): siRNA sense strand
guagauaggaaugacaauu

SEQ ID NO: 573054 - RNA, 19 nt, Homo sapiens
  misc_RNA (1)...(19): siRNA sense strand
acaacgcgccuguauuuga

SEQ ID NO: 573055 - RNA, 19 nt, Homo sapiens
  misc_RNA (1)...(19): siRNA sense strand
aaugacaauuauccgguua

SEQ ID NO: 573056 - RNA, 19 nt, Homo sapiens
  misc_RNA (1)...(19): siRNA sense strand
ugaaugacaauacaccaaa

SEQ ID NO: 573057 - RNA, 19 nt, Homo sapiens
  misc_RNA (1)...(19): siRNA sense strand
gcucuuggaggcauacauu

SEQ ID NO: 573058 - RNA, 19 nt, Homo sapiens
  misc_RNA (1)...(19): siRNA sense strand
gcgaauacccggaguuggu

SEQ ID NO: 573059 - RNA, 19 nt, Homo sapiens
  misc_RNA (1)...(19): siRNA sense strand
caugacaucagccaccaua

SEQ ID NO: 573060 - RNA, 19 nt, Homo sapiens
  misc_RNA (1)...(19): siRNA sense strand
cauggagacccaccacuuu

SEQ ID NO: 573061 - RNA, 19 nt, Homo sapiens
  misc_RNA (1)...(19): siRNA sense strand
aacagugacuauaaacuug

SEQ ID NO: 573062 - RNA, 19 nt, Homo sapiens
  misc_RNA (1)...(19): siRNA sense strand
acaccaaacuuuccucaac

SEQ ID NO: 573063 - RNA, 19 nt, Homo sapiens
  misc_RNA (1)...(19): siRNA sense strand
gaaugacaauacaccaaac

SEQ ID NO: 573064 - RNA, 19 nt, Homo sapiens
  misc_RNA (1)...(19): siRNA sense strand
ggaugaagaccucgauucu

SEQ ID NO: 573065 - RNA, 19 nt, Homo sapiens
  misc_RNA (1)...(19): siRNA sense strand
gcuuucacgugcacccuaa

SEQ ID NO: 573066 - RNA, 19 nt, Homo sapiens
  misc_RNA (1)...(19): siRNA sense strand
cggcuuccuuugacaacua

SEQ ID NO: 573067 - RNA, 19 nt, Homo sapiens
  misc_RNA (1)...(19): siRNA sense strand
uaauugccuuggcuuguau

SEQ ID NO: 573068 - RNA, 19 nt, Homo sapiens
  misc_RNA (1)...(19): siRNA sense strand
ggaaguaagaugguuucaa

SEQ ID NO: 573069 - RNA, 19 nt, Homo sapiens
  misc_RNA (1)...(19): siRNA sense strand
gggacuugguucugauaau

SEQ ID NO: 573070 - RNA, 19 nt, Homo sapiens
  misc_RNA (1)...(19): siRNA sense strand
gacaucagccaccauagau

SEQ ID NO: 573071 - RNA, 19 nt, Homo sapiens
  misc_RNA (1)...(19): siRNA sense strand
ugacaucagccaccauaga

SEQ ID NO: 573072 - RNA, 19 nt, Homo sapiens
  misc_RNA (1)...(19): siRNA sense strand
cgagggaagcaaugggaua

SEQ ID NO: 573073 - RNA, 19 nt, Homo sapiens
  misc_RNA (1)...(19): siRNA sense strand
ucaaauccuugcaugacau

SEQ ID NO: 573074 - RNA, 19 nt, Homo sapiens
  misc_RNA (1)...(19): siRNA sense strand
uguuggauguuaucucuga

SEQ ID NO: 573075 - RNA, 19 nt, Homo sapiens
  misc_RNA (1)...(19): siRNA sense strand
ggucauuuguggcaugucu

SEQ ID NO: 573076 - RNA, 19 nt, Homo sapiens
  misc_RNA (1)...(19): siRNA sense strand
uauuugagcgcuccguaua

SEQ ID NO: 573077 - RNA, 19 nt, Homo sapiens
  misc_RNA (1)...(19): siRNA sense strand
aaugacaacucaccucucu

SEQ ID NO: 573078 - RNA, 19 nt, Homo sapiens
  misc_RNA (1)...(19): siRNA sense strand
ggaaaggggaucacgcuaa

SEQ ID NO: 573079 - RNA, 19 nt, Homo sapiens
  misc_RNA (1)...(19): siRNA sense strand
cgaaggacaaucacugugu

SEQ ID NO: 573080 - RNA, 19 nt, Homo sapiens
  misc_RNA (1)...(19): siRNA sense strand
cgggacagcucgaguacuc

SEQ ID NO: 573081 - RNA, 19 nt, Homo sapiens
  misc_RNA (1)...(19): siRNA sense strand
ucacuagguccgccugaaa

SEQ ID NO: 573082 - RNA, 19 nt, Homo sapiens
  misc_RNA (1)...(19): siRNA sense strand
gacuugguucugauaauaa

SEQ ID NO: 573083 - RNA, 19 nt, Homo sapiens
  misc_RNA (1)...(19): siRNA sense strand
guauggaaguaagaugguu

SEQ ID NO: 573084 - RNA, 19 nt, Homo sapiens
  misc_RNA (1)...(19): siRNA sense strand
gaggaucugagguauggaa

SEQ ID NO: 573085 - RNA, 19 nt, Homo sapiens
  misc_RNA (1)...(19): siRNA sense strand
gaauaccaaguccugauca

SEQ ID NO: 573086 - RNA, 19 nt, Homo sapiens
  misc_RNA (1)...(19): siRNA sense strand
gaucagugaauaccaaguc

SEQ ID NO: 573087 - RNA, 19 nt, Homo sapiens
  misc_RNA (1)...(19): siRNA sense strand
caaacuagauuucgaagaa

SEQ ID NO: 573088 - RNA, 19 nt, Homo sapiens
  misc_RNA (1)...(19): siRNA sense strand
caagaacuacuacucauua

SEQ ID NO: 573089 - RNA, 19 nt, Homo sapiens
  misc_RNA (1)...(19): siRNA sense strand
gagaacgccuucaauggaa

SEQ ID NO: 573090 - RNA, 19 nt, Homo sapiens
  misc_RNA (1)...(19): siRNA sense strand
gaaagcaagaaacgaauaa

SEQ ID NO: 573091 - RNA, 19 nt, Homo sapiens
  misc_RNA (1)...(19): siRNA sense strand
gcagugguauaugcauuua

SEQ ID NO: 573092 - RNA, 19 nt, Homo sapiens
  misc_RNA (1)...(19): siRNA sense strand
ggacaggccucugcagguu

SEQ ID NO: 573093 - RNA, 19 nt, Homo sapiens
  misc_RNA (1)...(19): siRNA sense strand
gagaggaaauucaggaaca

SEQ ID NO: 573094 - RNA, 19 nt, Homo sapiens
  misc_RNA (1)...(19): siRNA sense strand
ggaugucaauguuuacuug

SEQ ID NO: 573095 - RNA, 19 nt, Homo sapiens
  misc_RNA (1)...(19): siRNA sense strand
gaacauuagugaucaagcu

SEQ ID NO: 573096 - RNA, 19 nt, Homo sapiens
  misc_RNA (1)...(19): siRNA sense strand
ggacucagaaugcuugaaa

SEQ ID NO: 573097 - RNA, 19 nt, Homo sapiens
  misc_RNA (1)...(19): siRNA sense strand
caacgauuauuucacuuug

SEQ ID NO: 573098 - RNA, 19 nt, Homo sapiens
  misc_RNA (1)...(19): siRNA sense strand
ggaggcaguugacaaagga

SEQ ID NO: 573099 - RNA, 19 nt, Homo sapiens
  misc_RNA (1)...(19): siRNA sense strand
cuacugcucuggcuucuga

SEQ ID NO: 573100 - RNA, 19 nt, Homo sapiens
  misc_RNA (1)...(19): siRNA sense strand
ggaaaacacuggacagaga

SEQ ID NO: 573101 - RNA, 19 nt, Homo sapiens
  misc_RNA (1)...(19): siRNA sense strand
gaauaaucauugcagaauc

SEQ ID NO: 573102 - RNA, 19 nt, Homo sapiens
  misc_RNA (1)...(19): siRNA sense strand
gacuggaucccaacgauua

SEQ ID NO: 573103 - RNA, 19 nt, Homo sapiens
  misc_RNA (1)...(19): siRNA sense strand
ggagguaaaucugcagaau

SEQ ID NO: 573104 - RNA, 19 nt, Homo sapiens
  misc_RNA (1)...(19): siRNA sense strand
gaaauucaggaacauaguu

SEQ ID NO: 573105 - RNA, 19 nt, Homo sapiens
  misc_RNA (1)...(19): siRNA sense strand
ggaaguacuagauguaaau

SEQ ID NO: 573106 - RNA, 19 nt, Homo sapiens
  misc_RNA (1)...(19): siRNA sense strand
gagcguaucagccuaugaa

SEQ ID NO: 573107 - RNA, 19 nt, Homo sapiens
  misc_RNA (1)...(19): siRNA sense strand
uaccaucacuucuuuguca

SEQ ID NO: 573108 - RNA, 19 nt, Homo sapiens
  misc_RNA (1)...(19): siRNA sense strand
ucacguugcugcuguauac

SEQ ID NO: 573109 - RNA, 19 nt, Homo sapiens
  misc_RNA (1)...(19): siRNA sense strand
gcugguggaugucaauguu

SEQ ID NO: 573110 - RNA, 19 nt, Homo sapiens
  misc_RNA (1)...(19): siRNA sense strand
gaaucuagaccuccggaaa

SEQ ID NO: 573111 - RNA, 19 nt, Homo sapiens
  misc_RNA (1)...(19): siRNA sense strand
ccaauccguuuauaaagug

SEQ ID NO: 573112 - RNA, 19 nt, Homo sapiens
  misc_RNA (1)...(19): siRNA sense strand
cgaugcagauauuggagua

SEQ ID NO: 573113 - RNA, 19 nt, Homo sapiens
  misc_RNA (1)...(19): siRNA sense strand
agaacgcgcuggucuccua

SEQ ID NO: 573114 - RNA, 19 nt, Homo sapiens
  misc_RNA (1)...(19): siRNA sense strand
gcaguugacaaaggaaaua

SEQ ID NO: 573115 - RNA, 19 nt, Homo sapiens
  misc_RNA (1)...(19): siRNA sense strand
ggaacauaguuuauuacug

SEQ ID NO: 573116 - RNA, 19 nt, Homo sapiens
  misc_RNA (1)...(19): siRNA sense strand
uguauggccugcaguggua

SEQ ID NO: 573117 - RNA, 19 nt, Homo sapiens
  misc_RNA (1)...(19): siRNA sense strand
caagcuaaaugccacagau

SEQ ID NO: 573118 - RNA, 19 nt, Homo sapiens
  misc_RNA (1)...(19): siRNA sense strand
cagccuagcgccauuauug

SEQ ID NO: 573119 - RNA, 19 nt, Homo sapiens
  misc_RNA (1)...(19): siRNA sense strand
ugagggacauuaacgacaa

SEQ ID NO: 573120 - RNA, 19 nt, Homo sapiens
  misc_RNA (1)...(19): siRNA sense strand
augcguggcuuucguauga

SEQ ID NO: 573121 - RNA, 19 nt, Homo sapiens
  misc_RNA (1)...(19): siRNA sense strand
ggacagagaggaaauucag

SEQ ID NO: 573122 - RNA, 19 nt, Homo sapiens
  misc_RNA (1)...(19): siRNA sense strand
ugaaagcaagaaacgaaua

SEQ ID NO: 573123 - RNA, 19 nt, Homo sapiens
  misc_RNA (1)...(19): siRNA sense strand
ugguggaugucaauguuua

SEQ ID NO: 573124 - RNA, 19 nt, Homo sapiens
  misc_RNA (1)...(19): siRNA sense strand
ugguacaaauggagauaua

SEQ ID NO: 573125 - RNA, 19 nt, Homo sapiens
  misc_RNA (1)...(19): siRNA sense strand
gcaagaaacgaauaaucau

SEQ ID NO: 573126 - RNA, 19 nt, Homo sapiens
  misc_RNA (1)...(19): siRNA sense strand
gaacaauggagaaauuagg

SEQ ID NO: 573127 - RNA, 19 nt, Homo sapiens
  misc_RNA (1)...(19): siRNA sense strand
gcuguacacuggcgagauc

SEQ ID NO: 573128 - RNA, 19 nt, Homo sapiens
  misc_RNA (1)...(19): siRNA sense strand
gaggaaauucaggaacaua

SEQ ID NO: 573129 - RNA, 19 nt, Homo sapiens
  misc_RNA (1)...(19): siRNA sense strand
gcauaagacggaccucaug

SEQ ID NO: 573130 - RNA, 19 nt, Homo sapiens
  misc_RNA (1)...(19): siRNA sense strand
gaucgugacucuggcucaa

SEQ ID NO: 573131 - RNA, 19 nt, Homo sapiens
  misc_RNA (1)...(19): siRNA sense strand
ccaacgauuauuucacuuu

SEQ ID NO: 573132 - RNA, 19 nt, Homo sapiens
  misc_RNA (1)...(19): siRNA sense strand
gcagggaguuggucguacu

SEQ ID NO: 573133 - RNA, 19 nt, Homo sapiens
  misc_RNA (1)...(19): siRNA sense strand
ccaccuacaagaacuacua

SEQ ID NO: 573134 - RNA, 19 nt, Homo sapiens
  misc_RNA (1)...(19): siRNA sense strand
gagguuaccaucacuucuu

SEQ ID NO: 573135 - RNA, 19 nt, Homo sapiens
  misc_RNA (1)...(19): siRNA sense strand
cgaauaaucauugcagaau

SEQ ID NO: 573136 - RNA, 19 nt, Homo sapiens
  misc_RNA (1)...(19): siRNA sense strand
gguggaaguacuagaugua

SEQ ID NO: 573137 - RNA, 19 nt, Homo sapiens
  misc_RNA (1)...(19): siRNA sense strand
guacaaauggagauauagu

SEQ ID NO: 573138 - RNA, 19 nt, Homo sapiens
  misc_RNA (1)...(19): siRNA sense strand
cuacaagaacuacuacuca

SEQ ID NO: 573139 - RNA, 19 nt, Homo sapiens
  misc_RNA (1)...(19): siRNA sense strand
uccgaacaauggagaaauu

SEQ ID NO: 573140 - RNA, 19 nt, Homo sapiens
  misc_RNA (1)...(19): siRNA sense strand
ggagauauaguuuacucau

SEQ ID NO: 573141 - RNA, 19 nt, Homo sapiens
  misc_RNA (1)...(19): siRNA sense strand
agagaacgccuucaaugga

SEQ ID NO: 573142 - RNA, 19 nt, Homo sapiens
  misc_RNA (1)...(19): siRNA sense strand
gggaggaggacucagaaug

SEQ ID NO: 573143 - RNA, 19 nt, Homo sapiens
  misc_RNA (1)...(19): siRNA sense strand
uaccauaaauccgaacaau

SEQ ID NO: 573144 - RNA, 19 nt, Homo sapiens
  misc_RNA (1)...(19): siRNA sense strand
gagguaaaucugcagaaug

SEQ ID NO: 573145 - RNA, 19 nt, Homo sapiens
  misc_RNA (1)...(19): siRNA sense strand
uggaaguacuagauguaaa

SEQ ID NO: 573146 - RNA, 19 nt, Homo sapiens
  misc_RNA (1)...(19): siRNA sense strand
ggaggaggacucagaaugc

SEQ ID NO: 573147 - RNA, 19 nt, Homo sapiens
  misc_RNA (1)...(19): siRNA sense strand
aaacagucuugagcaaaug

SEQ ID NO: 573148 - RNA, 19 nt, Homo sapiens
  misc_RNA (1)...(19): siRNA sense strand
agguaaaucugcagaaugg

SEQ ID NO: 573149 - RNA, 19 nt, Homo sapiens
  misc_RNA (1)...(19): siRNA sense strand
gcaaacuagauuucgaaga

SEQ ID NO: 573150 - RNA, 19 nt, Homo sapiens
  misc_RNA (1)...(19): siRNA sense strand
ggaaauucaggaacauagu

SEQ ID NO: 573151 - RNA, 19 nt, Homo sapiens
  misc_RNA (1)...(19): siRNA sense strand
ugaaggugagggacauuaa

SEQ ID NO: 573152 - RNA, 19 nt, Homo sapiens
  misc_RNA (1)...(19): siRNA sense strand
gaaguacuagauguaaaug

SEQ ID NO: 573153 - RNA, 19 nt, Homo sapiens
  misc_RNA (1)...(19): siRNA sense strand
uuagagaacgccuucaaug

SEQ ID NO: 573154 - RNA, 19 nt, Homo sapiens
  misc_RNA (1)...(19): siRNA sense strand
uaaacucggcauugaccua

SEQ ID NO: 573155 - RNA, 19 nt, Homo sapiens
  misc_RNA (1)...(19): siRNA sense strand
gaugguacaaauggagaua

SEQ ID NO: 573156 - RNA, 19 nt, Homo sapiens
  misc_RNA (1)...(19): siRNA sense strand
ccugaaagcaagaaacgaa

SEQ ID NO: 573157 - RNA, 19 nt, Homo sapiens
  misc_RNA (1)...(19): siRNA sense strand
uacaagaacuacuacucau

SEQ ID NO: 573158 - RNA, 19 nt, Homo sapiens
  misc_RNA (1)...(19): siRNA sense strand
gugaaggugagggacauua

SEQ ID NO: 573159 - RNA, 19 nt, Homo sapiens
  misc_RNA (1)...(19): siRNA sense strand
cguaucagccuaugaacug

SEQ ID NO: 573160 - RNA, 19 nt, Homo sapiens
  misc_RNA (1)...(19): siRNA sense strand
ccgaacaauggagaaauua

SEQ ID NO: 573161 - RNA, 19 nt, Homo sapiens
  misc_RNA (1)...(19): siRNA sense strand
ccgcccauauucccugaaa

SEQ ID NO: 573162 - RNA, 19 nt, Homo sapiens
  misc_RNA (1)...(19): siRNA sense strand
uuuauaaagugacgguguu

SEQ ID NO: 573163 - RNA, 19 nt, Homo sapiens
  misc_RNA (1)...(19): siRNA sense strand
aaacucgauuuccacuaga

SEQ ID NO: 573164 - RNA, 19 nt, Homo sapiens
  misc_RNA (1)...(19): siRNA sense strand
ucauuuagaaggccuguau

SEQ ID NO: 573165 - RNA, 19 nt, Homo sapiens
  misc_RNA (1)...(19): siRNA sense strand
acaagaacuacuacucauu

SEQ ID NO: 573166 - RNA, 19 nt, Homo sapiens
  misc_RNA (1)...(19): siRNA sense strand
aaagugacgguguuagaga

SEQ ID NO: 573167 - RNA, 19 nt, Homo sapiens
  misc_RNA (1)...(19): siRNA sense strand
gagggaggaggacucagaa

SEQ ID NO: 573168 - RNA, 19 nt, Homo sapiens
  misc_RNA (1)...(19): siRNA sense strand
guugacaaaggaaauauuc

SEQ ID NO: 573169 - RNA, 19 nt, Homo sapiens
  misc_RNA (1)...(19): siRNA sense strand
gaucccaacgauuauuuca

SEQ ID NO: 573170 - RNA, 19 nt, Homo sapiens
  misc_RNA (1)...(19): siRNA sense strand
gaggaggacucagaaugcu

SEQ ID NO: 573171 - RNA, 19 nt, Homo sapiens
  misc_RNA (1)...(19): siRNA sense strand
ggaccgcgagagcguauca

SEQ ID NO: 573172 - RNA, 19 nt, Homo sapiens
  misc_RNA (1)...(19): siRNA sense strand
guggaaguacuagauguaa

SEQ ID NO: 573173 - RNA, 19 nt, Homo sapiens
  misc_RNA (1)...(19): siRNA sense strand
ggacaaaaggcaaacuaga

SEQ ID NO: 573174 - RNA, 19 nt, Homo sapiens
  misc_RNA (1)...(19): siRNA sense strand
acgauuauuucacuuugga

SEQ ID NO: 573175 - RNA, 19 nt, Homo sapiens
  misc_RNA (1)...(19): siRNA sense strand
accaauccguuuauaaagu

SEQ ID NO: 573176 - RNA, 19 nt, Homo sapiens
  misc_RNA (1)...(19): siRNA sense strand
agcaagaaacgaauaauca

SEQ ID NO: 573177 - RNA, 19 nt, Homo sapiens
  misc_RNA (1)...(19): siRNA sense strand
aagugacgguguuagagaa

SEQ ID NO: 573178 - RNA, 19 nt, Homo sapiens
  misc_RNA (1)...(19): siRNA sense strand
aaaacagucuugagcaaau

SEQ ID NO: 573179 - RNA, 19 nt, Homo sapiens
  misc_RNA (1)...(19): siRNA sense strand
acaaugcguggcuuucgua

SEQ ID NO: 573180 - RNA, 19 nt, Homo sapiens
  misc_RNA (1)...(19): siRNA sense strand
gagagcguaucagccuaug

SEQ ID NO: 573181 - RNA, 19 nt, Homo sapiens
  misc_RNA (1)...(19): siRNA sense strand
gcaccuugacgccgcaugu

SEQ ID NO: 573182 - RNA, 19 nt, Homo sapiens
  misc_RNA (1)...(19): siRNA sense strand
ggccugcagugguauaugc

SEQ ID NO: 573183 - RNA, 19 nt, Homo sapiens
  misc_RNA (1)...(19): siRNA sense strand
ugccacagauccugaugau

SEQ ID NO: 573184 - RNA, 19 nt, Homo sapiens
  misc_RNA (1)...(19): siRNA sense strand
augcagauauuggaguaaa

SEQ ID NO: 573185 - RNA, 19 nt, Homo sapiens
  misc_RNA (1)...(19): siRNA sense strand
uagagaacgccuucaaugg

SEQ ID NO: 573186 - RNA, 19 nt, Homo sapiens
  misc_RNA (1)...(19): siRNA sense strand
gcacagugagcgagcugau

SEQ ID NO: 573187 - RNA, 19 nt, Homo sapiens
  misc_RNA (1)...(19): siRNA sense strand
caaacuagauuucgaagaa

SEQ ID NO: 573188 - RNA, 19 nt, Homo sapiens
  misc_RNA (1)...(19): siRNA sense strand
caagaacuacuacucauua

SEQ ID NO: 573189 - RNA, 19 nt, Homo sapiens
  misc_RNA (1)...(19): siRNA sense strand
gagaacgccuucaauggaa

SEQ ID NO: 573190 - RNA, 19 nt, Homo sapiens
  misc_RNA (1)...(19): siRNA sense strand
gaaagcaagaaacgaauaa

SEQ ID NO: 573191 - RNA, 19 nt, Homo sapiens
  misc_RNA (1)...(19): siRNA sense strand
gcagugguauaugcauuua

SEQ ID NO: 573192 - RNA, 19 nt, Homo sapiens
  misc_RNA (1)...(19): siRNA sense strand
ggacaggccucugcagguu

SEQ ID NO: 573193 - RNA, 19 nt, Homo sapiens
  misc_RNA (1)...(19): siRNA sense strand
gagaggaaauucaggaaca

SEQ ID NO: 573194 - RNA, 19 nt, Homo sapiens
  misc_RNA (1)...(19): siRNA sense strand
ggaugucaauguuuacuug

SEQ ID NO: 573195 - RNA, 19 nt, Homo sapiens
  misc_RNA (1)...(19): siRNA sense strand
gaacauuagugaucaagcu

SEQ ID NO: 573196 - RNA, 19 nt, Homo sapiens
  misc_RNA (1)...(19): siRNA sense strand
ggacucagaaugcuugaaa

SEQ ID NO: 573197 - RNA, 19 nt, Homo sapiens
  misc_RNA (1)...(19): siRNA sense strand
caacgauuauuucacuuug

SEQ ID NO: 573198 - RNA, 19 nt, Homo sapiens
  misc_RNA (1)...(19): siRNA sense strand
ggaggcaguugacaaagga

SEQ ID NO: 573199 - RNA, 19 nt, Homo sapiens
  misc_RNA (1)...(19): siRNA sense strand
cuacugcucuggcuucuga

SEQ ID NO: 573200 - RNA, 19 nt, Homo sapiens
  misc_RNA (1)...(19): siRNA sense strand
ggaaaacacuggacagaga

SEQ ID NO: 573201 - RNA, 19 nt, Homo sapiens
  misc_RNA (1)...(19): siRNA sense strand
gaauaaucauugcagaauc

SEQ ID NO: 573202 - RNA, 19 nt, Homo sapiens
  misc_RNA (1)...(19): siRNA sense strand
gacuggaucccaacgauua

SEQ ID NO: 573203 - RNA, 19 nt, Homo sapiens
  misc_RNA (1)...(19): siRNA sense strand
ggagguaaaucugcagaau

SEQ ID NO: 573204 - RNA, 19 nt, Homo sapiens
  misc_RNA (1)...(19): siRNA sense strand
gaaauucaggaacauaguu

SEQ ID NO: 573205 - RNA, 19 nt, Homo sapiens
  misc_RNA (1)...(19): siRNA sense strand
ggaaguacuagauguaaau

SEQ ID NO: 573206 - RNA, 19 nt, Homo sapiens
  misc_RNA (1)...(19): siRNA sense strand
gagcguaucagccuaugaa

SEQ ID NO: 573207 - RNA, 19 nt, Homo sapiens
  misc_RNA (1)...(19): siRNA sense strand
uaccaucacuucuuuguca

SEQ ID NO: 573208 - RNA, 19 nt, Homo sapiens
  misc_RNA (1)...(19): siRNA sense strand
ucacguugcugcuguauac

SEQ ID NO: 573209 - RNA, 19 nt, Homo sapiens
  misc_RNA (1)...(19): siRNA sense strand
gcugguggaugucaauguu

SEQ ID NO: 573210 - RNA, 19 nt, Homo sapiens
  misc_RNA (1)...(19): siRNA sense strand
gaaucuagaccuccggaaa

SEQ ID NO: 573211 - RNA, 19 nt, Homo sapiens
  misc_RNA (1)...(19): siRNA sense strand
ccaauccguuuauaaagug

SEQ ID NO: 573212 - RNA, 19 nt, Homo sapiens
  misc_RNA (1)...(19): siRNA sense strand
cgaugcagauauuggagua

SEQ ID NO: 573213 - RNA, 19 nt, Homo sapiens
  misc_RNA (1)...(19): siRNA sense strand
agaacgcgcuggucuccua

SEQ ID NO: 573214 - RNA, 19 nt, Homo sapiens
  misc_RNA (1)...(19): siRNA sense strand
gcaguugacaaaggaaaua

SEQ ID NO: 573215 - RNA, 19 nt, Homo sapiens
  misc_RNA (1)...(19): siRNA sense strand
ggaacauaguuuauuacug

SEQ ID NO: 573216 - RNA, 19 nt, Homo sapiens
  misc_RNA (1)...(19): siRNA sense strand
uguauggccugcaguggua

SEQ ID NO: 573217 - RNA, 19 nt, Homo sapiens
  misc_RNA (1)...(19): siRNA sense strand
caagcuaaaugccacagau

SEQ ID NO: 573218 - RNA, 19 nt, Homo sapiens
  misc_RNA (1)...(19): siRNA sense strand
cagccuagcgccauuauug

SEQ ID NO: 573219 - RNA, 19 nt, Homo sapiens
  misc_RNA (1)...(19): siRNA sense strand
ugagggacauuaacgacaa

SEQ ID NO: 573220 - RNA, 19 nt, Homo sapiens
  misc_RNA (1)...(19): siRNA sense strand
augcguggcuuucguauga

SEQ ID NO: 573221 - RNA, 19 nt, Homo sapiens
  misc_RNA (1)...(19): siRNA sense strand
ggacagagaggaaauucag

SEQ ID NO: 573222 - RNA, 19 nt, Homo sapiens
  misc_RNA (1)...(19): siRNA sense strand
ugaaagcaagaaacgaaua

SEQ ID NO: 573223 - RNA, 19 nt, Homo sapiens
  misc_RNA (1)...(19): siRNA sense strand
ugguggaugucaauguuua

SEQ ID NO: 573224 - RNA, 19 nt, Homo sapiens
  misc_RNA (1)...(19): siRNA sense strand
ugguacaaauggagauaua

SEQ ID NO: 573225 - RNA, 19 nt, Homo sapiens
  misc_RNA (1)...(19): siRNA sense strand
gcaagaaacgaauaaucau

SEQ ID NO: 573226 - RNA, 19 nt, Homo sapiens
  misc_RNA (1)...(19): siRNA sense strand
gaacaauggagaaauuagg

SEQ ID NO: 573227 - RNA, 19 nt, Homo sapiens
  misc_RNA (1)...(19): siRNA sense strand
gcuguacacuggcgagauc

SEQ ID NO: 573228 - RNA, 19 nt, Homo sapiens
  misc_RNA (1)...(19): siRNA sense strand
gaggaaauucaggaacaua

SEQ ID NO: 573229 - RNA, 19 nt, Homo sapiens
  misc_RNA (1)...(19): siRNA sense strand
gcauaagacggaccucaug

SEQ ID NO: 573230 - RNA, 19 nt, Homo sapiens
  misc_RNA (1)...(19): siRNA sense strand
gaucgugacucuggcucaa

SEQ ID NO: 573231 - RNA, 19 nt, Homo sapiens
  misc_RNA (1)...(19): siRNA sense strand
ccaacgauuauuucacuuu

SEQ ID NO: 573232 - RNA, 19 nt, Homo sapiens
  misc_RNA (1)...(19): siRNA sense strand
gcagggaguuggucguacu

SEQ ID NO: 573233 - RNA, 19 nt, Homo sapiens
  misc_RNA (1)...(19): siRNA sense strand
ccaccuacaagaacuacua

SEQ ID NO: 573234 - RNA, 19 nt, Homo sapiens
  misc_RNA (1)...(19): siRNA sense strand
gagguuaccaucacuucuu

SEQ ID NO: 573235 - RNA, 19 nt, Homo sapiens
  misc_RNA (1)...(19): siRNA sense strand
cgaauaaucauugcagaau

SEQ ID NO: 573236 - RNA, 19 nt, Homo sapiens
  misc_RNA (1)...(19): siRNA sense strand
gguggaaguacuagaugua

SEQ ID NO: 573237 - RNA, 19 nt, Homo sapiens
  misc_RNA (1)...(19): siRNA sense strand
guacaaauggagauauagu

SEQ ID NO: 573238 - RNA, 19 nt, Homo sapiens
  misc_RNA (1)...(19): siRNA sense strand
cuacaagaacuacuacuca

SEQ ID NO: 573239 - RNA, 19 nt, Homo sapiens
  misc_RNA (1)...(19): siRNA sense strand
uccgaacaauggagaaauu

SEQ ID NO: 573240 - RNA, 19 nt, Homo sapiens
  misc_RNA (1)...(19): siRNA sense strand
ggagauauaguuuacucau

SEQ ID NO: 573241 - RNA, 19 nt, Homo sapiens
  misc_RNA (1)...(19): siRNA sense strand
agagaacgccuucaaugga

SEQ ID NO: 573242 - RNA, 19 nt, Homo sapiens
  misc_RNA (1)...(19): siRNA sense strand
gggaggaggacucagaaug

SEQ ID NO: 573243 - RNA, 19 nt, Homo sapiens
  misc_RNA (1)...(19): siRNA sense strand
uaccauaaauccgaacaau

SEQ ID NO: 573244 - RNA, 19 nt, Homo sapiens
  misc_RNA (1)...(19): siRNA sense strand
gagguaaaucugcagaaug

SEQ ID NO: 573245 - RNA, 19 nt, Homo sapiens
  misc_RNA (1)...(19): siRNA sense strand
uggaaguacuagauguaaa

SEQ ID NO: 573246 - RNA, 19 nt, Homo sapiens
  misc_RNA (1)...(19): siRNA sense strand
ggaggaggacucagaaugc

SEQ ID NO: 573247 - RNA, 19 nt, Homo sapiens
  misc_RNA (1)...(19): siRNA sense strand
aaacagucuugagcaaaug

SEQ ID NO: 573248 - RNA, 19 nt, Homo sapiens
  misc_RNA (1)...(19): siRNA sense strand
agguaaaucugcagaaugg

SEQ ID NO: 573249 - RNA, 19 nt, Homo sapiens
  misc_RNA (1)...(19): siRNA sense strand
gcaaacuagauuucgaaga

SEQ ID NO: 573250 - RNA, 19 nt, Homo sapiens
  misc_RNA (1)...(19): siRNA sense strand
ggaaauucaggaacauagu

SEQ ID NO: 573251 - RNA, 19 nt, Homo sapiens
  misc_RNA (1)...(19): siRNA sense strand
ugaaggugagggacauuaa

SEQ ID NO: 573252 - RNA, 19 nt, Homo sapiens
  misc_RNA (1)...(19): siRNA sense strand
gaaguacuagauguaaaug

SEQ ID NO: 573253 - RNA, 19 nt, Homo sapiens
  misc_RNA (1)...(19): siRNA sense strand
uuagagaacgccuucaaug

SEQ ID NO: 573254 - RNA, 19 nt, Homo sapiens
  misc_RNA (1)...(19): siRNA sense strand
uaaacucggcauugaccua

SEQ ID NO: 573255 - RNA, 19 nt, Homo sapiens
  misc_RNA (1)...(19): siRNA sense strand
gaugguacaaauggagaua

SEQ ID NO: 573256 - RNA, 19 nt, Homo sapiens
  misc_RNA (1)...(19): siRNA sense strand
ccugaaagcaagaaacgaa

SEQ ID NO: 573257 - RNA, 19 nt, Homo sapiens
  misc_RNA (1)...(19): siRNA sense strand
uacaagaacuacuacucau

SEQ ID NO: 573258 - RNA, 19 nt, Homo sapiens
  misc_RNA (1)...(19): siRNA sense strand
gugaaggugagggacauua

SEQ ID NO: 573259 - RNA, 19 nt, Homo sapiens
  misc_RNA (1)...(19): siRNA sense strand
cguaucagccuaugaacug

SEQ ID NO: 573260 - RNA, 19 nt, Homo sapiens
  misc_RNA (1)...(19): siRNA sense strand
ccgaacaauggagaaauua

SEQ ID NO: 573261 - RNA, 19 nt, Homo sapiens
  misc_RNA (1)...(19): siRNA sense strand
ccgcccauauucccugaaa

SEQ ID NO: 573262 - RNA, 19 nt, Homo sapiens
  misc_RNA (1)...(19): siRNA sense strand
uuuauaaagugacgguguu

SEQ ID NO: 573263 - RNA, 19 nt, Homo sapiens
  misc_RNA (1)...(19): siRNA sense strand
aaacucgauuuccacuaga

SEQ ID NO: 573264 - RNA, 19 nt, Homo sapiens
  misc_RNA (1)...(19): siRNA sense strand
ucauuuagaaggccuguau

SEQ ID NO: 573265 - RNA, 19 nt, Homo sapiens
  misc_RNA (1)...(19): siRNA sense strand
acaagaacuacuacucauu

SEQ ID NO: 573266 - RNA, 19 nt, Homo sapiens
  misc_RNA (1)...(19): siRNA sense strand
aaagugacgguguuagaga

SEQ ID NO: 573267 - RNA, 19 nt, Homo sapiens
  misc_RNA (1)...(19): siRNA sense strand
gagggaggaggacucagaa

SEQ ID NO: 573268 - RNA, 19 nt, Homo sapiens
  misc_RNA (1)...(19): siRNA sense strand
guugacaaaggaaauauuc

SEQ ID NO: 573269 - RNA, 19 nt, Homo sapiens
  misc_RNA (1)...(19): siRNA sense strand
gaucccaacgauuauuuca

SEQ ID NO: 573270 - RNA, 19 nt, Homo sapiens
  misc_RNA (1)...(19): siRNA sense strand
gaggaggacucagaaugcu

SEQ ID NO: 573271 - RNA, 19 nt, Homo sapiens
  misc_RNA (1)...(19): siRNA sense strand
ggaccgcgagagcguauca

SEQ ID NO: 573272 - RNA, 19 nt, Homo sapiens
  misc_RNA (1)...(19): siRNA sense strand
guggaaguacuagauguaa

SEQ ID NO: 573273 - RNA, 19 nt, Homo sapiens
  misc_RNA (1)...(19): siRNA sense strand
ggacaaaaggcaaacuaga

SEQ ID NO: 573274 - RNA, 19 nt, Homo sapiens
  misc_RNA (1)...(19): siRNA sense strand
acgauuauuucacuuugga

SEQ ID NO: 573275 - RNA, 19 nt, Homo sapiens
  misc_RNA (1)...(19): siRNA sense strand
accaauccguuuauaaagu

SEQ ID NO: 573276 - RNA, 19 nt, Homo sapiens
  misc_RNA (1)...(19): siRNA sense strand
agcaagaaacgaauaauca

SEQ ID NO: 573277 - RNA, 19 nt, Homo sapiens
  misc_RNA (1)...(19): siRNA sense strand
aagugacgguguuagagaa

SEQ ID NO: 573278 - RNA, 19 nt, Homo sapiens
  misc_RNA (1)...(19): siRNA sense strand
aaaacagucuugagcaaau

SEQ ID NO: 573279 - RNA, 19 nt, Homo sapiens
  misc_RNA (1)...(19): siRNA sense strand
acaaugcguggcuuucgua

SEQ ID NO: 573280 - RNA, 19 nt, Homo sapiens
  misc_RNA (1)...(19): siRNA sense strand
gagagcguaucagccuaug

SEQ ID NO: 573281 - RNA, 19 nt, Homo sapiens
  misc_RNA (1)...(19): siRNA sense strand
gcaccuugacgccgcaugu

SEQ ID NO: 573282 - RNA, 19 nt, Homo sapiens
  misc_RNA (1)...(19): siRNA sense strand
ggccugcagugguauaugc

SEQ ID NO: 573283 - RNA, 19 nt, Homo sapiens
  misc_RNA (1)...(19): siRNA sense strand
ugccacagauccugaugau

SEQ ID NO: 573284 - RNA, 19 nt, Homo sapiens
  misc_RNA (1)...(19): siRNA sense strand
augcagauauuggaguaaa

SEQ ID NO: 573285 - RNA, 19 nt, Homo sapiens
  misc_RNA (1)...(19): siRNA sense strand
uagagaacgccuucaaugg

SEQ ID NO: 573286 - RNA, 19 nt, Homo sapiens
  misc_RNA (1)...(19): siRNA sense strand
gcacagugagcgagcugau

SEQ ID NO: 573287 - RNA, 19 nt, Homo sapiens
  misc_RNA (1)...(19): siRNA sense strand
gguaaucgauggcgguaaa

SEQ ID NO: 573288 - RNA, 19 nt, Homo sapiens
  misc_RNA (1)...(19): siRNA sense strand
caagagugauccaacuaaa

SEQ ID NO: 573289 - RNA, 19 nt, Homo sapiens
  misc_RNA (1)...(19): siRNA sense strand
agacacaggugaaauuaga

SEQ ID NO: 573290 - RNA, 19 nt, Homo sapiens
  misc_RNA (1)...(19): siRNA sense strand
caaugucccugaaguaaug

SEQ ID NO: 573291 - RNA, 19 nt, Homo sapiens
  misc_RNA (1)...(19): siRNA sense strand
aaagguaccuguuucugaa

SEQ ID NO: 573292 - RNA, 19 nt, Homo sapiens
  misc_RNA (1)...(19): siRNA sense strand
ugaaggacauuaacgacaa

SEQ ID NO: 573293 - RNA, 19 nt, Homo sapiens
  misc_RNA (1)...(19): siRNA sense strand
gagaauaaugccuaugaaa

SEQ ID NO: 573294 - RNA, 19 nt, Homo sapiens
  misc_RNA (1)...(19): siRNA sense strand
gaaauuuccuaugggauca

SEQ ID NO: 573295 - RNA, 19 nt, Homo sapiens
  misc_RNA (1)...(19): siRNA sense strand
ggacuuaauggagaaauuu

SEQ ID NO: 573296 - RNA, 19 nt, Homo sapiens
  misc_RNA (1)...(19): siRNA sense strand
aaaguaguguugucugaaa

SEQ ID NO: 573297 - RNA, 19 nt, Homo sapiens
  misc_RNA (1)...(19): siRNA sense strand
ggagguaaaucugcagaau

SEQ ID NO: 573298 - RNA, 19 nt, Homo sapiens
  misc_RNA (1)...(19): siRNA sense strand
ggaaguuauuggacagaga

SEQ ID NO: 573299 - RNA, 19 nt, Homo sapiens
  misc_RNA (1)...(19): siRNA sense strand
caggucaucugcucacuga

SEQ ID NO: 573300 - RNA, 19 nt, Homo sapiens
  misc_RNA (1)...(19): siRNA sense strand
ucaaauaaccguccuggau

SEQ ID NO: 573301 - RNA, 19 nt, Homo sapiens
  misc_RNA (1)...(19): siRNA sense strand
cagguuaacgccauugaua

SEQ ID NO: 573302 - RNA, 19 nt, Homo sapiens
  misc_RNA (1)...(19): siRNA sense strand
gauaagcccagcuauaaag

SEQ ID NO: 573303 - RNA, 19 nt, Homo sapiens
  misc_RNA (1)...(19): siRNA sense strand
agaacgcgcugguguccua

SEQ ID NO: 573304 - RNA, 19 nt, Homo sapiens
  misc_RNA (1)...(19): siRNA sense strand
cgaaggacuuaauggagaa

SEQ ID NO: 573305 - RNA, 19 nt, Homo sapiens
  misc_RNA (1)...(19): siRNA sense strand
ccagacacaggugaaauua

SEQ ID NO: 573306 - RNA, 19 nt, Homo sapiens
  misc_RNA (1)...(19): siRNA sense strand
gguuaacgccauugauaaa

SEQ ID NO: 573307 - RNA, 19 nt, Homo sapiens
  misc_RNA (1)...(19): siRNA sense strand
gcuauaaaguaguguuguc

SEQ ID NO: 573308 - RNA, 19 nt, Homo sapiens
  misc_RNA (1)...(19): siRNA sense strand
guuuaaauccucccaguga

SEQ ID NO: 573309 - RNA, 19 nt, Homo sapiens
  misc_RNA (1)...(19): siRNA sense strand
ugaagagaauaaugccuau

SEQ ID NO: 573310 - RNA, 19 nt, Homo sapiens
  misc_RNA (1)...(19): siRNA sense strand
auaaaguaguguugucuga

SEQ ID NO: 573311 - RNA, 19 nt, Homo sapiens
  misc_RNA (1)...(19): siRNA sense strand
ugacaaugguccggcguuu

SEQ ID NO: 573312 - RNA, 19 nt, Homo sapiens
  misc_RNA (1)...(19): siRNA sense strand
aagcggcucugguggauau

SEQ ID NO: 573313 - RNA, 19 nt, Homo sapiens
  misc_RNA (1)...(19): siRNA sense strand
ccaccuacaagaauuacua

SEQ ID NO: 573314 - RNA, 19 nt, Homo sapiens
  misc_RNA (1)...(19): siRNA sense strand
uugauaagcccagcuauaa

SEQ ID NO: 573315 - RNA, 19 nt, Homo sapiens
  misc_RNA (1)...(19): siRNA sense strand
gcuguacacuggcgagauc

SEQ ID NO: 573316 - RNA, 19 nt, Homo sapiens
  misc_RNA (1)...(19): siRNA sense strand
ucagguggguaccgucauu

SEQ ID NO: 573317 - RNA, 19 nt, Homo sapiens
  misc_RNA (1)...(19): siRNA sense strand
uaaacucucuuuugaccua

SEQ ID NO: 573318 - RNA, 19 nt, Homo sapiens
  misc_RNA (1)...(19): siRNA sense strand
gcccagcuauaaaguagug

SEQ ID NO: 573319 - RNA, 19 nt, Homo sapiens
  misc_RNA (1)...(19): siRNA sense strand
aaauaaccguccuggaugu

SEQ ID NO: 573320 - RNA, 19 nt, Homo sapiens
  misc_RNA (1)...(19): siRNA sense strand
cgccaaaacucaauuuauu

SEQ ID NO: 573321 - RNA, 19 nt, Homo sapiens
  misc_RNA (1)...(19): siRNA sense strand
uaaccguccuggaugugaa

SEQ ID NO: 573322 - RNA, 19 nt, Homo sapiens
  misc_RNA (1)...(19): siRNA sense strand
ucacugacaccucauguuc

SEQ ID NO: 573323 - RNA, 19 nt, Homo sapiens
  misc_RNA (1)...(19): siRNA sense strand
agagaauaaugccuaugaa

SEQ ID NO: 573324 - RNA, 19 nt, Homo sapiens
  misc_RNA (1)...(19): siRNA sense strand
ggauaucggcguaaacucu

SEQ ID NO: 573325 - RNA, 19 nt, Homo sapiens
  misc_RNA (1)...(19): siRNA sense strand
agagugauccaacuaaaug

SEQ ID NO: 573326 - RNA, 19 nt, Homo sapiens
  misc_RNA (1)...(19): siRNA sense strand
acaaugguccggcguuuga

SEQ ID NO: 573327 - RNA, 19 nt, Homo sapiens
  misc_RNA (1)...(19): siRNA sense strand
ggaugugaaugacaauggu

SEQ ID NO: 573328 - RNA, 19 nt, Homo sapiens
  misc_RNA (1)...(19): siRNA sense strand
cguuaagucuaaaugagaa

SEQ ID NO: 573329 - RNA, 19 nt, Homo sapiens
  misc_RNA (1)...(19): siRNA sense strand
gaaggacauuaacgacaac

SEQ ID NO: 573330 - RNA, 19 nt, Homo sapiens
  misc_RNA (1)...(19): siRNA sense strand
ucagcugucucgagaagau

SEQ ID NO: 573331 - RNA, 19 nt, Homo sapiens
  misc_RNA (1)...(19): siRNA sense strand
cggcucugguggauauuaa

SEQ ID NO: 573332 - RNA, 19 nt, Homo sapiens
  misc_RNA (1)...(19): siRNA sense strand
aagagaauaaugccuauga

SEQ ID NO: 573333 - RNA, 19 nt, Homo sapiens
  misc_RNA (1)...(19): siRNA sense strand
gagguaaaucugcagaaug

SEQ ID NO: 573334 - RNA, 19 nt, Homo sapiens
  misc_RNA (1)...(19): siRNA sense strand
guauauugccugaauuagu

SEQ ID NO: 573335 - RNA, 19 nt, Homo sapiens
  misc_RNA (1)...(19): siRNA sense strand
uagaauuuauggugaacug

SEQ ID NO: 573336 - RNA, 19 nt, Homo sapiens
  misc_RNA (1)...(19): siRNA sense strand
gagugagaaauguauguuu

SEQ ID NO: 573337 - RNA, 19 nt, Homo sapiens
  misc_RNA (1)...(19): siRNA sense strand
ggcguaaacucucuuuuga

SEQ ID NO: 573338 - RNA, 19 nt, Homo sapiens
  misc_RNA (1)...(19): siRNA sense strand
gcaugguccugguggaagu

SEQ ID NO: 573339 - RNA, 19 nt, Homo sapiens
  misc_RNA (1)...(19): siRNA sense strand
agguaaaucugcagaaugg

SEQ ID NO: 573340 - RNA, 19 nt, Homo sapiens
  misc_RNA (1)...(19): siRNA sense strand
acagagagcaaacgccaaa

SEQ ID NO: 573341 - RNA, 19 nt, Homo sapiens
  misc_RNA (1)...(19): siRNA sense strand
cgauggcgguaaaccagaa

SEQ ID NO: 573342 - RNA, 19 nt, Homo sapiens
  misc_RNA (1)...(19): siRNA sense strand
gauccagacgaaggacuua

SEQ ID NO: 573343 - RNA, 19 nt, Homo sapiens
  misc_RNA (1)...(19): siRNA sense strand
acaagagugauccaacuaa

SEQ ID NO: 573344 - RNA, 19 nt, Homo sapiens
  misc_RNA (1)...(19): siRNA sense strand
acacaagagugauccaacu

SEQ ID NO: 573345 - RNA, 19 nt, Homo sapiens
  misc_RNA (1)...(19): siRNA sense strand
ccagugagugagaaaugua

SEQ ID NO: 573346 - RNA, 19 nt, Homo sapiens
  misc_RNA (1)...(19): siRNA sense strand
uaacguguaccucaucauc

SEQ ID NO: 573347 - RNA, 19 nt, Homo sapiens
  misc_RNA (1)...(19): siRNA sense strand
gacgcugacuccggcuaua

SEQ ID NO: 573348 - RNA, 19 nt, Homo sapiens
  misc_RNA (1)...(19): siRNA sense strand
gcguuaagucuaaaugaga

SEQ ID NO: 573349 - RNA, 19 nt, Homo sapiens
  misc_RNA (1)...(19): siRNA sense strand
ugguggauauuaacgugua

SEQ ID NO: 573350 - RNA, 19 nt, Homo sapiens
  misc_RNA (1)...(19): siRNA sense strand
cgaagcggcucugguggau

SEQ ID NO: 573351 - RNA, 19 nt, Homo sapiens
  misc_RNA (1)...(19): siRNA sense strand
acgcuuggcuguccuacga

SEQ ID NO: 573352 - RNA, 19 nt, Homo sapiens
  misc_RNA (1)...(19): siRNA sense strand
gaacuggauuuugaagaga

SEQ ID NO: 573353 - RNA, 19 nt, Homo sapiens
  misc_RNA (1)...(19): siRNA sense strand
aagcccagcuauaaaguag

SEQ ID NO: 573354 - RNA, 19 nt, Homo sapiens
  misc_RNA (1)...(19): siRNA sense strand
uaagcccagcuauaaagua

SEQ ID NO: 573355 - RNA, 19 nt, Homo sapiens
  misc_RNA (1)...(19): siRNA sense strand
ugauaagcccagcuauaaa

SEQ ID NO: 573356 - RNA, 19 nt, Homo sapiens
  misc_RNA (1)...(19): siRNA sense strand
cuagagggcgcuucugaug

SEQ ID NO: 573357 - RNA, 19 nt, Homo sapiens
  misc_RNA (1)...(19): siRNA sense strand
uggaaguucuggacgugaa

SEQ ID NO: 573358 - RNA, 19 nt, Homo sapiens
  misc_RNA (1)...(19): siRNA sense strand
gccagugagugagaaaugu

SEQ ID NO: 573359 - RNA, 19 nt, Homo sapiens
  misc_RNA (1)...(19): siRNA sense strand
gaccuaugcguuaagucua

SEQ ID NO: 573360 - RNA, 19 nt, Homo sapiens
  misc_RNA (1)...(19): siRNA sense strand
agacgaaggacuuaaugga

SEQ ID NO: 573361 - RNA, 19 nt, Homo sapiens
  misc_RNA (1)...(19): siRNA sense strand
cacaagagugauccaacua

SEQ ID NO: 573362 - RNA, 19 nt, Homo sapiens
  misc_RNA (1)...(19): siRNA sense strand
gacaggccgcugcagguuu

SEQ ID NO: 573363 - RNA, 19 nt, Homo sapiens
  misc_RNA (1)...(19): siRNA sense strand
gagcaaacgccaaaacuca

SEQ ID NO: 573364 - RNA, 19 nt, Homo sapiens
  misc_RNA (1)...(19): siRNA sense strand
caccucauguucccuucaa

SEQ ID NO: 573365 - RNA, 19 nt, Homo sapiens
  misc_RNA (1)...(19): siRNA sense strand
uucaauaaauccagacaca

SEQ ID NO: 573366 - RNA, 19 nt, Homo sapiens
  misc_RNA (1)...(19): siRNA sense strand
uaaaguaguguugucugaa

SEQ ID NO: 573367 - RNA, 19 nt, Homo sapiens
  misc_RNA (1)...(19): siRNA sense strand
uggugucgcugguggagaa

SEQ ID NO: 573368 - RNA, 19 nt, Homo sapiens
  misc_RNA (1)...(19): siRNA sense strand
uuugauaagcccagcuaua

SEQ ID NO: 573369 - RNA, 19 nt, Homo sapiens
  misc_RNA (1)...(19): siRNA sense strand
uuuaaauccucccagugaa

SEQ ID NO: 573370 - RNA, 19 nt, Homo sapiens
  misc_RNA (1)...(19): siRNA sense strand
ggacgcugacuccggcuau

SEQ ID NO: 573371 - RNA, 19 nt, Homo sapiens
  misc_RNA (1)...(19): siRNA sense strand
gaagagaauaaugccuaug

SEQ ID NO: 573372 - RNA, 19 nt, Homo sapiens
  misc_RNA (1)...(19): siRNA sense strand
auggagaaauuuccuaugg

SEQ ID NO: 573373 - RNA, 19 nt, Homo sapiens
  misc_RNA (1)...(19): siRNA sense strand
ggcgguaaaccagaacuaa

SEQ ID NO: 573374 - RNA, 19 nt, Homo sapiens
  misc_RNA (1)...(19): siRNA sense strand
gcccaagacggaccucaug

SEQ ID NO: 573375 - RNA, 19 nt, Homo sapiens
  misc_RNA (1)...(19): siRNA sense strand
gcauuuuguuugugaauuc

SEQ ID NO: 573376 - RNA, 19 nt, Homo sapiens
  misc_RNA (1)...(19): siRNA sense strand
uaccgucauugcccugauu

SEQ ID NO: 573377 - RNA, 19 nt, Homo sapiens
  misc_RNA (1)...(19): siRNA sense strand
cgccauugauaaagggauu

SEQ ID NO: 573378 - RNA, 19 nt, Homo sapiens
  misc_RNA (1)...(19): siRNA sense strand
gugauuaucggaccaagag

SEQ ID NO: 573379 - RNA, 19 nt, Homo sapiens
  misc_RNA (1)...(19): siRNA sense strand
caaaacgacacaagaguga

SEQ ID NO: 573380 - RNA, 19 nt, Homo sapiens
  misc_RNA (1)...(19): siRNA sense strand
gcgcuucugaugcggauau

SEQ ID NO: 573381 - RNA, 19 nt, Homo sapiens
  misc_RNA (1)...(19): siRNA sense strand
acaagaauuacuacucguu

SEQ ID NO: 573382 - RNA, 19 nt, Homo sapiens
  misc_RNA (1)...(19): siRNA sense strand
ccagacgaaggacuuaaug

SEQ ID NO: 573383 - RNA, 19 nt, Homo sapiens
  misc_RNA (1)...(19): siRNA sense strand
accuaugcguuaagucuaa

SEQ ID NO: 573384 - RNA, 19 nt, Homo sapiens
  misc_RNA (1)...(19): siRNA sense strand
uuaacgccauugauaaagg

SEQ ID NO: 573385 - RNA, 19 nt, Homo sapiens
  misc_RNA (1)...(19): siRNA sense strand
gaagcggcucugguggaua

SEQ ID NO: 573386 - RNA, 19 nt, Homo sapiens
  misc_RNA (1)...(19): siRNA sense strand
guguccaccuacaagaauu

SEQ ID NO: 573387 - RNA, 19 nt, Homo sapiens
  misc_RNA (1)...(19): siRNA sense strand
gguaaucgauggcgguaaa

SEQ ID NO: 573388 - RNA, 19 nt, Homo sapiens
  misc_RNA (1)...(19): siRNA sense strand
caagagugauccaacuaaa

SEQ ID NO: 573389 - RNA, 19 nt, Homo sapiens
  misc_RNA (1)...(19): siRNA sense strand
agacacaggugaaauuaga

SEQ ID NO: 573390 - RNA, 19 nt, Homo sapiens
  misc_RNA (1)...(19): siRNA sense strand
caaugucccugaaguaaug

SEQ ID NO: 573391 - RNA, 19 nt, Homo sapiens
  misc_RNA (1)...(19): siRNA sense strand
aaagguaccuguuucugaa

SEQ ID NO: 573392 - RNA, 19 nt, Homo sapiens
  misc_RNA (1)...(19): siRNA sense strand
ugaaggacauuaacgacaa

SEQ ID NO: 573393 - RNA, 19 nt, Homo sapiens
  misc_RNA (1)...(19): siRNA sense strand
gagaauaaugccuaugaaa

SEQ ID NO: 573394 - RNA, 19 nt, Homo sapiens
  misc_RNA (1)...(19): siRNA sense strand
gaaauuuccuaugggauca

SEQ ID NO: 573395 - RNA, 19 nt, Homo sapiens
  misc_RNA (1)...(19): siRNA sense strand
ggacuuaauggagaaauuu

SEQ ID NO: 573396 - RNA, 19 nt, Homo sapiens
  misc_RNA (1)...(19): siRNA sense strand
aaaguaguguugucugaaa

SEQ ID NO: 573397 - RNA, 19 nt, Homo sapiens
  misc_RNA (1)...(19): siRNA sense strand
ggagguaaaucugcagaau

SEQ ID NO: 573398 - RNA, 19 nt, Homo sapiens
  misc_RNA (1)...(19): siRNA sense strand
ggaaguuauuggacagaga

SEQ ID NO: 573399 - RNA, 19 nt, Homo sapiens
  misc_RNA (1)...(19): siRNA sense strand
caggucaucugcucacuga

SEQ ID NO: 573400 - RNA, 19 nt, Homo sapiens
  misc_RNA (1)...(19): siRNA sense strand
ucaaauaaccguccuggau

SEQ ID NO: 573401 - RNA, 19 nt, Homo sapiens
  misc_RNA (1)...(19): siRNA sense strand
cagguuaacgccauugaua

SEQ ID NO: 573402 - RNA, 19 nt, Homo sapiens
  misc_RNA (1)...(19): siRNA sense strand
gauaagcccagcuauaaag

SEQ ID NO: 573403 - RNA, 19 nt, Homo sapiens
  misc_RNA (1)...(19): siRNA sense strand
agaacgcgcugguguccua

SEQ ID NO: 573404 - RNA, 19 nt, Homo sapiens
  misc_RNA (1)...(19): siRNA sense strand
cgaaggacuuaauggagaa

SEQ ID NO: 573405 - RNA, 19 nt, Homo sapiens
  misc_RNA (1)...(19): siRNA sense strand
ccagacacaggugaaauua

SEQ ID NO: 573406 - RNA, 19 nt, Homo sapiens
  misc_RNA (1)...(19): siRNA sense strand
gguuaacgccauugauaaa

SEQ ID NO: 573407 - RNA, 19 nt, Homo sapiens
  misc_RNA (1)...(19): siRNA sense strand
gcuauaaaguaguguuguc

SEQ ID NO: 573408 - RNA, 19 nt, Homo sapiens
  misc_RNA (1)...(19): siRNA sense strand
guuuaaauccucccaguga

SEQ ID NO: 573409 - RNA, 19 nt, Homo sapiens
  misc_RNA (1)...(19): siRNA sense strand
ugaagagaauaaugccuau

SEQ ID NO: 573410 - RNA, 19 nt, Homo sapiens
  misc_RNA (1)...(19): siRNA sense strand
auaaaguaguguugucuga

SEQ ID NO: 573411 - RNA, 19 nt, Homo sapiens
  misc_RNA (1)...(19): siRNA sense strand
ugacaaugguccggcguuu

SEQ ID NO: 573412 - RNA, 19 nt, Homo sapiens
  misc_RNA (1)...(19): siRNA sense strand
aagcggcucugguggauau

SEQ ID NO: 573413 - RNA, 19 nt, Homo sapiens
  misc_RNA (1)...(19): siRNA sense strand
ccaccuacaagaauuacua

SEQ ID NO: 573414 - RNA, 19 nt, Homo sapiens
  misc_RNA (1)...(19): siRNA sense strand
uugauaagcccagcuauaa

SEQ ID NO: 573415 - RNA, 19 nt, Homo sapiens
  misc_RNA (1)...(19): siRNA sense strand
gcuguacacuggcgagauc

SEQ ID NO: 573416 - RNA, 19 nt, Homo sapiens
  misc_RNA (1)...(19): siRNA sense strand
ucagguggguaccgucauu

SEQ ID NO: 573417 - RNA, 19 nt, Homo sapiens
  misc_RNA (1)...(19): siRNA sense strand
uaaacucucuuuugaccua

SEQ ID NO: 573418 - RNA, 19 nt, Homo sapiens
  misc_RNA (1)...(19): siRNA sense strand
gcccagcuauaaaguagug

SEQ ID NO: 573419 - RNA, 19 nt, Homo sapiens
  misc_RNA (1)...(19): siRNA sense strand
aaauaaccguccuggaugu

SEQ ID NO: 573420 - RNA, 19 nt, Homo sapiens
  misc_RNA (1)...(19): siRNA sense strand
cgccaaaacucaauuuauu

SEQ ID NO: 573421 - RNA, 19 nt, Homo sapiens
  misc_RNA (1)...(19): siRNA sense strand
uaaccguccuggaugugaa

SEQ ID NO: 573422 - RNA, 19 nt, Homo sapiens
  misc_RNA (1)...(19): siRNA sense strand
ucacugacaccucauguuc

SEQ ID NO: 573423 - RNA, 19 nt, Homo sapiens
  misc_RNA (1)...(19): siRNA sense strand
agagaauaaugccuaugaa

SEQ ID NO: 573424 - RNA, 19 nt, Homo sapiens
  misc_RNA (1)...(19): siRNA sense strand
ggauaucggcguaaacucu

SEQ ID NO: 573425 - RNA, 19 nt, Homo sapiens
  misc_RNA (1)...(19): siRNA sense strand
agagugauccaacuaaaug

SEQ ID NO: 573426 - RNA, 19 nt, Homo sapiens
  misc_RNA (1)...(19): siRNA sense strand
acaaugguccggcguuuga

SEQ ID NO: 573427 - RNA, 19 nt, Homo sapiens
  misc_RNA (1)...(19): siRNA sense strand
ggaugugaaugacaauggu

SEQ ID NO: 573428 - RNA, 19 nt, Homo sapiens
  misc_RNA (1)...(19): siRNA sense strand
cguuaagucuaaaugagaa

SEQ ID NO: 573429 - RNA, 19 nt, Homo sapiens
  misc_RNA (1)...(19): siRNA sense strand
gaaggacauuaacgacaac

SEQ ID NO: 573430 - RNA, 19 nt, Homo sapiens
  misc_RNA (1)...(19): siRNA sense strand
ucagcugucucgagaagau

SEQ ID NO: 573431 - RNA, 19 nt, Homo sapiens
  misc_RNA (1)...(19): siRNA sense strand
cggcucugguggauauuaa

SEQ ID NO: 573432 - RNA, 19 nt, Homo sapiens
  misc_RNA (1)...(19): siRNA sense strand
aagagaauaaugccuauga

SEQ ID NO: 573433 - RNA, 19 nt, Homo sapiens
  misc_RNA (1)...(19): siRNA sense strand
gagguaaaucugcagaaug

SEQ ID NO: 573434 - RNA, 19 nt, Homo sapiens
  misc_RNA (1)...(19): siRNA sense strand
guauauugccugaauuagu

SEQ ID NO: 573435 - RNA, 19 nt, Homo sapiens
  misc_RNA (1)...(19): siRNA sense strand
uagaauuuauggugaacug

SEQ ID NO: 573436 - RNA, 19 nt, Homo sapiens
  misc_RNA (1)...(19): siRNA sense strand
gagugagaaauguauguuu

SEQ ID NO: 573437 - RNA, 19 nt, Homo sapiens
  misc_RNA (1)...(19): siRNA sense strand
ggcguaaacucucuuuuga

SEQ ID NO: 573438 - RNA, 19 nt, Homo sapiens
  misc_RNA (1)...(19): siRNA sense strand
gcaugguccugguggaagu

SEQ ID NO: 573439 - RNA, 19 nt, Homo sapiens
  misc_RNA (1)...(19): siRNA sense strand
agguaaaucugcagaaugg

SEQ ID NO: 573440 - RNA, 19 nt, Homo sapiens
  misc_RNA (1)...(19): siRNA sense strand
acagagagcaaacgccaaa

SEQ ID NO: 573441 - RNA, 19 nt, Homo sapiens
  misc_RNA (1)...(19): siRNA sense strand
cgauggcgguaaaccagaa

SEQ ID NO: 573442 - RNA, 19 nt, Homo sapiens
  misc_RNA (1)...(19): siRNA sense strand
gauccagacgaaggacuua

SEQ ID NO: 573443 - RNA, 19 nt, Homo sapiens
  misc_RNA (1)...(19): siRNA sense strand
acaagagugauccaacuaa

SEQ ID NO: 573444 - RNA, 19 nt, Homo sapiens
  misc_RNA (1)...(19): siRNA sense strand
acacaagagugauccaacu

SEQ ID NO: 573445 - RNA, 19 nt, Homo sapiens
  misc_RNA (1)...(19): siRNA sense strand
ccagugagugagaaaugua

SEQ ID NO: 573446 - RNA, 19 nt, Homo sapiens
  misc_RNA (1)...(19): siRNA sense strand
uaacguguaccucaucauc

SEQ ID NO: 573447 - RNA, 19 nt, Homo sapiens
  misc_RNA (1)...(19): siRNA sense strand
gacgcugacuccggcuaua

SEQ ID NO: 573448 - RNA, 19 nt, Homo sapiens
  misc_RNA (1)...(19): siRNA sense strand
gcguuaagucuaaaugaga

SEQ ID NO: 573449 - RNA, 19 nt, Homo sapiens
  misc_RNA (1)...(19): siRNA sense strand
ugguggauauuaacgugua

SEQ ID NO: 573450 - RNA, 19 nt, Homo sapiens
  misc_RNA (1)...(19): siRNA sense strand
cgaagcggcucugguggau

SEQ ID NO: 573451 - RNA, 19 nt, Homo sapiens
  misc_RNA (1)...(19): siRNA sense strand
acgcuuggcuguccuacga

SEQ ID NO: 573452 - RNA, 19 nt, Homo sapiens
  misc_RNA (1)...(19): siRNA sense strand
gaacuggauuuugaagaga

SEQ ID NO: 573453 - RNA, 19 nt, Homo sapiens
  misc_RNA (1)...(19): siRNA sense strand
aagcccagcuauaaaguag

SEQ ID NO: 573454 - RNA, 19 nt, Homo sapiens
  misc_RNA (1)...(19): siRNA sense strand
uaagcccagcuauaaagua

SEQ ID NO: 573455 - RNA, 19 nt, Homo sapiens
  misc_RNA (1)...(19): siRNA sense strand
ugauaagcccagcuauaaa

SEQ ID NO: 573456 - RNA, 19 nt, Homo sapiens
  misc_RNA (1)...(19): siRNA sense strand
cuagagggcgcuucugaug

SEQ ID NO: 573457 - RNA, 19 nt, Homo sapiens
  misc_RNA (1)...(19): siRNA sense strand
uggaaguucuggacgugaa

SEQ ID NO: 573458 - RNA, 19 nt, Homo sapiens
  misc_RNA (1)...(19): siRNA sense strand
gccagugagugagaaaugu

SEQ ID NO: 573459 - RNA, 19 nt, Homo sapiens
  misc_RNA (1)...(19): siRNA sense strand
gaccuaugcguuaagucua

SEQ ID NO: 573460 - RNA, 19 nt, Homo sapiens
  misc_RNA (1)...(19): siRNA sense strand
agacgaaggacuuaaugga

SEQ ID NO: 573461 - RNA, 19 nt, Homo sapiens
  misc_RNA (1)...(19): siRNA sense strand
cacaagagugauccaacua

SEQ ID NO: 573462 - RNA, 19 nt, Homo sapiens
  misc_RNA (1)...(19): siRNA sense strand
gacaggccgcugcagguuu

SEQ ID NO: 573463 - RNA, 19 nt, Homo sapiens
  misc_RNA (1)...(19): siRNA sense strand
gagcaaacgccaaaacuca

SEQ ID NO: 573464 - RNA, 19 nt, Homo sapiens
  misc_RNA (1)...(19): siRNA sense strand
caccucauguucccuucaa

SEQ ID NO: 573465 - RNA, 19 nt, Homo sapiens
  misc_RNA (1)...(19): siRNA sense strand
uucaauaaauccagacaca

SEQ ID NO: 573466 - RNA, 19 nt, Homo sapiens
  misc_RNA (1)...(19): siRNA sense strand
uaaaguaguguugucugaa

SEQ ID NO: 573467 - RNA, 19 nt, Homo sapiens
  misc_RNA (1)...(19): siRNA sense strand
uggugucgcugguggagaa

SEQ ID NO: 573468 - RNA, 19 nt, Homo sapiens
  misc_RNA (1)...(19): siRNA sense strand
uuugauaagcccagcuaua

SEQ ID NO: 573469 - RNA, 19 nt, Homo sapiens
  misc_RNA (1)...(19): siRNA sense strand
uuuaaauccucccagugaa

SEQ ID NO: 573470 - RNA, 19 nt, Homo sapiens
  misc_RNA (1)...(19): siRNA sense strand
ggacgcugacuccggcuau

SEQ ID NO: 573471 - RNA, 19 nt, Homo sapiens
  misc_RNA (1)...(19): siRNA sense strand
gaagagaauaaugccuaug

SEQ ID NO: 573472 - RNA, 19 nt, Homo sapiens
  misc_RNA (1)...(19): siRNA sense strand
auggagaaauuuccuaugg

SEQ ID NO: 573473 - RNA, 19 nt, Homo sapiens
  misc_RNA (1)...(19): siRNA sense strand
ggcgguaaaccagaacuaa

SEQ ID NO: 573474 - RNA, 19 nt, Homo sapiens
  misc_RNA (1)...(19): siRNA sense strand
gcccaagacggaccucaug

SEQ ID NO: 573475 - RNA, 19 nt, Homo sapiens
  misc_RNA (1)...(19): siRNA sense strand
gcauuuuguuugugaauuc

SEQ ID NO: 573476 - RNA, 19 nt, Homo sapiens
  misc_RNA (1)...(19): siRNA sense strand
uaccgucauugcccugauu

SEQ ID NO: 573477 - RNA, 19 nt, Homo sapiens
  misc_RNA (1)...(19): siRNA sense strand
cgccauugauaaagggauu

SEQ ID NO: 573478 - RNA, 19 nt, Homo sapiens
  misc_RNA (1)...(19): siRNA sense strand
gugauuaucggaccaagag

SEQ ID NO: 573479 - RNA, 19 nt, Homo sapiens
  misc_RNA (1)...(19): siRNA sense strand
caaaacgacacaagaguga

SEQ ID NO: 573480 - RNA, 19 nt, Homo sapiens
  misc_RNA (1)...(19): siRNA sense strand
gcgcuucugaugcggauau

SEQ ID NO: 573481 - RNA, 19 nt, Homo sapiens
  misc_RNA (1)...(19): siRNA sense strand
acaagaauuacuacucguu

SEQ ID NO: 573482 - RNA, 19 nt, Homo sapiens
  misc_RNA (1)...(19): siRNA sense strand
ccagacgaaggacuuaaug

SEQ ID NO: 573483 - RNA, 19 nt, Homo sapiens
  misc_RNA (1)...(19): siRNA sense strand
accuaugcguuaagucuaa

SEQ ID NO: 573484 - RNA, 19 nt, Homo sapiens
  misc_RNA (1)...(19): siRNA sense strand
uuaacgccauugauaaagg

SEQ ID NO: 573485 - RNA, 19 nt, Homo sapiens
  misc_RNA (1)...(19): siRNA sense strand
gaagcggcucugguggaua

SEQ ID NO: 573486 - RNA, 19 nt, Homo sapiens
  misc_RNA (1)...(19): siRNA sense strand
guguccaccuacaagaauu

SEQ ID NO: 573487 - RNA, 19 nt, Homo sapiens
  misc_RNA (1)...(19): siRNA sense strand
gaacuuaauuugcugcuaa

SEQ ID NO: 573488 - RNA, 19 nt, Homo sapiens
  misc_RNA (1)...(19): siRNA sense strand
cgacaaugauccagaguuu

SEQ ID NO: 573489 - RNA, 19 nt, Homo sapiens
  misc_RNA (1)...(19): siRNA sense strand
uuaaagaagucucuggaua

SEQ ID NO: 573490 - RNA, 19 nt, Homo sapiens
  misc_RNA (1)...(19): siRNA sense strand
gagggucaauggaacuuua

SEQ ID NO: 573491 - RNA, 19 nt, Homo sapiens
  misc_RNA (1)...(19): siRNA sense strand
ggaaaaugcugcuaaagaa

SEQ ID NO: 573492 - RNA, 19 nt, Homo sapiens
  misc_RNA (1)...(19): siRNA sense strand
gagguaacauacuccuuaa

SEQ ID NO: 573493 - RNA, 19 nt, Homo sapiens
  misc_RNA (1)...(19): siRNA sense strand
ggaagacacuuauuuacac

SEQ ID NO: 573494 - RNA, 19 nt, Homo sapiens
  misc_RNA (1)...(19): siRNA sense strand
gaaguacaggcuacagaua

SEQ ID NO: 573495 - RNA, 19 nt, Homo sapiens
  misc_RNA (1)...(19): siRNA sense strand
gaagugagggucaauggaa

SEQ ID NO: 573496 - RNA, 19 nt, Homo sapiens
  misc_RNA (1)...(19): siRNA sense strand
gaggagggcccaccuaaga

SEQ ID NO: 573497 - RNA, 19 nt, Homo sapiens
  misc_RNA (1)...(19): siRNA sense strand
ugaaggacauuaacgacaa

SEQ ID NO: 573498 - RNA, 19 nt, Homo sapiens
  misc_RNA (1)...(19): siRNA sense strand
acgcguggcuuucauauga

SEQ ID NO: 573499 - RNA, 19 nt, Homo sapiens
  misc_RNA (1)...(19): siRNA sense strand
ggagguaaaucugcagaau

SEQ ID NO: 573500 - RNA, 19 nt, Homo sapiens
  misc_RNA (1)...(19): siRNA sense strand
caaaugguaagcagauuaa

SEQ ID NO: 573501 - RNA, 19 nt, Homo sapiens
  misc_RNA (1)...(19): siRNA sense strand
gaacaaaagcugcugauug

SEQ ID NO: 573502 - RNA, 19 nt, Homo sapiens
  misc_RNA (1)...(19): siRNA sense strand
caauggaagacacuuauuu

SEQ ID NO: 573503 - RNA, 19 nt, Homo sapiens
  misc_RNA (1)...(19): siRNA sense strand
agaaugcucuauugaccua

SEQ ID NO: 573504 - RNA, 19 nt, Homo sapiens
  misc_RNA (1)...(19): siRNA sense strand
gguaacauacuccuuaaug

SEQ ID NO: 573505 - RNA, 19 nt, Homo sapiens
  misc_RNA (1)...(19): siRNA sense strand
aaagaagucucuggauaga

SEQ ID NO: 573506 - RNA, 19 nt, Homo sapiens
  misc_RNA (1)...(19): siRNA sense strand
agagguaacauacuccuua

SEQ ID NO: 573507 - RNA, 19 nt, Homo sapiens
  misc_RNA (1)...(19): siRNA sense strand
caacaaaugguaagcagau

SEQ ID NO: 573508 - RNA, 19 nt, Homo sapiens
  misc_RNA (1)...(19): siRNA sense strand
agaacgcgcugguguccua

SEQ ID NO: 573509 - RNA, 19 nt, Homo sapiens
  misc_RNA (1)...(19): siRNA sense strand
uaaagaagucucuggauag

SEQ ID NO: 573510 - RNA, 19 nt, Homo sapiens
  misc_RNA (1)...(19): siRNA sense strand
gaagacacuuauuuacacu

SEQ ID NO: 573511 - RNA, 19 nt, Homo sapiens
  misc_RNA (1)...(19): siRNA sense strand
cgauaacucuccugaaguc

SEQ ID NO: 573512 - RNA, 19 nt, Homo sapiens
  misc_RNA (1)...(19): siRNA sense strand
cuauugaccuacaggcuaa

SEQ ID NO: 573513 - RNA, 19 nt, Homo sapiens
  misc_RNA (1)...(19): siRNA sense strand
gaacgugugggccuaugaa

SEQ ID NO: 573514 - RNA, 19 nt, Homo sapiens
  misc_RNA (1)...(19): siRNA sense strand
acaaugauccagaguuuga

SEQ ID NO: 573515 - RNA, 19 nt, Homo sapiens
  misc_RNA (1)...(19): siRNA sense strand
uguccaccuucaagaauua

SEQ ID NO: 573516 - RNA, 19 nt, Homo sapiens
  misc_RNA (1)...(19): siRNA sense strand
gauccagaguuugauaaau

SEQ ID NO: 573517 - RNA, 19 nt, Homo sapiens
  misc_RNA (1)...(19): siRNA sense strand
ucaauuaagcccaauggaa

SEQ ID NO: 573518 - RNA, 19 nt, Homo sapiens
  misc_RNA (1)...(19): siRNA sense strand
acaaaugguaagcagauua

SEQ ID NO: 573519 - RNA, 19 nt, Homo sapiens
  misc_RNA (1)...(19): siRNA sense strand
ggaacuuaauuugcugcua

SEQ ID NO: 573520 - RNA, 19 nt, Homo sapiens
  misc_RNA (1)...(19): siRNA sense strand
ccaccaggcugccacaucu

SEQ ID NO: 573521 - RNA, 19 nt, Homo sapiens
  misc_RNA (1)...(19): siRNA sense strand
ucaauggagagguaacaua

SEQ ID NO: 573522 - RNA, 19 nt, Homo sapiens
  misc_RNA (1)...(19): siRNA sense strand
aaacuccggaacuuaauuu

SEQ ID NO: 573523 - RNA, 19 nt, Homo sapiens
  misc_RNA (1)...(19): siRNA sense strand
ucacgcugcugcuguauac

SEQ ID NO: 573524 - RNA, 19 nt, Homo sapiens
  misc_RNA (1)...(19): siRNA sense strand
gcuguacacgggcgagaua

SEQ ID NO: 573525 - RNA, 19 nt, Homo sapiens
  misc_RNA (1)...(19): siRNA sense strand
ugaccuacaggcuaaguaa

SEQ ID NO: 573526 - RNA, 19 nt, Homo sapiens
  misc_RNA (1)...(19): siRNA sense strand
gacaggagccagggucaaa

SEQ ID NO: 573527 - RNA, 19 nt, Homo sapiens
  misc_RNA (1)...(19): siRNA sense strand
gcaguuaacaagcuaguac

SEQ ID NO: 573528 - RNA, 19 nt, Homo sapiens
  misc_RNA (1)...(19): siRNA sense strand
gaaggacauuaacgacaac

SEQ ID NO: 573529 - RNA, 19 nt, Homo sapiens
  misc_RNA (1)...(19): siRNA sense strand
ggacaccaacgauaacucu

SEQ ID NO: 573530 - RNA, 19 nt, Homo sapiens
  misc_RNA (1)...(19): siRNA sense strand
gagguaaaucugcagaaug

SEQ ID NO: 573531 - RNA, 19 nt, Homo sapiens
  misc_RNA (1)...(19): siRNA sense strand
gaaaaugcugcuaaagaaa

SEQ ID NO: 573532 - RNA, 19 nt, Homo sapiens
  misc_RNA (1)...(19): siRNA sense strand
ccaccgacuucuaguacug

SEQ ID NO: 573533 - RNA, 19 nt, Homo sapiens
  misc_RNA (1)...(19): siRNA sense strand
ugccacaucuucacagugu

SEQ ID NO: 573534 - RNA, 19 nt, Homo sapiens
  misc_RNA (1)...(19): siRNA sense strand
aacgauaacucuccugaag

SEQ ID NO: 573535 - RNA, 19 nt, Homo sapiens
  misc_RNA (1)...(19): siRNA sense strand
agagggagcuucugaugcu

SEQ ID NO: 573536 - RNA, 19 nt, Homo sapiens
  misc_RNA (1)...(19): siRNA sense strand
gcacggucauugcccugau

SEQ ID NO: 573537 - RNA, 19 nt, Homo sapiens
  misc_RNA (1)...(19): siRNA sense strand
gucaauggaacuuuagauu

SEQ ID NO: 573538 - RNA, 19 nt, Homo sapiens
  misc_RNA (1)...(19): siRNA sense strand
agguaaaucugcagaaugg

SEQ ID NO: 573539 - RNA, 19 nt, Homo sapiens
  misc_RNA (1)...(19): siRNA sense strand
aggagucaauggagaggua

SEQ ID NO: 573540 - RNA, 19 nt, Homo sapiens
  misc_RNA (1)...(19): siRNA sense strand
agacacuuauuuacacuag

SEQ ID NO: 573541 - RNA, 19 nt, Homo sapiens
  misc_RNA (1)...(19): siRNA sense strand
gagaaaacuccggaacuua

SEQ ID NO: 573542 - RNA, 19 nt, Homo sapiens
  misc_RNA (1)...(19): siRNA sense strand
guguccaccuucaagaauu

SEQ ID NO: 573543 - RNA, 19 nt, Homo sapiens
  misc_RNA (1)...(19): siRNA sense strand
gcccaauggaagacacuua

SEQ ID NO: 573544 - RNA, 19 nt, Homo sapiens
  misc_RNA (1)...(19): siRNA sense strand
uggcaccguucggcuguua

SEQ ID NO: 573545 - RNA, 19 nt, Homo sapiens
  misc_RNA (1)...(19): siRNA sense strand
aggcugcgcugguggaugu

SEQ ID NO: 573546 - RNA, 19 nt, Homo sapiens
  misc_RNA (1)...(19): siRNA sense strand
gaaggugcgcgcaguggau

SEQ ID NO: 573547 - RNA, 19 nt, Homo sapiens
  misc_RNA (1)...(19): siRNA sense strand
aaguacaggcuacagauaa

SEQ ID NO: 573548 - RNA, 19 nt, Homo sapiens
  misc_RNA (1)...(19): siRNA sense strand
gagaagugagggucaaugg

SEQ ID NO: 573549 - RNA, 19 nt, Homo sapiens
  misc_RNA (1)...(19): siRNA sense strand
ggacucgcguuuuccacua

SEQ ID NO: 573550 - RNA, 19 nt, Homo sapiens
  misc_RNA (1)...(19): siRNA sense strand
gagaacgugugggccuaug

SEQ ID NO: 573551 - RNA, 19 nt, Homo sapiens
  misc_RNA (1)...(19): siRNA sense strand
augcugacauugaagagaa

SEQ ID NO: 573552 - RNA, 19 nt, Homo sapiens
  misc_RNA (1)...(19): siRNA sense strand
cucuaggucugaauaaaga

SEQ ID NO: 573553 - RNA, 19 nt, Homo sapiens
  misc_RNA (1)...(19): siRNA sense strand
ucaagaauuacuacucguu

SEQ ID NO: 573554 - RNA, 19 nt, Homo sapiens
  misc_RNA (1)...(19): siRNA sense strand
caauggagagguaacauac

SEQ ID NO: 573555 - RNA, 19 nt, Homo sapiens
  misc_RNA (1)...(19): siRNA sense strand
auccagaguuugauaaauc

SEQ ID NO: 573556 - RNA, 19 nt, Homo sapiens
  misc_RNA (1)...(19): siRNA sense strand
caacgcguggcuuucauau

SEQ ID NO: 573557 - RNA, 19 nt, Homo sapiens
  misc_RNA (1)...(19): siRNA sense strand
caacgauaacucuccugaa

SEQ ID NO: 573558 - RNA, 19 nt, Homo sapiens
  misc_RNA (1)...(19): siRNA sense strand
gacaggccgcugcagguuu

SEQ ID NO: 573559 - RNA, 19 nt, Homo sapiens
  misc_RNA (1)...(19): siRNA sense strand
ccaauggcaggucacugua

SEQ ID NO: 573560 - RNA, 19 nt, Homo sapiens
  misc_RNA (1)...(19): siRNA sense strand
uggaagacacuuauuuaca

SEQ ID NO: 573561 - RNA, 19 nt, Homo sapiens
  misc_RNA (1)...(19): siRNA sense strand
ccaauggaagacacuuauu

SEQ ID NO: 573562 - RNA, 19 nt, Homo sapiens
  misc_RNA (1)...(19): siRNA sense strand
guaagcagauuaaaagacu

SEQ ID NO: 573563 - RNA, 19 nt, Homo sapiens
  misc_RNA (1)...(19): siRNA sense strand
gggaggcgcaguuaacaag

SEQ ID NO: 573564 - RNA, 19 nt, Homo sapiens
  misc_RNA (1)...(19): siRNA sense strand
cuucugaugcugacauuga

SEQ ID NO: 573565 - RNA, 19 nt, Homo sapiens
  misc_RNA (1)...(19): siRNA sense strand
agacgaaggagucaaugga

SEQ ID NO: 573566 - RNA, 19 nt, Homo sapiens
  misc_RNA (1)...(19): siRNA sense strand
gaccuacaggcuaaguaaa

SEQ ID NO: 573567 - RNA, 19 nt, Homo sapiens
  misc_RNA (1)...(19): siRNA sense strand
ugguggaugucaacgugua

SEQ ID NO: 573568 - RNA, 19 nt, Homo sapiens
  misc_RNA (1)...(19): siRNA sense strand
cuacaacgcguggcuuuca

SEQ ID NO: 573569 - RNA, 19 nt, Homo sapiens
  misc_RNA (1)...(19): siRNA sense strand
agaaaacuccggaacuuaa

SEQ ID NO: 573570 - RNA, 19 nt, Homo sapiens
  misc_RNA (1)...(19): siRNA sense strand
gcauuuuguuugugaauuc

SEQ ID NO: 573571 - RNA, 19 nt, Homo sapiens
  misc_RNA (1)...(19): siRNA sense strand
gcgccaccgacuucuagua

SEQ ID NO: 573572 - RNA, 19 nt, Homo sapiens
  misc_RNA (1)...(19): siRNA sense strand
ggagaagugagggucaaug

SEQ ID NO: 573573 - RNA, 19 nt, Homo sapiens
  misc_RNA (1)...(19): siRNA sense strand
acucuugugcucaaacuaa

SEQ ID NO: 573574 - RNA, 19 nt, Homo sapiens
  misc_RNA (1)...(19): siRNA sense strand
gacuacagcucuggcuucu

SEQ ID NO: 573575 - RNA, 19 nt, Homo sapiens
  misc_RNA (1)...(19): siRNA sense strand
ugaaguacaggcuacagau

SEQ ID NO: 573576 - RNA, 19 nt, Homo sapiens
  misc_RNA (1)...(19): siRNA sense strand
uagauucaccaacaaaugg

SEQ ID NO: 573577 - RNA, 19 nt, Homo sapiens
  misc_RNA (1)...(19): siRNA sense strand
caacguguaccugaucauc

SEQ ID NO: 573578 - RNA, 19 nt, Homo sapiens
  misc_RNA (1)...(19): siRNA sense strand
cuagagggagcuucugaug

SEQ ID NO: 573579 - RNA, 19 nt, Homo sapiens
  misc_RNA (1)...(19): siRNA sense strand
ucaaaauaauggagaagug

SEQ ID NO: 573580 - RNA, 19 nt, Homo sapiens
  misc_RNA (1)...(19): siRNA sense strand
gacacuuauuuacacuaga

SEQ ID NO: 573581 - RNA, 19 nt, Homo sapiens
  misc_RNA (1)...(19): siRNA sense strand
acaacgcguggcuuucaua

SEQ ID NO: 573582 - RNA, 19 nt, Homo sapiens
  misc_RNA (1)...(19): siRNA sense strand
cauacuccuuaaugucaau

SEQ ID NO: 573583 - RNA, 19 nt, Homo sapiens
  misc_RNA (1)...(19): siRNA sense strand
uacucacgcugcugcugua

SEQ ID NO: 573584 - RNA, 19 nt, Homo sapiens
  misc_RNA (1)...(19): siRNA sense strand
gcugccacaucuucacagu

SEQ ID NO: 573585 - RNA, 19 nt, Homo sapiens
  misc_RNA (1)...(19): siRNA sense strand
ccaccuucaagaauuacua

SEQ ID NO: 573586 - RNA, 19 nt, Homo sapiens
  misc_RNA (1)...(19): siRNA sense strand
ggucaauggaacuuuagau

SEQ ID NO: 573587 - RNA, 19 nt, Homo sapiens
  misc_RNA (1)...(19): siRNA sense strand
gaacuuaauuugcugcuaa

SEQ ID NO: 573588 - RNA, 19 nt, Homo sapiens
  misc_RNA (1)...(19): siRNA sense strand
cgacaaugauccagaguuu

SEQ ID NO: 573589 - RNA, 19 nt, Homo sapiens
  misc_RNA (1)...(19): siRNA sense strand
uuaaagaagucucuggaua

SEQ ID NO: 573590 - RNA, 19 nt, Homo sapiens
  misc_RNA (1)...(19): siRNA sense strand
gagggucaauggaacuuua

SEQ ID NO: 573591 - RNA, 19 nt, Homo sapiens
  misc_RNA (1)...(19): siRNA sense strand
ggaaaaugcugcuaaagaa

SEQ ID NO: 573592 - RNA, 19 nt, Homo sapiens
  misc_RNA (1)...(19): siRNA sense strand
gagguaacauacuccuuaa

SEQ ID NO: 573593 - RNA, 19 nt, Homo sapiens
  misc_RNA (1)...(19): siRNA sense strand
ggaagacacuuauuuacac

SEQ ID NO: 573594 - RNA, 19 nt, Homo sapiens
  misc_RNA (1)...(19): siRNA sense strand
gaaguacaggcuacagaua

SEQ ID NO: 573595 - RNA, 19 nt, Homo sapiens
  misc_RNA (1)...(19): siRNA sense strand
gaagugagggucaauggaa

SEQ ID NO: 573596 - RNA, 19 nt, Homo sapiens
  misc_RNA (1)...(19): siRNA sense strand
gaggagggcccaccuaaga

SEQ ID NO: 573597 - RNA, 19 nt, Homo sapiens
  misc_RNA (1)...(19): siRNA sense strand
ugaaggacauuaacgacaa

SEQ ID NO: 573598 - RNA, 19 nt, Homo sapiens
  misc_RNA (1)...(19): siRNA sense strand
acgcguggcuuucauauga

SEQ ID NO: 573599 - RNA, 19 nt, Homo sapiens
  misc_RNA (1)...(19): siRNA sense strand
ggagguaaaucugcagaau

SEQ ID NO: 573600 - RNA, 19 nt, Homo sapiens
  misc_RNA (1)...(19): siRNA sense strand
caaaugguaagcagauuaa

SEQ ID NO: 573601 - RNA, 19 nt, Homo sapiens
  misc_RNA (1)...(19): siRNA sense strand
gaacaaaagcugcugauug

SEQ ID NO: 573602 - RNA, 19 nt, Homo sapiens
  misc_RNA (1)...(19): siRNA sense strand
caauggaagacacuuauuu

SEQ ID NO: 573603 - RNA, 19 nt, Homo sapiens
  misc_RNA (1)...(19): siRNA sense strand
agaaugcucuauugaccua

SEQ ID NO: 573604 - RNA, 19 nt, Homo sapiens
  misc_RNA (1)...(19): siRNA sense strand
gguaacauacuccuuaaug

SEQ ID NO: 573605 - RNA, 19 nt, Homo sapiens
  misc_RNA (1)...(19): siRNA sense strand
aaagaagucucuggauaga

SEQ ID NO: 573606 - RNA, 19 nt, Homo sapiens
  misc_RNA (1)...(19): siRNA sense strand
agagguaacauacuccuua

SEQ ID NO: 573607 - RNA, 19 nt, Homo sapiens
  misc_RNA (1)...(19): siRNA sense strand
caacaaaugguaagcagau

SEQ ID NO: 573608 - RNA, 19 nt, Homo sapiens
  misc_RNA (1)...(19): siRNA sense strand
agaacgcgcugguguccua

SEQ ID NO: 573609 - RNA, 19 nt, Homo sapiens
  misc_RNA (1)...(19): siRNA sense strand
uaaagaagucucuggauag

SEQ ID NO: 573610 - RNA, 19 nt, Homo sapiens
  misc_RNA (1)...(19): siRNA sense strand
gaagacacuuauuuacacu

SEQ ID NO: 573611 - RNA, 19 nt, Homo sapiens
  misc_RNA (1)...(19): siRNA sense strand
cgauaacucuccugaaguc

SEQ ID NO: 573612 - RNA, 19 nt, Homo sapiens
  misc_RNA (1)...(19): siRNA sense strand
cuauugaccuacaggcuaa

SEQ ID NO: 573613 - RNA, 19 nt, Homo sapiens
  misc_RNA (1)...(19): siRNA sense strand
gaacgugugggccuaugaa

SEQ ID NO: 573614 - RNA, 19 nt, Homo sapiens
  misc_RNA (1)...(19): siRNA sense strand
acaaugauccagaguuuga

SEQ ID NO: 573615 - RNA, 19 nt, Homo sapiens
  misc_RNA (1)...(19): siRNA sense strand
uguccaccuucaagaauua

SEQ ID NO: 573616 - RNA, 19 nt, Homo sapiens
  misc_RNA (1)...(19): siRNA sense strand
gauccagaguuugauaaau

SEQ ID NO: 573617 - RNA, 19 nt, Homo sapiens
  misc_RNA (1)...(19): siRNA sense strand
ucaauuaagcccaauggaa

SEQ ID NO: 573618 - RNA, 19 nt, Homo sapiens
  misc_RNA (1)...(19): siRNA sense strand
acaaaugguaagcagauua

SEQ ID NO: 573619 - RNA, 19 nt, Homo sapiens
  misc_RNA (1)...(19): siRNA sense strand
ggaacuuaauuugcugcua

SEQ ID NO: 573620 - RNA, 19 nt, Homo sapiens
  misc_RNA (1)...(19): siRNA sense strand
ccaccaggcugccacaucu

SEQ ID NO: 573621 - RNA, 19 nt, Homo sapiens
  misc_RNA (1)...(19): siRNA sense strand
ucaauggagagguaacaua

SEQ ID NO: 573622 - RNA, 19 nt, Homo sapiens
  misc_RNA (1)...(19): siRNA sense strand
aaacuccggaacuuaauuu

SEQ ID NO: 573623 - RNA, 19 nt, Homo sapiens
  misc_RNA (1)...(19): siRNA sense strand
ucacgcugcugcuguauac

SEQ ID NO: 573624 - RNA, 19 nt, Homo sapiens
  misc_RNA (1)...(19): siRNA sense strand
gcuguacacgggcgagaua

SEQ ID NO: 573625 - RNA, 19 nt, Homo sapiens
  misc_RNA (1)...(19): siRNA sense strand
ugaccuacaggcuaaguaa

SEQ ID NO: 573626 - RNA, 19 nt, Homo sapiens
  misc_RNA (1)...(19): siRNA sense strand
gacaggagccagggucaaa

SEQ ID NO: 573627 - RNA, 19 nt, Homo sapiens
  misc_RNA (1)...(19): siRNA sense strand
gcaguuaacaagcuaguac

SEQ ID NO: 573628 - RNA, 19 nt, Homo sapiens
  misc_RNA (1)...(19): siRNA sense strand
gaaggacauuaacgacaac

SEQ ID NO: 573629 - RNA, 19 nt, Homo sapiens
  misc_RNA (1)...(19): siRNA sense strand
ggacaccaacgauaacucu

SEQ ID NO: 573630 - RNA, 19 nt, Homo sapiens
  misc_RNA (1)...(19): siRNA sense strand
gagguaaaucugcagaaug

SEQ ID NO: 573631 - RNA, 19 nt, Homo sapiens
  misc_RNA (1)...(19): siRNA sense strand
gaaaaugcugcuaaagaaa

SEQ ID NO: 573632 - RNA, 19 nt, Homo sapiens
  misc_RNA (1)...(19): siRNA sense strand
ccaccgacuucuaguacug

SEQ ID NO: 573633 - RNA, 19 nt, Homo sapiens
  misc_RNA (1)...(19): siRNA sense strand
ugccacaucuucacagugu

SEQ ID NO: 573634 - RNA, 19 nt, Homo sapiens
  misc_RNA (1)...(19): siRNA sense strand
aacgauaacucuccugaag

SEQ ID NO: 573635 - RNA, 19 nt, Homo sapiens
  misc_RNA (1)...(19): siRNA sense strand
agagggagcuucugaugcu

SEQ ID NO: 573636 - RNA, 19 nt, Homo sapiens
  misc_RNA (1)...(19): siRNA sense strand
gcacggucauugcccugau

SEQ ID NO: 573637 - RNA, 19 nt, Homo sapiens
  misc_RNA (1)...(19): siRNA sense strand
gucaauggaacuuuagauu

SEQ ID NO: 573638 - RNA, 19 nt, Homo sapiens
  misc_RNA (1)...(19): siRNA sense strand
agguaaaucugcagaaugg

SEQ ID NO: 573639 - RNA, 19 nt, Homo sapiens
  misc_RNA (1)...(19): siRNA sense strand
aggagucaauggagaggua

SEQ ID NO: 573640 - RNA, 19 nt, Homo sapiens
  misc_RNA (1)...(19): siRNA sense strand
agacacuuauuuacacuag

SEQ ID NO: 573641 - RNA, 19 nt, Homo sapiens
  misc_RNA (1)...(19): siRNA sense strand
gagaaaacuccggaacuua

SEQ ID NO: 573642 - RNA, 19 nt, Homo sapiens
  misc_RNA (1)...(19): siRNA sense strand
guguccaccuucaagaauu

SEQ ID NO: 573643 - RNA, 19 nt, Homo sapiens
  misc_RNA (1)...(19): siRNA sense strand
gcccaauggaagacacuua

SEQ ID NO: 573644 - RNA, 19 nt, Homo sapiens
  misc_RNA (1)...(19): siRNA sense strand
uggcaccguucggcuguua

SEQ ID NO: 573645 - RNA, 19 nt, Homo sapiens
  misc_RNA (1)...(19): siRNA sense strand
aggcugcgcugguggaugu

SEQ ID NO: 573646 - RNA, 19 nt, Homo sapiens
  misc_RNA (1)...(19): siRNA sense strand
gaaggugcgcgcaguggau

SEQ ID NO: 573647 - RNA, 19 nt, Homo sapiens
  misc_RNA (1)...(19): siRNA sense strand
aaguacaggcuacagauaa

SEQ ID NO: 573648 - RNA, 19 nt, Homo sapiens
  misc_RNA (1)...(19): siRNA sense strand
gagaagugagggucaaugg

SEQ ID NO: 573649 - RNA, 19 nt, Homo sapiens
  misc_RNA (1)...(19): siRNA sense strand
ggacucgcguuuuccacua

SEQ ID NO: 573650 - RNA, 19 nt, Homo sapiens
  misc_RNA (1)...(19): siRNA sense strand
gagaacgugugggccuaug

SEQ ID NO: 573651 - RNA, 19 nt, Homo sapiens
  misc_RNA (1)...(19): siRNA sense strand
augcugacauugaagagaa

SEQ ID NO: 573652 - RNA, 19 nt, Homo sapiens
  misc_RNA (1)...(19): siRNA sense strand
cucuaggucugaauaaaga

SEQ ID NO: 573653 - RNA, 19 nt, Homo sapiens
  misc_RNA (1)...(19): siRNA sense strand
ucaagaauuacuacucguu

SEQ ID NO: 573654 - RNA, 19 nt, Homo sapiens
  misc_RNA (1)...(19): siRNA sense strand
caauggagagguaacauac

SEQ ID NO: 573655 - RNA, 19 nt, Homo sapiens
  misc_RNA (1)...(19): siRNA sense strand
auccagaguuugauaaauc

SEQ ID NO: 573656 - RNA, 19 nt, Homo sapiens
  misc_RNA (1)...(19): siRNA sense strand
caacgcguggcuuucauau

SEQ ID NO: 573657 - RNA, 19 nt, Homo sapiens
  misc_RNA (1)...(19): siRNA sense strand
caacgauaacucuccugaa

SEQ ID NO: 573658 - RNA, 19 nt, Homo sapiens
  misc_RNA (1)...(19): siRNA sense strand
gacaggccgcugcagguuu

SEQ ID NO: 573659 - RNA, 19 nt, Homo sapiens
  misc_RNA (1)...(19): siRNA sense strand
ccaauggcaggucacugua

SEQ ID NO: 573660 - RNA, 19 nt, Homo sapiens
  misc_RNA (1)...(19): siRNA sense strand
uggaagacacuuauuuaca

SEQ ID NO: 573661 - RNA, 19 nt, Homo sapiens
  misc_RNA (1)...(19): siRNA sense strand
ccaauggaagacacuuauu

SEQ ID NO: 573662 - RNA, 19 nt, Homo sapiens
  misc_RNA (1)...(19): siRNA sense strand
guaagcagauuaaaagacu

SEQ ID NO: 573663 - RNA, 19 nt, Homo sapiens
  misc_RNA (1)...(19): siRNA sense strand
gggaggcgcaguuaacaag

SEQ ID NO: 573664 - RNA, 19 nt, Homo sapiens
  misc_RNA (1)...(19): siRNA sense strand
cuucugaugcugacauuga

SEQ ID NO: 573665 - RNA, 19 nt, Homo sapiens
  misc_RNA (1)...(19): siRNA sense strand
agacgaaggagucaaugga

SEQ ID NO: 573666 - RNA, 19 nt, Homo sapiens
  misc_RNA (1)...(19): siRNA sense strand
gaccuacaggcuaaguaaa

SEQ ID NO: 573667 - RNA, 19 nt, Homo sapiens
  misc_RNA (1)...(19): siRNA sense strand
ugguggaugucaacgugua

SEQ ID NO: 573668 - RNA, 19 nt, Homo sapiens
  misc_RNA (1)...(19): siRNA sense strand
cuacaacgcguggcuuuca

SEQ ID NO: 573669 - RNA, 19 nt, Homo sapiens
  misc_RNA (1)...(19): siRNA sense strand
agaaaacuccggaacuuaa

SEQ ID NO: 573670 - RNA, 19 nt, Homo sapiens
  misc_RNA (1)...(19): siRNA sense strand
gcauuuuguuugugaauuc

SEQ ID NO: 573671 - RNA, 19 nt, Homo sapiens
  misc_RNA (1)...(19): siRNA sense strand
gcgccaccgacuucuagua

SEQ ID NO: 573672 - RNA, 19 nt, Homo sapiens
  misc_RNA (1)...(19): siRNA sense strand
ggagaagugagggucaaug

SEQ ID NO: 573673 - RNA, 19 nt, Homo sapiens
  misc_RNA (1)...(19): siRNA sense strand
acucuugugcucaaacuaa

SEQ ID NO: 573674 - RNA, 19 nt, Homo sapiens
  misc_RNA (1)...(19): siRNA sense strand
gacuacagcucuggcuucu

SEQ ID NO: 573675 - RNA, 19 nt, Homo sapiens
  misc_RNA (1)...(19): siRNA sense strand
ugaaguacaggcuacagau

SEQ ID NO: 573676 - RNA, 19 nt, Homo sapiens
  misc_RNA (1)...(19): siRNA sense strand
uagauucaccaacaaaugg

SEQ ID NO: 573677 - RNA, 19 nt, Homo sapiens
  misc_RNA (1)...(19): siRNA sense strand
caacguguaccugaucauc

SEQ ID NO: 573678 - RNA, 19 nt, Homo sapiens
  misc_RNA (1)...(19): siRNA sense strand
cuagagggagcuucugaug

SEQ ID NO: 573679 - RNA, 19 nt, Homo sapiens
  misc_RNA (1)...(19): siRNA sense strand
ucaaaauaauggagaagug

SEQ ID NO: 573680 - RNA, 19 nt, Homo sapiens
  misc_RNA (1)...(19): siRNA sense strand
gacacuuauuuacacuaga

SEQ ID NO: 573681 - RNA, 19 nt, Homo sapiens
  misc_RNA (1)...(19): siRNA sense strand
acaacgcguggcuuucaua

SEQ ID NO: 573682 - RNA, 19 nt, Homo sapiens
  misc_RNA (1)...(19): siRNA sense strand
cauacuccuuaaugucaau

SEQ ID NO: 573683 - RNA, 19 nt, Homo sapiens
  misc_RNA (1)...(19): siRNA sense strand
uacucacgcugcugcugua

SEQ ID NO: 573684 - RNA, 19 nt, Homo sapiens
  misc_RNA (1)...(19): siRNA sense strand
gcugccacaucuucacagu

SEQ ID NO: 573685 - RNA, 19 nt, Homo sapiens
  misc_RNA (1)...(19): siRNA sense strand
ccaccuucaagaauuacua

SEQ ID NO: 573686 - RNA, 19 nt, Homo sapiens
  misc_RNA (1)...(19): siRNA sense strand
ggucaauggaacuuuagau

SEQ ID NO: 573687 - RNA, 19 nt, Homo sapiens
  misc_RNA (1)...(19): siRNA sense strand
gaaagaagaugcucaagug

SEQ ID NO: 573688 - RNA, 19 nt, Homo sapiens
  misc_RNA (1)...(19): siRNA sense strand
ggagagaacgcauugcuua

SEQ ID NO: 573689 - RNA, 19 nt, Homo sapiens
  misc_RNA (1)...(19): siRNA sense strand
gaauuuaccggaucuguuu

SEQ ID NO: 573690 - RNA, 19 nt, Homo sapiens
  misc_RNA (1)...(19): siRNA sense strand
cgaaaggacgggagaaaua

SEQ ID NO: 573691 - RNA, 19 nt, Homo sapiens
  misc_RNA (1)...(19): siRNA sense strand
gaaaggacgggagaaauaa

SEQ ID NO: 573692 - RNA, 19 nt, Homo sapiens
  misc_RNA (1)...(19): siRNA sense strand
acaaggaaaugauguauuc

SEQ ID NO: 573693 - RNA, 19 nt, Homo sapiens
  misc_RNA (1)...(19): siRNA sense strand
cagcuaaaguuguuguuga

SEQ ID NO: 573694 - RNA, 19 nt, Homo sapiens
  misc_RNA (1)...(19): siRNA sense strand
ggaauaaacaaggaaauga

SEQ ID NO: 573695 - RNA, 19 nt, Homo sapiens
  misc_RNA (1)...(19): siRNA sense strand
ucaagugaaccaaacauua

SEQ ID NO: 573696 - RNA, 19 nt, Homo sapiens
  misc_RNA (1)...(19): siRNA sense strand
gagaacgcauugcuuacuu

SEQ ID NO: 573697 - RNA, 19 nt, Homo sapiens
  misc_RNA (1)...(19): siRNA sense strand
cuacaagaauuacuacuca

SEQ ID NO: 573698 - RNA, 19 nt, Homo sapiens
  misc_RNA (1)...(19): siRNA sense strand
gacaguaacacuuaugaaa

SEQ ID NO: 573699 - RNA, 19 nt, Homo sapiens
  misc_RNA (1)...(19): siRNA sense strand
ugaaggacauuaacgacaa

SEQ ID NO: 573700 - RNA, 19 nt, Homo sapiens
  misc_RNA (1)...(19): siRNA sense strand
gcucaacgcuucugauucg

SEQ ID NO: 573701 - RNA, 19 nt, Homo sapiens
  misc_RNA (1)...(19): siRNA sense strand
ggagguaaaucugcagaau

SEQ ID NO: 573702 - RNA, 19 nt, Homo sapiens
  misc_RNA (1)...(19): siRNA sense strand
ggaggcaaaccugaauuua

SEQ ID NO: 573703 - RNA, 19 nt, Homo sapiens
  misc_RNA (1)...(19): siRNA sense strand
gguguuagaugccaaugau

SEQ ID NO: 573704 - RNA, 19 nt, Homo sapiens
  misc_RNA (1)...(19): siRNA sense strand
agaacgcauugcuuacuua

SEQ ID NO: 573705 - RNA, 19 nt, Homo sapiens
  misc_RNA (1)...(19): siRNA sense strand
ugacagaccgguuuaugaa

SEQ ID NO: 573706 - RNA, 19 nt, Homo sapiens
  misc_RNA (1)...(19): siRNA sense strand
gaaggaauaaacaaggaaa

SEQ ID NO: 573707 - RNA, 19 nt, Homo sapiens
  misc_RNA (1)...(19): siRNA sense strand
gaacaaaagcucucaauac

SEQ ID NO: 573708 - RNA, 19 nt, Homo sapiens
  misc_RNA (1)...(19): siRNA sense strand
caagugaaccaaacauuag

SEQ ID NO: 573709 - RNA, 19 nt, Homo sapiens
  misc_RNA (1)...(19): siRNA sense strand
caagaauuacuacucauug

SEQ ID NO: 573710 - RNA, 19 nt, Homo sapiens
  misc_RNA (1)...(19): siRNA sense strand
gcugcuggaucgugaagaa

SEQ ID NO: 573711 - RNA, 19 nt, Homo sapiens
  misc_RNA (1)...(19): siRNA sense strand
acgcauugcuuacuuacaa

SEQ ID NO: 573712 - RNA, 19 nt, Homo sapiens
  misc_RNA (1)...(19): siRNA sense strand
gaagaaaauccucagcuaa

SEQ ID NO: 573713 - RNA, 19 nt, Homo sapiens
  misc_RNA (1)...(19): siRNA sense strand
gauugucacuucucugucu

SEQ ID NO: 573714 - RNA, 19 nt, Homo sapiens
  misc_RNA (1)...(19): siRNA sense strand
ggacaguaacacuuaugaa

SEQ ID NO: 573715 - RNA, 19 nt, Homo sapiens
  misc_RNA (1)...(19): siRNA sense strand
ccaccuacaagaauuacua

SEQ ID NO: 573716 - RNA, 19 nt, Homo sapiens
  misc_RNA (1)...(19): siRNA sense strand
gauaagggaaacccaccua

SEQ ID NO: 573717 - RNA, 19 nt, Homo sapiens
  misc_RNA (1)...(19): siRNA sense strand
agaacgcccugguguccua

SEQ ID NO: 573718 - RNA, 19 nt, Homo sapiens
  misc_RNA (1)...(19): siRNA sense strand
gaaaaucaagugaaccaaa

SEQ ID NO: 573719 - RNA, 19 nt, Homo sapiens
  misc_RNA (1)...(19): siRNA sense strand
ugaagaaaauccucagcua

SEQ ID NO: 573720 - RNA, 19 nt, Homo sapiens
  misc_RNA (1)...(19): siRNA sense strand
gaaggacauuaacgacaac

SEQ ID NO: 573721 - RNA, 19 nt, Homo sapiens
  misc_RNA (1)...(19): siRNA sense strand
gagguaaaucugcagaaug

SEQ ID NO: 573722 - RNA, 19 nt, Homo sapiens
  misc_RNA (1)...(19): siRNA sense strand
cugcuugacucucgauuuc

SEQ ID NO: 573723 - RNA, 19 nt, Homo sapiens
  misc_RNA (1)...(19): siRNA sense strand
gaggcaaaccugaauuuac

SEQ ID NO: 573724 - RNA, 19 nt, Homo sapiens
  misc_RNA (1)...(19): siRNA sense strand
ccgcccagguucuccguaa

SEQ ID NO: 573725 - RNA, 19 nt, Homo sapiens
  misc_RNA (1)...(19): siRNA sense strand
agguaaaucugcagaaugg

SEQ ID NO: 573726 - RNA, 19 nt, Homo sapiens
  misc_RNA (1)...(19): siRNA sense strand
caaauucccagugcuuguu

SEQ ID NO: 573727 - RNA, 19 nt, Homo sapiens
  misc_RNA (1)...(19): siRNA sense strand
gcaccgucauugcccuaau

SEQ ID NO: 573728 - RNA, 19 nt, Homo sapiens
  misc_RNA (1)...(19): siRNA sense strand
caagugggcaccgucauug

SEQ ID NO: 573729 - RNA, 19 nt, Homo sapiens
  misc_RNA (1)...(19): siRNA sense strand
ugaaagaagaugcucaagu

SEQ ID NO: 573730 - RNA, 19 nt, Homo sapiens
  misc_RNA (1)...(19): siRNA sense strand
gcacgguccuaguggaacu

SEQ ID NO: 573731 - RNA, 19 nt, Homo sapiens
  misc_RNA (1)...(19): siRNA sense strand
gugaaccaaacauuaguaa

SEQ ID NO: 573732 - RNA, 19 nt, Homo sapiens
  misc_RNA (1)...(19): siRNA sense strand
cagaccgguuuaugaaguu

SEQ ID NO: 573733 - RNA, 19 nt, Homo sapiens
  misc_RNA (1)...(19): siRNA sense strand
acagaccgguuuaugaagu

SEQ ID NO: 573734 - RNA, 19 nt, Homo sapiens
  misc_RNA (1)...(19): siRNA sense strand
uguuagaugccaaugauaa

SEQ ID NO: 573735 - RNA, 19 nt, Homo sapiens
  misc_RNA (1)...(19): siRNA sense strand
cagcguuucugaccaugau

SEQ ID NO: 573736 - RNA, 19 nt, Homo sapiens
  misc_RNA (1)...(19): siRNA sense strand
uugaggacaguaacacuua

SEQ ID NO: 573737 - RNA, 19 nt, Homo sapiens
  misc_RNA (1)...(19): siRNA sense strand
uaagggaaacccaccuaug

SEQ ID NO: 573738 - RNA, 19 nt, Homo sapiens
  misc_RNA (1)...(19): siRNA sense strand
ugaggacaguaacacuuau

SEQ ID NO: 573739 - RNA, 19 nt, Homo sapiens
  misc_RNA (1)...(19): siRNA sense strand
uacaaacucaguccaaaug

SEQ ID NO: 573740 - RNA, 19 nt, Homo sapiens
  misc_RNA (1)...(19): siRNA sense strand
ucaagugggcaccgucauu

SEQ ID NO: 573741 - RNA, 19 nt, Homo sapiens
  misc_RNA (1)...(19): siRNA sense strand
guauucauuuagcucuuug

SEQ ID NO: 573742 - RNA, 19 nt, Homo sapiens
  misc_RNA (1)...(19): siRNA sense strand
cugcugcucucgcuucuuc

SEQ ID NO: 573743 - RNA, 19 nt, Homo sapiens
  misc_RNA (1)...(19): siRNA sense strand
cuuacaaacucaguccaaa

SEQ ID NO: 573744 - RNA, 19 nt, Homo sapiens
  misc_RNA (1)...(19): siRNA sense strand
gagagggugucggccuaug

SEQ ID NO: 573745 - RNA, 19 nt, Homo sapiens
  misc_RNA (1)...(19): siRNA sense strand
gauggaggcaaaccugaau

SEQ ID NO: 573746 - RNA, 19 nt, Homo sapiens
  misc_RNA (1)...(19): siRNA sense strand
agaccgguuuaugaaguua

SEQ ID NO: 573747 - RNA, 19 nt, Homo sapiens
  misc_RNA (1)...(19): siRNA sense strand
gacaggccgcugcagguuu

SEQ ID NO: 573748 - RNA, 19 nt, Homo sapiens
  misc_RNA (1)...(19): siRNA sense strand
augaugcuauugacuuuga

SEQ ID NO: 573749 - RNA, 19 nt, Homo sapiens
  misc_RNA (1)...(19): siRNA sense strand
guuugugaauucucggauu

SEQ ID NO: 573750 - RNA, 19 nt, Homo sapiens
  misc_RNA (1)...(19): siRNA sense strand
ggaugaaggaauaaacaag

SEQ ID NO: 573751 - RNA, 19 nt, Homo sapiens
  misc_RNA (1)...(19): siRNA sense strand
gacucucgauuuccacuag

SEQ ID NO: 573752 - RNA, 19 nt, Homo sapiens
  misc_RNA (1)...(19): siRNA sense strand
ggaagugaaggacauuaac

SEQ ID NO: 573753 - RNA, 19 nt, Homo sapiens
  misc_RNA (1)...(19): siRNA sense strand
aagaauuacuacucauugg

SEQ ID NO: 573754 - RNA, 19 nt, Homo sapiens
  misc_RNA (1)...(19): siRNA sense strand
agacaaauucccagugcuu

SEQ ID NO: 573755 - RNA, 19 nt, Homo sapiens
  misc_RNA (1)...(19): siRNA sense strand
gaacgcauugcuuacuuac

SEQ ID NO: 573756 - RNA, 19 nt, Homo sapiens
  misc_RNA (1)...(19): siRNA sense strand
gaagugaaggacauuaacg

SEQ ID NO: 573757 - RNA, 19 nt, Homo sapiens
  misc_RNA (1)...(19): siRNA sense strand
ugaauuuaccggaucuguu

SEQ ID NO: 573758 - RNA, 19 nt, Homo sapiens
  misc_RNA (1)...(19): siRNA sense strand
uggaagugaaggacauuaa

SEQ ID NO: 573759 - RNA, 19 nt, Homo sapiens
  misc_RNA (1)...(19): siRNA sense strand
aaaggacgggagaaauaaa

SEQ ID NO: 573760 - RNA, 19 nt, Homo sapiens
  misc_RNA (1)...(19): siRNA sense strand
uuugugaauucucggauug

SEQ ID NO: 573761 - RNA, 19 nt, Homo sapiens
  misc_RNA (1)...(19): siRNA sense strand
gcauuuuguuugugaauuc

SEQ ID NO: 573762 - RNA, 19 nt, Homo sapiens
  misc_RNA (1)...(19): siRNA sense strand
gagagaacgcauugcuuac

SEQ ID NO: 573763 - RNA, 19 nt, Homo sapiens
  misc_RNA (1)...(19): siRNA sense strand
gaggacaguaacacuuaug

SEQ ID NO: 573764 - RNA, 19 nt, Homo sapiens
  misc_RNA (1)...(19): siRNA sense strand
cggcucaacgcuucugauu

SEQ ID NO: 573765 - RNA, 19 nt, Homo sapiens
  misc_RNA (1)...(19): siRNA sense strand
uggaggcaaaccugaauuu

SEQ ID NO: 573766 - RNA, 19 nt, Homo sapiens
  misc_RNA (1)...(19): siRNA sense strand
gcuugacucucgauuucca

SEQ ID NO: 573767 - RNA, 19 nt, Homo sapiens
  misc_RNA (1)...(19): siRNA sense strand
guguccaccuacaagaauu

SEQ ID NO: 573768 - RNA, 19 nt, Homo sapiens
  misc_RNA (1)...(19): siRNA sense strand
aggcaaaccugaauuuacc

SEQ ID NO: 573769 - RNA, 19 nt, Homo sapiens
  misc_RNA (1)...(19): siRNA sense strand
uuacaaacucaguccaaau

SEQ ID NO: 573770 - RNA, 19 nt, Homo sapiens
  misc_RNA (1)...(19): siRNA sense strand
caccgucauugcccuaauc

SEQ ID NO: 573771 - RNA, 19 nt, Homo sapiens
  misc_RNA (1)...(19): siRNA sense strand
cgcauugcuuacuuacaaa

SEQ ID NO: 573772 - RNA, 19 nt, Homo sapiens
  misc_RNA (1)...(19): siRNA sense strand
guaaaugaugcuauugacu

SEQ ID NO: 573773 - RNA, 19 nt, Homo sapiens
  misc_RNA (1)...(19): siRNA sense strand
cacgauaagaaggaaauuu

SEQ ID NO: 573774 - RNA, 19 nt, Homo sapiens
  misc_RNA (1)...(19): siRNA sense strand
ugaaggaauaaacaaggaa

SEQ ID NO: 573775 - RNA, 19 nt, Homo sapiens
  misc_RNA (1)...(19): siRNA sense strand
gaauccagacugcuugacu

SEQ ID NO: 573776 - RNA, 19 nt, Homo sapiens
  misc_RNA (1)...(19): siRNA sense strand
augaaggaauaaacaagga

SEQ ID NO: 573777 - RNA, 19 nt, Homo sapiens
  misc_RNA (1)...(19): siRNA sense strand
cagcuccacuacucagucu

SEQ ID NO: 573778 - RNA, 19 nt, Homo sapiens
  misc_RNA (1)...(19): siRNA sense strand
aagaaaauccucagcuaaa

SEQ ID NO: 573779 - RNA, 19 nt, Homo sapiens
  misc_RNA (1)...(19): siRNA sense strand
acaaacucaguccaaauga

SEQ ID NO: 573780 - RNA, 19 nt, Homo sapiens
  misc_RNA (1)...(19): siRNA sense strand
gaaaauccucagcuaaagu

SEQ ID NO: 573781 - RNA, 19 nt, Homo sapiens
  misc_RNA (1)...(19): siRNA sense strand
aagggaaacccaccuaugg

SEQ ID NO: 573782 - RNA, 19 nt, Homo sapiens
  misc_RNA (1)...(19): siRNA sense strand
uguccaccuacaagaauua

SEQ ID NO: 573783 - RNA, 19 nt, Homo sapiens
  misc_RNA (1)...(19): siRNA sense strand
gaaagaagaugcucaagug

SEQ ID NO: 573784 - RNA, 19 nt, Homo sapiens
  misc_RNA (1)...(19): siRNA sense strand
ggagagaacgcauugcuua

SEQ ID NO: 573785 - RNA, 19 nt, Homo sapiens
  misc_RNA (1)...(19): siRNA sense strand
gaauuuaccggaucuguuu

SEQ ID NO: 573786 - RNA, 19 nt, Homo sapiens
  misc_RNA (1)...(19): siRNA sense strand
cgaaaggacgggagaaaua

SEQ ID NO: 573787 - RNA, 19 nt, Homo sapiens
  misc_RNA (1)...(19): siRNA sense strand
gaaaggacgggagaaauaa

SEQ ID NO: 573788 - RNA, 19 nt, Homo sapiens
  misc_RNA (1)...(19): siRNA sense strand
acaaggaaaugauguauuc

SEQ ID NO: 573789 - RNA, 19 nt, Homo sapiens
  misc_RNA (1)...(19): siRNA sense strand
cagcuaaaguuguuguuga

SEQ ID NO: 573790 - RNA, 19 nt, Homo sapiens
  misc_RNA (1)...(19): siRNA sense strand
ggaauaaacaaggaaauga

SEQ ID NO: 573791 - RNA, 19 nt, Homo sapiens
  misc_RNA (1)...(19): siRNA sense strand
ucaagugaaccaaacauua

SEQ ID NO: 573792 - RNA, 19 nt, Homo sapiens
  misc_RNA (1)...(19): siRNA sense strand
gagaacgcauugcuuacuu

SEQ ID NO: 573793 - RNA, 19 nt, Homo sapiens
  misc_RNA (1)...(19): siRNA sense strand
cuacaagaauuacuacuca

SEQ ID NO: 573794 - RNA, 19 nt, Homo sapiens
  misc_RNA (1)...(19): siRNA sense strand
gacaguaacacuuaugaaa

SEQ ID NO: 573795 - RNA, 19 nt, Homo sapiens
  misc_RNA (1)...(19): siRNA sense strand
ugaaggacauuaacgacaa

SEQ ID NO: 573796 - RNA, 19 nt, Homo sapiens
  misc_RNA (1)...(19): siRNA sense strand
gcucaacgcuucugauucg

SEQ ID NO: 573797 - RNA, 19 nt, Homo sapiens
  misc_RNA (1)...(19): siRNA sense strand
ggagguaaaucugcagaau

SEQ ID NO: 573798 - RNA, 19 nt, Homo sapiens
  misc_RNA (1)...(19): siRNA sense strand
ggaggcaaaccugaauuua

SEQ ID NO: 573799 - RNA, 19 nt, Homo sapiens
  misc_RNA (1)...(19): siRNA sense strand
gguguuagaugccaaugau

SEQ ID NO: 573800 - RNA, 19 nt, Homo sapiens
  misc_RNA (1)...(19): siRNA sense strand
agaacgcauugcuuacuua

SEQ ID NO: 573801 - RNA, 19 nt, Homo sapiens
  misc_RNA (1)...(19): siRNA sense strand
ugacagaccgguuuaugaa

SEQ ID NO: 573802 - RNA, 19 nt, Homo sapiens
  misc_RNA (1)...(19): siRNA sense strand
gaaggaauaaacaaggaaa

SEQ ID NO: 573803 - RNA, 19 nt, Homo sapiens
  misc_RNA (1)...(19): siRNA sense strand
gaacaaaagcucucaauac

SEQ ID NO: 573804 - RNA, 19 nt, Homo sapiens
  misc_RNA (1)...(19): siRNA sense strand
caagugaaccaaacauuag

SEQ ID NO: 573805 - RNA, 19 nt, Homo sapiens
  misc_RNA (1)...(19): siRNA sense strand
caagaauuacuacucauug

SEQ ID NO: 573806 - RNA, 19 nt, Homo sapiens
  misc_RNA (1)...(19): siRNA sense strand
gcugcuggaucgugaagaa

SEQ ID NO: 573807 - RNA, 19 nt, Homo sapiens
  misc_RNA (1)...(19): siRNA sense strand
acgcauugcuuacuuacaa

SEQ ID NO: 573808 - RNA, 19 nt, Homo sapiens
  misc_RNA (1)...(19): siRNA sense strand
gaagaaaauccucagcuaa

SEQ ID NO: 573809 - RNA, 19 nt, Homo sapiens
  misc_RNA (1)...(19): siRNA sense strand
gauugucacuucucugucu

SEQ ID NO: 573810 - RNA, 19 nt, Homo sapiens
  misc_RNA (1)...(19): siRNA sense strand
ggacaguaacacuuaugaa

SEQ ID NO: 573811 - RNA, 19 nt, Homo sapiens
  misc_RNA (1)...(19): siRNA sense strand
ccaccuacaagaauuacua

SEQ ID NO: 573812 - RNA, 19 nt, Homo sapiens
  misc_RNA (1)...(19): siRNA sense strand
gauaagggaaacccaccua

SEQ ID NO: 573813 - RNA, 19 nt, Homo sapiens
  misc_RNA (1)...(19): siRNA sense strand
agaacgcccugguguccua

SEQ ID NO: 573814 - RNA, 19 nt, Homo sapiens
  misc_RNA (1)...(19): siRNA sense strand
gaaaaucaagugaaccaaa

SEQ ID NO: 573815 - RNA, 19 nt, Homo sapiens
  misc_RNA (1)...(19): siRNA sense strand
ugaagaaaauccucagcua

SEQ ID NO: 573816 - RNA, 19 nt, Homo sapiens
  misc_RNA (1)...(19): siRNA sense strand
gaaggacauuaacgacaac

SEQ ID NO: 573817 - RNA, 19 nt, Homo sapiens
  misc_RNA (1)...(19): siRNA sense strand
gagguaaaucugcagaaug

SEQ ID NO: 573818 - RNA, 19 nt, Homo sapiens
  misc_RNA (1)...(19): siRNA sense strand
cugcuugacucucgauuuc

SEQ ID NO: 573819 - RNA, 19 nt, Homo sapiens
  misc_RNA (1)...(19): siRNA sense strand
gaggcaaaccugaauuuac

SEQ ID NO: 573820 - RNA, 19 nt, Homo sapiens
  misc_RNA (1)...(19): siRNA sense strand
ccgcccagguucuccguaa

SEQ ID NO: 573821 - RNA, 19 nt, Homo sapiens
  misc_RNA (1)...(19): siRNA sense strand
agguaaaucugcagaaugg

SEQ ID NO: 573822 - RNA, 19 nt, Homo sapiens
  misc_RNA (1)...(19): siRNA sense strand
caaauucccagugcuuguu

SEQ ID NO: 573823 - RNA, 19 nt, Homo sapiens
  misc_RNA (1)...(19): siRNA sense strand
gcaccgucauugcccuaau

SEQ ID NO: 573824 - RNA, 19 nt, Homo sapiens
  misc_RNA (1)...(19): siRNA sense strand
caagugggcaccgucauug

SEQ ID NO: 573825 - RNA, 19 nt, Homo sapiens
  misc_RNA (1)...(19): siRNA sense strand
ugaaagaagaugcucaagu

SEQ ID NO: 573826 - RNA, 19 nt, Homo sapiens
  misc_RNA (1)...(19): siRNA sense strand
gcacgguccuaguggaacu

SEQ ID NO: 573827 - RNA, 19 nt, Homo sapiens
  misc_RNA (1)...(19): siRNA sense strand
gugaaccaaacauuaguaa

SEQ ID NO: 573828 - RNA, 19 nt, Homo sapiens
  misc_RNA (1)...(19): siRNA sense strand
cagaccgguuuaugaaguu

SEQ ID NO: 573829 - RNA, 19 nt, Homo sapiens
  misc_RNA (1)...(19): siRNA sense strand
acagaccgguuuaugaagu

SEQ ID NO: 573830 - RNA, 19 nt, Homo sapiens
  misc_RNA (1)...(19): siRNA sense strand
uguuagaugccaaugauaa

SEQ ID NO: 573831 - RNA, 19 nt, Homo sapiens
  misc_RNA (1)...(19): siRNA sense strand
cagcguuucugaccaugau

SEQ ID NO: 573832 - RNA, 19 nt, Homo sapiens
  misc_RNA (1)...(19): siRNA sense strand
uugaggacaguaacacuua

SEQ ID NO: 573833 - RNA, 19 nt, Homo sapiens
  misc_RNA (1)...(19): siRNA sense strand
uaagggaaacccaccuaug

SEQ ID NO: 573834 - RNA, 19 nt, Homo sapiens
  misc_RNA (1)...(19): siRNA sense strand
ugaggacaguaacacuuau

SEQ ID NO: 573835 - RNA, 19 nt, Homo sapiens
  misc_RNA (1)...(19): siRNA sense strand
uacaaacucaguccaaaug

SEQ ID NO: 573836 - RNA, 19 nt, Homo sapiens
  misc_RNA (1)...(19): siRNA sense strand
ucaagugggcaccgucauu

SEQ ID NO: 573837 - RNA, 19 nt, Homo sapiens
  misc_RNA (1)...(19): siRNA sense strand
guauucauuuagcucuuug

SEQ ID NO: 573838 - RNA, 19 nt, Homo sapiens
  misc_RNA (1)...(19): siRNA sense strand
cugcugcucucgcuucuuc

SEQ ID NO: 573839 - RNA, 19 nt, Homo sapiens
  misc_RNA (1)...(19): siRNA sense strand
cuuacaaacucaguccaaa

SEQ ID NO: 573840 - RNA, 19 nt, Homo sapiens
  misc_RNA (1)...(19): siRNA sense strand
gagagggugucggccuaug

SEQ ID NO: 573841 - RNA, 19 nt, Homo sapiens
  misc_RNA (1)...(19): siRNA sense strand
gauggaggcaaaccugaau

SEQ ID NO: 573842 - RNA, 19 nt, Homo sapiens
  misc_RNA (1)...(19): siRNA sense strand
agaccgguuuaugaaguua

SEQ ID NO: 573843 - RNA, 19 nt, Homo sapiens
  misc_RNA (1)...(19): siRNA sense strand
gacaggccgcugcagguuu

SEQ ID NO: 573844 - RNA, 19 nt, Homo sapiens
  misc_RNA (1)...(19): siRNA sense strand
augaugcuauugacuuuga

SEQ ID NO: 573845 - RNA, 19 nt, Homo sapiens
  misc_RNA (1)...(19): siRNA sense strand
guuugugaauucucggauu

SEQ ID NO: 573846 - RNA, 19 nt, Homo sapiens
  misc_RNA (1)...(19): siRNA sense strand
ggaugaaggaauaaacaag

SEQ ID NO: 573847 - RNA, 19 nt, Homo sapiens
  misc_RNA (1)...(19): siRNA sense strand
gacucucgauuuccacuag

SEQ ID NO: 573848 - RNA, 19 nt, Homo sapiens
  misc_RNA (1)...(19): siRNA sense strand
ggaagugaaggacauuaac

SEQ ID NO: 573849 - RNA, 19 nt, Homo sapiens
  misc_RNA (1)...(19): siRNA sense strand
aagaauuacuacucauugg

SEQ ID NO: 573850 - RNA, 19 nt, Homo sapiens
  misc_RNA (1)...(19): siRNA sense strand
agacaaauucccagugcuu

SEQ ID NO: 573851 - RNA, 19 nt, Homo sapiens
  misc_RNA (1)...(19): siRNA sense strand
gaacgcauugcuuacuuac

SEQ ID NO: 573852 - RNA, 19 nt, Homo sapiens
  misc_RNA (1)...(19): siRNA sense strand
gaagugaaggacauuaacg

SEQ ID NO: 573853 - RNA, 19 nt, Homo sapiens
  misc_RNA (1)...(19): siRNA sense strand
ugaauuuaccggaucuguu

SEQ ID NO: 573854 - RNA, 19 nt, Homo sapiens
  misc_RNA (1)...(19): siRNA sense strand
uggaagugaaggacauuaa

SEQ ID NO: 573855 - RNA, 19 nt, Homo sapiens
  misc_RNA (1)...(19): siRNA sense strand
aaaggacgggagaaauaaa

SEQ ID NO: 573856 - RNA, 19 nt, Homo sapiens
  misc_RNA (1)...(19): siRNA sense strand
uuugugaauucucggauug

SEQ ID NO: 573857 - RNA, 19 nt, Homo sapiens
  misc_RNA (1)...(19): siRNA sense strand
gcauuuuguuugugaauuc

SEQ ID NO: 573858 - RNA, 19 nt, Homo sapiens
  misc_RNA (1)...(19): siRNA sense strand
gagagaacgcauugcuuac

SEQ ID NO: 573859 - RNA, 19 nt, Homo sapiens
  misc_RNA (1)...(19): siRNA sense strand
gaggacaguaacacuuaug

SEQ ID NO: 573860 - RNA, 19 nt, Homo sapiens
  misc_RNA (1)...(19): siRNA sense strand
cggcucaacgcuucugauu

SEQ ID NO: 573861 - RNA, 19 nt, Homo sapiens
  misc_RNA (1)...(19): siRNA sense strand
uggaggcaaaccugaauuu

SEQ ID NO: 573862 - RNA, 19 nt, Homo sapiens
  misc_RNA (1)...(19): siRNA sense strand
gcuugacucucgauuucca

SEQ ID NO: 573863 - RNA, 19 nt, Homo sapiens
  misc_RNA (1)...(19): siRNA sense strand
guguccaccuacaagaauu

SEQ ID NO: 573864 - RNA, 19 nt, Homo sapiens
  misc_RNA (1)...(19): siRNA sense strand
aggcaaaccugaauuuacc

SEQ ID NO: 573865 - RNA, 19 nt, Homo sapiens
  misc_RNA (1)...(19): siRNA sense strand
uuacaaacucaguccaaau

SEQ ID NO: 573866 - RNA, 19 nt, Homo sapiens
  misc_RNA (1)...(19): siRNA sense strand
caccgucauugcccuaauc

SEQ ID NO: 573867 - RNA, 19 nt, Homo sapiens
  misc_RNA (1)...(19): siRNA sense strand
cgcauugcuuacuuacaaa

SEQ ID NO: 573868 - RNA, 19 nt, Homo sapiens
  misc_RNA (1)...(19): siRNA sense strand
guaaaugaugcuauugacu

SEQ ID NO: 573869 - RNA, 19 nt, Homo sapiens
  misc_RNA (1)...(19): siRNA sense strand
cacgauaagaaggaaauuu

SEQ ID NO: 573870 - RNA, 19 nt, Homo sapiens
  misc_RNA (1)...(19): siRNA sense strand
ugaaggaauaaacaaggaa

SEQ ID NO: 573871 - RNA, 19 nt, Homo sapiens
  misc_RNA (1)...(19): siRNA sense strand
gaauccagacugcuugacu

SEQ ID NO: 573872 - RNA, 19 nt, Homo sapiens
  misc_RNA (1)...(19): siRNA sense strand
augaaggaauaaacaagga

SEQ ID NO: 573873 - RNA, 19 nt, Homo sapiens
  misc_RNA (1)...(19): siRNA sense strand
cagcuccacuacucagucu

SEQ ID NO: 573874 - RNA, 19 nt, Homo sapiens
  misc_RNA (1)...(19): siRNA sense strand
aagaaaauccucagcuaaa

SEQ ID NO: 573875 - RNA, 19 nt, Homo sapiens
  misc_RNA (1)...(19): siRNA sense strand
acaaacucaguccaaauga

SEQ ID NO: 573876 - RNA, 19 nt, Homo sapiens
  misc_RNA (1)...(19): siRNA sense strand
gaaaauccucagcuaaagu

SEQ ID NO: 573877 - RNA, 19 nt, Homo sapiens
  misc_RNA (1)...(19): siRNA sense strand
aagggaaacccaccuaugg

SEQ ID NO: 573878 - RNA, 19 nt, Homo sapiens
  misc_RNA (1)...(19): siRNA sense strand
uguccaccuacaagaauua

SEQ ID NO: 573879 - RNA, 19 nt, Homo sapiens
  misc_RNA (1)...(19): siRNA sense strand
gaaagaagaugcucaagug

SEQ ID NO: 573880 - RNA, 19 nt, Homo sapiens
  misc_RNA (1)...(19): siRNA sense strand
ggagagaacgcauugcuua

SEQ ID NO: 573881 - RNA, 19 nt, Homo sapiens
  misc_RNA (1)...(19): siRNA sense strand
gaauuuaccggaucuguuu

SEQ ID NO: 573882 - RNA, 19 nt, Homo sapiens
  misc_RNA (1)...(19): siRNA sense strand
cgaaaggacgggagaaaua

SEQ ID NO: 573883 - RNA, 19 nt, Homo sapiens
  misc_RNA (1)...(19): siRNA sense strand
gaaaggacgggagaaauaa

SEQ ID NO: 573884 - RNA, 19 nt, Homo sapiens
  misc_RNA (1)...(19): siRNA sense strand
acaaggaaaugauguauuc

SEQ ID NO: 573885 - RNA, 19 nt, Homo sapiens
  misc_RNA (1)...(19): siRNA sense strand
cagcuaaaguuguuguuga

SEQ ID NO: 573886 - RNA, 19 nt, Homo sapiens
  misc_RNA (1)...(19): siRNA sense strand
ggaauaaacaaggaaauga

SEQ ID NO: 573887 - RNA, 19 nt, Homo sapiens
  misc_RNA (1)...(19): siRNA sense strand
ucaagugaaccaaacauua

SEQ ID NO: 573888 - RNA, 19 nt, Homo sapiens
  misc_RNA (1)...(19): siRNA sense strand
gagaacgcauugcuuacuu

SEQ ID NO: 573889 - RNA, 19 nt, Homo sapiens
  misc_RNA (1)...(19): siRNA sense strand
cuacaagaauuacuacuca

SEQ ID NO: 573890 - RNA, 19 nt, Homo sapiens
  misc_RNA (1)...(19): siRNA sense strand
gacaguaacacuuaugaaa

SEQ ID NO: 573891 - RNA, 19 nt, Homo sapiens
  misc_RNA (1)...(19): siRNA sense strand
ugaaggacauuaacgacaa

SEQ ID NO: 573892 - RNA, 19 nt, Homo sapiens
  misc_RNA (1)...(19): siRNA sense strand
gcucaacgcuucugauucg

SEQ ID NO: 573893 - RNA, 19 nt, Homo sapiens
  misc_RNA (1)...(19): siRNA sense strand
ggagguaaaucugcagaau

SEQ ID NO: 573894 - RNA, 19 nt, Homo sapiens
  misc_RNA (1)...(19): siRNA sense strand
ggaggcaaaccugaauuua

SEQ ID NO: 573895 - RNA, 19 nt, Homo sapiens
  misc_RNA (1)...(19): siRNA sense strand
gguguuagaugccaaugau

SEQ ID NO: 573896 - RNA, 19 nt, Homo sapiens
  misc_RNA (1)...(19): siRNA sense strand
agaacgcauugcuuacuua

SEQ ID NO: 573897 - RNA, 19 nt, Homo sapiens
  misc_RNA (1)...(19): siRNA sense strand
ugacagaccgguuuaugaa

SEQ ID NO: 573898 - RNA, 19 nt, Homo sapiens
  misc_RNA (1)...(19): siRNA sense strand
gaaggaauaaacaaggaaa

SEQ ID NO: 573899 - RNA, 19 nt, Homo sapiens
  misc_RNA (1)...(19): siRNA sense strand
gaacaaaagcucucaauac

SEQ ID NO: 573900 - RNA, 19 nt, Homo sapiens
  misc_RNA (1)...(19): siRNA sense strand
caagugaaccaaacauuag

SEQ ID NO: 573901 - RNA, 19 nt, Homo sapiens
  misc_RNA (1)...(19): siRNA sense strand
caagaauuacuacucauug

SEQ ID NO: 573902 - RNA, 19 nt, Homo sapiens
  misc_RNA (1)...(19): siRNA sense strand
gcugcuggaucgugaagaa

SEQ ID NO: 573903 - RNA, 19 nt, Homo sapiens
  misc_RNA (1)...(19): siRNA sense strand
acgcauugcuuacuuacaa

SEQ ID NO: 573904 - RNA, 19 nt, Homo sapiens
  misc_RNA (1)...(19): siRNA sense strand
gaagaaaauccucagcuaa

SEQ ID NO: 573905 - RNA, 19 nt, Homo sapiens
  misc_RNA (1)...(19): siRNA sense strand
gauugucacuucucugucu

SEQ ID NO: 573906 - RNA, 19 nt, Homo sapiens
  misc_RNA (1)...(19): siRNA sense strand
ggacaguaacacuuaugaa

SEQ ID NO: 573907 - RNA, 19 nt, Homo sapiens
  misc_RNA (1)...(19): siRNA sense strand
ccaccuacaagaauuacua

SEQ ID NO: 573908 - RNA, 19 nt, Homo sapiens
  misc_RNA (1)...(19): siRNA sense strand
gauaagggaaacccaccua

SEQ ID NO: 573909 - RNA, 19 nt, Homo sapiens
  misc_RNA (1)...(19): siRNA sense strand
agaacgcccugguguccua

SEQ ID NO: 573910 - RNA, 19 nt, Homo sapiens
  misc_RNA (1)...(19): siRNA sense strand
gaaaaucaagugaaccaaa

SEQ ID NO: 573911 - RNA, 19 nt, Homo sapiens
  misc_RNA (1)...(19): siRNA sense strand
ugaagaaaauccucagcua

SEQ ID NO: 573912 - RNA, 19 nt, Homo sapiens
  misc_RNA (1)...(19): siRNA sense strand
gaaggacauuaacgacaac

SEQ ID NO: 573913 - RNA, 19 nt, Homo sapiens
  misc_RNA (1)...(19): siRNA sense strand
gagguaaaucugcagaaug

SEQ ID NO: 573914 - RNA, 19 nt, Homo sapiens
  misc_RNA (1)...(19): siRNA sense strand
cugcuugacucucgauuuc

SEQ ID NO: 573915 - RNA, 19 nt, Homo sapiens
  misc_RNA (1)...(19): siRNA sense strand
gaggcaaaccugaauuuac

SEQ ID NO: 573916 - RNA, 19 nt, Homo sapiens
  misc_RNA (1)...(19): siRNA sense strand
ccgcccagguucuccguaa

SEQ ID NO: 573917 - RNA, 19 nt, Homo sapiens
  misc_RNA (1)...(19): siRNA sense strand
agguaaaucugcagaaugg

SEQ ID NO: 573918 - RNA, 19 nt, Homo sapiens
  misc_RNA (1)...(19): siRNA sense strand
caaauucccagugcuuguu

SEQ ID NO: 573919 - RNA, 19 nt, Homo sapiens
  misc_RNA (1)...(19): siRNA sense strand
gcaccgucauugcccuaau

SEQ ID NO: 573920 - RNA, 19 nt, Homo sapiens
  misc_RNA (1)...(19): siRNA sense strand
caagugggcaccgucauug

SEQ ID NO: 573921 - RNA, 19 nt, Homo sapiens
  misc_RNA (1)...(19): siRNA sense strand
ugaaagaagaugcucaagu

SEQ ID NO: 573922 - RNA, 19 nt, Homo sapiens
  misc_RNA (1)...(19): siRNA sense strand
gcacgguccuaguggaacu

SEQ ID NO: 573923 - RNA, 19 nt, Homo sapiens
  misc_RNA (1)...(19): siRNA sense strand
gugaaccaaacauuaguaa

SEQ ID NO: 573924 - RNA, 19 nt, Homo sapiens
  misc_RNA (1)...(19): siRNA sense strand
cagaccgguuuaugaaguu

SEQ ID NO: 573925 - RNA, 19 nt, Homo sapiens
  misc_RNA (1)...(19): siRNA sense strand
acagaccgguuuaugaagu

SEQ ID NO: 573926 - RNA, 19 nt, Homo sapiens
  misc_RNA (1)...(19): siRNA sense strand
uguuagaugccaaugauaa

SEQ ID NO: 573927 - RNA, 19 nt, Homo sapiens
  misc_RNA (1)...(19): siRNA sense strand
cagcguuucugaccaugau

SEQ ID NO: 573928 - RNA, 19 nt, Homo sapiens
  misc_RNA (1)...(19): siRNA sense strand
uugaggacaguaacacuua

SEQ ID NO: 573929 - RNA, 19 nt, Homo sapiens
  misc_RNA (1)...(19): siRNA sense strand
uaagggaaacccaccuaug

SEQ ID NO: 573930 - RNA, 19 nt, Homo sapiens
  misc_RNA (1)...(19): siRNA sense strand
ugaggacaguaacacuuau

SEQ ID NO: 573931 - RNA, 19 nt, Homo sapiens
  misc_RNA (1)...(19): siRNA sense strand
uacaaacucaguccaaaug

SEQ ID NO: 573932 - RNA, 19 nt, Homo sapiens
  misc_RNA (1)...(19): siRNA sense strand
ucaagugggcaccgucauu

SEQ ID NO: 573933 - RNA, 19 nt, Homo sapiens
  misc_RNA (1)...(19): siRNA sense strand
guauucauuuagcucuuug

SEQ ID NO: 573934 - RNA, 19 nt, Homo sapiens
  misc_RNA (1)...(19): siRNA sense strand
cugcugcucucgcuucuuc

SEQ ID NO: 573935 - RNA, 19 nt, Homo sapiens
  misc_RNA (1)...(19): siRNA sense strand
cuuacaaacucaguccaaa

SEQ ID NO: 573936 - RNA, 19 nt, Homo sapiens
  misc_RNA (1)...(19): siRNA sense strand
gagagggugucggccuaug

SEQ ID NO: 573937 - RNA, 19 nt, Homo sapiens
  misc_RNA (1)...(19): siRNA sense strand
gauggaggcaaaccugaau

SEQ ID NO: 573938 - RNA, 19 nt, Homo sapiens
  misc_RNA (1)...(19): siRNA sense strand
agaccgguuuaugaaguua

SEQ ID NO: 573939 - RNA, 19 nt, Homo sapiens
  misc_RNA (1)...(19): siRNA sense strand
gacaggccgcugcagguuu

SEQ ID NO: 573940 - RNA, 19 nt, Homo sapiens
  misc_RNA (1)...(19): siRNA sense strand
augaugcuauugacuuuga

SEQ ID NO: 573941 - RNA, 19 nt, Homo sapiens
  misc_RNA (1)...(19): siRNA sense strand
guuugugaauucucggauu

SEQ ID NO: 573942 - RNA, 19 nt, Homo sapiens
  misc_RNA (1)...(19): siRNA sense strand
ggaugaaggaauaaacaag

SEQ ID NO: 573943 - RNA, 19 nt, Homo sapiens
  misc_RNA (1)...(19): siRNA sense strand
gacucucgauuuccacuag

SEQ ID NO: 573944 - RNA, 19 nt, Homo sapiens
  misc_RNA (1)...(19): siRNA sense strand
ggaagugaaggacauuaac

SEQ ID NO: 573945 - RNA, 19 nt, Homo sapiens
  misc_RNA (1)...(19): siRNA sense strand
aagaauuacuacucauugg

SEQ ID NO: 573946 - RNA, 19 nt, Homo sapiens
  misc_RNA (1)...(19): siRNA sense strand
agacaaauucccagugcuu

SEQ ID NO: 573947 - RNA, 19 nt, Homo sapiens
  misc_RNA (1)...(19): siRNA sense strand
gaacgcauugcuuacuuac

SEQ ID NO: 573948 - RNA, 19 nt, Homo sapiens
  misc_RNA (1)...(19): siRNA sense strand
gaagugaaggacauuaacg

SEQ ID NO: 573949 - RNA, 19 nt, Homo sapiens
  misc_RNA (1)...(19): siRNA sense strand
ugaauuuaccggaucuguu

SEQ ID NO: 573950 - RNA, 19 nt, Homo sapiens
  misc_RNA (1)...(19): siRNA sense strand
uggaagugaaggacauuaa

SEQ ID NO: 573951 - RNA, 19 nt, Homo sapiens
  misc_RNA (1)...(19): siRNA sense strand
aaaggacgggagaaauaaa

SEQ ID NO: 573952 - RNA, 19 nt, Homo sapiens
  misc_RNA (1)...(19): siRNA sense strand
uuugugaauucucggauug

SEQ ID NO: 573953 - RNA, 19 nt, Homo sapiens
  misc_RNA (1)...(19): siRNA sense strand
gcauuuuguuugugaauuc

SEQ ID NO: 573954 - RNA, 19 nt, Homo sapiens
  misc_RNA (1)...(19): siRNA sense strand
gagagaacgcauugcuuac

SEQ ID NO: 573955 - RNA, 19 nt, Homo sapiens
  misc_RNA (1)...(19): siRNA sense strand
gaggacaguaacacuuaug

SEQ ID NO: 573956 - RNA, 19 nt, Homo sapiens
  misc_RNA (1)...(19): siRNA sense strand
cggcucaacgcuucugauu

SEQ ID NO: 573957 - RNA, 19 nt, Homo sapiens
  misc_RNA (1)...(19): siRNA sense strand
uggaggcaaaccugaauuu

SEQ ID NO: 573958 - RNA, 19 nt, Homo sapiens
  misc_RNA (1)...(19): siRNA sense strand
gcuugacucucgauuucca

SEQ ID NO: 573959 - RNA, 19 nt, Homo sapiens
  misc_RNA (1)...(19): siRNA sense strand
guguccaccuacaagaauu

SEQ ID NO: 573960 - RNA, 19 nt, Homo sapiens
  misc_RNA (1)...(19): siRNA sense strand
aggcaaaccugaauuuacc

SEQ ID NO: 573961 - RNA, 19 nt, Homo sapiens
  misc_RNA (1)...(19): siRNA sense strand
uuacaaacucaguccaaau

SEQ ID NO: 573962 - RNA, 19 nt, Homo sapiens
  misc_RNA (1)...(19): siRNA sense strand
caccgucauugcccuaauc

SEQ ID NO: 573963 - RNA, 19 nt, Homo sapiens
  misc_RNA (1)...(19): siRNA sense strand
cgcauugcuuacuuacaaa

SEQ ID NO: 573964 - RNA, 19 nt, Homo sapiens
  misc_RNA (1)...(19): siRNA sense strand
guaaaugaugcuauugacu

SEQ ID NO: 573965 - RNA, 19 nt, Homo sapiens
  misc_RNA (1)...(19): siRNA sense strand
cacgauaagaaggaaauuu

SEQ ID NO: 573966 - RNA, 19 nt, Homo sapiens
  misc_RNA (1)...(19): siRNA sense strand
ugaaggaauaaacaaggaa

SEQ ID NO: 573967 - RNA, 19 nt, Homo sapiens
  misc_RNA (1)...(19): siRNA sense strand
gaauccagacugcuugacu

SEQ ID NO: 573968 - RNA, 19 nt, Homo sapiens
  misc_RNA (1)...(19): siRNA sense strand
augaaggaauaaacaagga

SEQ ID NO: 573969 - RNA, 19 nt, Homo sapiens
  misc_RNA (1)...(19): siRNA sense strand
cagcuccacuacucagucu

SEQ ID NO: 573970 - RNA, 19 nt, Homo sapiens
  misc_RNA (1)...(19): siRNA sense strand
aagaaaauccucagcuaaa

SEQ ID NO: 573971 - RNA, 19 nt, Homo sapiens
  misc_RNA (1)...(19): siRNA sense strand
acaaacucaguccaaauga

SEQ ID NO: 573972 - RNA, 19 nt, Homo sapiens
  misc_RNA (1)...(19): siRNA sense strand
gaaaauccucagcuaaagu

SEQ ID NO: 573973 - RNA, 19 nt, Homo sapiens
  misc_RNA (1)...(19): siRNA sense strand
aagggaaacccaccuaugg

SEQ ID NO: 573974 - RNA, 19 nt, Homo sapiens
  misc_RNA (1)...(19): siRNA sense strand
uguccaccuacaagaauua

SEQ ID NO: 573975 - RNA, 19 nt, Homo sapiens
  misc_RNA (1)...(19): siRNA sense strand
gagcaagauuuaaauguug

SEQ ID NO: 573976 - RNA, 19 nt, Homo sapiens
  misc_RNA (1)...(19): siRNA sense strand
caaagaacgaugagaauaa

SEQ ID NO: 573977 - RNA, 19 nt, Homo sapiens
  misc_RNA (1)...(19): siRNA sense strand
gcgaagagcaagauuuaaa

SEQ ID NO: 573978 - RNA, 19 nt, Homo sapiens
  misc_RNA (1)...(19): siRNA sense strand
aggcuuagcucucaugauu

SEQ ID NO: 573979 - RNA, 19 nt, Homo sapiens
  misc_RNA (1)...(19): siRNA sense strand
ugaaggauguuaaugacaa

SEQ ID NO: 573980 - RNA, 19 nt, Homo sapiens
  misc_RNA (1)...(19): siRNA sense strand
cgaacagucugaauacgaa

SEQ ID NO: 573981 - RNA, 19 nt, Homo sapiens
  misc_RNA (1)...(19): siRNA sense strand
gacaacggaacaacaguua

SEQ ID NO: 573982 - RNA, 19 nt, Homo sapiens
  misc_RNA (1)...(19): siRNA sense strand
gaagagcaagauuuaaaug

SEQ ID NO: 573983 - RNA, 19 nt, Homo sapiens
  misc_RNA (1)...(19): siRNA sense strand
guguuaaccuacaggcuua

SEQ ID NO: 573984 - RNA, 19 nt, Homo sapiens
  misc_RNA (1)...(19): siRNA sense strand
ggugaaggaucauggugaa

SEQ ID NO: 573985 - RNA, 19 nt, Homo sapiens
  misc_RNA (1)...(19): siRNA sense strand
acgcguggcuuucguauga

SEQ ID NO: 573986 - RNA, 19 nt, Homo sapiens
  misc_RNA (1)...(19): siRNA sense strand
ugaagacgcucaauuuggu

SEQ ID NO: 573987 - RNA, 19 nt, Homo sapiens
  misc_RNA (1)...(19): siRNA sense strand
gggcaaaccugagcucaca

SEQ ID NO: 573988 - RNA, 19 nt, Homo sapiens
  misc_RNA (1)...(19): siRNA sense strand
ucaaagaacgaugagaaua

SEQ ID NO: 573989 - RNA, 19 nt, Homo sapiens
  misc_RNA (1)...(19): siRNA sense strand
gaaaauccuuggacagaga

SEQ ID NO: 573990 - RNA, 19 nt, Homo sapiens
  misc_RNA (1)...(19): siRNA sense strand
agaacgcgcugguguccua

SEQ ID NO: 573991 - RNA, 19 nt, Homo sapiens
  misc_RNA (1)...(19): siRNA sense strand
uguccaccuucaagaauua

SEQ ID NO: 573992 - RNA, 19 nt, Homo sapiens
  misc_RNA (1)...(19): siRNA sense strand
uaaacugguugagcucgua

SEQ ID NO: 573993 - RNA, 19 nt, Homo sapiens
  misc_RNA (1)...(19): siRNA sense strand
gcuuagcucucaugauuac

SEQ ID NO: 573994 - RNA, 19 nt, Homo sapiens
  misc_RNA (1)...(19): siRNA sense strand
uaacgucccugagauagca

SEQ ID NO: 573995 - RNA, 19 nt, Homo sapiens
  misc_RNA (1)...(19): siRNA sense strand
gaaauacgggagaaauagu

SEQ ID NO: 573996 - RNA, 19 nt, Homo sapiens
  misc_RNA (1)...(19): siRNA sense strand
uagcauagaucgaaauacg

SEQ ID NO: 573997 - RNA, 19 nt, Homo sapiens
  misc_RNA (1)...(19): siRNA sense strand
gaagacgcucaauuuggua

SEQ ID NO: 573998 - RNA, 19 nt, Homo sapiens
  misc_RNA (1)...(19): siRNA sense strand
ugauaaugcucccacuuuc

SEQ ID NO: 573999 - RNA, 19 nt, Homo sapiens
  misc_RNA (1)...(19): siRNA sense strand
aggcgaagagcaagauuua

SEQ ID NO: 574000 - RNA, 19 nt, Homo sapiens
  misc_RNA (1)...(19): siRNA sense strand
caaacugaaugcuucugau

SEQ ID NO: 574001 - RNA, 19 nt, Homo sapiens
  misc_RNA (1)...(19): siRNA sense strand
caacggaacaacaguuauc

SEQ ID NO: 574002 - RNA, 19 nt, Homo sapiens
  misc_RNA (1)...(19): siRNA sense strand
cggaacaacaguuaucaaa

SEQ ID NO: 574003 - RNA, 19 nt, Homo sapiens
  misc_RNA (1)...(19): siRNA sense strand
ggugaaggauguuaaugac

SEQ ID NO: 574004 - RNA, 19 nt, Homo sapiens
  misc_RNA (1)...(19): siRNA sense strand
uuaauagccuuguugaaac

SEQ ID NO: 574005 - RNA, 19 nt, Homo sapiens
  misc_RNA (1)...(19): siRNA sense strand
ucgaaauacgggagaaaua

SEQ ID NO: 574006 - RNA, 19 nt, Homo sapiens
  misc_RNA (1)...(19): siRNA sense strand
gcagucggcuggcguuuug

SEQ ID NO: 574007 - RNA, 19 nt, Homo sapiens
  misc_RNA (1)...(19): siRNA sense strand
agauagcacugacuuccuu

SEQ ID NO: 574008 - RNA, 19 nt, Homo sapiens
  misc_RNA (1)...(19): siRNA sense strand
ugauaacgucccugagaua

SEQ ID NO: 574009 - RNA, 19 nt, Homo sapiens
  misc_RNA (1)...(19): siRNA sense strand
guugagcucguauuaagaa

SEQ ID NO: 574010 - RNA, 19 nt, Homo sapiens
  misc_RNA (1)...(19): siRNA sense strand
cgaagagcaagauuuaaau

SEQ ID NO: 574011 - RNA, 19 nt, Homo sapiens
  misc_RNA (1)...(19): siRNA sense strand
gcacugacuuccuuauccu

SEQ ID NO: 574012 - RNA, 19 nt, Homo sapiens
  misc_RNA (1)...(19): siRNA sense strand
cgaaauacgggagaaauag

SEQ ID NO: 574013 - RNA, 19 nt, Homo sapiens
  misc_RNA (1)...(19): siRNA sense strand
gaaggauguuaaugacaac

SEQ ID NO: 574014 - RNA, 19 nt, Homo sapiens
  misc_RNA (1)...(19): siRNA sense strand
gaacgaugagaauaaacug

SEQ ID NO: 574015 - RNA, 19 nt, Homo sapiens
  misc_RNA (1)...(19): siRNA sense strand
ugaauucaaagaacgauga

SEQ ID NO: 574016 - RNA, 19 nt, Homo sapiens
  misc_RNA (1)...(19): siRNA sense strand
caugcuagaugugaauuca

SEQ ID NO: 574017 - RNA, 19 nt, Homo sapiens
  misc_RNA (1)...(19): siRNA sense strand
guacugucaucgcccuaau

SEQ ID NO: 574018 - RNA, 19 nt, Homo sapiens
  misc_RNA (1)...(19): siRNA sense strand
gcgggucauugcaccguuu

SEQ ID NO: 574019 - RNA, 19 nt, Homo sapiens
  misc_RNA (1)...(19): siRNA sense strand
ugcuagaugugaauucaaa

SEQ ID NO: 574020 - RNA, 19 nt, Homo sapiens
  misc_RNA (1)...(19): siRNA sense strand
gauagcacugacuuccuua

SEQ ID NO: 574021 - RNA, 19 nt, Homo sapiens
  misc_RNA (1)...(19): siRNA sense strand
ugacaacccgccaguguuc

SEQ ID NO: 574022 - RNA, 19 nt, Homo sapiens
  misc_RNA (1)...(19): siRNA sense strand
ggucauacucgcaacaaca

SEQ ID NO: 574023 - RNA, 19 nt, Homo sapiens
  misc_RNA (1)...(19): siRNA sense strand
ucaauuugguacugucauc

SEQ ID NO: 574024 - RNA, 19 nt, Homo sapiens
  misc_RNA (1)...(19): siRNA sense strand
gcagacaacggaacaacag

SEQ ID NO: 574025 - RNA, 19 nt, Homo sapiens
  misc_RNA (1)...(19): siRNA sense strand
ugguugagcucguauuaag

SEQ ID NO: 574026 - RNA, 19 nt, Homo sapiens
  misc_RNA (1)...(19): siRNA sense strand
aaagcuguuuguuucagaa

SEQ ID NO: 574027 - RNA, 19 nt, Homo sapiens
  misc_RNA (1)...(19): siRNA sense strand
gagagagugucggccuaug

SEQ ID NO: 574028 - RNA, 19 nt, Homo sapiens
  misc_RNA (1)...(19): siRNA sense strand
ggaggugaaggauguuaau

SEQ ID NO: 574029 - RNA, 19 nt, Homo sapiens
  misc_RNA (1)...(19): siRNA sense strand
guguccaccuucaagaauu

SEQ ID NO: 574030 - RNA, 19 nt, Homo sapiens
  misc_RNA (1)...(19): siRNA sense strand
acugucaucgcccuaauua

SEQ ID NO: 574031 - RNA, 19 nt, Homo sapiens
  misc_RNA (1)...(19): siRNA sense strand
gauaacgucccugagauag

SEQ ID NO: 574032 - RNA, 19 nt, Homo sapiens
  misc_RNA (1)...(19): siRNA sense strand
uaauagccuuguugaaacu

SEQ ID NO: 574033 - RNA, 19 nt, Homo sapiens
  misc_RNA (1)...(19): siRNA sense strand
cgaugagaauaaacugguu

SEQ ID NO: 574034 - RNA, 19 nt, Homo sapiens
  misc_RNA (1)...(19): siRNA sense strand
ugcuggaugugaaugauaa

SEQ ID NO: 574035 - RNA, 19 nt, Homo sapiens
  misc_RNA (1)...(19): siRNA sense strand
gaaggaucauggugaaccu

SEQ ID NO: 574036 - RNA, 19 nt, Homo sapiens
  misc_RNA (1)...(19): siRNA sense strand
gggcaauuucauauucuuu

SEQ ID NO: 574037 - RNA, 19 nt, Homo sapiens
  misc_RNA (1)...(19): siRNA sense strand
ggaacaacaguuaucaaac

SEQ ID NO: 574038 - RNA, 19 nt, Homo sapiens
  misc_RNA (1)...(19): siRNA sense strand
ggaugugaaugauaaugcu

SEQ ID NO: 574039 - RNA, 19 nt, Homo sapiens
  misc_RNA (1)...(19): siRNA sense strand
gagcucguauuaagaaaau

SEQ ID NO: 574040 - RNA, 19 nt, Homo sapiens
  misc_RNA (1)...(19): siRNA sense strand
aaugauaacgucccugaga

SEQ ID NO: 574041 - RNA, 19 nt, Homo sapiens
  misc_RNA (1)...(19): siRNA sense strand
ucaagaauuacuacucguu

SEQ ID NO: 574042 - RNA, 19 nt, Homo sapiens
  misc_RNA (1)...(19): siRNA sense strand
gugaagacgcucaauuugg

SEQ ID NO: 574043 - RNA, 19 nt, Homo sapiens
  misc_RNA (1)...(19): siRNA sense strand
ccuacaggcuuagcucuca

SEQ ID NO: 574044 - RNA, 19 nt, Homo sapiens
  misc_RNA (1)...(19): siRNA sense strand
gagugucggccuaugaguu

SEQ ID NO: 574045 - RNA, 19 nt, Homo sapiens
  misc_RNA (1)...(19): siRNA sense strand
gacaggccgcugcagguuu

SEQ ID NO: 574046 - RNA, 19 nt, Homo sapiens
  misc_RNA (1)...(19): siRNA sense strand
gaucgaaauacgggagaaa

SEQ ID NO: 574047 - RNA, 19 nt, Homo sapiens
  misc_RNA (1)...(19): siRNA sense strand
ucaaacugaaugcuucuga

SEQ ID NO: 574048 - RNA, 19 nt, Homo sapiens
  misc_RNA (1)...(19): siRNA sense strand
augcagauguuggagcuaa

SEQ ID NO: 574049 - RNA, 19 nt, Homo sapiens
  misc_RNA (1)...(19): siRNA sense strand
acgugaagacgcucaauuu

SEQ ID NO: 574050 - RNA, 19 nt, Homo sapiens
  misc_RNA (1)...(19): siRNA sense strand
gggguaauuuggauuuuga

SEQ ID NO: 574051 - RNA, 19 nt, Homo sapiens
  misc_RNA (1)...(19): siRNA sense strand
cgugaagacgcucaauuug

SEQ ID NO: 574052 - RNA, 19 nt, Homo sapiens
  misc_RNA (1)...(19): siRNA sense strand
gcugggauccuggcgacua

SEQ ID NO: 574053 - RNA, 19 nt, Homo sapiens
  misc_RNA (1)...(19): siRNA sense strand
ccgccaguguuccggguaa

SEQ ID NO: 574054 - RNA, 19 nt, Homo sapiens
  misc_RNA (1)...(19): siRNA sense strand
ugguggaugucaacgugua

SEQ ID NO: 574055 - RNA, 19 nt, Homo sapiens
  misc_RNA (1)...(19): siRNA sense strand
gccuaugaguuggugguaa

SEQ ID NO: 574056 - RNA, 19 nt, Homo sapiens
  misc_RNA (1)...(19): siRNA sense strand
gugcuggaugugaaugaua

SEQ ID NO: 574057 - RNA, 19 nt, Homo sapiens
  misc_RNA (1)...(19): siRNA sense strand
gcauuuuguuugugaauuc

SEQ ID NO: 574058 - RNA, 19 nt, Homo sapiens
  misc_RNA (1)...(19): siRNA sense strand
agacaacggaacaacaguu

SEQ ID NO: 574059 - RNA, 19 nt, Homo sapiens
  misc_RNA (1)...(19): siRNA sense strand
ugauguaggcgaagagcaa

SEQ ID NO: 574060 - RNA, 19 nt, Homo sapiens
  misc_RNA (1)...(19): siRNA sense strand
guuaucaaacugaaugcuu

SEQ ID NO: 574061 - RNA, 19 nt, Homo sapiens
  misc_RNA (1)...(19): siRNA sense strand
ggcuuagcucucaugauua

SEQ ID NO: 574062 - RNA, 19 nt, Homo sapiens
  misc_RNA (1)...(19): siRNA sense strand
caacguguaccugaucauc

SEQ ID NO: 574063 - RNA, 19 nt, Homo sapiens
  misc_RNA (1)...(19): siRNA sense strand
ccuaugaguuggugguaac

SEQ ID NO: 574064 - RNA, 19 nt, Homo sapiens
  misc_RNA (1)...(19): siRNA sense strand
aaacugaaugcuucugauc

SEQ ID NO: 574065 - RNA, 19 nt, Homo sapiens
  misc_RNA (1)...(19): siRNA sense strand
augauaaugcucccacuuu

SEQ ID NO: 574066 - RNA, 19 nt, Homo sapiens
  misc_RNA (1)...(19): siRNA sense strand
uagcucucaugauuacuuc

SEQ ID NO: 574067 - RNA, 19 nt, Homo sapiens
  misc_RNA (1)...(19): siRNA sense strand
ggacguggaggugaaggau

SEQ ID NO: 574068 - RNA, 19 nt, Homo sapiens
  misc_RNA (1)...(19): siRNA sense strand
agagagugucggccuauga

SEQ ID NO: 574069 - RNA, 19 nt, Homo sapiens
  misc_RNA (1)...(19): siRNA sense strand
guugaaacuaugguuauug

SEQ ID NO: 574070 - RNA, 19 nt, Homo sapiens
  misc_RNA (1)...(19): siRNA sense strand
aaacgcagacaacggaaca

SEQ ID NO: 574071 - RNA, 19 nt, Homo sapiens
  misc_RNA (1)...(19): siRNA sense strand
auucaaagaacgaugagaa

SEQ ID NO: 574072 - RNA, 19 nt, Homo sapiens
  misc_RNA (1)...(19): siRNA sense strand
cuagaugugaauucaaaga

SEQ ID NO: 574073 - RNA, 19 nt, Homo sapiens
  misc_RNA (1)...(19): siRNA sense strand
ccaccuucaagaauuacua

SEQ ID NO: 574074 - RNA, 19 nt, Homo sapiens
  misc_RNA (1)...(19): siRNA sense strand
gagagugucggccuaugag

SEQ ID NO: 574075 - RNA, 19 nt, Homo sapiens
  misc_RNA (1)...(19): siRNA sense strand
gagcaagauuuaaauguug

SEQ ID NO: 574076 - RNA, 19 nt, Homo sapiens
  misc_RNA (1)...(19): siRNA sense strand
caaagaacgaugagaauaa

SEQ ID NO: 574077 - RNA, 19 nt, Homo sapiens
  misc_RNA (1)...(19): siRNA sense strand
gcgaagagcaagauuuaaa

SEQ ID NO: 574078 - RNA, 19 nt, Homo sapiens
  misc_RNA (1)...(19): siRNA sense strand
aggcuuagcucucaugauu

SEQ ID NO: 574079 - RNA, 19 nt, Homo sapiens
  misc_RNA (1)...(19): siRNA sense strand
ugaaggauguuaaugacaa

SEQ ID NO: 574080 - RNA, 19 nt, Homo sapiens
  misc_RNA (1)...(19): siRNA sense strand
cgaacagucugaauacgaa

SEQ ID NO: 574081 - RNA, 19 nt, Homo sapiens
  misc_RNA (1)...(19): siRNA sense strand
gacaacggaacaacaguua

SEQ ID NO: 574082 - RNA, 19 nt, Homo sapiens
  misc_RNA (1)...(19): siRNA sense strand
gaagagcaagauuuaaaug

SEQ ID NO: 574083 - RNA, 19 nt, Homo sapiens
  misc_RNA (1)...(19): siRNA sense strand
guguuaaccuacaggcuua

SEQ ID NO: 574084 - RNA, 19 nt, Homo sapiens
  misc_RNA (1)...(19): siRNA sense strand
ggugaaggaucauggugaa

SEQ ID NO: 574085 - RNA, 19 nt, Homo sapiens
  misc_RNA (1)...(19): siRNA sense strand
acgcguggcuuucguauga

SEQ ID NO: 574086 - RNA, 19 nt, Homo sapiens
  misc_RNA (1)...(19): siRNA sense strand
ugaagacgcucaauuuggu

SEQ ID NO: 574087 - RNA, 19 nt, Homo sapiens
  misc_RNA (1)...(19): siRNA sense strand
gggcaaaccugagcucaca

SEQ ID NO: 574088 - RNA, 19 nt, Homo sapiens
  misc_RNA (1)...(19): siRNA sense strand
ucaaagaacgaugagaaua

SEQ ID NO: 574089 - RNA, 19 nt, Homo sapiens
  misc_RNA (1)...(19): siRNA sense strand
gaaaauccuuggacagaga

SEQ ID NO: 574090 - RNA, 19 nt, Homo sapiens
  misc_RNA (1)...(19): siRNA sense strand
agaacgcgcugguguccua

SEQ ID NO: 574091 - RNA, 19 nt, Homo sapiens
  misc_RNA (1)...(19): siRNA sense strand
uguccaccuucaagaauua

SEQ ID NO: 574092 - RNA, 19 nt, Homo sapiens
  misc_RNA (1)...(19): siRNA sense strand
uaaacugguugagcucgua

SEQ ID NO: 574093 - RNA, 19 nt, Homo sapiens
  misc_RNA (1)...(19): siRNA sense strand
gcuuagcucucaugauuac

SEQ ID NO: 574094 - RNA, 19 nt, Homo sapiens
  misc_RNA (1)...(19): siRNA sense strand
uaacgucccugagauagca

SEQ ID NO: 574095 - RNA, 19 nt, Homo sapiens
  misc_RNA (1)...(19): siRNA sense strand
gaaauacgggagaaauagu

SEQ ID NO: 574096 - RNA, 19 nt, Homo sapiens
  misc_RNA (1)...(19): siRNA sense strand
uagcauagaucgaaauacg

SEQ ID NO: 574097 - RNA, 19 nt, Homo sapiens
  misc_RNA (1)...(19): siRNA sense strand
gaagacgcucaauuuggua

SEQ ID NO: 574098 - RNA, 19 nt, Homo sapiens
  misc_RNA (1)...(19): siRNA sense strand
ugauaaugcucccacuuuc

SEQ ID NO: 574099 - RNA, 19 nt, Homo sapiens
  misc_RNA (1)...(19): siRNA sense strand
aggcgaagagcaagauuua

SEQ ID NO: 574100 - RNA, 19 nt, Homo sapiens
  misc_RNA (1)...(19): siRNA sense strand
caaacugaaugcuucugau

SEQ ID NO: 574101 - RNA, 19 nt, Homo sapiens
  misc_RNA (1)...(19): siRNA sense strand
caacggaacaacaguuauc

SEQ ID NO: 574102 - RNA, 19 nt, Homo sapiens
  misc_RNA (1)...(19): siRNA sense strand
cggaacaacaguuaucaaa

SEQ ID NO: 574103 - RNA, 19 nt, Homo sapiens
  misc_RNA (1)...(19): siRNA sense strand
ggugaaggauguuaaugac

SEQ ID NO: 574104 - RNA, 19 nt, Homo sapiens
  misc_RNA (1)...(19): siRNA sense strand
uuaauagccuuguugaaac

SEQ ID NO: 574105 - RNA, 19 nt, Homo sapiens
  misc_RNA (1)...(19): siRNA sense strand
ucgaaauacgggagaaaua

SEQ ID NO: 574106 - RNA, 19 nt, Homo sapiens
  misc_RNA (1)...(19): siRNA sense strand
gcagucggcuggcguuuug

SEQ ID NO: 574107 - RNA, 19 nt, Homo sapiens
  misc_RNA (1)...(19): siRNA sense strand
agauagcacugacuuccuu

SEQ ID NO: 574108 - RNA, 19 nt, Homo sapiens
  misc_RNA (1)...(19): siRNA sense strand
ugauaacgucccugagaua

SEQ ID NO: 574109 - RNA, 19 nt, Homo sapiens
  misc_RNA (1)...(19): siRNA sense strand
guugagcucguauuaagaa

SEQ ID NO: 574110 - RNA, 19 nt, Homo sapiens
  misc_RNA (1)...(19): siRNA sense strand
cgaagagcaagauuuaaau

SEQ ID NO: 574111 - RNA, 19 nt, Homo sapiens
  misc_RNA (1)...(19): siRNA sense strand
gcacugacuuccuuauccu

SEQ ID NO: 574112 - RNA, 19 nt, Homo sapiens
  misc_RNA (1)...(19): siRNA sense strand
cgaaauacgggagaaauag

SEQ ID NO: 574113 - RNA, 19 nt, Homo sapiens
  misc_RNA (1)...(19): siRNA sense strand
gaaggauguuaaugacaac

SEQ ID NO: 574114 - RNA, 19 nt, Homo sapiens
  misc_RNA (1)...(19): siRNA sense strand
gaacgaugagaauaaacug

SEQ ID NO: 574115 - RNA, 19 nt, Homo sapiens
  misc_RNA (1)...(19): siRNA sense strand
ugaauucaaagaacgauga

SEQ ID NO: 574116 - RNA, 19 nt, Homo sapiens
  misc_RNA (1)...(19): siRNA sense strand
caugcuagaugugaauuca

SEQ ID NO: 574117 - RNA, 19 nt, Homo sapiens
  misc_RNA (1)...(19): siRNA sense strand
guacugucaucgcccuaau

SEQ ID NO: 574118 - RNA, 19 nt, Homo sapiens
  misc_RNA (1)...(19): siRNA sense strand
gcgggucauugcaccguuu

SEQ ID NO: 574119 - RNA, 19 nt, Homo sapiens
  misc_RNA (1)...(19): siRNA sense strand
ugcuagaugugaauucaaa

SEQ ID NO: 574120 - RNA, 19 nt, Homo sapiens
  misc_RNA (1)...(19): siRNA sense strand
gauagcacugacuuccuua

SEQ ID NO: 574121 - RNA, 19 nt, Homo sapiens
  misc_RNA (1)...(19): siRNA sense strand
ugacaacccgccaguguuc

SEQ ID NO: 574122 - RNA, 19 nt, Homo sapiens
  misc_RNA (1)...(19): siRNA sense strand
ggucauacucgcaacaaca

SEQ ID NO: 574123 - RNA, 19 nt, Homo sapiens
  misc_RNA (1)...(19): siRNA sense strand
ucaauuugguacugucauc

SEQ ID NO: 574124 - RNA, 19 nt, Homo sapiens
  misc_RNA (1)...(19): siRNA sense strand
gcagacaacggaacaacag

SEQ ID NO: 574125 - RNA, 19 nt, Homo sapiens
  misc_RNA (1)...(19): siRNA sense strand
ugguugagcucguauuaag

SEQ ID NO: 574126 - RNA, 19 nt, Homo sapiens
  misc_RNA (1)...(19): siRNA sense strand
aaagcuguuuguuucagaa

SEQ ID NO: 574127 - RNA, 19 nt, Homo sapiens
  misc_RNA (1)...(19): siRNA sense strand
gagagagugucggccuaug

SEQ ID NO: 574128 - RNA, 19 nt, Homo sapiens
  misc_RNA (1)...(19): siRNA sense strand
ggaggugaaggauguuaau

SEQ ID NO: 574129 - RNA, 19 nt, Homo sapiens
  misc_RNA (1)...(19): siRNA sense strand
guguccaccuucaagaauu

SEQ ID NO: 574130 - RNA, 19 nt, Homo sapiens
  misc_RNA (1)...(19): siRNA sense strand
acugucaucgcccuaauua

SEQ ID NO: 574131 - RNA, 19 nt, Homo sapiens
  misc_RNA (1)...(19): siRNA sense strand
gauaacgucccugagauag

SEQ ID NO: 574132 - RNA, 19 nt, Homo sapiens
  misc_RNA (1)...(19): siRNA sense strand
uaauagccuuguugaaacu

SEQ ID NO: 574133 - RNA, 19 nt, Homo sapiens
  misc_RNA (1)...(19): siRNA sense strand
cgaugagaauaaacugguu

SEQ ID NO: 574134 - RNA, 19 nt, Homo sapiens
  misc_RNA (1)...(19): siRNA sense strand
ugcuggaugugaaugauaa

SEQ ID NO: 574135 - RNA, 19 nt, Homo sapiens
  misc_RNA (1)...(19): siRNA sense strand
gaaggaucauggugaaccu

SEQ ID NO: 574136 - RNA, 19 nt, Homo sapiens
  misc_RNA (1)...(19): siRNA sense strand
gggcaauuucauauucuuu

SEQ ID NO: 574137 - RNA, 19 nt, Homo sapiens
  misc_RNA (1)...(19): siRNA sense strand
ggaacaacaguuaucaaac

SEQ ID NO: 574138 - RNA, 19 nt, Homo sapiens
  misc_RNA (1)...(19): siRNA sense strand
ggaugugaaugauaaugcu

SEQ ID NO: 574139 - RNA, 19 nt, Homo sapiens
  misc_RNA (1)...(19): siRNA sense strand
gagcucguauuaagaaaau

SEQ ID NO: 574140 - RNA, 19 nt, Homo sapiens
  misc_RNA (1)...(19): siRNA sense strand
aaugauaacgucccugaga

SEQ ID NO: 574141 - RNA, 19 nt, Homo sapiens
  misc_RNA (1)...(19): siRNA sense strand
ucaagaauuacuacucguu

SEQ ID NO: 574142 - RNA, 19 nt, Homo sapiens
  misc_RNA (1)...(19): siRNA sense strand
gugaagacgcucaauuugg

SEQ ID NO: 574143 - RNA, 19 nt, Homo sapiens
  misc_RNA (1)...(19): siRNA sense strand
ccuacaggcuuagcucuca

SEQ ID NO: 574144 - RNA, 19 nt, Homo sapiens
  misc_RNA (1)...(19): siRNA sense strand
gagugucggccuaugaguu

SEQ ID NO: 574145 - RNA, 19 nt, Homo sapiens
  misc_RNA (1)...(19): siRNA sense strand
gacaggccgcugcagguuu

SEQ ID NO: 574146 - RNA, 19 nt, Homo sapiens
  misc_RNA (1)...(19): siRNA sense strand
gaucgaaauacgggagaaa

SEQ ID NO: 574147 - RNA, 19 nt, Homo sapiens
  misc_RNA (1)...(19): siRNA sense strand
ucaaacugaaugcuucuga

SEQ ID NO: 574148 - RNA, 19 nt, Homo sapiens
  misc_RNA (1)...(19): siRNA sense strand
augcagauguuggagcuaa

SEQ ID NO: 574149 - RNA, 19 nt, Homo sapiens
  misc_RNA (1)...(19): siRNA sense strand
acgugaagacgcucaauuu

SEQ ID NO: 574150 - RNA, 19 nt, Homo sapiens
  misc_RNA (1)...(19): siRNA sense strand
gggguaauuuggauuuuga

SEQ ID NO: 574151 - RNA, 19 nt, Homo sapiens
  misc_RNA (1)...(19): siRNA sense strand
cgugaagacgcucaauuug

SEQ ID NO: 574152 - RNA, 19 nt, Homo sapiens
  misc_RNA (1)...(19): siRNA sense strand
gcugggauccuggcgacua

SEQ ID NO: 574153 - RNA, 19 nt, Homo sapiens
  misc_RNA (1)...(19): siRNA sense strand
ccgccaguguuccggguaa

SEQ ID NO: 574154 - RNA, 19 nt, Homo sapiens
  misc_RNA (1)...(19): siRNA sense strand
ugguggaugucaacgugua

SEQ ID NO: 574155 - RNA, 19 nt, Homo sapiens
  misc_RNA (1)...(19): siRNA sense strand
gccuaugaguuggugguaa

SEQ ID NO: 574156 - RNA, 19 nt, Homo sapiens
  misc_RNA (1)...(19): siRNA sense strand
gugcuggaugugaaugaua

SEQ ID NO: 574157 - RNA, 19 nt, Homo sapiens
  misc_RNA (1)...(19): siRNA sense strand
gcauuuuguuugugaauuc

SEQ ID NO: 574158 - RNA, 19 nt, Homo sapiens
  misc_RNA (1)...(19): siRNA sense strand
agacaacggaacaacaguu

SEQ ID NO: 574159 - RNA, 19 nt, Homo sapiens
  misc_RNA (1)...(19): siRNA sense strand
ugauguaggcgaagagcaa

SEQ ID NO: 574160 - RNA, 19 nt, Homo sapiens
  misc_RNA (1)...(19): siRNA sense strand
guuaucaaacugaaugcuu

SEQ ID NO: 574161 - RNA, 19 nt, Homo sapiens
  misc_RNA (1)...(19): siRNA sense strand
ggcuuagcucucaugauua

SEQ ID NO: 574162 - RNA, 19 nt, Homo sapiens
  misc_RNA (1)...(19): siRNA sense strand
caacguguaccugaucauc

SEQ ID NO: 574163 - RNA, 19 nt, Homo sapiens
  misc_RNA (1)...(19): siRNA sense strand
ccuaugaguuggugguaac

SEQ ID NO: 574164 - RNA, 19 nt, Homo sapiens
  misc_RNA (1)...(19): siRNA sense strand
aaacugaaugcuucugauc

SEQ ID NO: 574165 - RNA, 19 nt, Homo sapiens
  misc_RNA (1)...(19): siRNA sense strand
augauaaugcucccacuuu

SEQ ID NO: 574166 - RNA, 19 nt, Homo sapiens
  misc_RNA (1)...(19): siRNA sense strand
uagcucucaugauuacuuc

SEQ ID NO: 574167 - RNA, 19 nt, Homo sapiens
  misc_RNA (1)...(19): siRNA sense strand
ggacguggaggugaaggau

SEQ ID NO: 574168 - RNA, 19 nt, Homo sapiens
  misc_RNA (1)...(19): siRNA sense strand
agagagugucggccuauga

SEQ ID NO: 574169 - RNA, 19 nt, Homo sapiens
  misc_RNA (1)...(19): siRNA sense strand
guugaaacuaugguuauug

SEQ ID NO: 574170 - RNA, 19 nt, Homo sapiens
  misc_RNA (1)...(19): siRNA sense strand
aaacgcagacaacggaaca

SEQ ID NO: 574171 - RNA, 19 nt, Homo sapiens
  misc_RNA (1)...(19): siRNA sense strand
auucaaagaacgaugagaa

SEQ ID NO: 574172 - RNA, 19 nt, Homo sapiens
  misc_RNA (1)...(19): siRNA sense strand
cuagaugugaauucaaaga

SEQ ID NO: 574173 - RNA, 19 nt, Homo sapiens
  misc_RNA (1)...(19): siRNA sense strand
ccaccuucaagaauuacua

SEQ ID NO: 574174 - RNA, 19 nt, Homo sapiens
  misc_RNA (1)...(19): siRNA sense strand
gagagugucggccuaugag

SEQ ID NO: 574175 - RNA, 19 nt, Homo sapiens
  misc_RNA (1)...(19): siRNA sense strand
gaaaguagagcacacaaga

SEQ ID NO: 574176 - RNA, 19 nt, Homo sapiens
  misc_RNA (1)...(19): siRNA sense strand
ugacaaugcuccacaguug

SEQ ID NO: 574177 - RNA, 19 nt, Homo sapiens
  misc_RNA (1)...(19): siRNA sense strand
caucuacugcuguuuauua

SEQ ID NO: 574178 - RNA, 19 nt, Homo sapiens
  misc_RNA (1)...(19): siRNA sense strand
cgacaucuacugcuguuua

SEQ ID NO: 574179 - RNA, 19 nt, Homo sapiens
  misc_RNA (1)...(19): siRNA sense strand
agaacgcccugcucacuua

SEQ ID NO: 574180 - RNA, 19 nt, Homo sapiens
  misc_RNA (1)...(19): siRNA sense strand
ggagucaacggacagguua

SEQ ID NO: 574181 - RNA, 19 nt, Homo sapiens
  misc_RNA (1)...(19): siRNA sense strand
gaaaggccgcugcagguuu

SEQ ID NO: 574182 - RNA, 19 nt, Homo sapiens
  misc_RNA (1)...(19): siRNA sense strand
guacaguucuuguggaagu

SEQ ID NO: 574183 - RNA, 19 nt, Homo sapiens
  misc_RNA (1)...(19): siRNA sense strand
ugaaggacauuaacgacaa

SEQ ID NO: 574184 - RNA, 19 nt, Homo sapiens
  misc_RNA (1)...(19): siRNA sense strand
ggagguaaaucugcagaau

SEQ ID NO: 574185 - RNA, 19 nt, Homo sapiens
  misc_RNA (1)...(19): siRNA sense strand
ggacuuguauuacggaaac

SEQ ID NO: 574186 - RNA, 19 nt, Homo sapiens
  misc_RNA (1)...(19): siRNA sense strand
acgcguggcuuucguauga

SEQ ID NO: 574187 - RNA, 19 nt, Homo sapiens
  misc_RNA (1)...(19): siRNA sense strand
cuccggagcuucauuuauu

SEQ ID NO: 574188 - RNA, 19 nt, Homo sapiens
  misc_RNA (1)...(19): siRNA sense strand
ugauguuucuccagauaua

SEQ ID NO: 574189 - RNA, 19 nt, Homo sapiens
  misc_RNA (1)...(19): siRNA sense strand
gacuggcaccguucaauua

SEQ ID NO: 574190 - RNA, 19 nt, Homo sapiens
  misc_RNA (1)...(19): siRNA sense strand
gaagguacgugcaguugac

SEQ ID NO: 574191 - RNA, 19 nt, Homo sapiens
  misc_RNA (1)...(19): siRNA sense strand
agaccgagcugguggaugu

SEQ ID NO: 574192 - RNA, 19 nt, Homo sapiens
  misc_RNA (1)...(19): siRNA sense strand
cgacaacccuccgguguuc

SEQ ID NO: 574193 - RNA, 19 nt, Homo sapiens
  misc_RNA (1)...(19): siRNA sense strand
gaaauuaccagaaaacguu

SEQ ID NO: 574194 - RNA, 19 nt, Homo sapiens
  misc_RNA (1)...(19): siRNA sense strand
gggcgcauguaguuuggua

SEQ ID NO: 574195 - RNA, 19 nt, Homo sapiens
  misc_RNA (1)...(19): siRNA sense strand
agaacgcgcugguguccua

SEQ ID NO: 574196 - RNA, 19 nt, Homo sapiens
  misc_RNA (1)...(19): siRNA sense strand
gacaucuacugcuguuuau

SEQ ID NO: 574197 - RNA, 19 nt, Homo sapiens
  misc_RNA (1)...(19): siRNA sense strand
ccuaugagcuggugguuac

SEQ ID NO: 574198 - RNA, 19 nt, Homo sapiens
  misc_RNA (1)...(19): siRNA sense strand
uguccaccuucaagaauua

SEQ ID NO: 574199 - RNA, 19 nt, Homo sapiens
  misc_RNA (1)...(19): siRNA sense strand
ucacgguacuggacaacaa

SEQ ID NO: 574200 - RNA, 19 nt, Homo sapiens
  misc_RNA (1)...(19): siRNA sense strand
gguaaaaccucuuggacuu

SEQ ID NO: 574201 - RNA, 19 nt, Homo sapiens
  misc_RNA (1)...(19): siRNA sense strand
ucggaacgcuggugauuca

SEQ ID NO: 574202 - RNA, 19 nt, Homo sapiens
  misc_RNA (1)...(19): siRNA sense strand
gcuguacacuggugagauc

SEQ ID NO: 574203 - RNA, 19 nt, Homo sapiens
  misc_RNA (1)...(19): siRNA sense strand
ugauaggacauauggauuu

SEQ ID NO: 574204 - RNA, 19 nt, Homo sapiens
  misc_RNA (1)...(19): siRNA sense strand
cagguaccgucaucacauu

SEQ ID NO: 574205 - RNA, 19 nt, Homo sapiens
  misc_RNA (1)...(19): siRNA sense strand
agaagaaacuccggagcuu

SEQ ID NO: 574206 - RNA, 19 nt, Homo sapiens
  misc_RNA (1)...(19): siRNA sense strand
ggcuaaacauggcaacuuc

SEQ ID NO: 574207 - RNA, 19 nt, Homo sapiens
  misc_RNA (1)...(19): siRNA sense strand
ggauguaaaugacaaugcu

SEQ ID NO: 574208 - RNA, 19 nt, Homo sapiens
  misc_RNA (1)...(19): siRNA sense strand
gggauauuauuuacuccuu

SEQ ID NO: 574209 - RNA, 19 nt, Homo sapiens
  misc_RNA (1)...(19): siRNA sense strand
gaagaaaguagagcacaca

SEQ ID NO: 574210 - RNA, 19 nt, Homo sapiens
  misc_RNA (1)...(19): siRNA sense strand
gggaucuucuggagguaaa

SEQ ID NO: 574211 - RNA, 19 nt, Homo sapiens
  misc_RNA (1)...(19): siRNA sense strand
ggaaaggccgcugcagguu

SEQ ID NO: 574212 - RNA, 19 nt, Homo sapiens
  misc_RNA (1)...(19): siRNA sense strand
gaggccagcuccacuacuc

SEQ ID NO: 574213 - RNA, 19 nt, Homo sapiens
  misc_RNA (1)...(19): siRNA sense strand
ggaaguuguggauguaaau

SEQ ID NO: 574214 - RNA, 19 nt, Homo sapiens
  misc_RNA (1)...(19): siRNA sense strand
acggugaaauuaccagaaa

SEQ ID NO: 574215 - RNA, 19 nt, Homo sapiens
  misc_RNA (1)...(19): siRNA sense strand
agugauguuucuccagaua

SEQ ID NO: 574216 - RNA, 19 nt, Homo sapiens
  misc_RNA (1)...(19): siRNA sense strand
ucacauugauuagcguguu

SEQ ID NO: 574217 - RNA, 19 nt, Homo sapiens
  misc_RNA (1)...(19): siRNA sense strand
gcuccacaguugacucuca

SEQ ID NO: 574218 - RNA, 19 nt, Homo sapiens
  misc_RNA (1)...(19): siRNA sense strand
gaaggacauuaacgacaac

SEQ ID NO: 574219 - RNA, 19 nt, Homo sapiens
  misc_RNA (1)...(19): siRNA sense strand
gagguaaaucugcagaaug

SEQ ID NO: 574220 - RNA, 19 nt, Homo sapiens
  misc_RNA (1)...(19): siRNA sense strand
gauaggacauauggauuuu

SEQ ID NO: 574221 - RNA, 19 nt, Homo sapiens
  misc_RNA (1)...(19): siRNA sense strand
aaacuccggagcuucauuu

SEQ ID NO: 574222 - RNA, 19 nt, Homo sapiens
  misc_RNA (1)...(19): siRNA sense strand
gaaacuccggagcuucauu

SEQ ID NO: 574223 - RNA, 19 nt, Homo sapiens
  misc_RNA (1)...(19): siRNA sense strand
gagaacgcccugcucacuu

SEQ ID NO: 574224 - RNA, 19 nt, Homo sapiens
  misc_RNA (1)...(19): siRNA sense strand
cgacacgagcccuagauga

SEQ ID NO: 574225 - RNA, 19 nt, Homo sapiens
  misc_RNA (1)...(19): siRNA sense strand
gcgcauguaguuugguaaa

SEQ ID NO: 574226 - RNA, 19 nt, Homo sapiens
  misc_RNA (1)...(19): siRNA sense strand
acaaaggaaucuguucauc

SEQ ID NO: 574227 - RNA, 19 nt, Homo sapiens
  misc_RNA (1)...(19): siRNA sense strand
agguaaaucugcagaaugg

SEQ ID NO: 574228 - RNA, 19 nt, Homo sapiens
  misc_RNA (1)...(19): siRNA sense strand
cacauugauuagcguguuu

SEQ ID NO: 574229 - RNA, 19 nt, Homo sapiens
  misc_RNA (1)...(19): siRNA sense strand
gcuggucauuguacaguuc

SEQ ID NO: 574230 - RNA, 19 nt, Homo sapiens
  misc_RNA (1)...(19): siRNA sense strand
ugacuggcaccguucaauu

SEQ ID NO: 574231 - RNA, 19 nt, Homo sapiens
  misc_RNA (1)...(19): siRNA sense strand
ccgcuugacucucgguuuc

SEQ ID NO: 574232 - RNA, 19 nt, Homo sapiens
  misc_RNA (1)...(19): siRNA sense strand
gaggacgcccaaccaggua

SEQ ID NO: 574233 - RNA, 19 nt, Homo sapiens
  misc_RNA (1)...(19): siRNA sense strand
gcauguaguuugguaaagc

SEQ ID NO: 574234 - RNA, 19 nt, Homo sapiens
  misc_RNA (1)...(19): siRNA sense strand
gccgacaucuacugcuguu

SEQ ID NO: 574235 - RNA, 19 nt, Homo sapiens
  misc_RNA (1)...(19): siRNA sense strand
gagaguguguccgccuaug

SEQ ID NO: 574236 - RNA, 19 nt, Homo sapiens
  misc_RNA (1)...(19): siRNA sense strand
guguccaccuucaagaauu

SEQ ID NO: 574237 - RNA, 19 nt, Homo sapiens
  misc_RNA (1)...(19): siRNA sense strand
ugccucagauuuagacgaa

SEQ ID NO: 574238 - RNA, 19 nt, Homo sapiens
  misc_RNA (1)...(19): siRNA sense strand
cgacacaaaggaaucuguu

SEQ ID NO: 574239 - RNA, 19 nt, Homo sapiens
  misc_RNA (1)...(19): siRNA sense strand
uggaaguuguggauguaaa

SEQ ID NO: 574240 - RNA, 19 nt, Homo sapiens
  misc_RNA (1)...(19): siRNA sense strand
uguggaaguuguggaugua

SEQ ID NO: 574241 - RNA, 19 nt, Homo sapiens
  misc_RNA (1)...(19): siRNA sense strand
ccaaccagguaccgucauc

SEQ ID NO: 574242 - RNA, 19 nt, Homo sapiens
  misc_RNA (1)...(19): siRNA sense strand
gacaaugcuccacaguuga

SEQ ID NO: 574243 - RNA, 19 nt, Homo sapiens
  misc_RNA (1)...(19): siRNA sense strand
gaaguuguggauguaaaug

SEQ ID NO: 574244 - RNA, 19 nt, Homo sapiens
  misc_RNA (1)...(19): siRNA sense strand
aguauacgguguucgugaa

SEQ ID NO: 574245 - RNA, 19 nt, Homo sapiens
  misc_RNA (1)...(19): siRNA sense strand
gguccauccucuacagaca

SEQ ID NO: 574246 - RNA, 19 nt, Homo sapiens
  misc_RNA (1)...(19): siRNA sense strand
gaaagcggccaggcaccaa

SEQ ID NO: 574247 - RNA, 19 nt, Homo sapiens
  misc_RNA (1)...(19): siRNA sense strand
acacaaaggaaucuguuca

SEQ ID NO: 574248 - RNA, 19 nt, Homo sapiens
  misc_RNA (1)...(19): siRNA sense strand
ugagggcgcauguaguuug

SEQ ID NO: 574249 - RNA, 19 nt, Homo sapiens
  misc_RNA (1)...(19): siRNA sense strand
gcacgacacgagcccuaga

SEQ ID NO: 574250 - RNA, 19 nt, Homo sapiens
  misc_RNA (1)...(19): siRNA sense strand
ggagaacgcccugcucacu

SEQ ID NO: 574251 - RNA, 19 nt, Homo sapiens
  misc_RNA (1)...(19): siRNA sense strand
cccaaugccucagauuuag

SEQ ID NO: 574252 - RNA, 19 nt, Homo sapiens
  misc_RNA (1)...(19): siRNA sense strand
gacacgagcccuagaugag

SEQ ID NO: 574253 - RNA, 19 nt, Homo sapiens
  misc_RNA (1)...(19): siRNA sense strand
gcgaagguacgugcaguug

SEQ ID NO: 574254 - RNA, 19 nt, Homo sapiens
  misc_RNA (1)...(19): siRNA sense strand
gcugccacaucuucacugu

SEQ ID NO: 574255 - RNA, 19 nt, Homo sapiens
  misc_RNA (1)...(19): siRNA sense strand
ccagcaaccagcagguaaa

SEQ ID NO: 574256 - RNA, 19 nt, Homo sapiens
  misc_RNA (1)...(19): siRNA sense strand
gugauaggacauauggauu

SEQ ID NO: 574257 - RNA, 19 nt, Homo sapiens
  misc_RNA (1)...(19): siRNA sense strand
gauguuucuccagauauaa

SEQ ID NO: 574258 - RNA, 19 nt, Homo sapiens
  misc_RNA (1)...(19): siRNA sense strand
gaauggggauauuauuuac

SEQ ID NO: 574259 - RNA, 19 nt, Homo sapiens
  misc_RNA (1)...(19): siRNA sense strand
guacuggacaacaaugaca

SEQ ID NO: 574260 - RNA, 19 nt, Homo sapiens
  misc_RNA (1)...(19): siRNA sense strand
ugguggaugucaacgugua

SEQ ID NO: 574261 - RNA, 19 nt, Homo sapiens
  misc_RNA (1)...(19): siRNA sense strand
gagggcgcauguaguuugg

SEQ ID NO: 574262 - RNA, 19 nt, Homo sapiens
  misc_RNA (1)...(19): siRNA sense strand
ucugagggcgcauguaguu

SEQ ID NO: 574263 - RNA, 19 nt, Homo sapiens
  misc_RNA (1)...(19): siRNA sense strand
gacucucgguuuccacuag

SEQ ID NO: 574264 - RNA, 19 nt, Homo sapiens
  misc_RNA (1)...(19): siRNA sense strand
cgaagguacgugcaguuga

SEQ ID NO: 574265 - RNA, 19 nt, Homo sapiens
  misc_RNA (1)...(19): siRNA sense strand
gcauuuuguuugugaauuc

SEQ ID NO: 574266 - RNA, 19 nt, Homo sapiens
  misc_RNA (1)...(19): siRNA sense strand
aaaggccgcugcagguuuu

SEQ ID NO: 574267 - RNA, 19 nt, Homo sapiens
  misc_RNA (1)...(19): siRNA sense strand
aagaaacuccggagcuuca

SEQ ID NO: 574268 - RNA, 19 nt, Homo sapiens
  misc_RNA (1)...(19): siRNA sense strand
uccagucuguuggugcuua

SEQ ID NO: 574269 - RNA, 19 nt, Homo sapiens
  misc_RNA (1)...(19): siRNA sense strand
uaggacauauggauuuuga

SEQ ID NO: 574270 - RNA, 19 nt, Homo sapiens
  misc_RNA (1)...(19): siRNA sense strand
uaucggaacgcuggugauu

SEQ ID NO: 574271 - RNA, 19 nt, Homo sapiens
  misc_RNA (1)...(19): siRNA sense strand
ccuguauacggugaaauua

SEQ ID NO: 574272 - RNA, 19 nt, Homo sapiens
  misc_RNA (1)...(19): siRNA sense strand
caacguguaccugaucauc

SEQ ID NO: 574273 - RNA, 19 nt, Homo sapiens
  misc_RNA (1)...(19): siRNA sense strand
gguaccgucaucacauuga

SEQ ID NO: 574274 - RNA, 19 nt, Homo sapiens
  misc_RNA (1)...(19): siRNA sense strand
ccaccuucaagaauuacua

SEQ ID NO: 574275 - RNA, 19 nt, Homo sapiens
  misc_RNA (1)...(19): siRNA sense strand
gaaaguagagcacacaaga

SEQ ID NO: 574276 - RNA, 19 nt, Homo sapiens
  misc_RNA (1)...(19): siRNA sense strand
ugacaaugcuccacaguug

SEQ ID NO: 574277 - RNA, 19 nt, Homo sapiens
  misc_RNA (1)...(19): siRNA sense strand
caucuacugcuguuuauua

SEQ ID NO: 574278 - RNA, 19 nt, Homo sapiens
  misc_RNA (1)...(19): siRNA sense strand
cgacaucuacugcuguuua

SEQ ID NO: 574279 - RNA, 19 nt, Homo sapiens
  misc_RNA (1)...(19): siRNA sense strand
agaacgcccugcucacuua

SEQ ID NO: 574280 - RNA, 19 nt, Homo sapiens
  misc_RNA (1)...(19): siRNA sense strand
ggagucaacggacagguua

SEQ ID NO: 574281 - RNA, 19 nt, Homo sapiens
  misc_RNA (1)...(19): siRNA sense strand
gaaaggccgcugcagguuu

SEQ ID NO: 574282 - RNA, 19 nt, Homo sapiens
  misc_RNA (1)...(19): siRNA sense strand
guacaguucuuguggaagu

SEQ ID NO: 574283 - RNA, 19 nt, Homo sapiens
  misc_RNA (1)...(19): siRNA sense strand
ugaaggacauuaacgacaa

SEQ ID NO: 574284 - RNA, 19 nt, Homo sapiens
  misc_RNA (1)...(19): siRNA sense strand
ggagguaaaucugcagaau

SEQ ID NO: 574285 - RNA, 19 nt, Homo sapiens
  misc_RNA (1)...(19): siRNA sense strand
ggacuuguauuacggaaac

SEQ ID NO: 574286 - RNA, 19 nt, Homo sapiens
  misc_RNA (1)...(19): siRNA sense strand
acgcguggcuuucguauga

SEQ ID NO: 574287 - RNA, 19 nt, Homo sapiens
  misc_RNA (1)...(19): siRNA sense strand
cuccggagcuucauuuauu

SEQ ID NO: 574288 - RNA, 19 nt, Homo sapiens
  misc_RNA (1)...(19): siRNA sense strand
ugauguuucuccagauaua

SEQ ID NO: 574289 - RNA, 19 nt, Homo sapiens
  misc_RNA (1)...(19): siRNA sense strand
gacuggcaccguucaauua

SEQ ID NO: 574290 - RNA, 19 nt, Homo sapiens
  misc_RNA (1)...(19): siRNA sense strand
gaagguacgugcaguugac

SEQ ID NO: 574291 - RNA, 19 nt, Homo sapiens
  misc_RNA (1)...(19): siRNA sense strand
agaccgagcugguggaugu

SEQ ID NO: 574292 - RNA, 19 nt, Homo sapiens
  misc_RNA (1)...(19): siRNA sense strand
cgacaacccuccgguguuc

SEQ ID NO: 574293 - RNA, 19 nt, Homo sapiens
  misc_RNA (1)...(19): siRNA sense strand
gaaauuaccagaaaacguu

SEQ ID NO: 574294 - RNA, 19 nt, Homo sapiens
  misc_RNA (1)...(19): siRNA sense strand
gggcgcauguaguuuggua

SEQ ID NO: 574295 - RNA, 19 nt, Homo sapiens
  misc_RNA (1)...(19): siRNA sense strand
agaacgcgcugguguccua

SEQ ID NO: 574296 - RNA, 19 nt, Homo sapiens
  misc_RNA (1)...(19): siRNA sense strand
gacaucuacugcuguuuau

SEQ ID NO: 574297 - RNA, 19 nt, Homo sapiens
  misc_RNA (1)...(19): siRNA sense strand
ccuaugagcuggugguuac

SEQ ID NO: 574298 - RNA, 19 nt, Homo sapiens
  misc_RNA (1)...(19): siRNA sense strand
uguccaccuucaagaauua

SEQ ID NO: 574299 - RNA, 19 nt, Homo sapiens
  misc_RNA (1)...(19): siRNA sense strand
ucacgguacuggacaacaa

SEQ ID NO: 574300 - RNA, 19 nt, Homo sapiens
  misc_RNA (1)...(19): siRNA sense strand
gguaaaaccucuuggacuu

SEQ ID NO: 574301 - RNA, 19 nt, Homo sapiens
  misc_RNA (1)...(19): siRNA sense strand
ucggaacgcuggugauuca

SEQ ID NO: 574302 - RNA, 19 nt, Homo sapiens
  misc_RNA (1)...(19): siRNA sense strand
gcuguacacuggugagauc

SEQ ID NO: 574303 - RNA, 19 nt, Homo sapiens
  misc_RNA (1)...(19): siRNA sense strand
ugauaggacauauggauuu

SEQ ID NO: 574304 - RNA, 19 nt, Homo sapiens
  misc_RNA (1)...(19): siRNA sense strand
cagguaccgucaucacauu

SEQ ID NO: 574305 - RNA, 19 nt, Homo sapiens
  misc_RNA (1)...(19): siRNA sense strand
agaagaaacuccggagcuu

SEQ ID NO: 574306 - RNA, 19 nt, Homo sapiens
  misc_RNA (1)...(19): siRNA sense strand
ggcuaaacauggcaacuuc

SEQ ID NO: 574307 - RNA, 19 nt, Homo sapiens
  misc_RNA (1)...(19): siRNA sense strand
ggauguaaaugacaaugcu

SEQ ID NO: 574308 - RNA, 19 nt, Homo sapiens
  misc_RNA (1)...(19): siRNA sense strand
gggauauuauuuacuccuu

SEQ ID NO: 574309 - RNA, 19 nt, Homo sapiens
  misc_RNA (1)...(19): siRNA sense strand
gaagaaaguagagcacaca

SEQ ID NO: 574310 - RNA, 19 nt, Homo sapiens
  misc_RNA (1)...(19): siRNA sense strand
gggaucuucuggagguaaa

SEQ ID NO: 574311 - RNA, 19 nt, Homo sapiens
  misc_RNA (1)...(19): siRNA sense strand
ggaaaggccgcugcagguu

SEQ ID NO: 574312 - RNA, 19 nt, Homo sapiens
  misc_RNA (1)...(19): siRNA sense strand
gaggccagcuccacuacuc

SEQ ID NO: 574313 - RNA, 19 nt, Homo sapiens
  misc_RNA (1)...(19): siRNA sense strand
ggaaguuguggauguaaau

SEQ ID NO: 574314 - RNA, 19 nt, Homo sapiens
  misc_RNA (1)...(19): siRNA sense strand
acggugaaauuaccagaaa

SEQ ID NO: 574315 - RNA, 19 nt, Homo sapiens
  misc_RNA (1)...(19): siRNA sense strand
agugauguuucuccagaua

SEQ ID NO: 574316 - RNA, 19 nt, Homo sapiens
  misc_RNA (1)...(19): siRNA sense strand
ucacauugauuagcguguu

SEQ ID NO: 574317 - RNA, 19 nt, Homo sapiens
  misc_RNA (1)...(19): siRNA sense strand
gcuccacaguugacucuca

SEQ ID NO: 574318 - RNA, 19 nt, Homo sapiens
  misc_RNA (1)...(19): siRNA sense strand
gaaggacauuaacgacaac

SEQ ID NO: 574319 - RNA, 19 nt, Homo sapiens
  misc_RNA (1)...(19): siRNA sense strand
gagguaaaucugcagaaug

SEQ ID NO: 574320 - RNA, 19 nt, Homo sapiens
  misc_RNA (1)...(19): siRNA sense strand
gauaggacauauggauuuu

SEQ ID NO: 574321 - RNA, 19 nt, Homo sapiens
  misc_RNA (1)...(19): siRNA sense strand
aaacuccggagcuucauuu

SEQ ID NO: 574322 - RNA, 19 nt, Homo sapiens
  misc_RNA (1)...(19): siRNA sense strand
gaaacuccggagcuucauu

SEQ ID NO: 574323 - RNA, 19 nt, Homo sapiens
  misc_RNA (1)...(19): siRNA sense strand
gagaacgcccugcucacuu

SEQ ID NO: 574324 - RNA, 19 nt, Homo sapiens
  misc_RNA (1)...(19): siRNA sense strand
cgacacgagcccuagauga

SEQ ID NO: 574325 - RNA, 19 nt, Homo sapiens
  misc_RNA (1)...(19): siRNA sense strand
gcgcauguaguuugguaaa

SEQ ID NO: 574326 - RNA, 19 nt, Homo sapiens
  misc_RNA (1)...(19): siRNA sense strand
acaaaggaaucuguucauc

SEQ ID NO: 574327 - RNA, 19 nt, Homo sapiens
  misc_RNA (1)...(19): siRNA sense strand
agguaaaucugcagaaugg

SEQ ID NO: 574328 - RNA, 19 nt, Homo sapiens
  misc_RNA (1)...(19): siRNA sense strand
cacauugauuagcguguuu

SEQ ID NO: 574329 - RNA, 19 nt, Homo sapiens
  misc_RNA (1)...(19): siRNA sense strand
gcuggucauuguacaguuc

SEQ ID NO: 574330 - RNA, 19 nt, Homo sapiens
  misc_RNA (1)...(19): siRNA sense strand
ugacuggcaccguucaauu

SEQ ID NO: 574331 - RNA, 19 nt, Homo sapiens
  misc_RNA (1)...(19): siRNA sense strand
ccgcuugacucucgguuuc

SEQ ID NO: 574332 - RNA, 19 nt, Homo sapiens
  misc_RNA (1)...(19): siRNA sense strand
gaggacgcccaaccaggua

SEQ ID NO: 574333 - RNA, 19 nt, Homo sapiens
  misc_RNA (1)...(19): siRNA sense strand
gcauguaguuugguaaagc

SEQ ID NO: 574334 - RNA, 19 nt, Homo sapiens
  misc_RNA (1)...(19): siRNA sense strand
gccgacaucuacugcuguu

SEQ ID NO: 574335 - RNA, 19 nt, Homo sapiens
  misc_RNA (1)...(19): siRNA sense strand
gagaguguguccgccuaug

SEQ ID NO: 574336 - RNA, 19 nt, Homo sapiens
  misc_RNA (1)...(19): siRNA sense strand
guguccaccuucaagaauu

SEQ ID NO: 574337 - RNA, 19 nt, Homo sapiens
  misc_RNA (1)...(19): siRNA sense strand
ugccucagauuuagacgaa

SEQ ID NO: 574338 - RNA, 19 nt, Homo sapiens
  misc_RNA (1)...(19): siRNA sense strand
cgacacaaaggaaucuguu

SEQ ID NO: 574339 - RNA, 19 nt, Homo sapiens
  misc_RNA (1)...(19): siRNA sense strand
uggaaguuguggauguaaa

SEQ ID NO: 574340 - RNA, 19 nt, Homo sapiens
  misc_RNA (1)...(19): siRNA sense strand
uguggaaguuguggaugua

SEQ ID NO: 574341 - RNA, 19 nt, Homo sapiens
  misc_RNA (1)...(19): siRNA sense strand
ccaaccagguaccgucauc

SEQ ID NO: 574342 - RNA, 19 nt, Homo sapiens
  misc_RNA (1)...(19): siRNA sense strand
gacaaugcuccacaguuga

SEQ ID NO: 574343 - RNA, 19 nt, Homo sapiens
  misc_RNA (1)...(19): siRNA sense strand
gaaguuguggauguaaaug

SEQ ID NO: 574344 - RNA, 19 nt, Homo sapiens
  misc_RNA (1)...(19): siRNA sense strand
aguauacgguguucgugaa

SEQ ID NO: 574345 - RNA, 19 nt, Homo sapiens
  misc_RNA (1)...(19): siRNA sense strand
gguccauccucuacagaca

SEQ ID NO: 574346 - RNA, 19 nt, Homo sapiens
  misc_RNA (1)...(19): siRNA sense strand
gaaagcggccaggcaccaa

SEQ ID NO: 574347 - RNA, 19 nt, Homo sapiens
  misc_RNA (1)...(19): siRNA sense strand
acacaaaggaaucuguuca

SEQ ID NO: 574348 - RNA, 19 nt, Homo sapiens
  misc_RNA (1)...(19): siRNA sense strand
ugagggcgcauguaguuug

SEQ ID NO: 574349 - RNA, 19 nt, Homo sapiens
  misc_RNA (1)...(19): siRNA sense strand
gcacgacacgagcccuaga

SEQ ID NO: 574350 - RNA, 19 nt, Homo sapiens
  misc_RNA (1)...(19): siRNA sense strand
ggagaacgcccugcucacu

SEQ ID NO: 574351 - RNA, 19 nt, Homo sapiens
  misc_RNA (1)...(19): siRNA sense strand
cccaaugccucagauuuag

SEQ ID NO: 574352 - RNA, 19 nt, Homo sapiens
  misc_RNA (1)...(19): siRNA sense strand
gacacgagcccuagaugag

SEQ ID NO: 574353 - RNA, 19 nt, Homo sapiens
  misc_RNA (1)...(19): siRNA sense strand
gcgaagguacgugcaguug

SEQ ID NO: 574354 - RNA, 19 nt, Homo sapiens
  misc_RNA (1)...(19): siRNA sense strand
gcugccacaucuucacugu

SEQ ID NO: 574355 - RNA, 19 nt, Homo sapiens
  misc_RNA (1)...(19): siRNA sense strand
ccagcaaccagcagguaaa

SEQ ID NO: 574356 - RNA, 19 nt, Homo sapiens
  misc_RNA (1)...(19): siRNA sense strand
gugauaggacauauggauu

SEQ ID NO: 574357 - RNA, 19 nt, Homo sapiens
  misc_RNA (1)...(19): siRNA sense strand
gauguuucuccagauauaa

SEQ ID NO: 574358 - RNA, 19 nt, Homo sapiens
  misc_RNA (1)...(19): siRNA sense strand
gaauggggauauuauuuac

SEQ ID NO: 574359 - RNA, 19 nt, Homo sapiens
  misc_RNA (1)...(19): siRNA sense strand
guacuggacaacaaugaca

SEQ ID NO: 574360 - RNA, 19 nt, Homo sapiens
  misc_RNA (1)...(19): siRNA sense strand
ugguggaugucaacgugua

SEQ ID NO: 574361 - RNA, 19 nt, Homo sapiens
  misc_RNA (1)...(19): siRNA sense strand
gagggcgcauguaguuugg

SEQ ID NO: 574362 - RNA, 19 nt, Homo sapiens
  misc_RNA (1)...(19): siRNA sense strand
ucugagggcgcauguaguu

SEQ ID NO: 574363 - RNA, 19 nt, Homo sapiens
  misc_RNA (1)...(19): siRNA sense strand
gacucucgguuuccacuag

SEQ ID NO: 574364 - RNA, 19 nt, Homo sapiens
  misc_RNA (1)...(19): siRNA sense strand
cgaagguacgugcaguuga

SEQ ID NO: 574365 - RNA, 19 nt, Homo sapiens
  misc_RNA (1)...(19): siRNA sense strand
gcauuuuguuugugaauuc

SEQ ID NO: 574366 - RNA, 19 nt, Homo sapiens
  misc_RNA (1)...(19): siRNA sense strand
aaaggccgcugcagguuuu

SEQ ID NO: 574367 - RNA, 19 nt, Homo sapiens
  misc_RNA (1)...(19): siRNA sense strand
aagaaacuccggagcuuca

SEQ ID NO: 574368 - RNA, 19 nt, Homo sapiens
  misc_RNA (1)...(19): siRNA sense strand
uccagucuguuggugcuua

SEQ ID NO: 574369 - RNA, 19 nt, Homo sapiens
  misc_RNA (1)...(19): siRNA sense strand
uaggacauauggauuuuga

SEQ ID NO: 574370 - RNA, 19 nt, Homo sapiens
  misc_RNA (1)...(19): siRNA sense strand
uaucggaacgcuggugauu

SEQ ID NO: 574371 - RNA, 19 nt, Homo sapiens
  misc_RNA (1)...(19): siRNA sense strand
ccuguauacggugaaauua

SEQ ID NO: 574372 - RNA, 19 nt, Homo sapiens
  misc_RNA (1)...(19): siRNA sense strand
caacguguaccugaucauc

SEQ ID NO: 574373 - RNA, 19 nt, Homo sapiens
  misc_RNA (1)...(19): siRNA sense strand
gguaccgucaucacauuga

SEQ ID NO: 574374 - RNA, 19 nt, Homo sapiens
  misc_RNA (1)...(19): siRNA sense strand
ccaccuucaagaauuacua

SEQ ID NO: 574375 - RNA, 19 nt, Homo sapiens
  misc_RNA (1)...(19): siRNA sense strand
gaacaaagagugcugauuu

SEQ ID NO: 574376 - RNA, 19 nt, Homo sapiens
  misc_RNA (1)...(19): siRNA sense strand
caaauuccaucuuaaccua

SEQ ID NO: 574377 - RNA, 19 nt, Homo sapiens
  misc_RNA (1)...(19): siRNA sense strand
caaauugggcucuuauuaa

SEQ ID NO: 574378 - RNA, 19 nt, Homo sapiens
  misc_RNA (1)...(19): siRNA sense strand
gaacaacaguuaucagacu

SEQ ID NO: 574379 - RNA, 19 nt, Homo sapiens
  misc_RNA (1)...(19): siRNA sense strand
uaaacaaauugggcucuua

SEQ ID NO: 574380 - RNA, 19 nt, Homo sapiens
  misc_RNA (1)...(19): siRNA sense strand
aacaaagagugcugauuua

SEQ ID NO: 574381 - RNA, 19 nt, Homo sapiens
  misc_RNA (1)...(19): siRNA sense strand
uggcucaaauuccaucuua

SEQ ID NO: 574382 - RNA, 19 nt, Homo sapiens
  misc_RNA (1)...(19): siRNA sense strand
cgaacagucugaauacgaa

SEQ ID NO: 574383 - RNA, 19 nt, Homo sapiens
  misc_RNA (1)...(19): siRNA sense strand
acaaauugggcucuuauua

SEQ ID NO: 574384 - RNA, 19 nt, Homo sapiens
  misc_RNA (1)...(19): siRNA sense strand
aaagagugcugauuuacga

SEQ ID NO: 574385 - RNA, 19 nt, Homo sapiens
  misc_RNA (1)...(19): siRNA sense strand
ggagguaaaucugcagaau

SEQ ID NO: 574386 - RNA, 19 nt, Homo sapiens
  misc_RNA (1)...(19): siRNA sense strand
gacaacggaacaacaguua

SEQ ID NO: 574387 - RNA, 19 nt, Homo sapiens
  misc_RNA (1)...(19): siRNA sense strand
ugaagacgcucaauuuggu

SEQ ID NO: 574388 - RNA, 19 nt, Homo sapiens
  misc_RNA (1)...(19): siRNA sense strand
gauguuggcucaaauucca

SEQ ID NO: 574389 - RNA, 19 nt, Homo sapiens
  misc_RNA (1)...(19): siRNA sense strand
ggagguggccgacaugaau

SEQ ID NO: 574390 - RNA, 19 nt, Homo sapiens
  misc_RNA (1)...(19): siRNA sense strand
gggcaaaccugagcucaca

SEQ ID NO: 574391 - RNA, 19 nt, Homo sapiens
  misc_RNA (1)...(19): siRNA sense strand
agaacgcgcugguguccua

SEQ ID NO: 574392 - RNA, 19 nt, Homo sapiens
  misc_RNA (1)...(19): siRNA sense strand
gcagauguuggcucaaauu

SEQ ID NO: 574393 - RNA, 19 nt, Homo sapiens
  misc_RNA (1)...(19): siRNA sense strand
gaggauagauugggaaagc

SEQ ID NO: 574394 - RNA, 19 nt, Homo sapiens
  misc_RNA (1)...(19): siRNA sense strand
ugagggacauuaacgacaa

SEQ ID NO: 574395 - RNA, 19 nt, Homo sapiens
  misc_RNA (1)...(19): siRNA sense strand
uguccaccuucaagaauua

SEQ ID NO: 574396 - RNA, 19 nt, Homo sapiens
  misc_RNA (1)...(19): siRNA sense strand
aaagaaauccuuggacaga

SEQ ID NO: 574397 - RNA, 19 nt, Homo sapiens
  misc_RNA (1)...(19): siRNA sense strand
uaacgucccugagauagca

SEQ ID NO: 574398 - RNA, 19 nt, Homo sapiens
  misc_RNA (1)...(19): siRNA sense strand
gaaauacgggagaaauagu

SEQ ID NO: 574399 - RNA, 19 nt, Homo sapiens
  misc_RNA (1)...(19): siRNA sense strand
uagcauagaucgaaauacg

SEQ ID NO: 574400 - RNA, 19 nt, Homo sapiens
  misc_RNA (1)...(19): siRNA sense strand
agaaauccuuggacagaga

SEQ ID NO: 574401 - RNA, 19 nt, Homo sapiens
  misc_RNA (1)...(19): siRNA sense strand
gaagacgcucaauuuggua

SEQ ID NO: 574402 - RNA, 19 nt, Homo sapiens
  misc_RNA (1)...(19): siRNA sense strand
caucuuaaccuauaaacuc

SEQ ID NO: 574403 - RNA, 19 nt, Homo sapiens
  misc_RNA (1)...(19): siRNA sense strand
ugauaaugcucccacuuuc

SEQ ID NO: 574404 - RNA, 19 nt, Homo sapiens
  misc_RNA (1)...(19): siRNA sense strand
caacggaacaacaguuauc

SEQ ID NO: 574405 - RNA, 19 nt, Homo sapiens
  misc_RNA (1)...(19): siRNA sense strand
cgacaugaaugacaaugcu

SEQ ID NO: 574406 - RNA, 19 nt, Homo sapiens
  misc_RNA (1)...(19): siRNA sense strand
ucgaaauacgggagaaaua

SEQ ID NO: 574407 - RNA, 19 nt, Homo sapiens
  misc_RNA (1)...(19): siRNA sense strand
agauagcacugacuuccuu

SEQ ID NO: 574408 - RNA, 19 nt, Homo sapiens
  misc_RNA (1)...(19): siRNA sense strand
ugauaacgucccugagaua

SEQ ID NO: 574409 - RNA, 19 nt, Homo sapiens
  misc_RNA (1)...(19): siRNA sense strand
cgaaauacgggagaaauag

SEQ ID NO: 574410 - RNA, 19 nt, Homo sapiens
  misc_RNA (1)...(19): siRNA sense strand
gcacugacuuccuuauccu

SEQ ID NO: 574411 - RNA, 19 nt, Homo sapiens
  misc_RNA (1)...(19): siRNA sense strand
ggaacaaagagugcugauu

SEQ ID NO: 574412 - RNA, 19 nt, Homo sapiens
  misc_RNA (1)...(19): siRNA sense strand
gagguaaaucugcagaaug

SEQ ID NO: 574413 - RNA, 19 nt, Homo sapiens
  misc_RNA (1)...(19): siRNA sense strand
uugcagccaugguuauuga

SEQ ID NO: 574414 - RNA, 19 nt, Homo sapiens
  misc_RNA (1)...(19): siRNA sense strand
aaacaaauugggcucuuau

SEQ ID NO: 574415 - RNA, 19 nt, Homo sapiens
  misc_RNA (1)...(19): siRNA sense strand
ggaagcuccugcacacaac

SEQ ID NO: 574416 - RNA, 19 nt, Homo sapiens
  misc_RNA (1)...(19): siRNA sense strand
guacugucaucgcccuaau

SEQ ID NO: 574417 - RNA, 19 nt, Homo sapiens
  misc_RNA (1)...(19): siRNA sense strand
gcgggucauugcaccguuu

SEQ ID NO: 574418 - RNA, 19 nt, Homo sapiens
  misc_RNA (1)...(19): siRNA sense strand
agguaaaucugcagaaugg

SEQ ID NO: 574419 - RNA, 19 nt, Homo sapiens
  misc_RNA (1)...(19): siRNA sense strand
gauagcacugacuuccuua

SEQ ID NO: 574420 - RNA, 19 nt, Homo sapiens
  misc_RNA (1)...(19): siRNA sense strand
gcagacaacggaacaacag

SEQ ID NO: 574421 - RNA, 19 nt, Homo sapiens
  misc_RNA (1)...(19): siRNA sense strand
ucaauuugguacugucauc

SEQ ID NO: 574422 - RNA, 19 nt, Homo sapiens
  misc_RNA (1)...(19): siRNA sense strand
gauaacgucccugagauag

SEQ ID NO: 574423 - RNA, 19 nt, Homo sapiens
  misc_RNA (1)...(19): siRNA sense strand
guguccaccuucaagaauu

SEQ ID NO: 574424 - RNA, 19 nt, Homo sapiens
  misc_RNA (1)...(19): siRNA sense strand
acugucaucgcccuaauua

SEQ ID NO: 574425 - RNA, 19 nt, Homo sapiens
  misc_RNA (1)...(19): siRNA sense strand
ugcuggaugugaaugauaa

SEQ ID NO: 574426 - RNA, 19 nt, Homo sapiens
  misc_RNA (1)...(19): siRNA sense strand
gggcaauuucauauucuuu

SEQ ID NO: 574427 - RNA, 19 nt, Homo sapiens
  misc_RNA (1)...(19): siRNA sense strand
cggaacaacaguuaucaga

SEQ ID NO: 574428 - RNA, 19 nt, Homo sapiens
  misc_RNA (1)...(19): siRNA sense strand
ggaugugaaugauaaugcu

SEQ ID NO: 574429 - RNA, 19 nt, Homo sapiens
  misc_RNA (1)...(19): siRNA sense strand
ggauagauugggaaagcaa

SEQ ID NO: 574430 - RNA, 19 nt, Homo sapiens
  misc_RNA (1)...(19): siRNA sense strand
gcucaaauuccaucuuaac

SEQ ID NO: 574431 - RNA, 19 nt, Homo sapiens
  misc_RNA (1)...(19): siRNA sense strand
ucaagaauuacuacucguu

SEQ ID NO: 574432 - RNA, 19 nt, Homo sapiens
  misc_RNA (1)...(19): siRNA sense strand
gugaagacgcucaauuugg

SEQ ID NO: 574433 - RNA, 19 nt, Homo sapiens
  misc_RNA (1)...(19): siRNA sense strand
aaugauaacgucccugaga

SEQ ID NO: 574434 - RNA, 19 nt, Homo sapiens
  misc_RNA (1)...(19): siRNA sense strand
gaauacuucgggcuagaug

SEQ ID NO: 574435 - RNA, 19 nt, Homo sapiens
  misc_RNA (1)...(19): siRNA sense strand
gacaggccgcugcagguuu

SEQ ID NO: 574436 - RNA, 19 nt, Homo sapiens
  misc_RNA (1)...(19): siRNA sense strand
gaucgaaauacgggagaaa

SEQ ID NO: 574437 - RNA, 19 nt, Homo sapiens
  misc_RNA (1)...(19): siRNA sense strand
ggcucaaauuccaucuuaa

SEQ ID NO: 574438 - RNA, 19 nt, Homo sapiens
  misc_RNA (1)...(19): siRNA sense strand
acgugaagacgcucaauuu

SEQ ID NO: 574439 - RNA, 19 nt, Homo sapiens
  misc_RNA (1)...(19): siRNA sense strand
gggguaauuuggauuuuga

SEQ ID NO: 574440 - RNA, 19 nt, Homo sapiens
  misc_RNA (1)...(19): siRNA sense strand
augcagauguuggcucaaa

SEQ ID NO: 574441 - RNA, 19 nt, Homo sapiens
  misc_RNA (1)...(19): siRNA sense strand
cgugaagacgcucaauuug

SEQ ID NO: 574442 - RNA, 19 nt, Homo sapiens
  misc_RNA (1)...(19): siRNA sense strand
ggcuagaugugaaaauaaa

SEQ ID NO: 574443 - RNA, 19 nt, Homo sapiens
  misc_RNA (1)...(19): siRNA sense strand
gccuaugaguuggugguaa

SEQ ID NO: 574444 - RNA, 19 nt, Homo sapiens
  misc_RNA (1)...(19): siRNA sense strand
gugcuggaugugaaugaua

SEQ ID NO: 574445 - RNA, 19 nt, Homo sapiens
  misc_RNA (1)...(19): siRNA sense strand
gcauuuuguuugugaauuc

SEQ ID NO: 574446 - RNA, 19 nt, Homo sapiens
  misc_RNA (1)...(19): siRNA sense strand
agacaacggaacaacaguu

SEQ ID NO: 574447 - RNA, 19 nt, Homo sapiens
  misc_RNA (1)...(19): siRNA sense strand
uggccgacaugaaugacaa

SEQ ID NO: 574448 - RNA, 19 nt, Homo sapiens
  misc_RNA (1)...(19): siRNA sense strand
caggauggccuccaaagac

SEQ ID NO: 574449 - RNA, 19 nt, Homo sapiens
  misc_RNA (1)...(19): siRNA sense strand
ccuaugaguuggugguaac

SEQ ID NO: 574450 - RNA, 19 nt, Homo sapiens
  misc_RNA (1)...(19): siRNA sense strand
augauaaugcucccacuuu

SEQ ID NO: 574451 - RNA, 19 nt, Homo sapiens
  misc_RNA (1)...(19): siRNA sense strand
acagugaugacaauaaaca

SEQ ID NO: 574452 - RNA, 19 nt, Homo sapiens
  misc_RNA (1)...(19): siRNA sense strand
gaaaauaaacagugaugac

SEQ ID NO: 574453 - RNA, 19 nt, Homo sapiens
  misc_RNA (1)...(19): siRNA sense strand
ucaggauggccuccaaaga

SEQ ID NO: 574454 - RNA, 19 nt, Homo sapiens
  misc_RNA (1)...(19): siRNA sense strand
caaagagugcugauuuacg

SEQ ID NO: 574455 - RNA, 19 nt, Homo sapiens
  misc_RNA (1)...(19): siRNA sense strand
cgugucggccuaugaguug

SEQ ID NO: 574456 - RNA, 19 nt, Homo sapiens
  misc_RNA (1)...(19): siRNA sense strand
ccaccuucaagaauuacua

SEQ ID NO: 574457 - RNA, 19 nt, Homo sapiens
  misc_RNA (1)...(19): siRNA sense strand
ccaacgggcaggugaacug

SEQ ID NO: 574458 - RNA, 19 nt, Homo sapiens
  misc_RNA (1)...(19): siRNA sense strand
ugaccacuuuagcauagau

SEQ ID NO: 574459 - RNA, 19 nt, Homo sapiens
  misc_RNA (1)...(19): siRNA sense strand
uauugaccacuuuagcaua

SEQ ID NO: 574460 - RNA, 19 nt, Homo sapiens
  misc_RNA (1)...(19): siRNA sense strand
guuauugaccacuuuagca

SEQ ID NO: 574461 - RNA, 19 nt, Homo sapiens
  misc_RNA (1)...(19): siRNA sense strand
gauaaugcucccacuuucg

SEQ ID NO: 574462 - RNA, 19 nt, Homo sapiens
  misc_RNA (1)...(19): siRNA sense strand
acucaguucuagcgaauac

SEQ ID NO: 574463 - RNA, 19 nt, Homo sapiens
  misc_RNA (1)...(19): siRNA sense strand
gagguggccgacaugaaug

SEQ ID NO: 574464 - RNA, 19 nt, Homo sapiens
  misc_RNA (1)...(19): siRNA sense strand
gagagcgugucggccuaug

SEQ ID NO: 574465 - RNA, 19 nt, Homo sapiens
  misc_RNA (1)...(19): siRNA sense strand
guggaggugagggacauua

SEQ ID NO: 574466 - RNA, 19 nt, Homo sapiens
  misc_RNA (1)...(19): siRNA sense strand
auaaacaaauugggcucuu

SEQ ID NO: 574467 - RNA, 19 nt, Homo sapiens
  misc_RNA (1)...(19): siRNA sense strand
cgggcuagaugugaaaaua

SEQ ID NO: 574468 - RNA, 19 nt, Homo sapiens
  misc_RNA (1)...(19): siRNA sense strand
gaacaaagagugcugauuu

SEQ ID NO: 574469 - RNA, 19 nt, Homo sapiens
  misc_RNA (1)...(19): siRNA sense strand
caaauuccaucuuaaccua

SEQ ID NO: 574470 - RNA, 19 nt, Homo sapiens
  misc_RNA (1)...(19): siRNA sense strand
caaauugggcucuuauuaa

SEQ ID NO: 574471 - RNA, 19 nt, Homo sapiens
  misc_RNA (1)...(19): siRNA sense strand
gaacaacaguuaucagacu

SEQ ID NO: 574472 - RNA, 19 nt, Homo sapiens
  misc_RNA (1)...(19): siRNA sense strand
uaaacaaauugggcucuua

SEQ ID NO: 574473 - RNA, 19 nt, Homo sapiens
  misc_RNA (1)...(19): siRNA sense strand
aacaaagagugcugauuua

SEQ ID NO: 574474 - RNA, 19 nt, Homo sapiens
  misc_RNA (1)...(19): siRNA sense strand
uggcucaaauuccaucuua

SEQ ID NO: 574475 - RNA, 19 nt, Homo sapiens
  misc_RNA (1)...(19): siRNA sense strand
cgaacagucugaauacgaa

SEQ ID NO: 574476 - RNA, 19 nt, Homo sapiens
  misc_RNA (1)...(19): siRNA sense strand
acaaauugggcucuuauua

SEQ ID NO: 574477 - RNA, 19 nt, Homo sapiens
  misc_RNA (1)...(19): siRNA sense strand
aaagagugcugauuuacga

SEQ ID NO: 574478 - RNA, 19 nt, Homo sapiens
  misc_RNA (1)...(19): siRNA sense strand
ggagguaaaucugcagaau

SEQ ID NO: 574479 - RNA, 19 nt, Homo sapiens
  misc_RNA (1)...(19): siRNA sense strand
gacaacggaacaacaguua

SEQ ID NO: 574480 - RNA, 19 nt, Homo sapiens
  misc_RNA (1)...(19): siRNA sense strand
ugaagacgcucaauuuggu

SEQ ID NO: 574481 - RNA, 19 nt, Homo sapiens
  misc_RNA (1)...(19): siRNA sense strand
gauguuggcucaaauucca

SEQ ID NO: 574482 - RNA, 19 nt, Homo sapiens
  misc_RNA (1)...(19): siRNA sense strand
ggagguggccgacaugaau

SEQ ID NO: 574483 - RNA, 19 nt, Homo sapiens
  misc_RNA (1)...(19): siRNA sense strand
gggcaaaccugagcucaca

SEQ ID NO: 574484 - RNA, 19 nt, Homo sapiens
  misc_RNA (1)...(19): siRNA sense strand
agaacgcgcugguguccua

SEQ ID NO: 574485 - RNA, 19 nt, Homo sapiens
  misc_RNA (1)...(19): siRNA sense strand
gcagauguuggcucaaauu

SEQ ID NO: 574486 - RNA, 19 nt, Homo sapiens
  misc_RNA (1)...(19): siRNA sense strand
gaggauagauugggaaagc

SEQ ID NO: 574487 - RNA, 19 nt, Homo sapiens
  misc_RNA (1)...(19): siRNA sense strand
ugagggacauuaacgacaa

SEQ ID NO: 574488 - RNA, 19 nt, Homo sapiens
  misc_RNA (1)...(19): siRNA sense strand
uguccaccuucaagaauua

SEQ ID NO: 574489 - RNA, 19 nt, Homo sapiens
  misc_RNA (1)...(19): siRNA sense strand
aaagaaauccuuggacaga

SEQ ID NO: 574490 - RNA, 19 nt, Homo sapiens
  misc_RNA (1)...(19): siRNA sense strand
uaacgucccugagauagca

SEQ ID NO: 574491 - RNA, 19 nt, Homo sapiens
  misc_RNA (1)...(19): siRNA sense strand
gaaauacgggagaaauagu

SEQ ID NO: 574492 - RNA, 19 nt, Homo sapiens
  misc_RNA (1)...(19): siRNA sense strand
uagcauagaucgaaauacg

SEQ ID NO: 574493 - RNA, 19 nt, Homo sapiens
  misc_RNA (1)...(19): siRNA sense strand
agaaauccuuggacagaga

SEQ ID NO: 574494 - RNA, 19 nt, Homo sapiens
  misc_RNA (1)...(19): siRNA sense strand
gaagacgcucaauuuggua

SEQ ID NO: 574495 - RNA, 19 nt, Homo sapiens
  misc_RNA (1)...(19): siRNA sense strand
caucuuaaccuauaaacuc

SEQ ID NO: 574496 - RNA, 19 nt, Homo sapiens
  misc_RNA (1)...(19): siRNA sense strand
ugauaaugcucccacuuuc

SEQ ID NO: 574497 - RNA, 19 nt, Homo sapiens
  misc_RNA (1)...(19): siRNA sense strand
caacggaacaacaguuauc

SEQ ID NO: 574498 - RNA, 19 nt, Homo sapiens
  misc_RNA (1)...(19): siRNA sense strand
cgacaugaaugacaaugcu

SEQ ID NO: 574499 - RNA, 19 nt, Homo sapiens
  misc_RNA (1)...(19): siRNA sense strand
ucgaaauacgggagaaaua

SEQ ID NO: 574500 - RNA, 19 nt, Homo sapiens
  misc_RNA (1)...(19): siRNA sense strand
agauagcacugacuuccuu

SEQ ID NO: 574501 - RNA, 19 nt, Homo sapiens
  misc_RNA (1)...(19): siRNA sense strand
ugauaacgucccugagaua

SEQ ID NO: 574502 - RNA, 19 nt, Homo sapiens
  misc_RNA (1)...(19): siRNA sense strand
cgaaauacgggagaaauag

SEQ ID NO: 574503 - RNA, 19 nt, Homo sapiens
  misc_RNA (1)...(19): siRNA sense strand
gcacugacuuccuuauccu

SEQ ID NO: 574504 - RNA, 19 nt, Homo sapiens
  misc_RNA (1)...(19): siRNA sense strand
ggaacaaagagugcugauu

SEQ ID NO: 574505 - RNA, 19 nt, Homo sapiens
  misc_RNA (1)...(19): siRNA sense strand
gagguaaaucugcagaaug

SEQ ID NO: 574506 - RNA, 19 nt, Homo sapiens
  misc_RNA (1)...(19): siRNA sense strand
uugcagccaugguuauuga

SEQ ID NO: 574507 - RNA, 19 nt, Homo sapiens
  misc_RNA (1)...(19): siRNA sense strand
aaacaaauugggcucuuau

SEQ ID NO: 574508 - RNA, 19 nt, Homo sapiens
  misc_RNA (1)...(19): siRNA sense strand
ggaagcuccugcacacaac

SEQ ID NO: 574509 - RNA, 19 nt, Homo sapiens
  misc_RNA (1)...(19): siRNA sense strand
guacugucaucgcccuaau

SEQ ID NO: 574510 - RNA, 19 nt, Homo sapiens
  misc_RNA (1)...(19): siRNA sense strand
gcgggucauugcaccguuu

SEQ ID NO: 574511 - RNA, 19 nt, Homo sapiens
  misc_RNA (1)...(19): siRNA sense strand
agguaaaucugcagaaugg

SEQ ID NO: 574512 - RNA, 19 nt, Homo sapiens
  misc_RNA (1)...(19): siRNA sense strand
gauagcacugacuuccuua

SEQ ID NO: 574513 - RNA, 19 nt, Homo sapiens
  misc_RNA (1)...(19): siRNA sense strand
gcagacaacggaacaacag

SEQ ID NO: 574514 - RNA, 19 nt, Homo sapiens
  misc_RNA (1)...(19): siRNA sense strand
ucaauuugguacugucauc

SEQ ID NO: 574515 - RNA, 19 nt, Homo sapiens
  misc_RNA (1)...(19): siRNA sense strand
gauaacgucccugagauag

SEQ ID NO: 574516 - RNA, 19 nt, Homo sapiens
  misc_RNA (1)...(19): siRNA sense strand
guguccaccuucaagaauu

SEQ ID NO: 574517 - RNA, 19 nt, Homo sapiens
  misc_RNA (1)...(19): siRNA sense strand
acugucaucgcccuaauua

SEQ ID NO: 574518 - RNA, 19 nt, Homo sapiens
  misc_RNA (1)...(19): siRNA sense strand
ugcuggaugugaaugauaa

SEQ ID NO: 574519 - RNA, 19 nt, Homo sapiens
  misc_RNA (1)...(19): siRNA sense strand
gggcaauuucauauucuuu

SEQ ID NO: 574520 - RNA, 19 nt, Homo sapiens
  misc_RNA (1)...(19): siRNA sense strand
cggaacaacaguuaucaga

SEQ ID NO: 574521 - RNA, 19 nt, Homo sapiens
  misc_RNA (1)...(19): siRNA sense strand
ggaugugaaugauaaugcu

SEQ ID NO: 574522 - RNA, 19 nt, Homo sapiens
  misc_RNA (1)...(19): siRNA sense strand
ggauagauugggaaagcaa

SEQ ID NO: 574523 - RNA, 19 nt, Homo sapiens
  misc_RNA (1)...(19): siRNA sense strand
gcucaaauuccaucuuaac

SEQ ID NO: 574524 - RNA, 19 nt, Homo sapiens
  misc_RNA (1)...(19): siRNA sense strand
ucaagaauuacuacucguu

SEQ ID NO: 574525 - RNA, 19 nt, Homo sapiens
  misc_RNA (1)...(19): siRNA sense strand
gugaagacgcucaauuugg

SEQ ID NO: 574526 - RNA, 19 nt, Homo sapiens
  misc_RNA (1)...(19): siRNA sense strand
aaugauaacgucccugaga

SEQ ID NO: 574527 - RNA, 19 nt, Homo sapiens
  misc_RNA (1)...(19): siRNA sense strand
gaauacuucgggcuagaug

SEQ ID NO: 574528 - RNA, 19 nt, Homo sapiens
  misc_RNA (1)...(19): siRNA sense strand
gacaggccgcugcagguuu

SEQ ID NO: 574529 - RNA, 19 nt, Homo sapiens
  misc_RNA (1)...(19): siRNA sense strand
gaucgaaauacgggagaaa

SEQ ID NO: 574530 - RNA, 19 nt, Homo sapiens
  misc_RNA (1)...(19): siRNA sense strand
ggcucaaauuccaucuuaa

SEQ ID NO: 574531 - RNA, 19 nt, Homo sapiens
  misc_RNA (1)...(19): siRNA sense strand
acgugaagacgcucaauuu

SEQ ID NO: 574532 - RNA, 19 nt, Homo sapiens
  misc_RNA (1)...(19): siRNA sense strand
gggguaauuuggauuuuga

SEQ ID NO: 574533 - RNA, 19 nt, Homo sapiens
  misc_RNA (1)...(19): siRNA sense strand
augcagauguuggcucaaa

SEQ ID NO: 574534 - RNA, 19 nt, Homo sapiens
  misc_RNA (1)...(19): siRNA sense strand
cgugaagacgcucaauuug

SEQ ID NO: 574535 - RNA, 19 nt, Homo sapiens
  misc_RNA (1)...(19): siRNA sense strand
ggcuagaugugaaaauaaa

SEQ ID NO: 574536 - RNA, 19 nt, Homo sapiens
  misc_RNA (1)...(19): siRNA sense strand
gccuaugaguuggugguaa

SEQ ID NO: 574537 - RNA, 19 nt, Homo sapiens
  misc_RNA (1)...(19): siRNA sense strand
gugcuggaugugaaugaua

SEQ ID NO: 574538 - RNA, 19 nt, Homo sapiens
  misc_RNA (1)...(19): siRNA sense strand
gcauuuuguuugugaauuc

SEQ ID NO: 574539 - RNA, 19 nt, Homo sapiens
  misc_RNA (1)...(19): siRNA sense strand
agacaacggaacaacaguu

SEQ ID NO: 574540 - RNA, 19 nt, Homo sapiens
  misc_RNA (1)...(19): siRNA sense strand
uggccgacaugaaugacaa

SEQ ID NO: 574541 - RNA, 19 nt, Homo sapiens
  misc_RNA (1)...(19): siRNA sense strand
caggauggccuccaaagac

SEQ ID NO: 574542 - RNA, 19 nt, Homo sapiens
  misc_RNA (1)...(19): siRNA sense strand
ccuaugaguuggugguaac

SEQ ID NO: 574543 - RNA, 19 nt, Homo sapiens
  misc_RNA (1)...(19): siRNA sense strand
augauaaugcucccacuuu

SEQ ID NO: 574544 - RNA, 19 nt, Homo sapiens
  misc_RNA (1)...(19): siRNA sense strand
acagugaugacaauaaaca

SEQ ID NO: 574545 - RNA, 19 nt, Homo sapiens
  misc_RNA (1)...(19): siRNA sense strand
gaaaauaaacagugaugac

SEQ ID NO: 574546 - RNA, 19 nt, Homo sapiens
  misc_RNA (1)...(19): siRNA sense strand
ucaggauggccuccaaaga

SEQ ID NO: 574547 - RNA, 19 nt, Homo sapiens
  misc_RNA (1)...(19): siRNA sense strand
caaagagugcugauuuacg

SEQ ID NO: 574548 - RNA, 19 nt, Homo sapiens
  misc_RNA (1)...(19): siRNA sense strand
cgugucggccuaugaguug

SEQ ID NO: 574549 - RNA, 19 nt, Homo sapiens
  misc_RNA (1)...(19): siRNA sense strand
ccaccuucaagaauuacua

SEQ ID NO: 574550 - RNA, 19 nt, Homo sapiens
  misc_RNA (1)...(19): siRNA sense strand
ccaacgggcaggugaacug

SEQ ID NO: 574551 - RNA, 19 nt, Homo sapiens
  misc_RNA (1)...(19): siRNA sense strand
ugaccacuuuagcauagau

SEQ ID NO: 574552 - RNA, 19 nt, Homo sapiens
  misc_RNA (1)...(19): siRNA sense strand
uauugaccacuuuagcaua

SEQ ID NO: 574553 - RNA, 19 nt, Homo sapiens
  misc_RNA (1)...(19): siRNA sense strand
guuauugaccacuuuagca

SEQ ID NO: 574554 - RNA, 19 nt, Homo sapiens
  misc_RNA (1)...(19): siRNA sense strand
gauaaugcucccacuuucg

SEQ ID NO: 574555 - RNA, 19 nt, Homo sapiens
  misc_RNA (1)...(19): siRNA sense strand
acucaguucuagcgaauac

SEQ ID NO: 574556 - RNA, 19 nt, Homo sapiens
  misc_RNA (1)...(19): siRNA sense strand
gagguggccgacaugaaug

SEQ ID NO: 574557 - RNA, 19 nt, Homo sapiens
  misc_RNA (1)...(19): siRNA sense strand
gagagcgugucggccuaug

SEQ ID NO: 574558 - RNA, 19 nt, Homo sapiens
  misc_RNA (1)...(19): siRNA sense strand
guggaggugagggacauua

SEQ ID NO: 574559 - RNA, 19 nt, Homo sapiens
  misc_RNA (1)...(19): siRNA sense strand
auaaacaaauugggcucuu

SEQ ID NO: 574560 - RNA, 19 nt, Homo sapiens
  misc_RNA (1)...(19): siRNA sense strand
cgggcuagaugugaaaaua

SEQ ID NO: 574561 - RNA, 19 nt, Homo sapiens
  misc_RNA (1)...(19): siRNA sense strand
gaacaaagagugcugauuu

SEQ ID NO: 574562 - RNA, 19 nt, Homo sapiens
  misc_RNA (1)...(19): siRNA sense strand
caaauuccaucuuaaccua

SEQ ID NO: 574563 - RNA, 19 nt, Homo sapiens
  misc_RNA (1)...(19): siRNA sense strand
caaauugggcucuuauuaa

SEQ ID NO: 574564 - RNA, 19 nt, Homo sapiens
  misc_RNA (1)...(19): siRNA sense strand
gaacaacaguuaucagacu

SEQ ID NO: 574565 - RNA, 19 nt, Homo sapiens
  misc_RNA (1)...(19): siRNA sense strand
uaaacaaauugggcucuua

SEQ ID NO: 574566 - RNA, 19 nt, Homo sapiens
  misc_RNA (1)...(19): siRNA sense strand
aacaaagagugcugauuua

SEQ ID NO: 574567 - RNA, 19 nt, Homo sapiens
  misc_RNA (1)...(19): siRNA sense strand
uggcucaaauuccaucuua

SEQ ID NO: 574568 - RNA, 19 nt, Homo sapiens
  misc_RNA (1)...(19): siRNA sense strand
cgaacagucugaauacgaa

SEQ ID NO: 574569 - RNA, 19 nt, Homo sapiens
  misc_RNA (1)...(19): siRNA sense strand
acaaauugggcucuuauua

SEQ ID NO: 574570 - RNA, 19 nt, Homo sapiens
  misc_RNA (1)...(19): siRNA sense strand
aaagagugcugauuuacga

SEQ ID NO: 574571 - RNA, 19 nt, Homo sapiens
  misc_RNA (1)...(19): siRNA sense strand
ggagguaaaucugcagaau

SEQ ID NO: 574572 - RNA, 19 nt, Homo sapiens
  misc_RNA (1)...(19): siRNA sense strand
gacaacggaacaacaguua

SEQ ID NO: 574573 - RNA, 19 nt, Homo sapiens
  misc_RNA (1)...(19): siRNA sense strand
ugaagacgcucaauuuggu

SEQ ID NO: 574574 - RNA, 19 nt, Homo sapiens
  misc_RNA (1)...(19): siRNA sense strand
gauguuggcucaaauucca

SEQ ID NO: 574575 - RNA, 19 nt, Homo sapiens
  misc_RNA (1)...(19): siRNA sense strand
ggagguggccgacaugaau

SEQ ID NO: 574576 - RNA, 19 nt, Homo sapiens
  misc_RNA (1)...(19): siRNA sense strand
gggcaaaccugagcucaca

SEQ ID NO: 574577 - RNA, 19 nt, Homo sapiens
  misc_RNA (1)...(19): siRNA sense strand
agaacgcgcugguguccua

SEQ ID NO: 574578 - RNA, 19 nt, Homo sapiens
  misc_RNA (1)...(19): siRNA sense strand
gcagauguuggcucaaauu

SEQ ID NO: 574579 - RNA, 19 nt, Homo sapiens
  misc_RNA (1)...(19): siRNA sense strand
gaggauagauugggaaagc

SEQ ID NO: 574580 - RNA, 19 nt, Homo sapiens
  misc_RNA (1)...(19): siRNA sense strand
ugagggacauuaacgacaa

SEQ ID NO: 574581 - RNA, 19 nt, Homo sapiens
  misc_RNA (1)...(19): siRNA sense strand
uguccaccuucaagaauua

SEQ ID NO: 574582 - RNA, 19 nt, Homo sapiens
  misc_RNA (1)...(19): siRNA sense strand
aaagaaauccuuggacaga

SEQ ID NO: 574583 - RNA, 19 nt, Homo sapiens
  misc_RNA (1)...(19): siRNA sense strand
uaacgucccugagauagca

SEQ ID NO: 574584 - RNA, 19 nt, Homo sapiens
  misc_RNA (1)...(19): siRNA sense strand
gaaauacgggagaaauagu

SEQ ID NO: 574585 - RNA, 19 nt, Homo sapiens
  misc_RNA (1)...(19): siRNA sense strand
uagcauagaucgaaauacg

SEQ ID NO: 574586 - RNA, 19 nt, Homo sapiens
  misc_RNA (1)...(19): siRNA sense strand
agaaauccuuggacagaga

SEQ ID NO: 574587 - RNA, 19 nt, Homo sapiens
  misc_RNA (1)...(19): siRNA sense strand
gaagacgcucaauuuggua

SEQ ID NO: 574588 - RNA, 19 nt, Homo sapiens
  misc_RNA (1)...(19): siRNA sense strand
caucuuaaccuauaaacuc

SEQ ID NO: 574589 - RNA, 19 nt, Homo sapiens
  misc_RNA (1)...(19): siRNA sense strand
ugauaaugcucccacuuuc

SEQ ID NO: 574590 - RNA, 19 nt, Homo sapiens
  misc_RNA (1)...(19): siRNA sense strand
caacggaacaacaguuauc

SEQ ID NO: 574591 - RNA, 19 nt, Homo sapiens
  misc_RNA (1)...(19): siRNA sense strand
cgacaugaaugacaaugcu

SEQ ID NO: 574592 - RNA, 19 nt, Homo sapiens
  misc_RNA (1)...(19): siRNA sense strand
ucgaaauacgggagaaaua

SEQ ID NO: 574593 - RNA, 19 nt, Homo sapiens
  misc_RNA (1)...(19): siRNA sense strand
agauagcacugacuuccuu

SEQ ID NO: 574594 - RNA, 19 nt, Homo sapiens
  misc_RNA (1)...(19): siRNA sense strand
ugauaacgucccugagaua

SEQ ID NO: 574595 - RNA, 19 nt, Homo sapiens
  misc_RNA (1)...(19): siRNA sense strand
cgaaauacgggagaaauag

SEQ ID NO: 574596 - RNA, 19 nt, Homo sapiens
  misc_RNA (1)...(19): siRNA sense strand
gcacugacuuccuuauccu

SEQ ID NO: 574597 - RNA, 19 nt, Homo sapiens
  misc_RNA (1)...(19): siRNA sense strand
ggaacaaagagugcugauu

SEQ ID NO: 574598 - RNA, 19 nt, Homo sapiens
  misc_RNA (1)...(19): siRNA sense strand
gagguaaaucugcagaaug

SEQ ID NO: 574599 - RNA, 19 nt, Homo sapiens
  misc_RNA (1)...(19): siRNA sense strand
uugcagccaugguuauuga

SEQ ID NO: 574600 - RNA, 19 nt, Homo sapiens
  misc_RNA (1)...(19): siRNA sense strand
aaacaaauugggcucuuau

SEQ ID NO: 574601 - RNA, 19 nt, Homo sapiens
  misc_RNA (1)...(19): siRNA sense strand
ggaagcuccugcacacaac

SEQ ID NO: 574602 - RNA, 19 nt, Homo sapiens
  misc_RNA (1)...(19): siRNA sense strand
guacugucaucgcccuaau

SEQ ID NO: 574603 - RNA, 19 nt, Homo sapiens
  misc_RNA (1)...(19): siRNA sense strand
gcgggucauugcaccguuu

SEQ ID NO: 574604 - RNA, 19 nt, Homo sapiens
  misc_RNA (1)...(19): siRNA sense strand
agguaaaucugcagaaugg

SEQ ID NO: 574605 - RNA, 19 nt, Homo sapiens
  misc_RNA (1)...(19): siRNA sense strand
gauagcacugacuuccuua

SEQ ID NO: 574606 - RNA, 19 nt, Homo sapiens
  misc_RNA (1)...(19): siRNA sense strand
gcagacaacggaacaacag

SEQ ID NO: 574607 - RNA, 19 nt, Homo sapiens
  misc_RNA (1)...(19): siRNA sense strand
ucaauuugguacugucauc

SEQ ID NO: 574608 - RNA, 19 nt, Homo sapiens
  misc_RNA (1)...(19): siRNA sense strand
gauaacgucccugagauag

SEQ ID NO: 574609 - RNA, 19 nt, Homo sapiens
  misc_RNA (1)...(19): siRNA sense strand
guguccaccuucaagaauu

SEQ ID NO: 574610 - RNA, 19 nt, Homo sapiens
  misc_RNA (1)...(19): siRNA sense strand
acugucaucgcccuaauua

SEQ ID NO: 574611 - RNA, 19 nt, Homo sapiens
  misc_RNA (1)...(19): siRNA sense strand
ugcuggaugugaaugauaa

SEQ ID NO: 574612 - RNA, 19 nt, Homo sapiens
  misc_RNA (1)...(19): siRNA sense strand
gggcaauuucauauucuuu

SEQ ID NO: 574613 - RNA, 19 nt, Homo sapiens
  misc_RNA (1)...(19): siRNA sense strand
cggaacaacaguuaucaga

SEQ ID NO: 574614 - RNA, 19 nt, Homo sapiens
  misc_RNA (1)...(19): siRNA sense strand
ggaugugaaugauaaugcu

SEQ ID NO: 574615 - RNA, 19 nt, Homo sapiens
  misc_RNA (1)...(19): siRNA sense strand
ggauagauugggaaagcaa

SEQ ID NO: 574616 - RNA, 19 nt, Homo sapiens
  misc_RNA (1)...(19): siRNA sense strand
gcucaaauuccaucuuaac

SEQ ID NO: 574617 - RNA, 19 nt, Homo sapiens
  misc_RNA (1)...(19): siRNA sense strand
ucaagaauuacuacucguu

SEQ ID NO: 574618 - RNA, 19 nt, Homo sapiens
  misc_RNA (1)...(19): siRNA sense strand
gugaagacgcucaauuugg

SEQ ID NO: 574619 - RNA, 19 nt, Homo sapiens
  misc_RNA (1)...(19): siRNA sense strand
aaugauaacgucccugaga

SEQ ID NO: 574620 - RNA, 19 nt, Homo sapiens
  misc_RNA (1)...(19): siRNA sense strand
gaauacuucgggcuagaug

SEQ ID NO: 574621 - RNA, 19 nt, Homo sapiens
  misc_RNA (1)...(19): siRNA sense strand
gacaggccgcugcagguuu

SEQ ID NO: 574622 - RNA, 19 nt, Homo sapiens
  misc_RNA (1)...(19): siRNA sense strand
gaucgaaauacgggagaaa

SEQ ID NO: 574623 - RNA, 19 nt, Homo sapiens
  misc_RNA (1)...(19): siRNA sense strand
ggcucaaauuccaucuuaa

SEQ ID NO: 574624 - RNA, 19 nt, Homo sapiens
  misc_RNA (1)...(19): siRNA sense strand
acgugaagacgcucaauuu

SEQ ID NO: 574625 - RNA, 19 nt, Homo sapiens
  misc_RNA (1)...(19): siRNA sense strand
gggguaauuuggauuuuga

SEQ ID NO: 574626 - RNA, 19 nt, Homo sapiens
  misc_RNA (1)...(19): siRNA sense strand
augcagauguuggcucaaa

SEQ ID NO: 574627 - RNA, 19 nt, Homo sapiens
  misc_RNA (1)...(19): siRNA sense strand
cgugaagacgcucaauuug

SEQ ID NO: 574628 - RNA, 19 nt, Homo sapiens
  misc_RNA (1)...(19): siRNA sense strand
ggcuagaugugaaaauaaa

SEQ ID NO: 574629 - RNA, 19 nt, Homo sapiens
  misc_RNA (1)...(19): siRNA sense strand
gccuaugaguuggugguaa

SEQ ID NO: 574630 - RNA, 19 nt, Homo sapiens
  misc_RNA (1)...(19): siRNA sense strand
gugcuggaugugaaugaua

SEQ ID NO: 574631 - RNA, 19 nt, Homo sapiens
  misc_RNA (1)...(19): siRNA sense strand
gcauuuuguuugugaauuc

SEQ ID NO: 574632 - RNA, 19 nt, Homo sapiens
  misc_RNA (1)...(19): siRNA sense strand
agacaacggaacaacaguu

SEQ ID NO: 574633 - RNA, 19 nt, Homo sapiens
  misc_RNA (1)...(19): siRNA sense strand
uggccgacaugaaugacaa

SEQ ID NO: 574634 - RNA, 19 nt, Homo sapiens
  misc_RNA (1)...(19): siRNA sense strand
caggauggccuccaaagac

SEQ ID NO: 574635 - RNA, 19 nt, Homo sapiens
  misc_RNA (1)...(19): siRNA sense strand
ccuaugaguuggugguaac

SEQ ID NO: 574636 - RNA, 19 nt, Homo sapiens
  misc_RNA (1)...(19): siRNA sense strand
augauaaugcucccacuuu

SEQ ID NO: 574637 - RNA, 19 nt, Homo sapiens
  misc_RNA (1)...(19): siRNA sense strand
acagugaugacaauaaaca

SEQ ID NO: 574638 - RNA, 19 nt, Homo sapiens
  misc_RNA (1)...(19): siRNA sense strand
gaaaauaaacagugaugac

SEQ ID NO: 574639 - RNA, 19 nt, Homo sapiens
  misc_RNA (1)...(19): siRNA sense strand
ucaggauggccuccaaaga

SEQ ID NO: 574640 - RNA, 19 nt, Homo sapiens
  misc_RNA (1)...(19): siRNA sense strand
caaagagugcugauuuacg

SEQ ID NO: 574641 - RNA, 19 nt, Homo sapiens
  misc_RNA (1)...(19): siRNA sense strand
cgugucggccuaugaguug

SEQ ID NO: 574642 - RNA, 19 nt, Homo sapiens
  misc_RNA (1)...(19): siRNA sense strand
ccaccuucaagaauuacua

SEQ ID NO: 574643 - RNA, 19 nt, Homo sapiens
  misc_RNA (1)...(19): siRNA sense strand
ccaacgggcaggugaacug

SEQ ID NO: 574644 - RNA, 19 nt, Homo sapiens
  misc_RNA (1)...(19): siRNA sense strand
ugaccacuuuagcauagau

SEQ ID NO: 574645 - RNA, 19 nt, Homo sapiens
  misc_RNA (1)...(19): siRNA sense strand
uauugaccacuuuagcaua

SEQ ID NO: 574646 - RNA, 19 nt, Homo sapiens
  misc_RNA (1)...(19): siRNA sense strand
guuauugaccacuuuagca

SEQ ID NO: 574647 - RNA, 19 nt, Homo sapiens
  misc_RNA (1)...(19): siRNA sense strand
gauaaugcucccacuuucg

SEQ ID NO: 574648 - RNA, 19 nt, Homo sapiens
  misc_RNA (1)...(19): siRNA sense strand
acucaguucuagcgaauac

SEQ ID NO: 574649 - RNA, 19 nt, Homo sapiens
  misc_RNA (1)...(19): siRNA sense strand
gagguggccgacaugaaug

SEQ ID NO: 574650 - RNA, 19 nt, Homo sapiens
  misc_RNA (1)...(19): siRNA sense strand
gagagcgugucggccuaug

SEQ ID NO: 574651 - RNA, 19 nt, Homo sapiens
  misc_RNA (1)...(19): siRNA sense strand
guggaggugagggacauua

SEQ ID NO: 574652 - RNA, 19 nt, Homo sapiens
  misc_RNA (1)...(19): siRNA sense strand
auaaacaaauugggcucuu

SEQ ID NO: 574653 - RNA, 19 nt, Homo sapiens
  misc_RNA (1)...(19): siRNA sense strand
cgggcuagaugugaaaaua

SEQ ID NO: 574654 - RNA, 19 nt, Homo sapiens
  misc_RNA (1)...(19): siRNA sense strand
gaacaccguuuauuaguga

SEQ ID NO: 574655 - RNA, 19 nt, Homo sapiens
  misc_RNA (1)...(19): siRNA sense strand
acaagaacaccguuuauua

SEQ ID NO: 574656 - RNA, 19 nt, Homo sapiens
  misc_RNA (1)...(19): siRNA sense strand
caauugagauacagguuaa

SEQ ID NO: 574657 - RNA, 19 nt, Homo sapiens
  misc_RNA (1)...(19): siRNA sense strand
ggaaauccuuagauagaga

SEQ ID NO: 574658 - RNA, 19 nt, Homo sapiens
  misc_RNA (1)...(19): siRNA sense strand
gggcaucaauaaggaaaua

SEQ ID NO: 574659 - RNA, 19 nt, Homo sapiens
  misc_RNA (1)...(19): siRNA sense strand
ccaagugggacauuaguua

SEQ ID NO: 574660 - RNA, 19 nt, Homo sapiens
  misc_RNA (1)...(19): siRNA sense strand
caaaugcacaauugagaua

SEQ ID NO: 574661 - RNA, 19 nt, Homo sapiens
  misc_RNA (1)...(19): siRNA sense strand
gguuaaauccaaacgaaua

SEQ ID NO: 574662 - RNA, 19 nt, Homo sapiens
  misc_RNA (1)...(19): siRNA sense strand
cagacaagaacaaagauua

SEQ ID NO: 574663 - RNA, 19 nt, Homo sapiens
  misc_RNA (1)...(19): siRNA sense strand
ugaaggacaucaaugacaa

SEQ ID NO: 574664 - RNA, 19 nt, Homo sapiens
  misc_RNA (1)...(19): siRNA sense strand
acgcuuggcuuucguauga

SEQ ID NO: 574665 - RNA, 19 nt, Homo sapiens
  misc_RNA (1)...(19): siRNA sense strand
ggagguaaaucugcagaau

SEQ ID NO: 574666 - RNA, 19 nt, Homo sapiens
  misc_RNA (1)...(19): siRNA sense strand
caagaacaccguuuauuag

SEQ ID NO: 574667 - RNA, 19 nt, Homo sapiens
  misc_RNA (1)...(19): siRNA sense strand
ggaacuggauuaugaagac

SEQ ID NO: 574668 - RNA, 19 nt, Homo sapiens
  misc_RNA (1)...(19): siRNA sense strand
cagguuaaauccaaacgaa

SEQ ID NO: 574669 - RNA, 19 nt, Homo sapiens
  misc_RNA (1)...(19): siRNA sense strand
agugggacauuaguuauua

SEQ ID NO: 574670 - RNA, 19 nt, Homo sapiens
  misc_RNA (1)...(19): siRNA sense strand
ucaggacacuguaaaguag

SEQ ID NO: 574671 - RNA, 19 nt, Homo sapiens
  misc_RNA (1)...(19): siRNA sense strand
gauacagguuaaauccaaa

SEQ ID NO: 574672 - RNA, 19 nt, Homo sapiens
  misc_RNA (1)...(19): siRNA sense strand
cgauguaaaguccaaauuu

SEQ ID NO: 574673 - RNA, 19 nt, Homo sapiens
  misc_RNA (1)...(19): siRNA sense strand
gagaagaaacacaagaaca

SEQ ID NO: 574674 - RNA, 19 nt, Homo sapiens
  misc_RNA (1)...(19): siRNA sense strand
uguccaccuucaagaauua

SEQ ID NO: 574675 - RNA, 19 nt, Homo sapiens
  misc_RNA (1)...(19): siRNA sense strand
uggagcaaaugcacaauug

SEQ ID NO: 574676 - RNA, 19 nt, Homo sapiens
  misc_RNA (1)...(19): siRNA sense strand
gcaaaugcacaauugagau

SEQ ID NO: 574677 - RNA, 19 nt, Homo sapiens
  misc_RNA (1)...(19): siRNA sense strand
ggaaguggccgacgugaac

SEQ ID NO: 574678 - RNA, 19 nt, Homo sapiens
  misc_RNA (1)...(19): siRNA sense strand
caaaugaagaagaaacgaa

SEQ ID NO: 574679 - RNA, 19 nt, Homo sapiens
  misc_RNA (1)...(19): siRNA sense strand
agauacagguuaaauccaa

SEQ ID NO: 574680 - RNA, 19 nt, Homo sapiens
  misc_RNA (1)...(19): siRNA sense strand
guucaguuguugaucaaug

SEQ ID NO: 574681 - RNA, 19 nt, Homo sapiens
  misc_RNA (1)...(19): siRNA sense strand
aaugucagauuguuggaaa

SEQ ID NO: 574682 - RNA, 19 nt, Homo sapiens
  misc_RNA (1)...(19): siRNA sense strand
uauuagugauugcaacuga

SEQ ID NO: 574683 - RNA, 19 nt, Homo sapiens
  misc_RNA (1)...(19): siRNA sense strand
ugaaacuccuggaugugaa

SEQ ID NO: 574684 - RNA, 19 nt, Homo sapiens
  misc_RNA (1)...(19): siRNA sense strand
uaauauugaugccauggau

SEQ ID NO: 574685 - RNA, 19 nt, Homo sapiens
  misc_RNA (1)...(19): siRNA sense strand
acaauugagauacagguua

SEQ ID NO: 574686 - RNA, 19 nt, Homo sapiens
  misc_RNA (1)...(19): siRNA sense strand
agaacgcccugguguccua

SEQ ID NO: 574687 - RNA, 19 nt, Homo sapiens
  misc_RNA (1)...(19): siRNA sense strand
uagugaaacuccuggaugu

SEQ ID NO: 574688 - RNA, 19 nt, Homo sapiens
  misc_RNA (1)...(19): siRNA sense strand
guaaaguaguagugaaacu

SEQ ID NO: 574689 - RNA, 19 nt, Homo sapiens
  misc_RNA (1)...(19): siRNA sense strand
uaacagguacaguucaguu

SEQ ID NO: 574690 - RNA, 19 nt, Homo sapiens
  misc_RNA (1)...(19): siRNA sense strand
gaaauccuuagauagagaa

SEQ ID NO: 574691 - RNA, 19 nt, Homo sapiens
  misc_RNA (1)...(19): siRNA sense strand
gcgagagcgugucggucua

SEQ ID NO: 574692 - RNA, 19 nt, Homo sapiens
  misc_RNA (1)...(19): siRNA sense strand
cagguacaguucaguuguu

SEQ ID NO: 574693 - RNA, 19 nt, Homo sapiens
  misc_RNA (1)...(19): siRNA sense strand
ggucccaccucuacagaca

SEQ ID NO: 574694 - RNA, 19 nt, Homo sapiens
  misc_RNA (1)...(19): siRNA sense strand
acaguucaguuguugauca

SEQ ID NO: 574695 - RNA, 19 nt, Homo sapiens
  misc_RNA (1)...(19): siRNA sense strand
agaacaccguuuauuagug

SEQ ID NO: 574696 - RNA, 19 nt, Homo sapiens
  misc_RNA (1)...(19): siRNA sense strand
caacacgcucucuggauga

SEQ ID NO: 574697 - RNA, 19 nt, Homo sapiens
  misc_RNA (1)...(19): siRNA sense strand
gcacggucauugcucugau

SEQ ID NO: 574698 - RNA, 19 nt, Homo sapiens
  misc_RNA (1)...(19): siRNA sense strand
gaacgccucagaugcagau

SEQ ID NO: 574699 - RNA, 19 nt, Homo sapiens
  misc_RNA (1)...(19): siRNA sense strand
gagguaaaucugcagaaug

SEQ ID NO: 574700 - RNA, 19 nt, Homo sapiens
  misc_RNA (1)...(19): siRNA sense strand
caagugggacauuaguuau

SEQ ID NO: 574701 - RNA, 19 nt, Homo sapiens
  misc_RNA (1)...(19): siRNA sense strand
uguauuggaugcuaaugau

SEQ ID NO: 574702 - RNA, 19 nt, Homo sapiens
  misc_RNA (1)...(19): siRNA sense strand
ugaagaagaaacgaacuuu

SEQ ID NO: 574703 - RNA, 19 nt, Homo sapiens
  misc_RNA (1)...(19): siRNA sense strand
ggagcaaaugcacaauuga

SEQ ID NO: 574704 - RNA, 19 nt, Homo sapiens
  misc_RNA (1)...(19): siRNA sense strand
cuacaacgcuuggcuuucg

SEQ ID NO: 574705 - RNA, 19 nt, Homo sapiens
  misc_RNA (1)...(19): siRNA sense strand
cagcgugucuguggaagug

SEQ ID NO: 574706 - RNA, 19 nt, Homo sapiens
  misc_RNA (1)...(19): siRNA sense strand
gugggacauuaguuauuaa

SEQ ID NO: 574707 - RNA, 19 nt, Homo sapiens
  misc_RNA (1)...(19): siRNA sense strand
gcaccaagugggacauuag

SEQ ID NO: 574708 - RNA, 19 nt, Homo sapiens
  misc_RNA (1)...(19): siRNA sense strand
gagcaaaugcacaauugag

SEQ ID NO: 574709 - RNA, 19 nt, Homo sapiens
  misc_RNA (1)...(19): siRNA sense strand
agguaaaucugcagaaugg

SEQ ID NO: 574710 - RNA, 19 nt, Homo sapiens
  misc_RNA (1)...(19): siRNA sense strand
gugaaacuccuggauguga

SEQ ID NO: 574711 - RNA, 19 nt, Homo sapiens
  misc_RNA (1)...(19): siRNA sense strand
gcagugaaggacaucaaug

SEQ ID NO: 574712 - RNA, 19 nt, Homo sapiens
  misc_RNA (1)...(19): siRNA sense strand
cagugaaggacaucaauga

SEQ ID NO: 574713 - RNA, 19 nt, Homo sapiens
  misc_RNA (1)...(19): siRNA sense strand
uagagaagaaacacaagaa

SEQ ID NO: 574714 - RNA, 19 nt, Homo sapiens
  misc_RNA (1)...(19): siRNA sense strand
gaagaagaaacgaacuuuu

SEQ ID NO: 574715 - RNA, 19 nt, Homo sapiens
  misc_RNA (1)...(19): siRNA sense strand
aaaguacauucccauuauc

SEQ ID NO: 574716 - RNA, 19 nt, Homo sapiens
  misc_RNA (1)...(19): siRNA sense strand
gaaggacaucaaugacaau

SEQ ID NO: 574717 - RNA, 19 nt, Homo sapiens
  misc_RNA (1)...(19): siRNA sense strand
ccacucagcacggucauug

SEQ ID NO: 574718 - RNA, 19 nt, Homo sapiens
  misc_RNA (1)...(19): siRNA sense strand
gcgcgucggauuuggauau

SEQ ID NO: 574719 - RNA, 19 nt, Homo sapiens
  misc_RNA (1)...(19): siRNA sense strand
guguccaccuucaagaauu

SEQ ID NO: 574720 - RNA, 19 nt, Homo sapiens
  misc_RNA (1)...(19): siRNA sense strand
guacaguucaguuguugau

SEQ ID NO: 574721 - RNA, 19 nt, Homo sapiens
  misc_RNA (1)...(19): siRNA sense strand
cacaagaacaccguuuauu

SEQ ID NO: 574722 - RNA, 19 nt, Homo sapiens
  misc_RNA (1)...(19): siRNA sense strand
gagucaagaaugccagauu

SEQ ID NO: 574723 - RNA, 19 nt, Homo sapiens
  misc_RNA (1)...(19): siRNA sense strand
uccuggaugugaaugauaa

SEQ ID NO: 574724 - RNA, 19 nt, Homo sapiens
  misc_RNA (1)...(19): siRNA sense strand
gaacuggauuaugaagacu

SEQ ID NO: 574725 - RNA, 19 nt, Homo sapiens
  misc_RNA (1)...(19): siRNA sense strand
guauuggaugcuaaugaua

SEQ ID NO: 574726 - RNA, 19 nt, Homo sapiens
  misc_RNA (1)...(19): siRNA sense strand
gaaacuccuggaugugaau

SEQ ID NO: 574727 - RNA, 19 nt, Homo sapiens
  misc_RNA (1)...(19): siRNA sense strand
ugauaacgccccagaauuu

SEQ ID NO: 574728 - RNA, 19 nt, Homo sapiens
  misc_RNA (1)...(19): siRNA sense strand
aaagaggacgcuccacuca

SEQ ID NO: 574729 - RNA, 19 nt, Homo sapiens
  misc_RNA (1)...(19): siRNA sense strand
ucaagaauuacuacucguu

SEQ ID NO: 574730 - RNA, 19 nt, Homo sapiens
  misc_RNA (1)...(19): siRNA sense strand
acacaagaacaccguuuau

SEQ ID NO: 574731 - RNA, 19 nt, Homo sapiens
  misc_RNA (1)...(19): siRNA sense strand
gacaggccgcugcagguuu

SEQ ID NO: 574732 - RNA, 19 nt, Homo sapiens
  misc_RNA (1)...(19): siRNA sense strand
ccagacaagaacaaagauu

SEQ ID NO: 574733 - RNA, 19 nt, Homo sapiens
  misc_RNA (1)...(19): siRNA sense strand
gagggcaucaauaaggaaa

SEQ ID NO: 574734 - RNA, 19 nt, Homo sapiens
  misc_RNA (1)...(19): siRNA sense strand
auccuuagauagagaagaa

SEQ ID NO: 574735 - RNA, 19 nt, Homo sapiens
  misc_RNA (1)...(19): siRNA sense strand
gcaagcccacucuguugug

SEQ ID NO: 574736 - RNA, 19 nt, Homo sapiens
  misc_RNA (1)...(19): siRNA sense strand
cgucggauuuggauauugg

SEQ ID NO: 574737 - RNA, 19 nt, Homo sapiens
  misc_RNA (1)...(19): siRNA sense strand
auauugaugccauggauaa

SEQ ID NO: 574738 - RNA, 19 nt, Homo sapiens
  misc_RNA (1)...(19): siRNA sense strand
aggacacuguaaaguagua

SEQ ID NO: 574739 - RNA, 19 nt, Homo sapiens
  misc_RNA (1)...(19): siRNA sense strand
gugaaggacaucaaugaca

SEQ ID NO: 574740 - RNA, 19 nt, Homo sapiens
  misc_RNA (1)...(19): siRNA sense strand
agauagagaagaaacacaa

SEQ ID NO: 574741 - RNA, 19 nt, Homo sapiens
  misc_RNA (1)...(19): siRNA sense strand
ugguggaugucaacgugua

SEQ ID NO: 574742 - RNA, 19 nt, Homo sapiens
  misc_RNA (1)...(19): siRNA sense strand
caguucaguuguugaucaa

SEQ ID NO: 574743 - RNA, 19 nt, Homo sapiens
  misc_RNA (1)...(19): siRNA sense strand
aacacaagaacaccguuua

SEQ ID NO: 574744 - RNA, 19 nt, Homo sapiens
  misc_RNA (1)...(19): siRNA sense strand
aaacccgaacuaacaggua

SEQ ID NO: 574745 - RNA, 19 nt, Homo sapiens
  misc_RNA (1)...(19): siRNA sense strand
ggaugugaaugauaauacc

SEQ ID NO: 574746 - RNA, 19 nt, Homo sapiens
  misc_RNA (1)...(19): siRNA sense strand
gcauuuuguuugugaauuc

SEQ ID NO: 574747 - RNA, 19 nt, Homo sapiens
  misc_RNA (1)...(19): siRNA sense strand
caaacacggaaccuucguu

SEQ ID NO: 574748 - RNA, 19 nt, Homo sapiens
  misc_RNA (1)...(19): siRNA sense strand
caucaauaaggaaauagug

SEQ ID NO: 574749 - RNA, 19 nt, Homo sapiens
  misc_RNA (1)...(19): siRNA sense strand
caacguguaccugaucauc

SEQ ID NO: 574750 - RNA, 19 nt, Homo sapiens
  misc_RNA (1)...(19): siRNA sense strand
aggcugcccugguggaugu

SEQ ID NO: 574751 - RNA, 19 nt, Homo sapiens
  misc_RNA (1)...(19): siRNA sense strand
gagagcgugucggucuaug

SEQ ID NO: 574752 - RNA, 19 nt, Homo sapiens
  misc_RNA (1)...(19): siRNA sense strand
ggugaccugcucccuaaug

SEQ ID NO: 574753 - RNA, 19 nt, Homo sapiens
  misc_RNA (1)...(19): siRNA sense strand
gggaacuggauuaugaaga

SEQ ID NO: 574754 - RNA, 19 nt, Homo sapiens
  misc_RNA (1)...(19): siRNA sense strand
gaacaccguuuauuaguga

SEQ ID NO: 574755 - RNA, 19 nt, Homo sapiens
  misc_RNA (1)...(19): siRNA sense strand
acaagaacaccguuuauua

SEQ ID NO: 574756 - RNA, 19 nt, Homo sapiens
  misc_RNA (1)...(19): siRNA sense strand
caauugagauacagguuaa

SEQ ID NO: 574757 - RNA, 19 nt, Homo sapiens
  misc_RNA (1)...(19): siRNA sense strand
ggaaauccuuagauagaga

SEQ ID NO: 574758 - RNA, 19 nt, Homo sapiens
  misc_RNA (1)...(19): siRNA sense strand
gggcaucaauaaggaaaua

SEQ ID NO: 574759 - RNA, 19 nt, Homo sapiens
  misc_RNA (1)...(19): siRNA sense strand
ccaagugggacauuaguua

SEQ ID NO: 574760 - RNA, 19 nt, Homo sapiens
  misc_RNA (1)...(19): siRNA sense strand
caaaugcacaauugagaua

SEQ ID NO: 574761 - RNA, 19 nt, Homo sapiens
  misc_RNA (1)...(19): siRNA sense strand
gguuaaauccaaacgaaua

SEQ ID NO: 574762 - RNA, 19 nt, Homo sapiens
  misc_RNA (1)...(19): siRNA sense strand
cagacaagaacaaagauua

SEQ ID NO: 574763 - RNA, 19 nt, Homo sapiens
  misc_RNA (1)...(19): siRNA sense strand
ugaaggacaucaaugacaa

SEQ ID NO: 574764 - RNA, 19 nt, Homo sapiens
  misc_RNA (1)...(19): siRNA sense strand
acgcuuggcuuucguauga

SEQ ID NO: 574765 - RNA, 19 nt, Homo sapiens
  misc_RNA (1)...(19): siRNA sense strand
ggagguaaaucugcagaau

SEQ ID NO: 574766 - RNA, 19 nt, Homo sapiens
  misc_RNA (1)...(19): siRNA sense strand
caagaacaccguuuauuag

SEQ ID NO: 574767 - RNA, 19 nt, Homo sapiens
  misc_RNA (1)...(19): siRNA sense strand
ggaacuggauuaugaagac

SEQ ID NO: 574768 - RNA, 19 nt, Homo sapiens
  misc_RNA (1)...(19): siRNA sense strand
cagguuaaauccaaacgaa

SEQ ID NO: 574769 - RNA, 19 nt, Homo sapiens
  misc_RNA (1)...(19): siRNA sense strand
agugggacauuaguuauua

SEQ ID NO: 574770 - RNA, 19 nt, Homo sapiens
  misc_RNA (1)...(19): siRNA sense strand
ucaggacacuguaaaguag

SEQ ID NO: 574771 - RNA, 19 nt, Homo sapiens
  misc_RNA (1)...(19): siRNA sense strand
gauacagguuaaauccaaa

SEQ ID NO: 574772 - RNA, 19 nt, Homo sapiens
  misc_RNA (1)...(19): siRNA sense strand
cgauguaaaguccaaauuu

SEQ ID NO: 574773 - RNA, 19 nt, Homo sapiens
  misc_RNA (1)...(19): siRNA sense strand
gagaagaaacacaagaaca

SEQ ID NO: 574774 - RNA, 19 nt, Homo sapiens
  misc_RNA (1)...(19): siRNA sense strand
uguccaccuucaagaauua

SEQ ID NO: 574775 - RNA, 19 nt, Homo sapiens
  misc_RNA (1)...(19): siRNA sense strand
uggagcaaaugcacaauug

SEQ ID NO: 574776 - RNA, 19 nt, Homo sapiens
  misc_RNA (1)...(19): siRNA sense strand
gcaaaugcacaauugagau

SEQ ID NO: 574777 - RNA, 19 nt, Homo sapiens
  misc_RNA (1)...(19): siRNA sense strand
ggaaguggccgacgugaac

SEQ ID NO: 574778 - RNA, 19 nt, Homo sapiens
  misc_RNA (1)...(19): siRNA sense strand
caaaugaagaagaaacgaa

SEQ ID NO: 574779 - RNA, 19 nt, Homo sapiens
  misc_RNA (1)...(19): siRNA sense strand
agauacagguuaaauccaa

SEQ ID NO: 574780 - RNA, 19 nt, Homo sapiens
  misc_RNA (1)...(19): siRNA sense strand
guucaguuguugaucaaug

SEQ ID NO: 574781 - RNA, 19 nt, Homo sapiens
  misc_RNA (1)...(19): siRNA sense strand
aaugucagauuguuggaaa

SEQ ID NO: 574782 - RNA, 19 nt, Homo sapiens
  misc_RNA (1)...(19): siRNA sense strand
uauuagugauugcaacuga

SEQ ID NO: 574783 - RNA, 19 nt, Homo sapiens
  misc_RNA (1)...(19): siRNA sense strand
ugaaacuccuggaugugaa

SEQ ID NO: 574784 - RNA, 19 nt, Homo sapiens
  misc_RNA (1)...(19): siRNA sense strand
uaauauugaugccauggau

SEQ ID NO: 574785 - RNA, 19 nt, Homo sapiens
  misc_RNA (1)...(19): siRNA sense strand
acaauugagauacagguua

SEQ ID NO: 574786 - RNA, 19 nt, Homo sapiens
  misc_RNA (1)...(19): siRNA sense strand
agaacgcccugguguccua

SEQ ID NO: 574787 - RNA, 19 nt, Homo sapiens
  misc_RNA (1)...(19): siRNA sense strand
uagugaaacuccuggaugu

SEQ ID NO: 574788 - RNA, 19 nt, Homo sapiens
  misc_RNA (1)...(19): siRNA sense strand
guaaaguaguagugaaacu

SEQ ID NO: 574789 - RNA, 19 nt, Homo sapiens
  misc_RNA (1)...(19): siRNA sense strand
uaacagguacaguucaguu

SEQ ID NO: 574790 - RNA, 19 nt, Homo sapiens
  misc_RNA (1)...(19): siRNA sense strand
gaaauccuuagauagagaa

SEQ ID NO: 574791 - RNA, 19 nt, Homo sapiens
  misc_RNA (1)...(19): siRNA sense strand
gcgagagcgugucggucua

SEQ ID NO: 574792 - RNA, 19 nt, Homo sapiens
  misc_RNA (1)...(19): siRNA sense strand
cagguacaguucaguuguu

SEQ ID NO: 574793 - RNA, 19 nt, Homo sapiens
  misc_RNA (1)...(19): siRNA sense strand
ggucccaccucuacagaca

SEQ ID NO: 574794 - RNA, 19 nt, Homo sapiens
  misc_RNA (1)...(19): siRNA sense strand
acaguucaguuguugauca

SEQ ID NO: 574795 - RNA, 19 nt, Homo sapiens
  misc_RNA (1)...(19): siRNA sense strand
agaacaccguuuauuagug

SEQ ID NO: 574796 - RNA, 19 nt, Homo sapiens
  misc_RNA (1)...(19): siRNA sense strand
caacacgcucucuggauga

SEQ ID NO: 574797 - RNA, 19 nt, Homo sapiens
  misc_RNA (1)...(19): siRNA sense strand
gcacggucauugcucugau

SEQ ID NO: 574798 - RNA, 19 nt, Homo sapiens
  misc_RNA (1)...(19): siRNA sense strand
gaacgccucagaugcagau

SEQ ID NO: 574799 - RNA, 19 nt, Homo sapiens
  misc_RNA (1)...(19): siRNA sense strand
gagguaaaucugcagaaug

SEQ ID NO: 574800 - RNA, 19 nt, Homo sapiens
  misc_RNA (1)...(19): siRNA sense strand
caagugggacauuaguuau

SEQ ID NO: 574801 - RNA, 19 nt, Homo sapiens
  misc_RNA (1)...(19): siRNA sense strand
uguauuggaugcuaaugau

SEQ ID NO: 574802 - RNA, 19 nt, Homo sapiens
  misc_RNA (1)...(19): siRNA sense strand
ugaagaagaaacgaacuuu

SEQ ID NO: 574803 - RNA, 19 nt, Homo sapiens
  misc_RNA (1)...(19): siRNA sense strand
ggagcaaaugcacaauuga

SEQ ID NO: 574804 - RNA, 19 nt, Homo sapiens
  misc_RNA (1)...(19): siRNA sense strand
cuacaacgcuuggcuuucg

SEQ ID NO: 574805 - RNA, 19 nt, Homo sapiens
  misc_RNA (1)...(19): siRNA sense strand
cagcgugucuguggaagug

SEQ ID NO: 574806 - RNA, 19 nt, Homo sapiens
  misc_RNA (1)...(19): siRNA sense strand
gugggacauuaguuauuaa

SEQ ID NO: 574807 - RNA, 19 nt, Homo sapiens
  misc_RNA (1)...(19): siRNA sense strand
gcaccaagugggacauuag

SEQ ID NO: 574808 - RNA, 19 nt, Homo sapiens
  misc_RNA (1)...(19): siRNA sense strand
gagcaaaugcacaauugag

SEQ ID NO: 574809 - RNA, 19 nt, Homo sapiens
  misc_RNA (1)...(19): siRNA sense strand
agguaaaucugcagaaugg

SEQ ID NO: 574810 - RNA, 19 nt, Homo sapiens
  misc_RNA (1)...(19): siRNA sense strand
gugaaacuccuggauguga

SEQ ID NO: 574811 - RNA, 19 nt, Homo sapiens
  misc_RNA (1)...(19): siRNA sense strand
gcagugaaggacaucaaug

SEQ ID NO: 574812 - RNA, 19 nt, Homo sapiens
  misc_RNA (1)...(19): siRNA sense strand
cagugaaggacaucaauga

SEQ ID NO: 574813 - RNA, 19 nt, Homo sapiens
  misc_RNA (1)...(19): siRNA sense strand
uagagaagaaacacaagaa

SEQ ID NO: 574814 - RNA, 19 nt, Homo sapiens
  misc_RNA (1)...(19): siRNA sense strand
gaagaagaaacgaacuuuu

SEQ ID NO: 574815 - RNA, 19 nt, Homo sapiens
  misc_RNA (1)...(19): siRNA sense strand
aaaguacauucccauuauc

SEQ ID NO: 574816 - RNA, 19 nt, Homo sapiens
  misc_RNA (1)...(19): siRNA sense strand
gaaggacaucaaugacaau

SEQ ID NO: 574817 - RNA, 19 nt, Homo sapiens
  misc_RNA (1)...(19): siRNA sense strand
ccacucagcacggucauug

SEQ ID NO: 574818 - RNA, 19 nt, Homo sapiens
  misc_RNA (1)...(19): siRNA sense strand
gcgcgucggauuuggauau

SEQ ID NO: 574819 - RNA, 19 nt, Homo sapiens
  misc_RNA (1)...(19): siRNA sense strand
guguccaccuucaagaauu

SEQ ID NO: 574820 - RNA, 19 nt, Homo sapiens
  misc_RNA (1)...(19): siRNA sense strand
guacaguucaguuguugau

SEQ ID NO: 574821 - RNA, 19 nt, Homo sapiens
  misc_RNA (1)...(19): siRNA sense strand
cacaagaacaccguuuauu

SEQ ID NO: 574822 - RNA, 19 nt, Homo sapiens
  misc_RNA (1)...(19): siRNA sense strand
gagucaagaaugccagauu

SEQ ID NO: 574823 - RNA, 19 nt, Homo sapiens
  misc_RNA (1)...(19): siRNA sense strand
uccuggaugugaaugauaa

SEQ ID NO: 574824 - RNA, 19 nt, Homo sapiens
  misc_RNA (1)...(19): siRNA sense strand
gaacuggauuaugaagacu

SEQ ID NO: 574825 - RNA, 19 nt, Homo sapiens
  misc_RNA (1)...(19): siRNA sense strand
guauuggaugcuaaugaua

SEQ ID NO: 574826 - RNA, 19 nt, Homo sapiens
  misc_RNA (1)...(19): siRNA sense strand
gaaacuccuggaugugaau

SEQ ID NO: 574827 - RNA, 19 nt, Homo sapiens
  misc_RNA (1)...(19): siRNA sense strand
ugauaacgccccagaauuu

SEQ ID NO: 574828 - RNA, 19 nt, Homo sapiens
  misc_RNA (1)...(19): siRNA sense strand
aaagaggacgcuccacuca

SEQ ID NO: 574829 - RNA, 19 nt, Homo sapiens
  misc_RNA (1)...(19): siRNA sense strand
ucaagaauuacuacucguu

SEQ ID NO: 574830 - RNA, 19 nt, Homo sapiens
  misc_RNA (1)...(19): siRNA sense strand
acacaagaacaccguuuau

SEQ ID NO: 574831 - RNA, 19 nt, Homo sapiens
  misc_RNA (1)...(19): siRNA sense strand
gacaggccgcugcagguuu

SEQ ID NO: 574832 - RNA, 19 nt, Homo sapiens
  misc_RNA (1)...(19): siRNA sense strand
ccagacaagaacaaagauu

SEQ ID NO: 574833 - RNA, 19 nt, Homo sapiens
  misc_RNA (1)...(19): siRNA sense strand
gagggcaucaauaaggaaa

SEQ ID NO: 574834 - RNA, 19 nt, Homo sapiens
  misc_RNA (1)...(19): siRNA sense strand
auccuuagauagagaagaa

SEQ ID NO: 574835 - RNA, 19 nt, Homo sapiens
  misc_RNA (1)...(19): siRNA sense strand
gcaagcccacucuguugug

SEQ ID NO: 574836 - RNA, 19 nt, Homo sapiens
  misc_RNA (1)...(19): siRNA sense strand
cgucggauuuggauauugg

SEQ ID NO: 574837 - RNA, 19 nt, Homo sapiens
  misc_RNA (1)...(19): siRNA sense strand
auauugaugccauggauaa

SEQ ID NO: 574838 - RNA, 19 nt, Homo sapiens
  misc_RNA (1)...(19): siRNA sense strand
aggacacuguaaaguagua

SEQ ID NO: 574839 - RNA, 19 nt, Homo sapiens
  misc_RNA (1)...(19): siRNA sense strand
gugaaggacaucaaugaca

SEQ ID NO: 574840 - RNA, 19 nt, Homo sapiens
  misc_RNA (1)...(19): siRNA sense strand
agauagagaagaaacacaa

SEQ ID NO: 574841 - RNA, 19 nt, Homo sapiens
  misc_RNA (1)...(19): siRNA sense strand
ugguggaugucaacgugua

SEQ ID NO: 574842 - RNA, 19 nt, Homo sapiens
  misc_RNA (1)...(19): siRNA sense strand
caguucaguuguugaucaa

SEQ ID NO: 574843 - RNA, 19 nt, Homo sapiens
  misc_RNA (1)...(19): siRNA sense strand
aacacaagaacaccguuua

SEQ ID NO: 574844 - RNA, 19 nt, Homo sapiens
  misc_RNA (1)...(19): siRNA sense strand
aaacccgaacuaacaggua

SEQ ID NO: 574845 - RNA, 19 nt, Homo sapiens
  misc_RNA (1)...(19): siRNA sense strand
ggaugugaaugauaauacc

SEQ ID NO: 574846 - RNA, 19 nt, Homo sapiens
  misc_RNA (1)...(19): siRNA sense strand
gcauuuuguuugugaauuc

SEQ ID NO: 574847 - RNA, 19 nt, Homo sapiens
  misc_RNA (1)...(19): siRNA sense strand
caaacacggaaccuucguu

SEQ ID NO: 574848 - RNA, 19 nt, Homo sapiens
  misc_RNA (1)...(19): siRNA sense strand
caucaauaaggaaauagug

SEQ ID NO: 574849 - RNA, 19 nt, Homo sapiens
  misc_RNA (1)...(19): siRNA sense strand
caacguguaccugaucauc

SEQ ID NO: 574850 - RNA, 19 nt, Homo sapiens
  misc_RNA (1)...(19): siRNA sense strand
aggcugcccugguggaugu

SEQ ID NO: 574851 - RNA, 19 nt, Homo sapiens
  misc_RNA (1)...(19): siRNA sense strand
gagagcgugucggucuaug

SEQ ID NO: 574852 - RNA, 19 nt, Homo sapiens
  misc_RNA (1)...(19): siRNA sense strand
ggugaccugcucccuaaug

SEQ ID NO: 574853 - RNA, 19 nt, Homo sapiens
  misc_RNA (1)...(19): siRNA sense strand
gggaacuggauuaugaaga

SEQ ID NO: 574854 - RNA, 19 nt, Homo sapiens
  misc_RNA (1)...(19): siRNA sense strand
gaaagcaaauccuaugaaa

SEQ ID NO: 574855 - RNA, 19 nt, Homo sapiens
  misc_RNA (1)...(19): siRNA sense strand
ggacauuguuuauucauuc

SEQ ID NO: 574856 - RNA, 19 nt, Homo sapiens
  misc_RNA (1)...(19): siRNA sense strand
ugagggacauuaacgauaa

SEQ ID NO: 574857 - RNA, 19 nt, Homo sapiens
  misc_RNA (1)...(19): siRNA sense strand
gagcccaaaugaauacuuu

SEQ ID NO: 574858 - RNA, 19 nt, Homo sapiens
  misc_RNA (1)...(19): siRNA sense strand
gaagaaagcaaauccuaug

SEQ ID NO: 574859 - RNA, 19 nt, Homo sapiens
  misc_RNA (1)...(19): siRNA sense strand
ggaaaucuuuagacagaga

SEQ ID NO: 574860 - RNA, 19 nt, Homo sapiens
  misc_RNA (1)...(19): siRNA sense strand
agaacgcccugcucacuua

SEQ ID NO: 574861 - RNA, 19 nt, Homo sapiens
  misc_RNA (1)...(19): siRNA sense strand
ucacauagauccaauuacu

SEQ ID NO: 574862 - RNA, 19 nt, Homo sapiens
  misc_RNA (1)...(19): siRNA sense strand
agaagaagcuccggagauu

SEQ ID NO: 574863 - RNA, 19 nt, Homo sapiens
  misc_RNA (1)...(19): siRNA sense strand
gggcuuauauuacggaaau

SEQ ID NO: 574864 - RNA, 19 nt, Homo sapiens
  misc_RNA (1)...(19): siRNA sense strand
gcugguggaugucaacgua

SEQ ID NO: 574865 - RNA, 19 nt, Homo sapiens
  misc_RNA (1)...(19): siRNA sense strand
aaggugagauuacuagaaa

SEQ ID NO: 574866 - RNA, 19 nt, Homo sapiens
  misc_RNA (1)...(19): siRNA sense strand
ggagguggcugaugugaac

SEQ ID NO: 574867 - RNA, 19 nt, Homo sapiens
  misc_RNA (1)...(19): siRNA sense strand
ggagguaaaucugcagaau

SEQ ID NO: 574868 - RNA, 19 nt, Homo sapiens
  misc_RNA (1)...(19): siRNA sense strand
ggaauucaagucuuuauca

SEQ ID NO: 574869 - RNA, 19 nt, Homo sapiens
  misc_RNA (1)...(19): siRNA sense strand
aaacuuaacgccucagauu

SEQ ID NO: 574870 - RNA, 19 nt, Homo sapiens
  misc_RNA (1)...(19): siRNA sense strand
guaaagggauauauugacu

SEQ ID NO: 574871 - RNA, 19 nt, Homo sapiens
  misc_RNA (1)...(19): siRNA sense strand
acgauaaugucccagauuu

SEQ ID NO: 574872 - RNA, 19 nt, Homo sapiens
  misc_RNA (1)...(19): siRNA sense strand
gaagaucagcugcagacaa

SEQ ID NO: 574873 - RNA, 19 nt, Homo sapiens
  misc_RNA (1)...(19): siRNA sense strand
agacugagcccaaaugaau

SEQ ID NO: 574874 - RNA, 19 nt, Homo sapiens
  misc_RNA (1)...(19): siRNA sense strand
caacguauaccugaucauu

SEQ ID NO: 574875 - RNA, 19 nt, Homo sapiens
  misc_RNA (1)...(19): siRNA sense strand
acggaaaucuuuagacaga

SEQ ID NO: 574876 - RNA, 19 nt, Homo sapiens
  misc_RNA (1)...(19): siRNA sense strand
uagaagacaacaacgauaa

SEQ ID NO: 574877 - RNA, 19 nt, Homo sapiens
  misc_RNA (1)...(19): siRNA sense strand
agggauauauugacuuuga

SEQ ID NO: 574878 - RNA, 19 nt, Homo sapiens
  misc_RNA (1)...(19): siRNA sense strand
agaacgcgcugguguccua

SEQ ID NO: 574879 - RNA, 19 nt, Homo sapiens
  misc_RNA (1)...(19): siRNA sense strand
ggacagcucccacuuucug

SEQ ID NO: 574880 - RNA, 19 nt, Homo sapiens
  misc_RNA (1)...(19): siRNA sense strand
gaagaagcuccggagauuu

SEQ ID NO: 574881 - RNA, 19 nt, Homo sapiens
  misc_RNA (1)...(19): siRNA sense strand
gaagacaacaacgauaaug

SEQ ID NO: 574882 - RNA, 19 nt, Homo sapiens
  misc_RNA (1)...(19): siRNA sense strand
guagaagacaacaacgaua

SEQ ID NO: 574883 - RNA, 19 nt, Homo sapiens
  misc_RNA (1)...(19): siRNA sense strand
uuacggaaaucuuuagaca

SEQ ID NO: 574884 - RNA, 19 nt, Homo sapiens
  misc_RNA (1)...(19): siRNA sense strand
ggaaguagaagacaacaac

SEQ ID NO: 574885 - RNA, 19 nt, Homo sapiens
  misc_RNA (1)...(19): siRNA sense strand
uguccaccuucaagaauua

SEQ ID NO: 574886 - RNA, 19 nt, Homo sapiens
  misc_RNA (1)...(19): siRNA sense strand
gagaagaagcuccggagau

SEQ ID NO: 574887 - RNA, 19 nt, Homo sapiens
  misc_RNA (1)...(19): siRNA sense strand
ugacagaaccauuuauaag

SEQ ID NO: 574888 - RNA, 19 nt, Homo sapiens
  misc_RNA (1)...(19): siRNA sense strand
gggacauuguuuauucauu

SEQ ID NO: 574889 - RNA, 19 nt, Homo sapiens
  misc_RNA (1)...(19): siRNA sense strand
gcagacaacugaggaaucc

SEQ ID NO: 574890 - RNA, 19 nt, Homo sapiens
  misc_RNA (1)...(19): siRNA sense strand
acuuaacgccucagauuua

SEQ ID NO: 574891 - RNA, 19 nt, Homo sapiens
  misc_RNA (1)...(19): siRNA sense strand
caacgauaaugucccagau

SEQ ID NO: 574892 - RNA, 19 nt, Homo sapiens
  misc_RNA (1)...(19): siRNA sense strand
guagaguuauuguggaagu

SEQ ID NO: 574893 - RNA, 19 nt, Homo sapiens
  misc_RNA (1)...(19): siRNA sense strand
cgccaaaugugaaauccaa

SEQ ID NO: 574894 - RNA, 19 nt, Homo sapiens
  misc_RNA (1)...(19): siRNA sense strand
gcuguacacuggcgagauc

SEQ ID NO: 574895 - RNA, 19 nt, Homo sapiens
  misc_RNA (1)...(19): siRNA sense strand
acagaaccauuuauaaggu

SEQ ID NO: 574896 - RNA, 19 nt, Homo sapiens
  misc_RNA (1)...(19): siRNA sense strand
ggaacggucagcuccacua

SEQ ID NO: 574897 - RNA, 19 nt, Homo sapiens
  misc_RNA (1)...(19): siRNA sense strand
aauccaaguuucacauaga

SEQ ID NO: 574898 - RNA, 19 nt, Homo sapiens
  misc_RNA (1)...(19): siRNA sense strand
gggauauauugacuuugaa

SEQ ID NO: 574899 - RNA, 19 nt, Homo sapiens
  misc_RNA (1)...(19): siRNA sense strand
gcucacagccacugaugga

SEQ ID NO: 574900 - RNA, 19 nt, Homo sapiens
  misc_RNA (1)...(19): siRNA sense strand
gauaaugucccagauuugg

SEQ ID NO: 574901 - RNA, 19 nt, Homo sapiens
  misc_RNA (1)...(19): siRNA sense strand
gacagaaccauuuauaagg

SEQ ID NO: 574902 - RNA, 19 nt, Homo sapiens
  misc_RNA (1)...(19): siRNA sense strand
gugagggacauuaacgaua

SEQ ID NO: 574903 - RNA, 19 nt, Homo sapiens
  misc_RNA (1)...(19): siRNA sense strand
ccacugugcuggugucacu

SEQ ID NO: 574904 - RNA, 19 nt, Homo sapiens
  misc_RNA (1)...(19): siRNA sense strand
gaauucaagucuuuaucac

SEQ ID NO: 574905 - RNA, 19 nt, Homo sapiens
  misc_RNA (1)...(19): siRNA sense strand
gagaacgcccugcucacuu

SEQ ID NO: 574906 - RNA, 19 nt, Homo sapiens
  misc_RNA (1)...(19): siRNA sense strand
gauuuggaauucaagucuu

SEQ ID NO: 574907 - RNA, 19 nt, Homo sapiens
  misc_RNA (1)...(19): siRNA sense strand
gagguaaaucugcagaaug

SEQ ID NO: 574908 - RNA, 19 nt, Homo sapiens
  misc_RNA (1)...(19): siRNA sense strand
caaaugugaaauccaaguu

SEQ ID NO: 574909 - RNA, 19 nt, Homo sapiens
  misc_RNA (1)...(19): siRNA sense strand
agauuuagacgaaggauug

SEQ ID NO: 574910 - RNA, 19 nt, Homo sapiens
  misc_RNA (1)...(19): siRNA sense strand
cgccucagauuuagacgaa

SEQ ID NO: 574911 - RNA, 19 nt, Homo sapiens
  misc_RNA (1)...(19): siRNA sense strand
cugcugcucuuacuucuuc

SEQ ID NO: 574912 - RNA, 19 nt, Homo sapiens
  misc_RNA (1)...(19): siRNA sense strand
uaaggugagauuacuagaa

SEQ ID NO: 574913 - RNA, 19 nt, Homo sapiens
  misc_RNA (1)...(19): siRNA sense strand
ccgcuugacucucgguuuc

SEQ ID NO: 574914 - RNA, 19 nt, Homo sapiens
  misc_RNA (1)...(19): siRNA sense strand
aagaucagcugcagacaac

SEQ ID NO: 574915 - RNA, 19 nt, Homo sapiens
  misc_RNA (1)...(19): siRNA sense strand
ugguggaugucaacguaua

SEQ ID NO: 574916 - RNA, 19 nt, Homo sapiens
  misc_RNA (1)...(19): siRNA sense strand
guacagucaucgcccugau

SEQ ID NO: 574917 - RNA, 19 nt, Homo sapiens
  misc_RNA (1)...(19): siRNA sense strand
ugaagaaagcaaauccuau

SEQ ID NO: 574918 - RNA, 19 nt, Homo sapiens
  misc_RNA (1)...(19): siRNA sense strand
agguaaaucugcagaaugg

SEQ ID NO: 574919 - RNA, 19 nt, Homo sapiens
  misc_RNA (1)...(19): siRNA sense strand
gacugagcccaaaugaaua

SEQ ID NO: 574920 - RNA, 19 nt, Homo sapiens
  misc_RNA (1)...(19): siRNA sense strand
uggcugaugugaacgacaa

SEQ ID NO: 574921 - RNA, 19 nt, Homo sapiens
  misc_RNA (1)...(19): siRNA sense strand
ccauuuauaaggugagauu

SEQ ID NO: 574922 - RNA, 19 nt, Homo sapiens
  misc_RNA (1)...(19): siRNA sense strand
ggucuugggcuuauauuac

SEQ ID NO: 574923 - RNA, 19 nt, Homo sapiens
  misc_RNA (1)...(19): siRNA sense strand
uaaaaggucuugggcuuau

SEQ ID NO: 574924 - RNA, 19 nt, Homo sapiens
  misc_RNA (1)...(19): siRNA sense strand
guguccaccuucaagaauu

SEQ ID NO: 574925 - RNA, 19 nt, Homo sapiens
  misc_RNA (1)...(19): siRNA sense strand
uagaaaauguuccuaaugg

SEQ ID NO: 574926 - RNA, 19 nt, Homo sapiens
  misc_RNA (1)...(19): siRNA sense strand
acgcguggcuuucguacga

SEQ ID NO: 574927 - RNA, 19 nt, Homo sapiens
  misc_RNA (1)...(19): siRNA sense strand
cuuuaucacuuccaauuag

SEQ ID NO: 574928 - RNA, 19 nt, Homo sapiens
  misc_RNA (1)...(19): siRNA sense strand
agaaagcaaauccuaugaa

SEQ ID NO: 574929 - RNA, 19 nt, Homo sapiens
  misc_RNA (1)...(19): siRNA sense strand
ucuggccauuguagaguua

SEQ ID NO: 574930 - RNA, 19 nt, Homo sapiens
  misc_RNA (1)...(19): siRNA sense strand
ucaagaauuacuacucguu

SEQ ID NO: 574931 - RNA, 19 nt, Homo sapiens
  misc_RNA (1)...(19): siRNA sense strand
gaguuauuguggaaguaga

SEQ ID NO: 574932 - RNA, 19 nt, Homo sapiens
  misc_RNA (1)...(19): siRNA sense strand
ggagaacgcccugcucacu

SEQ ID NO: 574933 - RNA, 19 nt, Homo sapiens
  misc_RNA (1)...(19): siRNA sense strand
gaucagcugcagacaacug

SEQ ID NO: 574934 - RNA, 19 nt, Homo sapiens
  misc_RNA (1)...(19): siRNA sense strand
uagaguuauuguggaagua

SEQ ID NO: 574935 - RNA, 19 nt, Homo sapiens
  misc_RNA (1)...(19): siRNA sense strand
gacaggccgcugcagguuu

SEQ ID NO: 574936 - RNA, 19 nt, Homo sapiens
  misc_RNA (1)...(19): siRNA sense strand
gaaaucuuuagacagagaa

SEQ ID NO: 574937 - RNA, 19 nt, Homo sapiens
  misc_RNA (1)...(19): siRNA sense strand
gaggccuucuggagguaaa

SEQ ID NO: 574938 - RNA, 19 nt, Homo sapiens
  misc_RNA (1)...(19): siRNA sense strand
gcugccacaucuucacugu

SEQ ID NO: 574939 - RNA, 19 nt, Homo sapiens
  misc_RNA (1)...(19): siRNA sense strand
ucccagauuuggaauucaa

SEQ ID NO: 574940 - RNA, 19 nt, Homo sapiens
  misc_RNA (1)...(19): siRNA sense strand
uaaugucccagauuuggaa

SEQ ID NO: 574941 - RNA, 19 nt, Homo sapiens
  misc_RNA (1)...(19): siRNA sense strand
aaauccaaguuucacauag

SEQ ID NO: 574942 - RNA, 19 nt, Homo sapiens
  misc_RNA (1)...(19): siRNA sense strand
guagagggcauugauaagg

SEQ ID NO: 574943 - RNA, 19 nt, Homo sapiens
  misc_RNA (1)...(19): siRNA sense strand
gagcuacguuucggugcau

SEQ ID NO: 574944 - RNA, 19 nt, Homo sapiens
  misc_RNA (1)...(19): siRNA sense strand
guaaaaggucuugggcuua

SEQ ID NO: 574945 - RNA, 19 nt, Homo sapiens
  misc_RNA (1)...(19): siRNA sense strand
gacucucgguuuccacuag

SEQ ID NO: 574946 - RNA, 19 nt, Homo sapiens
  misc_RNA (1)...(19): siRNA sense strand
aagaaagcaaauccuauga

SEQ ID NO: 574947 - RNA, 19 nt, Homo sapiens
  misc_RNA (1)...(19): siRNA sense strand
gcauuuuguuugugaauuc

SEQ ID NO: 574948 - RNA, 19 nt, Homo sapiens
  misc_RNA (1)...(19): siRNA sense strand
ggaggcaaacccgaguuga

SEQ ID NO: 574949 - RNA, 19 nt, Homo sapiens
  misc_RNA (1)...(19): siRNA sense strand
ccaguuuaccugacucuag

SEQ ID NO: 574950 - RNA, 19 nt, Homo sapiens
  misc_RNA (1)...(19): siRNA sense strand
augcugcgcugguggaugu

SEQ ID NO: 574951 - RNA, 19 nt, Homo sapiens
  misc_RNA (1)...(19): siRNA sense strand
cuggucaccugcuccuuga

SEQ ID NO: 574952 - RNA, 19 nt, Homo sapiens
  misc_RNA (1)...(19): siRNA sense strand
ugucccagauuuggaauuc

SEQ ID NO: 574953 - RNA, 19 nt, Homo sapiens
  misc_RNA (1)...(19): siRNA sense strand
uauaaggugagauuacuag

SEQ ID NO: 574954 - RNA, 19 nt, Homo sapiens
  misc_RNA (1)...(19): siRNA sense strand
gaaagcaaauccuaugaaa

SEQ ID NO: 574955 - RNA, 19 nt, Homo sapiens
  misc_RNA (1)...(19): siRNA sense strand
ggacauuguuuauucauuc

SEQ ID NO: 574956 - RNA, 19 nt, Homo sapiens
  misc_RNA (1)...(19): siRNA sense strand
ugagggacauuaacgauaa

SEQ ID NO: 574957 - RNA, 19 nt, Homo sapiens
  misc_RNA (1)...(19): siRNA sense strand
gagcccaaaugaauacuuu

SEQ ID NO: 574958 - RNA, 19 nt, Homo sapiens
  misc_RNA (1)...(19): siRNA sense strand
gaagaaagcaaauccuaug

SEQ ID NO: 574959 - RNA, 19 nt, Homo sapiens
  misc_RNA (1)...(19): siRNA sense strand
ggaaaucuuuagacagaga

SEQ ID NO: 574960 - RNA, 19 nt, Homo sapiens
  misc_RNA (1)...(19): siRNA sense strand
agaacgcccugcucacuua

SEQ ID NO: 574961 - RNA, 19 nt, Homo sapiens
  misc_RNA (1)...(19): siRNA sense strand
ucacauagauccaauuacu

SEQ ID NO: 574962 - RNA, 19 nt, Homo sapiens
  misc_RNA (1)...(19): siRNA sense strand
agaagaagcuccggagauu

SEQ ID NO: 574963 - RNA, 19 nt, Homo sapiens
  misc_RNA (1)...(19): siRNA sense strand
gggcuuauauuacggaaau

SEQ ID NO: 574964 - RNA, 19 nt, Homo sapiens
  misc_RNA (1)...(19): siRNA sense strand
gcugguggaugucaacgua

SEQ ID NO: 574965 - RNA, 19 nt, Homo sapiens
  misc_RNA (1)...(19): siRNA sense strand
aaggugagauuacuagaaa

SEQ ID NO: 574966 - RNA, 19 nt, Homo sapiens
  misc_RNA (1)...(19): siRNA sense strand
ggagguggcugaugugaac

SEQ ID NO: 574967 - RNA, 19 nt, Homo sapiens
  misc_RNA (1)...(19): siRNA sense strand
ggagguaaaucugcagaau

SEQ ID NO: 574968 - RNA, 19 nt, Homo sapiens
  misc_RNA (1)...(19): siRNA sense strand
ggaauucaagucuuuauca

SEQ ID NO: 574969 - RNA, 19 nt, Homo sapiens
  misc_RNA (1)...(19): siRNA sense strand
aaacuuaacgccucagauu

SEQ ID NO: 574970 - RNA, 19 nt, Homo sapiens
  misc_RNA (1)...(19): siRNA sense strand
guaaagggauauauugacu

SEQ ID NO: 574971 - RNA, 19 nt, Homo sapiens
  misc_RNA (1)...(19): siRNA sense strand
acgauaaugucccagauuu

SEQ ID NO: 574972 - RNA, 19 nt, Homo sapiens
  misc_RNA (1)...(19): siRNA sense strand
gaagaucagcugcagacaa

SEQ ID NO: 574973 - RNA, 19 nt, Homo sapiens
  misc_RNA (1)...(19): siRNA sense strand
agacugagcccaaaugaau

SEQ ID NO: 574974 - RNA, 19 nt, Homo sapiens
  misc_RNA (1)...(19): siRNA sense strand
caacguauaccugaucauu

SEQ ID NO: 574975 - RNA, 19 nt, Homo sapiens
  misc_RNA (1)...(19): siRNA sense strand
acggaaaucuuuagacaga

SEQ ID NO: 574976 - RNA, 19 nt, Homo sapiens
  misc_RNA (1)...(19): siRNA sense strand
uagaagacaacaacgauaa

SEQ ID NO: 574977 - RNA, 19 nt, Homo sapiens
  misc_RNA (1)...(19): siRNA sense strand
agggauauauugacuuuga

SEQ ID NO: 574978 - RNA, 19 nt, Homo sapiens
  misc_RNA (1)...(19): siRNA sense strand
agaacgcgcugguguccua

SEQ ID NO: 574979 - RNA, 19 nt, Homo sapiens
  misc_RNA (1)...(19): siRNA sense strand
ggacagcucccacuuucug

SEQ ID NO: 574980 - RNA, 19 nt, Homo sapiens
  misc_RNA (1)...(19): siRNA sense strand
gaagaagcuccggagauuu

SEQ ID NO: 574981 - RNA, 19 nt, Homo sapiens
  misc_RNA (1)...(19): siRNA sense strand
gaagacaacaacgauaaug

SEQ ID NO: 574982 - RNA, 19 nt, Homo sapiens
  misc_RNA (1)...(19): siRNA sense strand
guagaagacaacaacgaua

SEQ ID NO: 574983 - RNA, 19 nt, Homo sapiens
  misc_RNA (1)...(19): siRNA sense strand
uuacggaaaucuuuagaca

SEQ ID NO: 574984 - RNA, 19 nt, Homo sapiens
  misc_RNA (1)...(19): siRNA sense strand
ggaaguagaagacaacaac

SEQ ID NO: 574985 - RNA, 19 nt, Homo sapiens
  misc_RNA (1)...(19): siRNA sense strand
uguccaccuucaagaauua

SEQ ID NO: 574986 - RNA, 19 nt, Homo sapiens
  misc_RNA (1)...(19): siRNA sense strand
gagaagaagcuccggagau

SEQ ID NO: 574987 - RNA, 19 nt, Homo sapiens
  misc_RNA (1)...(19): siRNA sense strand
ugacagaaccauuuauaag

SEQ ID NO: 574988 - RNA, 19 nt, Homo sapiens
  misc_RNA (1)...(19): siRNA sense strand
gggacauuguuuauucauu

SEQ ID NO: 574989 - RNA, 19 nt, Homo sapiens
  misc_RNA (1)...(19): siRNA sense strand
gcagacaacugaggaaucc

SEQ ID NO: 574990 - RNA, 19 nt, Homo sapiens
  misc_RNA (1)...(19): siRNA sense strand
acuuaacgccucagauuua

SEQ ID NO: 574991 - RNA, 19 nt, Homo sapiens
  misc_RNA (1)...(19): siRNA sense strand
caacgauaaugucccagau

SEQ ID NO: 574992 - RNA, 19 nt, Homo sapiens
  misc_RNA (1)...(19): siRNA sense strand
guagaguuauuguggaagu

SEQ ID NO: 574993 - RNA, 19 nt, Homo sapiens
  misc_RNA (1)...(19): siRNA sense strand
cgccaaaugugaaauccaa

SEQ ID NO: 574994 - RNA, 19 nt, Homo sapiens
  misc_RNA (1)...(19): siRNA sense strand
gcuguacacuggcgagauc

SEQ ID NO: 574995 - RNA, 19 nt, Homo sapiens
  misc_RNA (1)...(19): siRNA sense strand
acagaaccauuuauaaggu

SEQ ID NO: 574996 - RNA, 19 nt, Homo sapiens
  misc_RNA (1)...(19): siRNA sense strand
ggaacggucagcuccacua

SEQ ID NO: 574997 - RNA, 19 nt, Homo sapiens
  misc_RNA (1)...(19): siRNA sense strand
aauccaaguuucacauaga

SEQ ID NO: 574998 - RNA, 19 nt, Homo sapiens
  misc_RNA (1)...(19): siRNA sense strand
gggauauauugacuuugaa

SEQ ID NO: 574999 - RNA, 19 nt, Homo sapiens
  misc_RNA (1)...(19): siRNA sense strand
gcucacagccacugaugga

SEQ ID NO: 575000 - RNA, 19 nt, Homo sapiens
  misc_RNA (1)...(19): siRNA sense strand
gauaaugucccagauuugg

SEQ ID NO: 575001 - RNA, 19 nt, Homo sapiens
  misc_RNA (1)...(19): siRNA sense strand
gacagaaccauuuauaagg

SEQ ID NO: 575002 - RNA, 19 nt, Homo sapiens
  misc_RNA (1)...(19): siRNA sense strand
gugagggacauuaacgaua

SEQ ID NO: 575003 - RNA, 19 nt, Homo sapiens
  misc_RNA (1)...(19): siRNA sense strand
ccacugugcuggugucacu

SEQ ID NO: 575004 - RNA, 19 nt, Homo sapiens
  misc_RNA (1)...(19): siRNA sense strand
gaauucaagucuuuaucac

SEQ ID NO: 575005 - RNA, 19 nt, Homo sapiens
  misc_RNA (1)...(19): siRNA sense strand
gagaacgcccugcucacuu

SEQ ID NO: 575006 - RNA, 19 nt, Homo sapiens
  misc_RNA (1)...(19): siRNA sense strand
gauuuggaauucaagucuu

SEQ ID NO: 575007 - RNA, 19 nt, Homo sapiens
  misc_RNA (1)...(19): siRNA sense strand
gagguaaaucugcagaaug

SEQ ID NO: 575008 - RNA, 19 nt, Homo sapiens
  misc_RNA (1)...(19): siRNA sense strand
caaaugugaaauccaaguu

SEQ ID NO: 575009 - RNA, 19 nt, Homo sapiens
  misc_RNA (1)...(19): siRNA sense strand
agauuuagacgaaggauug

SEQ ID NO: 575010 - RNA, 19 nt, Homo sapiens
  misc_RNA (1)...(19): siRNA sense strand
cgccucagauuuagacgaa

SEQ ID NO: 575011 - RNA, 19 nt, Homo sapiens
  misc_RNA (1)...(19): siRNA sense strand
cugcugcucuuacuucuuc

SEQ ID NO: 575012 - RNA, 19 nt, Homo sapiens
  misc_RNA (1)...(19): siRNA sense strand
uaaggugagauuacuagaa

SEQ ID NO: 575013 - RNA, 19 nt, Homo sapiens
  misc_RNA (1)...(19): siRNA sense strand
ccgcuugacucucgguuuc

SEQ ID NO: 575014 - RNA, 19 nt, Homo sapiens
  misc_RNA (1)...(19): siRNA sense strand
aagaucagcugcagacaac

SEQ ID NO: 575015 - RNA, 19 nt, Homo sapiens
  misc_RNA (1)...(19): siRNA sense strand
ugguggaugucaacguaua

SEQ ID NO: 575016 - RNA, 19 nt, Homo sapiens
  misc_RNA (1)...(19): siRNA sense strand
guacagucaucgcccugau

SEQ ID NO: 575017 - RNA, 19 nt, Homo sapiens
  misc_RNA (1)...(19): siRNA sense strand
ugaagaaagcaaauccuau

SEQ ID NO: 575018 - RNA, 19 nt, Homo sapiens
  misc_RNA (1)...(19): siRNA sense strand
agguaaaucugcagaaugg

SEQ ID NO: 575019 - RNA, 19 nt, Homo sapiens
  misc_RNA (1)...(19): siRNA sense strand
gacugagcccaaaugaaua

SEQ ID NO: 575020 - RNA, 19 nt, Homo sapiens
  misc_RNA (1)...(19): siRNA sense strand
uggcugaugugaacgacaa

SEQ ID NO: 575021 - RNA, 19 nt, Homo sapiens
  misc_RNA (1)...(19): siRNA sense strand
ccauuuauaaggugagauu

SEQ ID NO: 575022 - RNA, 19 nt, Homo sapiens
  misc_RNA (1)...(19): siRNA sense strand
ggucuugggcuuauauuac

SEQ ID NO: 575023 - RNA, 19 nt, Homo sapiens
  misc_RNA (1)...(19): siRNA sense strand
uaaaaggucuugggcuuau

SEQ ID NO: 575024 - RNA, 19 nt, Homo sapiens
  misc_RNA (1)...(19): siRNA sense strand
guguccaccuucaagaauu

SEQ ID NO: 575025 - RNA, 19 nt, Homo sapiens
  misc_RNA (1)...(19): siRNA sense strand
uagaaaauguuccuaaugg

SEQ ID NO: 575026 - RNA, 19 nt, Homo sapiens
  misc_RNA (1)...(19): siRNA sense strand
acgcguggcuuucguacga

SEQ ID NO: 575027 - RNA, 19 nt, Homo sapiens
  misc_RNA (1)...(19): siRNA sense strand
cuuuaucacuuccaauuag

SEQ ID NO: 575028 - RNA, 19 nt, Homo sapiens
  misc_RNA (1)...(19): siRNA sense strand
agaaagcaaauccuaugaa

SEQ ID NO: 575029 - RNA, 19 nt, Homo sapiens
  misc_RNA (1)...(19): siRNA sense strand
ucuggccauuguagaguua

SEQ ID NO: 575030 - RNA, 19 nt, Homo sapiens
  misc_RNA (1)...(19): siRNA sense strand
ucaagaauuacuacucguu

SEQ ID NO: 575031 - RNA, 19 nt, Homo sapiens
  misc_RNA (1)...(19): siRNA sense strand
gaguuauuguggaaguaga

SEQ ID NO: 575032 - RNA, 19 nt, Homo sapiens
  misc_RNA (1)...(19): siRNA sense strand
ggagaacgcccugcucacu

SEQ ID NO: 575033 - RNA, 19 nt, Homo sapiens
  misc_RNA (1)...(19): siRNA sense strand
gaucagcugcagacaacug

SEQ ID NO: 575034 - RNA, 19 nt, Homo sapiens
  misc_RNA (1)...(19): siRNA sense strand
uagaguuauuguggaagua

SEQ ID NO: 575035 - RNA, 19 nt, Homo sapiens
  misc_RNA (1)...(19): siRNA sense strand
gacaggccgcugcagguuu

SEQ ID NO: 575036 - RNA, 19 nt, Homo sapiens
  misc_RNA (1)...(19): siRNA sense strand
gaaaucuuuagacagagaa

SEQ ID NO: 575037 - RNA, 19 nt, Homo sapiens
  misc_RNA (1)...(19): siRNA sense strand
gaggccuucuggagguaaa

SEQ ID NO: 575038 - RNA, 19 nt, Homo sapiens
  misc_RNA (1)...(19): siRNA sense strand
gcugccacaucuucacugu

SEQ ID NO: 575039 - RNA, 19 nt, Homo sapiens
  misc_RNA (1)...(19): siRNA sense strand
ucccagauuuggaauucaa

SEQ ID NO: 575040 - RNA, 19 nt, Homo sapiens
  misc_RNA (1)...(19): siRNA sense strand
uaaugucccagauuuggaa

SEQ ID NO: 575041 - RNA, 19 nt, Homo sapiens
  misc_RNA (1)...(19): siRNA sense strand
aaauccaaguuucacauag

SEQ ID NO: 575042 - RNA, 19 nt, Homo sapiens
  misc_RNA (1)...(19): siRNA sense strand
guagagggcauugauaagg

SEQ ID NO: 575043 - RNA, 19 nt, Homo sapiens
  misc_RNA (1)...(19): siRNA sense strand
gagcuacguuucggugcau

SEQ ID NO: 575044 - RNA, 19 nt, Homo sapiens
  misc_RNA (1)...(19): siRNA sense strand
guaaaaggucuugggcuua

SEQ ID NO: 575045 - RNA, 19 nt, Homo sapiens
  misc_RNA (1)...(19): siRNA sense strand
gacucucgguuuccacuag

SEQ ID NO: 575046 - RNA, 19 nt, Homo sapiens
  misc_RNA (1)...(19): siRNA sense strand
aagaaagcaaauccuauga

SEQ ID NO: 575047 - RNA, 19 nt, Homo sapiens
  misc_RNA (1)...(19): siRNA sense strand
gcauuuuguuugugaauuc

SEQ ID NO: 575048 - RNA, 19 nt, Homo sapiens
  misc_RNA (1)...(19): siRNA sense strand
ggaggcaaacccgaguuga

SEQ ID NO: 575049 - RNA, 19 nt, Homo sapiens
  misc_RNA (1)...(19): siRNA sense strand
ccaguuuaccugacucuag

SEQ ID NO: 575050 - RNA, 19 nt, Homo sapiens
  misc_RNA (1)...(19): siRNA sense strand
augcugcgcugguggaugu

SEQ ID NO: 575051 - RNA, 19 nt, Homo sapiens
  misc_RNA (1)...(19): siRNA sense strand
cuggucaccugcuccuuga

SEQ ID NO: 575052 - RNA, 19 nt, Homo sapiens
  misc_RNA (1)...(19): siRNA sense strand
ugucccagauuuggaauuc

SEQ ID NO: 575053 - RNA, 19 nt, Homo sapiens
  misc_RNA (1)...(19): siRNA sense strand
uauaaggugagauuacuag

SEQ ID NO: 575054 - RNA, 19 nt, Homo sapiens
  misc_RNA (1)...(19): siRNA sense strand
caaauucguuguugacuua

SEQ ID NO: 575055 - RNA, 19 nt, Homo sapiens
  misc_RNA (1)...(19): siRNA sense strand
uaacauagauuucgaggaa

SEQ ID NO: 575056 - RNA, 19 nt, Homo sapiens
  misc_RNA (1)...(19): siRNA sense strand
gcagauaucggaacaaauu

SEQ ID NO: 575057 - RNA, 19 nt, Homo sapiens
  misc_RNA (1)...(19): siRNA sense strand
uuagaagacucuccacuua

SEQ ID NO: 575058 - RNA, 19 nt, Homo sapiens
  misc_RNA (1)...(19): siRNA sense strand
ggacaugucagcagauauu

SEQ ID NO: 575059 - RNA, 19 nt, Homo sapiens
  misc_RNA (1)...(19): siRNA sense strand
caacuaaagaucacuguuu

SEQ ID NO: 575060 - RNA, 19 nt, Homo sapiens
  misc_RNA (1)...(19): siRNA sense strand
gcacaguucuacucgaaau

SEQ ID NO: 575061 - RNA, 19 nt, Homo sapiens
  misc_RNA (1)...(19): siRNA sense strand
gaaacaggauguggacguu

SEQ ID NO: 575062 - RNA, 19 nt, Homo sapiens
  misc_RNA (1)...(19): siRNA sense strand
ugaaggacauuaaugacaa

SEQ ID NO: 575063 - RNA, 19 nt, Homo sapiens
  misc_RNA (1)...(19): siRNA sense strand
aaagucagauuacucgaaa

SEQ ID NO: 575064 - RNA, 19 nt, Homo sapiens
  misc_RNA (1)...(19): siRNA sense strand
cgauuuggaugaaggagua

SEQ ID NO: 575065 - RNA, 19 nt, Homo sapiens
  misc_RNA (1)...(19): siRNA sense strand
uaauguaccugaguuaguu

SEQ ID NO: 575066 - RNA, 19 nt, Homo sapiens
  misc_RNA (1)...(19): siRNA sense strand
ccauuuagauccagucaau

SEQ ID NO: 575067 - RNA, 19 nt, Homo sapiens
  misc_RNA (1)...(19): siRNA sense strand
ggagguaaaucugcagaau

SEQ ID NO: 575068 - RNA, 19 nt, Homo sapiens
  misc_RNA (1)...(19): siRNA sense strand
agaccgaccucauggcuuu

SEQ ID NO: 575069 - RNA, 19 nt, Homo sapiens
  misc_RNA (1)...(19): siRNA sense strand
gaagugaaggacauuaaug

SEQ ID NO: 575070 - RNA, 19 nt, Homo sapiens
  misc_RNA (1)...(19): siRNA sense strand
acgcguggcuuucguauga

SEQ ID NO: 575071 - RNA, 19 nt, Homo sapiens
  misc_RNA (1)...(19): siRNA sense strand
cauaugaaauccagguaga

SEQ ID NO: 575072 - RNA, 19 nt, Homo sapiens
  misc_RNA (1)...(19): siRNA sense strand
auaaggauaucgcguauuc

SEQ ID NO: 575073 - RNA, 19 nt, Homo sapiens
  misc_RNA (1)...(19): siRNA sense strand
ucacacugcugcuauauac

SEQ ID NO: 575074 - RNA, 19 nt, Homo sapiens
  misc_RNA (1)...(19): siRNA sense strand
gaaggaguaaauaaggaua

SEQ ID NO: 575075 - RNA, 19 nt, Homo sapiens
  misc_RNA (1)...(19): siRNA sense strand
uccaauggcuguaaagaau

SEQ ID NO: 575076 - RNA, 19 nt, Homo sapiens
  misc_RNA (1)...(19): siRNA sense strand
ggacaaaucaguguaaagg

SEQ ID NO: 575077 - RNA, 19 nt, Homo sapiens
  misc_RNA (1)...(19): siRNA sense strand
ggauaucgcguauucuuuc

SEQ ID NO: 575078 - RNA, 19 nt, Homo sapiens
  misc_RNA (1)...(19): siRNA sense strand
ggacacuccuaagcauuau

SEQ ID NO: 575079 - RNA, 19 nt, Homo sapiens
  misc_RNA (1)...(19): siRNA sense strand
caagaauuacuacucauug

SEQ ID NO: 575080 - RNA, 19 nt, Homo sapiens
  misc_RNA (1)...(19): siRNA sense strand
ggaaaguaagucauaugaa

SEQ ID NO: 575081 - RNA, 19 nt, Homo sapiens
  misc_RNA (1)...(19): siRNA sense strand
gacgaucuauaaagucaga

SEQ ID NO: 575082 - RNA, 19 nt, Homo sapiens
  misc_RNA (1)...(19): siRNA sense strand
uguccaccuucaagaauua

SEQ ID NO: 575083 - RNA, 19 nt, Homo sapiens
  misc_RNA (1)...(19): siRNA sense strand
guaccugaguuaguuauuc

SEQ ID NO: 575084 - RNA, 19 nt, Homo sapiens
  misc_RNA (1)...(19): siRNA sense strand
gcacagucaucgcucugau

SEQ ID NO: 575085 - RNA, 19 nt, Homo sapiens
  misc_RNA (1)...(19): siRNA sense strand
agaggacgaucuauaaagu

SEQ ID NO: 575086 - RNA, 19 nt, Homo sapiens
  misc_RNA (1)...(19): siRNA sense strand
gguagaagccacggauaaa

SEQ ID NO: 575087 - RNA, 19 nt, Homo sapiens
  misc_RNA (1)...(19): siRNA sense strand
aaauaaggauaucgcguau

SEQ ID NO: 575088 - RNA, 19 nt, Homo sapiens
  misc_RNA (1)...(19): siRNA sense strand
ggaagugaaggacauuaau

SEQ ID NO: 575089 - RNA, 19 nt, Homo sapiens
  misc_RNA (1)...(19): siRNA sense strand
guaaaggguaacauagauu

SEQ ID NO: 575090 - RNA, 19 nt, Homo sapiens
  misc_RNA (1)...(19): siRNA sense strand
gauaucgcguauucuuuca

SEQ ID NO: 575091 - RNA, 19 nt, Homo sapiens
  misc_RNA (1)...(19): siRNA sense strand
gcacgacucaacuaaagau

SEQ ID NO: 575092 - RNA, 19 nt, Homo sapiens
  misc_RNA (1)...(19): siRNA sense strand
cuucaagaauuacuacuca

SEQ ID NO: 575093 - RNA, 19 nt, Homo sapiens
  misc_RNA (1)...(19): siRNA sense strand
cgaggaaaguaagucauau

SEQ ID NO: 575094 - RNA, 19 nt, Homo sapiens
  misc_RNA (1)...(19): siRNA sense strand
uguaaaggguaacauagau

SEQ ID NO: 575095 - RNA, 19 nt, Homo sapiens
  misc_RNA (1)...(19): siRNA sense strand
gagaggacgaucuauaaag

SEQ ID NO: 575096 - RNA, 19 nt, Homo sapiens
  misc_RNA (1)...(19): siRNA sense strand
ggagagggguugcccaaga

SEQ ID NO: 575097 - RNA, 19 nt, Homo sapiens
  misc_RNA (1)...(19): siRNA sense strand
agaacgcccugguguccua

SEQ ID NO: 575098 - RNA, 19 nt, Homo sapiens
  misc_RNA (1)...(19): siRNA sense strand
guuugugaauucucggaua

SEQ ID NO: 575099 - RNA, 19 nt, Homo sapiens
  misc_RNA (1)...(19): siRNA sense strand
cuuccuccuuguccaauua

SEQ ID NO: 575100 - RNA, 19 nt, Homo sapiens
  misc_RNA (1)...(19): siRNA sense strand
gaaggacauuaaugacaac

SEQ ID NO: 575101 - RNA, 19 nt, Homo sapiens
  misc_RNA (1)...(19): siRNA sense strand
ucacuaucuuuaccuguau

SEQ ID NO: 575102 - RNA, 19 nt, Homo sapiens
  misc_RNA (1)...(19): siRNA sense strand
ccaauuagccgggauagag

SEQ ID NO: 575103 - RNA, 19 nt, Homo sapiens
  misc_RNA (1)...(19): siRNA sense strand
ggaaauuaaaucccuugga

SEQ ID NO: 575104 - RNA, 19 nt, Homo sapiens
  misc_RNA (1)...(19): siRNA sense strand
gagaggagaaacaggaugu

SEQ ID NO: 575105 - RNA, 19 nt, Homo sapiens
  misc_RNA (1)...(19): siRNA sense strand
gaugaaggaguaaauaagg

SEQ ID NO: 575106 - RNA, 19 nt, Homo sapiens
  misc_RNA (1)...(19): siRNA sense strand
ggaugaaggaguaaauaag

SEQ ID NO: 575107 - RNA, 19 nt, Homo sapiens
  misc_RNA (1)...(19): siRNA sense strand
uaaagucagauuacucgaa

SEQ ID NO: 575108 - RNA, 19 nt, Homo sapiens
  misc_RNA (1)...(19): siRNA sense strand
gcccagugccugcugcuuu

SEQ ID NO: 575109 - RNA, 19 nt, Homo sapiens
  misc_RNA (1)...(19): siRNA sense strand
aagcugcacugguggaugu

SEQ ID NO: 575110 - RNA, 19 nt, Homo sapiens
  misc_RNA (1)...(19): siRNA sense strand
gagguaaaucugcagaaug

SEQ ID NO: 575111 - RNA, 19 nt, Homo sapiens
  misc_RNA (1)...(19): siRNA sense strand
gaggaaaguaagucauaug

SEQ ID NO: 575112 - RNA, 19 nt, Homo sapiens
  misc_RNA (1)...(19): siRNA sense strand
cuaauaacagcaauugaug

SEQ ID NO: 575113 - RNA, 19 nt, Homo sapiens
  misc_RNA (1)...(19): siRNA sense strand
ucgaggaaaguaagucaua

SEQ ID NO: 575114 - RNA, 19 nt, Homo sapiens
  misc_RNA (1)...(19): siRNA sense strand
caauggcuguaaagaaucu

SEQ ID NO: 575115 - RNA, 19 nt, Homo sapiens
  misc_RNA (1)...(19): siRNA sense strand
uaccugaguuaguuauuca

SEQ ID NO: 575116 - RNA, 19 nt, Homo sapiens
  misc_RNA (1)...(19): siRNA sense strand
cugcacaguucuacucgaa

SEQ ID NO: 575117 - RNA, 19 nt, Homo sapiens
  misc_RNA (1)...(19): siRNA sense strand
agguaaaucugcagaaugg

SEQ ID NO: 575118 - RNA, 19 nt, Homo sapiens
  misc_RNA (1)...(19): siRNA sense strand
uugagaggacgaucuauaa

SEQ ID NO: 575119 - RNA, 19 nt, Homo sapiens
  misc_RNA (1)...(19): siRNA sense strand
gaucacuguuuuagaugua

SEQ ID NO: 575120 - RNA, 19 nt, Homo sapiens
  misc_RNA (1)...(19): siRNA sense strand
uggcacgacucaacuaaag

SEQ ID NO: 575121 - RNA, 19 nt, Homo sapiens
  misc_RNA (1)...(19): siRNA sense strand
ugagaggacgaucuauaaa

SEQ ID NO: 575122 - RNA, 19 nt, Homo sapiens
  misc_RNA (1)...(19): siRNA sense strand
uaucgcguauucuuucaau

SEQ ID NO: 575123 - RNA, 19 nt, Homo sapiens
  misc_RNA (1)...(19): siRNA sense strand
aacaggauguggacguuga

SEQ ID NO: 575124 - RNA, 19 nt, Homo sapiens
  misc_RNA (1)...(19): siRNA sense strand
gcccaagaccgaccucaug

SEQ ID NO: 575125 - RNA, 19 nt, Homo sapiens
  misc_RNA (1)...(19): siRNA sense strand
guguccaccuucaagaauu

SEQ ID NO: 575126 - RNA, 19 nt, Homo sapiens
  misc_RNA (1)...(19): siRNA sense strand
caguguaaaggguaacaua

SEQ ID NO: 575127 - RNA, 19 nt, Homo sapiens
  misc_RNA (1)...(19): siRNA sense strand
acacuccuaagcauuauuu

SEQ ID NO: 575128 - RNA, 19 nt, Homo sapiens
  misc_RNA (1)...(19): siRNA sense strand
gaaggugcgcgcaguggau

SEQ ID NO: 575129 - RNA, 19 nt, Homo sapiens
  misc_RNA (1)...(19): siRNA sense strand
uggaugaaggaguaaauaa

SEQ ID NO: 575130 - RNA, 19 nt, Homo sapiens
  misc_RNA (1)...(19): siRNA sense strand
ugauaauguaccugaguua

SEQ ID NO: 575131 - RNA, 19 nt, Homo sapiens
  misc_RNA (1)...(19): siRNA sense strand
gauaauguaccugaguuag

SEQ ID NO: 575132 - RNA, 19 nt, Homo sapiens
  misc_RNA (1)...(19): siRNA sense strand
augcagauaucggaacaaa

SEQ ID NO: 575133 - RNA, 19 nt, Homo sapiens
  misc_RNA (1)...(19): siRNA sense strand
caauuagccgggauagaga

SEQ ID NO: 575134 - RNA, 19 nt, Homo sapiens
  misc_RNA (1)...(19): siRNA sense strand
ggugaaggaccacggugaa

SEQ ID NO: 575135 - RNA, 19 nt, Homo sapiens
  misc_RNA (1)...(19): siRNA sense strand
aggacgaucuauaaaguca

SEQ ID NO: 575136 - RNA, 19 nt, Homo sapiens
  misc_RNA (1)...(19): siRNA sense strand
gugaaggacauuaaugaca

SEQ ID NO: 575137 - RNA, 19 nt, Homo sapiens
  misc_RNA (1)...(19): siRNA sense strand
aaaucaguguaaaggguaa

SEQ ID NO: 575138 - RNA, 19 nt, Homo sapiens
  misc_RNA (1)...(19): siRNA sense strand
gacaggccgcugcagguuu

SEQ ID NO: 575139 - RNA, 19 nt, Homo sapiens
  misc_RNA (1)...(19): siRNA sense strand
aaugacaacgcgccaguuu

SEQ ID NO: 575140 - RNA, 19 nt, Homo sapiens
  misc_RNA (1)...(19): siRNA sense strand
ggauagaccgcgaggaacu

SEQ ID NO: 575141 - RNA, 19 nt, Homo sapiens
  misc_RNA (1)...(19): siRNA sense strand
cgcaguggaugcagacuca

SEQ ID NO: 575142 - RNA, 19 nt, Homo sapiens
  misc_RNA (1)...(19): siRNA sense strand
agaagacucuccacuuagc

SEQ ID NO: 575143 - RNA, 19 nt, Homo sapiens
  misc_RNA (1)...(19): siRNA sense strand
guguaaaggguaacauaga

SEQ ID NO: 575144 - RNA, 19 nt, Homo sapiens
  misc_RNA (1)...(19): siRNA sense strand
cgacucaacuaaagaucac

SEQ ID NO: 575145 - RNA, 19 nt, Homo sapiens
  misc_RNA (1)...(19): siRNA sense strand
aagaauuacuacucauugg

SEQ ID NO: 575146 - RNA, 19 nt, Homo sapiens
  misc_RNA (1)...(19): siRNA sense strand
uaacgccaccgauuuggau

SEQ ID NO: 575147 - RNA, 19 nt, Homo sapiens
  misc_RNA (1)...(19): siRNA sense strand
aagugaaggacauuaauga

SEQ ID NO: 575148 - RNA, 19 nt, Homo sapiens
  misc_RNA (1)...(19): siRNA sense strand
acggacaugucagcagaua

SEQ ID NO: 575149 - RNA, 19 nt, Homo sapiens
  misc_RNA (1)...(19): siRNA sense strand
aucacuaucuuuaccugua

SEQ ID NO: 575150 - RNA, 19 nt, Homo sapiens
  misc_RNA (1)...(19): siRNA sense strand
aggaaaguaagucauauga

SEQ ID NO: 575151 - RNA, 19 nt, Homo sapiens
  misc_RNA (1)...(19): siRNA sense strand
caauggacaaaucagugua

SEQ ID NO: 575152 - RNA, 19 nt, Homo sapiens
  misc_RNA (1)...(19): siRNA sense strand
ugguggaugucaacgugua

SEQ ID NO: 575153 - RNA, 19 nt, Homo sapiens
  misc_RNA (1)...(19): siRNA sense strand
ggaugucaacguguacuug

SEQ ID NO: 575154 - RNA, 19 nt, Homo sapiens
  misc_RNA (1)...(19): siRNA sense strand
caaauucguuguugacuua

SEQ ID NO: 575155 - RNA, 19 nt, Homo sapiens
  misc_RNA (1)...(19): siRNA sense strand
uaacauagauuucgaggaa

SEQ ID NO: 575156 - RNA, 19 nt, Homo sapiens
  misc_RNA (1)...(19): siRNA sense strand
gcagauaucggaacaaauu

SEQ ID NO: 575157 - RNA, 19 nt, Homo sapiens
  misc_RNA (1)...(19): siRNA sense strand
uuagaagacucuccacuua

SEQ ID NO: 575158 - RNA, 19 nt, Homo sapiens
  misc_RNA (1)...(19): siRNA sense strand
ggacaugucagcagauauu

SEQ ID NO: 575159 - RNA, 19 nt, Homo sapiens
  misc_RNA (1)...(19): siRNA sense strand
caacuaaagaucacuguuu

SEQ ID NO: 575160 - RNA, 19 nt, Homo sapiens
  misc_RNA (1)...(19): siRNA sense strand
gcacaguucuacucgaaau

SEQ ID NO: 575161 - RNA, 19 nt, Homo sapiens
  misc_RNA (1)...(19): siRNA sense strand
gaaacaggauguggacguu

SEQ ID NO: 575162 - RNA, 19 nt, Homo sapiens
  misc_RNA (1)...(19): siRNA sense strand
ugaaggacauuaaugacaa

SEQ ID NO: 575163 - RNA, 19 nt, Homo sapiens
  misc_RNA (1)...(19): siRNA sense strand
aaagucagauuacucgaaa

SEQ ID NO: 575164 - RNA, 19 nt, Homo sapiens
  misc_RNA (1)...(19): siRNA sense strand
cgauuuggaugaaggagua

SEQ ID NO: 575165 - RNA, 19 nt, Homo sapiens
  misc_RNA (1)...(19): siRNA sense strand
uaauguaccugaguuaguu

SEQ ID NO: 575166 - RNA, 19 nt, Homo sapiens
  misc_RNA (1)...(19): siRNA sense strand
ccauuuagauccagucaau

SEQ ID NO: 575167 - RNA, 19 nt, Homo sapiens
  misc_RNA (1)...(19): siRNA sense strand
ggagguaaaucugcagaau

SEQ ID NO: 575168 - RNA, 19 nt, Homo sapiens
  misc_RNA (1)...(19): siRNA sense strand
agaccgaccucauggcuuu

SEQ ID NO: 575169 - RNA, 19 nt, Homo sapiens
  misc_RNA (1)...(19): siRNA sense strand
gaagugaaggacauuaaug

SEQ ID NO: 575170 - RNA, 19 nt, Homo sapiens
  misc_RNA (1)...(19): siRNA sense strand
acgcguggcuuucguauga

SEQ ID NO: 575171 - RNA, 19 nt, Homo sapiens
  misc_RNA (1)...(19): siRNA sense strand
cauaugaaauccagguaga

SEQ ID NO: 575172 - RNA, 19 nt, Homo sapiens
  misc_RNA (1)...(19): siRNA sense strand
auaaggauaucgcguauuc

SEQ ID NO: 575173 - RNA, 19 nt, Homo sapiens
  misc_RNA (1)...(19): siRNA sense strand
ucacacugcugcuauauac

SEQ ID NO: 575174 - RNA, 19 nt, Homo sapiens
  misc_RNA (1)...(19): siRNA sense strand
gaaggaguaaauaaggaua

SEQ ID NO: 575175 - RNA, 19 nt, Homo sapiens
  misc_RNA (1)...(19): siRNA sense strand
uccaauggcuguaaagaau

SEQ ID NO: 575176 - RNA, 19 nt, Homo sapiens
  misc_RNA (1)...(19): siRNA sense strand
ggacaaaucaguguaaagg

SEQ ID NO: 575177 - RNA, 19 nt, Homo sapiens
  misc_RNA (1)...(19): siRNA sense strand
ggauaucgcguauucuuuc

SEQ ID NO: 575178 - RNA, 19 nt, Homo sapiens
  misc_RNA (1)...(19): siRNA sense strand
ggacacuccuaagcauuau

SEQ ID NO: 575179 - RNA, 19 nt, Homo sapiens
  misc_RNA (1)...(19): siRNA sense strand
caagaauuacuacucauug

SEQ ID NO: 575180 - RNA, 19 nt, Homo sapiens
  misc_RNA (1)...(19): siRNA sense strand
ggaaaguaagucauaugaa

SEQ ID NO: 575181 - RNA, 19 nt, Homo sapiens
  misc_RNA (1)...(19): siRNA sense strand
gacgaucuauaaagucaga

SEQ ID NO: 575182 - RNA, 19 nt, Homo sapiens
  misc_RNA (1)...(19): siRNA sense strand
uguccaccuucaagaauua

SEQ ID NO: 575183 - RNA, 19 nt, Homo sapiens
  misc_RNA (1)...(19): siRNA sense strand
guaccugaguuaguuauuc

SEQ ID NO: 575184 - RNA, 19 nt, Homo sapiens
  misc_RNA (1)...(19): siRNA sense strand
gcacagucaucgcucugau

SEQ ID NO: 575185 - RNA, 19 nt, Homo sapiens
  misc_RNA (1)...(19): siRNA sense strand
agaggacgaucuauaaagu

SEQ ID NO: 575186 - RNA, 19 nt, Homo sapiens
  misc_RNA (1)...(19): siRNA sense strand
gguagaagccacggauaaa

SEQ ID NO: 575187 - RNA, 19 nt, Homo sapiens
  misc_RNA (1)...(19): siRNA sense strand
aaauaaggauaucgcguau

SEQ ID NO: 575188 - RNA, 19 nt, Homo sapiens
  misc_RNA (1)...(19): siRNA sense strand
ggaagugaaggacauuaau

SEQ ID NO: 575189 - RNA, 19 nt, Homo sapiens
  misc_RNA (1)...(19): siRNA sense strand
guaaaggguaacauagauu

SEQ ID NO: 575190 - RNA, 19 nt, Homo sapiens
  misc_RNA (1)...(19): siRNA sense strand
gauaucgcguauucuuuca

SEQ ID NO: 575191 - RNA, 19 nt, Homo sapiens
  misc_RNA (1)...(19): siRNA sense strand
gcacgacucaacuaaagau

SEQ ID NO: 575192 - RNA, 19 nt, Homo sapiens
  misc_RNA (1)...(19): siRNA sense strand
cuucaagaauuacuacuca

SEQ ID NO: 575193 - RNA, 19 nt, Homo sapiens
  misc_RNA (1)...(19): siRNA sense strand
cgaggaaaguaagucauau

SEQ ID NO: 575194 - RNA, 19 nt, Homo sapiens
  misc_RNA (1)...(19): siRNA sense strand
uguaaaggguaacauagau

SEQ ID NO: 575195 - RNA, 19 nt, Homo sapiens
  misc_RNA (1)...(19): siRNA sense strand
gagaggacgaucuauaaag

SEQ ID NO: 575196 - RNA, 19 nt, Homo sapiens
  misc_RNA (1)...(19): siRNA sense strand
ggagagggguugcccaaga

SEQ ID NO: 575197 - RNA, 19 nt, Homo sapiens
  misc_RNA (1)...(19): siRNA sense strand
agaacgcccugguguccua

SEQ ID NO: 575198 - RNA, 19 nt, Homo sapiens
  misc_RNA (1)...(19): siRNA sense strand
guuugugaauucucggaua

SEQ ID NO: 575199 - RNA, 19 nt, Homo sapiens
  misc_RNA (1)...(19): siRNA sense strand
cuuccuccuuguccaauua

SEQ ID NO: 575200 - RNA, 19 nt, Homo sapiens
  misc_RNA (1)...(19): siRNA sense strand
gaaggacauuaaugacaac

SEQ ID NO: 575201 - RNA, 19 nt, Homo sapiens
  misc_RNA (1)...(19): siRNA sense strand
ucacuaucuuuaccuguau

SEQ ID NO: 575202 - RNA, 19 nt, Homo sapiens
  misc_RNA (1)...(19): siRNA sense strand
ccaauuagccgggauagag

SEQ ID NO: 575203 - RNA, 19 nt, Homo sapiens
  misc_RNA (1)...(19): siRNA sense strand
ggaaauuaaaucccuugga

SEQ ID NO: 575204 - RNA, 19 nt, Homo sapiens
  misc_RNA (1)...(19): siRNA sense strand
gagaggagaaacaggaugu

SEQ ID NO: 575205 - RNA, 19 nt, Homo sapiens
  misc_RNA (1)...(19): siRNA sense strand
gaugaaggaguaaauaagg

SEQ ID NO: 575206 - RNA, 19 nt, Homo sapiens
  misc_RNA (1)...(19): siRNA sense strand
ggaugaaggaguaaauaag

SEQ ID NO: 575207 - RNA, 19 nt, Homo sapiens
  misc_RNA (1)...(19): siRNA sense strand
uaaagucagauuacucgaa

SEQ ID NO: 575208 - RNA, 19 nt, Homo sapiens
  misc_RNA (1)...(19): siRNA sense strand
gcccagugccugcugcuuu

SEQ ID NO: 575209 - RNA, 19 nt, Homo sapiens
  misc_RNA (1)...(19): siRNA sense strand
aagcugcacugguggaugu

SEQ ID NO: 575210 - RNA, 19 nt, Homo sapiens
  misc_RNA (1)...(19): siRNA sense strand
gagguaaaucugcagaaug

SEQ ID NO: 575211 - RNA, 19 nt, Homo sapiens
  misc_RNA (1)...(19): siRNA sense strand
gaggaaaguaagucauaug

SEQ ID NO: 575212 - RNA, 19 nt, Homo sapiens
  misc_RNA (1)...(19): siRNA sense strand
cuaauaacagcaauugaug

SEQ ID NO: 575213 - RNA, 19 nt, Homo sapiens
  misc_RNA (1)...(19): siRNA sense strand
ucgaggaaaguaagucaua

SEQ ID NO: 575214 - RNA, 19 nt, Homo sapiens
  misc_RNA (1)...(19): siRNA sense strand
caauggcuguaaagaaucu

SEQ ID NO: 575215 - RNA, 19 nt, Homo sapiens
  misc_RNA (1)...(19): siRNA sense strand
uaccugaguuaguuauuca

SEQ ID NO: 575216 - RNA, 19 nt, Homo sapiens
  misc_RNA (1)...(19): siRNA sense strand
cugcacaguucuacucgaa

SEQ ID NO: 575217 - RNA, 19 nt, Homo sapiens
  misc_RNA (1)...(19): siRNA sense strand
agguaaaucugcagaaugg

SEQ ID NO: 575218 - RNA, 19 nt, Homo sapiens
  misc_RNA (1)...(19): siRNA sense strand
uugagaggacgaucuauaa

SEQ ID NO: 575219 - RNA, 19 nt, Homo sapiens
  misc_RNA (1)...(19): siRNA sense strand
gaucacuguuuuagaugua

SEQ ID NO: 575220 - RNA, 19 nt, Homo sapiens
  misc_RNA (1)...(19): siRNA sense strand
uggcacgacucaacuaaag

SEQ ID NO: 575221 - RNA, 19 nt, Homo sapiens
  misc_RNA (1)...(19): siRNA sense strand
ugagaggacgaucuauaaa

SEQ ID NO: 575222 - RNA, 19 nt, Homo sapiens
  misc_RNA (1)...(19): siRNA sense strand
uaucgcguauucuuucaau

SEQ ID NO: 575223 - RNA, 19 nt, Homo sapiens
  misc_RNA (1)...(19): siRNA sense strand
aacaggauguggacguuga

SEQ ID NO: 575224 - RNA, 19 nt, Homo sapiens
  misc_RNA (1)...(19): siRNA sense strand
gcccaagaccgaccucaug

SEQ ID NO: 575225 - RNA, 19 nt, Homo sapiens
  misc_RNA (1)...(19): siRNA sense strand
guguccaccuucaagaauu

SEQ ID NO: 575226 - RNA, 19 nt, Homo sapiens
  misc_RNA (1)...(19): siRNA sense strand
caguguaaaggguaacaua

SEQ ID NO: 575227 - RNA, 19 nt, Homo sapiens
  misc_RNA (1)...(19): siRNA sense strand
acacuccuaagcauuauuu

SEQ ID NO: 575228 - RNA, 19 nt, Homo sapiens
  misc_RNA (1)...(19): siRNA sense strand
gaaggugcgcgcaguggau

SEQ ID NO: 575229 - RNA, 19 nt, Homo sapiens
  misc_RNA (1)...(19): siRNA sense strand
uggaugaaggaguaaauaa

SEQ ID NO: 575230 - RNA, 19 nt, Homo sapiens
  misc_RNA (1)...(19): siRNA sense strand
ugauaauguaccugaguua

SEQ ID NO: 575231 - RNA, 19 nt, Homo sapiens
  misc_RNA (1)...(19): siRNA sense strand
gauaauguaccugaguuag

SEQ ID NO: 575232 - RNA, 19 nt, Homo sapiens
  misc_RNA (1)...(19): siRNA sense strand
augcagauaucggaacaaa

SEQ ID NO: 575233 - RNA, 19 nt, Homo sapiens
  misc_RNA (1)...(19): siRNA sense strand
caauuagccgggauagaga

SEQ ID NO: 575234 - RNA, 19 nt, Homo sapiens
  misc_RNA (1)...(19): siRNA sense strand
ggugaaggaccacggugaa

SEQ ID NO: 575235 - RNA, 19 nt, Homo sapiens
  misc_RNA (1)...(19): siRNA sense strand
aggacgaucuauaaaguca

SEQ ID NO: 575236 - RNA, 19 nt, Homo sapiens
  misc_RNA (1)...(19): siRNA sense strand
gugaaggacauuaaugaca

SEQ ID NO: 575237 - RNA, 19 nt, Homo sapiens
  misc_RNA (1)...(19): siRNA sense strand
aaaucaguguaaaggguaa

SEQ ID NO: 575238 - RNA, 19 nt, Homo sapiens
  misc_RNA (1)...(19): siRNA sense strand
gacaggccgcugcagguuu

SEQ ID NO: 575239 - RNA, 19 nt, Homo sapiens
  misc_RNA (1)...(19): siRNA sense strand
aaugacaacgcgccaguuu

SEQ ID NO: 575240 - RNA, 19 nt, Homo sapiens
  misc_RNA (1)...(19): siRNA sense strand
ggauagaccgcgaggaacu

SEQ ID NO: 575241 - RNA, 19 nt, Homo sapiens
  misc_RNA (1)...(19): siRNA sense strand
cgcaguggaugcagacuca

SEQ ID NO: 575242 - RNA, 19 nt, Homo sapiens
  misc_RNA (1)...(19): siRNA sense strand
agaagacucuccacuuagc

SEQ ID NO: 575243 - RNA, 19 nt, Homo sapiens
  misc_RNA (1)...(19): siRNA sense strand
guguaaaggguaacauaga

SEQ ID NO: 575244 - RNA, 19 nt, Homo sapiens
  misc_RNA (1)...(19): siRNA sense strand
cgacucaacuaaagaucac

SEQ ID NO: 575245 - RNA, 19 nt, Homo sapiens
  misc_RNA (1)...(19): siRNA sense strand
aagaauuacuacucauugg

SEQ ID NO: 575246 - RNA, 19 nt, Homo sapiens
  misc_RNA (1)...(19): siRNA sense strand
uaacgccaccgauuuggau

SEQ ID NO: 575247 - RNA, 19 nt, Homo sapiens
  misc_RNA (1)...(19): siRNA sense strand
aagugaaggacauuaauga

SEQ ID NO: 575248 - RNA, 19 nt, Homo sapiens
  misc_RNA (1)...(19): siRNA sense strand
acggacaugucagcagaua

SEQ ID NO: 575249 - RNA, 19 nt, Homo sapiens
  misc_RNA (1)...(19): siRNA sense strand
aucacuaucuuuaccugua

SEQ ID NO: 575250 - RNA, 19 nt, Homo sapiens
  misc_RNA (1)...(19): siRNA sense strand
aggaaaguaagucauauga

SEQ ID NO: 575251 - RNA, 19 nt, Homo sapiens
  misc_RNA (1)...(19): siRNA sense strand
caauggacaaaucagugua

SEQ ID NO: 575252 - RNA, 19 nt, Homo sapiens
  misc_RNA (1)...(19): siRNA sense strand
ugguggaugucaacgugua

SEQ ID NO: 575253 - RNA, 19 nt, Homo sapiens
  misc_RNA (1)...(19): siRNA sense strand
ggaugucaacguguacuug

SEQ ID NO: 575254 - RNA, 19 nt, Homo sapiens
  misc_RNA (1)...(19): siRNA sense strand
ggaaaucgcuggacagaga

SEQ ID NO: 575255 - RNA, 19 nt, Homo sapiens
  misc_RNA (1)...(19): siRNA sense strand
ccaaucaguuuacaaagua

SEQ ID NO: 575256 - RNA, 19 nt, Homo sapiens
  misc_RNA (1)...(19): siRNA sense strand
uaaaugcucuucucuccua

SEQ ID NO: 575257 - RNA, 19 nt, Homo sapiens
  misc_RNA (1)...(19): siRNA sense strand
gaacuaagcgaaucuuugu

SEQ ID NO: 575258 - RNA, 19 nt, Homo sapiens
  misc_RNA (1)...(19): siRNA sense strand
cgacaacccgccaauauuu

SEQ ID NO: 575259 - RNA, 19 nt, Homo sapiens
  misc_RNA (1)...(19): siRNA sense strand
agaaacagcucucagaauc

SEQ ID NO: 575260 - RNA, 19 nt, Homo sapiens
  misc_RNA (1)...(19): siRNA sense strand
gaacagcgagauuguguau

SEQ ID NO: 575261 - RNA, 19 nt, Homo sapiens
  misc_RNA (1)...(19): siRNA sense strand
agacuaaguuuaccauaga

SEQ ID NO: 575262 - RNA, 19 nt, Homo sapiens
  misc_RNA (1)...(19): siRNA sense strand
ggaaacugcugagguuaau

SEQ ID NO: 575263 - RNA, 19 nt, Homo sapiens
  misc_RNA (1)...(19): siRNA sense strand
ugaaggacauuaacgacaa

SEQ ID NO: 575264 - RNA, 19 nt, Homo sapiens
  misc_RNA (1)...(19): siRNA sense strand
ggagguaaaucugcagaau

SEQ ID NO: 575265 - RNA, 19 nt, Homo sapiens
  misc_RNA (1)...(19): siRNA sense strand
guuaaacgcuucugaugca

SEQ ID NO: 575266 - RNA, 19 nt, Homo sapiens
  misc_RNA (1)...(19): siRNA sense strand
gguauuagauguaaaugac

SEQ ID NO: 575267 - RNA, 19 nt, Homo sapiens
  misc_RNA (1)...(19): siRNA sense strand
agaggaaacugcugagguu

SEQ ID NO: 575268 - RNA, 19 nt, Homo sapiens
  misc_RNA (1)...(19): siRNA sense strand
ccgccaauauuuccaauga

SEQ ID NO: 575269 - RNA, 19 nt, Homo sapiens
  misc_RNA (1)...(19): siRNA sense strand
gcaaaguccuacgagauuc

SEQ ID NO: 575270 - RNA, 19 nt, Homo sapiens
  misc_RNA (1)...(19): siRNA sense strand
aaugggaccuuagugguua

SEQ ID NO: 575271 - RNA, 19 nt, Homo sapiens
  misc_RNA (1)...(19): siRNA sense strand
ccagaagucucaauaacgu

SEQ ID NO: 575272 - RNA, 19 nt, Homo sapiens
  misc_RNA (1)...(19): siRNA sense strand
acagcgagauuguguauuc

SEQ ID NO: 575273 - RNA, 19 nt, Homo sapiens
  misc_RNA (1)...(19): siRNA sense strand
gcagauauaggaguaaaug

SEQ ID NO: 575274 - RNA, 19 nt, Homo sapiens
  misc_RNA (1)...(19): siRNA sense strand
acaggcaaaugaugaacua

SEQ ID NO: 575275 - RNA, 19 nt, Homo sapiens
  misc_RNA (1)...(19): siRNA sense strand
agaacgcgcugguguccua

SEQ ID NO: 575276 - RNA, 19 nt, Homo sapiens
  misc_RNA (1)...(19): siRNA sense strand
cugcugagguuaauuuguu

SEQ ID NO: 575277 - RNA, 19 nt, Homo sapiens
  misc_RNA (1)...(19): siRNA sense strand
aaacugcugagguuaauuu

SEQ ID NO: 575278 - RNA, 19 nt, Homo sapiens
  misc_RNA (1)...(19): siRNA sense strand
gccaauauuuccaaugaca

SEQ ID NO: 575279 - RNA, 19 nt, Homo sapiens
  misc_RNA (1)...(19): siRNA sense strand
uaacacaccagaagucuca

SEQ ID NO: 575280 - RNA, 19 nt, Homo sapiens
  misc_RNA (1)...(19): siRNA sense strand
gggcaccguucaaauacuu

SEQ ID NO: 575281 - RNA, 19 nt, Homo sapiens
  misc_RNA (1)...(19): siRNA sense strand
ccaaugacaguaaagacua

SEQ ID NO: 575282 - RNA, 19 nt, Homo sapiens
  misc_RNA (1)...(19): siRNA sense strand
gaaacagcucucagaauca

SEQ ID NO: 575283 - RNA, 19 nt, Homo sapiens
  misc_RNA (1)...(19): siRNA sense strand
cagacuaaguuuaccauag

SEQ ID NO: 575284 - RNA, 19 nt, Homo sapiens
  misc_RNA (1)...(19): siRNA sense strand
caaugacaguaaagacuau

SEQ ID NO: 575285 - RNA, 19 nt, Homo sapiens
  misc_RNA (1)...(19): siRNA sense strand
uguccaccuucaagaauua

SEQ ID NO: 575286 - RNA, 19 nt, Homo sapiens
  misc_RNA (1)...(19): siRNA sense strand
gauguguccuccacuauac

SEQ ID NO: 575287 - RNA, 19 nt, Homo sapiens
  misc_RNA (1)...(19): siRNA sense strand
aguaaagacuauccgguuu

SEQ ID NO: 575288 - RNA, 19 nt, Homo sapiens
  misc_RNA (1)...(19): siRNA sense strand
ugaugcagauauaggagua

SEQ ID NO: 575289 - RNA, 19 nt, Homo sapiens
  misc_RNA (1)...(19): siRNA sense strand
uaacgacaacccgccaaua

SEQ ID NO: 575290 - RNA, 19 nt, Homo sapiens
  misc_RNA (1)...(19): siRNA sense strand
aauaacgucucucucacuu

SEQ ID NO: 575291 - RNA, 19 nt, Homo sapiens
  misc_RNA (1)...(19): siRNA sense strand
ggaccgaacagcgagauug

SEQ ID NO: 575292 - RNA, 19 nt, Homo sapiens
  misc_RNA (1)...(19): siRNA sense strand
gauauacaggcaaaugaug

SEQ ID NO: 575293 - RNA, 19 nt, Homo sapiens
  misc_RNA (1)...(19): siRNA sense strand
gcugcuugauucucgguuu

SEQ ID NO: 575294 - RNA, 19 nt, Homo sapiens
  misc_RNA (1)...(19): siRNA sense strand
caccagaagucucaauaac

SEQ ID NO: 575295 - RNA, 19 nt, Homo sapiens
  misc_RNA (1)...(19): siRNA sense strand
ccacuauacagacuaaguu

SEQ ID NO: 575296 - RNA, 19 nt, Homo sapiens
  misc_RNA (1)...(19): siRNA sense strand
gaggaaacugcugagguua

SEQ ID NO: 575297 - RNA, 19 nt, Homo sapiens
  misc_RNA (1)...(19): siRNA sense strand
gauucucgguuuccucuag

SEQ ID NO: 575298 - RNA, 19 nt, Homo sapiens
  misc_RNA (1)...(19): siRNA sense strand
gaaggacauuaacgacaac

SEQ ID NO: 575299 - RNA, 19 nt, Homo sapiens
  misc_RNA (1)...(19): siRNA sense strand
gagguaaaucugcagaaug

SEQ ID NO: 575300 - RNA, 19 nt, Homo sapiens
  misc_RNA (1)...(19): siRNA sense strand
cccaaucaguuuacaaagu

SEQ ID NO: 575301 - RNA, 19 nt, Homo sapiens
  misc_RNA (1)...(19): siRNA sense strand
guaaagacuauccgguuuc

SEQ ID NO: 575302 - RNA, 19 nt, Homo sapiens
  misc_RNA (1)...(19): siRNA sense strand
agguaaaucugcagaaugg

SEQ ID NO: 575303 - RNA, 19 nt, Homo sapiens
  misc_RNA (1)...(19): siRNA sense strand
ggccuucagcccuagcuua

SEQ ID NO: 575304 - RNA, 19 nt, Homo sapiens
  misc_RNA (1)...(19): siRNA sense strand
aggcuacgcugguggaugu

SEQ ID NO: 575305 - RNA, 19 nt, Homo sapiens
  misc_RNA (1)...(19): siRNA sense strand
gaucgcgacucugguacga

SEQ ID NO: 575306 - RNA, 19 nt, Homo sapiens
  misc_RNA (1)...(19): siRNA sense strand
ugauguguccuccacuaua

SEQ ID NO: 575307 - RNA, 19 nt, Homo sapiens
  misc_RNA (1)...(19): siRNA sense strand
ugaacuaagcgaaucuuug

SEQ ID NO: 575308 - RNA, 19 nt, Homo sapiens
  misc_RNA (1)...(19): siRNA sense strand
ccuccacuauacagacuaa

SEQ ID NO: 575309 - RNA, 19 nt, Homo sapiens
  misc_RNA (1)...(19): siRNA sense strand
aaacagcucucagaaucag

SEQ ID NO: 575310 - RNA, 19 nt, Homo sapiens
  misc_RNA (1)...(19): siRNA sense strand
gcacugucauugcucucau

SEQ ID NO: 575311 - RNA, 19 nt, Homo sapiens
  misc_RNA (1)...(19): siRNA sense strand
ggcaaaugaugaacuaagc

SEQ ID NO: 575312 - RNA, 19 nt, Homo sapiens
  misc_RNA (1)...(19): siRNA sense strand
gaaucagaauacguaggaa

SEQ ID NO: 575313 - RNA, 19 nt, Homo sapiens
  misc_RNA (1)...(19): siRNA sense strand
acacaguauucgugaagga

SEQ ID NO: 575314 - RNA, 19 nt, Homo sapiens
  misc_RNA (1)...(19): siRNA sense strand
guguccaccuucaagaauu

SEQ ID NO: 575315 - RNA, 19 nt, Homo sapiens
  misc_RNA (1)...(19): siRNA sense strand
uagauauacaggcaaauga

SEQ ID NO: 575316 - RNA, 19 nt, Homo sapiens
  misc_RNA (1)...(19): siRNA sense strand
gcucucagaaucagaauac

SEQ ID NO: 575317 - RNA, 19 nt, Homo sapiens
  misc_RNA (1)...(19): siRNA sense strand
acgcguggcuuucguacga

SEQ ID NO: 575318 - RNA, 19 nt, Homo sapiens
  misc_RNA (1)...(19): siRNA sense strand
guacacaguauucgugaag

SEQ ID NO: 575319 - RNA, 19 nt, Homo sapiens
  misc_RNA (1)...(19): siRNA sense strand
gucaggacauuguaaaauu

SEQ ID NO: 575320 - RNA, 19 nt, Homo sapiens
  misc_RNA (1)...(19): siRNA sense strand
gcagaugaaggaccgaaca

SEQ ID NO: 575321 - RNA, 19 nt, Homo sapiens
  misc_RNA (1)...(19): siRNA sense strand
uaaguuaaacgcuucugau

SEQ ID NO: 575322 - RNA, 19 nt, Homo sapiens
  misc_RNA (1)...(19): siRNA sense strand
agacuccgcagaagagaaa

SEQ ID NO: 575323 - RNA, 19 nt, Homo sapiens
  misc_RNA (1)...(19): siRNA sense strand
acaccagaagucucaauaa

SEQ ID NO: 575324 - RNA, 19 nt, Homo sapiens
  misc_RNA (1)...(19): siRNA sense strand
ucaagaauuacuacucguu

SEQ ID NO: 575325 - RNA, 19 nt, Homo sapiens
  misc_RNA (1)...(19): siRNA sense strand
agaaucagaauacguagga

SEQ ID NO: 575326 - RNA, 19 nt, Homo sapiens
  misc_RNA (1)...(19): siRNA sense strand
guaaaugacaaugaaccaa

SEQ ID NO: 575327 - RNA, 19 nt, Homo sapiens
  misc_RNA (1)...(19): siRNA sense strand
cuucagcccuagcuuaucu

SEQ ID NO: 575328 - RNA, 19 nt, Homo sapiens
  misc_RNA (1)...(19): siRNA sense strand
cacugcaacugacaaagga

SEQ ID NO: 575329 - RNA, 19 nt, Homo sapiens
  misc_RNA (1)...(19): siRNA sense strand
uagagaauacggcaaaugg

SEQ ID NO: 575330 - RNA, 19 nt, Homo sapiens
  misc_RNA (1)...(19): siRNA sense strand
gacaacccgccaauauuuc

SEQ ID NO: 575331 - RNA, 19 nt, Homo sapiens
  misc_RNA (1)...(19): siRNA sense strand
cagccugaguacacaguau

SEQ ID NO: 575332 - RNA, 19 nt, Homo sapiens
  misc_RNA (1)...(19): siRNA sense strand
ucgcgacucugguacgaau

SEQ ID NO: 575333 - RNA, 19 nt, Homo sapiens
  misc_RNA (1)...(19): siRNA sense strand
ggaguaaaugcucuucucu

SEQ ID NO: 575334 - RNA, 19 nt, Homo sapiens
  misc_RNA (1)...(19): siRNA sense strand
gaaggaccacggcgaacca

SEQ ID NO: 575335 - RNA, 19 nt, Homo sapiens
  misc_RNA (1)...(19): siRNA sense strand
caguauucgugaaggagaa

SEQ ID NO: 575336 - RNA, 19 nt, Homo sapiens
  misc_RNA (1)...(19): siRNA sense strand
gagauucaggucacugcaa

SEQ ID NO: 575337 - RNA, 19 nt, Homo sapiens
  misc_RNA (1)...(19): siRNA sense strand
caaaguccuacgagauuca

SEQ ID NO: 575338 - RNA, 19 nt, Homo sapiens
  misc_RNA (1)...(19): siRNA sense strand
aaaugggaccuuagugguu

SEQ ID NO: 575339 - RNA, 19 nt, Homo sapiens
  misc_RNA (1)...(19): siRNA sense strand
gaaacugcugagguuaauu

SEQ ID NO: 575340 - RNA, 19 nt, Homo sapiens
  misc_RNA (1)...(19): siRNA sense strand
cucagaaucagaauacgua

SEQ ID NO: 575341 - RNA, 19 nt, Homo sapiens
  misc_RNA (1)...(19): siRNA sense strand
ucacggugcugcuguacac

SEQ ID NO: 575342 - RNA, 19 nt, Homo sapiens
  misc_RNA (1)...(19): siRNA sense strand
ugguggaugucaacgugua

SEQ ID NO: 575343 - RNA, 19 nt, Homo sapiens
  misc_RNA (1)...(19): siRNA sense strand
gcuauacacgggugagauc

SEQ ID NO: 575344 - RNA, 19 nt, Homo sapiens
  misc_RNA (1)...(19): siRNA sense strand
cacaccagaagucucaaua

SEQ ID NO: 575345 - RNA, 19 nt, Homo sapiens
  misc_RNA (1)...(19): siRNA sense strand
gauaacacaccagaagucu

SEQ ID NO: 575346 - RNA, 19 nt, Homo sapiens
  misc_RNA (1)...(19): siRNA sense strand
gacuaaguuuaccauagau

SEQ ID NO: 575347 - RNA, 19 nt, Homo sapiens
  misc_RNA (1)...(19): siRNA sense strand
gaccgaacagcgagauugu

SEQ ID NO: 575348 - RNA, 19 nt, Homo sapiens
  misc_RNA (1)...(19): siRNA sense strand
gcauuuuguuugugaauuc

SEQ ID NO: 575349 - RNA, 19 nt, Homo sapiens
  misc_RNA (1)...(19): siRNA sense strand
ugcugagguuaauuuguua

SEQ ID NO: 575350 - RNA, 19 nt, Homo sapiens
  misc_RNA (1)...(19): siRNA sense strand
gcgagauuguguauucacu

SEQ ID NO: 575351 - RNA, 19 nt, Homo sapiens
  misc_RNA (1)...(19): siRNA sense strand
uauccgguuucccgaauca

SEQ ID NO: 575352 - RNA, 19 nt, Homo sapiens
  misc_RNA (1)...(19): siRNA sense strand
agcccuagcuuaucucaag

SEQ ID NO: 575353 - RNA, 19 nt, Homo sapiens
  misc_RNA (1)...(19): siRNA sense strand
aagcaaaguccuacgagau

SEQ ID NO: 575354 - RNA, 19 nt, Homo sapiens
  misc_RNA (1)...(19): siRNA sense strand
ggaaaucgcuggacagaga

SEQ ID NO: 575355 - RNA, 19 nt, Homo sapiens
  misc_RNA (1)...(19): siRNA sense strand
ccaaucaguuuacaaagua

SEQ ID NO: 575356 - RNA, 19 nt, Homo sapiens
  misc_RNA (1)...(19): siRNA sense strand
uaaaugcucuucucuccua

SEQ ID NO: 575357 - RNA, 19 nt, Homo sapiens
  misc_RNA (1)...(19): siRNA sense strand
gaacuaagcgaaucuuugu

SEQ ID NO: 575358 - RNA, 19 nt, Homo sapiens
  misc_RNA (1)...(19): siRNA sense strand
cgacaacccgccaauauuu

SEQ ID NO: 575359 - RNA, 19 nt, Homo sapiens
  misc_RNA (1)...(19): siRNA sense strand
agaaacagcucucagaauc

SEQ ID NO: 575360 - RNA, 19 nt, Homo sapiens
  misc_RNA (1)...(19): siRNA sense strand
gaacagcgagauuguguau

SEQ ID NO: 575361 - RNA, 19 nt, Homo sapiens
  misc_RNA (1)...(19): siRNA sense strand
agacuaaguuuaccauaga

SEQ ID NO: 575362 - RNA, 19 nt, Homo sapiens
  misc_RNA (1)...(19): siRNA sense strand
ggaaacugcugagguuaau

SEQ ID NO: 575363 - RNA, 19 nt, Homo sapiens
  misc_RNA (1)...(19): siRNA sense strand
ugaaggacauuaacgacaa

SEQ ID NO: 575364 - RNA, 19 nt, Homo sapiens
  misc_RNA (1)...(19): siRNA sense strand
ggagguaaaucugcagaau

SEQ ID NO: 575365 - RNA, 19 nt, Homo sapiens
  misc_RNA (1)...(19): siRNA sense strand
guuaaacgcuucugaugca

SEQ ID NO: 575366 - RNA, 19 nt, Homo sapiens
  misc_RNA (1)...(19): siRNA sense strand
gguauuagauguaaaugac

SEQ ID NO: 575367 - RNA, 19 nt, Homo sapiens
  misc_RNA (1)...(19): siRNA sense strand
agaggaaacugcugagguu

SEQ ID NO: 575368 - RNA, 19 nt, Homo sapiens
  misc_RNA (1)...(19): siRNA sense strand
ccgccaauauuuccaauga

SEQ ID NO: 575369 - RNA, 19 nt, Homo sapiens
  misc_RNA (1)...(19): siRNA sense strand
gcaaaguccuacgagauuc

SEQ ID NO: 575370 - RNA, 19 nt, Homo sapiens
  misc_RNA (1)...(19): siRNA sense strand
aaugggaccuuagugguua

SEQ ID NO: 575371 - RNA, 19 nt, Homo sapiens
  misc_RNA (1)...(19): siRNA sense strand
ccagaagucucaauaacgu

SEQ ID NO: 575372 - RNA, 19 nt, Homo sapiens
  misc_RNA (1)...(19): siRNA sense strand
acagcgagauuguguauuc

SEQ ID NO: 575373 - RNA, 19 nt, Homo sapiens
  misc_RNA (1)...(19): siRNA sense strand
gcagauauaggaguaaaug

SEQ ID NO: 575374 - RNA, 19 nt, Homo sapiens
  misc_RNA (1)...(19): siRNA sense strand
acaggcaaaugaugaacua

SEQ ID NO: 575375 - RNA, 19 nt, Homo sapiens
  misc_RNA (1)...(19): siRNA sense strand
agaacgcgcugguguccua

SEQ ID NO: 575376 - RNA, 19 nt, Homo sapiens
  misc_RNA (1)...(19): siRNA sense strand
cugcugagguuaauuuguu

SEQ ID NO: 575377 - RNA, 19 nt, Homo sapiens
  misc_RNA (1)...(19): siRNA sense strand
aaacugcugagguuaauuu

SEQ ID NO: 575378 - RNA, 19 nt, Homo sapiens
  misc_RNA (1)...(19): siRNA sense strand
gccaauauuuccaaugaca

SEQ ID NO: 575379 - RNA, 19 nt, Homo sapiens
  misc_RNA (1)...(19): siRNA sense strand
uaacacaccagaagucuca

SEQ ID NO: 575380 - RNA, 19 nt, Homo sapiens
  misc_RNA (1)...(19): siRNA sense strand
gggcaccguucaaauacuu

SEQ ID NO: 575381 - RNA, 19 nt, Homo sapiens
  misc_RNA (1)...(19): siRNA sense strand
ccaaugacaguaaagacua

SEQ ID NO: 575382 - RNA, 19 nt, Homo sapiens
  misc_RNA (1)...(19): siRNA sense strand
gaaacagcucucagaauca

SEQ ID NO: 575383 - RNA, 19 nt, Homo sapiens
  misc_RNA (1)...(19): siRNA sense strand
cagacuaaguuuaccauag

SEQ ID NO: 575384 - RNA, 19 nt, Homo sapiens
  misc_RNA (1)...(19): siRNA sense strand
caaugacaguaaagacuau

SEQ ID NO: 575385 - RNA, 19 nt, Homo sapiens
  misc_RNA (1)...(19): siRNA sense strand
uguccaccuucaagaauua

SEQ ID NO: 575386 - RNA, 19 nt, Homo sapiens
  misc_RNA (1)...(19): siRNA sense strand
gauguguccuccacuauac

SEQ ID NO: 575387 - RNA, 19 nt, Homo sapiens
  misc_RNA (1)...(19): siRNA sense strand
aguaaagacuauccgguuu

SEQ ID NO: 575388 - RNA, 19 nt, Homo sapiens
  misc_RNA (1)...(19): siRNA sense strand
ugaugcagauauaggagua

SEQ ID NO: 575389 - RNA, 19 nt, Homo sapiens
  misc_RNA (1)...(19): siRNA sense strand
uaacgacaacccgccaaua

SEQ ID NO: 575390 - RNA, 19 nt, Homo sapiens
  misc_RNA (1)...(19): siRNA sense strand
aauaacgucucucucacuu

SEQ ID NO: 575391 - RNA, 19 nt, Homo sapiens
  misc_RNA (1)...(19): siRNA sense strand
ggaccgaacagcgagauug

SEQ ID NO: 575392 - RNA, 19 nt, Homo sapiens
  misc_RNA (1)...(19): siRNA sense strand
gauauacaggcaaaugaug

SEQ ID NO: 575393 - RNA, 19 nt, Homo sapiens
  misc_RNA (1)...(19): siRNA sense strand
gcugcuugauucucgguuu

SEQ ID NO: 575394 - RNA, 19 nt, Homo sapiens
  misc_RNA (1)...(19): siRNA sense strand
caccagaagucucaauaac

SEQ ID NO: 575395 - RNA, 19 nt, Homo sapiens
  misc_RNA (1)...(19): siRNA sense strand
ccacuauacagacuaaguu

SEQ ID NO: 575396 - RNA, 19 nt, Homo sapiens
  misc_RNA (1)...(19): siRNA sense strand
gaggaaacugcugagguua

SEQ ID NO: 575397 - RNA, 19 nt, Homo sapiens
  misc_RNA (1)...(19): siRNA sense strand
gauucucgguuuccucuag

SEQ ID NO: 575398 - RNA, 19 nt, Homo sapiens
  misc_RNA (1)...(19): siRNA sense strand
gaaggacauuaacgacaac

SEQ ID NO: 575399 - RNA, 19 nt, Homo sapiens
  misc_RNA (1)...(19): siRNA sense strand
gagguaaaucugcagaaug

SEQ ID NO: 575400 - RNA, 19 nt, Homo sapiens
  misc_RNA (1)...(19): siRNA sense strand
cccaaucaguuuacaaagu

SEQ ID NO: 575401 - RNA, 19 nt, Homo sapiens
  misc_RNA (1)...(19): siRNA sense strand
guaaagacuauccgguuuc

SEQ ID NO: 575402 - RNA, 19 nt, Homo sapiens
  misc_RNA (1)...(19): siRNA sense strand
agguaaaucugcagaaugg

SEQ ID NO: 575403 - RNA, 19 nt, Homo sapiens
  misc_RNA (1)...(19): siRNA sense strand
ggccuucagcccuagcuua

SEQ ID NO: 575404 - RNA, 19 nt, Homo sapiens
  misc_RNA (1)...(19): siRNA sense strand
aggcuacgcugguggaugu

SEQ ID NO: 575405 - RNA, 19 nt, Homo sapiens
  misc_RNA (1)...(19): siRNA sense strand
gaucgcgacucugguacga

SEQ ID NO: 575406 - RNA, 19 nt, Homo sapiens
  misc_RNA (1)...(19): siRNA sense strand
ugauguguccuccacuaua

SEQ ID NO: 575407 - RNA, 19 nt, Homo sapiens
  misc_RNA (1)...(19): siRNA sense strand
ugaacuaagcgaaucuuug

SEQ ID NO: 575408 - RNA, 19 nt, Homo sapiens
  misc_RNA (1)...(19): siRNA sense strand
ccuccacuauacagacuaa

SEQ ID NO: 575409 - RNA, 19 nt, Homo sapiens
  misc_RNA (1)...(19): siRNA sense strand
aaacagcucucagaaucag

SEQ ID NO: 575410 - RNA, 19 nt, Homo sapiens
  misc_RNA (1)...(19): siRNA sense strand
gcacugucauugcucucau

SEQ ID NO: 575411 - RNA, 19 nt, Homo sapiens
  misc_RNA (1)...(19): siRNA sense strand
ggcaaaugaugaacuaagc

SEQ ID NO: 575412 - RNA, 19 nt, Homo sapiens
  misc_RNA (1)...(19): siRNA sense strand
gaaucagaauacguaggaa

SEQ ID NO: 575413 - RNA, 19 nt, Homo sapiens
  misc_RNA (1)...(19): siRNA sense strand
acacaguauucgugaagga

SEQ ID NO: 575414 - RNA, 19 nt, Homo sapiens
  misc_RNA (1)...(19): siRNA sense strand
guguccaccuucaagaauu

SEQ ID NO: 575415 - RNA, 19 nt, Homo sapiens
  misc_RNA (1)...(19): siRNA sense strand
uagauauacaggcaaauga

SEQ ID NO: 575416 - RNA, 19 nt, Homo sapiens
  misc_RNA (1)...(19): siRNA sense strand
gcucucagaaucagaauac

SEQ ID NO: 575417 - RNA, 19 nt, Homo sapiens
  misc_RNA (1)...(19): siRNA sense strand
acgcguggcuuucguacga

SEQ ID NO: 575418 - RNA, 19 nt, Homo sapiens
  misc_RNA (1)...(19): siRNA sense strand
guacacaguauucgugaag

SEQ ID NO: 575419 - RNA, 19 nt, Homo sapiens
  misc_RNA (1)...(19): siRNA sense strand
gucaggacauuguaaaauu

SEQ ID NO: 575420 - RNA, 19 nt, Homo sapiens
  misc_RNA (1)...(19): siRNA sense strand
gcagaugaaggaccgaaca

SEQ ID NO: 575421 - RNA, 19 nt, Homo sapiens
  misc_RNA (1)...(19): siRNA sense strand
uaaguuaaacgcuucugau

SEQ ID NO: 575422 - RNA, 19 nt, Homo sapiens
  misc_RNA (1)...(19): siRNA sense strand
agacuccgcagaagagaaa

SEQ ID NO: 575423 - RNA, 19 nt, Homo sapiens
  misc_RNA (1)...(19): siRNA sense strand
acaccagaagucucaauaa

SEQ ID NO: 575424 - RNA, 19 nt, Homo sapiens
  misc_RNA (1)...(19): siRNA sense strand
ucaagaauuacuacucguu

SEQ ID NO: 575425 - RNA, 19 nt, Homo sapiens
  misc_RNA (1)...(19): siRNA sense strand
agaaucagaauacguagga

SEQ ID NO: 575426 - RNA, 19 nt, Homo sapiens
  misc_RNA (1)...(19): siRNA sense strand
guaaaugacaaugaaccaa

SEQ ID NO: 575427 - RNA, 19 nt, Homo sapiens
  misc_RNA (1)...(19): siRNA sense strand
cuucagcccuagcuuaucu

SEQ ID NO: 575428 - RNA, 19 nt, Homo sapiens
  misc_RNA (1)...(19): siRNA sense strand
cacugcaacugacaaagga

SEQ ID NO: 575429 - RNA, 19 nt, Homo sapiens
  misc_RNA (1)...(19): siRNA sense strand
uagagaauacggcaaaugg

SEQ ID NO: 575430 - RNA, 19 nt, Homo sapiens
  misc_RNA (1)...(19): siRNA sense strand
gacaacccgccaauauuuc

SEQ ID NO: 575431 - RNA, 19 nt, Homo sapiens
  misc_RNA (1)...(19): siRNA sense strand
cagccugaguacacaguau

SEQ ID NO: 575432 - RNA, 19 nt, Homo sapiens
  misc_RNA (1)...(19): siRNA sense strand
ucgcgacucugguacgaau

SEQ ID NO: 575433 - RNA, 19 nt, Homo sapiens
  misc_RNA (1)...(19): siRNA sense strand
ggaguaaaugcucuucucu

SEQ ID NO: 575434 - RNA, 19 nt, Homo sapiens
  misc_RNA (1)...(19): siRNA sense strand
gaaggaccacggcgaacca

SEQ ID NO: 575435 - RNA, 19 nt, Homo sapiens
  misc_RNA (1)...(19): siRNA sense strand
caguauucgugaaggagaa

SEQ ID NO: 575436 - RNA, 19 nt, Homo sapiens
  misc_RNA (1)...(19): siRNA sense strand
gagauucaggucacugcaa

SEQ ID NO: 575437 - RNA, 19 nt, Homo sapiens
  misc_RNA (1)...(19): siRNA sense strand
caaaguccuacgagauuca

SEQ ID NO: 575438 - RNA, 19 nt, Homo sapiens
  misc_RNA (1)...(19): siRNA sense strand
aaaugggaccuuagugguu

SEQ ID NO: 575439 - RNA, 19 nt, Homo sapiens
  misc_RNA (1)...(19): siRNA sense strand
gaaacugcugagguuaauu

SEQ ID NO: 575440 - RNA, 19 nt, Homo sapiens
  misc_RNA (1)...(19): siRNA sense strand
cucagaaucagaauacgua

SEQ ID NO: 575441 - RNA, 19 nt, Homo sapiens
  misc_RNA (1)...(19): siRNA sense strand
ucacggugcugcuguacac

SEQ ID NO: 575442 - RNA, 19 nt, Homo sapiens
  misc_RNA (1)...(19): siRNA sense strand
ugguggaugucaacgugua

SEQ ID NO: 575443 - RNA, 19 nt, Homo sapiens
  misc_RNA (1)...(19): siRNA sense strand
gcuauacacgggugagauc

SEQ ID NO: 575444 - RNA, 19 nt, Homo sapiens
  misc_RNA (1)...(19): siRNA sense strand
cacaccagaagucucaaua

SEQ ID NO: 575445 - RNA, 19 nt, Homo sapiens
  misc_RNA (1)...(19): siRNA sense strand
gauaacacaccagaagucu

SEQ ID NO: 575446 - RNA, 19 nt, Homo sapiens
  misc_RNA (1)...(19): siRNA sense strand
gacuaaguuuaccauagau

SEQ ID NO: 575447 - RNA, 19 nt, Homo sapiens
  misc_RNA (1)...(19): siRNA sense strand
gaccgaacagcgagauugu

SEQ ID NO: 575448 - RNA, 19 nt, Homo sapiens
  misc_RNA (1)...(19): siRNA sense strand
gcauuuuguuugugaauuc

SEQ ID NO: 575449 - RNA, 19 nt, Homo sapiens
  misc_RNA (1)...(19): siRNA sense strand
ugcugagguuaauuuguua

SEQ ID NO: 575450 - RNA, 19 nt, Homo sapiens
  misc_RNA (1)...(19): siRNA sense strand
gcgagauuguguauucacu

SEQ ID NO: 575451 - RNA, 19 nt, Homo sapiens
  misc_RNA (1)...(19): siRNA sense strand
uauccgguuucccgaauca

SEQ ID NO: 575452 - RNA, 19 nt, Homo sapiens
  misc_RNA (1)...(19): siRNA sense strand
agcccuagcuuaucucaag

SEQ ID NO: 575453 - RNA, 19 nt, Homo sapiens
  misc_RNA (1)...(19): siRNA sense strand
aagcaaaguccuacgagau

SEQ ID NO: 575454 - RNA, 19 nt, Homo sapiens
  misc_RNA (1)...(19): siRNA sense strand
ggaaaucgcuggacagaga

SEQ ID NO: 575455 - RNA, 19 nt, Homo sapiens
  misc_RNA (1)...(19): siRNA sense strand
ccaaucaguuuacaaagua

SEQ ID NO: 575456 - RNA, 19 nt, Homo sapiens
  misc_RNA (1)...(19): siRNA sense strand
uaaaugcucuucucuccua

SEQ ID NO: 575457 - RNA, 19 nt, Homo sapiens
  misc_RNA (1)...(19): siRNA sense strand
gaacuaagcgaaucuuugu

SEQ ID NO: 575458 - RNA, 19 nt, Homo sapiens
  misc_RNA (1)...(19): siRNA sense strand
cgacaacccgccaauauuu

SEQ ID NO: 575459 - RNA, 19 nt, Homo sapiens
  misc_RNA (1)...(19): siRNA sense strand
agaaacagcucucagaauc

SEQ ID NO: 575460 - RNA, 19 nt, Homo sapiens
  misc_RNA (1)...(19): siRNA sense strand
gaacagcgagauuguguau

SEQ ID NO: 575461 - RNA, 19 nt, Homo sapiens
  misc_RNA (1)...(19): siRNA sense strand
agacuaaguuuaccauaga

SEQ ID NO: 575462 - RNA, 19 nt, Homo sapiens
  misc_RNA (1)...(19): siRNA sense strand
ggaaacugcugagguuaau

SEQ ID NO: 575463 - RNA, 19 nt, Homo sapiens
  misc_RNA (1)...(19): siRNA sense strand
ugaaggacauuaacgacaa

SEQ ID NO: 575464 - RNA, 19 nt, Homo sapiens
  misc_RNA (1)...(19): siRNA sense strand
ggagguaaaucugcagaau

SEQ ID NO: 575465 - RNA, 19 nt, Homo sapiens
  misc_RNA (1)...(19): siRNA sense strand
guuaaacgcuucugaugca

SEQ ID NO: 575466 - RNA, 19 nt, Homo sapiens
  misc_RNA (1)...(19): siRNA sense strand
gguauuagauguaaaugac

SEQ ID NO: 575467 - RNA, 19 nt, Homo sapiens
  misc_RNA (1)...(19): siRNA sense strand
agaggaaacugcugagguu

SEQ ID NO: 575468 - RNA, 19 nt, Homo sapiens
  misc_RNA (1)...(19): siRNA sense strand
ccgccaauauuuccaauga

SEQ ID NO: 575469 - RNA, 19 nt, Homo sapiens
  misc_RNA (1)...(19): siRNA sense strand
gcaaaguccuacgagauuc

SEQ ID NO: 575470 - RNA, 19 nt, Homo sapiens
  misc_RNA (1)...(19): siRNA sense strand
aaugggaccuuagugguua

SEQ ID NO: 575471 - RNA, 19 nt, Homo sapiens
  misc_RNA (1)...(19): siRNA sense strand
ccagaagucucaauaacgu

SEQ ID NO: 575472 - RNA, 19 nt, Homo sapiens
  misc_RNA (1)...(19): siRNA sense strand
acagcgagauuguguauuc

SEQ ID NO: 575473 - RNA, 19 nt, Homo sapiens
  misc_RNA (1)...(19): siRNA sense strand
gcagauauaggaguaaaug

SEQ ID NO: 575474 - RNA, 19 nt, Homo sapiens
  misc_RNA (1)...(19): siRNA sense strand
acaggcaaaugaugaacua

SEQ ID NO: 575475 - RNA, 19 nt, Homo sapiens
  misc_RNA (1)...(19): siRNA sense strand
agaacgcgcugguguccua

SEQ ID NO: 575476 - RNA, 19 nt, Homo sapiens
  misc_RNA (1)...(19): siRNA sense strand
cugcugagguuaauuuguu

SEQ ID NO: 575477 - RNA, 19 nt, Homo sapiens
  misc_RNA (1)...(19): siRNA sense strand
aaacugcugagguuaauuu

SEQ ID NO: 575478 - RNA, 19 nt, Homo sapiens
  misc_RNA (1)...(19): siRNA sense strand
gccaauauuuccaaugaca

SEQ ID NO: 575479 - RNA, 19 nt, Homo sapiens
  misc_RNA (1)...(19): siRNA sense strand
uaacacaccagaagucuca

SEQ ID NO: 575480 - RNA, 19 nt, Homo sapiens
  misc_RNA (1)...(19): siRNA sense strand
gggcaccguucaaauacuu

SEQ ID NO: 575481 - RNA, 19 nt, Homo sapiens
  misc_RNA (1)...(19): siRNA sense strand
ccaaugacaguaaagacua

SEQ ID NO: 575482 - RNA, 19 nt, Homo sapiens
  misc_RNA (1)...(19): siRNA sense strand
gaaacagcucucagaauca

SEQ ID NO: 575483 - RNA, 19 nt, Homo sapiens
  misc_RNA (1)...(19): siRNA sense strand
cagacuaaguuuaccauag

SEQ ID NO: 575484 - RNA, 19 nt, Homo sapiens
  misc_RNA (1)...(19): siRNA sense strand
caaugacaguaaagacuau

SEQ ID NO: 575485 - RNA, 19 nt, Homo sapiens
  misc_RNA (1)...(19): siRNA sense strand
uguccaccuucaagaauua

SEQ ID NO: 575486 - RNA, 19 nt, Homo sapiens
  misc_RNA (1)...(19): siRNA sense strand
gauguguccuccacuauac

SEQ ID NO: 575487 - RNA, 19 nt, Homo sapiens
  misc_RNA (1)...(19): siRNA sense strand
aguaaagacuauccgguuu

SEQ ID NO: 575488 - RNA, 19 nt, Homo sapiens
  misc_RNA (1)...(19): siRNA sense strand
ugaugcagauauaggagua

SEQ ID NO: 575489 - RNA, 19 nt, Homo sapiens
  misc_RNA (1)...(19): siRNA sense strand
uaacgacaacccgccaaua

SEQ ID NO: 575490 - RNA, 19 nt, Homo sapiens
  misc_RNA (1)...(19): siRNA sense strand
aauaacgucucucucacuu

SEQ ID NO: 575491 - RNA, 19 nt, Homo sapiens
  misc_RNA (1)...(19): siRNA sense strand
ggaccgaacagcgagauug

SEQ ID NO: 575492 - RNA, 19 nt, Homo sapiens
  misc_RNA (1)...(19): siRNA sense strand
gauauacaggcaaaugaug

SEQ ID NO: 575493 - RNA, 19 nt, Homo sapiens
  misc_RNA (1)...(19): siRNA sense strand
gcugcuugauucucgguuu

SEQ ID NO: 575494 - RNA, 19 nt, Homo sapiens
  misc_RNA (1)...(19): siRNA sense strand
caccagaagucucaauaac

SEQ ID NO: 575495 - RNA, 19 nt, Homo sapiens
  misc_RNA (1)...(19): siRNA sense strand
ccacuauacagacuaaguu

SEQ ID NO: 575496 - RNA, 19 nt, Homo sapiens
  misc_RNA (1)...(19): siRNA sense strand
gaggaaacugcugagguua

SEQ ID NO: 575497 - RNA, 19 nt, Homo sapiens
  misc_RNA (1)...(19): siRNA sense strand
gauucucgguuuccucuag

SEQ ID NO: 575498 - RNA, 19 nt, Homo sapiens
  misc_RNA (1)...(19): siRNA sense strand
gaaggacauuaacgacaac

SEQ ID NO: 575499 - RNA, 19 nt, Homo sapiens
  misc_RNA (1)...(19): siRNA sense strand
gagguaaaucugcagaaug

SEQ ID NO: 575500 - RNA, 19 nt, Homo sapiens
  misc_RNA (1)...(19): siRNA sense strand
cccaaucaguuuacaaagu

SEQ ID NO: 575501 - RNA, 19 nt, Homo sapiens
  misc_RNA (1)...(19): siRNA sense strand
guaaagacuauccgguuuc

SEQ ID NO: 575502 - RNA, 19 nt, Homo sapiens
  misc_RNA (1)...(19): siRNA sense strand
agguaaaucugcagaaugg

SEQ ID NO: 575503 - RNA, 19 nt, Homo sapiens
  misc_RNA (1)...(19): siRNA sense strand
ggccuucagcccuagcuua

SEQ ID NO: 575504 - RNA, 19 nt, Homo sapiens
  misc_RNA (1)...(19): siRNA sense strand
aggcuacgcugguggaugu

SEQ ID NO: 575505 - RNA, 19 nt, Homo sapiens
  misc_RNA (1)...(19): siRNA sense strand
gaucgcgacucugguacga

SEQ ID NO: 575506 - RNA, 19 nt, Homo sapiens
  misc_RNA (1)...(19): siRNA sense strand
ugauguguccuccacuaua

SEQ ID NO: 575507 - RNA, 19 nt, Homo sapiens
  misc_RNA (1)...(19): siRNA sense strand
ugaacuaagcgaaucuuug

SEQ ID NO: 575508 - RNA, 19 nt, Homo sapiens
  misc_RNA (1)...(19): siRNA sense strand
ccuccacuauacagacuaa

SEQ ID NO: 575509 - RNA, 19 nt, Homo sapiens
  misc_RNA (1)...(19): siRNA sense strand
aaacagcucucagaaucag

SEQ ID NO: 575510 - RNA, 19 nt, Homo sapiens
  misc_RNA (1)...(19): siRNA sense strand
gcacugucauugcucucau

SEQ ID NO: 575511 - RNA, 19 nt, Homo sapiens
  misc_RNA (1)...(19): siRNA sense strand
ggcaaaugaugaacuaagc

SEQ ID NO: 575512 - RNA, 19 nt, Homo sapiens
  misc_RNA (1)...(19): siRNA sense strand
gaaucagaauacguaggaa

SEQ ID NO: 575513 - RNA, 19 nt, Homo sapiens
  misc_RNA (1)...(19): siRNA sense strand
acacaguauucgugaagga

SEQ ID NO: 575514 - RNA, 19 nt, Homo sapiens
  misc_RNA (1)...(19): siRNA sense strand
guguccaccuucaagaauu

SEQ ID NO: 575515 - RNA, 19 nt, Homo sapiens
  misc_RNA (1)...(19): siRNA sense strand
uagauauacaggcaaauga

SEQ ID NO: 575516 - RNA, 19 nt, Homo sapiens
  misc_RNA (1)...(19): siRNA sense strand
gcucucagaaucagaauac

SEQ ID NO: 575517 - RNA, 19 nt, Homo sapiens
  misc_RNA (1)...(19): siRNA sense strand
acgcguggcuuucguacga

SEQ ID NO: 575518 - RNA, 19 nt, Homo sapiens
  misc_RNA (1)...(19): siRNA sense strand
guacacaguauucgugaag

SEQ ID NO: 575519 - RNA, 19 nt, Homo sapiens
  misc_RNA (1)...(19): siRNA sense strand
gucaggacauuguaaaauu

SEQ ID NO: 575520 - RNA, 19 nt, Homo sapiens
  misc_RNA (1)...(19): siRNA sense strand
gcagaugaaggaccgaaca

SEQ ID NO: 575521 - RNA, 19 nt, Homo sapiens
  misc_RNA (1)...(19): siRNA sense strand
uaaguuaaacgcuucugau

SEQ ID NO: 575522 - RNA, 19 nt, Homo sapiens
  misc_RNA (1)...(19): siRNA sense strand
agacuccgcagaagagaaa

SEQ ID NO: 575523 - RNA, 19 nt, Homo sapiens
  misc_RNA (1)...(19): siRNA sense strand
acaccagaagucucaauaa

SEQ ID NO: 575524 - RNA, 19 nt, Homo sapiens
  misc_RNA (1)...(19): siRNA sense strand
ucaagaauuacuacucguu

SEQ ID NO: 575525 - RNA, 19 nt, Homo sapiens
  misc_RNA (1)...(19): siRNA sense strand
agaaucagaauacguagga

SEQ ID NO: 575526 - RNA, 19 nt, Homo sapiens
  misc_RNA (1)...(19): siRNA sense strand
guaaaugacaaugaaccaa

SEQ ID NO: 575527 - RNA, 19 nt, Homo sapiens
  misc_RNA (1)...(19): siRNA sense strand
cuucagcccuagcuuaucu

SEQ ID NO: 575528 - RNA, 19 nt, Homo sapiens
  misc_RNA (1)...(19): siRNA sense strand
cacugcaacugacaaagga

SEQ ID NO: 575529 - RNA, 19 nt, Homo sapiens
  misc_RNA (1)...(19): siRNA sense strand
uagagaauacggcaaaugg

SEQ ID NO: 575530 - RNA, 19 nt, Homo sapiens
  misc_RNA (1)...(19): siRNA sense strand
gacaacccgccaauauuuc

SEQ ID NO: 575531 - RNA, 19 nt, Homo sapiens
  misc_RNA (1)...(19): siRNA sense strand
cagccugaguacacaguau

SEQ ID NO: 575532 - RNA, 19 nt, Homo sapiens
  misc_RNA (1)...(19): siRNA sense strand
ucgcgacucugguacgaau

SEQ ID NO: 575533 - RNA, 19 nt, Homo sapiens
  misc_RNA (1)...(19): siRNA sense strand
ggaguaaaugcucuucucu

SEQ ID NO: 575534 - RNA, 19 nt, Homo sapiens
  misc_RNA (1)...(19): siRNA sense strand
gaaggaccacggcgaacca

SEQ ID NO: 575535 - RNA, 19 nt, Homo sapiens
  misc_RNA (1)...(19): siRNA sense strand
caguauucgugaaggagaa

SEQ ID NO: 575536 - RNA, 19 nt, Homo sapiens
  misc_RNA (1)...(19): siRNA sense strand
gagauucaggucacugcaa

SEQ ID NO: 575537 - RNA, 19 nt, Homo sapiens
  misc_RNA (1)...(19): siRNA sense strand
caaaguccuacgagauuca

SEQ ID NO: 575538 - RNA, 19 nt, Homo sapiens
  misc_RNA (1)...(19): siRNA sense strand
aaaugggaccuuagugguu

SEQ ID NO: 575539 - RNA, 19 nt, Homo sapiens
  misc_RNA (1)...(19): siRNA sense strand
gaaacugcugagguuaauu

SEQ ID NO: 575540 - RNA, 19 nt, Homo sapiens
  misc_RNA (1)...(19): siRNA sense strand
cucagaaucagaauacgua

SEQ ID NO: 575541 - RNA, 19 nt, Homo sapiens
  misc_RNA (1)...(19): siRNA sense strand
ucacggugcugcuguacac

SEQ ID NO: 575542 - RNA, 19 nt, Homo sapiens
  misc_RNA (1)...(19): siRNA sense strand
ugguggaugucaacgugua

SEQ ID NO: 575543 - RNA, 19 nt, Homo sapiens
  misc_RNA (1)...(19): siRNA sense strand
gcuauacacgggugagauc

SEQ ID NO: 575544 - RNA, 19 nt, Homo sapiens
  misc_RNA (1)...(19): siRNA sense strand
cacaccagaagucucaaua

SEQ ID NO: 575545 - RNA, 19 nt, Homo sapiens
  misc_RNA (1)...(19): siRNA sense strand
gauaacacaccagaagucu

SEQ ID NO: 575546 - RNA, 19 nt, Homo sapiens
  misc_RNA (1)...(19): siRNA sense strand
gacuaaguuuaccauagau

SEQ ID NO: 575547 - RNA, 19 nt, Homo sapiens
  misc_RNA (1)...(19): siRNA sense strand
gaccgaacagcgagauugu

SEQ ID NO: 575548 - RNA, 19 nt, Homo sapiens
  misc_RNA (1)...(19): siRNA sense strand
gcauuuuguuugugaauuc

SEQ ID NO: 575549 - RNA, 19 nt, Homo sapiens
  misc_RNA (1)...(19): siRNA sense strand
ugcugagguuaauuuguua

SEQ ID NO: 575550 - RNA, 19 nt, Homo sapiens
  misc_RNA (1)...(19): siRNA sense strand
gcgagauuguguauucacu

SEQ ID NO: 575551 - RNA, 19 nt, Homo sapiens
  misc_RNA (1)...(19): siRNA sense strand
uauccgguuucccgaauca

SEQ ID NO: 575552 - RNA, 19 nt, Homo sapiens
  misc_RNA (1)...(19): siRNA sense strand
agcccuagcuuaucucaag

SEQ ID NO: 575553 - RNA, 19 nt, Homo sapiens
  misc_RNA (1)...(19): siRNA sense strand
aagcaaaguccuacgagau

SEQ ID NO: 575554 - RNA, 19 nt, Homo sapiens
  misc_RNA (1)...(19): siRNA sense strand
gaacuucacuuauuacuga

SEQ ID NO: 575555 - RNA, 19 nt, Homo sapiens
  misc_RNA (1)...(19): siRNA sense strand
gcaggugacuugcuccuua

SEQ ID NO: 575556 - RNA, 19 nt, Homo sapiens
  misc_RNA (1)...(19): siRNA sense strand
gaacauuagugaccacauu

SEQ ID NO: 575557 - RNA, 19 nt, Homo sapiens
  misc_RNA (1)...(19): siRNA sense strand
ucaaaucacuguaagguuu

SEQ ID NO: 575558 - RNA, 19 nt, Homo sapiens
  misc_RNA (1)...(19): siRNA sense strand
gggcagagaacaaauaaua

SEQ ID NO: 575559 - RNA, 19 nt, Homo sapiens
  misc_RNA (1)...(19): siRNA sense strand
caccagaacuucacuuauu

SEQ ID NO: 575560 - RNA, 19 nt, Homo sapiens
  misc_RNA (1)...(19): siRNA sense strand
gaacugaguaaaucucuuu

SEQ ID NO: 575561 - RNA, 19 nt, Homo sapiens
  misc_RNA (1)...(19): siRNA sense strand
guaaaucucuuuggcuuga

SEQ ID NO: 575562 - RNA, 19 nt, Homo sapiens
  misc_RNA (1)...(19): siRNA sense strand
ugaaagugcuggauguaaa

SEQ ID NO: 575563 - RNA, 19 nt, Homo sapiens
  misc_RNA (1)...(19): siRNA sense strand
gaaucuagacuccugaauu

SEQ ID NO: 575564 - RNA, 19 nt, Homo sapiens
  misc_RNA (1)...(19): siRNA sense strand
auacagaguccacuuguua

SEQ ID NO: 575565 - RNA, 19 nt, Homo sapiens
  misc_RNA (1)...(19): siRNA sense strand
cuaacgcucuucuaacgua

SEQ ID NO: 575566 - RNA, 19 nt, Homo sapiens
  misc_RNA (1)...(19): siRNA sense strand
gaaguccuccgaugucaaa

SEQ ID NO: 575567 - RNA, 19 nt, Homo sapiens
  misc_RNA (1)...(19): siRNA sense strand
gaaacaaaauccuacgaaa

SEQ ID NO: 575568 - RNA, 19 nt, Homo sapiens
  misc_RNA (1)...(19): siRNA sense strand
ggagguaaaucugcagaau

SEQ ID NO: 575569 - RNA, 19 nt, Homo sapiens
  misc_RNA (1)...(19): siRNA sense strand
aaucuagacuccugaauuc

SEQ ID NO: 575570 - RNA, 19 nt, Homo sapiens
  misc_RNA (1)...(19): siRNA sense strand
agaaggagcugcugaugca

SEQ ID NO: 575571 - RNA, 19 nt, Homo sapiens
  misc_RNA (1)...(19): siRNA sense strand
accagaacuucacuuauua

SEQ ID NO: 575572 - RNA, 19 nt, Homo sapiens
  misc_RNA (1)...(19): siRNA sense strand
gugaugaacugaguaaauc

SEQ ID NO: 575573 - RNA, 19 nt, Homo sapiens
  misc_RNA (1)...(19): siRNA sense strand
ugacgaagguguaaauggu

SEQ ID NO: 575574 - RNA, 19 nt, Homo sapiens
  misc_RNA (1)...(19): siRNA sense strand
gugaaagacauuaacgaua

SEQ ID NO: 575575 - RNA, 19 nt, Homo sapiens
  misc_RNA (1)...(19): siRNA sense strand
uaaaggcaguugauaaagg

SEQ ID NO: 575576 - RNA, 19 nt, Homo sapiens
  misc_RNA (1)...(19): siRNA sense strand
gcgagagccugucggucua

SEQ ID NO: 575577 - RNA, 19 nt, Homo sapiens
  misc_RNA (1)...(19): siRNA sense strand
cuacgaaauucaaguaaag

SEQ ID NO: 575578 - RNA, 19 nt, Homo sapiens
  misc_RNA (1)...(19): siRNA sense strand
agaacgcgcugguguccua

SEQ ID NO: 575579 - RNA, 19 nt, Homo sapiens
  misc_RNA (1)...(19): siRNA sense strand
ggagguggccgacgugaau

SEQ ID NO: 575580 - RNA, 19 nt, Homo sapiens
  misc_RNA (1)...(19): siRNA sense strand
gaaagugcuggauguaaau

SEQ ID NO: 575581 - RNA, 19 nt, Homo sapiens
  misc_RNA (1)...(19): siRNA sense strand
aaaggcaguugauaaagga

SEQ ID NO: 575582 - RNA, 19 nt, Homo sapiens
  misc_RNA (1)...(19): siRNA sense strand
ggcggucacuucauuguau

SEQ ID NO: 575583 - RNA, 19 nt, Homo sapiens
  misc_RNA (1)...(19): siRNA sense strand
caagugaugaacugaguaa

SEQ ID NO: 575584 - RNA, 19 nt, Homo sapiens
  misc_RNA (1)...(19): siRNA sense strand
uguccaccuucaagaauua

SEQ ID NO: 575585 - RNA, 19 nt, Homo sapiens
  misc_RNA (1)...(19): siRNA sense strand
caaguaaaggcaguugaua

SEQ ID NO: 575586 - RNA, 19 nt, Homo sapiens
  misc_RNA (1)...(19): siRNA sense strand
ccuacgaaauucaaguaaa

SEQ ID NO: 575587 - RNA, 19 nt, Homo sapiens
  misc_RNA (1)...(19): siRNA sense strand
gugauuauuucucuuugga

SEQ ID NO: 575588 - RNA, 19 nt, Homo sapiens
  misc_RNA (1)...(19): siRNA sense strand
caggugacuugcuccuuaa

SEQ ID NO: 575589 - RNA, 19 nt, Homo sapiens
  misc_RNA (1)...(19): siRNA sense strand
ggauguaaaugauaaugcu

SEQ ID NO: 575590 - RNA, 19 nt, Homo sapiens
  misc_RNA (1)...(19): siRNA sense strand
gauuccagcucaggagaaa

SEQ ID NO: 575591 - RNA, 19 nt, Homo sapiens
  misc_RNA (1)...(19): siRNA sense strand
guuagagacuacagcaaau

SEQ ID NO: 575592 - RNA, 19 nt, Homo sapiens
  misc_RNA (1)...(19): siRNA sense strand
gaagucgucuuuuccuuug

SEQ ID NO: 575593 - RNA, 19 nt, Homo sapiens
  misc_RNA (1)...(19): siRNA sense strand
ggugcuaacgcucuucuaa

SEQ ID NO: 575594 - RNA, 19 nt, Homo sapiens
  misc_RNA (1)...(19): siRNA sense strand
ugauaaugcuccagaacug

SEQ ID NO: 575595 - RNA, 19 nt, Homo sapiens
  misc_RNA (1)...(19): siRNA sense strand
cgagugauuauuucucuuu

SEQ ID NO: 575596 - RNA, 19 nt, Homo sapiens
  misc_RNA (1)...(19): siRNA sense strand
gaugucaaaucacuguaag

SEQ ID NO: 575597 - RNA, 19 nt, Homo sapiens
  misc_RNA (1)...(19): siRNA sense strand
agaagaaacaccagaacuu

SEQ ID NO: 575598 - RNA, 19 nt, Homo sapiens
  misc_RNA (1)...(19): siRNA sense strand
gagugauuauuucucuuug

SEQ ID NO: 575599 - RNA, 19 nt, Homo sapiens
  misc_RNA (1)...(19): siRNA sense strand
aguaaaggcaguugauaaa

SEQ ID NO: 575600 - RNA, 19 nt, Homo sapiens
  misc_RNA (1)...(19): siRNA sense strand
agaguccacuuguuagaga

SEQ ID NO: 575601 - RNA, 19 nt, Homo sapiens
  misc_RNA (1)...(19): siRNA sense strand
ggugaaagacauuaacgau

SEQ ID NO: 575602 - RNA, 19 nt, Homo sapiens
  misc_RNA (1)...(19): siRNA sense strand
gcaagugaugaacugagua

SEQ ID NO: 575603 - RNA, 19 nt, Homo sapiens
  misc_RNA (1)...(19): siRNA sense strand
ggcaagugaugaacugagu

SEQ ID NO: 575604 - RNA, 19 nt, Homo sapiens
  misc_RNA (1)...(19): siRNA sense strand
gagguaaaucugcagaaug

SEQ ID NO: 575605 - RNA, 19 nt, Homo sapiens
  misc_RNA (1)...(19): siRNA sense strand
gcggucacuucauuguauu

SEQ ID NO: 575606 - RNA, 19 nt, Homo sapiens
  misc_RNA (1)...(19): siRNA sense strand
gagacuacagcaaauggaa

SEQ ID NO: 575607 - RNA, 19 nt, Homo sapiens
  misc_RNA (1)...(19): siRNA sense strand
ugaccaggccguauacaga

SEQ ID NO: 575608 - RNA, 19 nt, Homo sapiens
  misc_RNA (1)...(19): siRNA sense strand
gagcugcaagguacaguug

SEQ ID NO: 575609 - RNA, 19 nt, Homo sapiens
  misc_RNA (1)...(19): siRNA sense strand
agguaaaucugcagaaugg

SEQ ID NO: 575610 - RNA, 19 nt, Homo sapiens
  misc_RNA (1)...(19): siRNA sense strand
ccaacgggcaggugacuug

SEQ ID NO: 575611 - RNA, 19 nt, Homo sapiens
  misc_RNA (1)...(19): siRNA sense strand
guccuccgaugucaaauca

SEQ ID NO: 575612 - RNA, 19 nt, Homo sapiens
  misc_RNA (1)...(19): siRNA sense strand
aaguaaaggcaguugauaa

SEQ ID NO: 575613 - RNA, 19 nt, Homo sapiens
  misc_RNA (1)...(19): siRNA sense strand
gaauucgcguuuuccgaua

SEQ ID NO: 575614 - RNA, 19 nt, Homo sapiens
  misc_RNA (1)...(19): siRNA sense strand
cccgggaucugcuucuuug

SEQ ID NO: 575615 - RNA, 19 nt, Homo sapiens
  misc_RNA (1)...(19): siRNA sense strand
gauagaaggagcugcugau

SEQ ID NO: 575616 - RNA, 19 nt, Homo sapiens
  misc_RNA (1)...(19): siRNA sense strand
gcucagcccgagugauuau

SEQ ID NO: 575617 - RNA, 19 nt, Homo sapiens
  misc_RNA (1)...(19): siRNA sense strand
acacaguauucgugaagga

SEQ ID NO: 575618 - RNA, 19 nt, Homo sapiens
  misc_RNA (1)...(19): siRNA sense strand
guguccaccuucaagaauu

SEQ ID NO: 575619 - RNA, 19 nt, Homo sapiens
  misc_RNA (1)...(19): siRNA sense strand
gugaaagugcuggauguaa

SEQ ID NO: 575620 - RNA, 19 nt, Homo sapiens
  misc_RNA (1)...(19): siRNA sense strand
uauacagaguccacuuguu

SEQ ID NO: 575621 - RNA, 19 nt, Homo sapiens
  misc_RNA (1)...(19): siRNA sense strand
gagaagaaacaccagaacu

SEQ ID NO: 575622 - RNA, 19 nt, Homo sapiens
  misc_RNA (1)...(19): siRNA sense strand
guacacaguauucgugaag

SEQ ID NO: 575623 - RNA, 19 nt, Homo sapiens
  misc_RNA (1)...(19): siRNA sense strand
ggcagagaacaaauaauau

SEQ ID NO: 575624 - RNA, 19 nt, Homo sapiens
  misc_RNA (1)...(19): siRNA sense strand
ggugaaagugcuggaugua

SEQ ID NO: 575625 - RNA, 19 nt, Homo sapiens
  misc_RNA (1)...(19): siRNA sense strand
ugguauuucucgugacauu

SEQ ID NO: 575626 - RNA, 19 nt, Homo sapiens
  misc_RNA (1)...(19): siRNA sense strand
caaacacggcaccuucguu

SEQ ID NO: 575627 - RNA, 19 nt, Homo sapiens
  misc_RNA (1)...(19): siRNA sense strand
ucaagaauuacuacucguu

SEQ ID NO: 575628 - RNA, 19 nt, Homo sapiens
  misc_RNA (1)...(19): siRNA sense strand
gaaggugaaagacauuaac

SEQ ID NO: 575629 - RNA, 19 nt, Homo sapiens
  misc_RNA (1)...(19): siRNA sense strand
gaacuggcggucacuucau

SEQ ID NO: 575630 - RNA, 19 nt, Homo sapiens
  misc_RNA (1)...(19): siRNA sense strand
aaaugauaaugcuccagaa

SEQ ID NO: 575631 - RNA, 19 nt, Homo sapiens
  misc_RNA (1)...(19): siRNA sense strand
ugaaggugaaagacauuaa

SEQ ID NO: 575632 - RNA, 19 nt, Homo sapiens
  misc_RNA (1)...(19): siRNA sense strand
gcagcccgaguacacagua

SEQ ID NO: 575633 - RNA, 19 nt, Homo sapiens
  misc_RNA (1)...(19): siRNA sense strand
gugacuugcuccuuaaugc

SEQ ID NO: 575634 - RNA, 19 nt, Homo sapiens
  misc_RNA (1)...(19): siRNA sense strand
cgaugucaaaucacuguaa

SEQ ID NO: 575635 - RNA, 19 nt, Homo sapiens
  misc_RNA (1)...(19): siRNA sense strand
guauuucucgugacauuca

SEQ ID NO: 575636 - RNA, 19 nt, Homo sapiens
  misc_RNA (1)...(19): siRNA sense strand
gacaggccgcugcagguuu

SEQ ID NO: 575637 - RNA, 19 nt, Homo sapiens
  misc_RNA (1)...(19): siRNA sense strand
aaaccggagcugcaaggua

SEQ ID NO: 575638 - RNA, 19 nt, Homo sapiens
  misc_RNA (1)...(19): siRNA sense strand
augcagacauuggugcuaa

SEQ ID NO: 575639 - RNA, 19 nt, Homo sapiens
  misc_RNA (1)...(19): siRNA sense strand
gugcuggauguaaaugaua

SEQ ID NO: 575640 - RNA, 19 nt, Homo sapiens
  misc_RNA (1)...(19): siRNA sense strand
guaaaggcaguugauaaag

SEQ ID NO: 575641 - RNA, 19 nt, Homo sapiens
  misc_RNA (1)...(19): siRNA sense strand
ucaggagaaauuagguuaa

SEQ ID NO: 575642 - RNA, 19 nt, Homo sapiens
  misc_RNA (1)...(19): siRNA sense strand
cauuagugaccacauuaaa

SEQ ID NO: 575643 - RNA, 19 nt, Homo sapiens
  misc_RNA (1)...(19): siRNA sense strand
aacauuagugaccacauua

SEQ ID NO: 575644 - RNA, 19 nt, Homo sapiens
  misc_RNA (1)...(19): siRNA sense strand
ggauguagaggcaagugau

SEQ ID NO: 575645 - RNA, 19 nt, Homo sapiens
  misc_RNA (1)...(19): siRNA sense strand
caguauucgugaaggagaa

SEQ ID NO: 575646 - RNA, 19 nt, Homo sapiens
  misc_RNA (1)...(19): siRNA sense strand
gauaauccacccgucuuca

SEQ ID NO: 575647 - RNA, 19 nt, Homo sapiens
  misc_RNA (1)...(19): siRNA sense strand
gaggugaaggugaaagaca

SEQ ID NO: 575648 - RNA, 19 nt, Homo sapiens
  misc_RNA (1)...(19): siRNA sense strand
uguuagagacuacagcaaa

SEQ ID NO: 575649 - RNA, 19 nt, Homo sapiens
  misc_RNA (1)...(19): siRNA sense strand
gugaaggugaaagacauua

SEQ ID NO: 575650 - RNA, 19 nt, Homo sapiens
  misc_RNA (1)...(19): siRNA sense strand
agaggcaagugaugaacug

SEQ ID NO: 575651 - RNA, 19 nt, Homo sapiens
  misc_RNA (1)...(19): siRNA sense strand
ucucgugacauucaagaaa

SEQ ID NO: 575652 - RNA, 19 nt, Homo sapiens
  misc_RNA (1)...(19): siRNA sense strand
uguauuugccuaucagaga

SEQ ID NO: 575653 - RNA, 19 nt, Homo sapiens
  misc_RNA (1)...(19): siRNA sense strand
ggaaguccuccgaugucaa

SEQ ID NO: 575654 - RNA, 19 nt, Homo sapiens
  misc_RNA (1)...(19): siRNA sense strand
gaacuucacuuauuacuga

SEQ ID NO: 575655 - RNA, 19 nt, Homo sapiens
  misc_RNA (1)...(19): siRNA sense strand
gcaggugacuugcuccuua

SEQ ID NO: 575656 - RNA, 19 nt, Homo sapiens
  misc_RNA (1)...(19): siRNA sense strand
gaacauuagugaccacauu

SEQ ID NO: 575657 - RNA, 19 nt, Homo sapiens
  misc_RNA (1)...(19): siRNA sense strand
ucaaaucacuguaagguuu

SEQ ID NO: 575658 - RNA, 19 nt, Homo sapiens
  misc_RNA (1)...(19): siRNA sense strand
gggcagagaacaaauaaua

SEQ ID NO: 575659 - RNA, 19 nt, Homo sapiens
  misc_RNA (1)...(19): siRNA sense strand
caccagaacuucacuuauu

SEQ ID NO: 575660 - RNA, 19 nt, Homo sapiens
  misc_RNA (1)...(19): siRNA sense strand
gaacugaguaaaucucuuu

SEQ ID NO: 575661 - RNA, 19 nt, Homo sapiens
  misc_RNA (1)...(19): siRNA sense strand
guaaaucucuuuggcuuga

SEQ ID NO: 575662 - RNA, 19 nt, Homo sapiens
  misc_RNA (1)...(19): siRNA sense strand
ugaaagugcuggauguaaa

SEQ ID NO: 575663 - RNA, 19 nt, Homo sapiens
  misc_RNA (1)...(19): siRNA sense strand
gaaucuagacuccugaauu

SEQ ID NO: 575664 - RNA, 19 nt, Homo sapiens
  misc_RNA (1)...(19): siRNA sense strand
auacagaguccacuuguua

SEQ ID NO: 575665 - RNA, 19 nt, Homo sapiens
  misc_RNA (1)...(19): siRNA sense strand
cuaacgcucuucuaacgua

SEQ ID NO: 575666 - RNA, 19 nt, Homo sapiens
  misc_RNA (1)...(19): siRNA sense strand
gaaguccuccgaugucaaa

SEQ ID NO: 575667 - RNA, 19 nt, Homo sapiens
  misc_RNA (1)...(19): siRNA sense strand
gaaacaaaauccuacgaaa

SEQ ID NO: 575668 - RNA, 19 nt, Homo sapiens
  misc_RNA (1)...(19): siRNA sense strand
ggagguaaaucugcagaau

SEQ ID NO: 575669 - RNA, 19 nt, Homo sapiens
  misc_RNA (1)...(19): siRNA sense strand
aaucuagacuccugaauuc

SEQ ID NO: 575670 - RNA, 19 nt, Homo sapiens
  misc_RNA (1)...(19): siRNA sense strand
agaaggagcugcugaugca

SEQ ID NO: 575671 - RNA, 19 nt, Homo sapiens
  misc_RNA (1)...(19): siRNA sense strand
accagaacuucacuuauua

SEQ ID NO: 575672 - RNA, 19 nt, Homo sapiens
  misc_RNA (1)...(19): siRNA sense strand
gugaugaacugaguaaauc

SEQ ID NO: 575673 - RNA, 19 nt, Homo sapiens
  misc_RNA (1)...(19): siRNA sense strand
ugacgaagguguaaauggu

SEQ ID NO: 575674 - RNA, 19 nt, Homo sapiens
  misc_RNA (1)...(19): siRNA sense strand
gugaaagacauuaacgaua

SEQ ID NO: 575675 - RNA, 19 nt, Homo sapiens
  misc_RNA (1)...(19): siRNA sense strand
uaaaggcaguugauaaagg

SEQ ID NO: 575676 - RNA, 19 nt, Homo sapiens
  misc_RNA (1)...(19): siRNA sense strand
gcgagagccugucggucua

SEQ ID NO: 575677 - RNA, 19 nt, Homo sapiens
  misc_RNA (1)...(19): siRNA sense strand
cuacgaaauucaaguaaag

SEQ ID NO: 575678 - RNA, 19 nt, Homo sapiens
  misc_RNA (1)...(19): siRNA sense strand
agaacgcgcugguguccua

SEQ ID NO: 575679 - RNA, 19 nt, Homo sapiens
  misc_RNA (1)...(19): siRNA sense strand
ggagguggccgacgugaau

SEQ ID NO: 575680 - RNA, 19 nt, Homo sapiens
  misc_RNA (1)...(19): siRNA sense strand
gaaagugcuggauguaaau

SEQ ID NO: 575681 - RNA, 19 nt, Homo sapiens
  misc_RNA (1)...(19): siRNA sense strand
aaaggcaguugauaaagga

SEQ ID NO: 575682 - RNA, 19 nt, Homo sapiens
  misc_RNA (1)...(19): siRNA sense strand
ggcggucacuucauuguau

SEQ ID NO: 575683 - RNA, 19 nt, Homo sapiens
  misc_RNA (1)...(19): siRNA sense strand
caagugaugaacugaguaa

SEQ ID NO: 575684 - RNA, 19 nt, Homo sapiens
  misc_RNA (1)...(19): siRNA sense strand
uguccaccuucaagaauua

SEQ ID NO: 575685 - RNA, 19 nt, Homo sapiens
  misc_RNA (1)...(19): siRNA sense strand
caaguaaaggcaguugaua

SEQ ID NO: 575686 - RNA, 19 nt, Homo sapiens
  misc_RNA (1)...(19): siRNA sense strand
ccuacgaaauucaaguaaa

SEQ ID NO: 575687 - RNA, 19 nt, Homo sapiens
  misc_RNA (1)...(19): siRNA sense strand
gugauuauuucucuuugga

SEQ ID NO: 575688 - RNA, 19 nt, Homo sapiens
  misc_RNA (1)...(19): siRNA sense strand
caggugacuugcuccuuaa

SEQ ID NO: 575689 - RNA, 19 nt, Homo sapiens
  misc_RNA (1)...(19): siRNA sense strand
ggauguaaaugauaaugcu

SEQ ID NO: 575690 - RNA, 19 nt, Homo sapiens
  misc_RNA (1)...(19): siRNA sense strand
gauuccagcucaggagaaa

SEQ ID NO: 575691 - RNA, 19 nt, Homo sapiens
  misc_RNA (1)...(19): siRNA sense strand
guuagagacuacagcaaau

SEQ ID NO: 575692 - RNA, 19 nt, Homo sapiens
  misc_RNA (1)...(19): siRNA sense strand
gaagucgucuuuuccuuug

SEQ ID NO: 575693 - RNA, 19 nt, Homo sapiens
  misc_RNA (1)...(19): siRNA sense strand
ggugcuaacgcucuucuaa

SEQ ID NO: 575694 - RNA, 19 nt, Homo sapiens
  misc_RNA (1)...(19): siRNA sense strand
ugauaaugcuccagaacug

SEQ ID NO: 575695 - RNA, 19 nt, Homo sapiens
  misc_RNA (1)...(19): siRNA sense strand
cgagugauuauuucucuuu

SEQ ID NO: 575696 - RNA, 19 nt, Homo sapiens
  misc_RNA (1)...(19): siRNA sense strand
gaugucaaaucacuguaag

SEQ ID NO: 575697 - RNA, 19 nt, Homo sapiens
  misc_RNA (1)...(19): siRNA sense strand
agaagaaacaccagaacuu

SEQ ID NO: 575698 - RNA, 19 nt, Homo sapiens
  misc_RNA (1)...(19): siRNA sense strand
gagugauuauuucucuuug

SEQ ID NO: 575699 - RNA, 19 nt, Homo sapiens
  misc_RNA (1)...(19): siRNA sense strand
aguaaaggcaguugauaaa

SEQ ID NO: 575700 - RNA, 19 nt, Homo sapiens
  misc_RNA (1)...(19): siRNA sense strand
agaguccacuuguuagaga

SEQ ID NO: 575701 - RNA, 19 nt, Homo sapiens
  misc_RNA (1)...(19): siRNA sense strand
ggugaaagacauuaacgau

SEQ ID NO: 575702 - RNA, 19 nt, Homo sapiens
  misc_RNA (1)...(19): siRNA sense strand
gcaagugaugaacugagua

SEQ ID NO: 575703 - RNA, 19 nt, Homo sapiens
  misc_RNA (1)...(19): siRNA sense strand
ggcaagugaugaacugagu

SEQ ID NO: 575704 - RNA, 19 nt, Homo sapiens
  misc_RNA (1)...(19): siRNA sense strand
gagguaaaucugcagaaug

SEQ ID NO: 575705 - RNA, 19 nt, Homo sapiens
  misc_RNA (1)...(19): siRNA sense strand
gcggucacuucauuguauu

SEQ ID NO: 575706 - RNA, 19 nt, Homo sapiens
  misc_RNA (1)...(19): siRNA sense strand
gagacuacagcaaauggaa

SEQ ID NO: 575707 - RNA, 19 nt, Homo sapiens
  misc_RNA (1)...(19): siRNA sense strand
ugaccaggccguauacaga

SEQ ID NO: 575708 - RNA, 19 nt, Homo sapiens
  misc_RNA (1)...(19): siRNA sense strand
gagcugcaagguacaguug

SEQ ID NO: 575709 - RNA, 19 nt, Homo sapiens
  misc_RNA (1)...(19): siRNA sense strand
agguaaaucugcagaaugg

SEQ ID NO: 575710 - RNA, 19 nt, Homo sapiens
  misc_RNA (1)...(19): siRNA sense strand
ccaacgggcaggugacuug

SEQ ID NO: 575711 - RNA, 19 nt, Homo sapiens
  misc_RNA (1)...(19): siRNA sense strand
guccuccgaugucaaauca

SEQ ID NO: 575712 - RNA, 19 nt, Homo sapiens
  misc_RNA (1)...(19): siRNA sense strand
aaguaaaggcaguugauaa

SEQ ID NO: 575713 - RNA, 19 nt, Homo sapiens
  misc_RNA (1)...(19): siRNA sense strand
gaauucgcguuuuccgaua

SEQ ID NO: 575714 - RNA, 19 nt, Homo sapiens
  misc_RNA (1)...(19): siRNA sense strand
cccgggaucugcuucuuug

SEQ ID NO: 575715 - RNA, 19 nt, Homo sapiens
  misc_RNA (1)...(19): siRNA sense strand
gauagaaggagcugcugau

SEQ ID NO: 575716 - RNA, 19 nt, Homo sapiens
  misc_RNA (1)...(19): siRNA sense strand
gcucagcccgagugauuau

SEQ ID NO: 575717 - RNA, 19 nt, Homo sapiens
  misc_RNA (1)...(19): siRNA sense strand
acacaguauucgugaagga

SEQ ID NO: 575718 - RNA, 19 nt, Homo sapiens
  misc_RNA (1)...(19): siRNA sense strand
guguccaccuucaagaauu

SEQ ID NO: 575719 - RNA, 19 nt, Homo sapiens
  misc_RNA (1)...(19): siRNA sense strand
gugaaagugcuggauguaa

SEQ ID NO: 575720 - RNA, 19 nt, Homo sapiens
  misc_RNA (1)...(19): siRNA sense strand
uauacagaguccacuuguu

SEQ ID NO: 575721 - RNA, 19 nt, Homo sapiens
  misc_RNA (1)...(19): siRNA sense strand
gagaagaaacaccagaacu

SEQ ID NO: 575722 - RNA, 19 nt, Homo sapiens
  misc_RNA (1)...(19): siRNA sense strand
guacacaguauucgugaag

SEQ ID NO: 575723 - RNA, 19 nt, Homo sapiens
  misc_RNA (1)...(19): siRNA sense strand
ggcagagaacaaauaauau

SEQ ID NO: 575724 - RNA, 19 nt, Homo sapiens
  misc_RNA (1)...(19): siRNA sense strand
ggugaaagugcuggaugua

SEQ ID NO: 575725 - RNA, 19 nt, Homo sapiens
  misc_RNA (1)...(19): siRNA sense strand
ugguauuucucgugacauu

SEQ ID NO: 575726 - RNA, 19 nt, Homo sapiens
  misc_RNA (1)...(19): siRNA sense strand
caaacacggcaccuucguu

SEQ ID NO: 575727 - RNA, 19 nt, Homo sapiens
  misc_RNA (1)...(19): siRNA sense strand
ucaagaauuacuacucguu

SEQ ID NO: 575728 - RNA, 19 nt, Homo sapiens
  misc_RNA (1)...(19): siRNA sense strand
gaaggugaaagacauuaac

SEQ ID NO: 575729 - RNA, 19 nt, Homo sapiens
  misc_RNA (1)...(19): siRNA sense strand
gaacuggcggucacuucau

SEQ ID NO: 575730 - RNA, 19 nt, Homo sapiens
  misc_RNA (1)...(19): siRNA sense strand
aaaugauaaugcuccagaa

SEQ ID NO: 575731 - RNA, 19 nt, Homo sapiens
  misc_RNA (1)...(19): siRNA sense strand
ugaaggugaaagacauuaa

SEQ ID NO: 575732 - RNA, 19 nt, Homo sapiens
  misc_RNA (1)...(19): siRNA sense strand
gcagcccgaguacacagua

SEQ ID NO: 575733 - RNA, 19 nt, Homo sapiens
  misc_RNA (1)...(19): siRNA sense strand
gugacuugcuccuuaaugc

SEQ ID NO: 575734 - RNA, 19 nt, Homo sapiens
  misc_RNA (1)...(19): siRNA sense strand
cgaugucaaaucacuguaa

SEQ ID NO: 575735 - RNA, 19 nt, Homo sapiens
  misc_RNA (1)...(19): siRNA sense strand
guauuucucgugacauuca

SEQ ID NO: 575736 - RNA, 19 nt, Homo sapiens
  misc_RNA (1)...(19): siRNA sense strand
gacaggccgcugcagguuu

SEQ ID NO: 575737 - RNA, 19 nt, Homo sapiens
  misc_RNA (1)...(19): siRNA sense strand
aaaccggagcugcaaggua

SEQ ID NO: 575738 - RNA, 19 nt, Homo sapiens
  misc_RNA (1)...(19): siRNA sense strand
augcagacauuggugcuaa

SEQ ID NO: 575739 - RNA, 19 nt, Homo sapiens
  misc_RNA (1)...(19): siRNA sense strand
gugcuggauguaaaugaua

SEQ ID NO: 575740 - RNA, 19 nt, Homo sapiens
  misc_RNA (1)...(19): siRNA sense strand
guaaaggcaguugauaaag

SEQ ID NO: 575741 - RNA, 19 nt, Homo sapiens
  misc_RNA (1)...(19): siRNA sense strand
ucaggagaaauuagguuaa

SEQ ID NO: 575742 - RNA, 19 nt, Homo sapiens
  misc_RNA (1)...(19): siRNA sense strand
cauuagugaccacauuaaa

SEQ ID NO: 575743 - RNA, 19 nt, Homo sapiens
  misc_RNA (1)...(19): siRNA sense strand
aacauuagugaccacauua

SEQ ID NO: 575744 - RNA, 19 nt, Homo sapiens
  misc_RNA (1)...(19): siRNA sense strand
ggauguagaggcaagugau

SEQ ID NO: 575745 - RNA, 19 nt, Homo sapiens
  misc_RNA (1)...(19): siRNA sense strand
caguauucgugaaggagaa

SEQ ID NO: 575746 - RNA, 19 nt, Homo sapiens
  misc_RNA (1)...(19): siRNA sense strand
gauaauccacccgucuuca

SEQ ID NO: 575747 - RNA, 19 nt, Homo sapiens
  misc_RNA (1)...(19): siRNA sense strand
gaggugaaggugaaagaca

SEQ ID NO: 575748 - RNA, 19 nt, Homo sapiens
  misc_RNA (1)...(19): siRNA sense strand
uguuagagacuacagcaaa

SEQ ID NO: 575749 - RNA, 19 nt, Homo sapiens
  misc_RNA (1)...(19): siRNA sense strand
gugaaggugaaagacauua

SEQ ID NO: 575750 - RNA, 19 nt, Homo sapiens
  misc_RNA (1)...(19): siRNA sense strand
agaggcaagugaugaacug

SEQ ID NO: 575751 - RNA, 19 nt, Homo sapiens
  misc_RNA (1)...(19): siRNA sense strand
ucucgugacauucaagaaa

SEQ ID NO: 575752 - RNA, 19 nt, Homo sapiens
  misc_RNA (1)...(19): siRNA sense strand
uguauuugccuaucagaga

SEQ ID NO: 575753 - RNA, 19 nt, Homo sapiens
  misc_RNA (1)...(19): siRNA sense strand
ggaaguccuccgaugucaa

SEQ ID NO: 575754 - RNA, 19 nt, Homo sapiens
  misc_RNA (1)...(19): siRNA sense strand
gaacuucacuuauuacuga

SEQ ID NO: 575755 - RNA, 19 nt, Homo sapiens
  misc_RNA (1)...(19): siRNA sense strand
gcaggugacuugcuccuua

SEQ ID NO: 575756 - RNA, 19 nt, Homo sapiens
  misc_RNA (1)...(19): siRNA sense strand
gaacauuagugaccacauu

SEQ ID NO: 575757 - RNA, 19 nt, Homo sapiens
  misc_RNA (1)...(19): siRNA sense strand
ucaaaucacuguaagguuu

SEQ ID NO: 575758 - RNA, 19 nt, Homo sapiens
  misc_RNA (1)...(19): siRNA sense strand
gggcagagaacaaauaaua

SEQ ID NO: 575759 - RNA, 19 nt, Homo sapiens
  misc_RNA (1)...(19): siRNA sense strand
caccagaacuucacuuauu

SEQ ID NO: 575760 - RNA, 19 nt, Homo sapiens
  misc_RNA (1)...(19): siRNA sense strand
gaacugaguaaaucucuuu

SEQ ID NO: 575761 - RNA, 19 nt, Homo sapiens
  misc_RNA (1)...(19): siRNA sense strand
guaaaucucuuuggcuuga

SEQ ID NO: 575762 - RNA, 19 nt, Homo sapiens
  misc_RNA (1)...(19): siRNA sense strand
ugaaagugcuggauguaaa

SEQ ID NO: 575763 - RNA, 19 nt, Homo sapiens
  misc_RNA (1)...(19): siRNA sense strand
gaaucuagacuccugaauu

SEQ ID NO: 575764 - RNA, 19 nt, Homo sapiens
  misc_RNA (1)...(19): siRNA sense strand
auacagaguccacuuguua

SEQ ID NO: 575765 - RNA, 19 nt, Homo sapiens
  misc_RNA (1)...(19): siRNA sense strand
cuaacgcucuucuaacgua

SEQ ID NO: 575766 - RNA, 19 nt, Homo sapiens
  misc_RNA (1)...(19): siRNA sense strand
gaaguccuccgaugucaaa

SEQ ID NO: 575767 - RNA, 19 nt, Homo sapiens
  misc_RNA (1)...(19): siRNA sense strand
gaaacaaaauccuacgaaa

SEQ ID NO: 575768 - RNA, 19 nt, Homo sapiens
  misc_RNA (1)...(19): siRNA sense strand
ggagguaaaucugcagaau

SEQ ID NO: 575769 - RNA, 19 nt, Homo sapiens
  misc_RNA (1)...(19): siRNA sense strand
aaucuagacuccugaauuc

SEQ ID NO: 575770 - RNA, 19 nt, Homo sapiens
  misc_RNA (1)...(19): siRNA sense strand
agaaggagcugcugaugca

SEQ ID NO: 575771 - RNA, 19 nt, Homo sapiens
  misc_RNA (1)...(19): siRNA sense strand
accagaacuucacuuauua

SEQ ID NO: 575772 - RNA, 19 nt, Homo sapiens
  misc_RNA (1)...(19): siRNA sense strand
gugaugaacugaguaaauc

SEQ ID NO: 575773 - RNA, 19 nt, Homo sapiens
  misc_RNA (1)...(19): siRNA sense strand
ugacgaagguguaaauggu

SEQ ID NO: 575774 - RNA, 19 nt, Homo sapiens
  misc_RNA (1)...(19): siRNA sense strand
gugaaagacauuaacgaua

SEQ ID NO: 575775 - RNA, 19 nt, Homo sapiens
  misc_RNA (1)...(19): siRNA sense strand
uaaaggcaguugauaaagg

SEQ ID NO: 575776 - RNA, 19 nt, Homo sapiens
  misc_RNA (1)...(19): siRNA sense strand
gcgagagccugucggucua

SEQ ID NO: 575777 - RNA, 19 nt, Homo sapiens
  misc_RNA (1)...(19): siRNA sense strand
cuacgaaauucaaguaaag

SEQ ID NO: 575778 - RNA, 19 nt, Homo sapiens
  misc_RNA (1)...(19): siRNA sense strand
agaacgcgcugguguccua

SEQ ID NO: 575779 - RNA, 19 nt, Homo sapiens
  misc_RNA (1)...(19): siRNA sense strand
ggagguggccgacgugaau

SEQ ID NO: 575780 - RNA, 19 nt, Homo sapiens
  misc_RNA (1)...(19): siRNA sense strand
gaaagugcuggauguaaau

SEQ ID NO: 575781 - RNA, 19 nt, Homo sapiens
  misc_RNA (1)...(19): siRNA sense strand
aaaggcaguugauaaagga

SEQ ID NO: 575782 - RNA, 19 nt, Homo sapiens
  misc_RNA (1)...(19): siRNA sense strand
ggcggucacuucauuguau

SEQ ID NO: 575783 - RNA, 19 nt, Homo sapiens
  misc_RNA (1)...(19): siRNA sense strand
caagugaugaacugaguaa

SEQ ID NO: 575784 - RNA, 19 nt, Homo sapiens
  misc_RNA (1)...(19): siRNA sense strand
uguccaccuucaagaauua

SEQ ID NO: 575785 - RNA, 19 nt, Homo sapiens
  misc_RNA (1)...(19): siRNA sense strand
caaguaaaggcaguugaua

SEQ ID NO: 575786 - RNA, 19 nt, Homo sapiens
  misc_RNA (1)...(19): siRNA sense strand
ccuacgaaauucaaguaaa

SEQ ID NO: 575787 - RNA, 19 nt, Homo sapiens
  misc_RNA (1)...(19): siRNA sense strand
gugauuauuucucuuugga

SEQ ID NO: 575788 - RNA, 19 nt, Homo sapiens
  misc_RNA (1)...(19): siRNA sense strand
caggugacuugcuccuuaa

SEQ ID NO: 575789 - RNA, 19 nt, Homo sapiens
  misc_RNA (1)...(19): siRNA sense strand
ggauguaaaugauaaugcu

SEQ ID NO: 575790 - RNA, 19 nt, Homo sapiens
  misc_RNA (1)...(19): siRNA sense strand
gauuccagcucaggagaaa

SEQ ID NO: 575791 - RNA, 19 nt, Homo sapiens
  misc_RNA (1)...(19): siRNA sense strand
guuagagacuacagcaaau

SEQ ID NO: 575792 - RNA, 19 nt, Homo sapiens
  misc_RNA (1)...(19): siRNA sense strand
gaagucgucuuuuccuuug

SEQ ID NO: 575793 - RNA, 19 nt, Homo sapiens
  misc_RNA (1)...(19): siRNA sense strand
ggugcuaacgcucuucuaa

SEQ ID NO: 575794 - RNA, 19 nt, Homo sapiens
  misc_RNA (1)...(19): siRNA sense strand
ugauaaugcuccagaacug

SEQ ID NO: 575795 - RNA, 19 nt, Homo sapiens
  misc_RNA (1)...(19): siRNA sense strand
cgagugauuauuucucuuu

SEQ ID NO: 575796 - RNA, 19 nt, Homo sapiens
  misc_RNA (1)...(19): siRNA sense strand
gaugucaaaucacuguaag

SEQ ID NO: 575797 - RNA, 19 nt, Homo sapiens
  misc_RNA (1)...(19): siRNA sense strand
agaagaaacaccagaacuu

SEQ ID NO: 575798 - RNA, 19 nt, Homo sapiens
  misc_RNA (1)...(19): siRNA sense strand
gagugauuauuucucuuug

SEQ ID NO: 575799 - RNA, 19 nt, Homo sapiens
  misc_RNA (1)...(19): siRNA sense strand
aguaaaggcaguugauaaa

SEQ ID NO: 575800 - RNA, 19 nt, Homo sapiens
  misc_RNA (1)...(19): siRNA sense strand
agaguccacuuguuagaga

SEQ ID NO: 575801 - RNA, 19 nt, Homo sapiens
  misc_RNA (1)...(19): siRNA sense strand
ggugaaagacauuaacgau

SEQ ID NO: 575802 - RNA, 19 nt, Homo sapiens
  misc_RNA (1)...(19): siRNA sense strand
gcaagugaugaacugagua

SEQ ID NO: 575803 - RNA, 19 nt, Homo sapiens
  misc_RNA (1)...(19): siRNA sense strand
ggcaagugaugaacugagu

SEQ ID NO: 575804 - RNA, 19 nt, Homo sapiens
  misc_RNA (1)...(19): siRNA sense strand
gagguaaaucugcagaaug

SEQ ID NO: 575805 - RNA, 19 nt, Homo sapiens
  misc_RNA (1)...(19): siRNA sense strand
gcggucacuucauuguauu

SEQ ID NO: 575806 - RNA, 19 nt, Homo sapiens
  misc_RNA (1)...(19): siRNA sense strand
gagacuacagcaaauggaa

SEQ ID NO: 575807 - RNA, 19 nt, Homo sapiens
  misc_RNA (1)...(19): siRNA sense strand
ugaccaggccguauacaga

SEQ ID NO: 575808 - RNA, 19 nt, Homo sapiens
  misc_RNA (1)...(19): siRNA sense strand
gagcugcaagguacaguug

SEQ ID NO: 575809 - RNA, 19 nt, Homo sapiens
  misc_RNA (1)...(19): siRNA sense strand
agguaaaucugcagaaugg

SEQ ID NO: 575810 - RNA, 19 nt, Homo sapiens
  misc_RNA (1)...(19): siRNA sense strand
ccaacgggcaggugacuug

SEQ ID NO: 575811 - RNA, 19 nt, Homo sapiens
  misc_RNA (1)...(19): siRNA sense strand
guccuccgaugucaaauca

SEQ ID NO: 575812 - RNA, 19 nt, Homo sapiens
  misc_RNA (1)...(19): siRNA sense strand
aaguaaaggcaguugauaa

SEQ ID NO: 575813 - RNA, 19 nt, Homo sapiens
  misc_RNA (1)...(19): siRNA sense strand
gaauucgcguuuuccgaua

SEQ ID NO: 575814 - RNA, 19 nt, Homo sapiens
  misc_RNA (1)...(19): siRNA sense strand
cccgggaucugcuucuuug

SEQ ID NO: 575815 - RNA, 19 nt, Homo sapiens
  misc_RNA (1)...(19): siRNA sense strand
gauagaaggagcugcugau

SEQ ID NO: 575816 - RNA, 19 nt, Homo sapiens
  misc_RNA (1)...(19): siRNA sense strand
gcucagcccgagugauuau

SEQ ID NO: 575817 - RNA, 19 nt, Homo sapiens
  misc_RNA (1)...(19): siRNA sense strand
acacaguauucgugaagga

SEQ ID NO: 575818 - RNA, 19 nt, Homo sapiens
  misc_RNA (1)...(19): siRNA sense strand
guguccaccuucaagaauu

SEQ ID NO: 575819 - RNA, 19 nt, Homo sapiens
  misc_RNA (1)...(19): siRNA sense strand
gugaaagugcuggauguaa

SEQ ID NO: 575820 - RNA, 19 nt, Homo sapiens
  misc_RNA (1)...(19): siRNA sense strand
uauacagaguccacuuguu

SEQ ID NO: 575821 - RNA, 19 nt, Homo sapiens
  misc_RNA (1)...(19): siRNA sense strand
gagaagaaacaccagaacu

SEQ ID NO: 575822 - RNA, 19 nt, Homo sapiens
  misc_RNA (1)...(19): siRNA sense strand
guacacaguauucgugaag

SEQ ID NO: 575823 - RNA, 19 nt, Homo sapiens
  misc_RNA (1)...(19): siRNA sense strand
ggcagagaacaaauaauau

SEQ ID NO: 575824 - RNA, 19 nt, Homo sapiens
  misc_RNA (1)...(19): siRNA sense strand
ggugaaagugcuggaugua

SEQ ID NO: 575825 - RNA, 19 nt, Homo sapiens
  misc_RNA (1)...(19): siRNA sense strand
ugguauuucucgugacauu

SEQ ID NO: 575826 - RNA, 19 nt, Homo sapiens
  misc_RNA (1)...(19): siRNA sense strand
caaacacggcaccuucguu

SEQ ID NO: 575827 - RNA, 19 nt, Homo sapiens
  misc_RNA (1)...(19): siRNA sense strand
ucaagaauuacuacucguu

SEQ ID NO: 575828 - RNA, 19 nt, Homo sapiens
  misc_RNA (1)...(19): siRNA sense strand
gaaggugaaagacauuaac

SEQ ID NO: 575829 - RNA, 19 nt, Homo sapiens
  misc_RNA (1)...(19): siRNA sense strand
gaacuggcggucacuucau

SEQ ID NO: 575830 - RNA, 19 nt, Homo sapiens
  misc_RNA (1)...(19): siRNA sense strand
aaaugauaaugcuccagaa

SEQ ID NO: 575831 - RNA, 19 nt, Homo sapiens
  misc_RNA (1)...(19): siRNA sense strand
ugaaggugaaagacauuaa

SEQ ID NO: 575832 - RNA, 19 nt, Homo sapiens
  misc_RNA (1)...(19): siRNA sense strand
gcagcccgaguacacagua

SEQ ID NO: 575833 - RNA, 19 nt, Homo sapiens
  misc_RNA (1)...(19): siRNA sense strand
gugacuugcuccuuaaugc

SEQ ID NO: 575834 - RNA, 19 nt, Homo sapiens
  misc_RNA (1)...(19): siRNA sense strand
cgaugucaaaucacuguaa

SEQ ID NO: 575835 - RNA, 19 nt, Homo sapiens
  misc_RNA (1)...(19): siRNA sense strand
guauuucucgugacauuca

SEQ ID NO: 575836 - RNA, 19 nt, Homo sapiens
  misc_RNA (1)...(19): siRNA sense strand
gacaggccgcugcagguuu

SEQ ID NO: 575837 - RNA, 19 nt, Homo sapiens
  misc_RNA (1)...(19): siRNA sense strand
aaaccggagcugcaaggua

SEQ ID NO: 575838 - RNA, 19 nt, Homo sapiens
  misc_RNA (1)...(19): siRNA sense strand
augcagacauuggugcuaa

SEQ ID NO: 575839 - RNA, 19 nt, Homo sapiens
  misc_RNA (1)...(19): siRNA sense strand
gugcuggauguaaaugaua

SEQ ID NO: 575840 - RNA, 19 nt, Homo sapiens
  misc_RNA (1)...(19): siRNA sense strand
guaaaggcaguugauaaag

SEQ ID NO: 575841 - RNA, 19 nt, Homo sapiens
  misc_RNA (1)...(19): siRNA sense strand
ucaggagaaauuagguuaa

SEQ ID NO: 575842 - RNA, 19 nt, Homo sapiens
  misc_RNA (1)...(19): siRNA sense strand
cauuagugaccacauuaaa

SEQ ID NO: 575843 - RNA, 19 nt, Homo sapiens
  misc_RNA (1)...(19): siRNA sense strand
aacauuagugaccacauua

SEQ ID NO: 575844 - RNA, 19 nt, Homo sapiens
  misc_RNA (1)...(19): siRNA sense strand
ggauguagaggcaagugau

SEQ ID NO: 575845 - RNA, 19 nt, Homo sapiens
  misc_RNA (1)...(19): siRNA sense strand
caguauucgugaaggagaa

SEQ ID NO: 575846 - RNA, 19 nt, Homo sapiens
  misc_RNA (1)...(19): siRNA sense strand
gauaauccacccgucuuca

SEQ ID NO: 575847 - RNA, 19 nt, Homo sapiens
  misc_RNA (1)...(19): siRNA sense strand
gaggugaaggugaaagaca

SEQ ID NO: 575848 - RNA, 19 nt, Homo sapiens
  misc_RNA (1)...(19): siRNA sense strand
uguuagagacuacagcaaa

SEQ ID NO: 575849 - RNA, 19 nt, Homo sapiens
  misc_RNA (1)...(19): siRNA sense strand
gugaaggugaaagacauua

SEQ ID NO: 575850 - RNA, 19 nt, Homo sapiens
  misc_RNA (1)...(19): siRNA sense strand
agaggcaagugaugaacug

SEQ ID NO: 575851 - RNA, 19 nt, Homo sapiens
  misc_RNA (1)...(19): siRNA sense strand
ucucgugacauucaagaaa

SEQ ID NO: 575852 - RNA, 19 nt, Homo sapiens
  misc_RNA (1)...(19): siRNA sense strand
uguauuugccuaucagaga

SEQ ID NO: 575853 - RNA, 19 nt, Homo sapiens
  misc_RNA (1)...(19): siRNA sense strand
ggaaguccuccgaugucaa

SEQ ID NO: 575854 - RNA, 19 nt, Homo sapiens
  misc_RNA (1)...(19): siRNA sense strand
ggaaggagcuacagucaga

SEQ ID NO: 575855 - RNA, 19 nt, Homo sapiens
  misc_RNA (1)...(19): siRNA sense strand
ggaacaaguuuaccaaaga

SEQ ID NO: 575856 - RNA, 19 nt, Homo sapiens
  misc_RNA (1)...(19): siRNA sense strand
gaaauuccgucuccucuuc

SEQ ID NO: 575857 - RNA, 19 nt, Homo sapiens
  misc_RNA (1)...(19): siRNA sense strand
ggauggagaugcugacaga

SEQ ID NO: 575858 - RNA, 19 nt, Homo sapiens
  misc_RNA (1)...(19): siRNA sense strand
gcuggucccuuauaaacua

SEQ ID NO: 575859 - RNA, 19 nt, Homo sapiens
  misc_RNA (1)...(19): siRNA sense strand
uuaagaggauguuugauga

SEQ ID NO: 575860 - RNA, 19 nt, Homo sapiens
  misc_RNA (1)...(19): siRNA sense strand
gggagaauguuccugaaug

SEQ ID NO: 575861 - RNA, 19 nt, Homo sapiens
  misc_RNA (1)...(19): siRNA sense strand
caauguacaugguggacua

SEQ ID NO: 575862 - RNA, 19 nt, Homo sapiens
  misc_RNA (1)...(19): siRNA sense strand
gcucagcgcuguccaaacu

SEQ ID NO: 575863 - RNA, 19 nt, Homo sapiens
  misc_RNA (1)...(19): siRNA sense strand
ucacgggucugccugauga

SEQ ID NO: 575864 - RNA, 19 nt, Homo sapiens
  misc_RNA (1)...(19): siRNA sense strand
aguauccacuucaucauua

SEQ ID NO: 575865 - RNA, 19 nt, Homo sapiens
  misc_RNA (1)...(19): siRNA sense strand
acaagcggaucaagaguaa

SEQ ID NO: 575866 - RNA, 19 nt, Homo sapiens
  misc_RNA (1)...(19): siRNA sense strand
uagaggagguguuugaugu

SEQ ID NO: 575867 - RNA, 19 nt, Homo sapiens
  misc_RNA (1)...(19): siRNA sense strand
gaacaaguuuaccaaagac

SEQ ID NO: 575868 - RNA, 19 nt, Homo sapiens
  misc_RNA (1)...(19): siRNA sense strand
gcaacagcauccaguuugu

SEQ ID NO: 575869 - RNA, 19 nt, Homo sapiens
  misc_RNA (1)...(19): siRNA sense strand
cgacaucgccaacacacua

SEQ ID NO: 575870 - RNA, 19 nt, Homo sapiens
  misc_RNA (1)...(19): siRNA sense strand
caucggaggauucugguua

SEQ ID NO: 575871 - RNA, 19 nt, Homo sapiens
  misc_RNA (1)...(19): siRNA sense strand
gaagagacagggcuuucaa

SEQ ID NO: 575872 - RNA, 19 nt, Homo sapiens
  misc_RNA (1)...(19): siRNA sense strand
gggaacaaguuuaccaaag

SEQ ID NO: 575873 - RNA, 19 nt, Homo sapiens
  misc_RNA (1)...(19): siRNA sense strand
gguguuugauguucuuuau

SEQ ID NO: 575874 - RNA, 19 nt, Homo sapiens
  misc_RNA (1)...(19): siRNA sense strand
gcucagauguguaccuucu

SEQ ID NO: 575875 - RNA, 19 nt, Homo sapiens
  misc_RNA (1)...(19): siRNA sense strand
cgggaccucuuaauuacua

SEQ ID NO: 575876 - RNA, 19 nt, Homo sapiens
  misc_RNA (1)...(19): siRNA sense strand
gaacggugucucccugauu

SEQ ID NO: 575877 - RNA, 19 nt, Homo sapiens
  misc_RNA (1)...(19): siRNA sense strand
gaaggccagccgaguauga

SEQ ID NO: 575878 - RNA, 19 nt, Homo sapiens
  misc_RNA (1)...(19): siRNA sense strand
ggagaauguuccugaaugc

SEQ ID NO: 575879 - RNA, 19 nt, Homo sapiens
  misc_RNA (1)...(19): siRNA sense strand
gugugcagauccuguuuaa

SEQ ID NO: 575880 - RNA, 19 nt, Homo sapiens
  misc_RNA (1)...(19): siRNA sense strand
ggagguguuugauguucuu

SEQ ID NO: 575881 - RNA, 19 nt, Homo sapiens
  misc_RNA (1)...(19): siRNA sense strand
gauguuugaugagcgaauu

SEQ ID NO: 575882 - RNA, 19 nt, Homo sapiens
  misc_RNA (1)...(19): siRNA sense strand
gagacagggcuuucaagaa

SEQ ID NO: 575883 - RNA, 19 nt, Homo sapiens
  misc_RNA (1)...(19): siRNA sense strand
gaggagguguuugauguuc

SEQ ID NO: 575884 - RNA, 19 nt, Homo sapiens
  misc_RNA (1)...(19): siRNA sense strand
ggaaugcucggucagacaa

SEQ ID NO: 575885 - RNA, 19 nt, Homo sapiens
  misc_RNA (1)...(19): siRNA sense strand
guauccacuucaucauuaa

SEQ ID NO: 575886 - RNA, 19 nt, Homo sapiens
  misc_RNA (1)...(19): siRNA sense strand
gaugguagaggagguguuu

SEQ ID NO: 575887 - RNA, 19 nt, Homo sapiens
  misc_RNA (1)...(19): siRNA sense strand
cauaguauccacuucauca

SEQ ID NO: 575888 - RNA, 19 nt, Homo sapiens
  misc_RNA (1)...(19): siRNA sense strand
ucccgggaccucuuaauua

SEQ ID NO: 575889 - RNA, 19 nt, Homo sapiens
  misc_RNA (1)...(19): siRNA sense strand
gcuccaacccuuugcagaa

SEQ ID NO: 575890 - RNA, 19 nt, Homo sapiens
  misc_RNA (1)...(19): siRNA sense strand
cccaaagccugaugaagau

SEQ ID NO: 575891 - RNA, 19 nt, Homo sapiens
  misc_RNA (1)...(19): siRNA sense strand
uccaaggacucaucccaaa

SEQ ID NO: 575892 - RNA, 19 nt, Homo sapiens
  misc_RNA (1)...(19): siRNA sense strand
ucccaaagccugaugaaga

SEQ ID NO: 575893 - RNA, 19 nt, Homo sapiens
  misc_RNA (1)...(19): siRNA sense strand
ucauuaagaggauguuuga

SEQ ID NO: 575894 - RNA, 19 nt, Homo sapiens
  misc_RNA (1)...(19): siRNA sense strand
gcauccaguuugucaucaa

SEQ ID NO: 575895 - RNA, 19 nt, Homo sapiens
  misc_RNA (1)...(19): siRNA sense strand
cagcaacagcauccaguuu

SEQ ID NO: 575896 - RNA, 19 nt, Homo sapiens
  misc_RNA (1)...(19): siRNA sense strand
aagaucaaguucacaguca

SEQ ID NO: 575897 - RNA, 19 nt, Homo sapiens
  misc_RNA (1)...(19): siRNA sense strand
uccaggaccuuuucaauaa

SEQ ID NO: 575898 - RNA, 19 nt, Homo sapiens
  misc_RNA (1)...(19): siRNA sense strand
ucacugagggagucaaaga

SEQ ID NO: 575899 - RNA, 19 nt, Homo sapiens
  misc_RNA (1)...(19): siRNA sense strand
gccaagcuccggaagauuc

SEQ ID NO: 575900 - RNA, 19 nt, Homo sapiens
  misc_RNA (1)...(19): siRNA sense strand
gggagcaggugaaggaacu

SEQ ID NO: 575901 - RNA, 19 nt, Homo sapiens
  misc_RNA (1)...(19): siRNA sense strand
caaagccugaugaagauga

SEQ ID NO: 575902 - RNA, 19 nt, Homo sapiens
  misc_RNA (1)...(19): siRNA sense strand
ccaaggugccagccaaaga

SEQ ID NO: 575903 - RNA, 19 nt, Homo sapiens
  misc_RNA (1)...(19): siRNA sense strand
uaaaggaaaccgaggacau

SEQ ID NO: 575904 - RNA, 19 nt, Homo sapiens
  misc_RNA (1)...(19): siRNA sense strand
uggaggagcgccauaguau

SEQ ID NO: 575905 - RNA, 19 nt, Homo sapiens
  misc_RNA (1)...(19): siRNA sense strand
guagaggagguguuugaug

SEQ ID NO: 575906 - RNA, 19 nt, Homo sapiens
  misc_RNA (1)...(19): siRNA sense strand
ggaacucuucaacgagaaa

SEQ ID NO: 575907 - RNA, 19 nt, Homo sapiens
  misc_RNA (1)...(19): siRNA sense strand
ggacgagagccugaagaga

SEQ ID NO: 575908 - RNA, 19 nt, Homo sapiens
  misc_RNA (1)...(19): siRNA sense strand
uggagaugcugacagacaa

SEQ ID NO: 575909 - RNA, 19 nt, Homo sapiens
  misc_RNA (1)...(19): siRNA sense strand
ccaaagacaccacgaagcu

SEQ ID NO: 575910 - RNA, 19 nt, Homo sapiens
  misc_RNA (1)...(19): siRNA sense strand
ccucauggccauccuggaa

SEQ ID NO: 575911 - RNA, 19 nt, Homo sapiens
  misc_RNA (1)...(19): siRNA sense strand
uacaagcggaucaagagua

SEQ ID NO: 575912 - RNA, 19 nt, Homo sapiens
  misc_RNA (1)...(19): siRNA sense strand
ggagaugcugacagacaaa

SEQ ID NO: 575913 - RNA, 19 nt, Homo sapiens
  misc_RNA (1)...(19): siRNA sense strand
gcacgaugagagcgccuuu

SEQ ID NO: 575914 - RNA, 19 nt, Homo sapiens
  misc_RNA (1)...(19): siRNA sense strand
caagacuucuccgacuguu

SEQ ID NO: 575915 - RNA, 19 nt, Homo sapiens
  misc_RNA (1)...(19): siRNA sense strand
ggaaaccgaggacaucaac

SEQ ID NO: 575916 - RNA, 19 nt, Homo sapiens
  misc_RNA (1)...(19): siRNA sense strand
gccaaagacagcagcauuc

SEQ ID NO: 575917 - RNA, 19 nt, Homo sapiens
  misc_RNA (1)...(19): siRNA sense strand
accggaagauugccuguga

SEQ ID NO: 575918 - RNA, 19 nt, Homo sapiens
  misc_RNA (1)...(19): siRNA sense strand
gcaaagacgagaucaucac

SEQ ID NO: 575919 - RNA, 19 nt, Homo sapiens
  misc_RNA (1)...(19): siRNA sense strand
gcaauggccaauguacaug

SEQ ID NO: 575920 - RNA, 19 nt, Homo sapiens
  misc_RNA (1)...(19): siRNA sense strand
ccagaucucacucgugcaa

SEQ ID NO: 575921 - RNA, 19 nt, Homo sapiens
  misc_RNA (1)...(19): siRNA sense strand
ucacagggaacaaguuuac

SEQ ID NO: 575922 - RNA, 19 nt, Homo sapiens
  misc_RNA (1)...(19): siRNA sense strand
gugggccucucauccagaa

SEQ ID NO: 575923 - RNA, 19 nt, Homo sapiens
  misc_RNA (1)...(19): siRNA sense strand
gggcaucccggacaagauc

SEQ ID NO: 575924 - RNA, 19 nt, Homo sapiens
  misc_RNA (1)...(19): siRNA sense strand
cuccaacccuuugcagaaa

SEQ ID NO: 575925 - RNA, 19 nt, Homo sapiens
  misc_RNA (1)...(19): siRNA sense strand
guccgcauggucaucauua

SEQ ID NO: 575926 - RNA, 19 nt, Homo sapiens
  misc_RNA (1)...(19): siRNA sense strand
ucaaggugccguacuccaa

SEQ ID NO: 575927 - RNA, 19 nt, Homo sapiens
  misc_RNA (1)...(19): siRNA sense strand
gugggacgccuucauaaag

SEQ ID NO: 575928 - RNA, 19 nt, Homo sapiens
  misc_RNA (1)...(19): siRNA sense strand
ugaagaugacgccaacaga

SEQ ID NO: 575929 - RNA, 19 nt, Homo sapiens
  misc_RNA (1)...(19): siRNA sense strand
gacaucgccaacacacuaa

SEQ ID NO: 575930 - RNA, 19 nt, Homo sapiens
  misc_RNA (1)...(19): siRNA sense strand
gccauaguauccacuucau

SEQ ID NO: 575931 - RNA, 19 nt, Homo sapiens
  misc_RNA (1)...(19): siRNA sense strand
ccuggaacauggcucagau

SEQ ID NO: 575932 - RNA, 19 nt, Homo sapiens
  misc_RNA (1)...(19): siRNA sense strand
cccgggaccucuuaauuac

SEQ ID NO: 575933 - RNA, 19 nt, Homo sapiens
  misc_RNA (1)...(19): siRNA sense strand
ccucuaacccggauucagu

SEQ ID NO: 575934 - RNA, 19 nt, Homo sapiens
  misc_RNA (1)...(19): siRNA sense strand
ucgccaagcuccggaagau

SEQ ID NO: 575935 - RNA, 19 nt, Homo sapiens
  misc_RNA (1)...(19): siRNA sense strand
gaggagcgccauaguaucc

SEQ ID NO: 575936 - RNA, 19 nt, Homo sapiens
  misc_RNA (1)...(19): siRNA sense strand
guacuccaaguuucugaug

SEQ ID NO: 575937 - RNA, 19 nt, Homo sapiens
  misc_RNA (1)...(19): siRNA sense strand
agaucucacucgugcaaug

SEQ ID NO: 575938 - RNA, 19 nt, Homo sapiens
  misc_RNA (1)...(19): siRNA sense strand
ccaacccuuugcagaaauc

SEQ ID NO: 575939 - RNA, 19 nt, Homo sapiens
  misc_RNA (1)...(19): siRNA sense strand
uaaccagcuccaacccuuu

SEQ ID NO: 575940 - RNA, 19 nt, Homo sapiens
  misc_RNA (1)...(19): siRNA sense strand
agagacagggcuuucaaga

SEQ ID NO: 575941 - RNA, 19 nt, Homo sapiens
  misc_RNA (1)...(19): siRNA sense strand
agacuucuccgacuguugu

SEQ ID NO: 575942 - RNA, 19 nt, Homo sapiens
  misc_RNA (1)...(19): siRNA sense strand
aagcgggucucggaaggaa

SEQ ID NO: 575943 - RNA, 19 nt, Homo sapiens
  misc_RNA (1)...(19): siRNA sense strand
gggaagccuugggcaucaa

SEQ ID NO: 575944 - RNA, 19 nt, Homo sapiens
  misc_RNA (1)...(19): siRNA sense strand
acgagagccugaagagaca

SEQ ID NO: 575945 - RNA, 19 nt, Homo sapiens
  misc_RNA (1)...(19): siRNA sense strand
guuaugggauggagaugcu

SEQ ID NO: 575946 - RNA, 19 nt, Homo sapiens
  misc_RNA (1)...(19): siRNA sense strand
aaauugagccagaggaucu

SEQ ID NO: 575947 - RNA, 19 nt, Homo sapiens
  misc_RNA (1)...(19): siRNA sense strand
gaagacugugggccaggaa

SEQ ID NO: 575948 - RNA, 19 nt, Homo sapiens
  misc_RNA (1)...(19): siRNA sense strand
uaguauccacuucaucauu

SEQ ID NO: 575949 - RNA, 19 nt, Homo sapiens
  misc_RNA (1)...(19): siRNA sense strand
ggaggagcgccauaguauc

SEQ ID NO: 575950 - RNA, 19 nt, Homo sapiens
  misc_RNA (1)...(19): siRNA sense strand
cagcucccgggaccucuua

SEQ ID NO: 575951 - RNA, 19 nt, Homo sapiens
  misc_RNA (1)...(19): siRNA sense strand
cggugcuggucccuuauaa

SEQ ID NO: 575952 - RNA, 19 nt, Homo sapiens
  misc_RNA (1)...(19): siRNA sense strand
gaggaucuggacaucauuc

SEQ ID NO: 575953 - RNA, 19 nt, Homo sapiens
  misc_RNA (1)...(19): siRNA sense strand
gggcugaggccgaucaaaa

SEQ ID NO: 575954 - RNA, 19 nt, Homo sapiens
  misc_RNA (1)...(19): siRNA sense strand
ggaaggagcuacagucaga

SEQ ID NO: 575955 - RNA, 19 nt, Homo sapiens
  misc_RNA (1)...(19): siRNA sense strand
ggaacaaguuuaccaaaga

SEQ ID NO: 575956 - RNA, 19 nt, Homo sapiens
  misc_RNA (1)...(19): siRNA sense strand
gaaauuccgucuccucuuc

SEQ ID NO: 575957 - RNA, 19 nt, Homo sapiens
  misc_RNA (1)...(19): siRNA sense strand
ggauggagaugcugacaga

SEQ ID NO: 575958 - RNA, 19 nt, Homo sapiens
  misc_RNA (1)...(19): siRNA sense strand
gcuggucccuuauaaacua

SEQ ID NO: 575959 - RNA, 19 nt, Homo sapiens
  misc_RNA (1)...(19): siRNA sense strand
uuaagaggauguuugauga

SEQ ID NO: 575960 - RNA, 19 nt, Homo sapiens
  misc_RNA (1)...(19): siRNA sense strand
gggagaauguuccugaaug

SEQ ID NO: 575961 - RNA, 19 nt, Homo sapiens
  misc_RNA (1)...(19): siRNA sense strand
caauguacaugguggacua

SEQ ID NO: 575962 - RNA, 19 nt, Homo sapiens
  misc_RNA (1)...(19): siRNA sense strand
gcucagcgcuguccaaacu

SEQ ID NO: 575963 - RNA, 19 nt, Homo sapiens
  misc_RNA (1)...(19): siRNA sense strand
ucacgggucugccugauga

SEQ ID NO: 575964 - RNA, 19 nt, Homo sapiens
  misc_RNA (1)...(19): siRNA sense strand
aguauccacuucaucauua

SEQ ID NO: 575965 - RNA, 19 nt, Homo sapiens
  misc_RNA (1)...(19): siRNA sense strand
acaagcggaucaagaguaa

SEQ ID NO: 575966 - RNA, 19 nt, Homo sapiens
  misc_RNA (1)...(19): siRNA sense strand
uagaggagguguuugaugu

SEQ ID NO: 575967 - RNA, 19 nt, Homo sapiens
  misc_RNA (1)...(19): siRNA sense strand
gaacaaguuuaccaaagac

SEQ ID NO: 575968 - RNA, 19 nt, Homo sapiens
  misc_RNA (1)...(19): siRNA sense strand
gcaacagcauccaguuugu

SEQ ID NO: 575969 - RNA, 19 nt, Homo sapiens
  misc_RNA (1)...(19): siRNA sense strand
cgacaucgccaacacacua

SEQ ID NO: 575970 - RNA, 19 nt, Homo sapiens
  misc_RNA (1)...(19): siRNA sense strand
caucggaggauucugguua

SEQ ID NO: 575971 - RNA, 19 nt, Homo sapiens
  misc_RNA (1)...(19): siRNA sense strand
gaagagacagggcuuucaa

SEQ ID NO: 575972 - RNA, 19 nt, Homo sapiens
  misc_RNA (1)...(19): siRNA sense strand
gggaacaaguuuaccaaag

SEQ ID NO: 575973 - RNA, 19 nt, Homo sapiens
  misc_RNA (1)...(19): siRNA sense strand
gguguuugauguucuuuau

SEQ ID NO: 575974 - RNA, 19 nt, Homo sapiens
  misc_RNA (1)...(19): siRNA sense strand
gcucagauguguaccuucu

SEQ ID NO: 575975 - RNA, 19 nt, Homo sapiens
  misc_RNA (1)...(19): siRNA sense strand
cgggaccucuuaauuacua

SEQ ID NO: 575976 - RNA, 19 nt, Homo sapiens
  misc_RNA (1)...(19): siRNA sense strand
gaacggugucucccugauu

SEQ ID NO: 575977 - RNA, 19 nt, Homo sapiens
  misc_RNA (1)...(19): siRNA sense strand
gaaggccagccgaguauga

SEQ ID NO: 575978 - RNA, 19 nt, Homo sapiens
  misc_RNA (1)...(19): siRNA sense strand
ggagaauguuccugaaugc

SEQ ID NO: 575979 - RNA, 19 nt, Homo sapiens
  misc_RNA (1)...(19): siRNA sense strand
gugugcagauccuguuuaa

SEQ ID NO: 575980 - RNA, 19 nt, Homo sapiens
  misc_RNA (1)...(19): siRNA sense strand
ggagguguuugauguucuu

SEQ ID NO: 575981 - RNA, 19 nt, Homo sapiens
  misc_RNA (1)...(19): siRNA sense strand
gauguuugaugagcgaauu

SEQ ID NO: 575982 - RNA, 19 nt, Homo sapiens
  misc_RNA (1)...(19): siRNA sense strand
gagacagggcuuucaagaa

SEQ ID NO: 575983 - RNA, 19 nt, Homo sapiens
  misc_RNA (1)...(19): siRNA sense strand
gaggagguguuugauguuc

SEQ ID NO: 575984 - RNA, 19 nt, Homo sapiens
  misc_RNA (1)...(19): siRNA sense strand
ggaaugcucggucagacaa

SEQ ID NO: 575985 - RNA, 19 nt, Homo sapiens
  misc_RNA (1)...(19): siRNA sense strand
guauccacuucaucauuaa

SEQ ID NO: 575986 - RNA, 19 nt, Homo sapiens
  misc_RNA (1)...(19): siRNA sense strand
gaugguagaggagguguuu

SEQ ID NO: 575987 - RNA, 19 nt, Homo sapiens
  misc_RNA (1)...(19): siRNA sense strand
cauaguauccacuucauca

SEQ ID NO: 575988 - RNA, 19 nt, Homo sapiens
  misc_RNA (1)...(19): siRNA sense strand
ucccgggaccucuuaauua

SEQ ID NO: 575989 - RNA, 19 nt, Homo sapiens
  misc_RNA (1)...(19): siRNA sense strand
gcuccaacccuuugcagaa

SEQ ID NO: 575990 - RNA, 19 nt, Homo sapiens
  misc_RNA (1)...(19): siRNA sense strand
cccaaagccugaugaagau

SEQ ID NO: 575991 - RNA, 19 nt, Homo sapiens
  misc_RNA (1)...(19): siRNA sense strand
uccaaggacucaucccaaa

SEQ ID NO: 575992 - RNA, 19 nt, Homo sapiens
  misc_RNA (1)...(19): siRNA sense strand
ucccaaagccugaugaaga

SEQ ID NO: 575993 - RNA, 19 nt, Homo sapiens
  misc_RNA (1)...(19): siRNA sense strand
ucauuaagaggauguuuga

SEQ ID NO: 575994 - RNA, 19 nt, Homo sapiens
  misc_RNA (1)...(19): siRNA sense strand
gcauccaguuugucaucaa

SEQ ID NO: 575995 - RNA, 19 nt, Homo sapiens
  misc_RNA (1)...(19): siRNA sense strand
cagcaacagcauccaguuu

SEQ ID NO: 575996 - RNA, 19 nt, Homo sapiens
  misc_RNA (1)...(19): siRNA sense strand
aagaucaaguucacaguca

SEQ ID NO: 575997 - RNA, 19 nt, Homo sapiens
  misc_RNA (1)...(19): siRNA sense strand
uccaggaccuuuucaauaa

SEQ ID NO: 575998 - RNA, 19 nt, Homo sapiens
  misc_RNA (1)...(19): siRNA sense strand
ucacugagggagucaaaga

SEQ ID NO: 575999 - RNA, 19 nt, Homo sapiens
  misc_RNA (1)...(19): siRNA sense strand
gccaagcuccggaagauuc

SEQ ID NO: 576000 - RNA, 19 nt, Homo sapiens
  misc_RNA (1)...(19): siRNA sense strand
gggagcaggugaaggaacu

SEQ ID NO: 576001 - RNA, 19 nt, Homo sapiens
  misc_RNA (1)...(19): siRNA sense strand
caaagccugaugaagauga

SEQ ID NO: 576002 - RNA, 19 nt, Homo sapiens
  misc_RNA (1)...(19): siRNA sense strand
ccaaggugccagccaaaga

SEQ ID NO: 576003 - RNA, 19 nt, Homo sapiens
  misc_RNA (1)...(19): siRNA sense strand
uaaaggaaaccgaggacau

SEQ ID NO: 576004 - RNA, 19 nt, Homo sapiens
  misc_RNA (1)...(19): siRNA sense strand
uggaggagcgccauaguau

SEQ ID NO: 576005 - RNA, 19 nt, Homo sapiens
  misc_RNA (1)...(19): siRNA sense strand
guagaggagguguuugaug

SEQ ID NO: 576006 - RNA, 19 nt, Homo sapiens
  misc_RNA (1)...(19): siRNA sense strand
ggaacucuucaacgagaaa

SEQ ID NO: 576007 - RNA, 19 nt, Homo sapiens
  misc_RNA (1)...(19): siRNA sense strand
ggacgagagccugaagaga

SEQ ID NO: 576008 - RNA, 19 nt, Homo sapiens
  misc_RNA (1)...(19): siRNA sense strand
uggagaugcugacagacaa

SEQ ID NO: 576009 - RNA, 19 nt, Homo sapiens
  misc_RNA (1)...(19): siRNA sense strand
ccaaagacaccacgaagcu

SEQ ID NO: 576010 - RNA, 19 nt, Homo sapiens
  misc_RNA (1)...(19): siRNA sense strand
ccucauggccauccuggaa

SEQ ID NO: 576011 - RNA, 19 nt, Homo sapiens
  misc_RNA (1)...(19): siRNA sense strand
uacaagcggaucaagagua

SEQ ID NO: 576012 - RNA, 19 nt, Homo sapiens
  misc_RNA (1)...(19): siRNA sense strand
ggagaugcugacagacaaa

SEQ ID NO: 576013 - RNA, 19 nt, Homo sapiens
  misc_RNA (1)...(19): siRNA sense strand
gcacgaugagagcgccuuu

SEQ ID NO: 576014 - RNA, 19 nt, Homo sapiens
  misc_RNA (1)...(19): siRNA sense strand
caagacuucuccgacuguu

SEQ ID NO: 576015 - RNA, 19 nt, Homo sapiens
  misc_RNA (1)...(19): siRNA sense strand
ggaaaccgaggacaucaac

SEQ ID NO: 576016 - RNA, 19 nt, Homo sapiens
  misc_RNA (1)...(19): siRNA sense strand
gccaaagacagcagcauuc

SEQ ID NO: 576017 - RNA, 19 nt, Homo sapiens
  misc_RNA (1)...(19): siRNA sense strand
accggaagauugccuguga

SEQ ID NO: 576018 - RNA, 19 nt, Homo sapiens
  misc_RNA (1)...(19): siRNA sense strand
gcaaagacgagaucaucac

SEQ ID NO: 576019 - RNA, 19 nt, Homo sapiens
  misc_RNA (1)...(19): siRNA sense strand
gcaauggccaauguacaug

SEQ ID NO: 576020 - RNA, 19 nt, Homo sapiens
  misc_RNA (1)...(19): siRNA sense strand
ccagaucucacucgugcaa

SEQ ID NO: 576021 - RNA, 19 nt, Homo sapiens
  misc_RNA (1)...(19): siRNA sense strand
ucacagggaacaaguuuac

SEQ ID NO: 576022 - RNA, 19 nt, Homo sapiens
  misc_RNA (1)...(19): siRNA sense strand
gugggccucucauccagaa

SEQ ID NO: 576023 - RNA, 19 nt, Homo sapiens
  misc_RNA (1)...(19): siRNA sense strand
gggcaucccggacaagauc

SEQ ID NO: 576024 - RNA, 19 nt, Homo sapiens
  misc_RNA (1)...(19): siRNA sense strand
cuccaacccuuugcagaaa

SEQ ID NO: 576025 - RNA, 19 nt, Homo sapiens
  misc_RNA (1)...(19): siRNA sense strand
guccgcauggucaucauua

SEQ ID NO: 576026 - RNA, 19 nt, Homo sapiens
  misc_RNA (1)...(19): siRNA sense strand
ucaaggugccguacuccaa

SEQ ID NO: 576027 - RNA, 19 nt, Homo sapiens
  misc_RNA (1)...(19): siRNA sense strand
gugggacgccuucauaaag

SEQ ID NO: 576028 - RNA, 19 nt, Homo sapiens
  misc_RNA (1)...(19): siRNA sense strand
ugaagaugacgccaacaga

SEQ ID NO: 576029 - RNA, 19 nt, Homo sapiens
  misc_RNA (1)...(19): siRNA sense strand
gacaucgccaacacacuaa

SEQ ID NO: 576030 - RNA, 19 nt, Homo sapiens
  misc_RNA (1)...(19): siRNA sense strand
gccauaguauccacuucau

SEQ ID NO: 576031 - RNA, 19 nt, Homo sapiens
  misc_RNA (1)...(19): siRNA sense strand
ccuggaacauggcucagau

SEQ ID NO: 576032 - RNA, 19 nt, Homo sapiens
  misc_RNA (1)...(19): siRNA sense strand
cccgggaccucuuaauuac

SEQ ID NO: 576033 - RNA, 19 nt, Homo sapiens
  misc_RNA (1)...(19): siRNA sense strand
ccucuaacccggauucagu

SEQ ID NO: 576034 - RNA, 19 nt, Homo sapiens
  misc_RNA (1)...(19): siRNA sense strand
ucgccaagcuccggaagau

SEQ ID NO: 576035 - RNA, 19 nt, Homo sapiens
  misc_RNA (1)...(19): siRNA sense strand
gaggagcgccauaguaucc

SEQ ID NO: 576036 - RNA, 19 nt, Homo sapiens
  misc_RNA (1)...(19): siRNA sense strand
guacuccaaguuucugaug

SEQ ID NO: 576037 - RNA, 19 nt, Homo sapiens
  misc_RNA (1)...(19): siRNA sense strand
agaucucacucgugcaaug

SEQ ID NO: 576038 - RNA, 19 nt, Homo sapiens
  misc_RNA (1)...(19): siRNA sense strand
ccaacccuuugcagaaauc

SEQ ID NO: 576039 - RNA, 19 nt, Homo sapiens
  misc_RNA (1)...(19): siRNA sense strand
uaaccagcuccaacccuuu

SEQ ID NO: 576040 - RNA, 19 nt, Homo sapiens
  misc_RNA (1)...(19): siRNA sense strand
agagacagggcuuucaaga

SEQ ID NO: 576041 - RNA, 19 nt, Homo sapiens
  misc_RNA (1)...(19): siRNA sense strand
agacuucuccgacuguugu

SEQ ID NO: 576042 - RNA, 19 nt, Homo sapiens
  misc_RNA (1)...(19): siRNA sense strand
aagcgggucucggaaggaa

SEQ ID NO: 576043 - RNA, 19 nt, Homo sapiens
  misc_RNA (1)...(19): siRNA sense strand
gggaagccuugggcaucaa

SEQ ID NO: 576044 - RNA, 19 nt, Homo sapiens
  misc_RNA (1)...(19): siRNA sense strand
acgagagccugaagagaca

SEQ ID NO: 576045 - RNA, 19 nt, Homo sapiens
  misc_RNA (1)...(19): siRNA sense strand
guuaugggauggagaugcu

SEQ ID NO: 576046 - RNA, 19 nt, Homo sapiens
  misc_RNA (1)...(19): siRNA sense strand
aaauugagccagaggaucu

SEQ ID NO: 576047 - RNA, 19 nt, Homo sapiens
  misc_RNA (1)...(19): siRNA sense strand
gaagacugugggccaggaa

SEQ ID NO: 576048 - RNA, 19 nt, Homo sapiens
  misc_RNA (1)...(19): siRNA sense strand
uaguauccacuucaucauu

SEQ ID NO: 576049 - RNA, 19 nt, Homo sapiens
  misc_RNA (1)...(19): siRNA sense strand
ggaggagcgccauaguauc

SEQ ID NO: 576050 - RNA, 19 nt, Homo sapiens
  misc_RNA (1)...(19): siRNA sense strand
cagcucccgggaccucuua

SEQ ID NO: 576051 - RNA, 19 nt, Homo sapiens
  misc_RNA (1)...(19): siRNA sense strand
cggugcuggucccuuauaa

SEQ ID NO: 576052 - RNA, 19 nt, Homo sapiens
  misc_RNA (1)...(19): siRNA sense strand
gaggaucuggacaucauuc

SEQ ID NO: 576053 - RNA, 19 nt, Homo sapiens
  misc_RNA (1)...(19): siRNA sense strand
gggcugaggccgaucaaaa

SEQ ID NO: 576054 - RNA, 19 nt, Homo sapiens
  misc_RNA (1)...(19): siRNA sense strand
ggacagaggcuauucaaca

SEQ ID NO: 576055 - RNA, 19 nt, Homo sapiens
  misc_RNA (1)...(19): siRNA sense strand
ucaacaagcucaugaagau

SEQ ID NO: 576056 - RNA, 19 nt, Homo sapiens
  misc_RNA (1)...(19): siRNA sense strand
gagaacagcagccucauga

SEQ ID NO: 576057 - RNA, 19 nt, Homo sapiens
  misc_RNA (1)...(19): siRNA sense strand
caagaaagccacagagaug

SEQ ID NO: 576058 - RNA, 19 nt, Homo sapiens
  misc_RNA (1)...(19): siRNA sense strand
gacagaggcuauucaacaa

SEQ ID NO: 576059 - RNA, 19 nt, Homo sapiens
  misc_RNA (1)...(19): siRNA sense strand
ccaaauggcuguggagcaa

SEQ ID NO: 576060 - RNA, 19 nt, Homo sapiens
  misc_RNA (1)...(19): siRNA sense strand
gcaggaaagugucgcaaag

SEQ ID NO: 576061 - RNA, 19 nt, Homo sapiens
  misc_RNA (1)...(19): siRNA sense strand
cggcagagaucggcuauga

SEQ ID NO: 576062 - RNA, 19 nt, Homo sapiens
  misc_RNA (1)...(19): siRNA sense strand
ggaaagugucgcaaaguug

SEQ ID NO: 576063 - RNA, 19 nt, Homo sapiens
  misc_RNA (1)...(19): siRNA sense strand
gaacagcagccucaugaag

SEQ ID NO: 576064 - RNA, 19 nt, Homo sapiens
  misc_RNA (1)...(19): siRNA sense strand
uggaggagcugaagcacaa

SEQ ID NO: 576065 - RNA, 19 nt, Homo sapiens
  misc_RNA (1)...(19): siRNA sense strand
gaaguucaauguggagaag

SEQ ID NO: 576066 - RNA, 19 nt, Homo sapiens
  misc_RNA (1)...(19): siRNA sense strand
cgaauaagcgggacaagca

SEQ ID NO: 576067 - RNA, 19 nt, Homo sapiens
  misc_RNA (1)...(19): siRNA sense strand
caucgaagccucagguaga

SEQ ID NO: 576068 - RNA, 19 nt, Homo sapiens
  misc_RNA (1)...(19): siRNA sense strand
gcagagacccugggagugu

SEQ ID NO: 576069 - RNA, 19 nt, Homo sapiens
  misc_RNA (1)...(19): siRNA sense strand
acaaguacgugcccuaugg

SEQ ID NO: 576070 - RNA, 19 nt, Homo sapiens
  misc_RNA (1)...(19): siRNA sense strand
gaggaggagcuacagauga

SEQ ID NO: 576071 - RNA, 19 nt, Homo sapiens
  misc_RNA (1)...(19): siRNA sense strand
cagaggugcuggccaagug

SEQ ID NO: 576072 - RNA, 19 nt, Homo sapiens
  misc_RNA (1)...(19): siRNA sense strand
caaggaugccuaugacaau

SEQ ID NO: 576073 - RNA, 19 nt, Homo sapiens
  misc_RNA (1)...(19): siRNA sense strand
ccacauggagacauucuug

SEQ ID NO: 576074 - RNA, 19 nt, Homo sapiens
  misc_RNA (1)...(19): siRNA sense strand
caaguggaggugcuucuuu

SEQ ID NO: 576075 - RNA, 19 nt, Homo sapiens
  misc_RNA (1)...(19): siRNA sense strand
aggaaagugucgcaaaguu

SEQ ID NO: 576076 - RNA, 19 nt, Homo sapiens
  misc_RNA (1)...(19): siRNA sense strand
gugcuucuuucaccaaaug

SEQ ID NO: 576077 - RNA, 19 nt, Homo sapiens
  misc_RNA (1)...(19): siRNA sense strand
gauggcaguggcacgaaua

SEQ ID NO: 576078 - RNA, 19 nt, Homo sapiens
  misc_RNA (1)...(19): siRNA sense strand
ggaggaggagcuacagaug

SEQ ID NO: 576079 - RNA, 19 nt, Homo sapiens
  misc_RNA (1)...(19): siRNA sense strand
ggauggcaguggcacgaau

SEQ ID NO: 576080 - RNA, 19 nt, Homo sapiens
  misc_RNA (1)...(19): siRNA sense strand
ggacagcugcuaggcaugu

SEQ ID NO: 576081 - RNA, 19 nt, Homo sapiens
  misc_RNA (1)...(19): siRNA sense strand
ucaaggaugccuaugacaa

SEQ ID NO: 576082 - RNA, 19 nt, Homo sapiens
  misc_RNA (1)...(19): siRNA sense strand
ccaagaaagccacagagau

SEQ ID NO: 576083 - RNA, 19 nt, Homo sapiens
  misc_RNA (1)...(19): siRNA sense strand
gaauaagcgggacaagcaa

SEQ ID NO: 576084 - RNA, 19 nt, Homo sapiens
  misc_RNA (1)...(19): siRNA sense strand
ggagaacagcagccucaug

SEQ ID NO: 576085 - RNA, 19 nt, Homo sapiens
  misc_RNA (1)...(19): siRNA sense strand
ggaugccuaugacaaugug

SEQ ID NO: 576086 - RNA, 19 nt, Homo sapiens
  misc_RNA (1)...(19): siRNA sense strand
ggaaguucaauguggagaa

SEQ ID NO: 576087 - RNA, 19 nt, Homo sapiens
  misc_RNA (1)...(19): siRNA sense strand
uggauguccuggccaagaa

SEQ ID NO: 576088 - RNA, 19 nt, Homo sapiens
  misc_RNA (1)...(19): siRNA sense strand
ccgcaggaauggugucauc

SEQ ID NO: 576089 - RNA, 19 nt, Homo sapiens
  misc_RNA (1)...(19): siRNA sense strand
caggaauggugucaucagu

SEQ ID NO: 576090 - RNA, 19 nt, Homo sapiens
  misc_RNA (1)...(19): siRNA sense strand
gccaagaaagccacagaga

SEQ ID NO: 576091 - RNA, 19 nt, Homo sapiens
  misc_RNA (1)...(19): siRNA sense strand
uggaggugcugcccuacuu

SEQ ID NO: 576092 - RNA, 19 nt, Homo sapiens
  misc_RNA (1)...(19): siRNA sense strand
ccgcucaucuucaacacau

SEQ ID NO: 576093 - RNA, 19 nt, Homo sapiens
  misc_RNA (1)...(19): siRNA sense strand
acagccacauggagacauu

SEQ ID NO: 576094 - RNA, 19 nt, Homo sapiens
  misc_RNA (1)...(19): siRNA sense strand
uggagaagccgcucaucuu

SEQ ID NO: 576095 - RNA, 19 nt, Homo sapiens
  misc_RNA (1)...(19): siRNA sense strand
gagaugcagcggaaguuca

SEQ ID NO: 576096 - RNA, 19 nt, Homo sapiens
  misc_RNA (1)...(19): siRNA sense strand
gcacgaauaagcgggacaa

SEQ ID NO: 576097 - RNA, 19 nt, Homo sapiens
  misc_RNA (1)...(19): siRNA sense strand
cauccagggcugagauuga

SEQ ID NO: 576098 - RNA, 19 nt, Homo sapiens
  misc_RNA (1)...(19): siRNA sense strand
caagugcgacagccacaug

SEQ ID NO: 576099 - RNA, 19 nt, Homo sapiens
  misc_RNA (1)...(19): siRNA sense strand
cagguagagucagcgauga

SEQ ID NO: 576100 - RNA, 19 nt, Homo sapiens
  misc_RNA (1)...(19): siRNA sense strand
ucagcgccauccuggacua

SEQ ID NO: 576101 - RNA, 19 nt, Homo sapiens
  misc_RNA (1)...(19): siRNA sense strand
ccucaaggaugccuaugac

SEQ ID NO: 576102 - RNA, 19 nt, Homo sapiens
  misc_RNA (1)...(19): siRNA sense strand
cgugagggcugguguuuug

SEQ ID NO: 576103 - RNA, 19 nt, Homo sapiens
  misc_RNA (1)...(19): siRNA sense strand
aaguggaggugcuucuuuc

SEQ ID NO: 576104 - RNA, 19 nt, Homo sapiens
  misc_RNA (1)...(19): siRNA sense strand
ggacuggagcagccucauc

SEQ ID NO: 576105 - RNA, 19 nt, Homo sapiens
  misc_RNA (1)...(19): siRNA sense strand
gaacuggcaaccucuucca

SEQ ID NO: 576106 - RNA, 19 nt, Homo sapiens
  misc_RNA (1)...(19): siRNA sense strand
ggaggugcugcccuacuug

SEQ ID NO: 576107 - RNA, 19 nt, Homo sapiens
  misc_RNA (1)...(19): siRNA sense strand
ggagaugcagcggaaguuc

SEQ ID NO: 576108 - RNA, 19 nt, Homo sapiens
  misc_RNA (1)...(19): siRNA sense strand
caacaagcucaugaagaug

SEQ ID NO: 576109 - RNA, 19 nt, Homo sapiens
  misc_RNA (1)...(19): siRNA sense strand
auaagcgggacaagcaaua

SEQ ID NO: 576110 - RNA, 19 nt, Homo sapiens
  misc_RNA (1)...(19): siRNA sense strand
aggcaugugugaccagauc

SEQ ID NO: 576111 - RNA, 19 nt, Homo sapiens
  misc_RNA (1)...(19): siRNA sense strand
gugccuggacuacguguug

SEQ ID NO: 576112 - RNA, 19 nt, Homo sapiens
  misc_RNA (1)...(19): siRNA sense strand
ccacguacgaggccaccaa

SEQ ID NO: 576113 - RNA, 19 nt, Homo sapiens
  misc_RNA (1)...(19): siRNA sense strand
aaggaugccuaugacaaug

SEQ ID NO: 576114 - RNA, 19 nt, Homo sapiens
  misc_RNA (1)...(19): siRNA sense strand
gaccuucuaugggcauuuu

SEQ ID NO: 576115 - RNA, 19 nt, Homo sapiens
  misc_RNA (1)...(19): siRNA sense strand
aggcagagcacaaggagau

SEQ ID NO: 576116 - RNA, 19 nt, Homo sapiens
  misc_RNA (1)...(19): siRNA sense strand
ggauguccuggccaagaaa

SEQ ID NO: 576117 - RNA, 19 nt, Homo sapiens
  misc_RNA (1)...(19): siRNA sense strand
gccugacgcuggagaugca

SEQ ID NO: 576118 - RNA, 19 nt, Homo sapiens
  misc_RNA (1)...(19): siRNA sense strand
uggcggugcugcaggaaag

SEQ ID NO: 576119 - RNA, 19 nt, Homo sapiens
  misc_RNA (1)...(19): siRNA sense strand
ccacguggcugcuguacuc

SEQ ID NO: 576120 - RNA, 19 nt, Homo sapiens
  misc_RNA (1)...(19): siRNA sense strand
gaugagauuuccuuuugua

SEQ ID NO: 576121 - RNA, 19 nt, Homo sapiens
  misc_RNA (1)...(19): siRNA sense strand
ggacagagcccugggugau

SEQ ID NO: 576122 - RNA, 19 nt, Homo sapiens
  misc_RNA (1)...(19): siRNA sense strand
gaccuccuaugaugagauu

SEQ ID NO: 576123 - RNA, 19 nt, Homo sapiens
  misc_RNA (1)...(19): siRNA sense strand
ggaccagcccucacuccuu

SEQ ID NO: 576124 - RNA, 19 nt, Homo sapiens
  misc_RNA (1)...(19): siRNA sense strand
cagaggaggcugcuguaga

SEQ ID NO: 576125 - RNA, 19 nt, Homo sapiens
  misc_RNA (1)...(19): siRNA sense strand
agaggaggcugcuguagac

SEQ ID NO: 576126 - RNA, 19 nt, Homo sapiens
  misc_RNA (1)...(19): siRNA sense strand
ccacccugcuggccuuugu

SEQ ID NO: 576127 - RNA, 19 nt, Homo sapiens
  misc_RNA (1)...(19): siRNA sense strand
gcaccgucuuccucuucuu

SEQ ID NO: 576128 - RNA, 19 nt, Homo sapiens
  misc_RNA (1)...(19): siRNA sense strand
gagauuuccuuuuguacau

SEQ ID NO: 576129 - RNA, 19 nt, Homo sapiens
  misc_RNA (1)...(19): siRNA sense strand
gcaggacugggccacauuc

SEQ ID NO: 576130 - RNA, 19 nt, Homo sapiens
  misc_RNA (1)...(19): siRNA sense strand
ugcgugagguccuggagaa

SEQ ID NO: 576131 - RNA, 19 nt, Homo sapiens
  misc_RNA (1)...(19): siRNA sense strand
gggcaccgucuuccucuuc

SEQ ID NO: 576132 - RNA, 19 nt, Homo sapiens
  misc_RNA (1)...(19): siRNA sense strand
ccaacaggccacgggauga

SEQ ID NO: 576133 - RNA, 19 nt, Homo sapiens
  misc_RNA (1)...(19): siRNA sense strand
acagagcccugggugaucu

SEQ ID NO: 576134 - RNA, 19 nt, Homo sapiens
  misc_RNA (1)...(19): siRNA sense strand
gugcaggacugggccacau

SEQ ID NO: 576135 - RNA, 19 nt, Homo sapiens
  misc_RNA (1)...(19): siRNA sense strand
gcagggcucggcuacacau

SEQ ID NO: 576136 - RNA, 19 nt, Homo sapiens
  misc_RNA (1)...(19): siRNA sense strand
gccggcagcuuccucuacu

SEQ ID NO: 576137 - RNA, 19 nt, Homo sapiens
  misc_RNA (1)...(19): siRNA sense strand
ggccacgggaugacaguug

SEQ ID NO: 576138 - RNA, 19 nt, Homo sapiens
  misc_RNA (1)...(19): siRNA sense strand
gcaccaagcuucagaacga

SEQ ID NO: 576139 - RNA, 19 nt, Homo sapiens
  misc_RNA (1)...(19): siRNA sense strand
guuuaaugcugacgaauuu

SEQ ID NO: 576140 - RNA, 19 nt, Homo sapiens
  misc_RNA (1)...(19): siRNA sense strand
gaacgaggagcaugugauu

SEQ ID NO: 576141 - RNA, 19 nt, Homo sapiens
  misc_RNA (1)...(19): siRNA sense strand
gaaguuuaaugcugacgaa

SEQ ID NO: 576142 - RNA, 19 nt, Homo sapiens
  misc_RNA (1)...(19): siRNA sense strand
cauggugucugaugaauau

SEQ ID NO: 576143 - RNA, 19 nt, Homo sapiens
  misc_RNA (1)...(19): siRNA sense strand
ucaaguacguucccaguca

SEQ ID NO: 576144 - RNA, 19 nt, Homo sapiens
  misc_RNA (1)...(19): siRNA sense strand
ugacgaauuugaagacaug

SEQ ID NO: 576145 - RNA, 19 nt, Homo sapiens
  misc_RNA (1)...(19): siRNA sense strand
caacaaauacauggugaaa

SEQ ID NO: 576146 - RNA, 19 nt, Homo sapiens
  misc_RNA (1)...(19): siRNA sense strand
ccacauuggucaagucauc

SEQ ID NO: 576147 - RNA, 19 nt, Homo sapiens
  misc_RNA (1)...(19): siRNA sense strand
gaacaagccguacccaaaa

SEQ ID NO: 576148 - RNA, 19 nt, Homo sapiens
  misc_RNA (1)...(19): siRNA sense strand
agaacaagccguacccaaa

SEQ ID NO: 576149 - RNA, 19 nt, Homo sapiens
  misc_RNA (1)...(19): siRNA sense strand
augagcagcugucuucuga

SEQ ID NO: 576150 - RNA, 19 nt, Homo sapiens
  misc_RNA (1)...(19): siRNA sense strand
auucauaucuccaagaagu

SEQ ID NO: 576151 - RNA, 19 nt, Homo sapiens
  misc_RNA (1)...(19): siRNA sense strand
ggacgccagaagauucaua

SEQ ID NO: 576152 - RNA, 19 nt, Homo sapiens
  misc_RNA (1)...(19): siRNA sense strand
aauaugagcagcugucuuc

SEQ ID NO: 576153 - RNA, 19 nt, Homo sapiens
  misc_RNA (1)...(19): siRNA sense strand
gcagggccaaguucaaguu

SEQ ID NO: 576154 - RNA, 19 nt, Homo sapiens
  misc_RNA (1)...(19): siRNA sense strand
gacaggcuccagacaggua

SEQ ID NO: 576155 - RNA, 19 nt, Homo sapiens
  misc_RNA (1)...(19): siRNA sense strand
gaaaaguuguggcagagau

SEQ ID NO: 576156 - RNA, 19 nt, Homo sapiens
  misc_RNA (1)...(19): siRNA sense strand
ccacauggugucugaugaa

SEQ ID NO: 576157 - RNA, 19 nt, Homo sapiens
  misc_RNA (1)...(19): siRNA sense strand
gcagagauggcuuucacau

SEQ ID NO: 576158 - RNA, 19 nt, Homo sapiens
  misc_RNA (1)...(19): siRNA sense strand
acaaauacauggugaaaag

SEQ ID NO: 576159 - RNA, 19 nt, Homo sapiens
  misc_RNA (1)...(19): siRNA sense strand
gaagacaugguggccaaga

SEQ ID NO: 576160 - RNA, 19 nt, Homo sapiens
  misc_RNA (1)...(19): siRNA sense strand
gccacauggugucugauga

SEQ ID NO: 576161 - RNA, 19 nt, Homo sapiens
  misc_RNA (1)...(19): siRNA sense strand
acgaggagcaugugauuga

SEQ ID NO: 576162 - RNA, 19 nt, Homo sapiens
  misc_RNA (1)...(19): siRNA sense strand
cgaggagcaugugauugaa

SEQ ID NO: 576163 - RNA, 19 nt, Homo sapiens
  misc_RNA (1)...(19): siRNA sense strand
cuccaucccuuccauguca

SEQ ID NO: 576164 - RNA, 19 nt, Homo sapiens
  misc_RNA (1)...(19): siRNA sense strand
caaguacguucccagucau

SEQ ID NO: 576165 - RNA, 19 nt, Homo sapiens
  misc_RNA (1)...(19): siRNA sense strand
uaugcgaggugccuuugga

SEQ ID NO: 576166 - RNA, 19 nt, Homo sapiens
  misc_RNA (1)...(19): siRNA sense strand
ucuuugaccuggguagaaa

SEQ ID NO: 576167 - RNA, 19 nt, Homo sapiens
  misc_RNA (1)...(19): siRNA sense strand
gaauaugagcagcugucuu

SEQ ID NO: 576168 - RNA, 19 nt, Homo sapiens
  misc_RNA (1)...(19): siRNA sense strand
ugaccuggguagaaagaag

SEQ ID NO: 576169 - RNA, 19 nt, Homo sapiens
  misc_RNA (1)...(19): siRNA sense strand
aagacaugguggccaagaa

SEQ ID NO: 576170 - RNA, 19 nt, Homo sapiens
  misc_RNA (1)...(19): siRNA sense strand
guggccacauggugucuga

SEQ ID NO: 576171 - RNA, 19 nt, Homo sapiens
  misc_RNA (1)...(19): siRNA sense strand
uuaaugcugacgaauuuga

SEQ ID NO: 576172 - RNA, 19 nt, Homo sapiens
  misc_RNA (1)...(19): siRNA sense strand
ggcggguucugcacucaug

SEQ ID NO: 576173 - RNA, 19 nt, Homo sapiens
  misc_RNA (1)...(19): siRNA sense strand
uggcagagauggcuuucac

SEQ ID NO: 576174 - RNA, 19 nt, Homo sapiens
  misc_RNA (1)...(19): siRNA sense strand
gcugacgaauuugaagaca

SEQ ID NO: 576175 - RNA, 19 nt, Homo sapiens
  misc_RNA (1)...(19): siRNA sense strand
gguccacauuggucaaguc

SEQ ID NO: 576176 - RNA, 19 nt, Homo sapiens
  misc_RNA (1)...(19): siRNA sense strand
cagagauggcuuucacaug

SEQ ID NO: 576177 - RNA, 19 nt, Homo sapiens
  misc_RNA (1)...(19): siRNA sense strand
guagaaagaaggcaaaagu

SEQ ID NO: 576178 - RNA, 19 nt, Homo sapiens
  misc_RNA (1)...(19): siRNA sense strand
cacauggugucugaugaau

SEQ ID NO: 576179 - RNA, 19 nt, Homo sapiens
  misc_RNA (1)...(19): siRNA sense strand
gacgccagaagauucauau

SEQ ID NO: 576180 - RNA, 19 nt, Homo sapiens
  misc_RNA (1)...(19): siRNA sense strand
ccugaugguuguggaguca

SEQ ID NO: 576181 - RNA, 19 nt, Homo sapiens
  misc_RNA (1)...(19): siRNA sense strand
ggacucuguuuaacuauua

SEQ ID NO: 576182 - RNA, 19 nt, Homo sapiens
  misc_RNA (1)...(19): siRNA sense strand
ggaaguggguaccucauuu

SEQ ID NO: 576183 - RNA, 19 nt, Homo sapiens
  misc_RNA (1)...(19): siRNA sense strand
agagacagcugauaacaaa

SEQ ID NO: 576184 - RNA, 19 nt, Homo sapiens
  misc_RNA (1)...(19): siRNA sense strand
ggagacagcugugggcauu

SEQ ID NO: 576185 - RNA, 19 nt, Homo sapiens
  misc_RNA (1)...(19): siRNA sense strand
gaaguggguaccucauuua

SEQ ID NO: 576186 - RNA, 19 nt, Homo sapiens
  misc_RNA (1)...(19): siRNA sense strand
ucgcugcccuggagaauua

SEQ ID NO: 576187 - RNA, 19 nt, Homo sapiens
  misc_RNA (1)...(19): siRNA sense strand
gaaaggcaagcaacuauau

SEQ ID NO: 576188 - RNA, 19 nt, Homo sapiens
  misc_RNA (1)...(19): siRNA sense strand
caaguacucugcacucuuc

SEQ ID NO: 576189 - RNA, 19 nt, Homo sapiens
  misc_RNA (1)...(19): siRNA sense strand
gaaaugugcuggguuugau

SEQ ID NO: 576190 - RNA, 19 nt, Homo sapiens
  misc_RNA (1)...(19): siRNA sense strand
ggaaaggcaagcaacuaua

SEQ ID NO: 576191 - RNA, 19 nt, Homo sapiens
  misc_RNA (1)...(19): siRNA sense strand
gcaacuauaugccuacaag

SEQ ID NO: 576192 - RNA, 19 nt, Homo sapiens
  misc_RNA (1)...(19): siRNA sense strand
ggacuuggaggcuggauuu

SEQ ID NO: 576193 - RNA, 19 nt, Homo sapiens
  misc_RNA (1)...(19): siRNA sense strand
gaagagacaauaaagaaca

SEQ ID NO: 576194 - RNA, 19 nt, Homo sapiens
  misc_RNA (1)...(19): siRNA sense strand
ggaguuaaccuuguccuuu

SEQ ID NO: 576195 - RNA, 19 nt, Homo sapiens
  misc_RNA (1)...(19): siRNA sense strand
ggaaggaggagaagucgaa

SEQ ID NO: 576196 - RNA, 19 nt, Homo sapiens
  misc_RNA (1)...(19): siRNA sense strand
gagagacuuugauaauuuc

SEQ ID NO: 576197 - RNA, 19 nt, Homo sapiens
  misc_RNA (1)...(19): siRNA sense strand
guggaaaugugcuggguuu

SEQ ID NO: 576198 - RNA, 19 nt, Homo sapiens
  misc_RNA (1)...(19): siRNA sense strand
aaugucagcugguaugaaa

SEQ ID NO: 576199 - RNA, 19 nt, Homo sapiens
  misc_RNA (1)...(19): siRNA sense strand
guggguaccucauuuacuu

SEQ ID NO: 576200 - RNA, 19 nt, Homo sapiens
  misc_RNA (1)...(19): siRNA sense strand
ggaaugagguagagaucgu

SEQ ID NO: 576201 - RNA, 19 nt, Homo sapiens
  misc_RNA (1)...(19): siRNA sense strand
gccuauggcuuacuuuaug

SEQ ID NO: 576202 - RNA, 19 nt, Homo sapiens
  misc_RNA (1)...(19): siRNA sense strand
uaagcgaucucagcaauuc

SEQ ID NO: 576203 - RNA, 19 nt, Homo sapiens
  misc_RNA (1)...(19): siRNA sense strand
gaacaagagaguaacaaag

SEQ ID NO: 576204 - RNA, 19 nt, Homo sapiens
  misc_RNA (1)...(19): siRNA sense strand
agacagcugauaacaaaua

SEQ ID NO: 576205 - RNA, 19 nt, Homo sapiens
  misc_RNA (1)...(19): siRNA sense strand
guucuucaguggcaucgua

SEQ ID NO: 576206 - RNA, 19 nt, Homo sapiens
  misc_RNA (1)...(19): siRNA sense strand
ggaaaugugcuggguuuga

SEQ ID NO: 576207 - RNA, 19 nt, Homo sapiens
  misc_RNA (1)...(19): siRNA sense strand
caauaaagaacaucacuca

SEQ ID NO: 576208 - RNA, 19 nt, Homo sapiens
  misc_RNA (1)...(19): siRNA sense strand
gcuaaugaagagacaauaa

SEQ ID NO: 576209 - RNA, 19 nt, Homo sapiens
  misc_RNA (1)...(19): siRNA sense strand
ggacgcaucuuugcacucu

SEQ ID NO: 576210 - RNA, 19 nt, Homo sapiens
  misc_RNA (1)...(19): siRNA sense strand
gaucgggaauucagagaca

SEQ ID NO: 576211 - RNA, 19 nt, Homo sapiens
  misc_RNA (1)...(19): siRNA sense strand
gcuacagccugauuauugu

SEQ ID NO: 576212 - RNA, 19 nt, Homo sapiens
  misc_RNA (1)...(19): siRNA sense strand
ggcaucguauuucaucuuu

SEQ ID NO: 576213 - RNA, 19 nt, Homo sapiens
  misc_RNA (1)...(19): siRNA sense strand
guuaagcgaucucagcaau

SEQ ID NO: 576214 - RNA, 19 nt, Homo sapiens
  misc_RNA (1)...(19): siRNA sense strand
gaaaauauccaucugacaa

SEQ ID NO: 576215 - RNA, 19 nt, Homo sapiens
  misc_RNA (1)...(19): siRNA sense strand
cgauggauguauggaguua

SEQ ID NO: 576216 - RNA, 19 nt, Homo sapiens
  misc_RNA (1)...(19): siRNA sense strand
gggaaccucuacacauuuc

SEQ ID NO: 576217 - RNA, 19 nt, Homo sapiens
  misc_RNA (1)...(19): siRNA sense strand
acaagagaguaacaaagaa

SEQ ID NO: 576218 - RNA, 19 nt, Homo sapiens
  misc_RNA (1)...(19): siRNA sense strand
ugagaagagucacaaaucu

SEQ ID NO: 576219 - RNA, 19 nt, Homo sapiens
  misc_RNA (1)...(19): siRNA sense strand
uauuacaacucuucugguu

SEQ ID NO: 576220 - RNA, 19 nt, Homo sapiens
  misc_RNA (1)...(19): siRNA sense strand
ccaagaaaugggucaaauu

SEQ ID NO: 576221 - RNA, 19 nt, Homo sapiens
  misc_RNA (1)...(19): siRNA sense strand
gaagagucacaaaucugua

SEQ ID NO: 576222 - RNA, 19 nt, Homo sapiens
  misc_RNA (1)...(19): siRNA sense strand
gggaaaggcaagcaacuau

SEQ ID NO: 576223 - RNA, 19 nt, Homo sapiens
  misc_RNA (1)...(19): siRNA sense strand
gagaguaacaaagaagaaa

SEQ ID NO: 576224 - RNA, 19 nt, Homo sapiens
  misc_RNA (1)...(19): siRNA sense strand
gacagcugauaacaaauau

SEQ ID NO: 576225 - RNA, 19 nt, Homo sapiens
  misc_RNA (1)...(19): siRNA sense strand
gaguuaaccuuguccuuuu

SEQ ID NO: 576226 - RNA, 19 nt, Homo sapiens
  misc_RNA (1)...(19): siRNA sense strand
gccaagaaaugggucaaau

SEQ ID NO: 576227 - RNA, 19 nt, Homo sapiens
  misc_RNA (1)...(19): siRNA sense strand
gaucuucaaccaaggaaug

SEQ ID NO: 576228 - RNA, 19 nt, Homo sapiens
  misc_RNA (1)...(19): siRNA sense strand
gcaaagccacagccagaga

SEQ ID NO: 576229 - RNA, 19 nt, Homo sapiens
  misc_RNA (1)...(19): siRNA sense strand
aggaauuuguggagaagua

SEQ ID NO: 576230 - RNA, 19 nt, Homo sapiens
  misc_RNA (1)...(19): siRNA sense strand
gccaggccauggacaagaa

SEQ ID NO: 576231 - RNA, 19 nt, Homo sapiens
  misc_RNA (1)...(19): siRNA sense strand
acuggacucuguuuaacua

SEQ ID NO: 576232 - RNA, 19 nt, Homo sapiens
  misc_RNA (1)...(19): siRNA sense strand
aaaugaagaucaaggacau

SEQ ID NO: 576233 - RNA, 19 nt, Homo sapiens
  misc_RNA (1)...(19): siRNA sense strand
caucguauuucaucuuucu

SEQ ID NO: 576234 - RNA, 19 nt, Homo sapiens
  misc_RNA (1)...(19): siRNA sense strand
ucaguggcaucguauuuca

SEQ ID NO: 576235 - RNA, 19 nt, Homo sapiens
  misc_RNA (1)...(19): siRNA sense strand
cagcuucaaggaaucaaua

SEQ ID NO: 576236 - RNA, 19 nt, Homo sapiens
  misc_RNA (1)...(19): siRNA sense strand
ucagggaggcccaggaauu

SEQ ID NO: 576237 - RNA, 19 nt, Homo sapiens
  misc_RNA (1)...(19): siRNA sense strand
uggaugggcuccuucuaug

SEQ ID NO: 576238 - RNA, 19 nt, Homo sapiens
  misc_RNA (1)...(19): siRNA sense strand
agacagcugugggcauuga

SEQ ID NO: 576239 - RNA, 19 nt, Homo sapiens
  misc_RNA (1)...(19): siRNA sense strand
gcagcugggacgcaucuuu

SEQ ID NO: 576240 - RNA, 19 nt, Homo sapiens
  misc_RNA (1)...(19): siRNA sense strand
guaccucauuuacuuugug

SEQ ID NO: 576241 - RNA, 19 nt, Homo sapiens
  misc_RNA (1)...(19): siRNA sense strand
uggaaagagugcucagaga

SEQ ID NO: 576242 - RNA, 19 nt, Homo sapiens
  misc_RNA (1)...(19): siRNA sense strand
ccucaagcuugcuaaugaa

SEQ ID NO: 576243 - RNA, 19 nt, Homo sapiens
  misc_RNA (1)...(19): siRNA sense strand
gaucucagcaauucuccaa

SEQ ID NO: 576244 - RNA, 19 nt, Homo sapiens
  misc_RNA (1)...(19): siRNA sense strand
aacaagagaguaacaaaga

SEQ ID NO: 576245 - RNA, 19 nt, Homo sapiens
  misc_RNA (1)...(19): siRNA sense strand
gagaagagucacaaaucug

SEQ ID NO: 576246 - RNA, 19 nt, Homo sapiens
  misc_RNA (1)...(19): siRNA sense strand
ugauguucuuggccauuua

SEQ ID NO: 576247 - RNA, 19 nt, Homo sapiens
  misc_RNA (1)...(19): siRNA sense strand
cuucauaugcugaguuuga

SEQ ID NO: 576248 - RNA, 19 nt, Homo sapiens
  misc_RNA (1)...(19): siRNA sense strand
cagcugguaugaaaggaau

SEQ ID NO: 576249 - RNA, 19 nt, Homo sapiens
  misc_RNA (1)...(19): siRNA sense strand
gaagaaaauauccaucuga

SEQ ID NO: 576250 - RNA, 19 nt, Homo sapiens
  misc_RNA (1)...(19): siRNA sense strand
cuuaauauuuggucuaguc

SEQ ID NO: 576251 - RNA, 19 nt, Homo sapiens
  misc_RNA (1)...(19): siRNA sense strand
caagugcuccgugaaguug

SEQ ID NO: 576252 - RNA, 19 nt, Homo sapiens
  misc_RNA (1)...(19): siRNA sense strand
cagggaggcccaggaauuu

SEQ ID NO: 576253 - RNA, 19 nt, Homo sapiens
  misc_RNA (1)...(19): siRNA sense strand
aauaguggaugaacaagag

SEQ ID NO: 576254 - RNA, 19 nt, Homo sapiens
  misc_RNA (1)...(19): siRNA sense strand
aggaaucaauaguggauga

SEQ ID NO: 576255 - RNA, 19 nt, Homo sapiens
  misc_RNA (1)...(19): siRNA sense strand
uaacguacaucaccauccu

SEQ ID NO: 576256 - RNA, 19 nt, Homo sapiens
  misc_RNA (1)...(19): siRNA sense strand
caagcuugcuaaugaagag

SEQ ID NO: 576257 - RNA, 19 nt, Homo sapiens
  misc_RNA (1)...(19): siRNA sense strand
aaauauccaucugacaaga

SEQ ID NO: 576258 - RNA, 19 nt, Homo sapiens
  misc_RNA (1)...(19): siRNA sense strand
ugaacaagagaguaacaaa

SEQ ID NO: 576259 - RNA, 19 nt, Homo sapiens
  misc_RNA (1)...(19): siRNA sense strand
ccugggaaaugaagaucaa

SEQ ID NO: 576260 - RNA, 19 nt, Homo sapiens
  misc_RNA (1)...(19): siRNA sense strand
aggcuggauuuccuucaua

SEQ ID NO: 576261 - RNA, 19 nt, Homo sapiens
  misc_RNA (1)...(19): siRNA sense strand
cugacaugcugguaacgua

SEQ ID NO: 576262 - RNA, 19 nt, Homo sapiens
  misc_RNA (1)...(19): siRNA sense strand
ugaaaggaaugagguagag

SEQ ID NO: 576263 - RNA, 19 nt, Homo sapiens
  misc_RNA (1)...(19): siRNA sense strand
ggccagcaauacccaagga

SEQ ID NO: 576264 - RNA, 19 nt, Homo sapiens
  misc_RNA (1)...(19): siRNA sense strand
guacucugcacucuucuau

SEQ ID NO: 576265 - RNA, 19 nt, Homo sapiens
  misc_RNA (1)...(19): siRNA sense strand
ggcaugcccuaugggagua

SEQ ID NO: 576266 - RNA, 19 nt, Homo sapiens
  misc_RNA (1)...(19): siRNA sense strand
caucaucugcuguuugugu

SEQ ID NO: 576267 - RNA, 19 nt, Homo sapiens
  misc_RNA (1)...(19): siRNA sense strand
ggccaacuuucucaucauc

SEQ ID NO: 576268 - RNA, 19 nt, Homo sapiens
  misc_RNA (1)...(19): siRNA sense strand
caaggaaucaauaguggau

SEQ ID NO: 576269 - RNA, 19 nt, Homo sapiens
  misc_RNA (1)...(19): siRNA sense strand
gaagaaaaggccauggauu

SEQ ID NO: 576270 - RNA, 19 nt, Homo sapiens
  misc_RNA (1)...(19): siRNA sense strand
uuucaagacucaauguauc

SEQ ID NO: 576271 - RNA, 19 nt, Homo sapiens
  misc_RNA (1)...(19): siRNA sense strand
gugcuggguuugaucuuca

SEQ ID NO: 576272 - RNA, 19 nt, Homo sapiens
  misc_RNA (1)...(19): siRNA sense strand
gaggcuggauuuccuucau

SEQ ID NO: 576273 - RNA, 19 nt, Homo sapiens
  misc_RNA (1)...(19): siRNA sense strand
accucaagcuugcuaauga

SEQ ID NO: 576274 - RNA, 19 nt, Homo sapiens
  misc_RNA (1)...(19): siRNA sense strand
ccaacuuucucaucaucug

SEQ ID NO: 576275 - RNA, 19 nt, Homo sapiens
  misc_RNA (1)...(19): siRNA sense strand
uggaugaacaagagaguaa

SEQ ID NO: 576276 - RNA, 19 nt, Homo sapiens
  misc_RNA (1)...(19): siRNA sense strand
gggaaaugaagaucaagga

SEQ ID NO: 576277 - RNA, 19 nt, Homo sapiens
  misc_RNA (1)...(19): siRNA sense strand
gggucaaauuuaagagaga

SEQ ID NO: 576278 - RNA, 19 nt, Homo sapiens
  misc_RNA (1)...(19): siRNA sense strand
gaaaggaaugagguagaga

SEQ ID NO: 576279 - RNA, 19 nt, Homo sapiens
  misc_RNA (1)...(19): siRNA sense strand
acucugcacucuucuaugg

SEQ ID NO: 576280 - RNA, 19 nt, Homo sapiens
  misc_RNA (1)...(19): siRNA sense strand
caaccuuccugggcaagau

SEQ ID NO: 576281 - RNA, 19 nt, Homo sapiens
  misc_RNA (1)...(19): siRNA sense strand
gcagcagccuaaacuauau

SEQ ID NO: 576282 - RNA, 19 nt, Homo sapiens
  misc_RNA (1)...(19): siRNA sense strand
gagauugucaagcaaauaa

SEQ ID NO: 576283 - RNA, 19 nt, Homo sapiens
  misc_RNA (1)...(19): siRNA sense strand
gaggauaccgugacaagaa

SEQ ID NO: 576284 - RNA, 19 nt, Homo sapiens
  misc_RNA (1)...(19): siRNA sense strand
ucaccgagauugucaagca

SEQ ID NO: 576285 - RNA, 19 nt, Homo sapiens
  misc_RNA (1)...(19): siRNA sense strand
ugcaaacacuuaugugaau

SEQ ID NO: 576286 - RNA, 19 nt, Homo sapiens
  misc_RNA (1)...(19): siRNA sense strand
gcaaacacuuaugugaauc

SEQ ID NO: 576287 - RNA, 19 nt, Homo sapiens
  misc_RNA (1)...(19): siRNA sense strand
acaagaagaggaugcagaa

SEQ ID NO: 576288 - RNA, 19 nt, Homo sapiens
  misc_RNA (1)...(19): siRNA sense strand
cagccuaaacuauaucuau

SEQ ID NO: 576289 - RNA, 19 nt, Homo sapiens
  misc_RNA (1)...(19): siRNA sense strand
cagcagcagccuaaacuau

SEQ ID NO: 576290 - RNA, 19 nt, Homo sapiens
  misc_RNA (1)...(19): siRNA sense strand
ucaagcaaauaacauaugc

SEQ ID NO: 576291 - RNA, 19 nt, Homo sapiens
  misc_RNA (1)...(19): siRNA sense strand
uaugcaaacacuuauguga

SEQ ID NO: 576292 - RNA, 19 nt, Homo sapiens
  misc_RNA (1)...(19): siRNA sense strand
ccuaaacuauaucuaugca

SEQ ID NO: 576293 - RNA, 19 nt, Homo sapiens
  misc_RNA (1)...(19): siRNA sense strand
cgagauugucaagcaaaua

SEQ ID NO: 576294 - RNA, 19 nt, Homo sapiens
  misc_RNA (1)...(19): siRNA sense strand
agcagcagccuaaacuaua

SEQ ID NO: 576295 - RNA, 19 nt, Homo sapiens
  misc_RNA (1)...(19): siRNA sense strand
acacagcuauccccagaaa

SEQ ID NO: 576296 - RNA, 19 nt, Homo sapiens
  misc_RNA (1)...(19): siRNA sense strand
agccuaaacuauaucuaug

SEQ ID NO: 576297 - RNA, 19 nt, Homo sapiens
  misc_RNA (1)...(19): siRNA sense strand
gggaggauaccgugacaag

SEQ ID NO: 576298 - RNA, 19 nt, Homo sapiens
  misc_RNA (1)...(19): siRNA sense strand
ggaggauaccgugacaaga

SEQ ID NO: 576299 - RNA, 19 nt, Homo sapiens
  misc_RNA (1)...(19): siRNA sense strand
cuauaucuaugcaaacacu

SEQ ID NO: 576300 - RNA, 19 nt, Homo sapiens
  misc_RNA (1)...(19): siRNA sense strand
ccgagauugucaagcaaau

SEQ ID NO: 576301 - RNA, 19 nt, Homo sapiens
  misc_RNA (1)...(19): siRNA sense strand
cagggaggauaccgugaca

SEQ ID NO: 576302 - RNA, 19 nt, Homo sapiens
  misc_RNA (1)...(19): siRNA sense strand
gauugucaagcaaauaaca

SEQ ID NO: 576303 - RNA, 19 nt, Homo sapiens
  misc_RNA (1)...(19): siRNA sense strand
caagaagaggaugcagaaa

SEQ ID NO: 576304 - RNA, 19 nt, Homo sapiens
  misc_RNA (1)...(19): siRNA sense strand
caccgagauugucaagcaa

SEQ ID NO: 576305 - RNA, 19 nt, Homo sapiens
  misc_RNA (1)...(19): siRNA sense strand
caaacacuuaugugaaucu

SEQ ID NO: 576306 - RNA, 19 nt, Homo sapiens
  misc_RNA (1)...(19): siRNA sense strand
gucaagcaaauaacauaug

SEQ ID NO: 576307 - RNA, 19 nt, Homo sapiens
  misc_RNA (1)...(19): siRNA sense strand
aaacugagcugaagaugga

SEQ ID NO: 576308 - RNA, 19 nt, Homo sapiens
  misc_RNA (1)...(19): siRNA sense strand
gcaggaagcacuugaguuu

SEQ ID NO: 576309 - RNA, 19 nt, Homo sapiens
  misc_RNA (1)...(19): siRNA sense strand
gaacuaagggaaacacuug

SEQ ID NO: 576310 - RNA, 19 nt, Homo sapiens
  misc_RNA (1)...(19): siRNA sense strand
gaaaacaccccucagaaua

SEQ ID NO: 576311 - RNA, 19 nt, Homo sapiens
  misc_RNA (1)...(19): siRNA sense strand
gaauagagccauaguucaa

SEQ ID NO: 576312 - RNA, 19 nt, Homo sapiens
  misc_RNA (1)...(19): siRNA sense strand
gaaagagaacuaagggaaa

SEQ ID NO: 576313 - RNA, 19 nt, Homo sapiens
  misc_RNA (1)...(19): siRNA sense strand
gaaaggacaauacaagaug

SEQ ID NO: 576314 - RNA, 19 nt, Homo sapiens
  misc_RNA (1)...(19): siRNA sense strand
gacaaacucucucuaacug

SEQ ID NO: 576315 - RNA, 19 nt, Homo sapiens
  misc_RNA (1)...(19): siRNA sense strand
gauggaagacuguauuuga

SEQ ID NO: 576316 - RNA, 19 nt, Homo sapiens
  misc_RNA (1)...(19): siRNA sense strand
ugccagagcucaagagaaa

SEQ ID NO: 576317 - RNA, 19 nt, Homo sapiens
  misc_RNA (1)...(19): siRNA sense strand
gggaaacacuugagaagca

SEQ ID NO: 576318 - RNA, 19 nt, Homo sapiens
  misc_RNA (1)...(19): siRNA sense strand
gaaaguugccauagauaau

SEQ ID NO: 576319 - RNA, 19 nt, Homo sapiens
  misc_RNA (1)...(19): siRNA sense strand
ucucaugucuccugggaua

SEQ ID NO: 576320 - RNA, 19 nt, Homo sapiens
  misc_RNA (1)...(19): siRNA sense strand
ucgagacucuucugacuaa

SEQ ID NO: 576321 - RNA, 19 nt, Homo sapiens
  misc_RNA (1)...(19): siRNA sense strand
gcaguuggcuauggaacaa

SEQ ID NO: 576322 - RNA, 19 nt, Homo sapiens
  misc_RNA (1)...(19): siRNA sense strand
gcaaacucaucuccaggaa

SEQ ID NO: 576323 - RNA, 19 nt, Homo sapiens
  misc_RNA (1)...(19): siRNA sense strand
gaaacggcgugaacaagca

SEQ ID NO: 576324 - RNA, 19 nt, Homo sapiens
  misc_RNA (1)...(19): siRNA sense strand
gugaaccgcugcaaacuca

SEQ ID NO: 576325 - RNA, 19 nt, Homo sapiens
  misc_RNA (1)...(19): siRNA sense strand
gagaagaaggcaaagagaa

SEQ ID NO: 576326 - RNA, 19 nt, Homo sapiens
  misc_RNA (1)...(19): siRNA sense strand
ucgagacccucuacaauga

SEQ ID NO: 576327 - RNA, 19 nt, Homo sapiens
  misc_RNA (1)...(19): siRNA sense strand
guugaaaguugccauagau

SEQ ID NO: 576328 - RNA, 19 nt, Homo sapiens
  misc_RNA (1)...(19): siRNA sense strand
aggaagcacuugaguuuga

SEQ ID NO: 576329 - RNA, 19 nt, Homo sapiens
  misc_RNA (1)...(19): siRNA sense strand
cagaacagaugcugaaagg

SEQ ID NO: 576330 - RNA, 19 nt, Homo sapiens
  misc_RNA (1)...(19): siRNA sense strand
caagauggaagacuguauu

SEQ ID NO: 576331 - RNA, 19 nt, Homo sapiens
  misc_RNA (1)...(19): siRNA sense strand
aaacuacugucauguacug

SEQ ID NO: 576332 - RNA, 19 nt, Homo sapiens
  misc_RNA (1)...(19): siRNA sense strand
ggaaacccguguacucaac

SEQ ID NO: 576333 - RNA, 19 nt, Homo sapiens
  misc_RNA (1)...(19): siRNA sense strand
gagaagcaguuggcuaugg

SEQ ID NO: 576334 - RNA, 19 nt, Homo sapiens
  misc_RNA (1)...(19): siRNA sense strand
ugaaaguugccauagauaa

SEQ ID NO: 576335 - RNA, 19 nt, Homo sapiens
  misc_RNA (1)...(19): siRNA sense strand
gagacagccuugacaaacu

SEQ ID NO: 576336 - RNA, 19 nt, Homo sapiens
  misc_RNA (1)...(19): siRNA sense strand
gacaauacaagauggaaga

SEQ ID NO: 576337 - RNA, 19 nt, Homo sapiens
  misc_RNA (1)...(19): siRNA sense strand
ggaagacuguauuugaaaa

SEQ ID NO: 576338 - RNA, 19 nt, Homo sapiens
  misc_RNA (1)...(19): siRNA sense strand
agaagaaggcaaagagaaa

SEQ ID NO: 576339 - RNA, 19 nt, Homo sapiens
  misc_RNA (1)...(19): siRNA sense strand
ggagaagaaggcaaagaga

SEQ ID NO: 576340 - RNA, 19 nt, Homo sapiens
  misc_RNA (1)...(19): siRNA sense strand
acaggcagcuucaacagau

SEQ ID NO: 576341 - RNA, 19 nt, Homo sapiens
  misc_RNA (1)...(19): siRNA sense strand
ggagugaaccgcugcaaac

SEQ ID NO: 576342 - RNA, 19 nt, Homo sapiens
  misc_RNA (1)...(19): siRNA sense strand
gaaaacuacugucauguac

SEQ ID NO: 576343 - RNA, 19 nt, Homo sapiens
  misc_RNA (1)...(19): siRNA sense strand
gauagucucagggucuuaa

SEQ ID NO: 576344 - RNA, 19 nt, Homo sapiens
  misc_RNA (1)...(19): siRNA sense strand
aagaauagagccauaguuc

SEQ ID NO: 576345 - RNA, 19 nt, Homo sapiens
  misc_RNA (1)...(19): siRNA sense strand
caucgagacucuucugacu

SEQ ID NO: 576346 - RNA, 19 nt, Homo sapiens
  misc_RNA (1)...(19): siRNA sense strand
agaaggagaagaaggcaaa

SEQ ID NO: 576347 - RNA, 19 nt, Homo sapiens
  misc_RNA (1)...(19): siRNA sense strand
aaaagaggcuaaagaagga

SEQ ID NO: 576348 - RNA, 19 nt, Homo sapiens
  misc_RNA (1)...(19): siRNA sense strand
ccuaagaggacucaaagug

SEQ ID NO: 576349 - RNA, 19 nt, Homo sapiens
  misc_RNA (1)...(19): siRNA sense strand
gcugaaaggacaauacaag

SEQ ID NO: 576350 - RNA, 19 nt, Homo sapiens
  misc_RNA (1)...(19): siRNA sense strand
aagcagaacagacgcuaaa

SEQ ID NO: 576351 - RNA, 19 nt, Homo sapiens
  misc_RNA (1)...(19): siRNA sense strand
ggaaaacaccccucagaau

SEQ ID NO: 576352 - RNA, 19 nt, Homo sapiens
  misc_RNA (1)...(19): siRNA sense strand
agaagcaguuggcuaugga

SEQ ID NO: 576353 - RNA, 19 nt, Homo sapiens
  misc_RNA (1)...(19): siRNA sense strand
uaagggaaacacuugagaa

SEQ ID NO: 576354 - RNA, 19 nt, Homo sapiens
  misc_RNA (1)...(19): siRNA sense strand
aaagagaacuaagggaaac

SEQ ID NO: 576355 - RNA, 19 nt, Homo sapiens
  misc_RNA (1)...(19): siRNA sense strand
caggcagcuucaacagaua

SEQ ID NO: 576356 - RNA, 19 nt, Homo sapiens
  misc_RNA (1)...(19): siRNA sense strand
cuaagaggacucaaagugu

SEQ ID NO: 576357 - RNA, 19 nt, Homo sapiens
  misc_RNA (1)...(19): siRNA sense strand
ugaaaggacaauacaagau

SEQ ID NO: 576358 - RNA, 19 nt, Homo sapiens
  misc_RNA (1)...(19): siRNA sense strand
ggcuaaagaaggagaagaa

SEQ ID NO: 576359 - RNA, 19 nt, Homo sapiens
  misc_RNA (1)...(19): siRNA sense strand
auggaagacuguauuugaa

SEQ ID NO: 576360 - RNA, 19 nt, Homo sapiens
  misc_RNA (1)...(19): siRNA sense strand
ucacgccgguggugugcaa

SEQ ID NO: 576361 - RNA, 19 nt, Homo sapiens
  misc_RNA (1)...(19): siRNA sense strand
gcagaacagaugcugaaag

SEQ ID NO: 576362 - RNA, 19 nt, Homo sapiens
  misc_RNA (1)...(19): siRNA sense strand
ucagaauaaugagugcaaa

SEQ ID NO: 576363 - RNA, 19 nt, Homo sapiens
  misc_RNA (1)...(19): siRNA sense strand
gaugagaccccgcuuucua

SEQ ID NO: 576364 - RNA, 19 nt, Homo sapiens
  misc_RNA (1)...(19): siRNA sense strand
ugacaaacucucucuaacu

SEQ ID NO: 576365 - RNA, 19 nt, Homo sapiens
  misc_RNA (1)...(19): siRNA sense strand
cacuugaguuugagacgaa

SEQ ID NO: 576366 - RNA, 19 nt, Homo sapiens
  misc_RNA (1)...(19): siRNA sense strand
ggugugcaauguggaacaa

SEQ ID NO: 576367 - RNA, 19 nt, Homo sapiens
  misc_RNA (1)...(19): siRNA sense strand
gacgaaacggcgugaacaa

SEQ ID NO: 576368 - RNA, 19 nt, Homo sapiens
  misc_RNA (1)...(19): siRNA sense strand
ggaagcacuugaguuugag

SEQ ID NO: 576369 - RNA, 19 nt, Homo sapiens
  misc_RNA (1)...(19): siRNA sense strand
acaaaagaauagagccaua

SEQ ID NO: 576370 - RNA, 19 nt, Homo sapiens
  misc_RNA (1)...(19): siRNA sense strand
gcuguugaaaguugccaua

SEQ ID NO: 576371 - RNA, 19 nt, Homo sapiens
  misc_RNA (1)...(19): siRNA sense strand
ccuggaaggccuccuaaga

SEQ ID NO: 576372 - RNA, 19 nt, Homo sapiens
  misc_RNA (1)...(19): siRNA sense strand
gaaccgcugcaaacucauc

SEQ ID NO: 576373 - RNA, 19 nt, Homo sapiens
  misc_RNA (1)...(19): siRNA sense strand
cggcagaacagaugcugaa

SEQ ID NO: 576374 - RNA, 19 nt, Homo sapiens
  misc_RNA (1)...(19): siRNA sense strand
gucucagggucuuaaauga

SEQ ID NO: 576375 - RNA, 19 nt, Homo sapiens
  misc_RNA (1)...(19): siRNA sense strand
gaagaaggcaaagagaaaa

SEQ ID NO: 576376 - RNA, 19 nt, Homo sapiens
  misc_RNA (1)...(19): siRNA sense strand
uguugaaaguugccauaga

SEQ ID NO: 576377 - RNA, 19 nt, Homo sapiens
  misc_RNA (1)...(19): siRNA sense strand
uggaagacuguauuugaaa

SEQ ID NO: 576378 - RNA, 19 nt, Homo sapiens
  misc_RNA (1)...(19): siRNA sense strand
gggaaacccguguacucaa

SEQ ID NO: 576379 - RNA, 19 nt, Homo sapiens
  misc_RNA (1)...(19): siRNA sense strand
aaaacaccccucagaauaa

SEQ ID NO: 576380 - RNA, 19 nt, Homo sapiens
  misc_RNA (1)...(19): siRNA sense strand
cagauagucucagggucuu

SEQ ID NO: 576381 - RNA, 19 nt, Homo sapiens
  misc_RNA (1)...(19): siRNA sense strand
caugucuccugggauaauu

SEQ ID NO: 576382 - RNA, 19 nt, Homo sapiens
  misc_RNA (1)...(19): siRNA sense strand
gauaaugccagagcucaag

SEQ ID NO: 576383 - RNA, 19 nt, Homo sapiens
  misc_RNA (1)...(19): siRNA sense strand
cuugacaaacucucucuaa

SEQ ID NO: 576384 - RNA, 19 nt, Homo sapiens
  misc_RNA (1)...(19): siRNA sense strand
agacagccuugacaaacuc

SEQ ID NO: 576385 - RNA, 19 nt, Homo sapiens
  misc_RNA (1)...(19): siRNA sense strand
ggacuucgagacccucuac

SEQ ID NO: 576386 - RNA, 19 nt, Homo sapiens
  misc_RNA (1)...(19): siRNA sense strand
ugaaaacuacugucaugua

SEQ ID NO: 576387 - RNA, 19 nt, Homo sapiens
  misc_RNA (1)...(19): siRNA sense strand
ccagagcucaagagaaaca

SEQ ID NO: 576388 - RNA, 19 nt, Homo sapiens
  misc_RNA (1)...(19): siRNA sense strand
aaaguugccauagauaaug

SEQ ID NO: 576389 - RNA, 19 nt, Homo sapiens
  misc_RNA (1)...(19): siRNA sense strand
agacucuucugacuaacau

SEQ ID NO: 576390 - RNA, 19 nt, Homo sapiens
  misc_RNA (1)...(19): siRNA sense strand
ugggauaauuccaccaaca

SEQ ID NO: 576391 - RNA, 19 nt, Homo sapiens
  misc_RNA (1)...(19): siRNA sense strand
gaccuggaaggccuccuaa

SEQ ID NO: 576392 - RNA, 19 nt, Homo sapiens
  misc_RNA (1)...(19): siRNA sense strand
aaagaauagagccauaguu

SEQ ID NO: 576393 - RNA, 19 nt, Homo sapiens
  misc_RNA (1)...(19): siRNA sense strand
gaagcaguuggcuauggaa

SEQ ID NO: 576394 - RNA, 19 nt, Homo sapiens
  misc_RNA (1)...(19): siRNA sense strand
aguagcagcagcagcagua

SEQ ID NO: 576395 - RNA, 19 nt, Homo sapiens
  misc_RNA (1)...(19): siRNA sense strand
caagcagaacagacgcuaa

SEQ ID NO: 576396 - RNA, 19 nt, Homo sapiens
  misc_RNA (1)...(19): siRNA sense strand
gaauaaugagugcaaaaug

SEQ ID NO: 576397 - RNA, 19 nt, Homo sapiens
  misc_RNA (1)...(19): siRNA sense strand
ugcauacggucuacaccaa

SEQ ID NO: 576398 - RNA, 19 nt, Homo sapiens
  misc_RNA (1)...(19): siRNA sense strand
aagauggaagacuguauuu

SEQ ID NO: 576399 - RNA, 19 nt, Homo sapiens
  misc_RNA (1)...(19): siRNA sense strand
gagacucuucugacuaaca

SEQ ID NO: 576400 - RNA, 19 nt, Homo sapiens
  misc_RNA (1)...(19): siRNA sense strand
aagagacagccuugacaaa

SEQ ID NO: 576401 - RNA, 19 nt, Homo sapiens
  misc_RNA (1)...(19): siRNA sense strand
gagacccucuacaaugacu

SEQ ID NO: 576402 - RNA, 19 nt, Homo sapiens
  misc_RNA (1)...(19): siRNA sense strand
gaaggcaaagagaaaauug

SEQ ID NO: 576403 - RNA, 19 nt, Homo sapiens
  misc_RNA (1)...(19): siRNA sense strand
gcaaguucuagaccuggaa

SEQ ID NO: 576404 - RNA, 19 nt, Homo sapiens
  misc_RNA (1)...(19): siRNA sense strand
uugagaagcaguuggcuau

SEQ ID NO: 576405 - RNA, 19 nt, Homo sapiens
  misc_RNA (1)...(19): siRNA sense strand
cugaaaggacaauacaaga

SEQ ID NO: 576406 - RNA, 19 nt, Homo sapiens
  misc_RNA (1)...(19): siRNA sense strand
agaauagagccauaguuca

SEQ ID NO: 576407 - RNA, 19 nt, Homo sapiens
  misc_RNA (1)...(19): siRNA sense strand
aaacugagcugaagaugga

SEQ ID NO: 576408 - RNA, 19 nt, Homo sapiens
  misc_RNA (1)...(19): siRNA sense strand
gcaggaagcacuugaguuu

SEQ ID NO: 576409 - RNA, 19 nt, Homo sapiens
  misc_RNA (1)...(19): siRNA sense strand
gaacuaagggaaacacuug

SEQ ID NO: 576410 - RNA, 19 nt, Homo sapiens
  misc_RNA (1)...(19): siRNA sense strand
gaaaacaccccucagaaua

SEQ ID NO: 576411 - RNA, 19 nt, Homo sapiens
  misc_RNA (1)...(19): siRNA sense strand
gaauagagccauaguucaa

SEQ ID NO: 576412 - RNA, 19 nt, Homo sapiens
  misc_RNA (1)...(19): siRNA sense strand
gaaagagaacuaagggaaa

SEQ ID NO: 576413 - RNA, 19 nt, Homo sapiens
  misc_RNA (1)...(19): siRNA sense strand
gaaaggacaauacaagaug

SEQ ID NO: 576414 - RNA, 19 nt, Homo sapiens
  misc_RNA (1)...(19): siRNA sense strand
gacaaacucucucuaacug

SEQ ID NO: 576415 - RNA, 19 nt, Homo sapiens
  misc_RNA (1)...(19): siRNA sense strand
gauggaagacuguauuuga

SEQ ID NO: 576416 - RNA, 19 nt, Homo sapiens
  misc_RNA (1)...(19): siRNA sense strand
ugccagagcucaagagaaa

SEQ ID NO: 576417 - RNA, 19 nt, Homo sapiens
  misc_RNA (1)...(19): siRNA sense strand
gggaaacacuugagaagca

SEQ ID NO: 576418 - RNA, 19 nt, Homo sapiens
  misc_RNA (1)...(19): siRNA sense strand
gaaaguugccauagauaau

SEQ ID NO: 576419 - RNA, 19 nt, Homo sapiens
  misc_RNA (1)...(19): siRNA sense strand
ucucaugucuccugggaua

SEQ ID NO: 576420 - RNA, 19 nt, Homo sapiens
  misc_RNA (1)...(19): siRNA sense strand
ucgagacucuucugacuaa

SEQ ID NO: 576421 - RNA, 19 nt, Homo sapiens
  misc_RNA (1)...(19): siRNA sense strand
gcaguuggcuauggaacaa

SEQ ID NO: 576422 - RNA, 19 nt, Homo sapiens
  misc_RNA (1)...(19): siRNA sense strand
gcaaacucaucuccaggaa

SEQ ID NO: 576423 - RNA, 19 nt, Homo sapiens
  misc_RNA (1)...(19): siRNA sense strand
gaaacggcgugaacaagca

SEQ ID NO: 576424 - RNA, 19 nt, Homo sapiens
  misc_RNA (1)...(19): siRNA sense strand
gugaaccgcugcaaacuca

SEQ ID NO: 576425 - RNA, 19 nt, Homo sapiens
  misc_RNA (1)...(19): siRNA sense strand
gagaagaaggcaaagagaa

SEQ ID NO: 576426 - RNA, 19 nt, Homo sapiens
  misc_RNA (1)...(19): siRNA sense strand
ucgagacccucuacaauga

SEQ ID NO: 576427 - RNA, 19 nt, Homo sapiens
  misc_RNA (1)...(19): siRNA sense strand
guugaaaguugccauagau

SEQ ID NO: 576428 - RNA, 19 nt, Homo sapiens
  misc_RNA (1)...(19): siRNA sense strand
aggaagcacuugaguuuga

SEQ ID NO: 576429 - RNA, 19 nt, Homo sapiens
  misc_RNA (1)...(19): siRNA sense strand
cagaacagaugcugaaagg

SEQ ID NO: 576430 - RNA, 19 nt, Homo sapiens
  misc_RNA (1)...(19): siRNA sense strand
caagauggaagacuguauu

SEQ ID NO: 576431 - RNA, 19 nt, Homo sapiens
  misc_RNA (1)...(19): siRNA sense strand
aaacuacugucauguacug

SEQ ID NO: 576432 - RNA, 19 nt, Homo sapiens
  misc_RNA (1)...(19): siRNA sense strand
ggaaacccguguacucaac

SEQ ID NO: 576433 - RNA, 19 nt, Homo sapiens
  misc_RNA (1)...(19): siRNA sense strand
gagaagcaguuggcuaugg

SEQ ID NO: 576434 - RNA, 19 nt, Homo sapiens
  misc_RNA (1)...(19): siRNA sense strand
ugaaaguugccauagauaa

SEQ ID NO: 576435 - RNA, 19 nt, Homo sapiens
  misc_RNA (1)...(19): siRNA sense strand
gagacagccuugacaaacu

SEQ ID NO: 576436 - RNA, 19 nt, Homo sapiens
  misc_RNA (1)...(19): siRNA sense strand
gacaauacaagauggaaga

SEQ ID NO: 576437 - RNA, 19 nt, Homo sapiens
  misc_RNA (1)...(19): siRNA sense strand
ggaagacuguauuugaaaa

SEQ ID NO: 576438 - RNA, 19 nt, Homo sapiens
  misc_RNA (1)...(19): siRNA sense strand
agaagaaggcaaagagaaa

SEQ ID NO: 576439 - RNA, 19 nt, Homo sapiens
  misc_RNA (1)...(19): siRNA sense strand
ggagaagaaggcaaagaga

SEQ ID NO: 576440 - RNA, 19 nt, Homo sapiens
  misc_RNA (1)...(19): siRNA sense strand
acaggcagcuucaacagau

SEQ ID NO: 576441 - RNA, 19 nt, Homo sapiens
  misc_RNA (1)...(19): siRNA sense strand
ggagugaaccgcugcaaac

SEQ ID NO: 576442 - RNA, 19 nt, Homo sapiens
  misc_RNA (1)...(19): siRNA sense strand
gaaaacuacugucauguac

SEQ ID NO: 576443 - RNA, 19 nt, Homo sapiens
  misc_RNA (1)...(19): siRNA sense strand
gauagucucagggucuuaa

SEQ ID NO: 576444 - RNA, 19 nt, Homo sapiens
  misc_RNA (1)...(19): siRNA sense strand
aagaauagagccauaguuc

SEQ ID NO: 576445 - RNA, 19 nt, Homo sapiens
  misc_RNA (1)...(19): siRNA sense strand
caucgagacucuucugacu

SEQ ID NO: 576446 - RNA, 19 nt, Homo sapiens
  misc_RNA (1)...(19): siRNA sense strand
agaaggagaagaaggcaaa

SEQ ID NO: 576447 - RNA, 19 nt, Homo sapiens
  misc_RNA (1)...(19): siRNA sense strand
aaaagaggcuaaagaagga

SEQ ID NO: 576448 - RNA, 19 nt, Homo sapiens
  misc_RNA (1)...(19): siRNA sense strand
ccuaagaggacucaaagug

SEQ ID NO: 576449 - RNA, 19 nt, Homo sapiens
  misc_RNA (1)...(19): siRNA sense strand
gcugaaaggacaauacaag

SEQ ID NO: 576450 - RNA, 19 nt, Homo sapiens
  misc_RNA (1)...(19): siRNA sense strand
aagcagaacagacgcuaaa

SEQ ID NO: 576451 - RNA, 19 nt, Homo sapiens
  misc_RNA (1)...(19): siRNA sense strand
ggaaaacaccccucagaau

SEQ ID NO: 576452 - RNA, 19 nt, Homo sapiens
  misc_RNA (1)...(19): siRNA sense strand
agaagcaguuggcuaugga

SEQ ID NO: 576453 - RNA, 19 nt, Homo sapiens
  misc_RNA (1)...(19): siRNA sense strand
uaagggaaacacuugagaa

SEQ ID NO: 576454 - RNA, 19 nt, Homo sapiens
  misc_RNA (1)...(19): siRNA sense strand
aaagagaacuaagggaaac

SEQ ID NO: 576455 - RNA, 19 nt, Homo sapiens
  misc_RNA (1)...(19): siRNA sense strand
caggcagcuucaacagaua

SEQ ID NO: 576456 - RNA, 19 nt, Homo sapiens
  misc_RNA (1)...(19): siRNA sense strand
cuaagaggacucaaagugu

SEQ ID NO: 576457 - RNA, 19 nt, Homo sapiens
  misc_RNA (1)...(19): siRNA sense strand
ugaaaggacaauacaagau

SEQ ID NO: 576458 - RNA, 19 nt, Homo sapiens
  misc_RNA (1)...(19): siRNA sense strand
ggcuaaagaaggagaagaa

SEQ ID NO: 576459 - RNA, 19 nt, Homo sapiens
  misc_RNA (1)...(19): siRNA sense strand
auggaagacuguauuugaa

SEQ ID NO: 576460 - RNA, 19 nt, Homo sapiens
  misc_RNA (1)...(19): siRNA sense strand
ucacgccgguggugugcaa

SEQ ID NO: 576461 - RNA, 19 nt, Homo sapiens
  misc_RNA (1)...(19): siRNA sense strand
gcagaacagaugcugaaag

SEQ ID NO: 576462 - RNA, 19 nt, Homo sapiens
  misc_RNA (1)...(19): siRNA sense strand
ucagaauaaugagugcaaa

SEQ ID NO: 576463 - RNA, 19 nt, Homo sapiens
  misc_RNA (1)...(19): siRNA sense strand
gaugagaccccgcuuucua

SEQ ID NO: 576464 - RNA, 19 nt, Homo sapiens
  misc_RNA (1)...(19): siRNA sense strand
ugacaaacucucucuaacu

SEQ ID NO: 576465 - RNA, 19 nt, Homo sapiens
  misc_RNA (1)...(19): siRNA sense strand
cacuugaguuugagacgaa

SEQ ID NO: 576466 - RNA, 19 nt, Homo sapiens
  misc_RNA (1)...(19): siRNA sense strand
ggugugcaauguggaacaa

SEQ ID NO: 576467 - RNA, 19 nt, Homo sapiens
  misc_RNA (1)...(19): siRNA sense strand
gacgaaacggcgugaacaa

SEQ ID NO: 576468 - RNA, 19 nt, Homo sapiens
  misc_RNA (1)...(19): siRNA sense strand
ggaagcacuugaguuugag

SEQ ID NO: 576469 - RNA, 19 nt, Homo sapiens
  misc_RNA (1)...(19): siRNA sense strand
acaaaagaauagagccaua

SEQ ID NO: 576470 - RNA, 19 nt, Homo sapiens
  misc_RNA (1)...(19): siRNA sense strand
gcuguugaaaguugccaua

SEQ ID NO: 576471 - RNA, 19 nt, Homo sapiens
  misc_RNA (1)...(19): siRNA sense strand
ccuggaaggccuccuaaga

SEQ ID NO: 576472 - RNA, 19 nt, Homo sapiens
  misc_RNA (1)...(19): siRNA sense strand
gaaccgcugcaaacucauc

SEQ ID NO: 576473 - RNA, 19 nt, Homo sapiens
  misc_RNA (1)...(19): siRNA sense strand
cggcagaacagaugcugaa

SEQ ID NO: 576474 - RNA, 19 nt, Homo sapiens
  misc_RNA (1)...(19): siRNA sense strand
gucucagggucuuaaauga

SEQ ID NO: 576475 - RNA, 19 nt, Homo sapiens
  misc_RNA (1)...(19): siRNA sense strand
gaagaaggcaaagagaaaa

SEQ ID NO: 576476 - RNA, 19 nt, Homo sapiens
  misc_RNA (1)...(19): siRNA sense strand
uguugaaaguugccauaga

SEQ ID NO: 576477 - RNA, 19 nt, Homo sapiens
  misc_RNA (1)...(19): siRNA sense strand
uggaagacuguauuugaaa

SEQ ID NO: 576478 - RNA, 19 nt, Homo sapiens
  misc_RNA (1)...(19): siRNA sense strand
gggaaacccguguacucaa

SEQ ID NO: 576479 - RNA, 19 nt, Homo sapiens
  misc_RNA (1)...(19): siRNA sense strand
aaaacaccccucagaauaa

SEQ ID NO: 576480 - RNA, 19 nt, Homo sapiens
  misc_RNA (1)...(19): siRNA sense strand
cagauagucucagggucuu

SEQ ID NO: 576481 - RNA, 19 nt, Homo sapiens
  misc_RNA (1)...(19): siRNA sense strand
caugucuccugggauaauu

SEQ ID NO: 576482 - RNA, 19 nt, Homo sapiens
  misc_RNA (1)...(19): siRNA sense strand
gauaaugccagagcucaag

SEQ ID NO: 576483 - RNA, 19 nt, Homo sapiens
  misc_RNA (1)...(19): siRNA sense strand
cuugacaaacucucucuaa

SEQ ID NO: 576484 - RNA, 19 nt, Homo sapiens
  misc_RNA (1)...(19): siRNA sense strand
agacagccuugacaaacuc

SEQ ID NO: 576485 - RNA, 19 nt, Homo sapiens
  misc_RNA (1)...(19): siRNA sense strand
ggacuucgagacccucuac

SEQ ID NO: 576486 - RNA, 19 nt, Homo sapiens
  misc_RNA (1)...(19): siRNA sense strand
ugaaaacuacugucaugua

SEQ ID NO: 576487 - RNA, 19 nt, Homo sapiens
  misc_RNA (1)...(19): siRNA sense strand
ccagagcucaagagaaaca

SEQ ID NO: 576488 - RNA, 19 nt, Homo sapiens
  misc_RNA (1)...(19): siRNA sense strand
aaaguugccauagauaaug

SEQ ID NO: 576489 - RNA, 19 nt, Homo sapiens
  misc_RNA (1)...(19): siRNA sense strand
agacucuucugacuaacau

SEQ ID NO: 576490 - RNA, 19 nt, Homo sapiens
  misc_RNA (1)...(19): siRNA sense strand
ugggauaauuccaccaaca

SEQ ID NO: 576491 - RNA, 19 nt, Homo sapiens
  misc_RNA (1)...(19): siRNA sense strand
gaccuggaaggccuccuaa

SEQ ID NO: 576492 - RNA, 19 nt, Homo sapiens
  misc_RNA (1)...(19): siRNA sense strand
aaagaauagagccauaguu

SEQ ID NO: 576493 - RNA, 19 nt, Homo sapiens
  misc_RNA (1)...(19): siRNA sense strand
gaagcaguuggcuauggaa

SEQ ID NO: 576494 - RNA, 19 nt, Homo sapiens
  misc_RNA (1)...(19): siRNA sense strand
aguagcagcagcagcagua

SEQ ID NO: 576495 - RNA, 19 nt, Homo sapiens
  misc_RNA (1)...(19): siRNA sense strand
caagcagaacagacgcuaa

SEQ ID NO: 576496 - RNA, 19 nt, Homo sapiens
  misc_RNA (1)...(19): siRNA sense strand
gaauaaugagugcaaaaug

SEQ ID NO: 576497 - RNA, 19 nt, Homo sapiens
  misc_RNA (1)...(19): siRNA sense strand
ugcauacggucuacaccaa

SEQ ID NO: 576498 - RNA, 19 nt, Homo sapiens
  misc_RNA (1)...(19): siRNA sense strand
aagauggaagacuguauuu

SEQ ID NO: 576499 - RNA, 19 nt, Homo sapiens
  misc_RNA (1)...(19): siRNA sense strand
gagacucuucugacuaaca

SEQ ID NO: 576500 - RNA, 19 nt, Homo sapiens
  misc_RNA (1)...(19): siRNA sense strand
aagagacagccuugacaaa

SEQ ID NO: 576501 - RNA, 19 nt, Homo sapiens
  misc_RNA (1)...(19): siRNA sense strand
gagacccucuacaaugacu

SEQ ID NO: 576502 - RNA, 19 nt, Homo sapiens
  misc_RNA (1)...(19): siRNA sense strand
gaaggcaaagagaaaauug

SEQ ID NO: 576503 - RNA, 19 nt, Homo sapiens
  misc_RNA (1)...(19): siRNA sense strand
gcaaguucuagaccuggaa

SEQ ID NO: 576504 - RNA, 19 nt, Homo sapiens
  misc_RNA (1)...(19): siRNA sense strand
uugagaagcaguuggcuau

SEQ ID NO: 576505 - RNA, 19 nt, Homo sapiens
  misc_RNA (1)...(19): siRNA sense strand
cugaaaggacaauacaaga

SEQ ID NO: 576506 - RNA, 19 nt, Homo sapiens
  misc_RNA (1)...(19): siRNA sense strand
agaauagagccauaguuca

SEQ ID NO: 576507 - RNA, 19 nt, Homo sapiens
  misc_RNA (1)...(19): siRNA sense strand
aaacugagcugaagaugga

SEQ ID NO: 576508 - RNA, 19 nt, Homo sapiens
  misc_RNA (1)...(19): siRNA sense strand
gcaggaagcacuugaguuu

SEQ ID NO: 576509 - RNA, 19 nt, Homo sapiens
  misc_RNA (1)...(19): siRNA sense strand
gaacuaagggaaacacuug

SEQ ID NO: 576510 - RNA, 19 nt, Homo sapiens
  misc_RNA (1)...(19): siRNA sense strand
gaaaacaccccucagaaua

SEQ ID NO: 576511 - RNA, 19 nt, Homo sapiens
  misc_RNA (1)...(19): siRNA sense strand
gaauagagccauaguucaa

SEQ ID NO: 576512 - RNA, 19 nt, Homo sapiens
  misc_RNA (1)...(19): siRNA sense strand
gaaagagaacuaagggaaa

SEQ ID NO: 576513 - RNA, 19 nt, Homo sapiens
  misc_RNA (1)...(19): siRNA sense strand
gaaaggacaauacaagaug

SEQ ID NO: 576514 - RNA, 19 nt, Homo sapiens
  misc_RNA (1)...(19): siRNA sense strand
gacaaacucucucuaacug

SEQ ID NO: 576515 - RNA, 19 nt, Homo sapiens
  misc_RNA (1)...(19): siRNA sense strand
gauggaagacuguauuuga

SEQ ID NO: 576516 - RNA, 19 nt, Homo sapiens
  misc_RNA (1)...(19): siRNA sense strand
ugccagagcucaagagaaa

SEQ ID NO: 576517 - RNA, 19 nt, Homo sapiens
  misc_RNA (1)...(19): siRNA sense strand
gggaaacacuugagaagca

SEQ ID NO: 576518 - RNA, 19 nt, Homo sapiens
  misc_RNA (1)...(19): siRNA sense strand
gaaaguugccauagauaau

SEQ ID NO: 576519 - RNA, 19 nt, Homo sapiens
  misc_RNA (1)...(19): siRNA sense strand
ucucaugucuccugggaua

SEQ ID NO: 576520 - RNA, 19 nt, Homo sapiens
  misc_RNA (1)...(19): siRNA sense strand
ucgagacucuucugacuaa

SEQ ID NO: 576521 - RNA, 19 nt, Homo sapiens
  misc_RNA (1)...(19): siRNA sense strand
gcaguuggcuauggaacaa

SEQ ID NO: 576522 - RNA, 19 nt, Homo sapiens
  misc_RNA (1)...(19): siRNA sense strand
gcaaacucaucuccaggaa

SEQ ID NO: 576523 - RNA, 19 nt, Homo sapiens
  misc_RNA (1)...(19): siRNA sense strand
gaaacggcgugaacaagca

SEQ ID NO: 576524 - RNA, 19 nt, Homo sapiens
  misc_RNA (1)...(19): siRNA sense strand
gugaaccgcugcaaacuca

SEQ ID NO: 576525 - RNA, 19 nt, Homo sapiens
  misc_RNA (1)...(19): siRNA sense strand
gagaagaaggcaaagagaa

SEQ ID NO: 576526 - RNA, 19 nt, Homo sapiens
  misc_RNA (1)...(19): siRNA sense strand
ucgagacccucuacaauga

SEQ ID NO: 576527 - RNA, 19 nt, Homo sapiens
  misc_RNA (1)...(19): siRNA sense strand
guugaaaguugccauagau

SEQ ID NO: 576528 - RNA, 19 nt, Homo sapiens
  misc_RNA (1)...(19): siRNA sense strand
aggaagcacuugaguuuga

SEQ ID NO: 576529 - RNA, 19 nt, Homo sapiens
  misc_RNA (1)...(19): siRNA sense strand
cagaacagaugcugaaagg

SEQ ID NO: 576530 - RNA, 19 nt, Homo sapiens
  misc_RNA (1)...(19): siRNA sense strand
caagauggaagacuguauu

SEQ ID NO: 576531 - RNA, 19 nt, Homo sapiens
  misc_RNA (1)...(19): siRNA sense strand
aaacuacugucauguacug

SEQ ID NO: 576532 - RNA, 19 nt, Homo sapiens
  misc_RNA (1)...(19): siRNA sense strand
ggaaacccguguacucaac

SEQ ID NO: 576533 - RNA, 19 nt, Homo sapiens
  misc_RNA (1)...(19): siRNA sense strand
gagaagcaguuggcuaugg

SEQ ID NO: 576534 - RNA, 19 nt, Homo sapiens
  misc_RNA (1)...(19): siRNA sense strand
ugaaaguugccauagauaa

SEQ ID NO: 576535 - RNA, 19 nt, Homo sapiens
  misc_RNA (1)...(19): siRNA sense strand
gagacagccuugacaaacu

SEQ ID NO: 576536 - RNA, 19 nt, Homo sapiens
  misc_RNA (1)...(19): siRNA sense strand
gacaauacaagauggaaga

SEQ ID NO: 576537 - RNA, 19 nt, Homo sapiens
  misc_RNA (1)...(19): siRNA sense strand
ggaagacuguauuugaaaa

SEQ ID NO: 576538 - RNA, 19 nt, Homo sapiens
  misc_RNA (1)...(19): siRNA sense strand
agaagaaggcaaagagaaa

SEQ ID NO: 576539 - RNA, 19 nt, Homo sapiens
  misc_RNA (1)...(19): siRNA sense strand
ggagaagaaggcaaagaga

SEQ ID NO: 576540 - RNA, 19 nt, Homo sapiens
  misc_RNA (1)...(19): siRNA sense strand
acaggcagcuucaacagau

SEQ ID NO: 576541 - RNA, 19 nt, Homo sapiens
  misc_RNA (1)...(19): siRNA sense strand
ggagugaaccgcugcaaac

SEQ ID NO: 576542 - RNA, 19 nt, Homo sapiens
  misc_RNA (1)...(19): siRNA sense strand
gaaaacuacugucauguac

SEQ ID NO: 576543 - RNA, 19 nt, Homo sapiens
  misc_RNA (1)...(19): siRNA sense strand
gauagucucagggucuuaa

SEQ ID NO: 576544 - RNA, 19 nt, Homo sapiens
  misc_RNA (1)...(19): siRNA sense strand
aagaauagagccauaguuc

SEQ ID NO: 576545 - RNA, 19 nt, Homo sapiens
  misc_RNA (1)...(19): siRNA sense strand
caucgagacucuucugacu

SEQ ID NO: 576546 - RNA, 19 nt, Homo sapiens
  misc_RNA (1)...(19): siRNA sense strand
agaaggagaagaaggcaaa

SEQ ID NO: 576547 - RNA, 19 nt, Homo sapiens
  misc_RNA (1)...(19): siRNA sense strand
aaaagaggcuaaagaagga

SEQ ID NO: 576548 - RNA, 19 nt, Homo sapiens
  misc_RNA (1)...(19): siRNA sense strand
ccuaagaggacucaaagug

SEQ ID NO: 576549 - RNA, 19 nt, Homo sapiens
  misc_RNA (1)...(19): siRNA sense strand
gcugaaaggacaauacaag

SEQ ID NO: 576550 - RNA, 19 nt, Homo sapiens
  misc_RNA (1)...(19): siRNA sense strand
aagcagaacagacgcuaaa

SEQ ID NO: 576551 - RNA, 19 nt, Homo sapiens
  misc_RNA (1)...(19): siRNA sense strand
ggaaaacaccccucagaau

SEQ ID NO: 576552 - RNA, 19 nt, Homo sapiens
  misc_RNA (1)...(19): siRNA sense strand
agaagcaguuggcuaugga

SEQ ID NO: 576553 - RNA, 19 nt, Homo sapiens
  misc_RNA (1)...(19): siRNA sense strand
uaagggaaacacuugagaa

SEQ ID NO: 576554 - RNA, 19 nt, Homo sapiens
  misc_RNA (1)...(19): siRNA sense strand
aaagagaacuaagggaaac

SEQ ID NO: 576555 - RNA, 19 nt, Homo sapiens
  misc_RNA (1)...(19): siRNA sense strand
caggcagcuucaacagaua

SEQ ID NO: 576556 - RNA, 19 nt, Homo sapiens
  misc_RNA (1)...(19): siRNA sense strand
cuaagaggacucaaagugu

SEQ ID NO: 576557 - RNA, 19 nt, Homo sapiens
  misc_RNA (1)...(19): siRNA sense strand
ugaaaggacaauacaagau

SEQ ID NO: 576558 - RNA, 19 nt, Homo sapiens
  misc_RNA (1)...(19): siRNA sense strand
ggcuaaagaaggagaagaa

SEQ ID NO: 576559 - RNA, 19 nt, Homo sapiens
  misc_RNA (1)...(19): siRNA sense strand
auggaagacuguauuugaa

SEQ ID NO: 576560 - RNA, 19 nt, Homo sapiens
  misc_RNA (1)...(19): siRNA sense strand
ucacgccgguggugugcaa

SEQ ID NO: 576561 - RNA, 19 nt, Homo sapiens
  misc_RNA (1)...(19): siRNA sense strand
gcagaacagaugcugaaag

SEQ ID NO: 576562 - RNA, 19 nt, Homo sapiens
  misc_RNA (1)...(19): siRNA sense strand
ucagaauaaugagugcaaa

SEQ ID NO: 576563 - RNA, 19 nt, Homo sapiens
  misc_RNA (1)...(19): siRNA sense strand
gaugagaccccgcuuucua

SEQ ID NO: 576564 - RNA, 19 nt, Homo sapiens
  misc_RNA (1)...(19): siRNA sense strand
ugacaaacucucucuaacu

SEQ ID NO: 576565 - RNA, 19 nt, Homo sapiens
  misc_RNA (1)...(19): siRNA sense strand
cacuugaguuugagacgaa

SEQ ID NO: 576566 - RNA, 19 nt, Homo sapiens
  misc_RNA (1)...(19): siRNA sense strand
ggugugcaauguggaacaa

SEQ ID NO: 576567 - RNA, 19 nt, Homo sapiens
  misc_RNA (1)...(19): siRNA sense strand
gacgaaacggcgugaacaa

SEQ ID NO: 576568 - RNA, 19 nt, Homo sapiens
  misc_RNA (1)...(19): siRNA sense strand
ggaagcacuugaguuugag

SEQ ID NO: 576569 - RNA, 19 nt, Homo sapiens
  misc_RNA (1)...(19): siRNA sense strand
acaaaagaauagagccaua

SEQ ID NO: 576570 - RNA, 19 nt, Homo sapiens
  misc_RNA (1)...(19): siRNA sense strand
gcuguugaaaguugccaua

SEQ ID NO: 576571 - RNA, 19 nt, Homo sapiens
  misc_RNA (1)...(19): siRNA sense strand
ccuggaaggccuccuaaga

SEQ ID NO: 576572 - RNA, 19 nt, Homo sapiens
  misc_RNA (1)...(19): siRNA sense strand
gaaccgcugcaaacucauc

SEQ ID NO: 576573 - RNA, 19 nt, Homo sapiens
  misc_RNA (1)...(19): siRNA sense strand
cggcagaacagaugcugaa

SEQ ID NO: 576574 - RNA, 19 nt, Homo sapiens
  misc_RNA (1)...(19): siRNA sense strand
gucucagggucuuaaauga

SEQ ID NO: 576575 - RNA, 19 nt, Homo sapiens
  misc_RNA (1)...(19): siRNA sense strand
gaagaaggcaaagagaaaa

SEQ ID NO: 576576 - RNA, 19 nt, Homo sapiens
  misc_RNA (1)...(19): siRNA sense strand
uguugaaaguugccauaga

SEQ ID NO: 576577 - RNA, 19 nt, Homo sapiens
  misc_RNA (1)...(19): siRNA sense strand
uggaagacuguauuugaaa

SEQ ID NO: 576578 - RNA, 19 nt, Homo sapiens
  misc_RNA (1)...(19): siRNA sense strand
gggaaacccguguacucaa

SEQ ID NO: 576579 - RNA, 19 nt, Homo sapiens
  misc_RNA (1)...(19): siRNA sense strand
aaaacaccccucagaauaa

SEQ ID NO: 576580 - RNA, 19 nt, Homo sapiens
  misc_RNA (1)...(19): siRNA sense strand
cagauagucucagggucuu

SEQ ID NO: 576581 - RNA, 19 nt, Homo sapiens
  misc_RNA (1)...(19): siRNA sense strand
caugucuccugggauaauu

SEQ ID NO: 576582 - RNA, 19 nt, Homo sapiens
  misc_RNA (1)...(19): siRNA sense strand
gauaaugccagagcucaag

SEQ ID NO: 576583 - RNA, 19 nt, Homo sapiens
  misc_RNA (1)...(19): siRNA sense strand
cuugacaaacucucucuaa

SEQ ID NO: 576584 - RNA, 19 nt, Homo sapiens
  misc_RNA (1)...(19): siRNA sense strand
agacagccuugacaaacuc

SEQ ID NO: 576585 - RNA, 19 nt, Homo sapiens
  misc_RNA (1)...(19): siRNA sense strand
ggacuucgagacccucuac

SEQ ID NO: 576586 - RNA, 19 nt, Homo sapiens
  misc_RNA (1)...(19): siRNA sense strand
ugaaaacuacugucaugua

SEQ ID NO: 576587 - RNA, 19 nt, Homo sapiens
  misc_RNA (1)...(19): siRNA sense strand
ccagagcucaagagaaaca

SEQ ID NO: 576588 - RNA, 19 nt, Homo sapiens
  misc_RNA (1)...(19): siRNA sense strand
aaaguugccauagauaaug

SEQ ID NO: 576589 - RNA, 19 nt, Homo sapiens
  misc_RNA (1)...(19): siRNA sense strand
agacucuucugacuaacau

SEQ ID NO: 576590 - RNA, 19 nt, Homo sapiens
  misc_RNA (1)...(19): siRNA sense strand
ugggauaauuccaccaaca

SEQ ID NO: 576591 - RNA, 19 nt, Homo sapiens
  misc_RNA (1)...(19): siRNA sense strand
gaccuggaaggccuccuaa

SEQ ID NO: 576592 - RNA, 19 nt, Homo sapiens
  misc_RNA (1)...(19): siRNA sense strand
aaagaauagagccauaguu

SEQ ID NO: 576593 - RNA, 19 nt, Homo sapiens
  misc_RNA (1)...(19): siRNA sense strand
gaagcaguuggcuauggaa

SEQ ID NO: 576594 - RNA, 19 nt, Homo sapiens
  misc_RNA (1)...(19): siRNA sense strand
aguagcagcagcagcagua

SEQ ID NO: 576595 - RNA, 19 nt, Homo sapiens
  misc_RNA (1)...(19): siRNA sense strand
caagcagaacagacgcuaa

SEQ ID NO: 576596 - RNA, 19 nt, Homo sapiens
  misc_RNA (1)...(19): siRNA sense strand
gaauaaugagugcaaaaug

SEQ ID NO: 576597 - RNA, 19 nt, Homo sapiens
  misc_RNA (1)...(19): siRNA sense strand
ugcauacggucuacaccaa

SEQ ID NO: 576598 - RNA, 19 nt, Homo sapiens
  misc_RNA (1)...(19): siRNA sense strand
aagauggaagacuguauuu

SEQ ID NO: 576599 - RNA, 19 nt, Homo sapiens
  misc_RNA (1)...(19): siRNA sense strand
gagacucuucugacuaaca

SEQ ID NO: 576600 - RNA, 19 nt, Homo sapiens
  misc_RNA (1)...(19): siRNA sense strand
aagagacagccuugacaaa

SEQ ID NO: 576601 - RNA, 19 nt, Homo sapiens
  misc_RNA (1)...(19): siRNA sense strand
gagacccucuacaaugacu

SEQ ID NO: 576602 - RNA, 19 nt, Homo sapiens
  misc_RNA (1)...(19): siRNA sense strand
gaaggcaaagagaaaauug

SEQ ID NO: 576603 - RNA, 19 nt, Homo sapiens
  misc_RNA (1)...(19): siRNA sense strand
gcaaguucuagaccuggaa

SEQ ID NO: 576604 - RNA, 19 nt, Homo sapiens
  misc_RNA (1)...(19): siRNA sense strand
uugagaagcaguuggcuau

SEQ ID NO: 576605 - RNA, 19 nt, Homo sapiens
  misc_RNA (1)...(19): siRNA sense strand
cugaaaggacaauacaaga

SEQ ID NO: 576606 - RNA, 19 nt, Homo sapiens
  misc_RNA (1)...(19): siRNA sense strand
agaauagagccauaguuca

SEQ ID NO: 576607 - RNA, 19 nt, Homo sapiens
  misc_RNA (1)...(19): siRNA sense strand
ccacagaucacacaacuga

SEQ ID NO: 576608 - RNA, 19 nt, Homo sapiens
  misc_RNA (1)...(19): siRNA sense strand
ggaaggaguucagcucugu

SEQ ID NO: 576609 - RNA, 19 nt, Homo sapiens
  misc_RNA (1)...(19): siRNA sense strand
gagaacggcagaaacugua

SEQ ID NO: 576610 - RNA, 19 nt, Homo sapiens
  misc_RNA (1)...(19): siRNA sense strand
ucacacaacugaagauugc

SEQ ID NO: 576611 - RNA, 19 nt, Homo sapiens
  misc_RNA (1)...(19): siRNA sense strand
ggagaacggcagaaacugu

SEQ ID NO: 576612 - RNA, 19 nt, Homo sapiens
  misc_RNA (1)...(19): siRNA sense strand
gaucacacaacugaagauu

SEQ ID NO: 576613 - RNA, 19 nt, Homo sapiens
  misc_RNA (1)...(19): siRNA sense strand
uaccagaacccacagauca

SEQ ID NO: 576614 - RNA, 19 nt, Homo sapiens
  misc_RNA (1)...(19): siRNA sense strand
ccaaaggcuuccgggagaa

SEQ ID NO: 576615 - RNA, 19 nt, Homo sapiens
  misc_RNA (1)...(19): siRNA sense strand
guaccauccacgagaauug

SEQ ID NO: 576616 - RNA, 19 nt, Homo sapiens
  misc_RNA (1)...(19): siRNA sense strand
cuacuuguuucuucuggau

SEQ ID NO: 576617 - RNA, 19 nt, Homo sapiens
  misc_RNA (1)...(19): siRNA sense strand
gcccgcuacuuguuucuuc

SEQ ID NO: 576618 - RNA, 19 nt, Homo sapiens
  misc_RNA (1)...(19): siRNA sense strand
gccugaccgugucuacauu

SEQ ID NO: 576619 - RNA, 19 nt, Homo sapiens
  misc_RNA (1)...(19): siRNA sense strand
ggacaccccuaaacuggau

SEQ ID NO: 576620 - RNA, 19 nt, Homo sapiens
  misc_RNA (1)...(19): siRNA sense strand
gaacccacagaucacacaa

SEQ ID NO: 576621 - RNA, 19 nt, Homo sapiens
  misc_RNA (1)...(19): siRNA sense strand
gugucaagcucaccaacag

SEQ ID NO: 576622 - RNA, 19 nt, Homo sapiens
  misc_RNA (1)...(19): siRNA sense strand
gaacggcagaaacuguaag

SEQ ID NO: 576623 - RNA, 19 nt, Homo sapiens
  misc_RNA (1)...(19): siRNA sense strand
ugcggcagccugugucuuu

SEQ ID NO: 576624 - RNA, 19 nt, Homo sapiens
  misc_RNA (1)...(19): siRNA sense strand
cagaucacacaacugaaga

SEQ ID NO: 576625 - RNA, 19 nt, Homo sapiens
  misc_RNA (1)...(19): siRNA sense strand
ccacagaucacacaacuga

SEQ ID NO: 576626 - RNA, 19 nt, Homo sapiens
  misc_RNA (1)...(19): siRNA sense strand
ggaaggaguucagcucugu

SEQ ID NO: 576627 - RNA, 19 nt, Homo sapiens
  misc_RNA (1)...(19): siRNA sense strand
gagaacggcagaaacugua

SEQ ID NO: 576628 - RNA, 19 nt, Homo sapiens
  misc_RNA (1)...(19): siRNA sense strand
ucacacaacugaagauugc

SEQ ID NO: 576629 - RNA, 19 nt, Homo sapiens
  misc_RNA (1)...(19): siRNA sense strand
ggagaacggcagaaacugu

SEQ ID NO: 576630 - RNA, 19 nt, Homo sapiens
  misc_RNA (1)...(19): siRNA sense strand
gaucacacaacugaagauu

SEQ ID NO: 576631 - RNA, 19 nt, Homo sapiens
  misc_RNA (1)...(19): siRNA sense strand
uaccagaacccacagauca

SEQ ID NO: 576632 - RNA, 19 nt, Homo sapiens
  misc_RNA (1)...(19): siRNA sense strand
ccaaaggcuuccgggagaa

SEQ ID NO: 576633 - RNA, 19 nt, Homo sapiens
  misc_RNA (1)...(19): siRNA sense strand
guaccauccacgagaauug

SEQ ID NO: 576634 - RNA, 19 nt, Homo sapiens
  misc_RNA (1)...(19): siRNA sense strand
cuacuuguuucuucuggau

SEQ ID NO: 576635 - RNA, 19 nt, Homo sapiens
  misc_RNA (1)...(19): siRNA sense strand
gcccgcuacuuguuucuuc

SEQ ID NO: 576636 - RNA, 19 nt, Homo sapiens
  misc_RNA (1)...(19): siRNA sense strand
gccugaccgugucuacauu

SEQ ID NO: 576637 - RNA, 19 nt, Homo sapiens
  misc_RNA (1)...(19): siRNA sense strand
ggacaccccuaaacuggau

SEQ ID NO: 576638 - RNA, 19 nt, Homo sapiens
  misc_RNA (1)...(19): siRNA sense strand
gaacccacagaucacacaa

SEQ ID NO: 576639 - RNA, 19 nt, Homo sapiens
  misc_RNA (1)...(19): siRNA sense strand
gugucaagcucaccaacag

SEQ ID NO: 576640 - RNA, 19 nt, Homo sapiens
  misc_RNA (1)...(19): siRNA sense strand
gaacggcagaaacuguaag

SEQ ID NO: 576641 - RNA, 19 nt, Homo sapiens
  misc_RNA (1)...(19): siRNA sense strand
ugcggcagccugugucuuu

SEQ ID NO: 576642 - RNA, 19 nt, Homo sapiens
  misc_RNA (1)...(19): siRNA sense strand
cagaucacacaacugaaga

SEQ ID NO: 576643 - RNA, 19 nt, Homo sapiens
  misc_RNA (1)...(19): siRNA sense strand
gaagagaucuaugguggaa

SEQ ID NO: 576644 - RNA, 19 nt, Homo sapiens
  misc_RNA (1)...(19): siRNA sense strand
gaucuaugguggaauuuca

SEQ ID NO: 576645 - RNA, 19 nt, Homo sapiens
  misc_RNA (1)...(19): siRNA sense strand
ucaaugugcugcuggaguu

SEQ ID NO: 576646 - RNA, 19 nt, Homo sapiens
  misc_RNA (1)...(19): siRNA sense strand
agagaucuaugguggaauu

SEQ ID NO: 576647 - RNA, 19 nt, Homo sapiens
  misc_RNA (1)...(19): siRNA sense strand
gcucggaacuccccuauau

SEQ ID NO: 576648 - RNA, 19 nt, Homo sapiens
  misc_RNA (1)...(19): siRNA sense strand
gguagacugugugaagaaa

SEQ ID NO: 576649 - RNA, 19 nt, Homo sapiens
  misc_RNA (1)...(19): siRNA sense strand
uagaaaugcucagggcaaa

SEQ ID NO: 576650 - RNA, 19 nt, Homo sapiens
  misc_RNA (1)...(19): siRNA sense strand
uacaauguuugcuacguuu

SEQ ID NO: 576651 - RNA, 19 nt, Homo sapiens
  misc_RNA (1)...(19): siRNA sense strand
cagagccacucgaacgauu

SEQ ID NO: 576652 - RNA, 19 nt, Homo sapiens
  misc_RNA (1)...(19): siRNA sense strand
ucaauggagugacaguuca

SEQ ID NO: 576653 - RNA, 19 nt, Homo sapiens
  misc_RNA (1)...(19): siRNA sense strand
ccauuucuauaucgucaaa

SEQ ID NO: 576654 - RNA, 19 nt, Homo sapiens
  misc_RNA (1)...(19): siRNA sense strand
uuacaauguuugcuacguu

SEQ ID NO: 576655 - RNA, 19 nt, Homo sapiens
  misc_RNA (1)...(19): siRNA sense strand
gagauccugcuggcaaaua

SEQ ID NO: 576656 - RNA, 19 nt, Homo sapiens
  misc_RNA (1)...(19): siRNA sense strand
caauuaaccgggugucuuc

SEQ ID NO: 576657 - RNA, 19 nt, Homo sapiens
  misc_RNA (1)...(19): siRNA sense strand
ggucgagcaugucaucaag

SEQ ID NO: 576658 - RNA, 19 nt, Homo sapiens
  misc_RNA (1)...(19): siRNA sense strand
gaggguagacugugugaag

SEQ ID NO: 576659 - RNA, 19 nt, Homo sapiens
  misc_RNA (1)...(19): siRNA sense strand
gaaaagaagcggcuaggau

SEQ ID NO: 576660 - RNA, 19 nt, Homo sapiens
  misc_RNA (1)...(19): siRNA sense strand
aaaagaagcggcuaggaua

SEQ ID NO: 576661 - RNA, 19 nt, Homo sapiens
  misc_RNA (1)...(19): siRNA sense strand
uaggauagcagaagagauc

SEQ ID NO: 576662 - RNA, 19 nt, Homo sapiens
  misc_RNA (1)...(19): siRNA sense strand
cuauggagcuaaccugaag

SEQ ID NO: 576663 - RNA, 19 nt, Homo sapiens
  misc_RNA (1)...(19): siRNA sense strand
ggaagaugguccuguuuuc

SEQ ID NO: 576664 - RNA, 19 nt, Homo sapiens
  misc_RNA (1)...(19): siRNA sense strand
agauccugcuggcaaauaa

SEQ ID NO: 576665 - RNA, 19 nt, Homo sapiens
  misc_RNA (1)...(19): siRNA sense strand
cagcgaggcaguccaaugu

SEQ ID NO: 576666 - RNA, 19 nt, Homo sapiens
  misc_RNA (1)...(19): siRNA sense strand
gauuccuccuauaccaaua

SEQ ID NO: 576667 - RNA, 19 nt, Homo sapiens
  misc_RNA (1)...(19): siRNA sense strand
gaaggcccaccugcucuuu

SEQ ID NO: 576668 - RNA, 19 nt, Homo sapiens
  misc_RNA (1)...(19): siRNA sense strand
ggccugugccaaagccuua

SEQ ID NO: 576669 - RNA, 19 nt, Homo sapiens
  misc_RNA (1)...(19): siRNA sense strand
gcagcgaggcaguccaaug

SEQ ID NO: 576670 - RNA, 19 nt, Homo sapiens
  misc_RNA (1)...(19): siRNA sense strand
ccuaacccauuucuauauc

SEQ ID NO: 576671 - RNA, 19 nt, Homo sapiens
  misc_RNA (1)...(19): siRNA sense strand
gcacacgucaauggaguga

SEQ ID NO: 576672 - RNA, 19 nt, Homo sapiens
  misc_RNA (1)...(19): siRNA sense strand
ucgaacgauuccuccuaua

SEQ ID NO: 576673 - RNA, 19 nt, Homo sapiens
  misc_RNA (1)...(19): siRNA sense strand
ucuccuaacccauuucuau

SEQ ID NO: 576674 - RNA, 19 nt, Homo sapiens
  misc_RNA (1)...(19): siRNA sense strand
gcgcuuacuggcccuuaaa

SEQ ID NO: 576675 - RNA, 19 nt, Homo sapiens
  misc_RNA (1)...(19): siRNA sense strand
gaaacuucuagaauuagga

SEQ ID NO: 576676 - RNA, 19 nt, Homo sapiens
  misc_RNA (1)...(19): siRNA sense strand
ggauagcagaagagaucua

SEQ ID NO: 576677 - RNA, 19 nt, Homo sapiens
  misc_RNA (1)...(19): siRNA sense strand
ucuauaucgucaaaggaaa

SEQ ID NO: 576678 - RNA, 19 nt, Homo sapiens
  misc_RNA (1)...(19): siRNA sense strand
uagcagaagagaucuaugg

SEQ ID NO: 576679 - RNA, 19 nt, Homo sapiens
  misc_RNA (1)...(19): siRNA sense strand
uggagauccugcuggcaaa

SEQ ID NO: 576680 - RNA, 19 nt, Homo sapiens
  misc_RNA (1)...(19): siRNA sense strand
uaugguggaauuucagauu

SEQ ID NO: 576681 - RNA, 19 nt, Homo sapiens
  misc_RNA (1)...(19): siRNA sense strand
gcugaucgauccccacuuc

SEQ ID NO: 576682 - RNA, 19 nt, Homo sapiens
  misc_RNA (1)...(19): siRNA sense strand
gaacgauuccuccuauacc

SEQ ID NO: 576683 - RNA, 19 nt, Homo sapiens
  misc_RNA (1)...(19): siRNA sense strand
cuccuaacccauuucuaua

SEQ ID NO: 576684 - RNA, 19 nt, Homo sapiens
  misc_RNA (1)...(19): siRNA sense strand
gagagugcauggagauccu

SEQ ID NO: 576685 - RNA, 19 nt, Homo sapiens
  misc_RNA (1)...(19): siRNA sense strand
ggcgcuuacuggcccuuaa

SEQ ID NO: 576686 - RNA, 19 nt, Homo sapiens
  misc_RNA (1)...(19): siRNA sense strand
ggguagacugugugaagaa

SEQ ID NO: 576687 - RNA, 19 nt, Homo sapiens
  misc_RNA (1)...(19): siRNA sense strand
cgaacgauuccuccuauac

SEQ ID NO: 576688 - RNA, 19 nt, Homo sapiens
  misc_RNA (1)...(19): siRNA sense strand
ugaagagaggucacagaga

SEQ ID NO: 576689 - RNA, 19 nt, Homo sapiens
  misc_RNA (1)...(19): siRNA sense strand
cucgaacgauuccuccuau

SEQ ID NO: 576690 - RNA, 19 nt, Homo sapiens
  misc_RNA (1)...(19): siRNA sense strand
uaacccauuucuauaucgu

SEQ ID NO: 576691 - RNA, 19 nt, Homo sapiens
  misc_RNA (1)...(19): siRNA sense strand
aaccugaagcguagaaaug

SEQ ID NO: 576692 - RNA, 19 nt, Homo sapiens
  misc_RNA (1)...(19): siRNA sense strand
uggcucuccuaacccauuu

SEQ ID NO: 576693 - RNA, 19 nt, Homo sapiens
  misc_RNA (1)...(19): siRNA sense strand
gcuggcaaauaauguuaac

SEQ ID NO: 576694 - RNA, 19 nt, Homo sapiens
  misc_RNA (1)...(19): siRNA sense strand
caaugugaaccuugugaca

SEQ ID NO: 576695 - RNA, 19 nt, Homo sapiens
  misc_RNA (1)...(19): siRNA sense strand
uaaccugaagcguagaaau

SEQ ID NO: 576696 - RNA, 19 nt, Homo sapiens
  misc_RNA (1)...(19): siRNA sense strand
uagacugugugaagaaacu

SEQ ID NO: 576697 - RNA, 19 nt, Homo sapiens
  misc_RNA (1)...(19): siRNA sense strand
aaagaagcggcuaggauag

SEQ ID NO: 576698 - RNA, 19 nt, Homo sapiens
  misc_RNA (1)...(19): siRNA sense strand
uggccucgcccauccauga

SEQ ID NO: 576699 - RNA, 19 nt, Homo sapiens
  misc_RNA (1)...(19): siRNA sense strand
acaauuaaccgggugucuu

SEQ ID NO: 576700 - RNA, 19 nt, Homo sapiens
  misc_RNA (1)...(19): siRNA sense strand
gcuaaccugaagcguagaa

SEQ ID NO: 576701 - RNA, 19 nt, Homo sapiens
  misc_RNA (1)...(19): siRNA sense strand
uaucgucaaaggaaauaga

SEQ ID NO: 576702 - RNA, 19 nt, Homo sapiens
  misc_RNA (1)...(19): siRNA sense strand
ggaaacagcagacuuuaga

SEQ ID NO: 576703 - RNA, 19 nt, Homo sapiens
  misc_RNA (1)...(19): siRNA sense strand
gcagaggacuugauguuca

SEQ ID NO: 576704 - RNA, 19 nt, Homo sapiens
  misc_RNA (1)...(19): siRNA sense strand
ggaagaaggcccuggauga

SEQ ID NO: 576705 - RNA, 19 nt, Homo sapiens
  misc_RNA (1)...(19): siRNA sense strand
caacaagccuccagagauc

SEQ ID NO: 576706 - RNA, 19 nt, Homo sapiens
  misc_RNA (1)...(19): siRNA sense strand
gaagagacccacaugaaga

SEQ ID NO: 576707 - RNA, 19 nt, Homo sapiens
  misc_RNA (1)...(19): siRNA sense strand
ggaggaaacagcagacuuu

SEQ ID NO: 576708 - RNA, 19 nt, Homo sapiens
  misc_RNA (1)...(19): siRNA sense strand
ggaugcagcuguggaaaug

SEQ ID NO: 576709 - RNA, 19 nt, Homo sapiens
  misc_RNA (1)...(19): siRNA sense strand
gaaggagcagucuaucuuu

SEQ ID NO: 576710 - RNA, 19 nt, Homo sapiens
  misc_RNA (1)...(19): siRNA sense strand
ggaggcagcagcuauuauu

SEQ ID NO: 576711 - RNA, 19 nt, Homo sapiens
  misc_RNA (1)...(19): siRNA sense strand
caagggaguucuucaagca

SEQ ID NO: 576712 - RNA, 19 nt, Homo sapiens
  misc_RNA (1)...(19): siRNA sense strand
aagaagagcugcggaagga

SEQ ID NO: 576713 - RNA, 19 nt, Homo sapiens
  misc_RNA (1)...(19): siRNA sense strand
cgaugcagcugacaccauu

SEQ ID NO: 576714 - RNA, 19 nt, Homo sapiens
  misc_RNA (1)...(19): siRNA sense strand
caaaauacgugcucaucaa

SEQ ID NO: 576715 - RNA, 19 nt, Homo sapiens
  misc_RNA (1)...(19): siRNA sense strand
gaggaaacagcagacuuua

SEQ ID NO: 576716 - RNA, 19 nt, Homo sapiens
  misc_RNA (1)...(19): siRNA sense strand
gauguacccucgcccuuca

SEQ ID NO: 576717 - RNA, 19 nt, Homo sapiens
  misc_RNA (1)...(19): siRNA sense strand
ggaagagacccacaugaag

SEQ ID NO: 576718 - RNA, 19 nt, Homo sapiens
  misc_RNA (1)...(19): siRNA sense strand
ggaggaggcagcagcuauu

SEQ ID NO: 576719 - RNA, 19 nt, Homo sapiens
  misc_RNA (1)...(19): siRNA sense strand
uugaggagcuggagcaaga

SEQ ID NO: 576720 - RNA, 19 nt, Homo sapiens
  misc_RNA (1)...(19): siRNA sense strand
uggcuaagguggcagaguu

SEQ ID NO: 576721 - RNA, 19 nt, Homo sapiens
  misc_RNA (1)...(19): siRNA sense strand
gaggaggcagcagcuauua

SEQ ID NO: 576722 - RNA, 19 nt, Homo sapiens
  misc_RNA (1)...(19): siRNA sense strand
gaaaugaagcggauuaacc

SEQ ID NO: 576723 - RNA, 19 nt, Homo sapiens
  misc_RNA (1)...(19): siRNA sense strand
ugaaggagcagucuaucuu

SEQ ID NO: 576724 - RNA, 19 nt, Homo sapiens
  misc_RNA (1)...(19): siRNA sense strand
gaaacagcagacuuuagaa

SEQ ID NO: 576725 - RNA, 19 nt, Homo sapiens
  misc_RNA (1)...(19): siRNA sense strand
ccaagaggcgguugaagga

SEQ ID NO: 576726 - RNA, 19 nt, Homo sapiens
  misc_RNA (1)...(19): siRNA sense strand
gaagaaggcccuggaugag

SEQ ID NO: 576727 - RNA, 19 nt, Homo sapiens
  misc_RNA (1)...(19): siRNA sense strand
gcagcugacaccauugaaa

SEQ ID NO: 576728 - RNA, 19 nt, Homo sapiens
  misc_RNA (1)...(19): siRNA sense strand
cagcagcguggaagacaua

SEQ ID NO: 576729 - RNA, 19 nt, Homo sapiens
  misc_RNA (1)...(19): siRNA sense strand
guggaaaugaagcggauua

SEQ ID NO: 576730 - RNA, 19 nt, Homo sapiens
  misc_RNA (1)...(19): siRNA sense strand
aagcugcucugccaaaaua

SEQ ID NO: 576731 - RNA, 19 nt, Homo sapiens
  misc_RNA (1)...(19): siRNA sense strand
ggaggaagagacccacaug

SEQ ID NO: 576732 - RNA, 19 nt, Homo sapiens
  misc_RNA (1)...(19): siRNA sense strand
gugccacccuucucaacuu

SEQ ID NO: 576733 - RNA, 19 nt, Homo sapiens
  misc_RNA (1)...(19): siRNA sense strand
gaggaagagacccacauga

SEQ ID NO: 576734 - RNA, 19 nt, Homo sapiens
  misc_RNA (1)...(19): siRNA sense strand
ggauuaaccgagagcaguu

SEQ ID NO: 576735 - RNA, 19 nt, Homo sapiens
  misc_RNA (1)...(19): siRNA sense strand
ggagcagucuaucuuuggu

SEQ ID NO: 576736 - RNA, 19 nt, Homo sapiens
  misc_RNA (1)...(19): siRNA sense strand
aaggagcagucuaucuuug

SEQ ID NO: 576737 - RNA, 19 nt, Homo sapiens
  misc_RNA (1)...(19): siRNA sense strand
ggaggaguuugcccaaucg

SEQ ID NO: 576738 - RNA, 19 nt, Homo sapiens
  misc_RNA (1)...(19): siRNA sense strand
gggcgaagaugugccugau

SEQ ID NO: 576739 - RNA, 19 nt, Homo sapiens
  misc_RNA (1)...(19): siRNA sense strand
ggagcuuucgggacacuuu

SEQ ID NO: 576740 - RNA, 19 nt, Homo sapiens
  misc_RNA (1)...(19): siRNA sense strand
gggagcaggccaagaagga

SEQ ID NO: 576741 - RNA, 19 nt, Homo sapiens
  misc_RNA (1)...(19): siRNA sense strand
gaggaggaguuugcccaau

SEQ ID NO: 576742 - RNA, 19 nt, Homo sapiens
  misc_RNA (1)...(19): siRNA sense strand
acaacaagccuccagagau

SEQ ID NO: 576743 - RNA, 19 nt, Homo sapiens
  misc_RNA (1)...(19): siRNA sense strand
aggaagagacccacaugaa

SEQ ID NO: 576744 - RNA, 19 nt, Homo sapiens
  misc_RNA (1)...(19): siRNA sense strand
ccucaagcuugcagcauca

SEQ ID NO: 576745 - RNA, 19 nt, Homo sapiens
  misc_RNA (1)...(19): siRNA sense strand
gcgggcagcugugauguac

SEQ ID NO: 576746 - RNA, 19 nt, Homo sapiens
  misc_RNA (1)...(19): siRNA sense strand
cagaggacuugauguucau

SEQ ID NO: 576747 - RNA, 19 nt, Homo sapiens
  misc_RNA (1)...(19): siRNA sense strand
ucaagcagcaggaaagagu

SEQ ID NO: 576748 - RNA, 19 nt, Homo sapiens
  misc_RNA (1)...(19): siRNA sense strand
ucaacugggugggcgaaga

SEQ ID NO: 576749 - RNA, 19 nt, Homo sapiens
  misc_RNA (1)...(19): siRNA sense strand
cuucgaggguggugauuag

SEQ ID NO: 576750 - RNA, 19 nt, Homo sapiens
  misc_RNA (1)...(19): siRNA sense strand
gaggcagcagcuauuauug

SEQ ID NO: 576751 - RNA, 19 nt, Homo sapiens
  misc_RNA (1)...(19): siRNA sense strand
gguugaaggagcagucuau

SEQ ID NO: 576752 - RNA, 19 nt, Homo sapiens
  misc_RNA (1)...(19): siRNA sense strand
ggcaccaccuaccagaaga

SEQ ID NO: 576753 - RNA, 19 nt, Homo sapiens
  misc_RNA (1)...(19): siRNA sense strand
cugacaccauugaaacuga

SEQ ID NO: 576754 - RNA, 19 nt, Homo sapiens
  misc_RNA (1)...(19): siRNA sense strand
aauacgugcucaucaacug

SEQ ID NO: 576755 - RNA, 19 nt, Homo sapiens
  misc_RNA (1)...(19): siRNA sense strand
cccugucgcugagcagaua

SEQ ID NO: 576756 - RNA, 19 nt, Homo sapiens
  misc_RNA (1)...(19): siRNA sense strand
aaacagcagacuuuagaag

SEQ ID NO: 576757 - RNA, 19 nt, Homo sapiens
  misc_RNA (1)...(19): siRNA sense strand
agaaccagaaggugaugua

SEQ ID NO: 576758 - RNA, 19 nt, Homo sapiens
  misc_RNA (1)...(19): siRNA sense strand
uaagguggcagaguucuuc

SEQ ID NO: 576759 - RNA, 19 nt, Homo sapiens
  misc_RNA (1)...(19): siRNA sense strand
caacugggugggcgaagau

SEQ ID NO: 576760 - RNA, 19 nt, Homo sapiens
  misc_RNA (1)...(19): siRNA sense strand
ucugggagcaggccaagaa

SEQ ID NO: 576761 - RNA, 19 nt, Homo sapiens
  misc_RNA (1)...(19): siRNA sense strand
gcgagaccacccagaagga

SEQ ID NO: 576762 - RNA, 19 nt, Homo sapiens
  misc_RNA (1)...(19): siRNA sense strand
agacccacaugaagaaguc

SEQ ID NO: 576763 - RNA, 19 nt, Homo sapiens
  misc_RNA (1)...(19): siRNA sense strand
aagagacccacaugaagaa

SEQ ID NO: 576764 - RNA, 19 nt, Homo sapiens
  misc_RNA (1)...(19): siRNA sense strand
augcagcuguggaaaugaa

SEQ ID NO: 576765 - RNA, 19 nt, Homo sapiens
  misc_RNA (1)...(19): siRNA sense strand
aggaggaguuugcccaauc

SEQ ID NO: 576766 - RNA, 19 nt, Homo sapiens
  misc_RNA (1)...(19): siRNA sense strand
gcuugcagcaucaggagaa

SEQ ID NO: 576767 - RNA, 19 nt, Homo sapiens
  misc_RNA (1)...(19): siRNA sense strand
cugcagaggacuugauguu

SEQ ID NO: 576768 - RNA, 19 nt, Homo sapiens
  misc_RNA (1)...(19): siRNA sense strand
ggagcaggccaagaaggaa

SEQ ID NO: 576769 - RNA, 19 nt, Homo sapiens
  misc_RNA (1)...(19): siRNA sense strand
gggcaccaccuaccagaag

SEQ ID NO: 576770 - RNA, 19 nt, Homo sapiens
  misc_RNA (1)...(19): siRNA sense strand
gcuucgaggguggugauua

SEQ ID NO: 576771 - RNA, 19 nt, Homo sapiens
  misc_RNA (1)...(19): siRNA sense strand
cagacccaguuccagaaga

SEQ ID NO: 576772 - RNA, 19 nt, Homo sapiens
  misc_RNA (1)...(19): siRNA sense strand
ggaaaugaagcggauuaac

SEQ ID NO: 576773 - RNA, 19 nt, Homo sapiens
  misc_RNA (1)...(19): siRNA sense strand
ccagagaucgacaucacau

SEQ ID NO: 576774 - RNA, 19 nt, Homo sapiens
  misc_RNA (1)...(19): siRNA sense strand
ugccacccuucucaacuuu

SEQ ID NO: 576775 - RNA, 19 nt, Homo sapiens
  misc_RNA (1)...(19): siRNA sense strand
aaucacaggaggaggaguu

SEQ ID NO: 576776 - RNA, 19 nt, Homo sapiens
  misc_RNA (1)...(19): siRNA sense strand
ucgggcagcggcucucuaa

SEQ ID NO: 576777 - RNA, 19 nt, Homo sapiens
  misc_RNA (1)...(19): siRNA sense strand
cagccucauugaccuaugg

SEQ ID NO: 576778 - RNA, 19 nt, Homo sapiens
  misc_RNA (1)...(19): siRNA sense strand
gaggagcacaggaggaaac

SEQ ID NO: 576779 - RNA, 19 nt, Homo sapiens
  misc_RNA (1)...(19): siRNA sense strand
cagcugacaccauugaaac

SEQ ID NO: 576780 - RNA, 19 nt, Homo sapiens
  misc_RNA (1)...(19): siRNA sense strand
agacccaguuccagaagag

SEQ ID NO: 576781 - RNA, 19 nt, Homo sapiens
  misc_RNA (1)...(19): siRNA sense strand
ggaaacagcagacuuuaga

SEQ ID NO: 576782 - RNA, 19 nt, Homo sapiens
  misc_RNA (1)...(19): siRNA sense strand
gcagaggacuugauguuca

SEQ ID NO: 576783 - RNA, 19 nt, Homo sapiens
  misc_RNA (1)...(19): siRNA sense strand
ggaagaaggcccuggauga

SEQ ID NO: 576784 - RNA, 19 nt, Homo sapiens
  misc_RNA (1)...(19): siRNA sense strand
caacaagccuccagagauc

SEQ ID NO: 576785 - RNA, 19 nt, Homo sapiens
  misc_RNA (1)...(19): siRNA sense strand
gaagagacccacaugaaga

SEQ ID NO: 576786 - RNA, 19 nt, Homo sapiens
  misc_RNA (1)...(19): siRNA sense strand
ggaggaaacagcagacuuu

SEQ ID NO: 576787 - RNA, 19 nt, Homo sapiens
  misc_RNA (1)...(19): siRNA sense strand
ggaugcagcuguggaaaug

SEQ ID NO: 576788 - RNA, 19 nt, Homo sapiens
  misc_RNA (1)...(19): siRNA sense strand
gaaggagcagucuaucuuu

SEQ ID NO: 576789 - RNA, 19 nt, Homo sapiens
  misc_RNA (1)...(19): siRNA sense strand
ggaggcagcagcuauuauu

SEQ ID NO: 576790 - RNA, 19 nt, Homo sapiens
  misc_RNA (1)...(19): siRNA sense strand
caagggaguucuucaagca

SEQ ID NO: 576791 - RNA, 19 nt, Homo sapiens
  misc_RNA (1)...(19): siRNA sense strand
aagaagagcugcggaagga

SEQ ID NO: 576792 - RNA, 19 nt, Homo sapiens
  misc_RNA (1)...(19): siRNA sense strand
cgaugcagcugacaccauu

SEQ ID NO: 576793 - RNA, 19 nt, Homo sapiens
  misc_RNA (1)...(19): siRNA sense strand
caaaauacgugcucaucaa

SEQ ID NO: 576794 - RNA, 19 nt, Homo sapiens
  misc_RNA (1)...(19): siRNA sense strand
gaggaaacagcagacuuua

SEQ ID NO: 576795 - RNA, 19 nt, Homo sapiens
  misc_RNA (1)...(19): siRNA sense strand
gauguacccucgcccuuca

SEQ ID NO: 576796 - RNA, 19 nt, Homo sapiens
  misc_RNA (1)...(19): siRNA sense strand
ggaagagacccacaugaag

SEQ ID NO: 576797 - RNA, 19 nt, Homo sapiens
  misc_RNA (1)...(19): siRNA sense strand
ggaggaggcagcagcuauu

SEQ ID NO: 576798 - RNA, 19 nt, Homo sapiens
  misc_RNA (1)...(19): siRNA sense strand
uugaggagcuggagcaaga

SEQ ID NO: 576799 - RNA, 19 nt, Homo sapiens
  misc_RNA (1)...(19): siRNA sense strand
uggcuaagguggcagaguu

SEQ ID NO: 576800 - RNA, 19 nt, Homo sapiens
  misc_RNA (1)...(19): siRNA sense strand
gaggaggcagcagcuauua

SEQ ID NO: 576801 - RNA, 19 nt, Homo sapiens
  misc_RNA (1)...(19): siRNA sense strand
gaaaugaagcggauuaacc

SEQ ID NO: 576802 - RNA, 19 nt, Homo sapiens
  misc_RNA (1)...(19): siRNA sense strand
ugaaggagcagucuaucuu

SEQ ID NO: 576803 - RNA, 19 nt, Homo sapiens
  misc_RNA (1)...(19): siRNA sense strand
gaaacagcagacuuuagaa

SEQ ID NO: 576804 - RNA, 19 nt, Homo sapiens
  misc_RNA (1)...(19): siRNA sense strand
ccaagaggcgguugaagga

SEQ ID NO: 576805 - RNA, 19 nt, Homo sapiens
  misc_RNA (1)...(19): siRNA sense strand
gaagaaggcccuggaugag

SEQ ID NO: 576806 - RNA, 19 nt, Homo sapiens
  misc_RNA (1)...(19): siRNA sense strand
gcagcugacaccauugaaa

SEQ ID NO: 576807 - RNA, 19 nt, Homo sapiens
  misc_RNA (1)...(19): siRNA sense strand
cagcagcguggaagacaua

SEQ ID NO: 576808 - RNA, 19 nt, Homo sapiens
  misc_RNA (1)...(19): siRNA sense strand
guggaaaugaagcggauua

SEQ ID NO: 576809 - RNA, 19 nt, Homo sapiens
  misc_RNA (1)...(19): siRNA sense strand
aagcugcucugccaaaaua

SEQ ID NO: 576810 - RNA, 19 nt, Homo sapiens
  misc_RNA (1)...(19): siRNA sense strand
ggaggaagagacccacaug

SEQ ID NO: 576811 - RNA, 19 nt, Homo sapiens
  misc_RNA (1)...(19): siRNA sense strand
gugccacccuucucaacuu

SEQ ID NO: 576812 - RNA, 19 nt, Homo sapiens
  misc_RNA (1)...(19): siRNA sense strand
gaggaagagacccacauga

SEQ ID NO: 576813 - RNA, 19 nt, Homo sapiens
  misc_RNA (1)...(19): siRNA sense strand
ggauuaaccgagagcaguu

SEQ ID NO: 576814 - RNA, 19 nt, Homo sapiens
  misc_RNA (1)...(19): siRNA sense strand
ggagcagucuaucuuuggu

SEQ ID NO: 576815 - RNA, 19 nt, Homo sapiens
  misc_RNA (1)...(19): siRNA sense strand
aaggagcagucuaucuuug

SEQ ID NO: 576816 - RNA, 19 nt, Homo sapiens
  misc_RNA (1)...(19): siRNA sense strand
ggaggaguuugcccaaucg

SEQ ID NO: 576817 - RNA, 19 nt, Homo sapiens
  misc_RNA (1)...(19): siRNA sense strand
gggcgaagaugugccugau

SEQ ID NO: 576818 - RNA, 19 nt, Homo sapiens
  misc_RNA (1)...(19): siRNA sense strand
ggagcuuucgggacacuuu

SEQ ID NO: 576819 - RNA, 19 nt, Homo sapiens
  misc_RNA (1)...(19): siRNA sense strand
gggagcaggccaagaagga

SEQ ID NO: 576820 - RNA, 19 nt, Homo sapiens
  misc_RNA (1)...(19): siRNA sense strand
gaggaggaguuugcccaau

SEQ ID NO: 576821 - RNA, 19 nt, Homo sapiens
  misc_RNA (1)...(19): siRNA sense strand
acaacaagccuccagagau

SEQ ID NO: 576822 - RNA, 19 nt, Homo sapiens
  misc_RNA (1)...(19): siRNA sense strand
aggaagagacccacaugaa

SEQ ID NO: 576823 - RNA, 19 nt, Homo sapiens
  misc_RNA (1)...(19): siRNA sense strand
ccucaagcuugcagcauca

SEQ ID NO: 576824 - RNA, 19 nt, Homo sapiens
  misc_RNA (1)...(19): siRNA sense strand
gcgggcagcugugauguac

SEQ ID NO: 576825 - RNA, 19 nt, Homo sapiens
  misc_RNA (1)...(19): siRNA sense strand
cagaggacuugauguucau

SEQ ID NO: 576826 - RNA, 19 nt, Homo sapiens
  misc_RNA (1)...(19): siRNA sense strand
ucaagcagcaggaaagagu

SEQ ID NO: 576827 - RNA, 19 nt, Homo sapiens
  misc_RNA (1)...(19): siRNA sense strand
ucaacugggugggcgaaga

SEQ ID NO: 576828 - RNA, 19 nt, Homo sapiens
  misc_RNA (1)...(19): siRNA sense strand
cuucgaggguggugauuag

SEQ ID NO: 576829 - RNA, 19 nt, Homo sapiens
  misc_RNA (1)...(19): siRNA sense strand
gaggcagcagcuauuauug

SEQ ID NO: 576830 - RNA, 19 nt, Homo sapiens
  misc_RNA (1)...(19): siRNA sense strand
gguugaaggagcagucuau

SEQ ID NO: 576831 - RNA, 19 nt, Homo sapiens
  misc_RNA (1)...(19): siRNA sense strand
ggcaccaccuaccagaaga

SEQ ID NO: 576832 - RNA, 19 nt, Homo sapiens
  misc_RNA (1)...(19): siRNA sense strand
cugacaccauugaaacuga

SEQ ID NO: 576833 - RNA, 19 nt, Homo sapiens
  misc_RNA (1)...(19): siRNA sense strand
aauacgugcucaucaacug

SEQ ID NO: 576834 - RNA, 19 nt, Homo sapiens
  misc_RNA (1)...(19): siRNA sense strand
cccugucgcugagcagaua

SEQ ID NO: 576835 - RNA, 19 nt, Homo sapiens
  misc_RNA (1)...(19): siRNA sense strand
aaacagcagacuuuagaag

SEQ ID NO: 576836 - RNA, 19 nt, Homo sapiens
  misc_RNA (1)...(19): siRNA sense strand
agaaccagaaggugaugua

SEQ ID NO: 576837 - RNA, 19 nt, Homo sapiens
  misc_RNA (1)...(19): siRNA sense strand
uaagguggcagaguucuuc

SEQ ID NO: 576838 - RNA, 19 nt, Homo sapiens
  misc_RNA (1)...(19): siRNA sense strand
caacugggugggcgaagau

SEQ ID NO: 576839 - RNA, 19 nt, Homo sapiens
  misc_RNA (1)...(19): siRNA sense strand
ucugggagcaggccaagaa

SEQ ID NO: 576840 - RNA, 19 nt, Homo sapiens
  misc_RNA (1)...(19): siRNA sense strand
gcgagaccacccagaagga

SEQ ID NO: 576841 - RNA, 19 nt, Homo sapiens
  misc_RNA (1)...(19): siRNA sense strand
agacccacaugaagaaguc

SEQ ID NO: 576842 - RNA, 19 nt, Homo sapiens
  misc_RNA (1)...(19): siRNA sense strand
aagagacccacaugaagaa

SEQ ID NO: 576843 - RNA, 19 nt, Homo sapiens
  misc_RNA (1)...(19): siRNA sense strand
augcagcuguggaaaugaa

SEQ ID NO: 576844 - RNA, 19 nt, Homo sapiens
  misc_RNA (1)...(19): siRNA sense strand
aggaggaguuugcccaauc

SEQ ID NO: 576845 - RNA, 19 nt, Homo sapiens
  misc_RNA (1)...(19): siRNA sense strand
gcuugcagcaucaggagaa

SEQ ID NO: 576846 - RNA, 19 nt, Homo sapiens
  misc_RNA (1)...(19): siRNA sense strand
cugcagaggacuugauguu

SEQ ID NO: 576847 - RNA, 19 nt, Homo sapiens
  misc_RNA (1)...(19): siRNA sense strand
ggagcaggccaagaaggaa

SEQ ID NO: 576848 - RNA, 19 nt, Homo sapiens
  misc_RNA (1)...(19): siRNA sense strand
gggcaccaccuaccagaag

SEQ ID NO: 576849 - RNA, 19 nt, Homo sapiens
  misc_RNA (1)...(19): siRNA sense strand
gcuucgaggguggugauua

SEQ ID NO: 576850 - RNA, 19 nt, Homo sapiens
  misc_RNA (1)...(19): siRNA sense strand
cagacccaguuccagaaga

SEQ ID NO: 576851 - RNA, 19 nt, Homo sapiens
  misc_RNA (1)...(19): siRNA sense strand
ggaaaugaagcggauuaac

SEQ ID NO: 576852 - RNA, 19 nt, Homo sapiens
  misc_RNA (1)...(19): siRNA sense strand
ccagagaucgacaucacau

SEQ ID NO: 576853 - RNA, 19 nt, Homo sapiens
  misc_RNA (1)...(19): siRNA sense strand
ugccacccuucucaacuuu

SEQ ID NO: 576854 - RNA, 19 nt, Homo sapiens
  misc_RNA (1)...(19): siRNA sense strand
aaucacaggaggaggaguu

SEQ ID NO: 576855 - RNA, 19 nt, Homo sapiens
  misc_RNA (1)...(19): siRNA sense strand
ucgggcagcggcucucuaa

SEQ ID NO: 576856 - RNA, 19 nt, Homo sapiens
  misc_RNA (1)...(19): siRNA sense strand
cagccucauugaccuaugg

SEQ ID NO: 576857 - RNA, 19 nt, Homo sapiens
  misc_RNA (1)...(19): siRNA sense strand
gaggagcacaggaggaaac

SEQ ID NO: 576858 - RNA, 19 nt, Homo sapiens
  misc_RNA (1)...(19): siRNA sense strand
cagcugacaccauugaaac

SEQ ID NO: 576859 - RNA, 19 nt, Homo sapiens
  misc_RNA (1)...(19): siRNA sense strand
agacccaguuccagaagag

SEQ ID NO: 576860 - RNA, 19 nt, Homo sapiens
  misc_RNA (1)...(19): siRNA sense strand
ugaagcaguucgugucuga

SEQ ID NO: 576861 - RNA, 19 nt, Homo sapiens
  misc_RNA (1)...(19): siRNA sense strand
ggcaauggcucagaaagga

SEQ ID NO: 576862 - RNA, 19 nt, Homo sapiens
  misc_RNA (1)...(19): siRNA sense strand
agaaggaccugagugaaga

SEQ ID NO: 576863 - RNA, 19 nt, Homo sapiens
  misc_RNA (1)...(19): siRNA sense strand
gggaggagcagaaauuugu

SEQ ID NO: 576864 - RNA, 19 nt, Homo sapiens
  misc_RNA (1)...(19): siRNA sense strand
gagacgggcuucaagaacu

SEQ ID NO: 576865 - RNA, 19 nt, Homo sapiens
  misc_RNA (1)...(19): siRNA sense strand
gagagacguucagcaacuu

SEQ ID NO: 576866 - RNA, 19 nt, Homo sapiens
  misc_RNA (1)...(19): siRNA sense strand
gaggcaaugugggaagaaa

SEQ ID NO: 576867 - RNA, 19 nt, Homo sapiens
  misc_RNA (1)...(19): siRNA sense strand
gaaagaugaagucgcuaga

SEQ ID NO: 576868 - RNA, 19 nt, Homo sapiens
  misc_RNA (1)...(19): siRNA sense strand
gggcugacgccgacaacua

SEQ ID NO: 576869 - RNA, 19 nt, Homo sapiens
  misc_RNA (1)...(19): siRNA sense strand
ugagagagacguucagcaa

SEQ ID NO: 576870 - RNA, 19 nt, Homo sapiens
  misc_RNA (1)...(19): siRNA sense strand
ccagggcaauggcucagaa

SEQ ID NO: 576871 - RNA, 19 nt, Homo sapiens
  misc_RNA (1)...(19): siRNA sense strand
cgaggacugugcccacuuc

SEQ ID NO: 576872 - RNA, 19 nt, Homo sapiens
  misc_RNA (1)...(19): siRNA sense strand
gcagaaggaccugagugaa

SEQ ID NO: 576873 - RNA, 19 nt, Homo sapiens
  misc_RNA (1)...(19): siRNA sense strand
uucagcaucuggacaauga

SEQ ID NO: 576874 - RNA, 19 nt, Homo sapiens
  misc_RNA (1)...(19): siRNA sense strand
aagaugaagucgcuagagu

SEQ ID NO: 576875 - RNA, 19 nt, Homo sapiens
  misc_RNA (1)...(19): siRNA sense strand
agagagacguucagcaacu

SEQ ID NO: 576876 - RNA, 19 nt, Homo sapiens
  misc_RNA (1)...(19): siRNA sense strand
gggaggcaaugugggaaga

SEQ ID NO: 576877 - RNA, 19 nt, Homo sapiens
  misc_RNA (1)...(19): siRNA sense strand
cagaaggaccugagugaag

SEQ ID NO: 576878 - RNA, 19 nt, Homo sapiens
  misc_RNA (1)...(19): siRNA sense strand
ggcaaugugggaagaaaga

SEQ ID NO: 576879 - RNA, 19 nt, Homo sapiens
  misc_RNA (1)...(19): siRNA sense strand
agucccagcuggagaaaca

SEQ ID NO: 576880 - RNA, 19 nt, Homo sapiens
  misc_RNA (1)...(19): siRNA sense strand
ccugggaggagcagaaauu

SEQ ID NO: 576881 - RNA, 19 nt, Homo sapiens
  misc_RNA (1)...(19): siRNA sense strand
uggagaaacagcagaagga

SEQ ID NO: 576882 - RNA, 19 nt, Homo sapiens
  misc_RNA (1)...(19): siRNA sense strand
gaccaaggaguaucaagac

SEQ ID NO: 576883 - RNA, 19 nt, Homo sapiens
  misc_RNA (1)...(19): siRNA sense strand
agacgggcuucaagaacug

SEQ ID NO: 576884 - RNA, 19 nt, Homo sapiens
  misc_RNA (1)...(19): siRNA sense strand
aucaagaccuucagcaucu

SEQ ID NO: 576885 - RNA, 19 nt, Homo sapiens
  misc_RNA (1)...(19): siRNA sense strand
ugaccaccaucagcucaga

SEQ ID NO: 576886 - RNA, 19 nt, Homo sapiens
  misc_RNA (1)...(19): siRNA sense strand
gggcaauggcucagaaagg

SEQ ID NO: 576887 - RNA, 19 nt, Homo sapiens
  misc_RNA (1)...(19): siRNA sense strand
ugaggagagugaccaccau

SEQ ID NO: 576888 - RNA, 19 nt, Homo sapiens
  misc_RNA (1)...(19): siRNA sense strand
gaaggaccugagugaagau

SEQ ID NO: 576889 - RNA, 19 nt, Homo sapiens
  misc_RNA (1)...(19): siRNA sense strand
caaugugggaagaaagaug

SEQ ID NO: 576890 - RNA, 19 nt, Homo sapiens
  misc_RNA (1)...(19): siRNA sense strand
uagagucccagcuggagaa

SEQ ID NO: 576891 - RNA, 19 nt, Homo sapiens
  misc_RNA (1)...(19): siRNA sense strand
aaugugggaagaaagauga

SEQ ID NO: 576892 - RNA, 19 nt, Homo sapiens
  misc_RNA (1)...(19): siRNA sense strand
gaaacuugcuggauaugau

SEQ ID NO: 576893 - RNA, 19 nt, Homo sapiens
  misc_RNA (1)...(19): siRNA sense strand
cuuggaaacuugcuggaua

SEQ ID NO: 576894 - RNA, 19 nt, Homo sapiens
  misc_RNA (1)...(19): siRNA sense strand
gcacgaugguccuacacau

SEQ ID NO: 576895 - RNA, 19 nt, Homo sapiens
  misc_RNA (1)...(19): siRNA sense strand
ggaaacuugcuggauauga

SEQ ID NO: 576896 - RNA, 19 nt, Homo sapiens
  misc_RNA (1)...(19): siRNA sense strand
uuggaaacuugcuggauau

SEQ ID NO: 576897 - RNA, 19 nt, Homo sapiens
  misc_RNA (1)...(19): siRNA sense strand
cuacacauuccagacauuu

SEQ ID NO: 576898 - RNA, 19 nt, Homo sapiens
  misc_RNA (1)...(19): siRNA sense strand
ucaguuccauggccaagag

SEQ ID NO: 576899 - RNA, 19 nt, Homo sapiens
  misc_RNA (1)...(19): siRNA sense strand
ccuacacauuccagacauu

SEQ ID NO: 576900 - RNA, 19 nt, Homo sapiens
  misc_RNA (1)...(19): siRNA sense strand
cccgaaggcucuccaucga

SEQ ID NO: 576901 - RNA, 19 nt, Homo sapiens
  misc_RNA (1)...(19): siRNA sense strand
ccagcacgaugguccuaca

SEQ ID NO: 576902 - RNA, 19 nt, Homo sapiens
  misc_RNA (1)...(19): siRNA sense strand
cacgaugguccuacacauu

SEQ ID NO: 576903 - RNA, 19 nt, Homo sapiens
  misc_RNA (1)...(19): siRNA sense strand
aaacuugcuggauaugaug

SEQ ID NO: 576904 - RNA, 19 nt, Homo sapiens
  misc_RNA (1)...(19): siRNA sense strand
cgagcacccuucaguucca

SEQ ID NO: 576905 - RNA, 19 nt, Homo sapiens
  misc_RNA (1)...(19): siRNA sense strand
ucaguuccauggccaagag

SEQ ID NO: 576906 - RNA, 19 nt, Homo sapiens
  misc_RNA (1)...(19): siRNA sense strand
cccgaaggcucuccaucga

SEQ ID NO: 576907 - RNA, 19 nt, Homo sapiens
  misc_RNA (1)...(19): siRNA sense strand
cgagcacccuucaguucca

SEQ ID NO: 576908 - RNA, 19 nt, Homo sapiens
  misc_RNA (1)...(19): siRNA sense strand
ggaaguaaccaaacaagaa

SEQ ID NO: 576909 - RNA, 19 nt, Homo sapiens
  misc_RNA (1)...(19): siRNA sense strand
gaaacuugcuggauaugau

SEQ ID NO: 576910 - RNA, 19 nt, Homo sapiens
  misc_RNA (1)...(19): siRNA sense strand
aagaagaccucaugagaga

SEQ ID NO: 576911 - RNA, 19 nt, Homo sapiens
  misc_RNA (1)...(19): siRNA sense strand
cuuggaaacuugcuggaua

SEQ ID NO: 576912 - RNA, 19 nt, Homo sapiens
  misc_RNA (1)...(19): siRNA sense strand
gaaguaaccaaacaagaag

SEQ ID NO: 576913 - RNA, 19 nt, Homo sapiens
  misc_RNA (1)...(19): siRNA sense strand
gcacgaugguccuacacau

SEQ ID NO: 576914 - RNA, 19 nt, Homo sapiens
  misc_RNA (1)...(19): siRNA sense strand
caaacaagaagaccucaug

SEQ ID NO: 576915 - RNA, 19 nt, Homo sapiens
  misc_RNA (1)...(19): siRNA sense strand
acaagaagaccucaugaga

SEQ ID NO: 576916 - RNA, 19 nt, Homo sapiens
  misc_RNA (1)...(19): siRNA sense strand
gguguuggaugucaaugau

SEQ ID NO: 576917 - RNA, 19 nt, Homo sapiens
  misc_RNA (1)...(19): siRNA sense strand
ggaugucaaugaugauuuu

SEQ ID NO: 576918 - RNA, 19 nt, Homo sapiens
  misc_RNA (1)...(19): siRNA sense strand
ggaagccaguacagaucuu

SEQ ID NO: 576919 - RNA, 19 nt, Homo sapiens
  misc_RNA (1)...(19): siRNA sense strand
ggaaacuugcuggauauga

SEQ ID NO: 576920 - RNA, 19 nt, Homo sapiens
  misc_RNA (1)...(19): siRNA sense strand
uguuggaugucaaugauga

SEQ ID NO: 576921 - RNA, 19 nt, Homo sapiens
  misc_RNA (1)...(19): siRNA sense strand
ccaggaagccaguacagau

SEQ ID NO: 576922 - RNA, 19 nt, Homo sapiens
  misc_RNA (1)...(19): siRNA sense strand
aaacaagaagaccucauga

SEQ ID NO: 576923 - RNA, 19 nt, Homo sapiens
  misc_RNA (1)...(19): siRNA sense strand
gaagccaguacagaucuuu

SEQ ID NO: 576924 - RNA, 19 nt, Homo sapiens
  misc_RNA (1)...(19): siRNA sense strand
uuggaaacuugcuggauau

SEQ ID NO: 576925 - RNA, 19 nt, Homo sapiens
  misc_RNA (1)...(19): siRNA sense strand
cuggagcccuucccugaga

SEQ ID NO: 576926 - RNA, 19 nt, Homo sapiens
  misc_RNA (1)...(19): siRNA sense strand
cuacacauuccagacauuu

SEQ ID NO: 576927 - RNA, 19 nt, Homo sapiens
  misc_RNA (1)...(19): siRNA sense strand
ccuacacauuccagacauu

SEQ ID NO: 576928 - RNA, 19 nt, Homo sapiens
  misc_RNA (1)...(19): siRNA sense strand
cugaggaaguaaccaaaca

SEQ ID NO: 576929 - RNA, 19 nt, Homo sapiens
  misc_RNA (1)...(19): siRNA sense strand
ucaguuccauggccaagag

SEQ ID NO: 576930 - RNA, 19 nt, Homo sapiens
  misc_RNA (1)...(19): siRNA sense strand
cccgaaggcucuccaucga

SEQ ID NO: 576931 - RNA, 19 nt, Homo sapiens
  misc_RNA (1)...(19): siRNA sense strand
gaggaaguaaccaaacaag

SEQ ID NO: 576932 - RNA, 19 nt, Homo sapiens
  misc_RNA (1)...(19): siRNA sense strand
ccagcacgaugguccuaca

SEQ ID NO: 576933 - RNA, 19 nt, Homo sapiens
  misc_RNA (1)...(19): siRNA sense strand
gugcugguguuggauguca

SEQ ID NO: 576934 - RNA, 19 nt, Homo sapiens
  misc_RNA (1)...(19): siRNA sense strand
cacgaugguccuacacauu

SEQ ID NO: 576935 - RNA, 19 nt, Homo sapiens
  misc_RNA (1)...(19): siRNA sense strand
uugaggcucugaugaacau

SEQ ID NO: 576936 - RNA, 19 nt, Homo sapiens
  misc_RNA (1)...(19): siRNA sense strand
ccacuuugaggcucugaug

SEQ ID NO: 576937 - RNA, 19 nt, Homo sapiens
  misc_RNA (1)...(19): siRNA sense strand
cgagcacccuucaguucca

SEQ ID NO: 576938 - RNA, 19 nt, Homo sapiens
  misc_RNA (1)...(19): siRNA sense strand
aaacuugcuggauaugaug

SEQ ID NO: 576939 - RNA, 19 nt, Homo sapiens
  misc_RNA (1)...(19): siRNA sense strand
gcccuucccugagaaacuc

SEQ ID NO: 576940 - RNA, 19 nt, Homo sapiens
  misc_RNA (1)...(19): siRNA sense strand
gaaacuugcuggauaugau

SEQ ID NO: 576941 - RNA, 19 nt, Homo sapiens
  misc_RNA (1)...(19): siRNA sense strand
cuuggaaacuugcuggaua

SEQ ID NO: 576942 - RNA, 19 nt, Homo sapiens
  misc_RNA (1)...(19): siRNA sense strand
gcacgaugguccuacacau

SEQ ID NO: 576943 - RNA, 19 nt, Homo sapiens
  misc_RNA (1)...(19): siRNA sense strand
ggaaacuugcuggauauga

SEQ ID NO: 576944 - RNA, 19 nt, Homo sapiens
  misc_RNA (1)...(19): siRNA sense strand
uuggaaacuugcuggauau

SEQ ID NO: 576945 - RNA, 19 nt, Homo sapiens
  misc_RNA (1)...(19): siRNA sense strand
cuacacauuccagacauuu

SEQ ID NO: 576946 - RNA, 19 nt, Homo sapiens
  misc_RNA (1)...(19): siRNA sense strand
ucaguuccauggccaagag

SEQ ID NO: 576947 - RNA, 19 nt, Homo sapiens
  misc_RNA (1)...(19): siRNA sense strand
ccuacacauuccagacauu

SEQ ID NO: 576948 - RNA, 19 nt, Homo sapiens
  misc_RNA (1)...(19): siRNA sense strand
cccgaaggcucuccaucga

SEQ ID NO: 576949 - RNA, 19 nt, Homo sapiens
  misc_RNA (1)...(19): siRNA sense strand
ccagcacgaugguccuaca

SEQ ID NO: 576950 - RNA, 19 nt, Homo sapiens
  misc_RNA (1)...(19): siRNA sense strand
cacgaugguccuacacauu

SEQ ID NO: 576951 - RNA, 19 nt, Homo sapiens
  misc_RNA (1)...(19): siRNA sense strand
aaacuugcuggauaugaug

SEQ ID NO: 576952 - RNA, 19 nt, Homo sapiens
  misc_RNA (1)...(19): siRNA sense strand
cgagcacccuucaguucca

SEQ ID NO: 576953 - RNA, 19 nt, Homo sapiens
  misc_RNA (1)...(19): siRNA sense strand
ggaaguaaccaaacaagaa

SEQ ID NO: 576954 - RNA, 19 nt, Homo sapiens
  misc_RNA (1)...(19): siRNA sense strand
gaaacuugcuggauaugau

SEQ ID NO: 576955 - RNA, 19 nt, Homo sapiens
  misc_RNA (1)...(19): siRNA sense strand
aagaagaccucaugagaga

SEQ ID NO: 576956 - RNA, 19 nt, Homo sapiens
  misc_RNA (1)...(19): siRNA sense strand
cuuggaaacuugcuggaua

SEQ ID NO: 576957 - RNA, 19 nt, Homo sapiens
  misc_RNA (1)...(19): siRNA sense strand
gaaguaaccaaacaagaag

SEQ ID NO: 576958 - RNA, 19 nt, Homo sapiens
  misc_RNA (1)...(19): siRNA sense strand
gcacgaugguccuacacau

SEQ ID NO: 576959 - RNA, 19 nt, Homo sapiens
  misc_RNA (1)...(19): siRNA sense strand
caaacaagaagaccucaug

SEQ ID NO: 576960 - RNA, 19 nt, Homo sapiens
  misc_RNA (1)...(19): siRNA sense strand
acaagaagaccucaugaga

SEQ ID NO: 576961 - RNA, 19 nt, Homo sapiens
  misc_RNA (1)...(19): siRNA sense strand
gguguuggaugucaaugau

SEQ ID NO: 576962 - RNA, 19 nt, Homo sapiens
  misc_RNA (1)...(19): siRNA sense strand
ggaugucaaugaugauuuu

SEQ ID NO: 576963 - RNA, 19 nt, Homo sapiens
  misc_RNA (1)...(19): siRNA sense strand
ggaagccaguacagaucuu

SEQ ID NO: 576964 - RNA, 19 nt, Homo sapiens
  misc_RNA (1)...(19): siRNA sense strand
ggaaacuugcuggauauga

SEQ ID NO: 576965 - RNA, 19 nt, Homo sapiens
  misc_RNA (1)...(19): siRNA sense strand
uguuggaugucaaugauga

SEQ ID NO: 576966 - RNA, 19 nt, Homo sapiens
  misc_RNA (1)...(19): siRNA sense strand
ccaggaagccaguacagau

SEQ ID NO: 576967 - RNA, 19 nt, Homo sapiens
  misc_RNA (1)...(19): siRNA sense strand
aaacaagaagaccucauga

SEQ ID NO: 576968 - RNA, 19 nt, Homo sapiens
  misc_RNA (1)...(19): siRNA sense strand
gaagccaguacagaucuuu

SEQ ID NO: 576969 - RNA, 19 nt, Homo sapiens
  misc_RNA (1)...(19): siRNA sense strand
uuggaaacuugcuggauau

SEQ ID NO: 576970 - RNA, 19 nt, Homo sapiens
  misc_RNA (1)...(19): siRNA sense strand
cuggagcccuucccugaga

SEQ ID NO: 576971 - RNA, 19 nt, Homo sapiens
  misc_RNA (1)...(19): siRNA sense strand
cuacacauuccagacauuu

SEQ ID NO: 576972 - RNA, 19 nt, Homo sapiens
  misc_RNA (1)...(19): siRNA sense strand
ccuacacauuccagacauu

SEQ ID NO: 576973 - RNA, 19 nt, Homo sapiens
  misc_RNA (1)...(19): siRNA sense strand
cugaggaaguaaccaaaca

SEQ ID NO: 576974 - RNA, 19 nt, Homo sapiens
  misc_RNA (1)...(19): siRNA sense strand
ucaguuccauggccaagag

SEQ ID NO: 576975 - RNA, 19 nt, Homo sapiens
  misc_RNA (1)...(19): siRNA sense strand
cccgaaggcucuccaucga

SEQ ID NO: 576976 - RNA, 19 nt, Homo sapiens
  misc_RNA (1)...(19): siRNA sense strand
gaggaaguaaccaaacaag

SEQ ID NO: 576977 - RNA, 19 nt, Homo sapiens
  misc_RNA (1)...(19): siRNA sense strand
ccagcacgaugguccuaca

SEQ ID NO: 576978 - RNA, 19 nt, Homo sapiens
  misc_RNA (1)...(19): siRNA sense strand
gugcugguguuggauguca

SEQ ID NO: 576979 - RNA, 19 nt, Homo sapiens
  misc_RNA (1)...(19): siRNA sense strand
cacgaugguccuacacauu

SEQ ID NO: 576980 - RNA, 19 nt, Homo sapiens
  misc_RNA (1)...(19): siRNA sense strand
uugaggcucugaugaacau

SEQ ID NO: 576981 - RNA, 19 nt, Homo sapiens
  misc_RNA (1)...(19): siRNA sense strand
ccacuuugaggcucugaug

SEQ ID NO: 576982 - RNA, 19 nt, Homo sapiens
  misc_RNA (1)...(19): siRNA sense strand
cgagcacccuucaguucca

SEQ ID NO: 576983 - RNA, 19 nt, Homo sapiens
  misc_RNA (1)...(19): siRNA sense strand
aaacuugcuggauaugaug

SEQ ID NO: 576984 - RNA, 19 nt, Homo sapiens
  misc_RNA (1)...(19): siRNA sense strand
gcccuucccugagaaacuc

SEQ ID NO: 576985 - RNA, 19 nt, Homo sapiens
  misc_RNA (1)...(19): siRNA sense strand
cuacagacauagaggauuu

SEQ ID NO: 576986 - RNA, 19 nt, Homo sapiens
  misc_RNA (1)...(19): siRNA sense strand
gaaagcauuacacuguuua

SEQ ID NO: 576987 - RNA, 19 nt, Homo sapiens
  misc_RNA (1)...(19): siRNA sense strand
gaacucgaauggccuuguu

SEQ ID NO: 576988 - RNA, 19 nt, Homo sapiens
  misc_RNA (1)...(19): siRNA sense strand
gcaguuguguccuggcuaa

SEQ ID NO: 576989 - RNA, 19 nt, Homo sapiens
  misc_RNA (1)...(19): siRNA sense strand
gcagugccauugauaggaa

SEQ ID NO: 576990 - RNA, 19 nt, Homo sapiens
  misc_RNA (1)...(19): siRNA sense strand
ggagaacauuuauaaagag

SEQ ID NO: 576991 - RNA, 19 nt, Homo sapiens
  misc_RNA (1)...(19): siRNA sense strand
cagaagaaagaaagcauua

SEQ ID NO: 576992 - RNA, 19 nt, Homo sapiens
  misc_RNA (1)...(19): siRNA sense strand
auaaagaguugucuacaga

SEQ ID NO: 576993 - RNA, 19 nt, Homo sapiens
  misc_RNA (1)...(19): siRNA sense strand
gaagaaagaaagcauuaca

SEQ ID NO: 576994 - RNA, 19 nt, Homo sapiens
  misc_RNA (1)...(19): siRNA sense strand
aaagaaagcauuacacugu

SEQ ID NO: 576995 - RNA, 19 nt, Homo sapiens
  misc_RNA (1)...(19): siRNA sense strand
agaaagcauuacacuguuu

SEQ ID NO: 576996 - RNA, 19 nt, Homo sapiens
  misc_RNA (1)...(19): siRNA sense strand
gcucacgggcucugcuuua

SEQ ID NO: 576997 - RNA, 19 nt, Homo sapiens
  misc_RNA (1)...(19): siRNA sense strand
gggauuuguugcagaagaa

SEQ ID NO: 576998 - RNA, 19 nt, Homo sapiens
  misc_RNA (1)...(19): siRNA sense strand
ggacaggauccauaucaug

SEQ ID NO: 576999 - RNA, 19 nt, Homo sapiens
  misc_RNA (1)...(19): siRNA sense strand
gcagaagaaagaaagcauu

SEQ ID NO: 577000 - RNA, 19 nt, Homo sapiens
  misc_RNA (1)...(19): siRNA sense strand
gaagcggcaccauguacua

SEQ ID NO: 577001 - RNA, 19 nt, Homo sapiens
  misc_RNA (1)...(19): siRNA sense strand
gcauuacacuguuuaucca

SEQ ID NO: 577002 - RNA, 19 nt, Homo sapiens
  misc_RNA (1)...(19): siRNA sense strand
gggcucugcuuuaguguuc

SEQ ID NO: 577003 - RNA, 19 nt, Homo sapiens
  misc_RNA (1)...(19): siRNA sense strand
caucaagccaacucucaua

SEQ ID NO: 577004 - RNA, 19 nt, Homo sapiens
  misc_RNA (1)...(19): siRNA sense strand
caagccaacucucauaagg

SEQ ID NO: 577005 - RNA, 19 nt, Homo sapiens
  misc_RNA (1)...(19): siRNA sense strand
ccaguuuggagaacauuua

SEQ ID NO: 577006 - RNA, 19 nt, Homo sapiens
  misc_RNA (1)...(19): siRNA sense strand
uaaaagaugugaagguugu

SEQ ID NO: 577007 - RNA, 19 nt, Homo sapiens
  misc_RNA (1)...(19): siRNA sense strand
uauagaggguucuuuggau

SEQ ID NO: 577008 - RNA, 19 nt, Homo sapiens
  misc_RNA (1)...(19): siRNA sense strand
aagaaagcauuacacuguu

SEQ ID NO: 577009 - RNA, 19 nt, Homo sapiens
  misc_RNA (1)...(19): siRNA sense strand
uaaaucagaacucgaaugg

SEQ ID NO: 577010 - RNA, 19 nt, Homo sapiens
  misc_RNA (1)...(19): siRNA sense strand
uuaucaagcuaaugggauu

SEQ ID NO: 577011 - RNA, 19 nt, Homo sapiens
  misc_RNA (1)...(19): siRNA sense strand
guauagaggguucuuugga

SEQ ID NO: 577012 - RNA, 19 nt, Homo sapiens
  misc_RNA (1)...(19): siRNA sense strand
uauaaagaguugucuacag

SEQ ID NO: 577013 - RNA, 19 nt, Homo sapiens
  misc_RNA (1)...(19): siRNA sense strand
cauaaaagaugugaagguu

SEQ ID NO: 577014 - RNA, 19 nt, Homo sapiens
  misc_RNA (1)...(19): siRNA sense strand
uguccuggcuaaaucagaa

SEQ ID NO: 577015 - RNA, 19 nt, Homo sapiens
  misc_RNA (1)...(19): siRNA sense strand
gggacaggauccauaucau

SEQ ID NO: 577016 - RNA, 19 nt, Homo sapiens
  misc_RNA (1)...(19): siRNA sense strand
agaagcccauugacuggaa

SEQ ID NO: 577017 - RNA, 19 nt, Homo sapiens
  misc_RNA (1)...(19): siRNA sense strand
aaugggauuuguugcagaa

SEQ ID NO: 577018 - RNA, 19 nt, Homo sapiens
  misc_RNA (1)...(19): siRNA sense strand
agaggguucuuuggaugua

SEQ ID NO: 577019 - RNA, 19 nt, Homo sapiens
  misc_RNA (1)...(19): siRNA sense strand
cacgggcucugcuuuagug

SEQ ID NO: 577020 - RNA, 19 nt, Homo sapiens
  misc_RNA (1)...(19): siRNA sense strand
uaucauggaccuaaucaag

SEQ ID NO: 577021 - RNA, 19 nt, Homo sapiens
  misc_RNA (1)...(19): siRNA sense strand
gggaaaccguauuuuauca

SEQ ID NO: 577022 - RNA, 19 nt, Homo sapiens
  misc_RNA (1)...(19): siRNA sense strand
gcucaucccuccccuuugu

SEQ ID NO: 577023 - RNA, 19 nt, Homo sapiens
  misc_RNA (1)...(19): siRNA sense strand
gaauggccuuguuuucuug

SEQ ID NO: 577024 - RNA, 19 nt, Homo sapiens
  misc_RNA (1)...(19): siRNA sense strand
cgaauggccuuguuuucuu

SEQ ID NO: 577025 - RNA, 19 nt, Homo sapiens
  misc_RNA (1)...(19): siRNA sense strand
guuguguccuggcuaaauc

SEQ ID NO: 577026 - RNA, 19 nt, Homo sapiens
  misc_RNA (1)...(19): siRNA sense strand
gcucugcuuuaguguucaa

SEQ ID NO: 577027 - RNA, 19 nt, Homo sapiens
  misc_RNA (1)...(19): siRNA sense strand
gcuaaugggauuuguugca

SEQ ID NO: 577028 - RNA, 19 nt, Homo sapiens
  misc_RNA (1)...(19): siRNA sense strand
ggcuaaaucagaacucgaa

SEQ ID NO: 577029 - RNA, 19 nt, Homo sapiens
  misc_RNA (1)...(19): siRNA sense strand
aagcuaaugggauuuguug

SEQ ID NO: 577030 - RNA, 19 nt, Homo sapiens
  misc_RNA (1)...(19): siRNA sense strand
gaccggauccagaggaaca

SEQ ID NO: 577031 - RNA, 19 nt, Homo sapiens
  misc_RNA (1)...(19): siRNA sense strand
ggaguucgggaaaccguau

SEQ ID NO: 577032 - RNA, 19 nt, Homo sapiens
  misc_RNA (1)...(19): siRNA sense strand
gaaaccguauuuuaucaag

SEQ ID NO: 577033 - RNA, 19 nt, Homo sapiens
  misc_RNA (1)...(19): siRNA sense strand
cuuuggauguagacacuuu

SEQ ID NO: 577034 - RNA, 19 nt, Homo sapiens
  misc_RNA (1)...(19): siRNA sense strand
guguauagaggguucuuug

SEQ ID NO: 577035 - RNA, 19 nt, Homo sapiens
  misc_RNA (1)...(19): siRNA sense strand
ucauggaccuaaucaagcu

SEQ ID NO: 577036 - RNA, 19 nt, Homo sapiens
  misc_RNA (1)...(19): siRNA sense strand
gcugagugccgagcaguug

SEQ ID NO: 577037 - RNA, 19 nt, Homo sapiens
  misc_RNA (1)...(19): siRNA sense strand
uccuggccauggagauuua

SEQ ID NO: 577038 - RNA, 19 nt, Homo sapiens
  misc_RNA (1)...(19): siRNA sense strand
caagcuaaugggauuuguu

SEQ ID NO: 577039 - RNA, 19 nt, Homo sapiens
  misc_RNA (1)...(19): siRNA sense strand
agaaagaaagcauuacacu

SEQ ID NO: 577040 - RNA, 19 nt, Homo sapiens
  misc_RNA (1)...(19): siRNA sense strand
ugggauuuguugcagaaga

SEQ ID NO: 577041 - RNA, 19 nt, Homo sapiens
  misc_RNA (1)...(19): siRNA sense strand
gauguagacacuuuucaaa

SEQ ID NO: 577042 - RNA, 19 nt, Homo sapiens
  misc_RNA (1)...(19): siRNA sense strand
agacauagaggauuuuguu

SEQ ID NO: 577043 - RNA, 19 nt, Homo sapiens
  misc_RNA (1)...(19): siRNA sense strand
ggaagcggcaccauguacu

SEQ ID NO: 577044 - RNA, 19 nt, Homo sapiens
  misc_RNA (1)...(19): siRNA sense strand
auaggaagcggcaccaugu

SEQ ID NO: 577045 - RNA, 19 nt, Homo sapiens
  misc_RNA (1)...(19): siRNA sense strand
cuaaaucagaacucgaaug

SEQ ID NO: 577046 - RNA, 19 nt, Homo sapiens
  misc_RNA (1)...(19): siRNA sense strand
cauaucauggaccuaauca

SEQ ID NO: 577047 - RNA, 19 nt, Homo sapiens
  misc_RNA (1)...(19): siRNA sense strand
ggcaagaagcccauugacu

SEQ ID NO: 577048 - RNA, 19 nt, Homo sapiens
  misc_RNA (1)...(19): siRNA sense strand
cuacagacauagaggauuu

SEQ ID NO: 577049 - RNA, 19 nt, Homo sapiens
  misc_RNA (1)...(19): siRNA sense strand
gaaagcauuacacuguuua

SEQ ID NO: 577050 - RNA, 19 nt, Homo sapiens
  misc_RNA (1)...(19): siRNA sense strand
gaacucgaauggccuuguu

SEQ ID NO: 577051 - RNA, 19 nt, Homo sapiens
  misc_RNA (1)...(19): siRNA sense strand
gcaguuguguccuggcuaa

SEQ ID NO: 577052 - RNA, 19 nt, Homo sapiens
  misc_RNA (1)...(19): siRNA sense strand
gcagugccauugauaggaa

SEQ ID NO: 577053 - RNA, 19 nt, Homo sapiens
  misc_RNA (1)...(19): siRNA sense strand
ggagaacauuuauaaagag

SEQ ID NO: 577054 - RNA, 19 nt, Homo sapiens
  misc_RNA (1)...(19): siRNA sense strand
cagaagaaagaaagcauua

SEQ ID NO: 577055 - RNA, 19 nt, Homo sapiens
  misc_RNA (1)...(19): siRNA sense strand
auaaagaguugucuacaga

SEQ ID NO: 577056 - RNA, 19 nt, Homo sapiens
  misc_RNA (1)...(19): siRNA sense strand
gaagaaagaaagcauuaca

SEQ ID NO: 577057 - RNA, 19 nt, Homo sapiens
  misc_RNA (1)...(19): siRNA sense strand
aaagaaagcauuacacugu

SEQ ID NO: 577058 - RNA, 19 nt, Homo sapiens
  misc_RNA (1)...(19): siRNA sense strand
agaaagcauuacacuguuu

SEQ ID NO: 577059 - RNA, 19 nt, Homo sapiens
  misc_RNA (1)...(19): siRNA sense strand
gcucacgggcucugcuuua

SEQ ID NO: 577060 - RNA, 19 nt, Homo sapiens
  misc_RNA (1)...(19): siRNA sense strand
gggauuuguugcagaagaa

SEQ ID NO: 577061 - RNA, 19 nt, Homo sapiens
  misc_RNA (1)...(19): siRNA sense strand
ggacaggauccauaucaug

SEQ ID NO: 577062 - RNA, 19 nt, Homo sapiens
  misc_RNA (1)...(19): siRNA sense strand
gcagaagaaagaaagcauu

SEQ ID NO: 577063 - RNA, 19 nt, Homo sapiens
  misc_RNA (1)...(19): siRNA sense strand
gaagcggcaccauguacua

SEQ ID NO: 577064 - RNA, 19 nt, Homo sapiens
  misc_RNA (1)...(19): siRNA sense strand
gcauuacacuguuuaucca

SEQ ID NO: 577065 - RNA, 19 nt, Homo sapiens
  misc_RNA (1)...(19): siRNA sense strand
gggcucugcuuuaguguuc

SEQ ID NO: 577066 - RNA, 19 nt, Homo sapiens
  misc_RNA (1)...(19): siRNA sense strand
caucaagccaacucucaua

SEQ ID NO: 577067 - RNA, 19 nt, Homo sapiens
  misc_RNA (1)...(19): siRNA sense strand
caagccaacucucauaagg

SEQ ID NO: 577068 - RNA, 19 nt, Homo sapiens
  misc_RNA (1)...(19): siRNA sense strand
ccaguuuggagaacauuua

SEQ ID NO: 577069 - RNA, 19 nt, Homo sapiens
  misc_RNA (1)...(19): siRNA sense strand
uaaaagaugugaagguugu

SEQ ID NO: 577070 - RNA, 19 nt, Homo sapiens
  misc_RNA (1)...(19): siRNA sense strand
uauagaggguucuuuggau

SEQ ID NO: 577071 - RNA, 19 nt, Homo sapiens
  misc_RNA (1)...(19): siRNA sense strand
aagaaagcauuacacuguu

SEQ ID NO: 577072 - RNA, 19 nt, Homo sapiens
  misc_RNA (1)...(19): siRNA sense strand
uaaaucagaacucgaaugg

SEQ ID NO: 577073 - RNA, 19 nt, Homo sapiens
  misc_RNA (1)...(19): siRNA sense strand
uuaucaagcuaaugggauu

SEQ ID NO: 577074 - RNA, 19 nt, Homo sapiens
  misc_RNA (1)...(19): siRNA sense strand
guauagaggguucuuugga

SEQ ID NO: 577075 - RNA, 19 nt, Homo sapiens
  misc_RNA (1)...(19): siRNA sense strand
uauaaagaguugucuacag

SEQ ID NO: 577076 - RNA, 19 nt, Homo sapiens
  misc_RNA (1)...(19): siRNA sense strand
cauaaaagaugugaagguu

SEQ ID NO: 577077 - RNA, 19 nt, Homo sapiens
  misc_RNA (1)...(19): siRNA sense strand
uguccuggcuaaaucagaa

SEQ ID NO: 577078 - RNA, 19 nt, Homo sapiens
  misc_RNA (1)...(19): siRNA sense strand
gggacaggauccauaucau

SEQ ID NO: 577079 - RNA, 19 nt, Homo sapiens
  misc_RNA (1)...(19): siRNA sense strand
agaagcccauugacuggaa

SEQ ID NO: 577080 - RNA, 19 nt, Homo sapiens
  misc_RNA (1)...(19): siRNA sense strand
aaugggauuuguugcagaa

SEQ ID NO: 577081 - RNA, 19 nt, Homo sapiens
  misc_RNA (1)...(19): siRNA sense strand
agaggguucuuuggaugua

SEQ ID NO: 577082 - RNA, 19 nt, Homo sapiens
  misc_RNA (1)...(19): siRNA sense strand
cacgggcucugcuuuagug

SEQ ID NO: 577083 - RNA, 19 nt, Homo sapiens
  misc_RNA (1)...(19): siRNA sense strand
uaucauggaccuaaucaag

SEQ ID NO: 577084 - RNA, 19 nt, Homo sapiens
  misc_RNA (1)...(19): siRNA sense strand
gggaaaccguauuuuauca

SEQ ID NO: 577085 - RNA, 19 nt, Homo sapiens
  misc_RNA (1)...(19): siRNA sense strand
gcucaucccuccccuuugu

SEQ ID NO: 577086 - RNA, 19 nt, Homo sapiens
  misc_RNA (1)...(19): siRNA sense strand
gaauggccuuguuuucuug

SEQ ID NO: 577087 - RNA, 19 nt, Homo sapiens
  misc_RNA (1)...(19): siRNA sense strand
cgaauggccuuguuuucuu

SEQ ID NO: 577088 - RNA, 19 nt, Homo sapiens
  misc_RNA (1)...(19): siRNA sense strand
guuguguccuggcuaaauc

SEQ ID NO: 577089 - RNA, 19 nt, Homo sapiens
  misc_RNA (1)...(19): siRNA sense strand
gcucugcuuuaguguucaa

SEQ ID NO: 577090 - RNA, 19 nt, Homo sapiens
  misc_RNA (1)...(19): siRNA sense strand
gcuaaugggauuuguugca

SEQ ID NO: 577091 - RNA, 19 nt, Homo sapiens
  misc_RNA (1)...(19): siRNA sense strand
ggcuaaaucagaacucgaa

SEQ ID NO: 577092 - RNA, 19 nt, Homo sapiens
  misc_RNA (1)...(19): siRNA sense strand
aagcuaaugggauuuguug

SEQ ID NO: 577093 - RNA, 19 nt, Homo sapiens
  misc_RNA (1)...(19): siRNA sense strand
gaccggauccagaggaaca

SEQ ID NO: 577094 - RNA, 19 nt, Homo sapiens
  misc_RNA (1)...(19): siRNA sense strand
ggaguucgggaaaccguau

SEQ ID NO: 577095 - RNA, 19 nt, Homo sapiens
  misc_RNA (1)...(19): siRNA sense strand
gaaaccguauuuuaucaag

SEQ ID NO: 577096 - RNA, 19 nt, Homo sapiens
  misc_RNA (1)...(19): siRNA sense strand
cuuuggauguagacacuuu

SEQ ID NO: 577097 - RNA, 19 nt, Homo sapiens
  misc_RNA (1)...(19): siRNA sense strand
guguauagaggguucuuug

SEQ ID NO: 577098 - RNA, 19 nt, Homo sapiens
  misc_RNA (1)...(19): siRNA sense strand
ucauggaccuaaucaagcu

SEQ ID NO: 577099 - RNA, 19 nt, Homo sapiens
  misc_RNA (1)...(19): siRNA sense strand
gcugagugccgagcaguug

SEQ ID NO: 577100 - RNA, 19 nt, Homo sapiens
  misc_RNA (1)...(19): siRNA sense strand
uccuggccauggagauuua

SEQ ID NO: 577101 - RNA, 19 nt, Homo sapiens
  misc_RNA (1)...(19): siRNA sense strand
caagcuaaugggauuuguu

SEQ ID NO: 577102 - RNA, 19 nt, Homo sapiens
  misc_RNA (1)...(19): siRNA sense strand
agaaagaaagcauuacacu

SEQ ID NO: 577103 - RNA, 19 nt, Homo sapiens
  misc_RNA (1)...(19): siRNA sense strand
ugggauuuguugcagaaga

SEQ ID NO: 577104 - RNA, 19 nt, Homo sapiens
  misc_RNA (1)...(19): siRNA sense strand
gauguagacacuuuucaaa

SEQ ID NO: 577105 - RNA, 19 nt, Homo sapiens
  misc_RNA (1)...(19): siRNA sense strand
agacauagaggauuuuguu

SEQ ID NO: 577106 - RNA, 19 nt, Homo sapiens
  misc_RNA (1)...(19): siRNA sense strand
ggaagcggcaccauguacu

SEQ ID NO: 577107 - RNA, 19 nt, Homo sapiens
  misc_RNA (1)...(19): siRNA sense strand
auaggaagcggcaccaugu

SEQ ID NO: 577108 - RNA, 19 nt, Homo sapiens
  misc_RNA (1)...(19): siRNA sense strand
cuaaaucagaacucgaaug

SEQ ID NO: 577109 - RNA, 19 nt, Homo sapiens
  misc_RNA (1)...(19): siRNA sense strand
cauaucauggaccuaauca

SEQ ID NO: 577110 - RNA, 19 nt, Homo sapiens
  misc_RNA (1)...(19): siRNA sense strand
ggcaagaagcccauugacu

SEQ ID NO: 577111 - RNA, 19 nt, Homo sapiens
  misc_RNA (1)...(19): siRNA sense strand
gccaaggacuuucaagaua

SEQ ID NO: 577112 - RNA, 19 nt, Homo sapiens
  misc_RNA (1)...(19): siRNA sense strand
gagccaagcuggagaaaca

SEQ ID NO: 577113 - RNA, 19 nt, Homo sapiens
  misc_RNA (1)...(19): siRNA sense strand
gagcagaaauucauuguac

SEQ ID NO: 577114 - RNA, 19 nt, Homo sapiens
  misc_RNA (1)...(19): siRNA sense strand
ccaaggacuuucaagauau

SEQ ID NO: 577115 - RNA, 19 nt, Homo sapiens
  misc_RNA (1)...(19): siRNA sense strand
gggcugaggcggagaagua

SEQ ID NO: 577116 - RNA, 19 nt, Homo sapiens
  misc_RNA (1)...(19): siRNA sense strand
gcccugcucuuccaucuga

SEQ ID NO: 577117 - RNA, 19 nt, Homo sapiens
  misc_RNA (1)...(19): siRNA sense strand
ucacucagccagauaauug

SEQ ID NO: 577118 - RNA, 19 nt, Homo sapiens
  misc_RNA (1)...(19): siRNA sense strand
gaaauucauuguacaacac

SEQ ID NO: 577119 - RNA, 19 nt, Homo sapiens
  misc_RNA (1)...(19): siRNA sense strand
ugacggagguccaggcaau

SEQ ID NO: 577120 - RNA, 19 nt, Homo sapiens
  misc_RNA (1)...(19): siRNA sense strand
gcagaaauucauuguacaa

SEQ ID NO: 577121 - RNA, 19 nt, Homo sapiens
  misc_RNA (1)...(19): siRNA sense strand
caagaucacaucccuagga

SEQ ID NO: 577122 - RNA, 19 nt, Homo sapiens
  misc_RNA (1)...(19): siRNA sense strand
caaggacuuucaagauauc

SEQ ID NO: 577123 - RNA, 19 nt, Homo sapiens
  misc_RNA (1)...(19): siRNA sense strand
agugauggcucuuggaaau

SEQ ID NO: 577124 - RNA, 19 nt, Homo sapiens
  misc_RNA (1)...(19): siRNA sense strand
uacaagaacugggcuguca

SEQ ID NO: 577125 - RNA, 19 nt, Homo sapiens
  misc_RNA (1)...(19): siRNA sense strand
gaagugaagacuguguuga

SEQ ID NO: 577126 - RNA, 19 nt, Homo sapiens
  misc_RNA (1)...(19): siRNA sense strand
cagcgugggugacaagauc

SEQ ID NO: 577127 - RNA, 19 nt, Homo sapiens
  misc_RNA (1)...(19): siRNA sense strand
ggagcagaaauucauugua

SEQ ID NO: 577128 - RNA, 19 nt, Homo sapiens
  misc_RNA (1)...(19): siRNA sense strand
ggaagugaagacuguguug

SEQ ID NO: 577129 - RNA, 19 nt, Homo sapiens
  misc_RNA (1)...(19): siRNA sense strand
gaccauccuuuccaucaag

SEQ ID NO: 577130 - RNA, 19 nt, Homo sapiens
  misc_RNA (1)...(19): siRNA sense strand
ggguggaagugaagacugu

SEQ ID NO: 577131 - RNA, 19 nt, Homo sapiens
  misc_RNA (1)...(19): siRNA sense strand
ggccaaggacuuucaagau

SEQ ID NO: 577132 - RNA, 19 nt, Homo sapiens
  misc_RNA (1)...(19): siRNA sense strand
gggaggagcagaaauucau

SEQ ID NO: 577133 - RNA, 19 nt, Homo sapiens
  misc_RNA (1)...(19): siRNA sense strand
ggaggagcagaaauucauu

SEQ ID NO: 577134 - RNA, 19 nt, Homo sapiens
  misc_RNA (1)...(19): siRNA sense strand
cgagcuggguggaagugaa

SEQ ID NO: 577135 - RNA, 19 nt, Homo sapiens
  misc_RNA (1)...(19): siRNA sense strand
ugaccauccuuuccaucaa

SEQ ID NO: 577136 - RNA, 19 nt, Homo sapiens
  misc_RNA (1)...(19): siRNA sense strand
gaggagcagaaauucauug

SEQ ID NO: 577137 - RNA, 19 nt, Homo sapiens
  misc_RNA (1)...(19): siRNA sense strand
gcacagacuauaggcacaa

SEQ ID NO: 577138 - RNA, 19 nt, Homo sapiens
  misc_RNA (1)...(19): siRNA sense strand
cagacuauaggcacaacua

SEQ ID NO: 577139 - RNA, 19 nt, Homo sapiens
  misc_RNA (1)...(19): siRNA sense strand
ccugaaagcagaucacgau

SEQ ID NO: 577140 - RNA, 19 nt, Homo sapiens
  misc_RNA (1)...(19): siRNA sense strand
guggauggcacagacuaua

SEQ ID NO: 577141 - RNA, 19 nt, Homo sapiens
  misc_RNA (1)...(19): siRNA sense strand
ccugggaggagcagaaauu

SEQ ID NO: 577142 - RNA, 19 nt, Homo sapiens
  misc_RNA (1)...(19): siRNA sense strand
agcaacggcucccaaagga

SEQ ID NO: 577143 - RNA, 19 nt, Homo sapiens
  misc_RNA (1)...(19): siRNA sense strand
cagcaacggcucccaaagg

SEQ ID NO: 577144 - RNA, 19 nt, Homo sapiens
  misc_RNA (1)...(19): siRNA sense strand
ugauggcucuuggaaaugg

SEQ ID NO: 577145 - RNA, 19 nt, Homo sapiens
  misc_RNA (1)...(19): siRNA sense strand
acuauaggcacaacuacaa

SEQ ID NO: 577146 - RNA, 19 nt, Homo sapiens
  misc_RNA (1)...(19): siRNA sense strand
aaaugaccauccuuuccau

SEQ ID NO: 577147 - RNA, 19 nt, Homo sapiens
  misc_RNA (1)...(19): siRNA sense strand
aagugaagacuguguugaa

SEQ ID NO: 577148 - RNA, 19 nt, Homo sapiens
  misc_RNA (1)...(19): siRNA sense strand
gccaaggacuuucaagaua

SEQ ID NO: 577149 - RNA, 19 nt, Homo sapiens
  misc_RNA (1)...(19): siRNA sense strand
gagccaagcuggagaaaca

SEQ ID NO: 577150 - RNA, 19 nt, Homo sapiens
  misc_RNA (1)...(19): siRNA sense strand
gagcagaaauucauuguac

SEQ ID NO: 577151 - RNA, 19 nt, Homo sapiens
  misc_RNA (1)...(19): siRNA sense strand
ccaaggacuuucaagauau

SEQ ID NO: 577152 - RNA, 19 nt, Homo sapiens
  misc_RNA (1)...(19): siRNA sense strand
gggcugaggcggagaagua

SEQ ID NO: 577153 - RNA, 19 nt, Homo sapiens
  misc_RNA (1)...(19): siRNA sense strand
gcccugcucuuccaucuga

SEQ ID NO: 577154 - RNA, 19 nt, Homo sapiens
  misc_RNA (1)...(19): siRNA sense strand
ucacucagccagauaauug

SEQ ID NO: 577155 - RNA, 19 nt, Homo sapiens
  misc_RNA (1)...(19): siRNA sense strand
gaaauucauuguacaacac

SEQ ID NO: 577156 - RNA, 19 nt, Homo sapiens
  misc_RNA (1)...(19): siRNA sense strand
ugacggagguccaggcaau

SEQ ID NO: 577157 - RNA, 19 nt, Homo sapiens
  misc_RNA (1)...(19): siRNA sense strand
gcagaaauucauuguacaa

SEQ ID NO: 577158 - RNA, 19 nt, Homo sapiens
  misc_RNA (1)...(19): siRNA sense strand
caagaucacaucccuagga

SEQ ID NO: 577159 - RNA, 19 nt, Homo sapiens
  misc_RNA (1)...(19): siRNA sense strand
caaggacuuucaagauauc

SEQ ID NO: 577160 - RNA, 19 nt, Homo sapiens
  misc_RNA (1)...(19): siRNA sense strand
agugauggcucuuggaaau

SEQ ID NO: 577161 - RNA, 19 nt, Homo sapiens
  misc_RNA (1)...(19): siRNA sense strand
uacaagaacugggcuguca

SEQ ID NO: 577162 - RNA, 19 nt, Homo sapiens
  misc_RNA (1)...(19): siRNA sense strand
gaagugaagacuguguuga

SEQ ID NO: 577163 - RNA, 19 nt, Homo sapiens
  misc_RNA (1)...(19): siRNA sense strand
cagcgugggugacaagauc

SEQ ID NO: 577164 - RNA, 19 nt, Homo sapiens
  misc_RNA (1)...(19): siRNA sense strand
ggagcagaaauucauugua

SEQ ID NO: 577165 - RNA, 19 nt, Homo sapiens
  misc_RNA (1)...(19): siRNA sense strand
ggaagugaagacuguguug

SEQ ID NO: 577166 - RNA, 19 nt, Homo sapiens
  misc_RNA (1)...(19): siRNA sense strand
gaccauccuuuccaucaag

SEQ ID NO: 577167 - RNA, 19 nt, Homo sapiens
  misc_RNA (1)...(19): siRNA sense strand
ggguggaagugaagacugu

SEQ ID NO: 577168 - RNA, 19 nt, Homo sapiens
  misc_RNA (1)...(19): siRNA sense strand
ggccaaggacuuucaagau

SEQ ID NO: 577169 - RNA, 19 nt, Homo sapiens
  misc_RNA (1)...(19): siRNA sense strand
gggaggagcagaaauucau

SEQ ID NO: 577170 - RNA, 19 nt, Homo sapiens
  misc_RNA (1)...(19): siRNA sense strand
ggaggagcagaaauucauu

SEQ ID NO: 577171 - RNA, 19 nt, Homo sapiens
  misc_RNA (1)...(19): siRNA sense strand
cgagcuggguggaagugaa

SEQ ID NO: 577172 - RNA, 19 nt, Homo sapiens
  misc_RNA (1)...(19): siRNA sense strand
ugaccauccuuuccaucaa

SEQ ID NO: 577173 - RNA, 19 nt, Homo sapiens
  misc_RNA (1)...(19): siRNA sense strand
gaggagcagaaauucauug

SEQ ID NO: 577174 - RNA, 19 nt, Homo sapiens
  misc_RNA (1)...(19): siRNA sense strand
gcacagacuauaggcacaa

SEQ ID NO: 577175 - RNA, 19 nt, Homo sapiens
  misc_RNA (1)...(19): siRNA sense strand
cagacuauaggcacaacua

SEQ ID NO: 577176 - RNA, 19 nt, Homo sapiens
  misc_RNA (1)...(19): siRNA sense strand
ccugaaagcagaucacgau

SEQ ID NO: 577177 - RNA, 19 nt, Homo sapiens
  misc_RNA (1)...(19): siRNA sense strand
guggauggcacagacuaua

SEQ ID NO: 577178 - RNA, 19 nt, Homo sapiens
  misc_RNA (1)...(19): siRNA sense strand
ccugggaggagcagaaauu

SEQ ID NO: 577179 - RNA, 19 nt, Homo sapiens
  misc_RNA (1)...(19): siRNA sense strand
agcaacggcucccaaagga

SEQ ID NO: 577180 - RNA, 19 nt, Homo sapiens
  misc_RNA (1)...(19): siRNA sense strand
cagcaacggcucccaaagg

SEQ ID NO: 577181 - RNA, 19 nt, Homo sapiens
  misc_RNA (1)...(19): siRNA sense strand
ugauggcucuuggaaaugg

SEQ ID NO: 577182 - RNA, 19 nt, Homo sapiens
  misc_RNA (1)...(19): siRNA sense strand
acuauaggcacaacuacaa

SEQ ID NO: 577183 - RNA, 19 nt, Homo sapiens
  misc_RNA (1)...(19): siRNA sense strand
aaaugaccauccuuuccau

SEQ ID NO: 577184 - RNA, 19 nt, Homo sapiens
  misc_RNA (1)...(19): siRNA sense strand
aagugaagacuguguugaa

SEQ ID NO: 577185 - RNA, 19 nt, Homo sapiens
  misc_RNA (1)...(19): siRNA sense strand
gccaaggacuuucaagaua

SEQ ID NO: 577186 - RNA, 19 nt, Homo sapiens
  misc_RNA (1)...(19): siRNA sense strand
gagccaagcuggagaaaca

SEQ ID NO: 577187 - RNA, 19 nt, Homo sapiens
  misc_RNA (1)...(19): siRNA sense strand
gagcagaaauucauuguac

SEQ ID NO: 577188 - RNA, 19 nt, Homo sapiens
  misc_RNA (1)...(19): siRNA sense strand
ccaaggacuuucaagauau

SEQ ID NO: 577189 - RNA, 19 nt, Homo sapiens
  misc_RNA (1)...(19): siRNA sense strand
gggcugaggcggagaagua

SEQ ID NO: 577190 - RNA, 19 nt, Homo sapiens
  misc_RNA (1)...(19): siRNA sense strand
gcccugcucuuccaucuga

SEQ ID NO: 577191 - RNA, 19 nt, Homo sapiens
  misc_RNA (1)...(19): siRNA sense strand
ucacucagccagauaauug

SEQ ID NO: 577192 - RNA, 19 nt, Homo sapiens
  misc_RNA (1)...(19): siRNA sense strand
gaaauucauuguacaacac

SEQ ID NO: 577193 - RNA, 19 nt, Homo sapiens
  misc_RNA (1)...(19): siRNA sense strand
ugacggagguccaggcaau

SEQ ID NO: 577194 - RNA, 19 nt, Homo sapiens
  misc_RNA (1)...(19): siRNA sense strand
gcagaaauucauuguacaa

SEQ ID NO: 577195 - RNA, 19 nt, Homo sapiens
  misc_RNA (1)...(19): siRNA sense strand
caagaucacaucccuagga

SEQ ID NO: 577196 - RNA, 19 nt, Homo sapiens
  misc_RNA (1)...(19): siRNA sense strand
caaggacuuucaagauauc

SEQ ID NO: 577197 - RNA, 19 nt, Homo sapiens
  misc_RNA (1)...(19): siRNA sense strand
agugauggcucuuggaaau

SEQ ID NO: 577198 - RNA, 19 nt, Homo sapiens
  misc_RNA (1)...(19): siRNA sense strand
uacaagaacugggcuguca

SEQ ID NO: 577199 - RNA, 19 nt, Homo sapiens
  misc_RNA (1)...(19): siRNA sense strand
gaagugaagacuguguuga

SEQ ID NO: 577200 - RNA, 19 nt, Homo sapiens
  misc_RNA (1)...(19): siRNA sense strand
cagcgugggugacaagauc

SEQ ID NO: 577201 - RNA, 19 nt, Homo sapiens
  misc_RNA (1)...(19): siRNA sense strand
ggagcagaaauucauugua

SEQ ID NO: 577202 - RNA, 19 nt, Homo sapiens
  misc_RNA (1)...(19): siRNA sense strand
ggaagugaagacuguguug

SEQ ID NO: 577203 - RNA, 19 nt, Homo sapiens
  misc_RNA (1)...(19): siRNA sense strand
gaccauccuuuccaucaag

SEQ ID NO: 577204 - RNA, 19 nt, Homo sapiens
  misc_RNA (1)...(19): siRNA sense strand
ggguggaagugaagacugu

SEQ ID NO: 577205 - RNA, 19 nt, Homo sapiens
  misc_RNA (1)...(19): siRNA sense strand
ggccaaggacuuucaagau

SEQ ID NO: 577206 - RNA, 19 nt, Homo sapiens
  misc_RNA (1)...(19): siRNA sense strand
gggaggagcagaaauucau

SEQ ID NO: 577207 - RNA, 19 nt, Homo sapiens
  misc_RNA (1)...(19): siRNA sense strand
ggaggagcagaaauucauu

SEQ ID NO: 577208 - RNA, 19 nt, Homo sapiens
  misc_RNA (1)...(19): siRNA sense strand
cgagcuggguggaagugaa

SEQ ID NO: 577209 - RNA, 19 nt, Homo sapiens
  misc_RNA (1)...(19): siRNA sense strand
ugaccauccuuuccaucaa

SEQ ID NO: 577210 - RNA, 19 nt, Homo sapiens
  misc_RNA (1)...(19): siRNA sense strand
gaggagcagaaauucauug

SEQ ID NO: 577211 - RNA, 19 nt, Homo sapiens
  misc_RNA (1)...(19): siRNA sense strand
gcacagacuauaggcacaa

SEQ ID NO: 577212 - RNA, 19 nt, Homo sapiens
  misc_RNA (1)...(19): siRNA sense strand
cagacuauaggcacaacua

SEQ ID NO: 577213 - RNA, 19 nt, Homo sapiens
  misc_RNA (1)...(19): siRNA sense strand
ccugaaagcagaucacgau

SEQ ID NO: 577214 - RNA, 19 nt, Homo sapiens
  misc_RNA (1)...(19): siRNA sense strand
guggauggcacagacuaua

SEQ ID NO: 577215 - RNA, 19 nt, Homo sapiens
  misc_RNA (1)...(19): siRNA sense strand
ccugggaggagcagaaauu

SEQ ID NO: 577216 - RNA, 19 nt, Homo sapiens
  misc_RNA (1)...(19): siRNA sense strand
agcaacggcucccaaagga

SEQ ID NO: 577217 - RNA, 19 nt, Homo sapiens
  misc_RNA (1)...(19): siRNA sense strand
cagcaacggcucccaaagg

SEQ ID NO: 577218 - RNA, 19 nt, Homo sapiens
  misc_RNA (1)...(19): siRNA sense strand
ugauggcucuuggaaaugg

SEQ ID NO: 577219 - RNA, 19 nt, Homo sapiens
  misc_RNA (1)...(19): siRNA sense strand
acuauaggcacaacuacaa

SEQ ID NO: 577220 - RNA, 19 nt, Homo sapiens
  misc_RNA (1)...(19): siRNA sense strand
aaaugaccauccuuuccau

SEQ ID NO: 577221 - RNA, 19 nt, Homo sapiens
  misc_RNA (1)...(19): siRNA sense strand
aagugaagacuguguugaa

SEQ ID NO: 577222 - RNA, 19 nt, Homo sapiens
  misc_RNA (1)...(19): siRNA sense strand
gccaaggacuuucaagaua

SEQ ID NO: 577223 - RNA, 19 nt, Homo sapiens
  misc_RNA (1)...(19): siRNA sense strand
gagccaagcuggagaaaca

SEQ ID NO: 577224 - RNA, 19 nt, Homo sapiens
  misc_RNA (1)...(19): siRNA sense strand
gagcagaaauucauuguac

SEQ ID NO: 577225 - RNA, 19 nt, Homo sapiens
  misc_RNA (1)...(19): siRNA sense strand
ccaaggacuuucaagauau

SEQ ID NO: 577226 - RNA, 19 nt, Homo sapiens
  misc_RNA (1)...(19): siRNA sense strand
gggcugaggcggagaagua

SEQ ID NO: 577227 - RNA, 19 nt, Homo sapiens
  misc_RNA (1)...(19): siRNA sense strand
gcccugcucuuccaucuga

SEQ ID NO: 577228 - RNA, 19 nt, Homo sapiens
  misc_RNA (1)...(19): siRNA sense strand
ucacucagccagauaauug

SEQ ID NO: 577229 - RNA, 19 nt, Homo sapiens
  misc_RNA (1)...(19): siRNA sense strand
gaaauucauuguacaacac

SEQ ID NO: 577230 - RNA, 19 nt, Homo sapiens
  misc_RNA (1)...(19): siRNA sense strand
ugacggagguccaggcaau

SEQ ID NO: 577231 - RNA, 19 nt, Homo sapiens
  misc_RNA (1)...(19): siRNA sense strand
gcagaaauucauuguacaa

SEQ ID NO: 577232 - RNA, 19 nt, Homo sapiens
  misc_RNA (1)...(19): siRNA sense strand
caagaucacaucccuagga

SEQ ID NO: 577233 - RNA, 19 nt, Homo sapiens
  misc_RNA (1)...(19): siRNA sense strand
caaggacuuucaagauauc

SEQ ID NO: 577234 - RNA, 19 nt, Homo sapiens
  misc_RNA (1)...(19): siRNA sense strand
agugauggcucuuggaaau

SEQ ID NO: 577235 - RNA, 19 nt, Homo sapiens
  misc_RNA (1)...(19): siRNA sense strand
uacaagaacugggcuguca

SEQ ID NO: 577236 - RNA, 19 nt, Homo sapiens
  misc_RNA (1)...(19): siRNA sense strand
gaagugaagacuguguuga

SEQ ID NO: 577237 - RNA, 19 nt, Homo sapiens
  misc_RNA (1)...(19): siRNA sense strand
cagcgugggugacaagauc

SEQ ID NO: 577238 - RNA, 19 nt, Homo sapiens
  misc_RNA (1)...(19): siRNA sense strand
ggagcagaaauucauugua

SEQ ID NO: 577239 - RNA, 19 nt, Homo sapiens
  misc_RNA (1)...(19): siRNA sense strand
ggaagugaagacuguguug

SEQ ID NO: 577240 - RNA, 19 nt, Homo sapiens
  misc_RNA (1)...(19): siRNA sense strand
gaccauccuuuccaucaag

SEQ ID NO: 577241 - RNA, 19 nt, Homo sapiens
  misc_RNA (1)...(19): siRNA sense strand
ggguggaagugaagacugu

SEQ ID NO: 577242 - RNA, 19 nt, Homo sapiens
  misc_RNA (1)...(19): siRNA sense strand
ggccaaggacuuucaagau

SEQ ID NO: 577243 - RNA, 19 nt, Homo sapiens
  misc_RNA (1)...(19): siRNA sense strand
gggaggagcagaaauucau

SEQ ID NO: 577244 - RNA, 19 nt, Homo sapiens
  misc_RNA (1)...(19): siRNA sense strand
ggaggagcagaaauucauu

SEQ ID NO: 577245 - RNA, 19 nt, Homo sapiens
  misc_RNA (1)...(19): siRNA sense strand
cgagcuggguggaagugaa

SEQ ID NO: 577246 - RNA, 19 nt, Homo sapiens
  misc_RNA (1)...(19): siRNA sense strand
ugaccauccuuuccaucaa

SEQ ID NO: 577247 - RNA, 19 nt, Homo sapiens
  misc_RNA (1)...(19): siRNA sense strand
gaggagcagaaauucauug

SEQ ID NO: 577248 - RNA, 19 nt, Homo sapiens
  misc_RNA (1)...(19): siRNA sense strand
gcacagacuauaggcacaa

SEQ ID NO: 577249 - RNA, 19 nt, Homo sapiens
  misc_RNA (1)...(19): siRNA sense strand
cagacuauaggcacaacua

SEQ ID NO: 577250 - RNA, 19 nt, Homo sapiens
  misc_RNA (1)...(19): siRNA sense strand
ccugaaagcagaucacgau

SEQ ID NO: 577251 - RNA, 19 nt, Homo sapiens
  misc_RNA (1)...(19): siRNA sense strand
guggauggcacagacuaua

SEQ ID NO: 577252 - RNA, 19 nt, Homo sapiens
  misc_RNA (1)...(19): siRNA sense strand
ccugggaggagcagaaauu

SEQ ID NO: 577253 - RNA, 19 nt, Homo sapiens
  misc_RNA (1)...(19): siRNA sense strand
agcaacggcucccaaagga

SEQ ID NO: 577254 - RNA, 19 nt, Homo sapiens
  misc_RNA (1)...(19): siRNA sense strand
cagcaacggcucccaaagg

SEQ ID NO: 577255 - RNA, 19 nt, Homo sapiens
  misc_RNA (1)...(19): siRNA sense strand
ugauggcucuuggaaaugg

SEQ ID NO: 577256 - RNA, 19 nt, Homo sapiens
  misc_RNA (1)...(19): siRNA sense strand
acuauaggcacaacuacaa

SEQ ID NO: 577257 - RNA, 19 nt, Homo sapiens
  misc_RNA (1)...(19): siRNA sense strand
aaaugaccauccuuuccau

SEQ ID NO: 577258 - RNA, 19 nt, Homo sapiens
  misc_RNA (1)...(19): siRNA sense strand
aagugaagacuguguugaa

SEQ ID NO: 577259 - RNA, 19 nt, Homo sapiens
  misc_RNA (1)...(19): siRNA sense strand
gccaaggacuuucaagaua

SEQ ID NO: 577260 - RNA, 19 nt, Homo sapiens
  misc_RNA (1)...(19): siRNA sense strand
gagccaagcuggagaaaca

SEQ ID NO: 577261 - RNA, 19 nt, Homo sapiens
  misc_RNA (1)...(19): siRNA sense strand
gagcagaaauucauuguac

SEQ ID NO: 577262 - RNA, 19 nt, Homo sapiens
  misc_RNA (1)...(19): siRNA sense strand
ccaaggacuuucaagauau

SEQ ID NO: 577263 - RNA, 19 nt, Homo sapiens
  misc_RNA (1)...(19): siRNA sense strand
gggcugaggcggagaagua

SEQ ID NO: 577264 - RNA, 19 nt, Homo sapiens
  misc_RNA (1)...(19): siRNA sense strand
gcccugcucuuccaucuga

SEQ ID NO: 577265 - RNA, 19 nt, Homo sapiens
  misc_RNA (1)...(19): siRNA sense strand
ucacucagccagauaauug

SEQ ID NO: 577266 - RNA, 19 nt, Homo sapiens
  misc_RNA (1)...(19): siRNA sense strand
gaaauucauuguacaacac

SEQ ID NO: 577267 - RNA, 19 nt, Homo sapiens
  misc_RNA (1)...(19): siRNA sense strand
ugacggagguccaggcaau

SEQ ID NO: 577268 - RNA, 19 nt, Homo sapiens
  misc_RNA (1)...(19): siRNA sense strand
gcagaaauucauuguacaa

SEQ ID NO: 577269 - RNA, 19 nt, Homo sapiens
  misc_RNA (1)...(19): siRNA sense strand
caagaucacaucccuagga

SEQ ID NO: 577270 - RNA, 19 nt, Homo sapiens
  misc_RNA (1)...(19): siRNA sense strand
caaggacuuucaagauauc

SEQ ID NO: 577271 - RNA, 19 nt, Homo sapiens
  misc_RNA (1)...(19): siRNA sense strand
agugauggcucuuggaaau

SEQ ID NO: 577272 - RNA, 19 nt, Homo sapiens
  misc_RNA (1)...(19): siRNA sense strand
uacaagaacugggcuguca

SEQ ID NO: 577273 - RNA, 19 nt, Homo sapiens
  misc_RNA (1)...(19): siRNA sense strand
gaagugaagacuguguuga

SEQ ID NO: 577274 - RNA, 19 nt, Homo sapiens
  misc_RNA (1)...(19): siRNA sense strand
cagcgugggugacaagauc

SEQ ID NO: 577275 - RNA, 19 nt, Homo sapiens
  misc_RNA (1)...(19): siRNA sense strand
ggagcagaaauucauugua

SEQ ID NO: 577276 - RNA, 19 nt, Homo sapiens
  misc_RNA (1)...(19): siRNA sense strand
ggaagugaagacuguguug

SEQ ID NO: 577277 - RNA, 19 nt, Homo sapiens
  misc_RNA (1)...(19): siRNA sense strand
gaccauccuuuccaucaag

SEQ ID NO: 577278 - RNA, 19 nt, Homo sapiens
  misc_RNA (1)...(19): siRNA sense strand
ggguggaagugaagacugu

SEQ ID NO: 577279 - RNA, 19 nt, Homo sapiens
  misc_RNA (1)...(19): siRNA sense strand
ggccaaggacuuucaagau

SEQ ID NO: 577280 - RNA, 19 nt, Homo sapiens
  misc_RNA (1)...(19): siRNA sense strand
gggaggagcagaaauucau

SEQ ID NO: 577281 - RNA, 19 nt, Homo sapiens
  misc_RNA (1)...(19): siRNA sense strand
ggaggagcagaaauucauu

SEQ ID NO: 577282 - RNA, 19 nt, Homo sapiens
  misc_RNA (1)...(19): siRNA sense strand
cgagcuggguggaagugaa

SEQ ID NO: 577283 - RNA, 19 nt, Homo sapiens
  misc_RNA (1)...(19): siRNA sense strand
ugaccauccuuuccaucaa

SEQ ID NO: 577284 - RNA, 19 nt, Homo sapiens
  misc_RNA (1)...(19): siRNA sense strand
gaggagcagaaauucauug

SEQ ID NO: 577285 - RNA, 19 nt, Homo sapiens
  misc_RNA (1)...(19): siRNA sense strand
gcacagacuauaggcacaa

SEQ ID NO: 577286 - RNA, 19 nt, Homo sapiens
  misc_RNA (1)...(19): siRNA sense strand
cagacuauaggcacaacua

SEQ ID NO: 577287 - RNA, 19 nt, Homo sapiens
  misc_RNA (1)...(19): siRNA sense strand
ccugaaagcagaucacgau

SEQ ID NO: 577288 - RNA, 19 nt, Homo sapiens
  misc_RNA (1)...(19): siRNA sense strand
guggauggcacagacuaua

SEQ ID NO: 577289 - RNA, 19 nt, Homo sapiens
  misc_RNA (1)...(19): siRNA sense strand
ccugggaggagcagaaauu

SEQ ID NO: 577290 - RNA, 19 nt, Homo sapiens
  misc_RNA (1)...(19): siRNA sense strand
agcaacggcucccaaagga

SEQ ID NO: 577291 - RNA, 19 nt, Homo sapiens
  misc_RNA (1)...(19): siRNA sense strand
cagcaacggcucccaaagg

SEQ ID NO: 577292 - RNA, 19 nt, Homo sapiens
  misc_RNA (1)...(19): siRNA sense strand
ugauggcucuuggaaaugg

SEQ ID NO: 577293 - RNA, 19 nt, Homo sapiens
  misc_RNA (1)...(19): siRNA sense strand
acuauaggcacaacuacaa

SEQ ID NO: 577294 - RNA, 19 nt, Homo sapiens
  misc_RNA (1)...(19): siRNA sense strand
aaaugaccauccuuuccau

SEQ ID NO: 577295 - RNA, 19 nt, Homo sapiens
  misc_RNA (1)...(19): siRNA sense strand
aagugaagacuguguugaa

SEQ ID NO: 577296 - RNA, 19 nt, Homo sapiens
  misc_RNA (1)...(19): siRNA sense strand
gccaaggacuuucaagaua

SEQ ID NO: 577297 - RNA, 19 nt, Homo sapiens
  misc_RNA (1)...(19): siRNA sense strand
gagccaagcuggagaaaca

SEQ ID NO: 577298 - RNA, 19 nt, Homo sapiens
  misc_RNA (1)...(19): siRNA sense strand
gagcagaaauucauuguac

SEQ ID NO: 577299 - RNA, 19 nt, Homo sapiens
  misc_RNA (1)...(19): siRNA sense strand
ccaaggacuuucaagauau

SEQ ID NO: 577300 - RNA, 19 nt, Homo sapiens
  misc_RNA (1)...(19): siRNA sense strand
gggcugaggcggagaagua

SEQ ID NO: 577301 - RNA, 19 nt, Homo sapiens
  misc_RNA (1)...(19): siRNA sense strand
gcccugcucuuccaucuga

SEQ ID NO: 577302 - RNA, 19 nt, Homo sapiens
  misc_RNA (1)...(19): siRNA sense strand
ucacucagccagauaauug

SEQ ID NO: 577303 - RNA, 19 nt, Homo sapiens
  misc_RNA (1)...(19): siRNA sense strand
gaaauucauuguacaacac

SEQ ID NO: 577304 - RNA, 19 nt, Homo sapiens
  misc_RNA (1)...(19): siRNA sense strand
ugacggagguccaggcaau

SEQ ID NO: 577305 - RNA, 19 nt, Homo sapiens
  misc_RNA (1)...(19): siRNA sense strand
gcagaaauucauuguacaa

SEQ ID NO: 577306 - RNA, 19 nt, Homo sapiens
  misc_RNA (1)...(19): siRNA sense strand
caagaucacaucccuagga

SEQ ID NO: 577307 - RNA, 19 nt, Homo sapiens
  misc_RNA (1)...(19): siRNA sense strand
caaggacuuucaagauauc

SEQ ID NO: 577308 - RNA, 19 nt, Homo sapiens
  misc_RNA (1)...(19): siRNA sense strand
agugauggcucuuggaaau

SEQ ID NO: 577309 - RNA, 19 nt, Homo sapiens
  misc_RNA (1)...(19): siRNA sense strand
uacaagaacugggcuguca

SEQ ID NO: 577310 - RNA, 19 nt, Homo sapiens
  misc_RNA (1)...(19): siRNA sense strand
gaagugaagacuguguuga

SEQ ID NO: 577311 - RNA, 19 nt, Homo sapiens
  misc_RNA (1)...(19): siRNA sense strand
cagcgugggugacaagauc

SEQ ID NO: 577312 - RNA, 19 nt, Homo sapiens
  misc_RNA (1)...(19): siRNA sense strand
ggagcagaaauucauugua

SEQ ID NO: 577313 - RNA, 19 nt, Homo sapiens
  misc_RNA (1)...(19): siRNA sense strand
ggaagugaagacuguguug

SEQ ID NO: 577314 - RNA, 19 nt, Homo sapiens
  misc_RNA (1)...(19): siRNA sense strand
gaccauccuuuccaucaag

SEQ ID NO: 577315 - RNA, 19 nt, Homo sapiens
  misc_RNA (1)...(19): siRNA sense strand
ggguggaagugaagacugu

SEQ ID NO: 577316 - RNA, 19 nt, Homo sapiens
  misc_RNA (1)...(19): siRNA sense strand
ggccaaggacuuucaagau

SEQ ID NO: 577317 - RNA, 19 nt, Homo sapiens
  misc_RNA (1)...(19): siRNA sense strand
gggaggagcagaaauucau

SEQ ID NO: 577318 - RNA, 19 nt, Homo sapiens
  misc_RNA (1)...(19): siRNA sense strand
ggaggagcagaaauucauu

SEQ ID NO: 577319 - RNA, 19 nt, Homo sapiens
  misc_RNA (1)...(19): siRNA sense strand
cgagcuggguggaagugaa

SEQ ID NO: 577320 - RNA, 19 nt, Homo sapiens
  misc_RNA (1)...(19): siRNA sense strand
ugaccauccuuuccaucaa

SEQ ID NO: 577321 - RNA, 19 nt, Homo sapiens
  misc_RNA (1)...(19): siRNA sense strand
gaggagcagaaauucauug

SEQ ID NO: 577322 - RNA, 19 nt, Homo sapiens
  misc_RNA (1)...(19): siRNA sense strand
gcacagacuauaggcacaa

SEQ ID NO: 577323 - RNA, 19 nt, Homo sapiens
  misc_RNA (1)...(19): siRNA sense strand
cagacuauaggcacaacua

SEQ ID NO: 577324 - RNA, 19 nt, Homo sapiens
  misc_RNA (1)...(19): siRNA sense strand
ccugaaagcagaucacgau

SEQ ID NO: 577325 - RNA, 19 nt, Homo sapiens
  misc_RNA (1)...(19): siRNA sense strand
guggauggcacagacuaua

SEQ ID NO: 577326 - RNA, 19 nt, Homo sapiens
  misc_RNA (1)...(19): siRNA sense strand
ccugggaggagcagaaauu

SEQ ID NO: 577327 - RNA, 19 nt, Homo sapiens
  misc_RNA (1)...(19): siRNA sense strand
agcaacggcucccaaagga

SEQ ID NO: 577328 - RNA, 19 nt, Homo sapiens
  misc_RNA (1)...(19): siRNA sense strand
cagcaacggcucccaaagg

SEQ ID NO: 577329 - RNA, 19 nt, Homo sapiens
  misc_RNA (1)...(19): siRNA sense strand
ugauggcucuuggaaaugg

SEQ ID NO: 577330 - RNA, 19 nt, Homo sapiens
  misc_RNA (1)...(19): siRNA sense strand
acuauaggcacaacuacaa

SEQ ID NO: 577331 - RNA, 19 nt, Homo sapiens
  misc_RNA (1)...(19): siRNA sense strand
aaaugaccauccuuuccau

SEQ ID NO: 577332 - RNA, 19 nt, Homo sapiens
  misc_RNA (1)...(19): siRNA sense strand
aagugaagacuguguugaa

SEQ ID NO: 577333 - RNA, 19 nt, Homo sapiens
  misc_RNA (1)...(19): siRNA sense strand
gccaaggacuuucaagaua

SEQ ID NO: 577334 - RNA, 19 nt, Homo sapiens
  misc_RNA (1)...(19): siRNA sense strand
gagccaagcuggagaaaca

SEQ ID NO: 577335 - RNA, 19 nt, Homo sapiens
  misc_RNA (1)...(19): siRNA sense strand
gagcagaaauucauuguac

SEQ ID NO: 577336 - RNA, 19 nt, Homo sapiens
  misc_RNA (1)...(19): siRNA sense strand
ccaaggacuuucaagauau

SEQ ID NO: 577337 - RNA, 19 nt, Homo sapiens
  misc_RNA (1)...(19): siRNA sense strand
gggcugaggcggagaagua

SEQ ID NO: 577338 - RNA, 19 nt, Homo sapiens
  misc_RNA (1)...(19): siRNA sense strand
gcccugcucuuccaucuga

SEQ ID NO: 577339 - RNA, 19 nt, Homo sapiens
  misc_RNA (1)...(19): siRNA sense strand
ucacucagccagauaauug

SEQ ID NO: 577340 - RNA, 19 nt, Homo sapiens
  misc_RNA (1)...(19): siRNA sense strand
gaaauucauuguacaacac

SEQ ID NO: 577341 - RNA, 19 nt, Homo sapiens
  misc_RNA (1)...(19): siRNA sense strand
ugacggagguccaggcaau

SEQ ID NO: 577342 - RNA, 19 nt, Homo sapiens
  misc_RNA (1)...(19): siRNA sense strand
gcagaaauucauuguacaa

SEQ ID NO: 577343 - RNA, 19 nt, Homo sapiens
  misc_RNA (1)...(19): siRNA sense strand
caagaucacaucccuagga

SEQ ID NO: 577344 - RNA, 19 nt, Homo sapiens
  misc_RNA (1)...(19): siRNA sense strand
caaggacuuucaagauauc

SEQ ID NO: 577345 - RNA, 19 nt, Homo sapiens
  misc_RNA (1)...(19): siRNA sense strand
agugauggcucuuggaaau

SEQ ID NO: 577346 - RNA, 19 nt, Homo sapiens
  misc_RNA (1)...(19): siRNA sense strand
uacaagaacugggcuguca

SEQ ID NO: 577347 - RNA, 19 nt, Homo sapiens
  misc_RNA (1)...(19): siRNA sense strand
gaagugaagacuguguuga

SEQ ID NO: 577348 - RNA, 19 nt, Homo sapiens
  misc_RNA (1)...(19): siRNA sense strand
cagcgugggugacaagauc

SEQ ID NO: 577349 - RNA, 19 nt, Homo sapiens
  misc_RNA (1)...(19): siRNA sense strand
ggagcagaaauucauugua

SEQ ID NO: 577350 - RNA, 19 nt, Homo sapiens
  misc_RNA (1)...(19): siRNA sense strand
ggaagugaagacuguguug

SEQ ID NO: 577351 - RNA, 19 nt, Homo sapiens
  misc_RNA (1)...(19): siRNA sense strand
gaccauccuuuccaucaag

SEQ ID NO: 577352 - RNA, 19 nt, Homo sapiens
  misc_RNA (1)...(19): siRNA sense strand
ggguggaagugaagacugu

SEQ ID NO: 577353 - RNA, 19 nt, Homo sapiens
  misc_RNA (1)...(19): siRNA sense strand
ggccaaggacuuucaagau

SEQ ID NO: 577354 - RNA, 19 nt, Homo sapiens
  misc_RNA (1)...(19): siRNA sense strand
gggaggagcagaaauucau

SEQ ID NO: 577355 - RNA, 19 nt, Homo sapiens
  misc_RNA (1)...(19): siRNA sense strand
ggaggagcagaaauucauu

SEQ ID NO: 577356 - RNA, 19 nt, Homo sapiens
  misc_RNA (1)...(19): siRNA sense strand
cgagcuggguggaagugaa

SEQ ID NO: 577357 - RNA, 19 nt, Homo sapiens
  misc_RNA (1)...(19): siRNA sense strand
ugaccauccuuuccaucaa

SEQ ID NO: 577358 - RNA, 19 nt, Homo sapiens
  misc_RNA (1)...(19): siRNA sense strand
gaggagcagaaauucauug

SEQ ID NO: 577359 - RNA, 19 nt, Homo sapiens
  misc_RNA (1)...(19): siRNA sense strand
gcacagacuauaggcacaa

SEQ ID NO: 577360 - RNA, 19 nt, Homo sapiens
  misc_RNA (1)...(19): siRNA sense strand
cagacuauaggcacaacua

SEQ ID NO: 577361 - RNA, 19 nt, Homo sapiens
  misc_RNA (1)...(19): siRNA sense strand
ccugaaagcagaucacgau

SEQ ID NO: 577362 - RNA, 19 nt, Homo sapiens
  misc_RNA (1)...(19): siRNA sense strand
guggauggcacagacuaua

SEQ ID NO: 577363 - RNA, 19 nt, Homo sapiens
  misc_RNA (1)...(19): siRNA sense strand
ccugggaggagcagaaauu

SEQ ID NO: 577364 - RNA, 19 nt, Homo sapiens
  misc_RNA (1)...(19): siRNA sense strand
agcaacggcucccaaagga

SEQ ID NO: 577365 - RNA, 19 nt, Homo sapiens
  misc_RNA (1)...(19): siRNA sense strand
cagcaacggcucccaaagg

SEQ ID NO: 577366 - RNA, 19 nt, Homo sapiens
  misc_RNA (1)...(19): siRNA sense strand
ugauggcucuuggaaaugg

SEQ ID NO: 577367 - RNA, 19 nt, Homo sapiens
  misc_RNA (1)...(19): siRNA sense strand
acuauaggcacaacuacaa

SEQ ID NO: 577368 - RNA, 19 nt, Homo sapiens
  misc_RNA (1)...(19): siRNA sense strand
aaaugaccauccuuuccau

SEQ ID NO: 577369 - RNA, 19 nt, Homo sapiens
  misc_RNA (1)...(19): siRNA sense strand
aagugaagacuguguugaa

SEQ ID NO: 577370 - RNA, 19 nt, Homo sapiens
  misc_RNA (1)...(19): siRNA sense strand
gccaaggacuuucaagaua

SEQ ID NO: 577371 - RNA, 19 nt, Homo sapiens
  misc_RNA (1)...(19): siRNA sense strand
gagccaagcuggagaaaca

SEQ ID NO: 577372 - RNA, 19 nt, Homo sapiens
  misc_RNA (1)...(19): siRNA sense strand
gagcagaaauucauuguac

SEQ ID NO: 577373 - RNA, 19 nt, Homo sapiens
  misc_RNA (1)...(19): siRNA sense strand
ccaaggacuuucaagauau

SEQ ID NO: 577374 - RNA, 19 nt, Homo sapiens
  misc_RNA (1)...(19): siRNA sense strand
gggcugaggcggagaagua

SEQ ID NO: 577375 - RNA, 19 nt, Homo sapiens
  misc_RNA (1)...(19): siRNA sense strand
gcccugcucuuccaucuga

SEQ ID NO: 577376 - RNA, 19 nt, Homo sapiens
  misc_RNA (1)...(19): siRNA sense strand
ucacucagccagauaauug

SEQ ID NO: 577377 - RNA, 19 nt, Homo sapiens
  misc_RNA (1)...(19): siRNA sense strand
gaaauucauuguacaacac

SEQ ID NO: 577378 - RNA, 19 nt, Homo sapiens
  misc_RNA (1)...(19): siRNA sense strand
ugacggagguccaggcaau

SEQ ID NO: 577379 - RNA, 19 nt, Homo sapiens
  misc_RNA (1)...(19): siRNA sense strand
gcagaaauucauuguacaa

SEQ ID NO: 577380 - RNA, 19 nt, Homo sapiens
  misc_RNA (1)...(19): siRNA sense strand
caagaucacaucccuagga

SEQ ID NO: 577381 - RNA, 19 nt, Homo sapiens
  misc_RNA (1)...(19): siRNA sense strand
caaggacuuucaagauauc

SEQ ID NO: 577382 - RNA, 19 nt, Homo sapiens
  misc_RNA (1)...(19): siRNA sense strand
agugauggcucuuggaaau

SEQ ID NO: 577383 - RNA, 19 nt, Homo sapiens
  misc_RNA (1)...(19): siRNA sense strand
uacaagaacugggcuguca

SEQ ID NO: 577384 - RNA, 19 nt, Homo sapiens
  misc_RNA (1)...(19): siRNA sense strand
gaagugaagacuguguuga

SEQ ID NO: 577385 - RNA, 19 nt, Homo sapiens
  misc_RNA (1)...(19): siRNA sense strand
cagcgugggugacaagauc

SEQ ID NO: 577386 - RNA, 19 nt, Homo sapiens
  misc_RNA (1)...(19): siRNA sense strand
ggagcagaaauucauugua

SEQ ID NO: 577387 - RNA, 19 nt, Homo sapiens
  misc_RNA (1)...(19): siRNA sense strand
ggaagugaagacuguguug

SEQ ID NO: 577388 - RNA, 19 nt, Homo sapiens
  misc_RNA (1)...(19): siRNA sense strand
gaccauccuuuccaucaag

SEQ ID NO: 577389 - RNA, 19 nt, Homo sapiens
  misc_RNA (1)...(19): siRNA sense strand
ggguggaagugaagacugu

SEQ ID NO: 577390 - RNA, 19 nt, Homo sapiens
  misc_RNA (1)...(19): siRNA sense strand
ggccaaggacuuucaagau

SEQ ID NO: 577391 - RNA, 19 nt, Homo sapiens
  misc_RNA (1)...(19): siRNA sense strand
gggaggagcagaaauucau

SEQ ID NO: 577392 - RNA, 19 nt, Homo sapiens
  misc_RNA (1)...(19): siRNA sense strand
ggaggagcagaaauucauu

SEQ ID NO: 577393 - RNA, 19 nt, Homo sapiens
  misc_RNA (1)...(19): siRNA sense strand
cgagcuggguggaagugaa

SEQ ID NO: 577394 - RNA, 19 nt, Homo sapiens
  misc_RNA (1)...(19): siRNA sense strand
ugaccauccuuuccaucaa

SEQ ID NO: 577395 - RNA, 19 nt, Homo sapiens
  misc_RNA (1)...(19): siRNA sense strand
gaggagcagaaauucauug

SEQ ID NO: 577396 - RNA, 19 nt, Homo sapiens
  misc_RNA (1)...(19): siRNA sense strand
gcacagacuauaggcacaa

SEQ ID NO: 577397 - RNA, 19 nt, Homo sapiens
  misc_RNA (1)...(19): siRNA sense strand
cagacuauaggcacaacua

SEQ ID NO: 577398 - RNA, 19 nt, Homo sapiens
  misc_RNA (1)...(19): siRNA sense strand
ccugaaagcagaucacgau

SEQ ID NO: 577399 - RNA, 19 nt, Homo sapiens
  misc_RNA (1)...(19): siRNA sense strand
guggauggcacagacuaua

SEQ ID NO: 577400 - RNA, 19 nt, Homo sapiens
  misc_RNA (1)...(19): siRNA sense strand
ccugggaggagcagaaauu

SEQ ID NO: 577401 - RNA, 19 nt, Homo sapiens
  misc_RNA (1)...(19): siRNA sense strand
agcaacggcucccaaagga

SEQ ID NO: 577402 - RNA, 19 nt, Homo sapiens
  misc_RNA (1)...(19): siRNA sense strand
cagcaacggcucccaaagg

SEQ ID NO: 577403 - RNA, 19 nt, Homo sapiens
  misc_RNA (1)...(19): siRNA sense strand
ugauggcucuuggaaaugg

SEQ ID NO: 577404 - RNA, 19 nt, Homo sapiens
  misc_RNA (1)...(19): siRNA sense strand
acuauaggcacaacuacaa

SEQ ID NO: 577405 - RNA, 19 nt, Homo sapiens
  misc_RNA (1)...(19): siRNA sense strand
aaaugaccauccuuuccau

SEQ ID NO: 577406 - RNA, 19 nt, Homo sapiens
  misc_RNA (1)...(19): siRNA sense strand
aagugaagacuguguugaa

SEQ ID NO: 577407 - RNA, 19 nt, Homo sapiens
  misc_RNA (1)...(19): siRNA sense strand
gaccagggcuacagugaag

SEQ ID NO: 577408 - RNA, 19 nt, Homo sapiens
  misc_RNA (1)...(19): siRNA sense strand
gaagguggugggcacagua

SEQ ID NO: 577409 - RNA, 19 nt, Homo sapiens
  misc_RNA (1)...(19): siRNA sense strand
uaggagcucugcccguuga

SEQ ID NO: 577410 - RNA, 19 nt, Homo sapiens
  misc_RNA (1)...(19): siRNA sense strand
gcugguggaucuucauaca

SEQ ID NO: 577411 - RNA, 19 nt, Homo sapiens
  misc_RNA (1)...(19): siRNA sense strand
gguugcagcuguuucaucu

SEQ ID NO: 577412 - RNA, 19 nt, Homo sapiens
  misc_RNA (1)...(19): siRNA sense strand
gagcucugcccguugauga

SEQ ID NO: 577413 - RNA, 19 nt, Homo sapiens
  misc_RNA (1)...(19): siRNA sense strand
cuuaucacauccgcaaaua

SEQ ID NO: 577414 - RNA, 19 nt, Homo sapiens
  misc_RNA (1)...(19): siRNA sense strand
uaccagagcuugggcuuca

SEQ ID NO: 577415 - RNA, 19 nt, Homo sapiens
  misc_RNA (1)...(19): siRNA sense strand
ucauacaguucauuucauc

SEQ ID NO: 577416 - RNA, 19 nt, Homo sapiens
  misc_RNA (1)...(19): siRNA sense strand
ggaccagggcuacagugaa

SEQ ID NO: 577417 - RNA, 19 nt, Homo sapiens
  misc_RNA (1)...(19): siRNA sense strand
gaguguggcuccugcuucu

SEQ ID NO: 577418 - RNA, 19 nt, Homo sapiens
  misc_RNA (1)...(19): siRNA sense strand
caccaaauccuaccugagu

SEQ ID NO: 577419 - RNA, 19 nt, Homo sapiens
  misc_RNA (1)...(19): siRNA sense strand
gggcuacagugaaguuguc

SEQ ID NO: 577420 - RNA, 19 nt, Homo sapiens
  misc_RNA (1)...(19): siRNA sense strand
ggcugaaucugaagagaag

SEQ ID NO: 577421 - RNA, 19 nt, Homo sapiens
  misc_RNA (1)...(19): siRNA sense strand
ccaaauccuaccugaguga

SEQ ID NO: 577422 - RNA, 19 nt, Homo sapiens
  misc_RNA (1)...(19): siRNA sense strand
caguucauuucaucuauca

SEQ ID NO: 577423 - RNA, 19 nt, Homo sapiens
  misc_RNA (1)...(19): siRNA sense strand
gcagcuguuucaucucucu

SEQ ID NO: 577424 - RNA, 19 nt, Homo sapiens
  misc_RNA (1)...(19): siRNA sense strand
uuacugaagcugccucgaa

SEQ ID NO: 577425 - RNA, 19 nt, Homo sapiens
  misc_RNA (1)...(19): siRNA sense strand
cuggguggcugaaucugaa

SEQ ID NO: 577426 - RNA, 19 nt, Homo sapiens
  misc_RNA (1)...(19): siRNA sense strand
gauucuggcccucguguuc

SEQ ID NO: 577427 - RNA, 19 nt, Homo sapiens
  misc_RNA (1)...(19): siRNA sense strand
ugguggaucuucauacagu

SEQ ID NO: 577428 - RNA, 19 nt, Homo sapiens
  misc_RNA (1)...(19): siRNA sense strand
gguggaucuucauacaguu

SEQ ID NO: 577429 - RNA, 19 nt, Homo sapiens
  misc_RNA (1)...(19): siRNA sense strand
ccucgaacccucauacucu

SEQ ID NO: 577430 - RNA, 19 nt, Homo sapiens
  misc_RNA (1)...(19): siRNA sense strand
cuucauacaguucauuuca

SEQ ID NO: 577431 - RNA, 19 nt, Homo sapiens
  misc_RNA (1)...(19): siRNA sense strand
gaucuucauacaguucauu

SEQ ID NO: 577432 - RNA, 19 nt, Homo sapiens
  misc_RNA (1)...(19): siRNA sense strand
gcauugcgcacagacaugu

SEQ ID NO: 577433 - RNA, 19 nt, Homo sapiens
  misc_RNA (1)...(19): siRNA sense strand
gggaccagggcuacaguga

SEQ ID NO: 577434 - RNA, 19 nt, Homo sapiens
  misc_RNA (1)...(19): siRNA sense strand
agaagcgguugcagcuguu

SEQ ID NO: 577435 - RNA, 19 nt, Homo sapiens
  misc_RNA (1)...(19): siRNA sense strand
ccagggcuacagugaaguu

SEQ ID NO: 577436 - RNA, 19 nt, Homo sapiens
  misc_RNA (1)...(19): siRNA sense strand
gcuucuggguggcugaauc

SEQ ID NO: 577437 - RNA, 19 nt, Homo sapiens
  misc_RNA (1)...(19): siRNA sense strand
acaguucauuucaucuauc

SEQ ID NO: 577438 - RNA, 19 nt, Homo sapiens
  misc_RNA (1)...(19): siRNA sense strand
gaagcgguugcagcuguuu

SEQ ID NO: 577439 - RNA, 19 nt, Homo sapiens
  misc_RNA (1)...(19): siRNA sense strand
gaacccucauacucuuacu

SEQ ID NO: 577440 - RNA, 19 nt, Homo sapiens
  misc_RNA (1)...(19): siRNA sense strand
caggagagcgaccgcaagu

SEQ ID NO: 577441 - RNA, 19 nt, Homo sapiens
  misc_RNA (1)...(19): siRNA sense strand
gaacauggcagauuuaaua

SEQ ID NO: 577442 - RNA, 19 nt, Homo sapiens
  misc_RNA (1)...(19): siRNA sense strand
caacaaaccuucuaagcuu

SEQ ID NO: 577443 - RNA, 19 nt, Homo sapiens
  misc_RNA (1)...(19): siRNA sense strand
guaaugagcugaagugugu

SEQ ID NO: 577444 - RNA, 19 nt, Homo sapiens
  misc_RNA (1)...(19): siRNA sense strand
gaaauggaguuugcaguaa

SEQ ID NO: 577445 - RNA, 19 nt, Homo sapiens
  misc_RNA (1)...(19): siRNA sense strand
uaucaugacuuccugaaua

SEQ ID NO: 577446 - RNA, 19 nt, Homo sapiens
  misc_RNA (1)...(19): siRNA sense strand
gaaaucacaucuacuuuag

SEQ ID NO: 577447 - RNA, 19 nt, Homo sapiens
  misc_RNA (1)...(19): siRNA sense strand
gcaagacuguggaaguuaa

SEQ ID NO: 577448 - RNA, 19 nt, Homo sapiens
  misc_RNA (1)...(19): siRNA sense strand
gaagaaaccaaauacauug

SEQ ID NO: 577449 - RNA, 19 nt, Homo sapiens
  misc_RNA (1)...(19): siRNA sense strand
gaaacgugcucaggaaauu

SEQ ID NO: 577450 - RNA, 19 nt, Homo sapiens
  misc_RNA (1)...(19): siRNA sense strand
ggaaauggaguuugcagua

SEQ ID NO: 577451 - RNA, 19 nt, Homo sapiens
  misc_RNA (1)...(19): siRNA sense strand
gagaagcaguaaaugauug

SEQ ID NO: 577452 - RNA, 19 nt, Homo sapiens
  misc_RNA (1)...(19): siRNA sense strand
gaggaaacccugacucauu

SEQ ID NO: 577453 - RNA, 19 nt, Homo sapiens
  misc_RNA (1)...(19): siRNA sense strand
ggaauuugcuuuggaggaa

SEQ ID NO: 577454 - RNA, 19 nt, Homo sapiens
  misc_RNA (1)...(19): siRNA sense strand
gaggaggcgugaaugaauu

SEQ ID NO: 577455 - RNA, 19 nt, Homo sapiens
  misc_RNA (1)...(19): siRNA sense strand
gcuguccucugaauacaua

SEQ ID NO: 577456 - RNA, 19 nt, Homo sapiens
  misc_RNA (1)...(19): siRNA sense strand
gggagacacuggcuauuau

SEQ ID NO: 577457 - RNA, 19 nt, Homo sapiens
  misc_RNA (1)...(19): siRNA sense strand
ccaaauacauugaacugau

SEQ ID NO: 577458 - RNA, 19 nt, Homo sapiens
  misc_RNA (1)...(19): siRNA sense strand
gggaugugcuuugugguua

SEQ ID NO: 577459 - RNA, 19 nt, Homo sapiens
  misc_RNA (1)...(19): siRNA sense strand
cauaauugcuggcaccauu

SEQ ID NO: 577460 - RNA, 19 nt, Homo sapiens
  misc_RNA (1)...(19): siRNA sense strand
gaaccacacauaucucauu

SEQ ID NO: 577461 - RNA, 19 nt, Homo sapiens
  misc_RNA (1)...(19): siRNA sense strand
caaauacauugaacugaug

SEQ ID NO: 577462 - RNA, 19 nt, Homo sapiens
  misc_RNA (1)...(19): siRNA sense strand
caacaaguuugccauaucu

SEQ ID NO: 577463 - RNA, 19 nt, Homo sapiens
  misc_RNA (1)...(19): siRNA sense strand
guaaagaaggcacuauuug

SEQ ID NO: 577464 - RNA, 19 nt, Homo sapiens
  misc_RNA (1)...(19): siRNA sense strand
caaaugaugugcuuagaac

SEQ ID NO: 577465 - RNA, 19 nt, Homo sapiens
  misc_RNA (1)...(19): siRNA sense strand
gaaaggaggaggcgugaau

SEQ ID NO: 577466 - RNA, 19 nt, Homo sapiens
  misc_RNA (1)...(19): siRNA sense strand
gcagaguguuguaagaaau

SEQ ID NO: 577467 - RNA, 19 nt, Homo sapiens
  misc_RNA (1)...(19): siRNA sense strand
gagcugaagugugugugua

SEQ ID NO: 577468 - RNA, 19 nt, Homo sapiens
  misc_RNA (1)...(19): siRNA sense strand
gcagcaaggaagaacauua

SEQ ID NO: 577469 - RNA, 19 nt, Homo sapiens
  misc_RNA (1)...(19): siRNA sense strand
gauagacaaugcaaauaca

SEQ ID NO: 577470 - RNA, 19 nt, Homo sapiens
  misc_RNA (1)...(19): siRNA sense strand
aggaaacccugacucauuu

SEQ ID NO: 577471 - RNA, 19 nt, Homo sapiens
  misc_RNA (1)...(19): siRNA sense strand
gcaccaauaucauaauagg

SEQ ID NO: 577472 - RNA, 19 nt, Homo sapiens
  misc_RNA (1)...(19): siRNA sense strand
ggagcagaguguuguaaga

SEQ ID NO: 577473 - RNA, 19 nt, Homo sapiens
  misc_RNA (1)...(19): siRNA sense strand
uuacaaauccagacuguuu

SEQ ID NO: 577474 - RNA, 19 nt, Homo sapiens
  misc_RNA (1)...(19): siRNA sense strand
gaggagagcacuguuacua

SEQ ID NO: 577475 - RNA, 19 nt, Homo sapiens
  misc_RNA (1)...(19): siRNA sense strand
agacaaagacacauggaua

SEQ ID NO: 577476 - RNA, 19 nt, Homo sapiens
  misc_RNA (1)...(19): siRNA sense strand
cgaaaucuguggugaacau

SEQ ID NO: 577477 - RNA, 19 nt, Homo sapiens
  misc_RNA (1)...(19): siRNA sense strand
uguaagaaaugcaccuuga

SEQ ID NO: 577478 - RNA, 19 nt, Homo sapiens
  misc_RNA (1)...(19): siRNA sense strand
gacaacaaguuugccauau

SEQ ID NO: 577479 - RNA, 19 nt, Homo sapiens
  misc_RNA (1)...(19): siRNA sense strand
cagcaaggaagaacauuaa

SEQ ID NO: 577480 - RNA, 19 nt, Homo sapiens
  misc_RNA (1)...(19): siRNA sense strand
ggaaagacaaagacacaug

SEQ ID NO: 577481 - RNA, 19 nt, Homo sapiens
  misc_RNA (1)...(19): siRNA sense strand
gacacuggcuauuaucuuc

SEQ ID NO: 577482 - RNA, 19 nt, Homo sapiens
  misc_RNA (1)...(19): siRNA sense strand
ugacucauuuguugcauug

SEQ ID NO: 577483 - RNA, 19 nt, Homo sapiens
  misc_RNA (1)...(19): siRNA sense strand
agacaaauauugcuaugag

SEQ ID NO: 577484 - RNA, 19 nt, Homo sapiens
  misc_RNA (1)...(19): siRNA sense strand
gcaguaaaugauugugaua

SEQ ID NO: 577485 - RNA, 19 nt, Homo sapiens
  misc_RNA (1)...(19): siRNA sense strand
gaacugaugauugugaaug

SEQ ID NO: 577486 - RNA, 19 nt, Homo sapiens
  misc_RNA (1)...(19): siRNA sense strand
gaucuuccaucugaauuuc

SEQ ID NO: 577487 - RNA, 19 nt, Homo sapiens
  misc_RNA (1)...(19): siRNA sense strand
gcuaugagaaacugaauau

SEQ ID NO: 577488 - RNA, 19 nt, Homo sapiens
  misc_RNA (1)...(19): siRNA sense strand
ggugacagcaucagacaaa

SEQ ID NO: 577489 - RNA, 19 nt, Homo sapiens
  misc_RNA (1)...(19): siRNA sense strand
gagauagacaaugcaaaua

SEQ ID NO: 577490 - RNA, 19 nt, Homo sapiens
  misc_RNA (1)...(19): siRNA sense strand
ggauggauauucaugugau

SEQ ID NO: 577491 - RNA, 19 nt, Homo sapiens
  misc_RNA (1)...(19): siRNA sense strand
gaaugaucaccuuauguuu

SEQ ID NO: 577492 - RNA, 19 nt, Homo sapiens
  misc_RNA (1)...(19): siRNA sense strand
gaagaagaaaccaaauaca

SEQ ID NO: 577493 - RNA, 19 nt, Homo sapiens
  misc_RNA (1)...(19): siRNA sense strand
uggcaccaauaucauaaua

SEQ ID NO: 577494 - RNA, 19 nt, Homo sapiens
  misc_RNA (1)...(19): siRNA sense strand
acauugaacugaugauugu

SEQ ID NO: 577495 - RNA, 19 nt, Homo sapiens
  misc_RNA (1)...(19): siRNA sense strand
gaaaccaaauacauugaac

SEQ ID NO: 577496 - RNA, 19 nt, Homo sapiens
  misc_RNA (1)...(19): siRNA sense strand
ugaaugaucaccuuauguu

SEQ ID NO: 577497 - RNA, 19 nt, Homo sapiens
  misc_RNA (1)...(19): siRNA sense strand
ucacaaugaugaugcaaag

SEQ ID NO: 577498 - RNA, 19 nt, Homo sapiens
  misc_RNA (1)...(19): siRNA sense strand
gaagaugggacaccuugug

SEQ ID NO: 577499 - RNA, 19 nt, Homo sapiens
  misc_RNA (1)...(19): siRNA sense strand
ggccgaauguguccuugaa

SEQ ID NO: 577500 - RNA, 19 nt, Homo sapiens
  misc_RNA (1)...(19): siRNA sense strand
uuuaauggcuguuacacuu

SEQ ID NO: 577501 - RNA, 19 nt, Homo sapiens
  misc_RNA (1)...(19): siRNA sense strand
cuacgugaguuuaugaaau

SEQ ID NO: 577502 - RNA, 19 nt, Homo sapiens
  misc_RNA (1)...(19): siRNA sense strand
gcaguugacucauguugac

SEQ ID NO: 577503 - RNA, 19 nt, Homo sapiens
  misc_RNA (1)...(19): siRNA sense strand
ucaagaggauuuccauuuu

SEQ ID NO: 577504 - RNA, 19 nt, Homo sapiens
  misc_RNA (1)...(19): siRNA sense strand
gacagcaucagacaaauau

SEQ ID NO: 577505 - RNA, 19 nt, Homo sapiens
  misc_RNA (1)...(19): siRNA sense strand
ggaggaggcgugaaugaau

SEQ ID NO: 577506 - RNA, 19 nt, Homo sapiens
  misc_RNA (1)...(19): siRNA sense strand
aauccagacuguuugaauu

SEQ ID NO: 577507 - RNA, 19 nt, Homo sapiens
  misc_RNA (1)...(19): siRNA sense strand
guuagcaaguggugaaugu

SEQ ID NO: 577508 - RNA, 19 nt, Homo sapiens
  misc_RNA (1)...(19): siRNA sense strand
caacaaacgggaugugcuu

SEQ ID NO: 577509 - RNA, 19 nt, Homo sapiens
  misc_RNA (1)...(19): siRNA sense strand
gacaaauauugcuaugaga

SEQ ID NO: 577510 - RNA, 19 nt, Homo sapiens
  misc_RNA (1)...(19): siRNA sense strand
ugacagcaucagacaaaua

SEQ ID NO: 577511 - RNA, 19 nt, Homo sapiens
  misc_RNA (1)...(19): siRNA sense strand
gcaggagacgccucauuga

SEQ ID NO: 577512 - RNA, 19 nt, Homo sapiens
  misc_RNA (1)...(19): siRNA sense strand
gagcagaguguuguaagaa

SEQ ID NO: 577513 - RNA, 19 nt, Homo sapiens
  misc_RNA (1)...(19): siRNA sense strand
ugacaacaaguuugccaua

SEQ ID NO: 577514 - RNA, 19 nt, Homo sapiens
  misc_RNA (1)...(19): siRNA sense strand
acacauggauacagugcaa

SEQ ID NO: 577515 - RNA, 19 nt, Homo sapiens
  misc_RNA (1)...(19): siRNA sense strand
aaagacacauggauacagu

SEQ ID NO: 577516 - RNA, 19 nt, Homo sapiens
  misc_RNA (1)...(19): siRNA sense strand
ggagaggagugugauugug

SEQ ID NO: 577517 - RNA, 19 nt, Homo sapiens
  misc_RNA (1)...(19): siRNA sense strand
ggagggauuuuaucaaaga

SEQ ID NO: 577518 - RNA, 19 nt, Homo sapiens
  misc_RNA (1)...(19): siRNA sense strand
ucgauauccucguaaugua

SEQ ID NO: 577519 - RNA, 19 nt, Homo sapiens
  misc_RNA (1)...(19): siRNA sense strand
guucugauugcaacacuua

SEQ ID NO: 577520 - RNA, 19 nt, Homo sapiens
  misc_RNA (1)...(19): siRNA sense strand
cgugaaacgugcucaggaa

SEQ ID NO: 577521 - RNA, 19 nt, Homo sapiens
  misc_RNA (1)...(19): siRNA sense strand
gguauuaucucagacaaaa

SEQ ID NO: 577522 - RNA, 19 nt, Homo sapiens
  misc_RNA (1)...(19): siRNA sense strand
caacuuaagaccaggauag

SEQ ID NO: 577523 - RNA, 19 nt, Homo sapiens
  misc_RNA (1)...(19): siRNA sense strand
cagcaucagacaaauauug

SEQ ID NO: 577524 - RNA, 19 nt, Homo sapiens
  misc_RNA (1)...(19): siRNA sense strand
gaaaaugggcgaccucgaa

SEQ ID NO: 577525 - RNA, 19 nt, Homo sapiens
  misc_RNA (1)...(19): siRNA sense strand
gcaguaaugagcugaagug

SEQ ID NO: 577526 - RNA, 19 nt, Homo sapiens
  misc_RNA (1)...(19): siRNA sense strand
gaaggagcagaguguugua

SEQ ID NO: 577527 - RNA, 19 nt, Homo sapiens
  misc_RNA (1)...(19): siRNA sense strand
gaaaggauuccagacacaa

SEQ ID NO: 577528 - RNA, 19 nt, Homo sapiens
  misc_RNA (1)...(19): siRNA sense strand
uuacuucccucacaaugau

SEQ ID NO: 577529 - RNA, 19 nt, Homo sapiens
  misc_RNA (1)...(19): siRNA sense strand
agaacucgauggugaaauc

SEQ ID NO: 577530 - RNA, 19 nt, Homo sapiens
  misc_RNA (1)...(19): siRNA sense strand
ggugaacauggcagauuua

SEQ ID NO: 577531 - RNA, 19 nt, Homo sapiens
  misc_RNA (1)...(19): siRNA sense strand
ugaaaggauuccagacaca

SEQ ID NO: 577532 - RNA, 19 nt, Homo sapiens
  misc_RNA (1)...(19): siRNA sense strand
caaggaagaacauuaaacu

SEQ ID NO: 577533 - RNA, 19 nt, Homo sapiens
  misc_RNA (1)...(19): siRNA sense strand
gugacggucuuugcuguaa

SEQ ID NO: 577534 - RNA, 19 nt, Homo sapiens
  misc_RNA (1)...(19): siRNA sense strand
gcaaguggugaauguaaau

SEQ ID NO: 577535 - RNA, 19 nt, Homo sapiens
  misc_RNA (1)...(19): siRNA sense strand
gaaaaucagaggcaaaaga

SEQ ID NO: 577536 - RNA, 19 nt, Homo sapiens
  misc_RNA (1)...(19): siRNA sense strand
gauuugcuguccucugaau

SEQ ID NO: 577537 - RNA, 19 nt, Homo sapiens
  misc_RNA (1)...(19): siRNA sense strand
ugauggagcuagagaagag

SEQ ID NO: 577538 - RNA, 19 nt, Homo sapiens
  misc_RNA (1)...(19): siRNA sense strand
acacuuacuucccucacaa

SEQ ID NO: 577539 - RNA, 19 nt, Homo sapiens
  misc_RNA (1)...(19): siRNA sense strand
aaauggaguuugcaguaau

SEQ ID NO: 577540 - RNA, 19 nt, Homo sapiens
  misc_RNA (1)...(19): siRNA sense strand
ccaaaugaugugcuuagaa

SEQ ID NO: 577541 - RNA, 19 nt, Homo sapiens
  misc_RNA (1)...(19): siRNA sense strand
gaacauggcagauuuaaua

SEQ ID NO: 577542 - RNA, 19 nt, Homo sapiens
  misc_RNA (1)...(19): siRNA sense strand
caacaaaccuucuaagcuu

SEQ ID NO: 577543 - RNA, 19 nt, Homo sapiens
  misc_RNA (1)...(19): siRNA sense strand
guaaugagcugaagugugu

SEQ ID NO: 577544 - RNA, 19 nt, Homo sapiens
  misc_RNA (1)...(19): siRNA sense strand
gaaauggaguuugcaguaa

SEQ ID NO: 577545 - RNA, 19 nt, Homo sapiens
  misc_RNA (1)...(19): siRNA sense strand
uaucaugacuuccugaaua

SEQ ID NO: 577546 - RNA, 19 nt, Homo sapiens
  misc_RNA (1)...(19): siRNA sense strand
gaaaucacaucuacuuuag

SEQ ID NO: 577547 - RNA, 19 nt, Homo sapiens
  misc_RNA (1)...(19): siRNA sense strand
gcaagacuguggaaguuaa

SEQ ID NO: 577548 - RNA, 19 nt, Homo sapiens
  misc_RNA (1)...(19): siRNA sense strand
gaagaaaccaaauacauug

SEQ ID NO: 577549 - RNA, 19 nt, Homo sapiens
  misc_RNA (1)...(19): siRNA sense strand
gaaacgugcucaggaaauu

SEQ ID NO: 577550 - RNA, 19 nt, Homo sapiens
  misc_RNA (1)...(19): siRNA sense strand
ggaaauggaguuugcagua

SEQ ID NO: 577551 - RNA, 19 nt, Homo sapiens
  misc_RNA (1)...(19): siRNA sense strand
gagaagcaguaaaugauug

SEQ ID NO: 577552 - RNA, 19 nt, Homo sapiens
  misc_RNA (1)...(19): siRNA sense strand
gaggaaacccugacucauu

SEQ ID NO: 577553 - RNA, 19 nt, Homo sapiens
  misc_RNA (1)...(19): siRNA sense strand
ggaauuugcuuuggaggaa

SEQ ID NO: 577554 - RNA, 19 nt, Homo sapiens
  misc_RNA (1)...(19): siRNA sense strand
gaggaggcgugaaugaauu

SEQ ID NO: 577555 - RNA, 19 nt, Homo sapiens
  misc_RNA (1)...(19): siRNA sense strand
gcuguccucugaauacaua

SEQ ID NO: 577556 - RNA, 19 nt, Homo sapiens
  misc_RNA (1)...(19): siRNA sense strand
gggagacacuggcuauuau

SEQ ID NO: 577557 - RNA, 19 nt, Homo sapiens
  misc_RNA (1)...(19): siRNA sense strand
ccaaauacauugaacugau

SEQ ID NO: 577558 - RNA, 19 nt, Homo sapiens
  misc_RNA (1)...(19): siRNA sense strand
gggaugugcuuugugguua

SEQ ID NO: 577559 - RNA, 19 nt, Homo sapiens
  misc_RNA (1)...(19): siRNA sense strand
cauaauugcuggcaccauu

SEQ ID NO: 577560 - RNA, 19 nt, Homo sapiens
  misc_RNA (1)...(19): siRNA sense strand
gaaccacacauaucucauu

SEQ ID NO: 577561 - RNA, 19 nt, Homo sapiens
  misc_RNA (1)...(19): siRNA sense strand
caaauacauugaacugaug

SEQ ID NO: 577562 - RNA, 19 nt, Homo sapiens
  misc_RNA (1)...(19): siRNA sense strand
caacaaguuugccauaucu

SEQ ID NO: 577563 - RNA, 19 nt, Homo sapiens
  misc_RNA (1)...(19): siRNA sense strand
guaaagaaggcacuauuug

SEQ ID NO: 577564 - RNA, 19 nt, Homo sapiens
  misc_RNA (1)...(19): siRNA sense strand
caaaugaugugcuuagaac

SEQ ID NO: 577565 - RNA, 19 nt, Homo sapiens
  misc_RNA (1)...(19): siRNA sense strand
gaaaggaggaggcgugaau

SEQ ID NO: 577566 - RNA, 19 nt, Homo sapiens
  misc_RNA (1)...(19): siRNA sense strand
gcagaguguuguaagaaau

SEQ ID NO: 577567 - RNA, 19 nt, Homo sapiens
  misc_RNA (1)...(19): siRNA sense strand
gagcugaagugugugugua

SEQ ID NO: 577568 - RNA, 19 nt, Homo sapiens
  misc_RNA (1)...(19): siRNA sense strand
gcagcaaggaagaacauua

SEQ ID NO: 577569 - RNA, 19 nt, Homo sapiens
  misc_RNA (1)...(19): siRNA sense strand
gauagacaaugcaaauaca

SEQ ID NO: 577570 - RNA, 19 nt, Homo sapiens
  misc_RNA (1)...(19): siRNA sense strand
aggaaacccugacucauuu

SEQ ID NO: 577571 - RNA, 19 nt, Homo sapiens
  misc_RNA (1)...(19): siRNA sense strand
gcaccaauaucauaauagg

SEQ ID NO: 577572 - RNA, 19 nt, Homo sapiens
  misc_RNA (1)...(19): siRNA sense strand
ggagcagaguguuguaaga

SEQ ID NO: 577573 - RNA, 19 nt, Homo sapiens
  misc_RNA (1)...(19): siRNA sense strand
uuacaaauccagacuguuu

SEQ ID NO: 577574 - RNA, 19 nt, Homo sapiens
  misc_RNA (1)...(19): siRNA sense strand
gaggagagcacuguuacua

SEQ ID NO: 577575 - RNA, 19 nt, Homo sapiens
  misc_RNA (1)...(19): siRNA sense strand
agacaaagacacauggaua

SEQ ID NO: 577576 - RNA, 19 nt, Homo sapiens
  misc_RNA (1)...(19): siRNA sense strand
cgaaaucuguggugaacau

SEQ ID NO: 577577 - RNA, 19 nt, Homo sapiens
  misc_RNA (1)...(19): siRNA sense strand
uguaagaaaugcaccuuga

SEQ ID NO: 577578 - RNA, 19 nt, Homo sapiens
  misc_RNA (1)...(19): siRNA sense strand
gacaacaaguuugccauau

SEQ ID NO: 577579 - RNA, 19 nt, Homo sapiens
  misc_RNA (1)...(19): siRNA sense strand
cagcaaggaagaacauuaa

SEQ ID NO: 577580 - RNA, 19 nt, Homo sapiens
  misc_RNA (1)...(19): siRNA sense strand
ggaaagacaaagacacaug

SEQ ID NO: 577581 - RNA, 19 nt, Homo sapiens
  misc_RNA (1)...(19): siRNA sense strand
gacacuggcuauuaucuuc

SEQ ID NO: 577582 - RNA, 19 nt, Homo sapiens
  misc_RNA (1)...(19): siRNA sense strand
ugacucauuuguugcauug

SEQ ID NO: 577583 - RNA, 19 nt, Homo sapiens
  misc_RNA (1)...(19): siRNA sense strand
agacaaauauugcuaugag

SEQ ID NO: 577584 - RNA, 19 nt, Homo sapiens
  misc_RNA (1)...(19): siRNA sense strand
gcaguaaaugauugugaua

SEQ ID NO: 577585 - RNA, 19 nt, Homo sapiens
  misc_RNA (1)...(19): siRNA sense strand
gaacugaugauugugaaug

SEQ ID NO: 577586 - RNA, 19 nt, Homo sapiens
  misc_RNA (1)...(19): siRNA sense strand
gaucuuccaucugaauuuc

SEQ ID NO: 577587 - RNA, 19 nt, Homo sapiens
  misc_RNA (1)...(19): siRNA sense strand
gcuaugagaaacugaauau

SEQ ID NO: 577588 - RNA, 19 nt, Homo sapiens
  misc_RNA (1)...(19): siRNA sense strand
ggugacagcaucagacaaa

SEQ ID NO: 577589 - RNA, 19 nt, Homo sapiens
  misc_RNA (1)...(19): siRNA sense strand
gagauagacaaugcaaaua

SEQ ID NO: 577590 - RNA, 19 nt, Homo sapiens
  misc_RNA (1)...(19): siRNA sense strand
ggauggauauucaugugau

SEQ ID NO: 577591 - RNA, 19 nt, Homo sapiens
  misc_RNA (1)...(19): siRNA sense strand
gaaugaucaccuuauguuu

SEQ ID NO: 577592 - RNA, 19 nt, Homo sapiens
  misc_RNA (1)...(19): siRNA sense strand
gaagaagaaaccaaauaca

SEQ ID NO: 577593 - RNA, 19 nt, Homo sapiens
  misc_RNA (1)...(19): siRNA sense strand
uggcaccaauaucauaaua

SEQ ID NO: 577594 - RNA, 19 nt, Homo sapiens
  misc_RNA (1)...(19): siRNA sense strand
acauugaacugaugauugu

SEQ ID NO: 577595 - RNA, 19 nt, Homo sapiens
  misc_RNA (1)...(19): siRNA sense strand
gaaaccaaauacauugaac

SEQ ID NO: 577596 - RNA, 19 nt, Homo sapiens
  misc_RNA (1)...(19): siRNA sense strand
ugaaugaucaccuuauguu

SEQ ID NO: 577597 - RNA, 19 nt, Homo sapiens
  misc_RNA (1)...(19): siRNA sense strand
ucacaaugaugaugcaaag

SEQ ID NO: 577598 - RNA, 19 nt, Homo sapiens
  misc_RNA (1)...(19): siRNA sense strand
gaagaugggacaccuugug

SEQ ID NO: 577599 - RNA, 19 nt, Homo sapiens
  misc_RNA (1)...(19): siRNA sense strand
ggccgaauguguccuugaa

SEQ ID NO: 577600 - RNA, 19 nt, Homo sapiens
  misc_RNA (1)...(19): siRNA sense strand
uuuaauggcuguuacacuu

SEQ ID NO: 577601 - RNA, 19 nt, Homo sapiens
  misc_RNA (1)...(19): siRNA sense strand
cuacgugaguuuaugaaau

SEQ ID NO: 577602 - RNA, 19 nt, Homo sapiens
  misc_RNA (1)...(19): siRNA sense strand
gcaguugacucauguugac

SEQ ID NO: 577603 - RNA, 19 nt, Homo sapiens
  misc_RNA (1)...(19): siRNA sense strand
ucaagaggauuuccauuuu

SEQ ID NO: 577604 - RNA, 19 nt, Homo sapiens
  misc_RNA (1)...(19): siRNA sense strand
gacagcaucagacaaauau

SEQ ID NO: 577605 - RNA, 19 nt, Homo sapiens
  misc_RNA (1)...(19): siRNA sense strand
ggaggaggcgugaaugaau

SEQ ID NO: 577606 - RNA, 19 nt, Homo sapiens
  misc_RNA (1)...(19): siRNA sense strand
aauccagacuguuugaauu

SEQ ID NO: 577607 - RNA, 19 nt, Homo sapiens
  misc_RNA (1)...(19): siRNA sense strand
guuagcaaguggugaaugu

SEQ ID NO: 577608 - RNA, 19 nt, Homo sapiens
  misc_RNA (1)...(19): siRNA sense strand
caacaaacgggaugugcuu

SEQ ID NO: 577609 - RNA, 19 nt, Homo sapiens
  misc_RNA (1)...(19): siRNA sense strand
gacaaauauugcuaugaga

SEQ ID NO: 577610 - RNA, 19 nt, Homo sapiens
  misc_RNA (1)...(19): siRNA sense strand
ugacagcaucagacaaaua

SEQ ID NO: 577611 - RNA, 19 nt, Homo sapiens
  misc_RNA (1)...(19): siRNA sense strand
gcaggagacgccucauuga

SEQ ID NO: 577612 - RNA, 19 nt, Homo sapiens
  misc_RNA (1)...(19): siRNA sense strand
gagcagaguguuguaagaa

SEQ ID NO: 577613 - RNA, 19 nt, Homo sapiens
  misc_RNA (1)...(19): siRNA sense strand
ugacaacaaguuugccaua

SEQ ID NO: 577614 - RNA, 19 nt, Homo sapiens
  misc_RNA (1)...(19): siRNA sense strand
acacauggauacagugcaa

SEQ ID NO: 577615 - RNA, 19 nt, Homo sapiens
  misc_RNA (1)...(19): siRNA sense strand
aaagacacauggauacagu

SEQ ID NO: 577616 - RNA, 19 nt, Homo sapiens
  misc_RNA (1)...(19): siRNA sense strand
ggagaggagugugauugug

SEQ ID NO: 577617 - RNA, 19 nt, Homo sapiens
  misc_RNA (1)...(19): siRNA sense strand
ggagggauuuuaucaaaga

SEQ ID NO: 577618 - RNA, 19 nt, Homo sapiens
  misc_RNA (1)...(19): siRNA sense strand
ucgauauccucguaaugua

SEQ ID NO: 577619 - RNA, 19 nt, Homo sapiens
  misc_RNA (1)...(19): siRNA sense strand
guucugauugcaacacuua

SEQ ID NO: 577620 - RNA, 19 nt, Homo sapiens
  misc_RNA (1)...(19): siRNA sense strand
cgugaaacgugcucaggaa

SEQ ID NO: 577621 - RNA, 19 nt, Homo sapiens
  misc_RNA (1)...(19): siRNA sense strand
gguauuaucucagacaaaa

SEQ ID NO: 577622 - RNA, 19 nt, Homo sapiens
  misc_RNA (1)...(19): siRNA sense strand
caacuuaagaccaggauag

SEQ ID NO: 577623 - RNA, 19 nt, Homo sapiens
  misc_RNA (1)...(19): siRNA sense strand
cagcaucagacaaauauug

SEQ ID NO: 577624 - RNA, 19 nt, Homo sapiens
  misc_RNA (1)...(19): siRNA sense strand
gaaaaugggcgaccucgaa

SEQ ID NO: 577625 - RNA, 19 nt, Homo sapiens
  misc_RNA (1)...(19): siRNA sense strand
gcaguaaugagcugaagug

SEQ ID NO: 577626 - RNA, 19 nt, Homo sapiens
  misc_RNA (1)...(19): siRNA sense strand
gaaggagcagaguguugua

SEQ ID NO: 577627 - RNA, 19 nt, Homo sapiens
  misc_RNA (1)...(19): siRNA sense strand
gaaaggauuccagacacaa

SEQ ID NO: 577628 - RNA, 19 nt, Homo sapiens
  misc_RNA (1)...(19): siRNA sense strand
uuacuucccucacaaugau

SEQ ID NO: 577629 - RNA, 19 nt, Homo sapiens
  misc_RNA (1)...(19): siRNA sense strand
agaacucgauggugaaauc

SEQ ID NO: 577630 - RNA, 19 nt, Homo sapiens
  misc_RNA (1)...(19): siRNA sense strand
ggugaacauggcagauuua

SEQ ID NO: 577631 - RNA, 19 nt, Homo sapiens
  misc_RNA (1)...(19): siRNA sense strand
ugaaaggauuccagacaca

SEQ ID NO: 577632 - RNA, 19 nt, Homo sapiens
  misc_RNA (1)...(19): siRNA sense strand
caaggaagaacauuaaacu

SEQ ID NO: 577633 - RNA, 19 nt, Homo sapiens
  misc_RNA (1)...(19): siRNA sense strand
gugacggucuuugcuguaa

SEQ ID NO: 577634 - RNA, 19 nt, Homo sapiens
  misc_RNA (1)...(19): siRNA sense strand
gcaaguggugaauguaaau

SEQ ID NO: 577635 - RNA, 19 nt, Homo sapiens
  misc_RNA (1)...(19): siRNA sense strand
gaaaaucagaggcaaaaga

SEQ ID NO: 577636 - RNA, 19 nt, Homo sapiens
  misc_RNA (1)...(19): siRNA sense strand
gauuugcuguccucugaau

SEQ ID NO: 577637 - RNA, 19 nt, Homo sapiens
  misc_RNA (1)...(19): siRNA sense strand
ugauggagcuagagaagag

SEQ ID NO: 577638 - RNA, 19 nt, Homo sapiens
  misc_RNA (1)...(19): siRNA sense strand
acacuuacuucccucacaa

SEQ ID NO: 577639 - RNA, 19 nt, Homo sapiens
  misc_RNA (1)...(19): siRNA sense strand
aaauggaguuugcaguaau

SEQ ID NO: 577640 - RNA, 19 nt, Homo sapiens
  misc_RNA (1)...(19): siRNA sense strand
ccaaaugaugugcuuagaa

SEQ ID NO: 577641 - RNA, 19 nt, Homo sapiens
  misc_RNA (1)...(19): siRNA sense strand
gaacauggcagauuuaaua

SEQ ID NO: 577642 - RNA, 19 nt, Homo sapiens
  misc_RNA (1)...(19): siRNA sense strand
caacaaaccuucuaagcuu

SEQ ID NO: 577643 - RNA, 19 nt, Homo sapiens
  misc_RNA (1)...(19): siRNA sense strand
guaaugagcugaagugugu

SEQ ID NO: 577644 - RNA, 19 nt, Homo sapiens
  misc_RNA (1)...(19): siRNA sense strand
gaaauggaguuugcaguaa

SEQ ID NO: 577645 - RNA, 19 nt, Homo sapiens
  misc_RNA (1)...(19): siRNA sense strand
uaucaugacuuccugaaua

SEQ ID NO: 577646 - RNA, 19 nt, Homo sapiens
  misc_RNA (1)...(19): siRNA sense strand
gaaaucacaucuacuuuag

SEQ ID NO: 577647 - RNA, 19 nt, Homo sapiens
  misc_RNA (1)...(19): siRNA sense strand
gcaagacuguggaaguuaa

SEQ ID NO: 577648 - RNA, 19 nt, Homo sapiens
  misc_RNA (1)...(19): siRNA sense strand
gaagaaaccaaauacauug

SEQ ID NO: 577649 - RNA, 19 nt, Homo sapiens
  misc_RNA (1)...(19): siRNA sense strand
gaaacgugcucaggaaauu

SEQ ID NO: 577650 - RNA, 19 nt, Homo sapiens
  misc_RNA (1)...(19): siRNA sense strand
ggaaauggaguuugcagua

SEQ ID NO: 577651 - RNA, 19 nt, Homo sapiens
  misc_RNA (1)...(19): siRNA sense strand
gagaagcaguaaaugauug

SEQ ID NO: 577652 - RNA, 19 nt, Homo sapiens
  misc_RNA (1)...(19): siRNA sense strand
gaggaaacccugacucauu

SEQ ID NO: 577653 - RNA, 19 nt, Homo sapiens
  misc_RNA (1)...(19): siRNA sense strand
ggaauuugcuuuggaggaa

SEQ ID NO: 577654 - RNA, 19 nt, Homo sapiens
  misc_RNA (1)...(19): siRNA sense strand
gaggaggcgugaaugaauu

SEQ ID NO: 577655 - RNA, 19 nt, Homo sapiens
  misc_RNA (1)...(19): siRNA sense strand
gcuguccucugaauacaua

SEQ ID NO: 577656 - RNA, 19 nt, Homo sapiens
  misc_RNA (1)...(19): siRNA sense strand
gggagacacuggcuauuau

SEQ ID NO: 577657 - RNA, 19 nt, Homo sapiens
  misc_RNA (1)...(19): siRNA sense strand
ccaaauacauugaacugau

SEQ ID NO: 577658 - RNA, 19 nt, Homo sapiens
  misc_RNA (1)...(19): siRNA sense strand
gggaugugcuuugugguua

SEQ ID NO: 577659 - RNA, 19 nt, Homo sapiens
  misc_RNA (1)...(19): siRNA sense strand
cauaauugcuggcaccauu

SEQ ID NO: 577660 - RNA, 19 nt, Homo sapiens
  misc_RNA (1)...(19): siRNA sense strand
gaaccacacauaucucauu

SEQ ID NO: 577661 - RNA, 19 nt, Homo sapiens
  misc_RNA (1)...(19): siRNA sense strand
caaauacauugaacugaug

SEQ ID NO: 577662 - RNA, 19 nt, Homo sapiens
  misc_RNA (1)...(19): siRNA sense strand
caacaaguuugccauaucu

SEQ ID NO: 577663 - RNA, 19 nt, Homo sapiens
  misc_RNA (1)...(19): siRNA sense strand
guaaagaaggcacuauuug

SEQ ID NO: 577664 - RNA, 19 nt, Homo sapiens
  misc_RNA (1)...(19): siRNA sense strand
caaaugaugugcuuagaac

SEQ ID NO: 577665 - RNA, 19 nt, Homo sapiens
  misc_RNA (1)...(19): siRNA sense strand
gaaaggaggaggcgugaau

SEQ ID NO: 577666 - RNA, 19 nt, Homo sapiens
  misc_RNA (1)...(19): siRNA sense strand
gcagaguguuguaagaaau

SEQ ID NO: 577667 - RNA, 19 nt, Homo sapiens
  misc_RNA (1)...(19): siRNA sense strand
gagcugaagugugugugua

SEQ ID NO: 577668 - RNA, 19 nt, Homo sapiens
  misc_RNA (1)...(19): siRNA sense strand
gcagcaaggaagaacauua

SEQ ID NO: 577669 - RNA, 19 nt, Homo sapiens
  misc_RNA (1)...(19): siRNA sense strand
gauagacaaugcaaauaca

SEQ ID NO: 577670 - RNA, 19 nt, Homo sapiens
  misc_RNA (1)...(19): siRNA sense strand
aggaaacccugacucauuu

SEQ ID NO: 577671 - RNA, 19 nt, Homo sapiens
  misc_RNA (1)...(19): siRNA sense strand
gcaccaauaucauaauagg

SEQ ID NO: 577672 - RNA, 19 nt, Homo sapiens
  misc_RNA (1)...(19): siRNA sense strand
ggagcagaguguuguaaga

SEQ ID NO: 577673 - RNA, 19 nt, Homo sapiens
  misc_RNA (1)...(19): siRNA sense strand
uuacaaauccagacuguuu

SEQ ID NO: 577674 - RNA, 19 nt, Homo sapiens
  misc_RNA (1)...(19): siRNA sense strand
gaggagagcacuguuacua

SEQ ID NO: 577675 - RNA, 19 nt, Homo sapiens
  misc_RNA (1)...(19): siRNA sense strand
agacaaagacacauggaua

SEQ ID NO: 577676 - RNA, 19 nt, Homo sapiens
  misc_RNA (1)...(19): siRNA sense strand
cgaaaucuguggugaacau

SEQ ID NO: 577677 - RNA, 19 nt, Homo sapiens
  misc_RNA (1)...(19): siRNA sense strand
uguaagaaaugcaccuuga

SEQ ID NO: 577678 - RNA, 19 nt, Homo sapiens
  misc_RNA (1)...(19): siRNA sense strand
gacaacaaguuugccauau

SEQ ID NO: 577679 - RNA, 19 nt, Homo sapiens
  misc_RNA (1)...(19): siRNA sense strand
cagcaaggaagaacauuaa

SEQ ID NO: 577680 - RNA, 19 nt, Homo sapiens
  misc_RNA (1)...(19): siRNA sense strand
ggaaagacaaagacacaug

SEQ ID NO: 577681 - RNA, 19 nt, Homo sapiens
  misc_RNA (1)...(19): siRNA sense strand
gacacuggcuauuaucuuc

SEQ ID NO: 577682 - RNA, 19 nt, Homo sapiens
  misc_RNA (1)...(19): siRNA sense strand
ugacucauuuguugcauug

SEQ ID NO: 577683 - RNA, 19 nt, Homo sapiens
  misc_RNA (1)...(19): siRNA sense strand
agacaaauauugcuaugag

SEQ ID NO: 577684 - RNA, 19 nt, Homo sapiens
  misc_RNA (1)...(19): siRNA sense strand
gcaguaaaugauugugaua

SEQ ID NO: 577685 - RNA, 19 nt, Homo sapiens
  misc_RNA (1)...(19): siRNA sense strand
gaacugaugauugugaaug

SEQ ID NO: 577686 - RNA, 19 nt, Homo sapiens
  misc_RNA (1)...(19): siRNA sense strand
gaucuuccaucugaauuuc

SEQ ID NO: 577687 - RNA, 19 nt, Homo sapiens
  misc_RNA (1)...(19): siRNA sense strand
gcuaugagaaacugaauau

SEQ ID NO: 577688 - RNA, 19 nt, Homo sapiens
  misc_RNA (1)...(19): siRNA sense strand
ggugacagcaucagacaaa

SEQ ID NO: 577689 - RNA, 19 nt, Homo sapiens
  misc_RNA (1)...(19): siRNA sense strand
gagauagacaaugcaaaua

SEQ ID NO: 577690 - RNA, 19 nt, Homo sapiens
  misc_RNA (1)...(19): siRNA sense strand
ggauggauauucaugugau

SEQ ID NO: 577691 - RNA, 19 nt, Homo sapiens
  misc_RNA (1)...(19): siRNA sense strand
gaaugaucaccuuauguuu

SEQ ID NO: 577692 - RNA, 19 nt, Homo sapiens
  misc_RNA (1)...(19): siRNA sense strand
gaagaagaaaccaaauaca

SEQ ID NO: 577693 - RNA, 19 nt, Homo sapiens
  misc_RNA (1)...(19): siRNA sense strand
uggcaccaauaucauaaua

SEQ ID NO: 577694 - RNA, 19 nt, Homo sapiens
  misc_RNA (1)...(19): siRNA sense strand
acauugaacugaugauugu

SEQ ID NO: 577695 - RNA, 19 nt, Homo sapiens
  misc_RNA (1)...(19): siRNA sense strand
gaaaccaaauacauugaac

SEQ ID NO: 577696 - RNA, 19 nt, Homo sapiens
  misc_RNA (1)...(19): siRNA sense strand
ugaaugaucaccuuauguu

SEQ ID NO: 577697 - RNA, 19 nt, Homo sapiens
  misc_RNA (1)...(19): siRNA sense strand
ucacaaugaugaugcaaag

SEQ ID NO: 577698 - RNA, 19 nt, Homo sapiens
  misc_RNA (1)...(19): siRNA sense strand
gaagaugggacaccuugug

SEQ ID NO: 577699 - RNA, 19 nt, Homo sapiens
  misc_RNA (1)...(19): siRNA sense strand
ggccgaauguguccuugaa

SEQ ID NO: 577700 - RNA, 19 nt, Homo sapiens
  misc_RNA (1)...(19): siRNA sense strand
uuuaauggcuguuacacuu

SEQ ID NO: 577701 - RNA, 19 nt, Homo sapiens
  misc_RNA (1)...(19): siRNA sense strand
cuacgugaguuuaugaaau

SEQ ID NO: 577702 - RNA, 19 nt, Homo sapiens
  misc_RNA (1)...(19): siRNA sense strand
gcaguugacucauguugac

SEQ ID NO: 577703 - RNA, 19 nt, Homo sapiens
  misc_RNA (1)...(19): siRNA sense strand
ucaagaggauuuccauuuu

SEQ ID NO: 577704 - RNA, 19 nt, Homo sapiens
  misc_RNA (1)...(19): siRNA sense strand
gacagcaucagacaaauau

SEQ ID NO: 577705 - RNA, 19 nt, Homo sapiens
  misc_RNA (1)...(19): siRNA sense strand
ggaggaggcgugaaugaau

SEQ ID NO: 577706 - RNA, 19 nt, Homo sapiens
  misc_RNA (1)...(19): siRNA sense strand
aauccagacuguuugaauu

SEQ ID NO: 577707 - RNA, 19 nt, Homo sapiens
  misc_RNA (1)...(19): siRNA sense strand
guuagcaaguggugaaugu

SEQ ID NO: 577708 - RNA, 19 nt, Homo sapiens
  misc_RNA (1)...(19): siRNA sense strand
caacaaacgggaugugcuu

SEQ ID NO: 577709 - RNA, 19 nt, Homo sapiens
  misc_RNA (1)...(19): siRNA sense strand
gacaaauauugcuaugaga

SEQ ID NO: 577710 - RNA, 19 nt, Homo sapiens
  misc_RNA (1)...(19): siRNA sense strand
ugacagcaucagacaaaua

SEQ ID NO: 577711 - RNA, 19 nt, Homo sapiens
  misc_RNA (1)...(19): siRNA sense strand
gcaggagacgccucauuga

SEQ ID NO: 577712 - RNA, 19 nt, Homo sapiens
  misc_RNA (1)...(19): siRNA sense strand
gagcagaguguuguaagaa

SEQ ID NO: 577713 - RNA, 19 nt, Homo sapiens
  misc_RNA (1)...(19): siRNA sense strand
ugacaacaaguuugccaua

SEQ ID NO: 577714 - RNA, 19 nt, Homo sapiens
  misc_RNA (1)...(19): siRNA sense strand
acacauggauacagugcaa

SEQ ID NO: 577715 - RNA, 19 nt, Homo sapiens
  misc_RNA (1)...(19): siRNA sense strand
aaagacacauggauacagu

SEQ ID NO: 577716 - RNA, 19 nt, Homo sapiens
  misc_RNA (1)...(19): siRNA sense strand
ggagaggagugugauugug

SEQ ID NO: 577717 - RNA, 19 nt, Homo sapiens
  misc_RNA (1)...(19): siRNA sense strand
ggagggauuuuaucaaaga

SEQ ID NO: 577718 - RNA, 19 nt, Homo sapiens
  misc_RNA (1)...(19): siRNA sense strand
ucgauauccucguaaugua

SEQ ID NO: 577719 - RNA, 19 nt, Homo sapiens
  misc_RNA (1)...(19): siRNA sense strand
guucugauugcaacacuua

SEQ ID NO: 577720 - RNA, 19 nt, Homo sapiens
  misc_RNA (1)...(19): siRNA sense strand
cgugaaacgugcucaggaa

SEQ ID NO: 577721 - RNA, 19 nt, Homo sapiens
  misc_RNA (1)...(19): siRNA sense strand
gguauuaucucagacaaaa

SEQ ID NO: 577722 - RNA, 19 nt, Homo sapiens
  misc_RNA (1)...(19): siRNA sense strand
caacuuaagaccaggauag

SEQ ID NO: 577723 - RNA, 19 nt, Homo sapiens
  misc_RNA (1)...(19): siRNA sense strand
cagcaucagacaaauauug

SEQ ID NO: 577724 - RNA, 19 nt, Homo sapiens
  misc_RNA (1)...(19): siRNA sense strand
gaaaaugggcgaccucgaa

SEQ ID NO: 577725 - RNA, 19 nt, Homo sapiens
  misc_RNA (1)...(19): siRNA sense strand
gcaguaaugagcugaagug

SEQ ID NO: 577726 - RNA, 19 nt, Homo sapiens
  misc_RNA (1)...(19): siRNA sense strand
gaaggagcagaguguugua

SEQ ID NO: 577727 - RNA, 19 nt, Homo sapiens
  misc_RNA (1)...(19): siRNA sense strand
gaaaggauuccagacacaa

SEQ ID NO: 577728 - RNA, 19 nt, Homo sapiens
  misc_RNA (1)...(19): siRNA sense strand
uuacuucccucacaaugau

SEQ ID NO: 577729 - RNA, 19 nt, Homo sapiens
  misc_RNA (1)...(19): siRNA sense strand
agaacucgauggugaaauc

SEQ ID NO: 577730 - RNA, 19 nt, Homo sapiens
  misc_RNA (1)...(19): siRNA sense strand
ggugaacauggcagauuua

SEQ ID NO: 577731 - RNA, 19 nt, Homo sapiens
  misc_RNA (1)...(19): siRNA sense strand
ugaaaggauuccagacaca

SEQ ID NO: 577732 - RNA, 19 nt, Homo sapiens
  misc_RNA (1)...(19): siRNA sense strand
caaggaagaacauuaaacu

SEQ ID NO: 577733 - RNA, 19 nt, Homo sapiens
  misc_RNA (1)...(19): siRNA sense strand
gugacggucuuugcuguaa

SEQ ID NO: 577734 - RNA, 19 nt, Homo sapiens
  misc_RNA (1)...(19): siRNA sense strand
gcaaguggugaauguaaau

SEQ ID NO: 577735 - RNA, 19 nt, Homo sapiens
  misc_RNA (1)...(19): siRNA sense strand
gaaaaucagaggcaaaaga

SEQ ID NO: 577736 - RNA, 19 nt, Homo sapiens
  misc_RNA (1)...(19): siRNA sense strand
gauuugcuguccucugaau

SEQ ID NO: 577737 - RNA, 19 nt, Homo sapiens
  misc_RNA (1)...(19): siRNA sense strand
ugauggagcuagagaagag

SEQ ID NO: 577738 - RNA, 19 nt, Homo sapiens
  misc_RNA (1)...(19): siRNA sense strand
acacuuacuucccucacaa

SEQ ID NO: 577739 - RNA, 19 nt, Homo sapiens
  misc_RNA (1)...(19): siRNA sense strand
aaauggaguuugcaguaau

SEQ ID NO: 577740 - RNA, 19 nt, Homo sapiens
  misc_RNA (1)...(19): siRNA sense strand
ccaaaugaugugcuuagaa

SEQ ID NO: 577741 - RNA, 19 nt, Homo sapiens
  misc_RNA (1)...(19): siRNA sense strand
gaacauggcagauuuaaua

SEQ ID NO: 577742 - RNA, 19 nt, Homo sapiens
  misc_RNA (1)...(19): siRNA sense strand
caacaaaccuucuaagcuu

SEQ ID NO: 577743 - RNA, 19 nt, Homo sapiens
  misc_RNA (1)...(19): siRNA sense strand
guaaugagcugaagugugu

SEQ ID NO: 577744 - RNA, 19 nt, Homo sapiens
  misc_RNA (1)...(19): siRNA sense strand
gaaauggaguuugcaguaa

SEQ ID NO: 577745 - RNA, 19 nt, Homo sapiens
  misc_RNA (1)...(19): siRNA sense strand
uaucaugacuuccugaaua

SEQ ID NO: 577746 - RNA, 19 nt, Homo sapiens
  misc_RNA (1)...(19): siRNA sense strand
gaaaucacaucuacuuuag

SEQ ID NO: 577747 - RNA, 19 nt, Homo sapiens
  misc_RNA (1)...(19): siRNA sense strand
gcaagacuguggaaguuaa

SEQ ID NO: 577748 - RNA, 19 nt, Homo sapiens
  misc_RNA (1)...(19): siRNA sense strand
gaagaaaccaaauacauug

SEQ ID NO: 577749 - RNA, 19 nt, Homo sapiens
  misc_RNA (1)...(19): siRNA sense strand
gaaacgugcucaggaaauu

SEQ ID NO: 577750 - RNA, 19 nt, Homo sapiens
  misc_RNA (1)...(19): siRNA sense strand
ggaaauggaguuugcagua

SEQ ID NO: 577751 - RNA, 19 nt, Homo sapiens
  misc_RNA (1)...(19): siRNA sense strand
gagaagcaguaaaugauug

SEQ ID NO: 577752 - RNA, 19 nt, Homo sapiens
  misc_RNA (1)...(19): siRNA sense strand
gaggaaacccugacucauu

SEQ ID NO: 577753 - RNA, 19 nt, Homo sapiens
  misc_RNA (1)...(19): siRNA sense strand
ggaauuugcuuuggaggaa

SEQ ID NO: 577754 - RNA, 19 nt, Homo sapiens
  misc_RNA (1)...(19): siRNA sense strand
gaggaggcgugaaugaauu

SEQ ID NO: 577755 - RNA, 19 nt, Homo sapiens
  misc_RNA (1)...(19): siRNA sense strand
gcuguccucugaauacaua

SEQ ID NO: 577756 - RNA, 19 nt, Homo sapiens
  misc_RNA (1)...(19): siRNA sense strand
gggagacacuggcuauuau

SEQ ID NO: 577757 - RNA, 19 nt, Homo sapiens
  misc_RNA (1)...(19): siRNA sense strand
ccaaauacauugaacugau

SEQ ID NO: 577758 - RNA, 19 nt, Homo sapiens
  misc_RNA (1)...(19): siRNA sense strand
gggaugugcuuugugguua

SEQ ID NO: 577759 - RNA, 19 nt, Homo sapiens
  misc_RNA (1)...(19): siRNA sense strand
cauaauugcuggcaccauu

SEQ ID NO: 577760 - RNA, 19 nt, Homo sapiens
  misc_RNA (1)...(19): siRNA sense strand
gaaccacacauaucucauu

SEQ ID NO: 577761 - RNA, 19 nt, Homo sapiens
  misc_RNA (1)...(19): siRNA sense strand
caaauacauugaacugaug

SEQ ID NO: 577762 - RNA, 19 nt, Homo sapiens
  misc_RNA (1)...(19): siRNA sense strand
caacaaguuugccauaucu

SEQ ID NO: 577763 - RNA, 19 nt, Homo sapiens
  misc_RNA (1)...(19): siRNA sense strand
guaaagaaggcacuauuug

SEQ ID NO: 577764 - RNA, 19 nt, Homo sapiens
  misc_RNA (1)...(19): siRNA sense strand
caaaugaugugcuuagaac

SEQ ID NO: 577765 - RNA, 19 nt, Homo sapiens
  misc_RNA (1)...(19): siRNA sense strand
gaaaggaggaggcgugaau

SEQ ID NO: 577766 - RNA, 19 nt, Homo sapiens
  misc_RNA (1)...(19): siRNA sense strand
gcagaguguuguaagaaau

SEQ ID NO: 577767 - RNA, 19 nt, Homo sapiens
  misc_RNA (1)...(19): siRNA sense strand
gagcugaagugugugugua

SEQ ID NO: 577768 - RNA, 19 nt, Homo sapiens
  misc_RNA (1)...(19): siRNA sense strand
gcagcaaggaagaacauua

SEQ ID NO: 577769 - RNA, 19 nt, Homo sapiens
  misc_RNA (1)...(19): siRNA sense strand
gauagacaaugcaaauaca

SEQ ID NO: 577770 - RNA, 19 nt, Homo sapiens
  misc_RNA (1)...(19): siRNA sense strand
aggaaacccugacucauuu

SEQ ID NO: 577771 - RNA, 19 nt, Homo sapiens
  misc_RNA (1)...(19): siRNA sense strand
gcaccaauaucauaauagg

SEQ ID NO: 577772 - RNA, 19 nt, Homo sapiens
  misc_RNA (1)...(19): siRNA sense strand
ggagcagaguguuguaaga

SEQ ID NO: 577773 - RNA, 19 nt, Homo sapiens
  misc_RNA (1)...(19): siRNA sense strand
uuacaaauccagacuguuu

SEQ ID NO: 577774 - RNA, 19 nt, Homo sapiens
  misc_RNA (1)...(19): siRNA sense strand
gaggagagcacuguuacua

SEQ ID NO: 577775 - RNA, 19 nt, Homo sapiens
  misc_RNA (1)...(19): siRNA sense strand
agacaaagacacauggaua

SEQ ID NO: 577776 - RNA, 19 nt, Homo sapiens
  misc_RNA (1)...(19): siRNA sense strand
cgaaaucuguggugaacau

SEQ ID NO: 577777 - RNA, 19 nt, Homo sapiens
  misc_RNA (1)...(19): siRNA sense strand
uguaagaaaugcaccuuga

SEQ ID NO: 577778 - RNA, 19 nt, Homo sapiens
  misc_RNA (1)...(19): siRNA sense strand
gacaacaaguuugccauau

SEQ ID NO: 577779 - RNA, 19 nt, Homo sapiens
  misc_RNA (1)...(19): siRNA sense strand
cagcaaggaagaacauuaa

SEQ ID NO: 577780 - RNA, 19 nt, Homo sapiens
  misc_RNA (1)...(19): siRNA sense strand
ggaaagacaaagacacaug

SEQ ID NO: 577781 - RNA, 19 nt, Homo sapiens
  misc_RNA (1)...(19): siRNA sense strand
gacacuggcuauuaucuuc

SEQ ID NO: 577782 - RNA, 19 nt, Homo sapiens
  misc_RNA (1)...(19): siRNA sense strand
ugacucauuuguugcauug

SEQ ID NO: 577783 - RNA, 19 nt, Homo sapiens
  misc_RNA (1)...(19): siRNA sense strand
agacaaauauugcuaugag

SEQ ID NO: 577784 - RNA, 19 nt, Homo sapiens
  misc_RNA (1)...(19): siRNA sense strand
gcaguaaaugauugugaua

SEQ ID NO: 577785 - RNA, 19 nt, Homo sapiens
  misc_RNA (1)...(19): siRNA sense strand
gaacugaugauugugaaug

SEQ ID NO: 577786 - RNA, 19 nt, Homo sapiens
  misc_RNA (1)...(19): siRNA sense strand
gaucuuccaucugaauuuc

SEQ ID NO: 577787 - RNA, 19 nt, Homo sapiens
  misc_RNA (1)...(19): siRNA sense strand
gcuaugagaaacugaauau

SEQ ID NO: 577788 - RNA, 19 nt, Homo sapiens
  misc_RNA (1)...(19): siRNA sense strand
ggugacagcaucagacaaa

SEQ ID NO: 577789 - RNA, 19 nt, Homo sapiens
  misc_RNA (1)...(19): siRNA sense strand
gagauagacaaugcaaaua

SEQ ID NO: 577790 - RNA, 19 nt, Homo sapiens
  misc_RNA (1)...(19): siRNA sense strand
ggauggauauucaugugau

SEQ ID NO: 577791 - RNA, 19 nt, Homo sapiens
  misc_RNA (1)...(19): siRNA sense strand
gaaugaucaccuuauguuu

SEQ ID NO: 577792 - RNA, 19 nt, Homo sapiens
  misc_RNA (1)...(19): siRNA sense strand
gaagaagaaaccaaauaca

SEQ ID NO: 577793 - RNA, 19 nt, Homo sapiens
  misc_RNA (1)...(19): siRNA sense strand
uggcaccaauaucauaaua

SEQ ID NO: 577794 - RNA, 19 nt, Homo sapiens
  misc_RNA (1)...(19): siRNA sense strand
acauugaacugaugauugu

SEQ ID NO: 577795 - RNA, 19 nt, Homo sapiens
  misc_RNA (1)...(19): siRNA sense strand
gaaaccaaauacauugaac

SEQ ID NO: 577796 - RNA, 19 nt, Homo sapiens
  misc_RNA (1)...(19): siRNA sense strand
ugaaugaucaccuuauguu

SEQ ID NO: 577797 - RNA, 19 nt, Homo sapiens
  misc_RNA (1)...(19): siRNA sense strand
ucacaaugaugaugcaaag

SEQ ID NO: 577798 - RNA, 19 nt, Homo sapiens
  misc_RNA (1)...(19): siRNA sense strand
gaagaugggacaccuugug

SEQ ID NO: 577799 - RNA, 19 nt, Homo sapiens
  misc_RNA (1)...(19): siRNA sense strand
ggccgaauguguccuugaa

SEQ ID NO: 577800 - RNA, 19 nt, Homo sapiens
  misc_RNA (1)...(19): siRNA sense strand
uuuaauggcuguuacacuu

SEQ ID NO: 577801 - RNA, 19 nt, Homo sapiens
  misc_RNA (1)...(19): siRNA sense strand
cuacgugaguuuaugaaau

SEQ ID NO: 577802 - RNA, 19 nt, Homo sapiens
  misc_RNA (1)...(19): siRNA sense strand
gcaguugacucauguugac

SEQ ID NO: 577803 - RNA, 19 nt, Homo sapiens
  misc_RNA (1)...(19): siRNA sense strand
ucaagaggauuuccauuuu

SEQ ID NO: 577804 - RNA, 19 nt, Homo sapiens
  misc_RNA (1)...(19): siRNA sense strand
gacagcaucagacaaauau

SEQ ID NO: 577805 - RNA, 19 nt, Homo sapiens
  misc_RNA (1)...(19): siRNA sense strand
ggaggaggcgugaaugaau

SEQ ID NO: 577806 - RNA, 19 nt, Homo sapiens
  misc_RNA (1)...(19): siRNA sense strand
aauccagacuguuugaauu

SEQ ID NO: 577807 - RNA, 19 nt, Homo sapiens
  misc_RNA (1)...(19): siRNA sense strand
guuagcaaguggugaaugu

SEQ ID NO: 577808 - RNA, 19 nt, Homo sapiens
  misc_RNA (1)...(19): siRNA sense strand
caacaaacgggaugugcuu

SEQ ID NO: 577809 - RNA, 19 nt, Homo sapiens
  misc_RNA (1)...(19): siRNA sense strand
gacaaauauugcuaugaga

SEQ ID NO: 577810 - RNA, 19 nt, Homo sapiens
  misc_RNA (1)...(19): siRNA sense strand
ugacagcaucagacaaaua

SEQ ID NO: 577811 - RNA, 19 nt, Homo sapiens
  misc_RNA (1)...(19): siRNA sense strand
gcaggagacgccucauuga

SEQ ID NO: 577812 - RNA, 19 nt, Homo sapiens
  misc_RNA (1)...(19): siRNA sense strand
gagcagaguguuguaagaa

SEQ ID NO: 577813 - RNA, 19 nt, Homo sapiens
  misc_RNA (1)...(19): siRNA sense strand
ugacaacaaguuugccaua

SEQ ID NO: 577814 - RNA, 19 nt, Homo sapiens
  misc_RNA (1)...(19): siRNA sense strand
acacauggauacagugcaa

SEQ ID NO: 577815 - RNA, 19 nt, Homo sapiens
  misc_RNA (1)...(19): siRNA sense strand
aaagacacauggauacagu

SEQ ID NO: 577816 - RNA, 19 nt, Homo sapiens
  misc_RNA (1)...(19): siRNA sense strand
ggagaggagugugauugug

SEQ ID NO: 577817 - RNA, 19 nt, Homo sapiens
  misc_RNA (1)...(19): siRNA sense strand
ggagggauuuuaucaaaga

SEQ ID NO: 577818 - RNA, 19 nt, Homo sapiens
  misc_RNA (1)...(19): siRNA sense strand
ucgauauccucguaaugua

SEQ ID NO: 577819 - RNA, 19 nt, Homo sapiens
  misc_RNA (1)...(19): siRNA sense strand
guucugauugcaacacuua

SEQ ID NO: 577820 - RNA, 19 nt, Homo sapiens
  misc_RNA (1)...(19): siRNA sense strand
cgugaaacgugcucaggaa

SEQ ID NO: 577821 - RNA, 19 nt, Homo sapiens
  misc_RNA (1)...(19): siRNA sense strand
gguauuaucucagacaaaa

SEQ ID NO: 577822 - RNA, 19 nt, Homo sapiens
  misc_RNA (1)...(19): siRNA sense strand
caacuuaagaccaggauag

SEQ ID NO: 577823 - RNA, 19 nt, Homo sapiens
  misc_RNA (1)...(19): siRNA sense strand
cagcaucagacaaauauug

SEQ ID NO: 577824 - RNA, 19 nt, Homo sapiens
  misc_RNA (1)...(19): siRNA sense strand
gaaaaugggcgaccucgaa

SEQ ID NO: 577825 - RNA, 19 nt, Homo sapiens
  misc_RNA (1)...(19): siRNA sense strand
gcaguaaugagcugaagug

SEQ ID NO: 577826 - RNA, 19 nt, Homo sapiens
  misc_RNA (1)...(19): siRNA sense strand
gaaggagcagaguguugua

SEQ ID NO: 577827 - RNA, 19 nt, Homo sapiens
  misc_RNA (1)...(19): siRNA sense strand
gaaaggauuccagacacaa

SEQ ID NO: 577828 - RNA, 19 nt, Homo sapiens
  misc_RNA (1)...(19): siRNA sense strand
uuacuucccucacaaugau

SEQ ID NO: 577829 - RNA, 19 nt, Homo sapiens
  misc_RNA (1)...(19): siRNA sense strand
agaacucgauggugaaauc

SEQ ID NO: 577830 - RNA, 19 nt, Homo sapiens
  misc_RNA (1)...(19): siRNA sense strand
ggugaacauggcagauuua

SEQ ID NO: 577831 - RNA, 19 nt, Homo sapiens
  misc_RNA (1)...(19): siRNA sense strand
ugaaaggauuccagacaca

SEQ ID NO: 577832 - RNA, 19 nt, Homo sapiens
  misc_RNA (1)...(19): siRNA sense strand
caaggaagaacauuaaacu

SEQ ID NO: 577833 - RNA, 19 nt, Homo sapiens
  misc_RNA (1)...(19): siRNA sense strand
gugacggucuuugcuguaa

SEQ ID NO: 577834 - RNA, 19 nt, Homo sapiens
  misc_RNA (1)...(19): siRNA sense strand
gcaaguggugaauguaaau

SEQ ID NO: 577835 - RNA, 19 nt, Homo sapiens
  misc_RNA (1)...(19): siRNA sense strand
gaaaaucagaggcaaaaga

SEQ ID NO: 577836 - RNA, 19 nt, Homo sapiens
  misc_RNA (1)...(19): siRNA sense strand
gauuugcuguccucugaau

SEQ ID NO: 577837 - RNA, 19 nt, Homo sapiens
  misc_RNA (1)...(19): siRNA sense strand
ugauggagcuagagaagag

SEQ ID NO: 577838 - RNA, 19 nt, Homo sapiens
  misc_RNA (1)...(19): siRNA sense strand
acacuuacuucccucacaa

SEQ ID NO: 577839 - RNA, 19 nt, Homo sapiens
  misc_RNA (1)...(19): siRNA sense strand
aaauggaguuugcaguaau

SEQ ID NO: 577840 - RNA, 19 nt, Homo sapiens
  misc_RNA (1)...(19): siRNA sense strand
ccaaaugaugugcuuagaa

SEQ ID NO: 577841 - RNA, 19 nt, Homo sapiens
  misc_RNA (1)...(19): siRNA sense strand
gaacauggcagauuuaaua

SEQ ID NO: 577842 - RNA, 19 nt, Homo sapiens
  misc_RNA (1)...(19): siRNA sense strand
caacaaaccuucuaagcuu

SEQ ID NO: 577843 - RNA, 19 nt, Homo sapiens
  misc_RNA (1)...(19): siRNA sense strand
guaaugagcugaagugugu

SEQ ID NO: 577844 - RNA, 19 nt, Homo sapiens
  misc_RNA (1)...(19): siRNA sense strand
gaaauggaguuugcaguaa

SEQ ID NO: 577845 - RNA, 19 nt, Homo sapiens
  misc_RNA (1)...(19): siRNA sense strand
uaucaugacuuccugaaua

SEQ ID NO: 577846 - RNA, 19 nt, Homo sapiens
  misc_RNA (1)...(19): siRNA sense strand
gaaaucacaucuacuuuag

SEQ ID NO: 577847 - RNA, 19 nt, Homo sapiens
  misc_RNA (1)...(19): siRNA sense strand
gcaagacuguggaaguuaa

SEQ ID NO: 577848 - RNA, 19 nt, Homo sapiens
  misc_RNA (1)...(19): siRNA sense strand
gaagaaaccaaauacauug

SEQ ID NO: 577849 - RNA, 19 nt, Homo sapiens
  misc_RNA (1)...(19): siRNA sense strand
gaaacgugcucaggaaauu

SEQ ID NO: 577850 - RNA, 19 nt, Homo sapiens
  misc_RNA (1)...(19): siRNA sense strand
ggaaauggaguuugcagua

SEQ ID NO: 577851 - RNA, 19 nt, Homo sapiens
  misc_RNA (1)...(19): siRNA sense strand
gagaagcaguaaaugauug

SEQ ID NO: 577852 - RNA, 19 nt, Homo sapiens
  misc_RNA (1)...(19): siRNA sense strand
gaggaaacccugacucauu

SEQ ID NO: 577853 - RNA, 19 nt, Homo sapiens
  misc_RNA (1)...(19): siRNA sense strand
ggaauuugcuuuggaggaa

SEQ ID NO: 577854 - RNA, 19 nt, Homo sapiens
  misc_RNA (1)...(19): siRNA sense strand
gaggaggcgugaaugaauu

SEQ ID NO: 577855 - RNA, 19 nt, Homo sapiens
  misc_RNA (1)...(19): siRNA sense strand
gcuguccucugaauacaua

SEQ ID NO: 577856 - RNA, 19 nt, Homo sapiens
  misc_RNA (1)...(19): siRNA sense strand
gggagacacuggcuauuau

SEQ ID NO: 577857 - RNA, 19 nt, Homo sapiens
  misc_RNA (1)...(19): siRNA sense strand
ccaaauacauugaacugau

SEQ ID NO: 577858 - RNA, 19 nt, Homo sapiens
  misc_RNA (1)...(19): siRNA sense strand
gggaugugcuuugugguua

SEQ ID NO: 577859 - RNA, 19 nt, Homo sapiens
  misc_RNA (1)...(19): siRNA sense strand
cauaauugcuggcaccauu

SEQ ID NO: 577860 - RNA, 19 nt, Homo sapiens
  misc_RNA (1)...(19): siRNA sense strand
gaaccacacauaucucauu

SEQ ID NO: 577861 - RNA, 19 nt, Homo sapiens
  misc_RNA (1)...(19): siRNA sense strand
caaauacauugaacugaug

SEQ ID NO: 577862 - RNA, 19 nt, Homo sapiens
  misc_RNA (1)...(19): siRNA sense strand
caacaaguuugccauaucu

SEQ ID NO: 577863 - RNA, 19 nt, Homo sapiens
  misc_RNA (1)...(19): siRNA sense strand
guaaagaaggcacuauuug

SEQ ID NO: 577864 - RNA, 19 nt, Homo sapiens
  misc_RNA (1)...(19): siRNA sense strand
caaaugaugugcuuagaac

SEQ ID NO: 577865 - RNA, 19 nt, Homo sapiens
  misc_RNA (1)...(19): siRNA sense strand
gaaaggaggaggcgugaau

SEQ ID NO: 577866 - RNA, 19 nt, Homo sapiens
  misc_RNA (1)...(19): siRNA sense strand
gcagaguguuguaagaaau

SEQ ID NO: 577867 - RNA, 19 nt, Homo sapiens
  misc_RNA (1)...(19): siRNA sense strand
gagcugaagugugugugua

SEQ ID NO: 577868 - RNA, 19 nt, Homo sapiens
  misc_RNA (1)...(19): siRNA sense strand
gcagcaaggaagaacauua

SEQ ID NO: 577869 - RNA, 19 nt, Homo sapiens
  misc_RNA (1)...(19): siRNA sense strand
gauagacaaugcaaauaca

SEQ ID NO: 577870 - RNA, 19 nt, Homo sapiens
  misc_RNA (1)...(19): siRNA sense strand
aggaaacccugacucauuu

SEQ ID NO: 577871 - RNA, 19 nt, Homo sapiens
  misc_RNA (1)...(19): siRNA sense strand
gcaccaauaucauaauagg

SEQ ID NO: 577872 - RNA, 19 nt, Homo sapiens
  misc_RNA (1)...(19): siRNA sense strand
ggagcagaguguuguaaga

SEQ ID NO: 577873 - RNA, 19 nt, Homo sapiens
  misc_RNA (1)...(19): siRNA sense strand
uuacaaauccagacuguuu

SEQ ID NO: 577874 - RNA, 19 nt, Homo sapiens
  misc_RNA (1)...(19): siRNA sense strand
gaggagagcacuguuacua

SEQ ID NO: 577875 - RNA, 19 nt, Homo sapiens
  misc_RNA (1)...(19): siRNA sense strand
agacaaagacacauggaua

SEQ ID NO: 577876 - RNA, 19 nt, Homo sapiens
  misc_RNA (1)...(19): siRNA sense strand
cgaaaucuguggugaacau

SEQ ID NO: 577877 - RNA, 19 nt, Homo sapiens
  misc_RNA (1)...(19): siRNA sense strand
uguaagaaaugcaccuuga

SEQ ID NO: 577878 - RNA, 19 nt, Homo sapiens
  misc_RNA (1)...(19): siRNA sense strand
gacaacaaguuugccauau

SEQ ID NO: 577879 - RNA, 19 nt, Homo sapiens
  misc_RNA (1)...(19): siRNA sense strand
cagcaaggaagaacauuaa

SEQ ID NO: 577880 - RNA, 19 nt, Homo sapiens
  misc_RNA (1)...(19): siRNA sense strand
ggaaagacaaagacacaug

SEQ ID NO: 577881 - RNA, 19 nt, Homo sapiens
  misc_RNA (1)...(19): siRNA sense strand
gacacuggcuauuaucuuc

SEQ ID NO: 577882 - RNA, 19 nt, Homo sapiens
  misc_RNA (1)...(19): siRNA sense strand
ugacucauuuguugcauug

SEQ ID NO: 577883 - RNA, 19 nt, Homo sapiens
  misc_RNA (1)...(19): siRNA sense strand
agacaaauauugcuaugag

SEQ ID NO: 577884 - RNA, 19 nt, Homo sapiens
  misc_RNA (1)...(19): siRNA sense strand
gcaguaaaugauugugaua

SEQ ID NO: 577885 - RNA, 19 nt, Homo sapiens
  misc_RNA (1)...(19): siRNA sense strand
gaacugaugauugugaaug

SEQ ID NO: 577886 - RNA, 19 nt, Homo sapiens
  misc_RNA (1)...(19): siRNA sense strand
gaucuuccaucugaauuuc

SEQ ID NO: 577887 - RNA, 19 nt, Homo sapiens
  misc_RNA (1)...(19): siRNA sense strand
gcuaugagaaacugaauau

SEQ ID NO: 577888 - RNA, 19 nt, Homo sapiens
  misc_RNA (1)...(19): siRNA sense strand
ggugacagcaucagacaaa

SEQ ID NO: 577889 - RNA, 19 nt, Homo sapiens
  misc_RNA (1)...(19): siRNA sense strand
gagauagacaaugcaaaua

SEQ ID NO: 577890 - RNA, 19 nt, Homo sapiens
  misc_RNA (1)...(19): siRNA sense strand
ggauggauauucaugugau

SEQ ID NO: 577891 - RNA, 19 nt, Homo sapiens
  misc_RNA (1)...(19): siRNA sense strand
gaaugaucaccuuauguuu

SEQ ID NO: 577892 - RNA, 19 nt, Homo sapiens
  misc_RNA (1)...(19): siRNA sense strand
gaagaagaaaccaaauaca

SEQ ID NO: 577893 - RNA, 19 nt, Homo sapiens
  misc_RNA (1)...(19): siRNA sense strand
uggcaccaauaucauaaua

SEQ ID NO: 577894 - RNA, 19 nt, Homo sapiens
  misc_RNA (1)...(19): siRNA sense strand
acauugaacugaugauugu

SEQ ID NO: 577895 - RNA, 19 nt, Homo sapiens
  misc_RNA (1)...(19): siRNA sense strand
gaaaccaaauacauugaac

SEQ ID NO: 577896 - RNA, 19 nt, Homo sapiens
  misc_RNA (1)...(19): siRNA sense strand
ugaaugaucaccuuauguu

SEQ ID NO: 577897 - RNA, 19 nt, Homo sapiens
  misc_RNA (1)...(19): siRNA sense strand
ucacaaugaugaugcaaag

SEQ ID NO: 577898 - RNA, 19 nt, Homo sapiens
  misc_RNA (1)...(19): siRNA sense strand
gaagaugggacaccuugug

SEQ ID NO: 577899 - RNA, 19 nt, Homo sapiens
  misc_RNA (1)...(19): siRNA sense strand
ggccgaauguguccuugaa

SEQ ID NO: 577900 - RNA, 19 nt, Homo sapiens
  misc_RNA (1)...(19): siRNA sense strand
uuuaauggcuguuacacuu

SEQ ID NO: 577901 - RNA, 19 nt, Homo sapiens
  misc_RNA (1)...(19): siRNA sense strand
cuacgugaguuuaugaaau

SEQ ID NO: 577902 - RNA, 19 nt, Homo sapiens
  misc_RNA (1)...(19): siRNA sense strand
gcaguugacucauguugac

SEQ ID NO: 577903 - RNA, 19 nt, Homo sapiens
  misc_RNA (1)...(19): siRNA sense strand
ucaagaggauuuccauuuu

SEQ ID NO: 577904 - RNA, 19 nt, Homo sapiens
  misc_RNA (1)...(19): siRNA sense strand
gacagcaucagacaaauau

SEQ ID NO: 577905 - RNA, 19 nt, Homo sapiens
  misc_RNA (1)...(19): siRNA sense strand
ggaggaggcgugaaugaau

SEQ ID NO: 577906 - RNA, 19 nt, Homo sapiens
  misc_RNA (1)...(19): siRNA sense strand
aauccagacuguuugaauu

SEQ ID NO: 577907 - RNA, 19 nt, Homo sapiens
  misc_RNA (1)...(19): siRNA sense strand
guuagcaaguggugaaugu

SEQ ID NO: 577908 - RNA, 19 nt, Homo sapiens
  misc_RNA (1)...(19): siRNA sense strand
caacaaacgggaugugcuu

SEQ ID NO: 577909 - RNA, 19 nt, Homo sapiens
  misc_RNA (1)...(19): siRNA sense strand
gacaaauauugcuaugaga

SEQ ID NO: 577910 - RNA, 19 nt, Homo sapiens
  misc_RNA (1)...(19): siRNA sense strand
ugacagcaucagacaaaua

SEQ ID NO: 577911 - RNA, 19 nt, Homo sapiens
  misc_RNA (1)...(19): siRNA sense strand
gcaggagacgccucauuga

SEQ ID NO: 577912 - RNA, 19 nt, Homo sapiens
  misc_RNA (1)...(19): siRNA sense strand
gagcagaguguuguaagaa

SEQ ID NO: 577913 - RNA, 19 nt, Homo sapiens
  misc_RNA (1)...(19): siRNA sense strand
ugacaacaaguuugccaua

SEQ ID NO: 577914 - RNA, 19 nt, Homo sapiens
  misc_RNA (1)...(19): siRNA sense strand
acacauggauacagugcaa

SEQ ID NO: 577915 - RNA, 19 nt, Homo sapiens
  misc_RNA (1)...(19): siRNA sense strand
aaagacacauggauacagu

SEQ ID NO: 577916 - RNA, 19 nt, Homo sapiens
  misc_RNA (1)...(19): siRNA sense strand
ggagaggagugugauugug

SEQ ID NO: 577917 - RNA, 19 nt, Homo sapiens
  misc_RNA (1)...(19): siRNA sense strand
ggagggauuuuaucaaaga

SEQ ID NO: 577918 - RNA, 19 nt, Homo sapiens
  misc_RNA (1)...(19): siRNA sense strand
ucgauauccucguaaugua

SEQ ID NO: 577919 - RNA, 19 nt, Homo sapiens
  misc_RNA (1)...(19): siRNA sense strand
guucugauugcaacacuua

SEQ ID NO: 577920 - RNA, 19 nt, Homo sapiens
  misc_RNA (1)...(19): siRNA sense strand
cgugaaacgugcucaggaa

SEQ ID NO: 577921 - RNA, 19 nt, Homo sapiens
  misc_RNA (1)...(19): siRNA sense strand
gguauuaucucagacaaaa

SEQ ID NO: 577922 - RNA, 19 nt, Homo sapiens
  misc_RNA (1)...(19): siRNA sense strand
caacuuaagaccaggauag

SEQ ID NO: 577923 - RNA, 19 nt, Homo sapiens
  misc_RNA (1)...(19): siRNA sense strand
cagcaucagacaaauauug

SEQ ID NO: 577924 - RNA, 19 nt, Homo sapiens
  misc_RNA (1)...(19): siRNA sense strand
gaaaaugggcgaccucgaa

SEQ ID NO: 577925 - RNA, 19 nt, Homo sapiens
  misc_RNA (1)...(19): siRNA sense strand
gcaguaaugagcugaagug

SEQ ID NO: 577926 - RNA, 19 nt, Homo sapiens
  misc_RNA (1)...(19): siRNA sense strand
gaaggagcagaguguugua

SEQ ID NO: 577927 - RNA, 19 nt, Homo sapiens
  misc_RNA (1)...(19): siRNA sense strand
gaaaggauuccagacacaa

SEQ ID NO: 577928 - RNA, 19 nt, Homo sapiens
  misc_RNA (1)...(19): siRNA sense strand
uuacuucccucacaaugau

SEQ ID NO: 577929 - RNA, 19 nt, Homo sapiens
  misc_RNA (1)...(19): siRNA sense strand
agaacucgauggugaaauc

SEQ ID NO: 577930 - RNA, 19 nt, Homo sapiens
  misc_RNA (1)...(19): siRNA sense strand
ggugaacauggcagauuua

SEQ ID NO: 577931 - RNA, 19 nt, Homo sapiens
  misc_RNA (1)...(19): siRNA sense strand
ugaaaggauuccagacaca

SEQ ID NO: 577932 - RNA, 19 nt, Homo sapiens
  misc_RNA (1)...(19): siRNA sense strand
caaggaagaacauuaaacu

SEQ ID NO: 577933 - RNA, 19 nt, Homo sapiens
  misc_RNA (1)...(19): siRNA sense strand
gugacggucuuugcuguaa

SEQ ID NO: 577934 - RNA, 19 nt, Homo sapiens
  misc_RNA (1)...(19): siRNA sense strand
gcaaguggugaauguaaau

SEQ ID NO: 577935 - RNA, 19 nt, Homo sapiens
  misc_RNA (1)...(19): siRNA sense strand
gaaaaucagaggcaaaaga

SEQ ID NO: 577936 - RNA, 19 nt, Homo sapiens
  misc_RNA (1)...(19): siRNA sense strand
gauuugcuguccucugaau

SEQ ID NO: 577937 - RNA, 19 nt, Homo sapiens
  misc_RNA (1)...(19): siRNA sense strand
ugauggagcuagagaagag

SEQ ID NO: 577938 - RNA, 19 nt, Homo sapiens
  misc_RNA (1)...(19): siRNA sense strand
acacuuacuucccucacaa

SEQ ID NO: 577939 - RNA, 19 nt, Homo sapiens
  misc_RNA (1)...(19): siRNA sense strand
aaauggaguuugcaguaau

SEQ ID NO: 577940 - RNA, 19 nt, Homo sapiens
  misc_RNA (1)...(19): siRNA sense strand
ccaaaugaugugcuuagaa

SEQ ID NO: 577941 - RNA, 19 nt, Homo sapiens
  misc_RNA (1)...(19): siRNA sense strand
caacggauuuaccgaguua

SEQ ID NO: 577942 - RNA, 19 nt, Homo sapiens
  misc_RNA (1)...(19): siRNA sense strand
gcaagugacugacaucaau

SEQ ID NO: 577943 - RNA, 19 nt, Homo sapiens
  misc_RNA (1)...(19): siRNA sense strand
ccaccuaugucucuauuaa

SEQ ID NO: 577944 - RNA, 19 nt, Homo sapiens
  misc_RNA (1)...(19): siRNA sense strand
gaagaauggucaaguuguc

SEQ ID NO: 577945 - RNA, 19 nt, Homo sapiens
  misc_RNA (1)...(19): siRNA sense strand
gaagauuaguccugcuaug

SEQ ID NO: 577946 - RNA, 19 nt, Homo sapiens
  misc_RNA (1)...(19): siRNA sense strand
ggaaauacaagcugaagau

SEQ ID NO: 577947 - RNA, 19 nt, Homo sapiens
  misc_RNA (1)...(19): siRNA sense strand
gaaacuguacggaauagaa

SEQ ID NO: 577948 - RNA, 19 nt, Homo sapiens
  misc_RNA (1)...(19): siRNA sense strand
ggacaaaagugcucauuuc

SEQ ID NO: 577949 - RNA, 19 nt, Homo sapiens
  misc_RNA (1)...(19): siRNA sense strand
ccucagaccuuacccucua

SEQ ID NO: 577950 - RNA, 19 nt, Homo sapiens
  misc_RNA (1)...(19): siRNA sense strand
ccgaaagucuggaaguaaa

SEQ ID NO: 577951 - RNA, 19 nt, Homo sapiens
  misc_RNA (1)...(19): siRNA sense strand
gaguuaaaguccuugagaa

SEQ ID NO: 577952 - RNA, 19 nt, Homo sapiens
  misc_RNA (1)...(19): siRNA sense strand
ugacaguguuggauacaaa

SEQ ID NO: 577953 - RNA, 19 nt, Homo sapiens
  misc_RNA (1)...(19): siRNA sense strand
gcaaugagaauucuagagu

SEQ ID NO: 577954 - RNA, 19 nt, Homo sapiens
  misc_RNA (1)...(19): siRNA sense strand
gagugaaacuguacggaau

SEQ ID NO: 577955 - RNA, 19 nt, Homo sapiens
  misc_RNA (1)...(19): siRNA sense strand
gacaauagaccugaaguga

SEQ ID NO: 577956 - RNA, 19 nt, Homo sapiens
  misc_RNA (1)...(19): siRNA sense strand
ggaacaguaauucuucuuu

SEQ ID NO: 577957 - RNA, 19 nt, Homo sapiens
  misc_RNA (1)...(19): siRNA sense strand
ccacuuagcagcaaugugu

SEQ ID NO: 577958 - RNA, 19 nt, Homo sapiens
  misc_RNA (1)...(19): siRNA sense strand
caaugagaauucuagaguu

SEQ ID NO: 577959 - RNA, 19 nt, Homo sapiens
  misc_RNA (1)...(19): siRNA sense strand
uaugagcaguuuagagauu

SEQ ID NO: 577960 - RNA, 19 nt, Homo sapiens
  misc_RNA (1)...(19): siRNA sense strand
gagcuuuccuacagaccua

SEQ ID NO: 577961 - RNA, 19 nt, Homo sapiens
  misc_RNA (1)...(19): siRNA sense strand
cggaauagaaauagaagua

SEQ ID NO: 577962 - RNA, 19 nt, Homo sapiens
  misc_RNA (1)...(19): siRNA sense strand
ucauugagacuguuuguuu

SEQ ID NO: 577963 - RNA, 19 nt, Homo sapiens
  misc_RNA (1)...(19): siRNA sense strand
ggccgaaagucuggaagua

SEQ ID NO: 577964 - RNA, 19 nt, Homo sapiens
  misc_RNA (1)...(19): siRNA sense strand
uuaaaguccugguugaaga

SEQ ID NO: 577965 - RNA, 19 nt, Homo sapiens
  misc_RNA (1)...(19): siRNA sense strand
ggucuccucucuccaccua

SEQ ID NO: 577966 - RNA, 19 nt, Homo sapiens
  misc_RNA (1)...(19): siRNA sense strand
gaaaacaacgccagaggua

SEQ ID NO: 577967 - RNA, 19 nt, Homo sapiens
  misc_RNA (1)...(19): siRNA sense strand
ucucugcuauuccagcuua

SEQ ID NO: 577968 - RNA, 19 nt, Homo sapiens
  misc_RNA (1)...(19): siRNA sense strand
ugaacucccuccagagcua

SEQ ID NO: 577969 - RNA, 19 nt, Homo sapiens
  misc_RNA (1)...(19): siRNA sense strand
caaguugucuguucuaucc

SEQ ID NO: 577970 - RNA, 19 nt, Homo sapiens
  misc_RNA (1)...(19): siRNA sense strand
accauuacaucucuguuua

SEQ ID NO: 577971 - RNA, 19 nt, Homo sapiens
  misc_RNA (1)...(19): siRNA sense strand
gaccugaagugaccauuac

SEQ ID NO: 577972 - RNA, 19 nt, Homo sapiens
  misc_RNA (1)...(19): siRNA sense strand
guacggaauagaaauagaa

SEQ ID NO: 577973 - RNA, 19 nt, Homo sapiens
  misc_RNA (1)...(19): siRNA sense strand
gaccauuacaucucuguuu

SEQ ID NO: 577974 - RNA, 19 nt, Homo sapiens
  misc_RNA (1)...(19): siRNA sense strand
ggugucuggugaacuuuaa

SEQ ID NO: 577975 - RNA, 19 nt, Homo sapiens
  misc_RNA (1)...(19): siRNA sense strand
agauagagaugcgcucaaa

SEQ ID NO: 577976 - RNA, 19 nt, Homo sapiens
  misc_RNA (1)...(19): siRNA sense strand
ggaaauaucaacagcaaaa

SEQ ID NO: 577977 - RNA, 19 nt, Homo sapiens
  misc_RNA (1)...(19): siRNA sense strand
gcauacaaauucuggaaaa

SEQ ID NO: 577978 - RNA, 19 nt, Homo sapiens
  misc_RNA (1)...(19): siRNA sense strand
ggaagaauggucaaguugu

SEQ ID NO: 577979 - RNA, 19 nt, Homo sapiens
  misc_RNA (1)...(19): siRNA sense strand
ggacgcagcuuuucucucu

SEQ ID NO: 577980 - RNA, 19 nt, Homo sapiens
  misc_RNA (1)...(19): siRNA sense strand
gcagucgucuccugugucu

SEQ ID NO: 577981 - RNA, 19 nt, Homo sapiens
  misc_RNA (1)...(19): siRNA sense strand
ccacagaaauucacaucac

SEQ ID NO: 577982 - RNA, 19 nt, Homo sapiens
  misc_RNA (1)...(19): siRNA sense strand
gaagugaccauuacaucuc

SEQ ID NO: 577983 - RNA, 19 nt, Homo sapiens
  misc_RNA (1)...(19): siRNA sense strand
gaaaaguggcauacaaauu

SEQ ID NO: 577984 - RNA, 19 nt, Homo sapiens
  misc_RNA (1)...(19): siRNA sense strand
gcaccucagggaacaguaa

SEQ ID NO: 577985 - RNA, 19 nt, Homo sapiens
  misc_RNA (1)...(19): siRNA sense strand
cagagguacuuccaucuuc

SEQ ID NO: 577986 - RNA, 19 nt, Homo sapiens
  misc_RNA (1)...(19): siRNA sense strand
ugaaaauacuggggaaaua

SEQ ID NO: 577987 - RNA, 19 nt, Homo sapiens
  misc_RNA (1)...(19): siRNA sense strand
cgggaagaauggucaaguu

SEQ ID NO: 577988 - RNA, 19 nt, Homo sapiens
  misc_RNA (1)...(19): siRNA sense strand
gaaauacaagcugaagaug

SEQ ID NO: 577989 - RNA, 19 nt, Homo sapiens
  misc_RNA (1)...(19): siRNA sense strand
gguggaagauguaaaugac

SEQ ID NO: 577990 - RNA, 19 nt, Homo sapiens
  misc_RNA (1)...(19): siRNA sense strand
ccaaguuuccuauagaaga

SEQ ID NO: 577991 - RNA, 19 nt, Homo sapiens
  misc_RNA (1)...(19): siRNA sense strand
aauacaagcugaagauggu

SEQ ID NO: 577992 - RNA, 19 nt, Homo sapiens
  misc_RNA (1)...(19): siRNA sense strand
gauuccaaguuuccuauag

SEQ ID NO: 577993 - RNA, 19 nt, Homo sapiens
  misc_RNA (1)...(19): siRNA sense strand
gggaagaauggucaaguug

SEQ ID NO: 577994 - RNA, 19 nt, Homo sapiens
  misc_RNA (1)...(19): siRNA sense strand
uggaagauguaaaugacaa

SEQ ID NO: 577995 - RNA, 19 nt, Homo sapiens
  misc_RNA (1)...(19): siRNA sense strand
ggagcacguuauccacuuc

SEQ ID NO: 577996 - RNA, 19 nt, Homo sapiens
  misc_RNA (1)...(19): siRNA sense strand
gcccaacuaugcagacaca

SEQ ID NO: 577997 - RNA, 19 nt, Homo sapiens
  misc_RNA (1)...(19): siRNA sense strand
gaccgagacuccgggaaga

SEQ ID NO: 577998 - RNA, 19 nt, Homo sapiens
  misc_RNA (1)...(19): siRNA sense strand
ucauuucgguggaagaugu

SEQ ID NO: 577999 - RNA, 19 nt, Homo sapiens
  misc_RNA (1)...(19): siRNA sense strand
aaacuguacggaauagaaa

SEQ ID NO: 578000 - RNA, 19 nt, Homo sapiens
  misc_RNA (1)...(19): siRNA sense strand
gcucugugcuccuuugacu

SEQ ID NO: 578001 - RNA, 19 nt, Homo sapiens
  misc_RNA (1)...(19): siRNA sense strand
gaccugggcagucuucaga

SEQ ID NO: 578002 - RNA, 19 nt, Homo sapiens
  misc_RNA (1)...(19): siRNA sense strand
ccagcuccgcggaagauua

SEQ ID NO: 578003 - RNA, 19 nt, Homo sapiens
  misc_RNA (1)...(19): siRNA sense strand
cgcaucgucucuagaggua

SEQ ID NO: 578004 - RNA, 19 nt, Homo sapiens
  misc_RNA (1)...(19): siRNA sense strand
gugcccaccucacacuuug

SEQ ID NO: 578005 - RNA, 19 nt, Homo sapiens
  misc_RNA (1)...(19): siRNA sense strand
gcauccaugugacaguguu

SEQ ID NO: 578006 - RNA, 19 nt, Homo sapiens
  misc_RNA (1)...(19): siRNA sense strand
gaccuauucucaggaguuc

SEQ ID NO: 578007 - RNA, 19 nt, Homo sapiens
  misc_RNA (1)...(19): siRNA sense strand
cuggaggccucagaccuua

SEQ ID NO: 578008 - RNA, 19 nt, Homo sapiens
  misc_RNA (1)...(19): siRNA sense strand
cuaugucucuauuaacuca

SEQ ID NO: 578009 - RNA, 19 nt, Homo sapiens
  misc_RNA (1)...(19): siRNA sense strand
gguugaagacagagugaaa

SEQ ID NO: 578010 - RNA, 19 nt, Homo sapiens
  misc_RNA (1)...(19): siRNA sense strand
gguucgagcuuuccuacag

SEQ ID NO: 578011 - RNA, 19 nt, Homo sapiens
  misc_RNA (1)...(19): siRNA sense strand
gaaaauacuggggaaauau

SEQ ID NO: 578012 - RNA, 19 nt, Homo sapiens
  misc_RNA (1)...(19): siRNA sense strand
cgaguuaaaguccuugaga

SEQ ID NO: 578013 - RNA, 19 nt, Homo sapiens
  misc_RNA (1)...(19): siRNA sense strand
caugugacaguguuggaua

SEQ ID NO: 578014 - RNA, 19 nt, Homo sapiens
  misc_RNA (1)...(19): siRNA sense strand
gccgaaagucuggaaguaa

SEQ ID NO: 578015 - RNA, 19 nt, Homo sapiens
  misc_RNA (1)...(19): siRNA sense strand
caaguuuccuauagaagac

SEQ ID NO: 578016 - RNA, 19 nt, Homo sapiens
  misc_RNA (1)...(19): siRNA sense strand
guucgagcuuuccuacaga

SEQ ID NO: 578017 - RNA, 19 nt, Homo sapiens
  misc_RNA (1)...(19): siRNA sense strand
acuaugagcaguuuagaga

SEQ ID NO: 578018 - RNA, 19 nt, Homo sapiens
  misc_RNA (1)...(19): siRNA sense strand
uuaaaguccuugagaacgu

SEQ ID NO: 578019 - RNA, 19 nt, Homo sapiens
  misc_RNA (1)...(19): siRNA sense strand
ucaacggauuuaccgaguu

SEQ ID NO: 578020 - RNA, 19 nt, Homo sapiens
  misc_RNA (1)...(19): siRNA sense strand
agaccugaagugaccauua

SEQ ID NO: 578021 - RNA, 19 nt, Homo sapiens
  misc_RNA (1)...(19): siRNA sense strand
aaaacaaucucugcuauuc

SEQ ID NO: 578022 - RNA, 19 nt, Homo sapiens
  misc_RNA (1)...(19): siRNA sense strand
acagugcgcauccauguga

SEQ ID NO: 578023 - RNA, 19 nt, Homo sapiens
  misc_RNA (1)...(19): siRNA sense strand
gaaugacaaugccccagaa

SEQ ID NO: 578024 - RNA, 19 nt, Homo sapiens
  misc_RNA (1)...(19): siRNA sense strand
ucuccgugauugccuauga

SEQ ID NO: 578025 - RNA, 19 nt, Homo sapiens
  misc_RNA (1)...(19): siRNA sense strand
ucacaucacccugcaagug

SEQ ID NO: 578026 - RNA, 19 nt, Homo sapiens
  misc_RNA (1)...(19): siRNA sense strand
ucagggaacaguaauucuu

SEQ ID NO: 578027 - RNA, 19 nt, Homo sapiens
  misc_RNA (1)...(19): siRNA sense strand
gugaaacuguacggaauag

SEQ ID NO: 578028 - RNA, 19 nt, Homo sapiens
  misc_RNA (1)...(19): siRNA sense strand
gcuauuccagcuuaaugaa

SEQ ID NO: 578029 - RNA, 19 nt, Homo sapiens
  misc_RNA (1)...(19): siRNA sense strand
ggaagauuaguccugcuau

SEQ ID NO: 578030 - RNA, 19 nt, Homo sapiens
  misc_RNA (1)...(19): siRNA sense strand
ggucaaguugucuguucua

SEQ ID NO: 578031 - RNA, 19 nt, Homo sapiens
  misc_RNA (1)...(19): siRNA sense strand
caaggaagagucaccugau

SEQ ID NO: 578032 - RNA, 19 nt, Homo sapiens
  misc_RNA (1)...(19): siRNA sense strand
uaauccaccugcuuucucu

SEQ ID NO: 578033 - RNA, 19 nt, Homo sapiens
  misc_RNA (1)...(19): siRNA sense strand
uccaggagaaucuaucuuu

SEQ ID NO: 578034 - RNA, 19 nt, Homo sapiens
  misc_RNA (1)...(19): siRNA sense strand
ggggaaauaucaacagcaa

SEQ ID NO: 578035 - RNA, 19 nt, Homo sapiens
  misc_RNA (1)...(19): siRNA sense strand
caggagaaucuaucuuuua

SEQ ID NO: 578036 - RNA, 19 nt, Homo sapiens
  misc_RNA (1)...(19): siRNA sense strand
ccaggagaaucuaucuuuu

SEQ ID NO: 578037 - RNA, 19 nt, Homo sapiens
  misc_RNA (1)...(19): siRNA sense strand
agagguaggacgcagcuuu

SEQ ID NO: 578038 - RNA, 19 nt, Homo sapiens
  misc_RNA (1)...(19): siRNA sense strand
ggauugaaaggguggacaa

SEQ ID NO: 578039 - RNA, 19 nt, Homo sapiens
  misc_RNA (1)...(19): siRNA sense strand
aaaguggcauacaaauucu

SEQ ID NO: 578040 - RNA, 19 nt, Homo sapiens
  misc_RNA (1)...(19): siRNA sense strand
ccagagguacuuccaucuu

SEQ ID NO: 578041 - RNA, 19 nt, Homo sapiens
  misc_RNA (1)...(19): siRNA sense strand
caacggauuuaccgaguua

SEQ ID NO: 578042 - RNA, 19 nt, Homo sapiens
  misc_RNA (1)...(19): siRNA sense strand
gcaagugacugacaucaau

SEQ ID NO: 578043 - RNA, 19 nt, Homo sapiens
  misc_RNA (1)...(19): siRNA sense strand
ccaccuaugucucuauuaa

SEQ ID NO: 578044 - RNA, 19 nt, Homo sapiens
  misc_RNA (1)...(19): siRNA sense strand
gaagaauggucaaguuguc

SEQ ID NO: 578045 - RNA, 19 nt, Homo sapiens
  misc_RNA (1)...(19): siRNA sense strand
gaagauuaguccugcuaug

SEQ ID NO: 578046 - RNA, 19 nt, Homo sapiens
  misc_RNA (1)...(19): siRNA sense strand
ggaaauacaagcugaagau

SEQ ID NO: 578047 - RNA, 19 nt, Homo sapiens
  misc_RNA (1)...(19): siRNA sense strand
gaaacuguacggaauagaa

SEQ ID NO: 578048 - RNA, 19 nt, Homo sapiens
  misc_RNA (1)...(19): siRNA sense strand
ggacaaaagugcucauuuc

SEQ ID NO: 578049 - RNA, 19 nt, Homo sapiens
  misc_RNA (1)...(19): siRNA sense strand
ccucagaccuuacccucua

SEQ ID NO: 578050 - RNA, 19 nt, Homo sapiens
  misc_RNA (1)...(19): siRNA sense strand
ccgaaagucuggaaguaaa

SEQ ID NO: 578051 - RNA, 19 nt, Homo sapiens
  misc_RNA (1)...(19): siRNA sense strand
gaguuaaaguccuugagaa

SEQ ID NO: 578052 - RNA, 19 nt, Homo sapiens
  misc_RNA (1)...(19): siRNA sense strand
ugacaguguuggauacaaa

SEQ ID NO: 578053 - RNA, 19 nt, Homo sapiens
  misc_RNA (1)...(19): siRNA sense strand
gcaaugagaauucuagagu

SEQ ID NO: 578054 - RNA, 19 nt, Homo sapiens
  misc_RNA (1)...(19): siRNA sense strand
gagugaaacuguacggaau

SEQ ID NO: 578055 - RNA, 19 nt, Homo sapiens
  misc_RNA (1)...(19): siRNA sense strand
gacaauagaccugaaguga

SEQ ID NO: 578056 - RNA, 19 nt, Homo sapiens
  misc_RNA (1)...(19): siRNA sense strand
ggaacaguaauucuucuuu

SEQ ID NO: 578057 - RNA, 19 nt, Homo sapiens
  misc_RNA (1)...(19): siRNA sense strand
ccacuuagcagcaaugugu

SEQ ID NO: 578058 - RNA, 19 nt, Homo sapiens
  misc_RNA (1)...(19): siRNA sense strand
caaugagaauucuagaguu

SEQ ID NO: 578059 - RNA, 19 nt, Homo sapiens
  misc_RNA (1)...(19): siRNA sense strand
uaugagcaguuuagagauu

SEQ ID NO: 578060 - RNA, 19 nt, Homo sapiens
  misc_RNA (1)...(19): siRNA sense strand
gagcuuuccuacagaccua

SEQ ID NO: 578061 - RNA, 19 nt, Homo sapiens
  misc_RNA (1)...(19): siRNA sense strand
cggaauagaaauagaagua

SEQ ID NO: 578062 - RNA, 19 nt, Homo sapiens
  misc_RNA (1)...(19): siRNA sense strand
ucauugagacuguuuguuu

SEQ ID NO: 578063 - RNA, 19 nt, Homo sapiens
  misc_RNA (1)...(19): siRNA sense strand
ggccgaaagucuggaagua

SEQ ID NO: 578064 - RNA, 19 nt, Homo sapiens
  misc_RNA (1)...(19): siRNA sense strand
uuaaaguccugguugaaga

SEQ ID NO: 578065 - RNA, 19 nt, Homo sapiens
  misc_RNA (1)...(19): siRNA sense strand
ggucuccucucuccaccua

SEQ ID NO: 578066 - RNA, 19 nt, Homo sapiens
  misc_RNA (1)...(19): siRNA sense strand
gaaaacaacgccagaggua

SEQ ID NO: 578067 - RNA, 19 nt, Homo sapiens
  misc_RNA (1)...(19): siRNA sense strand
ucucugcuauuccagcuua

SEQ ID NO: 578068 - RNA, 19 nt, Homo sapiens
  misc_RNA (1)...(19): siRNA sense strand
ugaacucccuccagagcua

SEQ ID NO: 578069 - RNA, 19 nt, Homo sapiens
  misc_RNA (1)...(19): siRNA sense strand
caaguugucuguucuaucc

SEQ ID NO: 578070 - RNA, 19 nt, Homo sapiens
  misc_RNA (1)...(19): siRNA sense strand
accauuacaucucuguuua

SEQ ID NO: 578071 - RNA, 19 nt, Homo sapiens
  misc_RNA (1)...(19): siRNA sense strand
gaccugaagugaccauuac

SEQ ID NO: 578072 - RNA, 19 nt, Homo sapiens
  misc_RNA (1)...(19): siRNA sense strand
guacggaauagaaauagaa

SEQ ID NO: 578073 - RNA, 19 nt, Homo sapiens
  misc_RNA (1)...(19): siRNA sense strand
gaccauuacaucucuguuu

SEQ ID NO: 578074 - RNA, 19 nt, Homo sapiens
  misc_RNA (1)...(19): siRNA sense strand
ggugucuggugaacuuuaa

SEQ ID NO: 578075 - RNA, 19 nt, Homo sapiens
  misc_RNA (1)...(19): siRNA sense strand
agauagagaugcgcucaaa

SEQ ID NO: 578076 - RNA, 19 nt, Homo sapiens
  misc_RNA (1)...(19): siRNA sense strand
ggaaauaucaacagcaaaa

SEQ ID NO: 578077 - RNA, 19 nt, Homo sapiens
  misc_RNA (1)...(19): siRNA sense strand
gcauacaaauucuggaaaa

SEQ ID NO: 578078 - RNA, 19 nt, Homo sapiens
  misc_RNA (1)...(19): siRNA sense strand
ggaagaauggucaaguugu

SEQ ID NO: 578079 - RNA, 19 nt, Homo sapiens
  misc_RNA (1)...(19): siRNA sense strand
ggacgcagcuuuucucucu

SEQ ID NO: 578080 - RNA, 19 nt, Homo sapiens
  misc_RNA (1)...(19): siRNA sense strand
gcagucgucuccugugucu

SEQ ID NO: 578081 - RNA, 19 nt, Homo sapiens
  misc_RNA (1)...(19): siRNA sense strand
ccacagaaauucacaucac

SEQ ID NO: 578082 - RNA, 19 nt, Homo sapiens
  misc_RNA (1)...(19): siRNA sense strand
gaagugaccauuacaucuc

SEQ ID NO: 578083 - RNA, 19 nt, Homo sapiens
  misc_RNA (1)...(19): siRNA sense strand
gaaaaguggcauacaaauu

SEQ ID NO: 578084 - RNA, 19 nt, Homo sapiens
  misc_RNA (1)...(19): siRNA sense strand
gcaccucagggaacaguaa

SEQ ID NO: 578085 - RNA, 19 nt, Homo sapiens
  misc_RNA (1)...(19): siRNA sense strand
cagagguacuuccaucuuc

SEQ ID NO: 578086 - RNA, 19 nt, Homo sapiens
  misc_RNA (1)...(19): siRNA sense strand
ugaaaauacuggggaaaua

SEQ ID NO: 578087 - RNA, 19 nt, Homo sapiens
  misc_RNA (1)...(19): siRNA sense strand
cgggaagaauggucaaguu

SEQ ID NO: 578088 - RNA, 19 nt, Homo sapiens
  misc_RNA (1)...(19): siRNA sense strand
gaaauacaagcugaagaug

SEQ ID NO: 578089 - RNA, 19 nt, Homo sapiens
  misc_RNA (1)...(19): siRNA sense strand
gguggaagauguaaaugac

SEQ ID NO: 578090 - RNA, 19 nt, Homo sapiens
  misc_RNA (1)...(19): siRNA sense strand
ccaaguuuccuauagaaga

SEQ ID NO: 578091 - RNA, 19 nt, Homo sapiens
  misc_RNA (1)...(19): siRNA sense strand
aauacaagcugaagauggu

SEQ ID NO: 578092 - RNA, 19 nt, Homo sapiens
  misc_RNA (1)...(19): siRNA sense strand
gauuccaaguuuccuauag

SEQ ID NO: 578093 - RNA, 19 nt, Homo sapiens
  misc_RNA (1)...(19): siRNA sense strand
gggaagaauggucaaguug

SEQ ID NO: 578094 - RNA, 19 nt, Homo sapiens
  misc_RNA (1)...(19): siRNA sense strand
uggaagauguaaaugacaa

SEQ ID NO: 578095 - RNA, 19 nt, Homo sapiens
  misc_RNA (1)...(19): siRNA sense strand
ggagcacguuauccacuuc

SEQ ID NO: 578096 - RNA, 19 nt, Homo sapiens
  misc_RNA (1)...(19): siRNA sense strand
gcccaacuaugcagacaca

SEQ ID NO: 578097 - RNA, 19 nt, Homo sapiens
  misc_RNA (1)...(19): siRNA sense strand
gaccgagacuccgggaaga

SEQ ID NO: 578098 - RNA, 19 nt, Homo sapiens
  misc_RNA (1)...(19): siRNA sense strand
ucauuucgguggaagaugu

SEQ ID NO: 578099 - RNA, 19 nt, Homo sapiens
  misc_RNA (1)...(19): siRNA sense strand
aaacuguacggaauagaaa

SEQ ID NO: 578100 - RNA, 19 nt, Homo sapiens
  misc_RNA (1)...(19): siRNA sense strand
gcucugugcuccuuugacu

SEQ ID NO: 578101 - RNA, 19 nt, Homo sapiens
  misc_RNA (1)...(19): siRNA sense strand
gaccugggcagucuucaga

SEQ ID NO: 578102 - RNA, 19 nt, Homo sapiens
  misc_RNA (1)...(19): siRNA sense strand
ccagcuccgcggaagauua

SEQ ID NO: 578103 - RNA, 19 nt, Homo sapiens
  misc_RNA (1)...(19): siRNA sense strand
cgcaucgucucuagaggua

SEQ ID NO: 578104 - RNA, 19 nt, Homo sapiens
  misc_RNA (1)...(19): siRNA sense strand
gugcccaccucacacuuug

SEQ ID NO: 578105 - RNA, 19 nt, Homo sapiens
  misc_RNA (1)...(19): siRNA sense strand
gcauccaugugacaguguu

SEQ ID NO: 578106 - RNA, 19 nt, Homo sapiens
  misc_RNA (1)...(19): siRNA sense strand
gaccuauucucaggaguuc

SEQ ID NO: 578107 - RNA, 19 nt, Homo sapiens
  misc_RNA (1)...(19): siRNA sense strand
cuggaggccucagaccuua

SEQ ID NO: 578108 - RNA, 19 nt, Homo sapiens
  misc_RNA (1)...(19): siRNA sense strand
cuaugucucuauuaacuca

SEQ ID NO: 578109 - RNA, 19 nt, Homo sapiens
  misc_RNA (1)...(19): siRNA sense strand
gguugaagacagagugaaa

SEQ ID NO: 578110 - RNA, 19 nt, Homo sapiens
  misc_RNA (1)...(19): siRNA sense strand
gguucgagcuuuccuacag

SEQ ID NO: 578111 - RNA, 19 nt, Homo sapiens
  misc_RNA (1)...(19): siRNA sense strand
gaaaauacuggggaaauau

SEQ ID NO: 578112 - RNA, 19 nt, Homo sapiens
  misc_RNA (1)...(19): siRNA sense strand
cgaguuaaaguccuugaga

SEQ ID NO: 578113 - RNA, 19 nt, Homo sapiens
  misc_RNA (1)...(19): siRNA sense strand
caugugacaguguuggaua

SEQ ID NO: 578114 - RNA, 19 nt, Homo sapiens
  misc_RNA (1)...(19): siRNA sense strand
gccgaaagucuggaaguaa

SEQ ID NO: 578115 - RNA, 19 nt, Homo sapiens
  misc_RNA (1)...(19): siRNA sense strand
caaguuuccuauagaagac

SEQ ID NO: 578116 - RNA, 19 nt, Homo sapiens
  misc_RNA (1)...(19): siRNA sense strand
guucgagcuuuccuacaga

SEQ ID NO: 578117 - RNA, 19 nt, Homo sapiens
  misc_RNA (1)...(19): siRNA sense strand
acuaugagcaguuuagaga

SEQ ID NO: 578118 - RNA, 19 nt, Homo sapiens
  misc_RNA (1)...(19): siRNA sense strand
uuaaaguccuugagaacgu

SEQ ID NO: 578119 - RNA, 19 nt, Homo sapiens
  misc_RNA (1)...(19): siRNA sense strand
ucaacggauuuaccgaguu

SEQ ID NO: 578120 - RNA, 19 nt, Homo sapiens
  misc_RNA (1)...(19): siRNA sense strand
agaccugaagugaccauua

SEQ ID NO: 578121 - RNA, 19 nt, Homo sapiens
  misc_RNA (1)...(19): siRNA sense strand
aaaacaaucucugcuauuc

SEQ ID NO: 578122 - RNA, 19 nt, Homo sapiens
  misc_RNA (1)...(19): siRNA sense strand
acagugcgcauccauguga

SEQ ID NO: 578123 - RNA, 19 nt, Homo sapiens
  misc_RNA (1)...(19): siRNA sense strand
gaaugacaaugccccagaa

SEQ ID NO: 578124 - RNA, 19 nt, Homo sapiens
  misc_RNA (1)...(19): siRNA sense strand
ucuccgugauugccuauga

SEQ ID NO: 578125 - RNA, 19 nt, Homo sapiens
  misc_RNA (1)...(19): siRNA sense strand
ucacaucacccugcaagug

SEQ ID NO: 578126 - RNA, 19 nt, Homo sapiens
  misc_RNA (1)...(19): siRNA sense strand
ucagggaacaguaauucuu

SEQ ID NO: 578127 - RNA, 19 nt, Homo sapiens
  misc_RNA (1)...(19): siRNA sense strand
gugaaacuguacggaauag

SEQ ID NO: 578128 - RNA, 19 nt, Homo sapiens
  misc_RNA (1)...(19): siRNA sense strand
gcuauuccagcuuaaugaa

SEQ ID NO: 578129 - RNA, 19 nt, Homo sapiens
  misc_RNA (1)...(19): siRNA sense strand
ggaagauuaguccugcuau

SEQ ID NO: 578130 - RNA, 19 nt, Homo sapiens
  misc_RNA (1)...(19): siRNA sense strand
ggucaaguugucuguucua

SEQ ID NO: 578131 - RNA, 19 nt, Homo sapiens
  misc_RNA (1)...(19): siRNA sense strand
caaggaagagucaccugau

SEQ ID NO: 578132 - RNA, 19 nt, Homo sapiens
  misc_RNA (1)...(19): siRNA sense strand
uaauccaccugcuuucucu

SEQ ID NO: 578133 - RNA, 19 nt, Homo sapiens
  misc_RNA (1)...(19): siRNA sense strand
uccaggagaaucuaucuuu

SEQ ID NO: 578134 - RNA, 19 nt, Homo sapiens
  misc_RNA (1)...(19): siRNA sense strand
ggggaaauaucaacagcaa

SEQ ID NO: 578135 - RNA, 19 nt, Homo sapiens
  misc_RNA (1)...(19): siRNA sense strand
caggagaaucuaucuuuua

SEQ ID NO: 578136 - RNA, 19 nt, Homo sapiens
  misc_RNA (1)...(19): siRNA sense strand
ccaggagaaucuaucuuuu

SEQ ID NO: 578137 - RNA, 19 nt, Homo sapiens
  misc_RNA (1)...(19): siRNA sense strand
agagguaggacgcagcuuu

SEQ ID NO: 578138 - RNA, 19 nt, Homo sapiens
  misc_RNA (1)...(19): siRNA sense strand
ggauugaaaggguggacaa

SEQ ID NO: 578139 - RNA, 19 nt, Homo sapiens
  misc_RNA (1)...(19): siRNA sense strand
aaaguggcauacaaauucu

SEQ ID NO: 578140 - RNA, 19 nt, Homo sapiens
  misc_RNA (1)...(19): siRNA sense strand
ccagagguacuuccaucuu

SEQ ID NO: 578141 - RNA, 19 nt, Homo sapiens
  misc_RNA (1)...(19): siRNA sense strand
gaaacacucucuuuguaua

SEQ ID NO: 578142 - RNA, 19 nt, Homo sapiens
  misc_RNA (1)...(19): siRNA sense strand
gaaacugccuucuaugaaa

SEQ ID NO: 578143 - RNA, 19 nt, Homo sapiens
  misc_RNA (1)...(19): siRNA sense strand
ggagaaauaucaacuuuag

SEQ ID NO: 578144 - RNA, 19 nt, Homo sapiens
  misc_RNA (1)...(19): siRNA sense strand
gggaaacacucucuuugua

SEQ ID NO: 578145 - RNA, 19 nt, Homo sapiens
  misc_RNA (1)...(19): siRNA sense strand
ggacagagaugcccucaag

SEQ ID NO: 578146 - RNA, 19 nt, Homo sapiens
  misc_RNA (1)...(19): siRNA sense strand
gaacuacaacuaagaguga

SEQ ID NO: 578147 - RNA, 19 nt, Homo sapiens
  misc_RNA (1)...(19): siRNA sense strand
ugucauaccuccugcuuaa

SEQ ID NO: 578148 - RNA, 19 nt, Homo sapiens
  misc_RNA (1)...(19): siRNA sense strand
caggagaaauaucaacuuu

SEQ ID NO: 578149 - RNA, 19 nt, Homo sapiens
  misc_RNA (1)...(19): siRNA sense strand
cagggaaacucacauauuc

SEQ ID NO: 578150 - RNA, 19 nt, Homo sapiens
  misc_RNA (1)...(19): siRNA sense strand
acuaugacgucuuuaagua

SEQ ID NO: 578151 - RNA, 19 nt, Homo sapiens
  misc_RNA (1)...(19): siRNA sense strand
ugacaacguuccaagauuc

SEQ ID NO: 578152 - RNA, 19 nt, Homo sapiens
  misc_RNA (1)...(19): siRNA sense strand
ggaaacacucucuuuguau

SEQ ID NO: 578153 - RNA, 19 nt, Homo sapiens
  misc_RNA (1)...(19): siRNA sense strand
acuaugaccucacguugua

SEQ ID NO: 578154 - RNA, 19 nt, Homo sapiens
  misc_RNA (1)...(19): siRNA sense strand
gaucacaguuuuagaugua

SEQ ID NO: 578155 - RNA, 19 nt, Homo sapiens
  misc_RNA (1)...(19): siRNA sense strand
cgacgguccuuacaacuau

SEQ ID NO: 578156 - RNA, 19 nt, Homo sapiens
  misc_RNA (1)...(19): siRNA sense strand
gaacucgcuuacaggagaa

SEQ ID NO: 578157 - RNA, 19 nt, Homo sapiens
  misc_RNA (1)...(19): siRNA sense strand
caucugaacucgcuuacag

SEQ ID NO: 578158 - RNA, 19 nt, Homo sapiens
  misc_RNA (1)...(19): siRNA sense strand
ugauaaugcuccagaagug

SEQ ID NO: 578159 - RNA, 19 nt, Homo sapiens
  misc_RNA (1)...(19): siRNA sense strand
cuauagacguggaaauaau

SEQ ID NO: 578160 - RNA, 19 nt, Homo sapiens
  misc_RNA (1)...(19): siRNA sense strand
ugagagaacuacaacuaag

SEQ ID NO: 578161 - RNA, 19 nt, Homo sapiens
  misc_RNA (1)...(19): siRNA sense strand
gaagugacauauucuuuuc

SEQ ID NO: 578162 - RNA, 19 nt, Homo sapiens
  misc_RNA (1)...(19): siRNA sense strand
ugacagugguggaugugaa

SEQ ID NO: 578163 - RNA, 19 nt, Homo sapiens
  misc_RNA (1)...(19): siRNA sense strand
gggaagugacauauucuuu

SEQ ID NO: 578164 - RNA, 19 nt, Homo sapiens
  misc_RNA (1)...(19): siRNA sense strand
cgcaucaucuccagaggua

SEQ ID NO: 578165 - RNA, 19 nt, Homo sapiens
  misc_RNA (1)...(19): siRNA sense strand
gagagaacuacaacuaaga

SEQ ID NO: 578166 - RNA, 19 nt, Homo sapiens
  misc_RNA (1)...(19): siRNA sense strand
gauaaugcccagaucacuu

SEQ ID NO: 578167 - RNA, 19 nt, Homo sapiens
  misc_RNA (1)...(19): siRNA sense strand
ccagggaaacucacauauu

SEQ ID NO: 578168 - RNA, 19 nt, Homo sapiens
  misc_RNA (1)...(19): siRNA sense strand
aaacugccuucuaugaaau

SEQ ID NO: 578169 - RNA, 19 nt, Homo sapiens
  misc_RNA (1)...(19): siRNA sense strand
ccacacgccugucuucucu

SEQ ID NO: 578170 - RNA, 19 nt, Homo sapiens
  misc_RNA (1)...(19): siRNA sense strand
ggacagucauugcucuuuu

SEQ ID NO: 578171 - RNA, 19 nt, Homo sapiens
  misc_RNA (1)...(19): siRNA sense strand
aaagaaaaccugccaagua

SEQ ID NO: 578172 - RNA, 19 nt, Homo sapiens
  misc_RNA (1)...(19): siRNA sense strand
uaagagugacugcacauga

SEQ ID NO: 578173 - RNA, 19 nt, Homo sapiens
  misc_RNA (1)...(19): siRNA sense strand
auaaugcccagaucacuua

SEQ ID NO: 578174 - RNA, 19 nt, Homo sapiens
  misc_RNA (1)...(19): siRNA sense strand
caagacugcucacgguaca

SEQ ID NO: 578175 - RNA, 19 nt, Homo sapiens
  misc_RNA (1)...(19): siRNA sense strand
uggcagacaccaacgauaa

SEQ ID NO: 578176 - RNA, 19 nt, Homo sapiens
  misc_RNA (1)...(19): siRNA sense strand
uguauaacaucacacugaa

SEQ ID NO: 578177 - RNA, 19 nt, Homo sapiens
  misc_RNA (1)...(19): siRNA sense strand
gacggaagaaauaaaugua

SEQ ID NO: 578178 - RNA, 19 nt, Homo sapiens
  misc_RNA (1)...(19): siRNA sense strand
ggacuacagaggauucuuc

SEQ ID NO: 578179 - RNA, 19 nt, Homo sapiens
  misc_RNA (1)...(19): siRNA sense strand
guagcucaaucccugaaga

SEQ ID NO: 578180 - RNA, 19 nt, Homo sapiens
  misc_RNA (1)...(19): siRNA sense strand
ggauagaccgggaagagau

SEQ ID NO: 578181 - RNA, 19 nt, Homo sapiens
  misc_RNA (1)...(19): siRNA sense strand
cuacaucgcugagaacaac

SEQ ID NO: 578182 - RNA, 19 nt, Homo sapiens
  misc_RNA (1)...(19): siRNA sense strand
gacguggaaauaauagaua

SEQ ID NO: 578183 - RNA, 19 nt, Homo sapiens
  misc_RNA (1)...(19): siRNA sense strand
aagaaaaccugccaaguau

SEQ ID NO: 578184 - RNA, 19 nt, Homo sapiens
  misc_RNA (1)...(19): siRNA sense strand
gcuaacauccguagauuuu

SEQ ID NO: 578185 - RNA, 19 nt, Homo sapiens
  misc_RNA (1)...(19): siRNA sense strand
gcagaccuauucccaugag

SEQ ID NO: 578186 - RNA, 19 nt, Homo sapiens
  misc_RNA (1)...(19): siRNA sense strand
cuccuaaacuuccaaagau

SEQ ID NO: 578187 - RNA, 19 nt, Homo sapiens
  misc_RNA (1)...(19): siRNA sense strand
ggaagugacauauucuuuu

SEQ ID NO: 578188 - RNA, 19 nt, Homo sapiens
  misc_RNA (1)...(19): siRNA sense strand
caggagagcugugagaaaa

SEQ ID NO: 578189 - RNA, 19 nt, Homo sapiens
  misc_RNA (1)...(19): siRNA sense strand
gggcaggacguauucucua

SEQ ID NO: 578190 - RNA, 19 nt, Homo sapiens
  misc_RNA (1)...(19): siRNA sense strand
gauaaugcuccagaaguga

SEQ ID NO: 578191 - RNA, 19 nt, Homo sapiens
  misc_RNA (1)...(19): siRNA sense strand
gggcuccaguguccuccua

SEQ ID NO: 578192 - RNA, 19 nt, Homo sapiens
  misc_RNA (1)...(19): siRNA sense strand
ccacgacagugaggauaau

SEQ ID NO: 578193 - RNA, 19 nt, Homo sapiens
  misc_RNA (1)...(19): siRNA sense strand
gaaaaccugccaaguauuc

SEQ ID NO: 578194 - RNA, 19 nt, Homo sapiens
  misc_RNA (1)...(19): siRNA sense strand
ugggagacaucgccaagga

SEQ ID NO: 578195 - RNA, 19 nt, Homo sapiens
  misc_RNA (1)...(19): siRNA sense strand
cagcgagccaggacucuuu

SEQ ID NO: 578196 - RNA, 19 nt, Homo sapiens
  misc_RNA (1)...(19): siRNA sense strand
gcuuacaggagaaauauca

SEQ ID NO: 578197 - RNA, 19 nt, Homo sapiens
  misc_RNA (1)...(19): siRNA sense strand
aaacucacauauucaugca

SEQ ID NO: 578198 - RNA, 19 nt, Homo sapiens
  misc_RNA (1)...(19): siRNA sense strand
aagugacuaugacgucuuu

SEQ ID NO: 578199 - RNA, 19 nt, Homo sapiens
  misc_RNA (1)...(19): siRNA sense strand
gaggauaaugcccagauca

SEQ ID NO: 578200 - RNA, 19 nt, Homo sapiens
  misc_RNA (1)...(19): siRNA sense strand
ccuauagacguggaaauaa

SEQ ID NO: 578201 - RNA, 19 nt, Homo sapiens
  misc_RNA (1)...(19): siRNA sense strand
ggaaacucacauauucaug

SEQ ID NO: 578202 - RNA, 19 nt, Homo sapiens
  misc_RNA (1)...(19): siRNA sense strand
ugacggaagaaauaaaugu

SEQ ID NO: 578203 - RNA, 19 nt, Homo sapiens
  misc_RNA (1)...(19): siRNA sense strand
ccaggagagcugugagaaa

SEQ ID NO: 578204 - RNA, 19 nt, Homo sapiens
  misc_RNA (1)...(19): siRNA sense strand
gugacuaugacgucuuuaa

SEQ ID NO: 578205 - RNA, 19 nt, Homo sapiens
  misc_RNA (1)...(19): siRNA sense strand
gaagugacuaugacgucuu

SEQ ID NO: 578206 - RNA, 19 nt, Homo sapiens
  misc_RNA (1)...(19): siRNA sense strand
gcucaagaugguccuggua

SEQ ID NO: 578207 - RNA, 19 nt, Homo sapiens
  misc_RNA (1)...(19): siRNA sense strand
gggaaacucacauauucau

SEQ ID NO: 578208 - RNA, 19 nt, Homo sapiens
  misc_RNA (1)...(19): siRNA sense strand
uaacauccguagauuuuca

SEQ ID NO: 578209 - RNA, 19 nt, Homo sapiens
  misc_RNA (1)...(19): siRNA sense strand
ccaguguccuccuaugucu

SEQ ID NO: 578210 - RNA, 19 nt, Homo sapiens
  misc_RNA (1)...(19): siRNA sense strand
aaaugauaaugcuccagaa

SEQ ID NO: 578211 - RNA, 19 nt, Homo sapiens
  misc_RNA (1)...(19): siRNA sense strand
uguacgcgcugcaauccuu

SEQ ID NO: 578212 - RNA, 19 nt, Homo sapiens
  misc_RNA (1)...(19): siRNA sense strand
cacaggaccacgacaguga

SEQ ID NO: 578213 - RNA, 19 nt, Homo sapiens
  misc_RNA (1)...(19): siRNA sense strand
gaccugcaccauuccagaa

SEQ ID NO: 578214 - RNA, 19 nt, Homo sapiens
  misc_RNA (1)...(19): siRNA sense strand
gcuccagaagugacuauga

SEQ ID NO: 578215 - RNA, 19 nt, Homo sapiens
  misc_RNA (1)...(19): siRNA sense strand
cccuauagacguggaaaua

SEQ ID NO: 578216 - RNA, 19 nt, Homo sapiens
  misc_RNA (1)...(19): siRNA sense strand
agagguaggacgcagcuuu

SEQ ID NO: 578217 - RNA, 19 nt, Homo sapiens
  misc_RNA (1)...(19): siRNA sense strand
gcuccaguguccuccuaug

SEQ ID NO: 578218 - RNA, 19 nt, Homo sapiens
  misc_RNA (1)...(19): siRNA sense strand
ggcaggacguauucucuac

SEQ ID NO: 578219 - RNA, 19 nt, Homo sapiens
  misc_RNA (1)...(19): siRNA sense strand
ucaagaugguccugguagu

SEQ ID NO: 578220 - RNA, 19 nt, Homo sapiens
  misc_RNA (1)...(19): siRNA sense strand
cagucuacaucgcugagaa

SEQ ID NO: 578221 - RNA, 19 nt, Homo sapiens
  misc_RNA (1)...(19): siRNA sense strand
uauaacaucacacugaaag

SEQ ID NO: 578222 - RNA, 19 nt, Homo sapiens
  misc_RNA (1)...(19): siRNA sense strand
cucaaucccugaagacaca

SEQ ID NO: 578223 - RNA, 19 nt, Homo sapiens
  misc_RNA (1)...(19): siRNA sense strand
gggguucgguuuccguuaa

SEQ ID NO: 578224 - RNA, 19 nt, Homo sapiens
  misc_RNA (1)...(19): siRNA sense strand
uugcuaacauccguagauu

SEQ ID NO: 578225 - RNA, 19 nt, Homo sapiens
  misc_RNA (1)...(19): siRNA sense strand
guccagggaaacucacaua

SEQ ID NO: 578226 - RNA, 19 nt, Homo sapiens
  misc_RNA (1)...(19): siRNA sense strand
guauaacaucacacugaaa

SEQ ID NO: 578227 - RNA, 19 nt, Homo sapiens
  misc_RNA (1)...(19): siRNA sense strand
uaaugacaacguuccaaga

SEQ ID NO: 578228 - RNA, 19 nt, Homo sapiens
  misc_RNA (1)...(19): siRNA sense strand
ccgacgguccuuacaacua

SEQ ID NO: 578229 - RNA, 19 nt, Homo sapiens
  misc_RNA (1)...(19): siRNA sense strand
cgcggugucugguaaacuu

SEQ ID NO: 578230 - RNA, 19 nt, Homo sapiens
  misc_RNA (1)...(19): siRNA sense strand
gacuaugacgucuuuaagu

SEQ ID NO: 578231 - RNA, 19 nt, Homo sapiens
  misc_RNA (1)...(19): siRNA sense strand
augacaacguuccaagauu

SEQ ID NO: 578232 - RNA, 19 nt, Homo sapiens
  misc_RNA (1)...(19): siRNA sense strand
gaccacgacagugaggaua

SEQ ID NO: 578233 - RNA, 19 nt, Homo sapiens
  misc_RNA (1)...(19): siRNA sense strand
acacugaaagccacagaug

SEQ ID NO: 578234 - RNA, 19 nt, Homo sapiens
  misc_RNA (1)...(19): siRNA sense strand
gggacagucauugcucuuu

SEQ ID NO: 578235 - RNA, 19 nt, Homo sapiens
  misc_RNA (1)...(19): siRNA sense strand
aggcuuuccugcagaccua

SEQ ID NO: 578236 - RNA, 19 nt, Homo sapiens
  misc_RNA (1)...(19): siRNA sense strand
cagaacgccuggcugucau

SEQ ID NO: 578237 - RNA, 19 nt, Homo sapiens
  misc_RNA (1)...(19): siRNA sense strand
uaugagcaguugagagaac

SEQ ID NO: 578238 - RNA, 19 nt, Homo sapiens
  misc_RNA (1)...(19): siRNA sense strand
ggaccacgacagugaggau

SEQ ID NO: 578239 - RNA, 19 nt, Homo sapiens
  misc_RNA (1)...(19): siRNA sense strand
cgggaaacacucucuuugu

SEQ ID NO: 578240 - RNA, 19 nt, Homo sapiens
  misc_RNA (1)...(19): siRNA sense strand
aaacuuggaccgggaaaca

SEQ ID NO: 578241 - RNA, 19 nt, Homo sapiens
  misc_RNA (1)...(19): siRNA sense strand
gaaacacucucuuuguaua

SEQ ID NO: 578242 - RNA, 19 nt, Homo sapiens
  misc_RNA (1)...(19): siRNA sense strand
gaaacugccuucuaugaaa

SEQ ID NO: 578243 - RNA, 19 nt, Homo sapiens
  misc_RNA (1)...(19): siRNA sense strand
ggagaaauaucaacuuuag

SEQ ID NO: 578244 - RNA, 19 nt, Homo sapiens
  misc_RNA (1)...(19): siRNA sense strand
gggaaacacucucuuugua

SEQ ID NO: 578245 - RNA, 19 nt, Homo sapiens
  misc_RNA (1)...(19): siRNA sense strand
ggacagagaugcccucaag

SEQ ID NO: 578246 - RNA, 19 nt, Homo sapiens
  misc_RNA (1)...(19): siRNA sense strand
gaacuacaacuaagaguga

SEQ ID NO: 578247 - RNA, 19 nt, Homo sapiens
  misc_RNA (1)...(19): siRNA sense strand
ugucauaccuccugcuuaa

SEQ ID NO: 578248 - RNA, 19 nt, Homo sapiens
  misc_RNA (1)...(19): siRNA sense strand
caggagaaauaucaacuuu

SEQ ID NO: 578249 - RNA, 19 nt, Homo sapiens
  misc_RNA (1)...(19): siRNA sense strand
cagggaaacucacauauuc

SEQ ID NO: 578250 - RNA, 19 nt, Homo sapiens
  misc_RNA (1)...(19): siRNA sense strand
acuaugacgucuuuaagua

SEQ ID NO: 578251 - RNA, 19 nt, Homo sapiens
  misc_RNA (1)...(19): siRNA sense strand
ugacaacguuccaagauuc

SEQ ID NO: 578252 - RNA, 19 nt, Homo sapiens
  misc_RNA (1)...(19): siRNA sense strand
ggaaacacucucuuuguau

SEQ ID NO: 578253 - RNA, 19 nt, Homo sapiens
  misc_RNA (1)...(19): siRNA sense strand
acuaugaccucacguugua

SEQ ID NO: 578254 - RNA, 19 nt, Homo sapiens
  misc_RNA (1)...(19): siRNA sense strand
gaucacaguuuuagaugua

SEQ ID NO: 578255 - RNA, 19 nt, Homo sapiens
  misc_RNA (1)...(19): siRNA sense strand
cgacgguccuuacaacuau

SEQ ID NO: 578256 - RNA, 19 nt, Homo sapiens
  misc_RNA (1)...(19): siRNA sense strand
gaacucgcuuacaggagaa

SEQ ID NO: 578257 - RNA, 19 nt, Homo sapiens
  misc_RNA (1)...(19): siRNA sense strand
caucugaacucgcuuacag

SEQ ID NO: 578258 - RNA, 19 nt, Homo sapiens
  misc_RNA (1)...(19): siRNA sense strand
ugauaaugcuccagaagug

SEQ ID NO: 578259 - RNA, 19 nt, Homo sapiens
  misc_RNA (1)...(19): siRNA sense strand
cuauagacguggaaauaau

SEQ ID NO: 578260 - RNA, 19 nt, Homo sapiens
  misc_RNA (1)...(19): siRNA sense strand
ugagagaacuacaacuaag

SEQ ID NO: 578261 - RNA, 19 nt, Homo sapiens
  misc_RNA (1)...(19): siRNA sense strand
gaagugacauauucuuuuc

SEQ ID NO: 578262 - RNA, 19 nt, Homo sapiens
  misc_RNA (1)...(19): siRNA sense strand
ugacagugguggaugugaa

SEQ ID NO: 578263 - RNA, 19 nt, Homo sapiens
  misc_RNA (1)...(19): siRNA sense strand
gggaagugacauauucuuu

SEQ ID NO: 578264 - RNA, 19 nt, Homo sapiens
  misc_RNA (1)...(19): siRNA sense strand
cgcaucaucuccagaggua

SEQ ID NO: 578265 - RNA, 19 nt, Homo sapiens
  misc_RNA (1)...(19): siRNA sense strand
gagagaacuacaacuaaga

SEQ ID NO: 578266 - RNA, 19 nt, Homo sapiens
  misc_RNA (1)...(19): siRNA sense strand
gauaaugcccagaucacuu

SEQ ID NO: 578267 - RNA, 19 nt, Homo sapiens
  misc_RNA (1)...(19): siRNA sense strand
ccagggaaacucacauauu

SEQ ID NO: 578268 - RNA, 19 nt, Homo sapiens
  misc_RNA (1)...(19): siRNA sense strand
aaacugccuucuaugaaau

SEQ ID NO: 578269 - RNA, 19 nt, Homo sapiens
  misc_RNA (1)...(19): siRNA sense strand
ccacacgccugucuucucu

SEQ ID NO: 578270 - RNA, 19 nt, Homo sapiens
  misc_RNA (1)...(19): siRNA sense strand
ggacagucauugcucuuuu

SEQ ID NO: 578271 - RNA, 19 nt, Homo sapiens
  misc_RNA (1)...(19): siRNA sense strand
aaagaaaaccugccaagua

SEQ ID NO: 578272 - RNA, 19 nt, Homo sapiens
  misc_RNA (1)...(19): siRNA sense strand
uaagagugacugcacauga

SEQ ID NO: 578273 - RNA, 19 nt, Homo sapiens
  misc_RNA (1)...(19): siRNA sense strand
auaaugcccagaucacuua

SEQ ID NO: 578274 - RNA, 19 nt, Homo sapiens
  misc_RNA (1)...(19): siRNA sense strand
caagacugcucacgguaca

SEQ ID NO: 578275 - RNA, 19 nt, Homo sapiens
  misc_RNA (1)...(19): siRNA sense strand
uggcagacaccaacgauaa

SEQ ID NO: 578276 - RNA, 19 nt, Homo sapiens
  misc_RNA (1)...(19): siRNA sense strand
uguauaacaucacacugaa

SEQ ID NO: 578277 - RNA, 19 nt, Homo sapiens
  misc_RNA (1)...(19): siRNA sense strand
gacggaagaaauaaaugua

SEQ ID NO: 578278 - RNA, 19 nt, Homo sapiens
  misc_RNA (1)...(19): siRNA sense strand
ggacuacagaggauucuuc

SEQ ID NO: 578279 - RNA, 19 nt, Homo sapiens
  misc_RNA (1)...(19): siRNA sense strand
guagcucaaucccugaaga

SEQ ID NO: 578280 - RNA, 19 nt, Homo sapiens
  misc_RNA (1)...(19): siRNA sense strand
ggauagaccgggaagagau

SEQ ID NO: 578281 - RNA, 19 nt, Homo sapiens
  misc_RNA (1)...(19): siRNA sense strand
cuacaucgcugagaacaac

SEQ ID NO: 578282 - RNA, 19 nt, Homo sapiens
  misc_RNA (1)...(19): siRNA sense strand
gacguggaaauaauagaua

SEQ ID NO: 578283 - RNA, 19 nt, Homo sapiens
  misc_RNA (1)...(19): siRNA sense strand
aagaaaaccugccaaguau

SEQ ID NO: 578284 - RNA, 19 nt, Homo sapiens
  misc_RNA (1)...(19): siRNA sense strand
gcuaacauccguagauuuu

SEQ ID NO: 578285 - RNA, 19 nt, Homo sapiens
  misc_RNA (1)...(19): siRNA sense strand
gcagaccuauucccaugag

SEQ ID NO: 578286 - RNA, 19 nt, Homo sapiens
  misc_RNA (1)...(19): siRNA sense strand
cuccuaaacuuccaaagau

SEQ ID NO: 578287 - RNA, 19 nt, Homo sapiens
  misc_RNA (1)...(19): siRNA sense strand
ggaagugacauauucuuuu

SEQ ID NO: 578288 - RNA, 19 nt, Homo sapiens
  misc_RNA (1)...(19): siRNA sense strand
caggagagcugugagaaaa

SEQ ID NO: 578289 - RNA, 19 nt, Homo sapiens
  misc_RNA (1)...(19): siRNA sense strand
gggcaggacguauucucua

SEQ ID NO: 578290 - RNA, 19 nt, Homo sapiens
  misc_RNA (1)...(19): siRNA sense strand
gauaaugcuccagaaguga

SEQ ID NO: 578291 - RNA, 19 nt, Homo sapiens
  misc_RNA (1)...(19): siRNA sense strand
gggcuccaguguccuccua

SEQ ID NO: 578292 - RNA, 19 nt, Homo sapiens
  misc_RNA (1)...(19): siRNA sense strand
ccacgacagugaggauaau

SEQ ID NO: 578293 - RNA, 19 nt, Homo sapiens
  misc_RNA (1)...(19): siRNA sense strand
gaaaaccugccaaguauuc

SEQ ID NO: 578294 - RNA, 19 nt, Homo sapiens
  misc_RNA (1)...(19): siRNA sense strand
ugggagacaucgccaagga

SEQ ID NO: 578295 - RNA, 19 nt, Homo sapiens
  misc_RNA (1)...(19): siRNA sense strand
cagcgagccaggacucuuu

SEQ ID NO: 578296 - RNA, 19 nt, Homo sapiens
  misc_RNA (1)...(19): siRNA sense strand
gcuuacaggagaaauauca

SEQ ID NO: 578297 - RNA, 19 nt, Homo sapiens
  misc_RNA (1)...(19): siRNA sense strand
aaacucacauauucaugca

SEQ ID NO: 578298 - RNA, 19 nt, Homo sapiens
  misc_RNA (1)...(19): siRNA sense strand
aagugacuaugacgucuuu

SEQ ID NO: 578299 - RNA, 19 nt, Homo sapiens
  misc_RNA (1)...(19): siRNA sense strand
gaggauaaugcccagauca

SEQ ID NO: 578300 - RNA, 19 nt, Homo sapiens
  misc_RNA (1)...(19): siRNA sense strand
ccuauagacguggaaauaa

SEQ ID NO: 578301 - RNA, 19 nt, Homo sapiens
  misc_RNA (1)...(19): siRNA sense strand
ggaaacucacauauucaug

SEQ ID NO: 578302 - RNA, 19 nt, Homo sapiens
  misc_RNA (1)...(19): siRNA sense strand
ugacggaagaaauaaaugu

SEQ ID NO: 578303 - RNA, 19 nt, Homo sapiens
  misc_RNA (1)...(19): siRNA sense strand
ccaggagagcugugagaaa

SEQ ID NO: 578304 - RNA, 19 nt, Homo sapiens
  misc_RNA (1)...(19): siRNA sense strand
gugacuaugacgucuuuaa

SEQ ID NO: 578305 - RNA, 19 nt, Homo sapiens
  misc_RNA (1)...(19): siRNA sense strand
gaagugacuaugacgucuu

SEQ ID NO: 578306 - RNA, 19 nt, Homo sapiens
  misc_RNA (1)...(19): siRNA sense strand
gcucaagaugguccuggua

SEQ ID NO: 578307 - RNA, 19 nt, Homo sapiens
  misc_RNA (1)...(19): siRNA sense strand
gggaaacucacauauucau

SEQ ID NO: 578308 - RNA, 19 nt, Homo sapiens
  misc_RNA (1)...(19): siRNA sense strand
uaacauccguagauuuuca

SEQ ID NO: 578309 - RNA, 19 nt, Homo sapiens
  misc_RNA (1)...(19): siRNA sense strand
ccaguguccuccuaugucu

SEQ ID NO: 578310 - RNA, 19 nt, Homo sapiens
  misc_RNA (1)...(19): siRNA sense strand
aaaugauaaugcuccagaa

SEQ ID NO: 578311 - RNA, 19 nt, Homo sapiens
  misc_RNA (1)...(19): siRNA sense strand
uguacgcgcugcaauccuu

SEQ ID NO: 578312 - RNA, 19 nt, Homo sapiens
  misc_RNA (1)...(19): siRNA sense strand
cacaggaccacgacaguga

SEQ ID NO: 578313 - RNA, 19 nt, Homo sapiens
  misc_RNA (1)...(19): siRNA sense strand
gaccugcaccauuccagaa

SEQ ID NO: 578314 - RNA, 19 nt, Homo sapiens
  misc_RNA (1)...(19): siRNA sense strand
gcuccagaagugacuauga

SEQ ID NO: 578315 - RNA, 19 nt, Homo sapiens
  misc_RNA (1)...(19): siRNA sense strand
cccuauagacguggaaaua

SEQ ID NO: 578316 - RNA, 19 nt, Homo sapiens
  misc_RNA (1)...(19): siRNA sense strand
agagguaggacgcagcuuu

SEQ ID NO: 578317 - RNA, 19 nt, Homo sapiens
  misc_RNA (1)...(19): siRNA sense strand
gcuccaguguccuccuaug

SEQ ID NO: 578318 - RNA, 19 nt, Homo sapiens
  misc_RNA (1)...(19): siRNA sense strand
ggcaggacguauucucuac

SEQ ID NO: 578319 - RNA, 19 nt, Homo sapiens
  misc_RNA (1)...(19): siRNA sense strand
ucaagaugguccugguagu

SEQ ID NO: 578320 - RNA, 19 nt, Homo sapiens
  misc_RNA (1)...(19): siRNA sense strand
cagucuacaucgcugagaa

SEQ ID NO: 578321 - RNA, 19 nt, Homo sapiens
  misc_RNA (1)...(19): siRNA sense strand
uauaacaucacacugaaag

SEQ ID NO: 578322 - RNA, 19 nt, Homo sapiens
  misc_RNA (1)...(19): siRNA sense strand
cucaaucccugaagacaca

SEQ ID NO: 578323 - RNA, 19 nt, Homo sapiens
  misc_RNA (1)...(19): siRNA sense strand
gggguucgguuuccguuaa

SEQ ID NO: 578324 - RNA, 19 nt, Homo sapiens
  misc_RNA (1)...(19): siRNA sense strand
uugcuaacauccguagauu

SEQ ID NO: 578325 - RNA, 19 nt, Homo sapiens
  misc_RNA (1)...(19): siRNA sense strand
guccagggaaacucacaua

SEQ ID NO: 578326 - RNA, 19 nt, Homo sapiens
  misc_RNA (1)...(19): siRNA sense strand
guauaacaucacacugaaa

SEQ ID NO: 578327 - RNA, 19 nt, Homo sapiens
  misc_RNA (1)...(19): siRNA sense strand
uaaugacaacguuccaaga

SEQ ID NO: 578328 - RNA, 19 nt, Homo sapiens
  misc_RNA (1)...(19): siRNA sense strand
ccgacgguccuuacaacua

SEQ ID NO: 578329 - RNA, 19 nt, Homo sapiens
  misc_RNA (1)...(19): siRNA sense strand
cgcggugucugguaaacuu

SEQ ID NO: 578330 - RNA, 19 nt, Homo sapiens
  misc_RNA (1)...(19): siRNA sense strand
gacuaugacgucuuuaagu

SEQ ID NO: 578331 - RNA, 19 nt, Homo sapiens
  misc_RNA (1)...(19): siRNA sense strand
augacaacguuccaagauu

SEQ ID NO: 578332 - RNA, 19 nt, Homo sapiens
  misc_RNA (1)...(19): siRNA sense strand
gaccacgacagugaggaua

SEQ ID NO: 578333 - RNA, 19 nt, Homo sapiens
  misc_RNA (1)...(19): siRNA sense strand
acacugaaagccacagaug

SEQ ID NO: 578334 - RNA, 19 nt, Homo sapiens
  misc_RNA (1)...(19): siRNA sense strand
gggacagucauugcucuuu

SEQ ID NO: 578335 - RNA, 19 nt, Homo sapiens
  misc_RNA (1)...(19): siRNA sense strand
aggcuuuccugcagaccua

SEQ ID NO: 578336 - RNA, 19 nt, Homo sapiens
  misc_RNA (1)...(19): siRNA sense strand
cagaacgccuggcugucau

SEQ ID NO: 578337 - RNA, 19 nt, Homo sapiens
  misc_RNA (1)...(19): siRNA sense strand
uaugagcaguugagagaac

SEQ ID NO: 578338 - RNA, 19 nt, Homo sapiens
  misc_RNA (1)...(19): siRNA sense strand
ggaccacgacagugaggau

SEQ ID NO: 578339 - RNA, 19 nt, Homo sapiens
  misc_RNA (1)...(19): siRNA sense strand
cgggaaacacucucuuugu

SEQ ID NO: 578340 - RNA, 19 nt, Homo sapiens
  misc_RNA (1)...(19): siRNA sense strand
aaacuuggaccgggaaaca

SEQ ID NO: 578341 - RNA, 19 nt, Homo sapiens
  misc_RNA (1)...(19): siRNA sense strand
gcgaaagucuuaauaacua

SEQ ID NO: 578342 - RNA, 19 nt, Homo sapiens
  misc_RNA (1)...(19): siRNA sense strand
gaaacaaucaucucucuaa

SEQ ID NO: 578343 - RNA, 19 nt, Homo sapiens
  misc_RNA (1)...(19): siRNA sense strand
gaggauaaacugaaucuuu

SEQ ID NO: 578344 - RNA, 19 nt, Homo sapiens
  misc_RNA (1)...(19): siRNA sense strand
gauuuaagcucagugguaa

SEQ ID NO: 578345 - RNA, 19 nt, Homo sapiens
  misc_RNA (1)...(19): siRNA sense strand
ggaugucaaugauaaugua

SEQ ID NO: 578346 - RNA, 19 nt, Homo sapiens
  misc_RNA (1)...(19): siRNA sense strand
acaaucaucucucuaaaug

SEQ ID NO: 578347 - RNA, 19 nt, Homo sapiens
  misc_RNA (1)...(19): siRNA sense strand
ggacauuaaugacaauaca

SEQ ID NO: 578348 - RNA, 19 nt, Homo sapiens
  misc_RNA (1)...(19): siRNA sense strand
ggaaauaguggacauuaau

SEQ ID NO: 578349 - RNA, 19 nt, Homo sapiens
  misc_RNA (1)...(19): siRNA sense strand
cugcaaaucuagacuauga

SEQ ID NO: 578350 - RNA, 19 nt, Homo sapiens
  misc_RNA (1)...(19): siRNA sense strand
gcagaacaauugcugaaag

SEQ ID NO: 578351 - RNA, 19 nt, Homo sapiens
  misc_RNA (1)...(19): siRNA sense strand
ggauuuacuugaaacgaaa

SEQ ID NO: 578352 - RNA, 19 nt, Homo sapiens
  misc_RNA (1)...(19): siRNA sense strand
aagcgagccucuucugaua

SEQ ID NO: 578353 - RNA, 19 nt, Homo sapiens
  misc_RNA (1)...(19): siRNA sense strand
gagcgaaagucuuaauaac

SEQ ID NO: 578354 - RNA, 19 nt, Homo sapiens
  misc_RNA (1)...(19): siRNA sense strand
ggaagaauuggaagugaaa

SEQ ID NO: 578355 - RNA, 19 nt, Homo sapiens
  misc_RNA (1)...(19): siRNA sense strand
gaaagugcaccuccaggaa

SEQ ID NO: 578356 - RNA, 19 nt, Homo sapiens
  misc_RNA (1)...(19): siRNA sense strand
ggauuuaagcucaguggua

SEQ ID NO: 578357 - RNA, 19 nt, Homo sapiens
  misc_RNA (1)...(19): siRNA sense strand
gaaauaguggacauuaaug

SEQ ID NO: 578358 - RNA, 19 nt, Homo sapiens
  misc_RNA (1)...(19): siRNA sense strand
uaacaguucuagaugugaa

SEQ ID NO: 578359 - RNA, 19 nt, Homo sapiens
  misc_RNA (1)...(19): siRNA sense strand
gguaacaguucuagaugug

SEQ ID NO: 578360 - RNA, 19 nt, Homo sapiens
  misc_RNA (1)...(19): siRNA sense strand
gaacaccaccucugucuac

SEQ ID NO: 578361 - RNA, 19 nt, Homo sapiens
  misc_RNA (1)...(19): siRNA sense strand
gcgcagauccgcuacucua

SEQ ID NO: 578362 - RNA, 19 nt, Homo sapiens
  misc_RNA (1)...(19): siRNA sense strand
aaucaucucucuaaaugug

SEQ ID NO: 578363 - RNA, 19 nt, Homo sapiens
  misc_RNA (1)...(19): siRNA sense strand
gaacaguaaucgcccuuuu

SEQ ID NO: 578364 - RNA, 19 nt, Homo sapiens
  misc_RNA (1)...(19): siRNA sense strand
cagauccgcuacucuauuc

SEQ ID NO: 578365 - RNA, 19 nt, Homo sapiens
  misc_RNA (1)...(19): siRNA sense strand
gcguaagagucaucugauu

SEQ ID NO: 578366 - RNA, 19 nt, Homo sapiens
  misc_RNA (1)...(19): siRNA sense strand
gcagauccgcuacucuauu

SEQ ID NO: 578367 - RNA, 19 nt, Homo sapiens
  misc_RNA (1)...(19): siRNA sense strand
gcucaagcgucgcccaaau

SEQ ID NO: 578368 - RNA, 19 nt, Homo sapiens
  misc_RNA (1)...(19): siRNA sense strand
gagguauucuuguacaaca

SEQ ID NO: 578369 - RNA, 19 nt, Homo sapiens
  misc_RNA (1)...(19): siRNA sense strand
gggcuuuccugcagaccua

SEQ ID NO: 578370 - RNA, 19 nt, Homo sapiens
  misc_RNA (1)...(19): siRNA sense strand
uggaaauaguggacauuaa

SEQ ID NO: 578371 - RNA, 19 nt, Homo sapiens
  misc_RNA (1)...(19): siRNA sense strand
ccgaggagcuggagaaagg

SEQ ID NO: 578372 - RNA, 19 nt, Homo sapiens
  misc_RNA (1)...(19): siRNA sense strand
ggaaggagaagccguuuac

SEQ ID NO: 578373 - RNA, 19 nt, Homo sapiens
  misc_RNA (1)...(19): siRNA sense strand
ggagaacccaggcaacuuc

SEQ ID NO: 578374 - RNA, 19 nt, Homo sapiens
  misc_RNA (1)...(19): siRNA sense strand
uaacucaggauuuacuuga

SEQ ID NO: 578375 - RNA, 19 nt, Homo sapiens
  misc_RNA (1)...(19): siRNA sense strand
cagaaacaaucaucucucu

SEQ ID NO: 578376 - RNA, 19 nt, Homo sapiens
  misc_RNA (1)...(19): siRNA sense strand
cagaaaagaucucacaaau

SEQ ID NO: 578377 - RNA, 19 nt, Homo sapiens
  misc_RNA (1)...(19): siRNA sense strand
cagccugucuaccguguaa

SEQ ID NO: 578378 - RNA, 19 nt, Homo sapiens
  misc_RNA (1)...(19): siRNA sense strand
gcagcuccauccucucguu

SEQ ID NO: 578379 - RNA, 19 nt, Homo sapiens
  misc_RNA (1)...(19): siRNA sense strand
cagaacaauugcugaaagu

SEQ ID NO: 578380 - RNA, 19 nt, Homo sapiens
  misc_RNA (1)...(19): siRNA sense strand
cagaagugguuguuacauc

SEQ ID NO: 578381 - RNA, 19 nt, Homo sapiens
  misc_RNA (1)...(19): siRNA sense strand
guaacuuauuccuuuguga

SEQ ID NO: 578382 - RNA, 19 nt, Homo sapiens
  misc_RNA (1)...(19): siRNA sense strand
cguaagagucaucugauuu

SEQ ID NO: 578383 - RNA, 19 nt, Homo sapiens
  misc_RNA (1)...(19): siRNA sense strand
ggacagagacgcgcucaag

SEQ ID NO: 578384 - RNA, 19 nt, Homo sapiens
  misc_RNA (1)...(19): siRNA sense strand
ucuuggaugucaaugauaa

SEQ ID NO: 578385 - RNA, 19 nt, Homo sapiens
  misc_RNA (1)...(19): siRNA sense strand
uaucuuggaugucaaugau

SEQ ID NO: 578386 - RNA, 19 nt, Homo sapiens
  misc_RNA (1)...(19): siRNA sense strand
gcaccuccaggaacaguaa

SEQ ID NO: 578387 - RNA, 19 nt, Homo sapiens
  misc_RNA (1)...(19): siRNA sense strand
caaugauaauguaccagaa

SEQ ID NO: 578388 - RNA, 19 nt, Homo sapiens
  misc_RNA (1)...(19): siRNA sense strand
gaaucuuuaucccguggaa

SEQ ID NO: 578389 - RNA, 19 nt, Homo sapiens
  misc_RNA (1)...(19): siRNA sense strand
gaagucucccauuugaauu

SEQ ID NO: 578390 - RNA, 19 nt, Homo sapiens
  misc_RNA (1)...(19): siRNA sense strand
cuggagaaauuucaacuuc

SEQ ID NO: 578391 - RNA, 19 nt, Homo sapiens
  misc_RNA (1)...(19): siRNA sense strand
caaauucugguaacaguuc

SEQ ID NO: 578392 - RNA, 19 nt, Homo sapiens
  misc_RNA (1)...(19): siRNA sense strand
caauacaccccgauucuua

SEQ ID NO: 578393 - RNA, 19 nt, Homo sapiens
  misc_RNA (1)...(19): siRNA sense strand
gaaauuucaacuucugcaa

SEQ ID NO: 578394 - RNA, 19 nt, Homo sapiens
  misc_RNA (1)...(19): siRNA sense strand
guggaaauaguggacauua

SEQ ID NO: 578395 - RNA, 19 nt, Homo sapiens
  misc_RNA (1)...(19): siRNA sense strand
uuuaugagcuggguguuga

SEQ ID NO: 578396 - RNA, 19 nt, Homo sapiens
  misc_RNA (1)...(19): siRNA sense strand
acucaggauuuacuugaaa

SEQ ID NO: 578397 - RNA, 19 nt, Homo sapiens
  misc_RNA (1)...(19): siRNA sense strand
guaauagucacuucucagu

SEQ ID NO: 578398 - RNA, 19 nt, Homo sapiens
  misc_RNA (1)...(19): siRNA sense strand
auucggaccucacucugua

SEQ ID NO: 578399 - RNA, 19 nt, Homo sapiens
  misc_RNA (1)...(19): siRNA sense strand
gagguaggaugcagcuuuu

SEQ ID NO: 578400 - RNA, 19 nt, Homo sapiens
  misc_RNA (1)...(19): siRNA sense strand
cgcggugucuggugaguuu

SEQ ID NO: 578401 - RNA, 19 nt, Homo sapiens
  misc_RNA (1)...(19): siRNA sense strand
acacuccaauguuuacuca

SEQ ID NO: 578402 - RNA, 19 nt, Homo sapiens
  misc_RNA (1)...(19): siRNA sense strand
gggaaggagaagccguuua

SEQ ID NO: 578403 - RNA, 19 nt, Homo sapiens
  misc_RNA (1)...(19): siRNA sense strand
ccuacucacuggcagaaga

SEQ ID NO: 578404 - RNA, 19 nt, Homo sapiens
  misc_RNA (1)...(19): siRNA sense strand
agaagucucccauuugaau

SEQ ID NO: 578405 - RNA, 19 nt, Homo sapiens
  misc_RNA (1)...(19): siRNA sense strand
agaagugguuguuacaucu

SEQ ID NO: 578406 - RNA, 19 nt, Homo sapiens
  misc_RNA (1)...(19): siRNA sense strand
auaacuaucuuggauguca

SEQ ID NO: 578407 - RNA, 19 nt, Homo sapiens
  misc_RNA (1)...(19): siRNA sense strand
agagcgaaagucuuaauaa

SEQ ID NO: 578408 - RNA, 19 nt, Homo sapiens
  misc_RNA (1)...(19): siRNA sense strand
cagagcgaaagucuuaaua

SEQ ID NO: 578409 - RNA, 19 nt, Homo sapiens
  misc_RNA (1)...(19): siRNA sense strand
gcaacaucgucaaggaucu

SEQ ID NO: 578410 - RNA, 19 nt, Homo sapiens
  misc_RNA (1)...(19): siRNA sense strand
ggaacaccaccucugucua

SEQ ID NO: 578411 - RNA, 19 nt, Homo sapiens
  misc_RNA (1)...(19): siRNA sense strand
ccaggagagcuaugagaaa

SEQ ID NO: 578412 - RNA, 19 nt, Homo sapiens
  misc_RNA (1)...(19): siRNA sense strand
cugcagcgcuggcacaagu

SEQ ID NO: 578413 - RNA, 19 nt, Homo sapiens
  misc_RNA (1)...(19): siRNA sense strand
gaaugacaacacuccaaug

SEQ ID NO: 578414 - RNA, 19 nt, Homo sapiens
  misc_RNA (1)...(19): siRNA sense strand
gaccagaacgcccaagucu

SEQ ID NO: 578415 - RNA, 19 nt, Homo sapiens
  misc_RNA (1)...(19): siRNA sense strand
ugacaaaugcagcucuaga

SEQ ID NO: 578416 - RNA, 19 nt, Homo sapiens
  misc_RNA (1)...(19): siRNA sense strand
ucgagacucuggccugaau

SEQ ID NO: 578417 - RNA, 19 nt, Homo sapiens
  misc_RNA (1)...(19): siRNA sense strand
caacuucugcaaaucuaga

SEQ ID NO: 578418 - RNA, 19 nt, Homo sapiens
  misc_RNA (1)...(19): siRNA sense strand
uaguggacauuaaugacaa

SEQ ID NO: 578419 - RNA, 19 nt, Homo sapiens
  misc_RNA (1)...(19): siRNA sense strand
aggauuuacuugaaacgaa

SEQ ID NO: 578420 - RNA, 19 nt, Homo sapiens
  misc_RNA (1)...(19): siRNA sense strand
guaagagucaucugauuuu

SEQ ID NO: 578421 - RNA, 19 nt, Homo sapiens
  misc_RNA (1)...(19): siRNA sense strand
cgcaucgucuccagaggua

SEQ ID NO: 578422 - RNA, 19 nt, Homo sapiens
  misc_RNA (1)...(19): siRNA sense strand
uaagcucagugguaauagu

SEQ ID NO: 578423 - RNA, 19 nt, Homo sapiens
  misc_RNA (1)...(19): siRNA sense strand
aggaagaauuggaagugaa

SEQ ID NO: 578424 - RNA, 19 nt, Homo sapiens
  misc_RNA (1)...(19): siRNA sense strand
aaggaagaauuggaaguga

SEQ ID NO: 578425 - RNA, 19 nt, Homo sapiens
  misc_RNA (1)...(19): siRNA sense strand
gcgagccucuucugauaac

SEQ ID NO: 578426 - RNA, 19 nt, Homo sapiens
  misc_RNA (1)...(19): siRNA sense strand
agagguaggaugcagcuuu

SEQ ID NO: 578427 - RNA, 19 nt, Homo sapiens
  misc_RNA (1)...(19): siRNA sense strand
gaagugaaaauucucgaaa

SEQ ID NO: 578428 - RNA, 19 nt, Homo sapiens
  misc_RNA (1)...(19): siRNA sense strand
uaggcaacaucgucaagga

SEQ ID NO: 578429 - RNA, 19 nt, Homo sapiens
  misc_RNA (1)...(19): siRNA sense strand
caggagagcuaugagaaaa

SEQ ID NO: 578430 - RNA, 19 nt, Homo sapiens
  misc_RNA (1)...(19): siRNA sense strand
ugucgaggauaaacugaau

SEQ ID NO: 578431 - RNA, 19 nt, Homo sapiens
  misc_RNA (1)...(19): siRNA sense strand
uaacuaucuuggaugucaa

SEQ ID NO: 578432 - RNA, 19 nt, Homo sapiens
  misc_RNA (1)...(19): siRNA sense strand
acuaugaggacucgaguuu

SEQ ID NO: 578433 - RNA, 19 nt, Homo sapiens
  misc_RNA (1)...(19): siRNA sense strand
ggaugcagcuuuucucucu

SEQ ID NO: 578434 - RNA, 19 nt, Homo sapiens
  misc_RNA (1)...(19): siRNA sense strand
acuaugagcaguugagaga

SEQ ID NO: 578435 - RNA, 19 nt, Homo sapiens
  misc_RNA (1)...(19): siRNA sense strand
caacuccgacacugggauu

SEQ ID NO: 578436 - RNA, 19 nt, Homo sapiens
  misc_RNA (1)...(19): siRNA sense strand
caucuucucugugaaugca

SEQ ID NO: 578437 - RNA, 19 nt, Homo sapiens
  misc_RNA (1)...(19): siRNA sense strand
gccuccaucuucucuguga

SEQ ID NO: 578438 - RNA, 19 nt, Homo sapiens
  misc_RNA (1)...(19): siRNA sense strand
aaaggaacaccaccucugu

SEQ ID NO: 578439 - RNA, 19 nt, Homo sapiens
  misc_RNA (1)...(19): siRNA sense strand
ccgacacgcuuaucaacca

SEQ ID NO: 578440 - RNA, 19 nt, Homo sapiens
  misc_RNA (1)...(19): siRNA sense strand
gagaaaagcgagccucuuc

SEQ ID NO: 578441 - RNA, 19 nt, Homo sapiens
  misc_RNA (1)...(19): siRNA sense strand
gcgaaagucuuaauaacua

SEQ ID NO: 578442 - RNA, 19 nt, Homo sapiens
  misc_RNA (1)...(19): siRNA sense strand
gaaacaaucaucucucuaa

SEQ ID NO: 578443 - RNA, 19 nt, Homo sapiens
  misc_RNA (1)...(19): siRNA sense strand
gaggauaaacugaaucuuu

SEQ ID NO: 578444 - RNA, 19 nt, Homo sapiens
  misc_RNA (1)...(19): siRNA sense strand
gauuuaagcucagugguaa

SEQ ID NO: 578445 - RNA, 19 nt, Homo sapiens
  misc_RNA (1)...(19): siRNA sense strand
ggaugucaaugauaaugua

SEQ ID NO: 578446 - RNA, 19 nt, Homo sapiens
  misc_RNA (1)...(19): siRNA sense strand
acaaucaucucucuaaaug

SEQ ID NO: 578447 - RNA, 19 nt, Homo sapiens
  misc_RNA (1)...(19): siRNA sense strand
ggacauuaaugacaauaca

SEQ ID NO: 578448 - RNA, 19 nt, Homo sapiens
  misc_RNA (1)...(19): siRNA sense strand
ggaaauaguggacauuaau

SEQ ID NO: 578449 - RNA, 19 nt, Homo sapiens
  misc_RNA (1)...(19): siRNA sense strand
cugcaaaucuagacuauga

SEQ ID NO: 578450 - RNA, 19 nt, Homo sapiens
  misc_RNA (1)...(19): siRNA sense strand
gcagaacaauugcugaaag

SEQ ID NO: 578451 - RNA, 19 nt, Homo sapiens
  misc_RNA (1)...(19): siRNA sense strand
ggauuuacuugaaacgaaa

SEQ ID NO: 578452 - RNA, 19 nt, Homo sapiens
  misc_RNA (1)...(19): siRNA sense strand
aagcgagccucuucugaua

SEQ ID NO: 578453 - RNA, 19 nt, Homo sapiens
  misc_RNA (1)...(19): siRNA sense strand
gagcgaaagucuuaauaac

SEQ ID NO: 578454 - RNA, 19 nt, Homo sapiens
  misc_RNA (1)...(19): siRNA sense strand
ggaagaauuggaagugaaa

SEQ ID NO: 578455 - RNA, 19 nt, Homo sapiens
  misc_RNA (1)...(19): siRNA sense strand
gaaagugcaccuccaggaa

SEQ ID NO: 578456 - RNA, 19 nt, Homo sapiens
  misc_RNA (1)...(19): siRNA sense strand
ggauuuaagcucaguggua

SEQ ID NO: 578457 - RNA, 19 nt, Homo sapiens
  misc_RNA (1)...(19): siRNA sense strand
gaaauaguggacauuaaug

SEQ ID NO: 578458 - RNA, 19 nt, Homo sapiens
  misc_RNA (1)...(19): siRNA sense strand
uaacaguucuagaugugaa

SEQ ID NO: 578459 - RNA, 19 nt, Homo sapiens
  misc_RNA (1)...(19): siRNA sense strand
gguaacaguucuagaugug

SEQ ID NO: 578460 - RNA, 19 nt, Homo sapiens
  misc_RNA (1)...(19): siRNA sense strand
gaacaccaccucugucuac

SEQ ID NO: 578461 - RNA, 19 nt, Homo sapiens
  misc_RNA (1)...(19): siRNA sense strand
gcgcagauccgcuacucua

SEQ ID NO: 578462 - RNA, 19 nt, Homo sapiens
  misc_RNA (1)...(19): siRNA sense strand
aaucaucucucuaaaugug

SEQ ID NO: 578463 - RNA, 19 nt, Homo sapiens
  misc_RNA (1)...(19): siRNA sense strand
gaacaguaaucgcccuuuu

SEQ ID NO: 578464 - RNA, 19 nt, Homo sapiens
  misc_RNA (1)...(19): siRNA sense strand
cagauccgcuacucuauuc

SEQ ID NO: 578465 - RNA, 19 nt, Homo sapiens
  misc_RNA (1)...(19): siRNA sense strand
gcguaagagucaucugauu

SEQ ID NO: 578466 - RNA, 19 nt, Homo sapiens
  misc_RNA (1)...(19): siRNA sense strand
gcagauccgcuacucuauu

SEQ ID NO: 578467 - RNA, 19 nt, Homo sapiens
  misc_RNA (1)...(19): siRNA sense strand
gcucaagcgucgcccaaau

SEQ ID NO: 578468 - RNA, 19 nt, Homo sapiens
  misc_RNA (1)...(19): siRNA sense strand
gagguauucuuguacaaca

SEQ ID NO: 578469 - RNA, 19 nt, Homo sapiens
  misc_RNA (1)...(19): siRNA sense strand
gggcuuuccugcagaccua

SEQ ID NO: 578470 - RNA, 19 nt, Homo sapiens
  misc_RNA (1)...(19): siRNA sense strand
uggaaauaguggacauuaa

SEQ ID NO: 578471 - RNA, 19 nt, Homo sapiens
  misc_RNA (1)...(19): siRNA sense strand
ccgaggagcuggagaaagg

SEQ ID NO: 578472 - RNA, 19 nt, Homo sapiens
  misc_RNA (1)...(19): siRNA sense strand
ggaaggagaagccguuuac

SEQ ID NO: 578473 - RNA, 19 nt, Homo sapiens
  misc_RNA (1)...(19): siRNA sense strand
ggagaacccaggcaacuuc

SEQ ID NO: 578474 - RNA, 19 nt, Homo sapiens
  misc_RNA (1)...(19): siRNA sense strand
uaacucaggauuuacuuga

SEQ ID NO: 578475 - RNA, 19 nt, Homo sapiens
  misc_RNA (1)...(19): siRNA sense strand
cagaaacaaucaucucucu

SEQ ID NO: 578476 - RNA, 19 nt, Homo sapiens
  misc_RNA (1)...(19): siRNA sense strand
cagaaaagaucucacaaau

SEQ ID NO: 578477 - RNA, 19 nt, Homo sapiens
  misc_RNA (1)...(19): siRNA sense strand
cagccugucuaccguguaa

SEQ ID NO: 578478 - RNA, 19 nt, Homo sapiens
  misc_RNA (1)...(19): siRNA sense strand
gcagcuccauccucucguu

SEQ ID NO: 578479 - RNA, 19 nt, Homo sapiens
  misc_RNA (1)...(19): siRNA sense strand
cagaacaauugcugaaagu

SEQ ID NO: 578480 - RNA, 19 nt, Homo sapiens
  misc_RNA (1)...(19): siRNA sense strand
cagaagugguuguuacauc

SEQ ID NO: 578481 - RNA, 19 nt, Homo sapiens
  misc_RNA (1)...(19): siRNA sense strand
guaacuuauuccuuuguga

SEQ ID NO: 578482 - RNA, 19 nt, Homo sapiens
  misc_RNA (1)...(19): siRNA sense strand
cguaagagucaucugauuu

SEQ ID NO: 578483 - RNA, 19 nt, Homo sapiens
  misc_RNA (1)...(19): siRNA sense strand
ggacagagacgcgcucaag

SEQ ID NO: 578484 - RNA, 19 nt, Homo sapiens
  misc_RNA (1)...(19): siRNA sense strand
ucuuggaugucaaugauaa

SEQ ID NO: 578485 - RNA, 19 nt, Homo sapiens
  misc_RNA (1)...(19): siRNA sense strand
uaucuuggaugucaaugau

SEQ ID NO: 578486 - RNA, 19 nt, Homo sapiens
  misc_RNA (1)...(19): siRNA sense strand
gcaccuccaggaacaguaa

SEQ ID NO: 578487 - RNA, 19 nt, Homo sapiens
  misc_RNA (1)...(19): siRNA sense strand
caaugauaauguaccagaa

SEQ ID NO: 578488 - RNA, 19 nt, Homo sapiens
  misc_RNA (1)...(19): siRNA sense strand
gaaucuuuaucccguggaa

SEQ ID NO: 578489 - RNA, 19 nt, Homo sapiens
  misc_RNA (1)...(19): siRNA sense strand
gaagucucccauuugaauu

SEQ ID NO: 578490 - RNA, 19 nt, Homo sapiens
  misc_RNA (1)...(19): siRNA sense strand
cuggagaaauuucaacuuc

SEQ ID NO: 578491 - RNA, 19 nt, Homo sapiens
  misc_RNA (1)...(19): siRNA sense strand
caaauucugguaacaguuc

SEQ ID NO: 578492 - RNA, 19 nt, Homo sapiens
  misc_RNA (1)...(19): siRNA sense strand
caauacaccccgauucuua

SEQ ID NO: 578493 - RNA, 19 nt, Homo sapiens
  misc_RNA (1)...(19): siRNA sense strand
gaaauuucaacuucugcaa

SEQ ID NO: 578494 - RNA, 19 nt, Homo sapiens
  misc_RNA (1)...(19): siRNA sense strand
guggaaauaguggacauua

SEQ ID NO: 578495 - RNA, 19 nt, Homo sapiens
  misc_RNA (1)...(19): siRNA sense strand
uuuaugagcuggguguuga

SEQ ID NO: 578496 - RNA, 19 nt, Homo sapiens
  misc_RNA (1)...(19): siRNA sense strand
acucaggauuuacuugaaa

SEQ ID NO: 578497 - RNA, 19 nt, Homo sapiens
  misc_RNA (1)...(19): siRNA sense strand
guaauagucacuucucagu

SEQ ID NO: 578498 - RNA, 19 nt, Homo sapiens
  misc_RNA (1)...(19): siRNA sense strand
auucggaccucacucugua

SEQ ID NO: 578499 - RNA, 19 nt, Homo sapiens
  misc_RNA (1)...(19): siRNA sense strand
gagguaggaugcagcuuuu

SEQ ID NO: 578500 - RNA, 19 nt, Homo sapiens
  misc_RNA (1)...(19): siRNA sense strand
cgcggugucuggugaguuu

SEQ ID NO: 578501 - RNA, 19 nt, Homo sapiens
  misc_RNA (1)...(19): siRNA sense strand
acacuccaauguuuacuca

SEQ ID NO: 578502 - RNA, 19 nt, Homo sapiens
  misc_RNA (1)...(19): siRNA sense strand
gggaaggagaagccguuua

SEQ ID NO: 578503 - RNA, 19 nt, Homo sapiens
  misc_RNA (1)...(19): siRNA sense strand
ccuacucacuggcagaaga

SEQ ID NO: 578504 - RNA, 19 nt, Homo sapiens
  misc_RNA (1)...(19): siRNA sense strand
agaagucucccauuugaau

SEQ ID NO: 578505 - RNA, 19 nt, Homo sapiens
  misc_RNA (1)...(19): siRNA sense strand
agaagugguuguuacaucu

SEQ ID NO: 578506 - RNA, 19 nt, Homo sapiens
  misc_RNA (1)...(19): siRNA sense strand
auaacuaucuuggauguca

SEQ ID NO: 578507 - RNA, 19 nt, Homo sapiens
  misc_RNA (1)...(19): siRNA sense strand
agagcgaaagucuuaauaa

SEQ ID NO: 578508 - RNA, 19 nt, Homo sapiens
  misc_RNA (1)...(19): siRNA sense strand
cagagcgaaagucuuaaua

SEQ ID NO: 578509 - RNA, 19 nt, Homo sapiens
  misc_RNA (1)...(19): siRNA sense strand
gcaacaucgucaaggaucu

SEQ ID NO: 578510 - RNA, 19 nt, Homo sapiens
  misc_RNA (1)...(19): siRNA sense strand
ggaacaccaccucugucua

SEQ ID NO: 578511 - RNA, 19 nt, Homo sapiens
  misc_RNA (1)...(19): siRNA sense strand
ccaggagagcuaugagaaa

SEQ ID NO: 578512 - RNA, 19 nt, Homo sapiens
  misc_RNA (1)...(19): siRNA sense strand
cugcagcgcuggcacaagu

SEQ ID NO: 578513 - RNA, 19 nt, Homo sapiens
  misc_RNA (1)...(19): siRNA sense strand
gaaugacaacacuccaaug

SEQ ID NO: 578514 - RNA, 19 nt, Homo sapiens
  misc_RNA (1)...(19): siRNA sense strand
gaccagaacgcccaagucu

SEQ ID NO: 578515 - RNA, 19 nt, Homo sapiens
  misc_RNA (1)...(19): siRNA sense strand
ugacaaaugcagcucuaga

SEQ ID NO: 578516 - RNA, 19 nt, Homo sapiens
  misc_RNA (1)...(19): siRNA sense strand
ucgagacucuggccugaau

SEQ ID NO: 578517 - RNA, 19 nt, Homo sapiens
  misc_RNA (1)...(19): siRNA sense strand
caacuucugcaaaucuaga

SEQ ID NO: 578518 - RNA, 19 nt, Homo sapiens
  misc_RNA (1)...(19): siRNA sense strand
uaguggacauuaaugacaa

SEQ ID NO: 578519 - RNA, 19 nt, Homo sapiens
  misc_RNA (1)...(19): siRNA sense strand
aggauuuacuugaaacgaa

SEQ ID NO: 578520 - RNA, 19 nt, Homo sapiens
  misc_RNA (1)...(19): siRNA sense strand
guaagagucaucugauuuu

SEQ ID NO: 578521 - RNA, 19 nt, Homo sapiens
  misc_RNA (1)...(19): siRNA sense strand
cgcaucgucuccagaggua

SEQ ID NO: 578522 - RNA, 19 nt, Homo sapiens
  misc_RNA (1)...(19): siRNA sense strand
uaagcucagugguaauagu

SEQ ID NO: 578523 - RNA, 19 nt, Homo sapiens
  misc_RNA (1)...(19): siRNA sense strand
aggaagaauuggaagugaa

SEQ ID NO: 578524 - RNA, 19 nt, Homo sapiens
  misc_RNA (1)...(19): siRNA sense strand
aaggaagaauuggaaguga

SEQ ID NO: 578525 - RNA, 19 nt, Homo sapiens
  misc_RNA (1)...(19): siRNA sense strand
gcgagccucuucugauaac

SEQ ID NO: 578526 - RNA, 19 nt, Homo sapiens
  misc_RNA (1)...(19): siRNA sense strand
agagguaggaugcagcuuu

SEQ ID NO: 578527 - RNA, 19 nt, Homo sapiens
  misc_RNA (1)...(19): siRNA sense strand
gaagugaaaauucucgaaa

SEQ ID NO: 578528 - RNA, 19 nt, Homo sapiens
  misc_RNA (1)...(19): siRNA sense strand
uaggcaacaucgucaagga

SEQ ID NO: 578529 - RNA, 19 nt, Homo sapiens
  misc_RNA (1)...(19): siRNA sense strand
caggagagcuaugagaaaa

SEQ ID NO: 578530 - RNA, 19 nt, Homo sapiens
  misc_RNA (1)...(19): siRNA sense strand
ugucgaggauaaacugaau

SEQ ID NO: 578531 - RNA, 19 nt, Homo sapiens
  misc_RNA (1)...(19): siRNA sense strand
uaacuaucuuggaugucaa

SEQ ID NO: 578532 - RNA, 19 nt, Homo sapiens
  misc_RNA (1)...(19): siRNA sense strand
acuaugaggacucgaguuu

SEQ ID NO: 578533 - RNA, 19 nt, Homo sapiens
  misc_RNA (1)...(19): siRNA sense strand
ggaugcagcuuuucucucu

SEQ ID NO: 578534 - RNA, 19 nt, Homo sapiens
  misc_RNA (1)...(19): siRNA sense strand
acuaugagcaguugagaga

SEQ ID NO: 578535 - RNA, 19 nt, Homo sapiens
  misc_RNA (1)...(19): siRNA sense strand
caacuccgacacugggauu

SEQ ID NO: 578536 - RNA, 19 nt, Homo sapiens
  misc_RNA (1)...(19): siRNA sense strand
caucuucucugugaaugca

SEQ ID NO: 578537 - RNA, 19 nt, Homo sapiens
  misc_RNA (1)...(19): siRNA sense strand
gccuccaucuucucuguga

SEQ ID NO: 578538 - RNA, 19 nt, Homo sapiens
  misc_RNA (1)...(19): siRNA sense strand
aaaggaacaccaccucugu

SEQ ID NO: 578539 - RNA, 19 nt, Homo sapiens
  misc_RNA (1)...(19): siRNA sense strand
ccgacacgcuuaucaacca

SEQ ID NO: 578540 - RNA, 19 nt, Homo sapiens
  misc_RNA (1)...(19): siRNA sense strand
gagaaaagcgagccucuuc

SEQ ID NO: 578541 - RNA, 19 nt, Homo sapiens
  misc_RNA (1)...(19): siRNA sense strand
uaagguagaugcaaacaaa

SEQ ID NO: 578542 - RNA, 19 nt, Homo sapiens
  misc_RNA (1)...(19): siRNA sense strand
gaaaguagcagacguuaau

SEQ ID NO: 578543 - RNA, 19 nt, Homo sapiens
  misc_RNA (1)...(19): siRNA sense strand
ggaauaaacgggaaauuga

SEQ ID NO: 578544 - RNA, 19 nt, Homo sapiens
  misc_RNA (1)...(19): siRNA sense strand
ggaaauugaccuacucuuu

SEQ ID NO: 578545 - RNA, 19 nt, Homo sapiens
  misc_RNA (1)...(19): siRNA sense strand
gaagagagcugugagaaaa

SEQ ID NO: 578546 - RNA, 19 nt, Homo sapiens
  misc_RNA (1)...(19): siRNA sense strand
gagauugcaugcucuauuc

SEQ ID NO: 578547 - RNA, 19 nt, Homo sapiens
  misc_RNA (1)...(19): siRNA sense strand
gaagucaguugauaauuac

SEQ ID NO: 578548 - RNA, 19 nt, Homo sapiens
  misc_RNA (1)...(19): siRNA sense strand
uacaaucacuggacuauga

SEQ ID NO: 578549 - RNA, 19 nt, Homo sapiens
  misc_RNA (1)...(19): siRNA sense strand
cagacacgcuccuuaguga

SEQ ID NO: 578550 - RNA, 19 nt, Homo sapiens
  misc_RNA (1)...(19): siRNA sense strand
gaacuguaaucgcgcuguu

SEQ ID NO: 578551 - RNA, 19 nt, Homo sapiens
  misc_RNA (1)...(19): siRNA sense strand
ucugaugucugauaaggua

SEQ ID NO: 578552 - RNA, 19 nt, Homo sapiens
  misc_RNA (1)...(19): siRNA sense strand
gcacuucucucuggaugug

SEQ ID NO: 578553 - RNA, 19 nt, Homo sapiens
  misc_RNA (1)...(19): siRNA sense strand
ccaguucgaucucugaaga

SEQ ID NO: 578554 - RNA, 19 nt, Homo sapiens
  misc_RNA (1)...(19): siRNA sense strand
aaucucaacucuacaauca

SEQ ID NO: 578555 - RNA, 19 nt, Homo sapiens
  misc_RNA (1)...(19): siRNA sense strand
ggaaaucucaacucuacaa

SEQ ID NO: 578556 - RNA, 19 nt, Homo sapiens
  misc_RNA (1)...(19): siRNA sense strand
uagcagacguuaaugacaa

SEQ ID NO: 578557 - RNA, 19 nt, Homo sapiens
  misc_RNA (1)...(19): siRNA sense strand
ugagauccuucgacuauga

SEQ ID NO: 578558 - RNA, 19 nt, Homo sapiens
  misc_RNA (1)...(19): siRNA sense strand
gaaauugaccuacucuuuu

SEQ ID NO: 578559 - RNA, 19 nt, Homo sapiens
  misc_RNA (1)...(19): siRNA sense strand
ggauccagaugagggaaua

SEQ ID NO: 578560 - RNA, 19 nt, Homo sapiens
  misc_RNA (1)...(19): siRNA sense strand
ggagaagucaguugauaau

SEQ ID NO: 578561 - RNA, 19 nt, Homo sapiens
  misc_RNA (1)...(19): siRNA sense strand
uggaguagaaguagaaaua

SEQ ID NO: 578562 - RNA, 19 nt, Homo sapiens
  misc_RNA (1)...(19): siRNA sense strand
gggaauaaacgggaaauug

SEQ ID NO: 578563 - RNA, 19 nt, Homo sapiens
  misc_RNA (1)...(19): siRNA sense strand
cuagggaccuggacagaga

SEQ ID NO: 578564 - RNA, 19 nt, Homo sapiens
  misc_RNA (1)...(19): siRNA sense strand
ugagagaccuacaguugug

SEQ ID NO: 578565 - RNA, 19 nt, Homo sapiens
  misc_RNA (1)...(19): siRNA sense strand
ggaguagaaguagaaauaa

SEQ ID NO: 578566 - RNA, 19 nt, Homo sapiens
  misc_RNA (1)...(19): siRNA sense strand
gaggaagagucaccugauc

SEQ ID NO: 578567 - RNA, 19 nt, Homo sapiens
  misc_RNA (1)...(19): siRNA sense strand
gggcuuuccugcagaccua

SEQ ID NO: 578568 - RNA, 19 nt, Homo sapiens
  misc_RNA (1)...(19): siRNA sense strand
guggugaacuuuaacaucu

SEQ ID NO: 578569 - RNA, 19 nt, Homo sapiens
  misc_RNA (1)...(19): siRNA sense strand
gcacaagucacgccugcuu

SEQ ID NO: 578570 - RNA, 19 nt, Homo sapiens
  misc_RNA (1)...(19): siRNA sense strand
guugagagaccuacaguug

SEQ ID NO: 578571 - RNA, 19 nt, Homo sapiens
  misc_RNA (1)...(19): siRNA sense strand
cggaggagcuggacaaagg

SEQ ID NO: 578572 - RNA, 19 nt, Homo sapiens
  misc_RNA (1)...(19): siRNA sense strand
aagcggaacugauggacaa

SEQ ID NO: 578573 - RNA, 19 nt, Homo sapiens
  misc_RNA (1)...(19): siRNA sense strand
gaacuuuaacaucuugguu

SEQ ID NO: 578574 - RNA, 19 nt, Homo sapiens
  misc_RNA (1)...(19): siRNA sense strand
ccuccuauguauccauuaa

SEQ ID NO: 578575 - RNA, 19 nt, Homo sapiens
  misc_RNA (1)...(19): siRNA sense strand
ucaccucucugaccaguuc

SEQ ID NO: 578576 - RNA, 19 nt, Homo sapiens
  misc_RNA (1)...(19): siRNA sense strand
gauggaggcgcucuuguug

SEQ ID NO: 578577 - RNA, 19 nt, Homo sapiens
  misc_RNA (1)...(19): siRNA sense strand
ggugaacuuuaacaucuug

SEQ ID NO: 578578 - RNA, 19 nt, Homo sapiens
  misc_RNA (1)...(19): siRNA sense strand
gauucuaccucauggaagu

SEQ ID NO: 578579 - RNA, 19 nt, Homo sapiens
  misc_RNA (1)...(19): siRNA sense strand
uuuccgggaugaagaguua

SEQ ID NO: 578580 - RNA, 19 nt, Homo sapiens
  misc_RNA (1)...(19): siRNA sense strand
gcagacacgcuccuuagug

SEQ ID NO: 578581 - RNA, 19 nt, Homo sapiens
  misc_RNA (1)...(19): siRNA sense strand
ggacagagacgcgcucaag

SEQ ID NO: 578582 - RNA, 19 nt, Homo sapiens
  misc_RNA (1)...(19): siRNA sense strand
ggauggaggcgcucuuguu

SEQ ID NO: 578583 - RNA, 19 nt, Homo sapiens
  misc_RNA (1)...(19): siRNA sense strand
gcacucggcugcucaugcu

SEQ ID NO: 578584 - RNA, 19 nt, Homo sapiens
  misc_RNA (1)...(19): siRNA sense strand
caucuugguugagaacaaa

SEQ ID NO: 578585 - RNA, 19 nt, Homo sapiens
  misc_RNA (1)...(19): siRNA sense strand
gaacugauggacaaaagua

SEQ ID NO: 578586 - RNA, 19 nt, Homo sapiens
  misc_RNA (1)...(19): siRNA sense strand
guacaggacgugaaugaca

SEQ ID NO: 578587 - RNA, 19 nt, Homo sapiens
  misc_RNA (1)...(19): siRNA sense strand
gaccuaggcaguaucaaga

SEQ ID NO: 578588 - RNA, 19 nt, Homo sapiens
  misc_RNA (1)...(19): siRNA sense strand
cugauaagguagaugcaaa

SEQ ID NO: 578589 - RNA, 19 nt, Homo sapiens
  misc_RNA (1)...(19): siRNA sense strand
gcccuuguccuccuaugua

SEQ ID NO: 578590 - RNA, 19 nt, Homo sapiens
  misc_RNA (1)...(19): siRNA sense strand
ggaugaagaguuaaaagua

SEQ ID NO: 578591 - RNA, 19 nt, Homo sapiens
  misc_RNA (1)...(19): siRNA sense strand
caaagaagaacggcgaguu

SEQ ID NO: 578592 - RNA, 19 nt, Homo sapiens
  misc_RNA (1)...(19): siRNA sense strand
aagcgagccucuucugaug

SEQ ID NO: 578593 - RNA, 19 nt, Homo sapiens
  misc_RNA (1)...(19): siRNA sense strand
gagcccugcuggacagaga

SEQ ID NO: 578594 - RNA, 19 nt, Homo sapiens
  misc_RNA (1)...(19): siRNA sense strand
gaguacagcgugaguguuc

SEQ ID NO: 578595 - RNA, 19 nt, Homo sapiens
  misc_RNA (1)...(19): siRNA sense strand
gcuccaaucugcacuucuc

SEQ ID NO: 578596 - RNA, 19 nt, Homo sapiens
  misc_RNA (1)...(19): siRNA sense strand
ugaagagagcugugagaaa

SEQ ID NO: 578597 - RNA, 19 nt, Homo sapiens
  misc_RNA (1)...(19): siRNA sense strand
ucggagacuuuccaacuug

SEQ ID NO: 578598 - RNA, 19 nt, Homo sapiens
  misc_RNA (1)...(19): siRNA sense strand
uguguguggugaacuuuaa

SEQ ID NO: 578599 - RNA, 19 nt, Homo sapiens
  misc_RNA (1)...(19): siRNA sense strand
gaccucacacucuaucuug

SEQ ID NO: 578600 - RNA, 19 nt, Homo sapiens
  misc_RNA (1)...(19): siRNA sense strand
ucugagauccuucgacuau

SEQ ID NO: 578601 - RNA, 19 nt, Homo sapiens
  misc_RNA (1)...(19): siRNA sense strand
ugacaacccacccaauuuc

SEQ ID NO: 578602 - RNA, 19 nt, Homo sapiens
  misc_RNA (1)...(19): siRNA sense strand
uuggagaagucaguugaua

SEQ ID NO: 578603 - RNA, 19 nt, Homo sapiens
  misc_RNA (1)...(19): siRNA sense strand
ucacuggacuaugaagaau

SEQ ID NO: 578604 - RNA, 19 nt, Homo sapiens
  misc_RNA (1)...(19): siRNA sense strand
gaucuggaccucacacucu

SEQ ID NO: 578605 - RNA, 19 nt, Homo sapiens
  misc_RNA (1)...(19): siRNA sense strand
ccuaggaauuugccuuuua

SEQ ID NO: 578606 - RNA, 19 nt, Homo sapiens
  misc_RNA (1)...(19): siRNA sense strand
gagaagucaguugauaauu

SEQ ID NO: 578607 - RNA, 19 nt, Homo sapiens
  misc_RNA (1)...(19): siRNA sense strand
uacaggacgugaaugacaa

SEQ ID NO: 578608 - RNA, 19 nt, Homo sapiens
  misc_RNA (1)...(19): siRNA sense strand
gguagaugcaaacaaagaa

SEQ ID NO: 578609 - RNA, 19 nt, Homo sapiens
  misc_RNA (1)...(19): siRNA sense strand
ggaccucacacucuaucuu

SEQ ID NO: 578610 - RNA, 19 nt, Homo sapiens
  misc_RNA (1)...(19): siRNA sense strand
cagcgagccaggacucuuu

SEQ ID NO: 578611 - RNA, 19 nt, Homo sapiens
  misc_RNA (1)...(19): siRNA sense strand
gucucuaucuucucuguga

SEQ ID NO: 578612 - RNA, 19 nt, Homo sapiens
  misc_RNA (1)...(19): siRNA sense strand
uuacgguccucgacgcaaa

SEQ ID NO: 578613 - RNA, 19 nt, Homo sapiens
  misc_RNA (1)...(19): siRNA sense strand
uuuaacaucuugguugaga

SEQ ID NO: 578614 - RNA, 19 nt, Homo sapiens
  misc_RNA (1)...(19): siRNA sense strand
ggugguagcgguggacaaa

SEQ ID NO: 578615 - RNA, 19 nt, Homo sapiens
  misc_RNA (1)...(19): siRNA sense strand
uagcguacaugauggugau

SEQ ID NO: 578616 - RNA, 19 nt, Homo sapiens
  misc_RNA (1)...(19): siRNA sense strand
gugguaagcggaacugaug

SEQ ID NO: 578617 - RNA, 19 nt, Homo sapiens
  misc_RNA (1)...(19): siRNA sense strand
gcgagccucuucugauguc

SEQ ID NO: 578618 - RNA, 19 nt, Homo sapiens
  misc_RNA (1)...(19): siRNA sense strand
ugguagcgguggacaaaga

SEQ ID NO: 578619 - RNA, 19 nt, Homo sapiens
  misc_RNA (1)...(19): siRNA sense strand
ccuacucccuggcugaaga

SEQ ID NO: 578620 - RNA, 19 nt, Homo sapiens
  misc_RNA (1)...(19): siRNA sense strand
aaugacaacccacccaauu

SEQ ID NO: 578621 - RNA, 19 nt, Homo sapiens
  misc_RNA (1)...(19): siRNA sense strand
cgcaucgucuccagaggua

SEQ ID NO: 578622 - RNA, 19 nt, Homo sapiens
  misc_RNA (1)...(19): siRNA sense strand
ugagauugcaugcucuauu

SEQ ID NO: 578623 - RNA, 19 nt, Homo sapiens
  misc_RNA (1)...(19): siRNA sense strand
gaaaucucaacucuacaau

SEQ ID NO: 578624 - RNA, 19 nt, Homo sapiens
  misc_RNA (1)...(19): siRNA sense strand
ggggaaaucucaacucuac

SEQ ID NO: 578625 - RNA, 19 nt, Homo sapiens
  misc_RNA (1)...(19): siRNA sense strand
gaauaaacgggaaauugac

SEQ ID NO: 578626 - RNA, 19 nt, Homo sapiens
  misc_RNA (1)...(19): siRNA sense strand
ggaugugggugugaacucu

SEQ ID NO: 578627 - RNA, 19 nt, Homo sapiens
  misc_RNA (1)...(19): siRNA sense strand
uaaggugguggucacagua

SEQ ID NO: 578628 - RNA, 19 nt, Homo sapiens
  misc_RNA (1)...(19): siRNA sense strand
gagacuuuccaacuugauu

SEQ ID NO: 578629 - RNA, 19 nt, Homo sapiens
  misc_RNA (1)...(19): siRNA sense strand
gcgugaguguuccagagaa

SEQ ID NO: 578630 - RNA, 19 nt, Homo sapiens
  misc_RNA (1)...(19): siRNA sense strand
uggagaagucaguugauaa

SEQ ID NO: 578631 - RNA, 19 nt, Homo sapiens
  misc_RNA (1)...(19): siRNA sense strand
cagauucuaccucauggaa

SEQ ID NO: 578632 - RNA, 19 nt, Homo sapiens
  misc_RNA (1)...(19): siRNA sense strand
acuaugagcaguugagaga

SEQ ID NO: 578633 - RNA, 19 nt, Homo sapiens
  misc_RNA (1)...(19): siRNA sense strand
acuguaaucgcgcuguuua

SEQ ID NO: 578634 - RNA, 19 nt, Homo sapiens
  misc_RNA (1)...(19): siRNA sense strand
caguacaggacgugaauga

SEQ ID NO: 578635 - RNA, 19 nt, Homo sapiens
  misc_RNA (1)...(19): siRNA sense strand
cggagacuuuccaacuuga

SEQ ID NO: 578636 - RNA, 19 nt, Homo sapiens
  misc_RNA (1)...(19): siRNA sense strand
ccucuucugaugucugaua

SEQ ID NO: 578637 - RNA, 19 nt, Homo sapiens
  misc_RNA (1)...(19): siRNA sense strand
agagguaggacgcagcuuu

SEQ ID NO: 578638 - RNA, 19 nt, Homo sapiens
  misc_RNA (1)...(19): siRNA sense strand
cuaggaauuugccuuuuaa

SEQ ID NO: 578639 - RNA, 19 nt, Homo sapiens
  misc_RNA (1)...(19): siRNA sense strand
ggaagugguagcucaggau

SEQ ID NO: 578640 - RNA, 19 nt, Homo sapiens
  misc_RNA (1)...(19): siRNA sense strand
gagaaaagcgagccucuuc

SEQ ID NO: 578641 - RNA, 19 nt, Homo sapiens
  misc_RNA (1)...(19): siRNA sense strand
uaagguagaugcaaacaaa

SEQ ID NO: 578642 - RNA, 19 nt, Homo sapiens
  misc_RNA (1)...(19): siRNA sense strand
gaaaguagcagacguuaau

SEQ ID NO: 578643 - RNA, 19 nt, Homo sapiens
  misc_RNA (1)...(19): siRNA sense strand
ggaauaaacgggaaauuga

SEQ ID NO: 578644 - RNA, 19 nt, Homo sapiens
  misc_RNA (1)...(19): siRNA sense strand
ggaaauugaccuacucuuu

SEQ ID NO: 578645 - RNA, 19 nt, Homo sapiens
  misc_RNA (1)...(19): siRNA sense strand
gaagagagcugugagaaaa

SEQ ID NO: 578646 - RNA, 19 nt, Homo sapiens
  misc_RNA (1)...(19): siRNA sense strand
gagauugcaugcucuauuc

SEQ ID NO: 578647 - RNA, 19 nt, Homo sapiens
  misc_RNA (1)...(19): siRNA sense strand
gaagucaguugauaauuac

SEQ ID NO: 578648 - RNA, 19 nt, Homo sapiens
  misc_RNA (1)...(19): siRNA sense strand
uacaaucacuggacuauga

SEQ ID NO: 578649 - RNA, 19 nt, Homo sapiens
  misc_RNA (1)...(19): siRNA sense strand
cagacacgcuccuuaguga

SEQ ID NO: 578650 - RNA, 19 nt, Homo sapiens
  misc_RNA (1)...(19): siRNA sense strand
gaacuguaaucgcgcuguu

SEQ ID NO: 578651 - RNA, 19 nt, Homo sapiens
  misc_RNA (1)...(19): siRNA sense strand
ucugaugucugauaaggua

SEQ ID NO: 578652 - RNA, 19 nt, Homo sapiens
  misc_RNA (1)...(19): siRNA sense strand
gcacuucucucuggaugug

SEQ ID NO: 578653 - RNA, 19 nt, Homo sapiens
  misc_RNA (1)...(19): siRNA sense strand
ccaguucgaucucugaaga

SEQ ID NO: 578654 - RNA, 19 nt, Homo sapiens
  misc_RNA (1)...(19): siRNA sense strand
aaucucaacucuacaauca

SEQ ID NO: 578655 - RNA, 19 nt, Homo sapiens
  misc_RNA (1)...(19): siRNA sense strand
ggaaaucucaacucuacaa

SEQ ID NO: 578656 - RNA, 19 nt, Homo sapiens
  misc_RNA (1)...(19): siRNA sense strand
uagcagacguuaaugacaa

SEQ ID NO: 578657 - RNA, 19 nt, Homo sapiens
  misc_RNA (1)...(19): siRNA sense strand
ugagauccuucgacuauga

SEQ ID NO: 578658 - RNA, 19 nt, Homo sapiens
  misc_RNA (1)...(19): siRNA sense strand
gaaauugaccuacucuuuu

SEQ ID NO: 578659 - RNA, 19 nt, Homo sapiens
  misc_RNA (1)...(19): siRNA sense strand
ggauccagaugagggaaua

SEQ ID NO: 578660 - RNA, 19 nt, Homo sapiens
  misc_RNA (1)...(19): siRNA sense strand
ggagaagucaguugauaau

SEQ ID NO: 578661 - RNA, 19 nt, Homo sapiens
  misc_RNA (1)...(19): siRNA sense strand
uggaguagaaguagaaaua

SEQ ID NO: 578662 - RNA, 19 nt, Homo sapiens
  misc_RNA (1)...(19): siRNA sense strand
gggaauaaacgggaaauug

SEQ ID NO: 578663 - RNA, 19 nt, Homo sapiens
  misc_RNA (1)...(19): siRNA sense strand
cuagggaccuggacagaga

SEQ ID NO: 578664 - RNA, 19 nt, Homo sapiens
  misc_RNA (1)...(19): siRNA sense strand
ugagagaccuacaguugug

SEQ ID NO: 578665 - RNA, 19 nt, Homo sapiens
  misc_RNA (1)...(19): siRNA sense strand
ggaguagaaguagaaauaa

SEQ ID NO: 578666 - RNA, 19 nt, Homo sapiens
  misc_RNA (1)...(19): siRNA sense strand
gaggaagagucaccugauc

SEQ ID NO: 578667 - RNA, 19 nt, Homo sapiens
  misc_RNA (1)...(19): siRNA sense strand
gggcuuuccugcagaccua

SEQ ID NO: 578668 - RNA, 19 nt, Homo sapiens
  misc_RNA (1)...(19): siRNA sense strand
guggugaacuuuaacaucu

SEQ ID NO: 578669 - RNA, 19 nt, Homo sapiens
  misc_RNA (1)...(19): siRNA sense strand
gcacaagucacgccugcuu

SEQ ID NO: 578670 - RNA, 19 nt, Homo sapiens
  misc_RNA (1)...(19): siRNA sense strand
guugagagaccuacaguug

SEQ ID NO: 578671 - RNA, 19 nt, Homo sapiens
  misc_RNA (1)...(19): siRNA sense strand
cggaggagcuggacaaagg

SEQ ID NO: 578672 - RNA, 19 nt, Homo sapiens
  misc_RNA (1)...(19): siRNA sense strand
aagcggaacugauggacaa

SEQ ID NO: 578673 - RNA, 19 nt, Homo sapiens
  misc_RNA (1)...(19): siRNA sense strand
gaacuuuaacaucuugguu

SEQ ID NO: 578674 - RNA, 19 nt, Homo sapiens
  misc_RNA (1)...(19): siRNA sense strand
ccuccuauguauccauuaa

SEQ ID NO: 578675 - RNA, 19 nt, Homo sapiens
  misc_RNA (1)...(19): siRNA sense strand
ucaccucucugaccaguuc

SEQ ID NO: 578676 - RNA, 19 nt, Homo sapiens
  misc_RNA (1)...(19): siRNA sense strand
gauggaggcgcucuuguug

SEQ ID NO: 578677 - RNA, 19 nt, Homo sapiens
  misc_RNA (1)...(19): siRNA sense strand
ggugaacuuuaacaucuug

SEQ ID NO: 578678 - RNA, 19 nt, Homo sapiens
  misc_RNA (1)...(19): siRNA sense strand
gauucuaccucauggaagu

SEQ ID NO: 578679 - RNA, 19 nt, Homo sapiens
  misc_RNA (1)...(19): siRNA sense strand
uuuccgggaugaagaguua

SEQ ID NO: 578680 - RNA, 19 nt, Homo sapiens
  misc_RNA (1)...(19): siRNA sense strand
gcagacacgcuccuuagug

SEQ ID NO: 578681 - RNA, 19 nt, Homo sapiens
  misc_RNA (1)...(19): siRNA sense strand
ggacagagacgcgcucaag

SEQ ID NO: 578682 - RNA, 19 nt, Homo sapiens
  misc_RNA (1)...(19): siRNA sense strand
ggauggaggcgcucuuguu

SEQ ID NO: 578683 - RNA, 19 nt, Homo sapiens
  misc_RNA (1)...(19): siRNA sense strand
gcacucggcugcucaugcu

SEQ ID NO: 578684 - RNA, 19 nt, Homo sapiens
  misc_RNA (1)...(19): siRNA sense strand
caucuugguugagaacaaa

SEQ ID NO: 578685 - RNA, 19 nt, Homo sapiens
  misc_RNA (1)...(19): siRNA sense strand
gaacugauggacaaaagua

SEQ ID NO: 578686 - RNA, 19 nt, Homo sapiens
  misc_RNA (1)...(19): siRNA sense strand
guacaggacgugaaugaca

SEQ ID NO: 578687 - RNA, 19 nt, Homo sapiens
  misc_RNA (1)...(19): siRNA sense strand
gaccuaggcaguaucaaga

SEQ ID NO: 578688 - RNA, 19 nt, Homo sapiens
  misc_RNA (1)...(19): siRNA sense strand
cugauaagguagaugcaaa

SEQ ID NO: 578689 - RNA, 19 nt, Homo sapiens
  misc_RNA (1)...(19): siRNA sense strand
gcccuuguccuccuaugua

SEQ ID NO: 578690 - RNA, 19 nt, Homo sapiens
  misc_RNA (1)...(19): siRNA sense strand
ggaugaagaguuaaaagua

SEQ ID NO: 578691 - RNA, 19 nt, Homo sapiens
  misc_RNA (1)...(19): siRNA sense strand
caaagaagaacggcgaguu

SEQ ID NO: 578692 - RNA, 19 nt, Homo sapiens
  misc_RNA (1)...(19): siRNA sense strand
aagcgagccucuucugaug

SEQ ID NO: 578693 - RNA, 19 nt, Homo sapiens
  misc_RNA (1)...(19): siRNA sense strand
gagcccugcuggacagaga

SEQ ID NO: 578694 - RNA, 19 nt, Homo sapiens
  misc_RNA (1)...(19): siRNA sense strand
gaguacagcgugaguguuc

SEQ ID NO: 578695 - RNA, 19 nt, Homo sapiens
  misc_RNA (1)...(19): siRNA sense strand
gcuccaaucugcacuucuc

SEQ ID NO: 578696 - RNA, 19 nt, Homo sapiens
  misc_RNA (1)...(19): siRNA sense strand
ugaagagagcugugagaaa

SEQ ID NO: 578697 - RNA, 19 nt, Homo sapiens
  misc_RNA (1)...(19): siRNA sense strand
ucggagacuuuccaacuug

SEQ ID NO: 578698 - RNA, 19 nt, Homo sapiens
  misc_RNA (1)...(19): siRNA sense strand
uguguguggugaacuuuaa

SEQ ID NO: 578699 - RNA, 19 nt, Homo sapiens
  misc_RNA (1)...(19): siRNA sense strand
gaccucacacucuaucuug

SEQ ID NO: 578700 - RNA, 19 nt, Homo sapiens
  misc_RNA (1)...(19): siRNA sense strand
ucugagauccuucgacuau

SEQ ID NO: 578701 - RNA, 19 nt, Homo sapiens
  misc_RNA (1)...(19): siRNA sense strand
ugacaacccacccaauuuc

SEQ ID NO: 578702 - RNA, 19 nt, Homo sapiens
  misc_RNA (1)...(19): siRNA sense strand
uuggagaagucaguugaua

SEQ ID NO: 578703 - RNA, 19 nt, Homo sapiens
  misc_RNA (1)...(19): siRNA sense strand
ucacuggacuaugaagaau

SEQ ID NO: 578704 - RNA, 19 nt, Homo sapiens
  misc_RNA (1)...(19): siRNA sense strand
gaucuggaccucacacucu

SEQ ID NO: 578705 - RNA, 19 nt, Homo sapiens
  misc_RNA (1)...(19): siRNA sense strand
ccuaggaauuugccuuuua

SEQ ID NO: 578706 - RNA, 19 nt, Homo sapiens
  misc_RNA (1)...(19): siRNA sense strand
gagaagucaguugauaauu

SEQ ID NO: 578707 - RNA, 19 nt, Homo sapiens
  misc_RNA (1)...(19): siRNA sense strand
uacaggacgugaaugacaa

SEQ ID NO: 578708 - RNA, 19 nt, Homo sapiens
  misc_RNA (1)...(19): siRNA sense strand
gguagaugcaaacaaagaa

SEQ ID NO: 578709 - RNA, 19 nt, Homo sapiens
  misc_RNA (1)...(19): siRNA sense strand
ggaccucacacucuaucuu

SEQ ID NO: 578710 - RNA, 19 nt, Homo sapiens
  misc_RNA (1)...(19): siRNA sense strand
cagcgagccaggacucuuu

SEQ ID NO: 578711 - RNA, 19 nt, Homo sapiens
  misc_RNA (1)...(19): siRNA sense strand
gucucuaucuucucuguga

SEQ ID NO: 578712 - RNA, 19 nt, Homo sapiens
  misc_RNA (1)...(19): siRNA sense strand
uuacgguccucgacgcaaa

SEQ ID NO: 578713 - RNA, 19 nt, Homo sapiens
  misc_RNA (1)...(19): siRNA sense strand
uuuaacaucuugguugaga

SEQ ID NO: 578714 - RNA, 19 nt, Homo sapiens
  misc_RNA (1)...(19): siRNA sense strand
ggugguagcgguggacaaa

SEQ ID NO: 578715 - RNA, 19 nt, Homo sapiens
  misc_RNA (1)...(19): siRNA sense strand
uagcguacaugauggugau

SEQ ID NO: 578716 - RNA, 19 nt, Homo sapiens
  misc_RNA (1)...(19): siRNA sense strand
gugguaagcggaacugaug

SEQ ID NO: 578717 - RNA, 19 nt, Homo sapiens
  misc_RNA (1)...(19): siRNA sense strand
gcgagccucuucugauguc

SEQ ID NO: 578718 - RNA, 19 nt, Homo sapiens
  misc_RNA (1)...(19): siRNA sense strand
ugguagcgguggacaaaga

SEQ ID NO: 578719 - RNA, 19 nt, Homo sapiens
  misc_RNA (1)...(19): siRNA sense strand
ccuacucccuggcugaaga

SEQ ID NO: 578720 - RNA, 19 nt, Homo sapiens
  misc_RNA (1)...(19): siRNA sense strand
aaugacaacccacccaauu

SEQ ID NO: 578721 - RNA, 19 nt, Homo sapiens
  misc_RNA (1)...(19): siRNA sense strand
cgcaucgucuccagaggua

SEQ ID NO: 578722 - RNA, 19 nt, Homo sapiens
  misc_RNA (1)...(19): siRNA sense strand
ugagauugcaugcucuauu

SEQ ID NO: 578723 - RNA, 19 nt, Homo sapiens
  misc_RNA (1)...(19): siRNA sense strand
gaaaucucaacucuacaau

SEQ ID NO: 578724 - RNA, 19 nt, Homo sapiens
  misc_RNA (1)...(19): siRNA sense strand
ggggaaaucucaacucuac

SEQ ID NO: 578725 - RNA, 19 nt, Homo sapiens
  misc_RNA (1)...(19): siRNA sense strand
gaauaaacgggaaauugac

SEQ ID NO: 578726 - RNA, 19 nt, Homo sapiens
  misc_RNA (1)...(19): siRNA sense strand
ggaugugggugugaacucu

SEQ ID NO: 578727 - RNA, 19 nt, Homo sapiens
  misc_RNA (1)...(19): siRNA sense strand
uaaggugguggucacagua

SEQ ID NO: 578728 - RNA, 19 nt, Homo sapiens
  misc_RNA (1)...(19): siRNA sense strand
gagacuuuccaacuugauu

SEQ ID NO: 578729 - RNA, 19 nt, Homo sapiens
  misc_RNA (1)...(19): siRNA sense strand
gcgugaguguuccagagaa

SEQ ID NO: 578730 - RNA, 19 nt, Homo sapiens
  misc_RNA (1)...(19): siRNA sense strand
uggagaagucaguugauaa

SEQ ID NO: 578731 - RNA, 19 nt, Homo sapiens
  misc_RNA (1)...(19): siRNA sense strand
cagauucuaccucauggaa

SEQ ID NO: 578732 - RNA, 19 nt, Homo sapiens
  misc_RNA (1)...(19): siRNA sense strand
acuaugagcaguugagaga

SEQ ID NO: 578733 - RNA, 19 nt, Homo sapiens
  misc_RNA (1)...(19): siRNA sense strand
acuguaaucgcgcuguuua

SEQ ID NO: 578734 - RNA, 19 nt, Homo sapiens
  misc_RNA (1)...(19): siRNA sense strand
caguacaggacgugaauga

SEQ ID NO: 578735 - RNA, 19 nt, Homo sapiens
  misc_RNA (1)...(19): siRNA sense strand
cggagacuuuccaacuuga

SEQ ID NO: 578736 - RNA, 19 nt, Homo sapiens
  misc_RNA (1)...(19): siRNA sense strand
ccucuucugaugucugaua

SEQ ID NO: 578737 - RNA, 19 nt, Homo sapiens
  misc_RNA (1)...(19): siRNA sense strand
agagguaggacgcagcuuu

SEQ ID NO: 578738 - RNA, 19 nt, Homo sapiens
  misc_RNA (1)...(19): siRNA sense strand
cuaggaauuugccuuuuaa

SEQ ID NO: 578739 - RNA, 19 nt, Homo sapiens
  misc_RNA (1)...(19): siRNA sense strand
ggaagugguagcucaggau

SEQ ID NO: 578740 - RNA, 19 nt, Homo sapiens
  misc_RNA (1)...(19): siRNA sense strand
gagaaaagcgagccucuuc

SEQ ID NO: 578741 - RNA, 19 nt, Homo sapiens
  misc_RNA (1)...(19): siRNA sense strand
gaagaagucucagaauaua

SEQ ID NO: 578742 - RNA, 19 nt, Homo sapiens
  misc_RNA (1)...(19): siRNA sense strand
gggaagaagucucagaaua

SEQ ID NO: 578743 - RNA, 19 nt, Homo sapiens
  misc_RNA (1)...(19): siRNA sense strand
gaagauacagugaagauuu

SEQ ID NO: 578744 - RNA, 19 nt, Homo sapiens
  misc_RNA (1)...(19): siRNA sense strand
gaaauggccuagucacaug

SEQ ID NO: 578745 - RNA, 19 nt, Homo sapiens
  misc_RNA (1)...(19): siRNA sense strand
ggaagaagucucagaauau

SEQ ID NO: 578746 - RNA, 19 nt, Homo sapiens
  misc_RNA (1)...(19): siRNA sense strand
gaaaagaccuauggaaauu

SEQ ID NO: 578747 - RNA, 19 nt, Homo sapiens
  misc_RNA (1)...(19): siRNA sense strand
ugacaaaccuggagauucu

SEQ ID NO: 578748 - RNA, 19 nt, Homo sapiens
  misc_RNA (1)...(19): siRNA sense strand
uaucacagcuauuucaguu

SEQ ID NO: 578749 - RNA, 19 nt, Homo sapiens
  misc_RNA (1)...(19): siRNA sense strand
caacucaaacgguuacuuu

SEQ ID NO: 578750 - RNA, 19 nt, Homo sapiens
  misc_RNA (1)...(19): siRNA sense strand
ucacagcuauuucaguuga

SEQ ID NO: 578751 - RNA, 19 nt, Homo sapiens
  misc_RNA (1)...(19): siRNA sense strand
guuaccagcucaacucaaa

SEQ ID NO: 578752 - RNA, 19 nt, Homo sapiens
  misc_RNA (1)...(19): siRNA sense strand
cauguucuauuccagauaa

SEQ ID NO: 578753 - RNA, 19 nt, Homo sapiens
  misc_RNA (1)...(19): siRNA sense strand
aagcgagccucuucugaua

SEQ ID NO: 578754 - RNA, 19 nt, Homo sapiens
  misc_RNA (1)...(19): siRNA sense strand
ggguagagguggaaauaau

SEQ ID NO: 578755 - RNA, 19 nt, Homo sapiens
  misc_RNA (1)...(19): siRNA sense strand
ugaggacucuggauucuau

SEQ ID NO: 578756 - RNA, 19 nt, Homo sapiens
  misc_RNA (1)...(19): siRNA sense strand
gcaccagaagucacaguua

SEQ ID NO: 578757 - RNA, 19 nt, Homo sapiens
  misc_RNA (1)...(19): siRNA sense strand
gagccuccaucuuaucuau

SEQ ID NO: 578758 - RNA, 19 nt, Homo sapiens
  misc_RNA (1)...(19): siRNA sense strand
ggacagggaagaagucuca

SEQ ID NO: 578759 - RNA, 19 nt, Homo sapiens
  misc_RNA (1)...(19): siRNA sense strand
ggacagaacagagggaaau

SEQ ID NO: 578760 - RNA, 19 nt, Homo sapiens
  misc_RNA (1)...(19): siRNA sense strand
cgauaaugcucccguguuc

SEQ ID NO: 578761 - RNA, 19 nt, Homo sapiens
  misc_RNA (1)...(19): siRNA sense strand
gggcuuuccugcagaccua

SEQ ID NO: 578762 - RNA, 19 nt, Homo sapiens
  misc_RNA (1)...(19): siRNA sense strand
ugccaggauucucauaaua

SEQ ID NO: 578763 - RNA, 19 nt, Homo sapiens
  misc_RNA (1)...(19): siRNA sense strand
gcacaagucacgccugcuu

SEQ ID NO: 578764 - RNA, 19 nt, Homo sapiens
  misc_RNA (1)...(19): siRNA sense strand
gugcaccucuguccuccua

SEQ ID NO: 578765 - RNA, 19 nt, Homo sapiens
  misc_RNA (1)...(19): siRNA sense strand
cuagucacauguucuauuc

SEQ ID NO: 578766 - RNA, 19 nt, Homo sapiens
  misc_RNA (1)...(19): siRNA sense strand
ggaaauggccuagucacau

SEQ ID NO: 578767 - RNA, 19 nt, Homo sapiens
  misc_RNA (1)...(19): siRNA sense strand
cagaacagagggaaauaaa

SEQ ID NO: 578768 - RNA, 19 nt, Homo sapiens
  misc_RNA (1)...(19): siRNA sense strand
uaacucaggauuuacuuga

SEQ ID NO: 578769 - RNA, 19 nt, Homo sapiens
  misc_RNA (1)...(19): siRNA sense strand
gcaccucuguccuccuaug

SEQ ID NO: 578770 - RNA, 19 nt, Homo sapiens
  misc_RNA (1)...(19): siRNA sense strand
ggaaauuauuaucgguugu

SEQ ID NO: 578771 - RNA, 19 nt, Homo sapiens
  misc_RNA (1)...(19): siRNA sense strand
gauccuauaugcucuuugc

SEQ ID NO: 578772 - RNA, 19 nt, Homo sapiens
  misc_RNA (1)...(19): siRNA sense strand
gacagugacucaggaggaa

SEQ ID NO: 578773 - RNA, 19 nt, Homo sapiens
  misc_RNA (1)...(19): siRNA sense strand
ggacagagacgcgcucaag

SEQ ID NO: 578774 - RNA, 19 nt, Homo sapiens
  misc_RNA (1)...(19): siRNA sense strand
gacagagacucaggucaga

SEQ ID NO: 578775 - RNA, 19 nt, Homo sapiens
  misc_RNA (1)...(19): siRNA sense strand
gacaaaauaucacagcuau

SEQ ID NO: 578776 - RNA, 19 nt, Homo sapiens
  misc_RNA (1)...(19): siRNA sense strand
gaaaucagggccgaacaga

SEQ ID NO: 578777 - RNA, 19 nt, Homo sapiens
  misc_RNA (1)...(19): siRNA sense strand
gacaaugcccgaaucacuu

SEQ ID NO: 578778 - RNA, 19 nt, Homo sapiens
  misc_RNA (1)...(19): siRNA sense strand
acaaugcccgaaucacuua

SEQ ID NO: 578779 - RNA, 19 nt, Homo sapiens
  misc_RNA (1)...(19): siRNA sense strand
gcggguagagguggaaaua

SEQ ID NO: 578780 - RNA, 19 nt, Homo sapiens
  misc_RNA (1)...(19): siRNA sense strand
cagcgagccgggacuauuu

SEQ ID NO: 578781 - RNA, 19 nt, Homo sapiens
  misc_RNA (1)...(19): siRNA sense strand
gccuccaucuuaucuauga

SEQ ID NO: 578782 - RNA, 19 nt, Homo sapiens
  misc_RNA (1)...(19): siRNA sense strand
aaucugccauucacacuug

SEQ ID NO: 578783 - RNA, 19 nt, Homo sapiens
  misc_RNA (1)...(19): siRNA sense strand
guggaaauaaucgauguua

SEQ ID NO: 578784 - RNA, 19 nt, Homo sapiens
  misc_RNA (1)...(19): siRNA sense strand
cagaauauaacaucacugu

SEQ ID NO: 578785 - RNA, 19 nt, Homo sapiens
  misc_RNA (1)...(19): siRNA sense strand
ccacucagcagcaaugugu

SEQ ID NO: 578786 - RNA, 19 nt, Homo sapiens
  misc_RNA (1)...(19): siRNA sense strand
auacagggauccuauaugc

SEQ ID NO: 578787 - RNA, 19 nt, Homo sapiens
  misc_RNA (1)...(19): siRNA sense strand
ccaauacagggauccuaua

SEQ ID NO: 578788 - RNA, 19 nt, Homo sapiens
  misc_RNA (1)...(19): siRNA sense strand
gaacagagggaaauaaaag

SEQ ID NO: 578789 - RNA, 19 nt, Homo sapiens
  misc_RNA (1)...(19): siRNA sense strand
caauacagggauccuauau

SEQ ID NO: 578790 - RNA, 19 nt, Homo sapiens
  misc_RNA (1)...(19): siRNA sense strand
ccgaacagauucucuacuc

SEQ ID NO: 578791 - RNA, 19 nt, Homo sapiens
  misc_RNA (1)...(19): siRNA sense strand
guacaguaauugcacuuuu

SEQ ID NO: 578792 - RNA, 19 nt, Homo sapiens
  misc_RNA (1)...(19): siRNA sense strand
gggccgaugggauuaagua

SEQ ID NO: 578793 - RNA, 19 nt, Homo sapiens
  misc_RNA (1)...(19): siRNA sense strand
acucaggauuuacuugaaa

SEQ ID NO: 578794 - RNA, 19 nt, Homo sapiens
  misc_RNA (1)...(19): siRNA sense strand
gcggaagagucaccugauc

SEQ ID NO: 578795 - RNA, 19 nt, Homo sapiens
  misc_RNA (1)...(19): siRNA sense strand
ggugacaguucuggaugaa

SEQ ID NO: 578796 - RNA, 19 nt, Homo sapiens
  misc_RNA (1)...(19): siRNA sense strand
caacccagcuaugcagaca

SEQ ID NO: 578797 - RNA, 19 nt, Homo sapiens
  misc_RNA (1)...(19): siRNA sense strand
gaugacagccagugacagu

SEQ ID NO: 578798 - RNA, 19 nt, Homo sapiens
  misc_RNA (1)...(19): siRNA sense strand
ugacaacgcaccagaaguc

SEQ ID NO: 578799 - RNA, 19 nt, Homo sapiens
  misc_RNA (1)...(19): siRNA sense strand
ugacaguucuggaugaaaa

SEQ ID NO: 578800 - RNA, 19 nt, Homo sapiens
  misc_RNA (1)...(19): siRNA sense strand
aaugauaacccacccaguu

SEQ ID NO: 578801 - RNA, 19 nt, Homo sapiens
  misc_RNA (1)...(19): siRNA sense strand
aaaggagacccuaaucuuc

SEQ ID NO: 578802 - RNA, 19 nt, Homo sapiens
  misc_RNA (1)...(19): siRNA sense strand
gaacuccuccacugucuac

SEQ ID NO: 578803 - RNA, 19 nt, Homo sapiens
  misc_RNA (1)...(19): siRNA sense strand
ucauaauacuuguggauac

SEQ ID NO: 578804 - RNA, 19 nt, Homo sapiens
  misc_RNA (1)...(19): siRNA sense strand
caccagaagucacaguuac

SEQ ID NO: 578805 - RNA, 19 nt, Homo sapiens
  misc_RNA (1)...(19): siRNA sense strand
gacagaacagagggaaaua

SEQ ID NO: 578806 - RNA, 19 nt, Homo sapiens
  misc_RNA (1)...(19): siRNA sense strand
ucuagaagauacagugaag

SEQ ID NO: 578807 - RNA, 19 nt, Homo sapiens
  misc_RNA (1)...(19): siRNA sense strand
caacgcaccagaagucaca

SEQ ID NO: 578808 - RNA, 19 nt, Homo sapiens
  misc_RNA (1)...(19): siRNA sense strand
gaguggggauauaacaaua

SEQ ID NO: 578809 - RNA, 19 nt, Homo sapiens
  misc_RNA (1)...(19): siRNA sense strand
cagauguccuggcugacuu

SEQ ID NO: 578810 - RNA, 19 nt, Homo sapiens
  misc_RNA (1)...(19): siRNA sense strand
uauaugcucuuugcuccuu

SEQ ID NO: 578811 - RNA, 19 nt, Homo sapiens
  misc_RNA (1)...(19): siRNA sense strand
gggauccuauaugcucuuu

SEQ ID NO: 578812 - RNA, 19 nt, Homo sapiens
  misc_RNA (1)...(19): siRNA sense strand
ggaaauaaaaguugcugaa

SEQ ID NO: 578813 - RNA, 19 nt, Homo sapiens
  misc_RNA (1)...(19): siRNA sense strand
ccgggagaguugugagaaa

SEQ ID NO: 578814 - RNA, 19 nt, Homo sapiens
  misc_RNA (1)...(19): siRNA sense strand
cgcaucgucuccagaggua

SEQ ID NO: 578815 - RNA, 19 nt, Homo sapiens
  misc_RNA (1)...(19): siRNA sense strand
acuaugagcaguuuagaga

SEQ ID NO: 578816 - RNA, 19 nt, Homo sapiens
  misc_RNA (1)...(19): siRNA sense strand
ccaggauucucauaauacu

SEQ ID NO: 578817 - RNA, 19 nt, Homo sapiens
  misc_RNA (1)...(19): siRNA sense strand
gcgagccucuucugauaac

SEQ ID NO: 578818 - RNA, 19 nt, Homo sapiens
  misc_RNA (1)...(19): siRNA sense strand
uuccuacucugcuuacauu

SEQ ID NO: 578819 - RNA, 19 nt, Homo sapiens
  misc_RNA (1)...(19): siRNA sense strand
ggaggaaauggccuaguca

SEQ ID NO: 578820 - RNA, 19 nt, Homo sapiens
  misc_RNA (1)...(19): siRNA sense strand
uagaagauacagugaagau

SEQ ID NO: 578821 - RNA, 19 nt, Homo sapiens
  misc_RNA (1)...(19): siRNA sense strand
gggaacuccuccacugucu

SEQ ID NO: 578822 - RNA, 19 nt, Homo sapiens
  misc_RNA (1)...(19): siRNA sense strand
caaacugugugacaaaccu

SEQ ID NO: 578823 - RNA, 19 nt, Homo sapiens
  misc_RNA (1)...(19): siRNA sense strand
cugagacgcuggcacaagu

SEQ ID NO: 578824 - RNA, 19 nt, Homo sapiens
  misc_RNA (1)...(19): siRNA sense strand
ccuccuaugucuccaucaa

SEQ ID NO: 578825 - RNA, 19 nt, Homo sapiens
  misc_RNA (1)...(19): siRNA sense strand
ccacccacuuucccucaug

SEQ ID NO: 578826 - RNA, 19 nt, Homo sapiens
  misc_RNA (1)...(19): siRNA sense strand
agagguaggacgcagcuuu

SEQ ID NO: 578827 - RNA, 19 nt, Homo sapiens
  misc_RNA (1)...(19): siRNA sense strand
aaggagacccuaaucuuca

SEQ ID NO: 578828 - RNA, 19 nt, Homo sapiens
  misc_RNA (1)...(19): siRNA sense strand
ugacaacccacccacuuuc

SEQ ID NO: 578829 - RNA, 19 nt, Homo sapiens
  misc_RNA (1)...(19): siRNA sense strand
cagggaagaagucucagaa

SEQ ID NO: 578830 - RNA, 19 nt, Homo sapiens
  misc_RNA (1)...(19): siRNA sense strand
gaacacuggacagggaaga

SEQ ID NO: 578831 - RNA, 19 nt, Homo sapiens
  misc_RNA (1)...(19): siRNA sense strand
gggccgaacagauucucua

SEQ ID NO: 578832 - RNA, 19 nt, Homo sapiens
  misc_RNA (1)...(19): siRNA sense strand
ggaaaucagggccgaacag

SEQ ID NO: 578833 - RNA, 19 nt, Homo sapiens
  misc_RNA (1)...(19): siRNA sense strand
gagaaaagcgagccucuuc

SEQ ID NO: 578834 - RNA, 19 nt, Homo sapiens
  misc_RNA (1)...(19): siRNA sense strand
cuucgacuaugagcaguuu

SEQ ID NO: 578835 - RNA, 19 nt, Homo sapiens
  misc_RNA (1)...(19): siRNA sense strand
ggccuagucacauguucua

SEQ ID NO: 578836 - RNA, 19 nt, Homo sapiens
  misc_RNA (1)...(19): siRNA sense strand
gcucaguccaggaaucuuc

SEQ ID NO: 578837 - RNA, 19 nt, Homo sapiens
  misc_RNA (1)...(19): siRNA sense strand
uaauacuuguggauaccaa

SEQ ID NO: 578838 - RNA, 19 nt, Homo sapiens
  misc_RNA (1)...(19): siRNA sense strand
gauaacucaggauuuacuu

SEQ ID NO: 578839 - RNA, 19 nt, Homo sapiens
  misc_RNA (1)...(19): siRNA sense strand
gguagagguggaaauaauc

SEQ ID NO: 578840 - RNA, 19 nt, Homo sapiens
  misc_RNA (1)...(19): siRNA sense strand
aaagcgagccucuucugau

SEQ ID NO: 578841 - RNA, 19 nt, Homo sapiens
  misc_RNA (1)...(19): siRNA sense strand
gaagaagucucagaauaua

SEQ ID NO: 578842 - RNA, 19 nt, Homo sapiens
  misc_RNA (1)...(19): siRNA sense strand
gggaagaagucucagaaua

SEQ ID NO: 578843 - RNA, 19 nt, Homo sapiens
  misc_RNA (1)...(19): siRNA sense strand
gaagauacagugaagauuu

SEQ ID NO: 578844 - RNA, 19 nt, Homo sapiens
  misc_RNA (1)...(19): siRNA sense strand
gaaauggccuagucacaug

SEQ ID NO: 578845 - RNA, 19 nt, Homo sapiens
  misc_RNA (1)...(19): siRNA sense strand
ggaagaagucucagaauau

SEQ ID NO: 578846 - RNA, 19 nt, Homo sapiens
  misc_RNA (1)...(19): siRNA sense strand
gaaaagaccuauggaaauu

SEQ ID NO: 578847 - RNA, 19 nt, Homo sapiens
  misc_RNA (1)...(19): siRNA sense strand
ugacaaaccuggagauucu

SEQ ID NO: 578848 - RNA, 19 nt, Homo sapiens
  misc_RNA (1)...(19): siRNA sense strand
uaucacagcuauuucaguu

SEQ ID NO: 578849 - RNA, 19 nt, Homo sapiens
  misc_RNA (1)...(19): siRNA sense strand
caacucaaacgguuacuuu

SEQ ID NO: 578850 - RNA, 19 nt, Homo sapiens
  misc_RNA (1)...(19): siRNA sense strand
ucacagcuauuucaguuga

SEQ ID NO: 578851 - RNA, 19 nt, Homo sapiens
  misc_RNA (1)...(19): siRNA sense strand
guuaccagcucaacucaaa

SEQ ID NO: 578852 - RNA, 19 nt, Homo sapiens
  misc_RNA (1)...(19): siRNA sense strand
cauguucuauuccagauaa

SEQ ID NO: 578853 - RNA, 19 nt, Homo sapiens
  misc_RNA (1)...(19): siRNA sense strand
aagcgagccucuucugaua

SEQ ID NO: 578854 - RNA, 19 nt, Homo sapiens
  misc_RNA (1)...(19): siRNA sense strand
ggguagagguggaaauaau

SEQ ID NO: 578855 - RNA, 19 nt, Homo sapiens
  misc_RNA (1)...(19): siRNA sense strand
ugaggacucuggauucuau

SEQ ID NO: 578856 - RNA, 19 nt, Homo sapiens
  misc_RNA (1)...(19): siRNA sense strand
gcaccagaagucacaguua

SEQ ID NO: 578857 - RNA, 19 nt, Homo sapiens
  misc_RNA (1)...(19): siRNA sense strand
gagccuccaucuuaucuau

SEQ ID NO: 578858 - RNA, 19 nt, Homo sapiens
  misc_RNA (1)...(19): siRNA sense strand
ggacagggaagaagucuca

SEQ ID NO: 578859 - RNA, 19 nt, Homo sapiens
  misc_RNA (1)...(19): siRNA sense strand
ggacagaacagagggaaau

SEQ ID NO: 578860 - RNA, 19 nt, Homo sapiens
  misc_RNA (1)...(19): siRNA sense strand
cgauaaugcucccguguuc

SEQ ID NO: 578861 - RNA, 19 nt, Homo sapiens
  misc_RNA (1)...(19): siRNA sense strand
gggcuuuccugcagaccua

SEQ ID NO: 578862 - RNA, 19 nt, Homo sapiens
  misc_RNA (1)...(19): siRNA sense strand
ugccaggauucucauaaua

SEQ ID NO: 578863 - RNA, 19 nt, Homo sapiens
  misc_RNA (1)...(19): siRNA sense strand
gcacaagucacgccugcuu

SEQ ID NO: 578864 - RNA, 19 nt, Homo sapiens
  misc_RNA (1)...(19): siRNA sense strand
gugcaccucuguccuccua

SEQ ID NO: 578865 - RNA, 19 nt, Homo sapiens
  misc_RNA (1)...(19): siRNA sense strand
cuagucacauguucuauuc

SEQ ID NO: 578866 - RNA, 19 nt, Homo sapiens
  misc_RNA (1)...(19): siRNA sense strand
ggaaauggccuagucacau

SEQ ID NO: 578867 - RNA, 19 nt, Homo sapiens
  misc_RNA (1)...(19): siRNA sense strand
cagaacagagggaaauaaa

SEQ ID NO: 578868 - RNA, 19 nt, Homo sapiens
  misc_RNA (1)...(19): siRNA sense strand
uaacucaggauuuacuuga

SEQ ID NO: 578869 - RNA, 19 nt, Homo sapiens
  misc_RNA (1)...(19): siRNA sense strand
gcaccucuguccuccuaug

SEQ ID NO: 578870 - RNA, 19 nt, Homo sapiens
  misc_RNA (1)...(19): siRNA sense strand
ggaaauuauuaucgguugu

SEQ ID NO: 578871 - RNA, 19 nt, Homo sapiens
  misc_RNA (1)...(19): siRNA sense strand
gauccuauaugcucuuugc

SEQ ID NO: 578872 - RNA, 19 nt, Homo sapiens
  misc_RNA (1)...(19): siRNA sense strand
gacagugacucaggaggaa

SEQ ID NO: 578873 - RNA, 19 nt, Homo sapiens
  misc_RNA (1)...(19): siRNA sense strand
ggacagagacgcgcucaag

SEQ ID NO: 578874 - RNA, 19 nt, Homo sapiens
  misc_RNA (1)...(19): siRNA sense strand
gacagagacucaggucaga

SEQ ID NO: 578875 - RNA, 19 nt, Homo sapiens
  misc_RNA (1)...(19): siRNA sense strand
gacaaaauaucacagcuau

SEQ ID NO: 578876 - RNA, 19 nt, Homo sapiens
  misc_RNA (1)...(19): siRNA sense strand
gaaaucagggccgaacaga

SEQ ID NO: 578877 - RNA, 19 nt, Homo sapiens
  misc_RNA (1)...(19): siRNA sense strand
gacaaugcccgaaucacuu

SEQ ID NO: 578878 - RNA, 19 nt, Homo sapiens
  misc_RNA (1)...(19): siRNA sense strand
acaaugcccgaaucacuua

SEQ ID NO: 578879 - RNA, 19 nt, Homo sapiens
  misc_RNA (1)...(19): siRNA sense strand
gcggguagagguggaaaua

SEQ ID NO: 578880 - RNA, 19 nt, Homo sapiens
  misc_RNA (1)...(19): siRNA sense strand
cagcgagccgggacuauuu

SEQ ID NO: 578881 - RNA, 19 nt, Homo sapiens
  misc_RNA (1)...(19): siRNA sense strand
gccuccaucuuaucuauga

SEQ ID NO: 578882 - RNA, 19 nt, Homo sapiens
  misc_RNA (1)...(19): siRNA sense strand
aaucugccauucacacuug

SEQ ID NO: 578883 - RNA, 19 nt, Homo sapiens
  misc_RNA (1)...(19): siRNA sense strand
guggaaauaaucgauguua

SEQ ID NO: 578884 - RNA, 19 nt, Homo sapiens
  misc_RNA (1)...(19): siRNA sense strand
cagaauauaacaucacugu

SEQ ID NO: 578885 - RNA, 19 nt, Homo sapiens
  misc_RNA (1)...(19): siRNA sense strand
ccacucagcagcaaugugu

SEQ ID NO: 578886 - RNA, 19 nt, Homo sapiens
  misc_RNA (1)...(19): siRNA sense strand
auacagggauccuauaugc

SEQ ID NO: 578887 - RNA, 19 nt, Homo sapiens
  misc_RNA (1)...(19): siRNA sense strand
ccaauacagggauccuaua

SEQ ID NO: 578888 - RNA, 19 nt, Homo sapiens
  misc_RNA (1)...(19): siRNA sense strand
gaacagagggaaauaaaag

SEQ ID NO: 578889 - RNA, 19 nt, Homo sapiens
  misc_RNA (1)...(19): siRNA sense strand
caauacagggauccuauau

SEQ ID NO: 578890 - RNA, 19 nt, Homo sapiens
  misc_RNA (1)...(19): siRNA sense strand
ccgaacagauucucuacuc

SEQ ID NO: 578891 - RNA, 19 nt, Homo sapiens
  misc_RNA (1)...(19): siRNA sense strand
guacaguaauugcacuuuu

SEQ ID NO: 578892 - RNA, 19 nt, Homo sapiens
  misc_RNA (1)...(19): siRNA sense strand
gggccgaugggauuaagua

SEQ ID NO: 578893 - RNA, 19 nt, Homo sapiens
  misc_RNA (1)...(19): siRNA sense strand
acucaggauuuacuugaaa

SEQ ID NO: 578894 - RNA, 19 nt, Homo sapiens
  misc_RNA (1)...(19): siRNA sense strand
gcggaagagucaccugauc

SEQ ID NO: 578895 - RNA, 19 nt, Homo sapiens
  misc_RNA (1)...(19): siRNA sense strand
ggugacaguucuggaugaa

SEQ ID NO: 578896 - RNA, 19 nt, Homo sapiens
  misc_RNA (1)...(19): siRNA sense strand
caacccagcuaugcagaca

SEQ ID NO: 578897 - RNA, 19 nt, Homo sapiens
  misc_RNA (1)...(19): siRNA sense strand
gaugacagccagugacagu

SEQ ID NO: 578898 - RNA, 19 nt, Homo sapiens
  misc_RNA (1)...(19): siRNA sense strand
ugacaacgcaccagaaguc

SEQ ID NO: 578899 - RNA, 19 nt, Homo sapiens
  misc_RNA (1)...(19): siRNA sense strand
ugacaguucuggaugaaaa

SEQ ID NO: 578900 - RNA, 19 nt, Homo sapiens
  misc_RNA (1)...(19): siRNA sense strand
aaugauaacccacccaguu

SEQ ID NO: 578901 - RNA, 19 nt, Homo sapiens
  misc_RNA (1)...(19): siRNA sense strand
aaaggagacccuaaucuuc

SEQ ID NO: 578902 - RNA, 19 nt, Homo sapiens
  misc_RNA (1)...(19): siRNA sense strand
gaacuccuccacugucuac

SEQ ID NO: 578903 - RNA, 19 nt, Homo sapiens
  misc_RNA (1)...(19): siRNA sense strand
ucauaauacuuguggauac

SEQ ID NO: 578904 - RNA, 19 nt, Homo sapiens
  misc_RNA (1)...(19): siRNA sense strand
caccagaagucacaguuac

SEQ ID NO: 578905 - RNA, 19 nt, Homo sapiens
  misc_RNA (1)...(19): siRNA sense strand
gacagaacagagggaaaua

SEQ ID NO: 578906 - RNA, 19 nt, Homo sapiens
  misc_RNA (1)...(19): siRNA sense strand
ucuagaagauacagugaag

SEQ ID NO: 578907 - RNA, 19 nt, Homo sapiens
  misc_RNA (1)...(19): siRNA sense strand
caacgcaccagaagucaca

SEQ ID NO: 578908 - RNA, 19 nt, Homo sapiens
  misc_RNA (1)...(19): siRNA sense strand
gaguggggauauaacaaua

SEQ ID NO: 578909 - RNA, 19 nt, Homo sapiens
  misc_RNA (1)...(19): siRNA sense strand
cagauguccuggcugacuu

SEQ ID NO: 578910 - RNA, 19 nt, Homo sapiens
  misc_RNA (1)...(19): siRNA sense strand
uauaugcucuuugcuccuu

SEQ ID NO: 578911 - RNA, 19 nt, Homo sapiens
  misc_RNA (1)...(19): siRNA sense strand
gggauccuauaugcucuuu

SEQ ID NO: 578912 - RNA, 19 nt, Homo sapiens
  misc_RNA (1)...(19): siRNA sense strand
ggaaauaaaaguugcugaa

SEQ ID NO: 578913 - RNA, 19 nt, Homo sapiens
  misc_RNA (1)...(19): siRNA sense strand
ccgggagaguugugagaaa

SEQ ID NO: 578914 - RNA, 19 nt, Homo sapiens
  misc_RNA (1)...(19): siRNA sense strand
cgcaucgucuccagaggua

SEQ ID NO: 578915 - RNA, 19 nt, Homo sapiens
  misc_RNA (1)...(19): siRNA sense strand
acuaugagcaguuuagaga

SEQ ID NO: 578916 - RNA, 19 nt, Homo sapiens
  misc_RNA (1)...(19): siRNA sense strand
ccaggauucucauaauacu

SEQ ID NO: 578917 - RNA, 19 nt, Homo sapiens
  misc_RNA (1)...(19): siRNA sense strand
gcgagccucuucugauaac

SEQ ID NO: 578918 - RNA, 19 nt, Homo sapiens
  misc_RNA (1)...(19): siRNA sense strand
uuccuacucugcuuacauu

SEQ ID NO: 578919 - RNA, 19 nt, Homo sapiens
  misc_RNA (1)...(19): siRNA sense strand
ggaggaaauggccuaguca

SEQ ID NO: 578920 - RNA, 19 nt, Homo sapiens
  misc_RNA (1)...(19): siRNA sense strand
uagaagauacagugaagau

SEQ ID NO: 578921 - RNA, 19 nt, Homo sapiens
  misc_RNA (1)...(19): siRNA sense strand
gggaacuccuccacugucu

SEQ ID NO: 578922 - RNA, 19 nt, Homo sapiens
  misc_RNA (1)...(19): siRNA sense strand
caaacugugugacaaaccu

SEQ ID NO: 578923 - RNA, 19 nt, Homo sapiens
  misc_RNA (1)...(19): siRNA sense strand
cugagacgcuggcacaagu

SEQ ID NO: 578924 - RNA, 19 nt, Homo sapiens
  misc_RNA (1)...(19): siRNA sense strand
ccuccuaugucuccaucaa

SEQ ID NO: 578925 - RNA, 19 nt, Homo sapiens
  misc_RNA (1)...(19): siRNA sense strand
ccacccacuuucccucaug

SEQ ID NO: 578926 - RNA, 19 nt, Homo sapiens
  misc_RNA (1)...(19): siRNA sense strand
agagguaggacgcagcuuu

SEQ ID NO: 578927 - RNA, 19 nt, Homo sapiens
  misc_RNA (1)...(19): siRNA sense strand
aaggagacccuaaucuuca

SEQ ID NO: 578928 - RNA, 19 nt, Homo sapiens
  misc_RNA (1)...(19): siRNA sense strand
ugacaacccacccacuuuc

SEQ ID NO: 578929 - RNA, 19 nt, Homo sapiens
  misc_RNA (1)...(19): siRNA sense strand
cagggaagaagucucagaa

SEQ ID NO: 578930 - RNA, 19 nt, Homo sapiens
  misc_RNA (1)...(19): siRNA sense strand
gaacacuggacagggaaga

SEQ ID NO: 578931 - RNA, 19 nt, Homo sapiens
  misc_RNA (1)...(19): siRNA sense strand
gggccgaacagauucucua

SEQ ID NO: 578932 - RNA, 19 nt, Homo sapiens
  misc_RNA (1)...(19): siRNA sense strand
ggaaaucagggccgaacag

SEQ ID NO: 578933 - RNA, 19 nt, Homo sapiens
  misc_RNA (1)...(19): siRNA sense strand
gagaaaagcgagccucuuc

SEQ ID NO: 578934 - RNA, 19 nt, Homo sapiens
  misc_RNA (1)...(19): siRNA sense strand
cuucgacuaugagcaguuu

SEQ ID NO: 578935 - RNA, 19 nt, Homo sapiens
  misc_RNA (1)...(19): siRNA sense strand
ggccuagucacauguucua

SEQ ID NO: 578936 - RNA, 19 nt, Homo sapiens
  misc_RNA (1)...(19): siRNA sense strand
gcucaguccaggaaucuuc

SEQ ID NO: 578937 - RNA, 19 nt, Homo sapiens
  misc_RNA (1)...(19): siRNA sense strand
uaauacuuguggauaccaa

SEQ ID NO: 578938 - RNA, 19 nt, Homo sapiens
  misc_RNA (1)...(19): siRNA sense strand
gauaacucaggauuuacuu

SEQ ID NO: 578939 - RNA, 19 nt, Homo sapiens
  misc_RNA (1)...(19): siRNA sense strand
gguagagguggaaauaauc

SEQ ID NO: 578940 - RNA, 19 nt, Homo sapiens
  misc_RNA (1)...(19): siRNA sense strand
aaagcgagccucuucugau

SEQ ID NO: 578941 - RNA, 19 nt, Homo sapiens
  misc_RNA (1)...(19): siRNA sense strand
gaaaggagauuccaaccua

SEQ ID NO: 578942 - RNA, 19 nt, Homo sapiens
  misc_RNA (1)...(19): siRNA sense strand
ugacaaugcuccagaaauu

SEQ ID NO: 578943 - RNA, 19 nt, Homo sapiens
  misc_RNA (1)...(19): siRNA sense strand
gcgaacaaauaucagaaua

SEQ ID NO: 578944 - RNA, 19 nt, Homo sapiens
  misc_RNA (1)...(19): siRNA sense strand
gcucaagugucuuauauuc

SEQ ID NO: 578945 - RNA, 19 nt, Homo sapiens
  misc_RNA (1)...(19): siRNA sense strand
gaacccgauuuccaauuaa

SEQ ID NO: 578946 - RNA, 19 nt, Homo sapiens
  misc_RNA (1)...(19): siRNA sense strand
cugcagaacuacaagcuua

SEQ ID NO: 578947 - RNA, 19 nt, Homo sapiens
  misc_RNA (1)...(19): siRNA sense strand
gaaugacaaugcuccagaa

SEQ ID NO: 578948 - RNA, 19 nt, Homo sapiens
  misc_RNA (1)...(19): siRNA sense strand
cagaggaauuggaaauaaa

SEQ ID NO: 578949 - RNA, 19 nt, Homo sapiens
  misc_RNA (1)...(19): siRNA sense strand
gaaacaggauccggucaga

SEQ ID NO: 578950 - RNA, 19 nt, Homo sapiens
  misc_RNA (1)...(19): siRNA sense strand
aagcgagccucuucugaua

SEQ ID NO: 578951 - RNA, 19 nt, Homo sapiens
  misc_RNA (1)...(19): siRNA sense strand
cgagcaauuuagagacuua

SEQ ID NO: 578952 - RNA, 19 nt, Homo sapiens
  misc_RNA (1)...(19): siRNA sense strand
acagaggaauuggaaauaa

SEQ ID NO: 578953 - RNA, 19 nt, Homo sapiens
  misc_RNA (1)...(19): siRNA sense strand
gaguggagaaguaucaaua

SEQ ID NO: 578954 - RNA, 19 nt, Homo sapiens
  misc_RNA (1)...(19): siRNA sense strand
cggaagagccaccugauuu

SEQ ID NO: 578955 - RNA, 19 nt, Homo sapiens
  misc_RNA (1)...(19): siRNA sense strand
ccacccaccuucccucauu

SEQ ID NO: 578956 - RNA, 19 nt, Homo sapiens
  misc_RNA (1)...(19): siRNA sense strand
gccauguucuaugaaauua

SEQ ID NO: 578957 - RNA, 19 nt, Homo sapiens
  misc_RNA (1)...(19): siRNA sense strand
ugacaacccaccaauguuu

SEQ ID NO: 578958 - RNA, 19 nt, Homo sapiens
  misc_RNA (1)...(19): siRNA sense strand
gaugccauguucuaugaaa

SEQ ID NO: 578959 - RNA, 19 nt, Homo sapiens
  misc_RNA (1)...(19): siRNA sense strand
guggagaaguaucaauauu

SEQ ID NO: 578960 - RNA, 19 nt, Homo sapiens
  misc_RNA (1)...(19): siRNA sense strand
ugauaaugcuccuaauuuc

SEQ ID NO: 578961 - RNA, 19 nt, Homo sapiens
  misc_RNA (1)...(19): siRNA sense strand
caacagaggaauuggaaau

SEQ ID NO: 578962 - RNA, 19 nt, Homo sapiens
  misc_RNA (1)...(19): siRNA sense strand
gggauucaaugcucaagug

SEQ ID NO: 578963 - RNA, 19 nt, Homo sapiens
  misc_RNA (1)...(19): siRNA sense strand
gacaaugcuccagaaauua

SEQ ID NO: 578964 - RNA, 19 nt, Homo sapiens
  misc_RNA (1)...(19): siRNA sense strand
uuaacucccugcagaacua

SEQ ID NO: 578965 - RNA, 19 nt, Homo sapiens
  misc_RNA (1)...(19): siRNA sense strand
agaucaauauuaccgcuua

SEQ ID NO: 578966 - RNA, 19 nt, Homo sapiens
  misc_RNA (1)...(19): siRNA sense strand
gaagagggcaccguuggaa

SEQ ID NO: 578967 - RNA, 19 nt, Homo sapiens
  misc_RNA (1)...(19): siRNA sense strand
ucaaugcucaagugucuua

SEQ ID NO: 578968 - RNA, 19 nt, Homo sapiens
  misc_RNA (1)...(19): siRNA sense strand
gguugaggauaaauugaaa

SEQ ID NO: 578969 - RNA, 19 nt, Homo sapiens
  misc_RNA (1)...(19): siRNA sense strand
gggcuuuccugcagaccua

SEQ ID NO: 578970 - RNA, 19 nt, Homo sapiens
  misc_RNA (1)...(19): siRNA sense strand
gacaacccaccaauguuua

SEQ ID NO: 578971 - RNA, 19 nt, Homo sapiens
  misc_RNA (1)...(19): siRNA sense strand
ugacccagauguaggcauu

SEQ ID NO: 578972 - RNA, 19 nt, Homo sapiens
  misc_RNA (1)...(19): siRNA sense strand
uaacucaggauuuacuuga

SEQ ID NO: 578973 - RNA, 19 nt, Homo sapiens
  misc_RNA (1)...(19): siRNA sense strand
caauauuaccgcuuaguga

SEQ ID NO: 578974 - RNA, 19 nt, Homo sapiens
  misc_RNA (1)...(19): siRNA sense strand
ggaccgcgaacaaauauca

SEQ ID NO: 578975 - RNA, 19 nt, Homo sapiens
  misc_RNA (1)...(19): siRNA sense strand
ggacgcagcuuuucucucu

SEQ ID NO: 578976 - RNA, 19 nt, Homo sapiens
  misc_RNA (1)...(19): siRNA sense strand
ggacagagacgcgcucaag

SEQ ID NO: 578977 - RNA, 19 nt, Homo sapiens
  misc_RNA (1)...(19): siRNA sense strand
gggcaccguuggaagagaa

SEQ ID NO: 578978 - RNA, 19 nt, Homo sapiens
  misc_RNA (1)...(19): siRNA sense strand
gcaaaugacaacccaccaa

SEQ ID NO: 578979 - RNA, 19 nt, Homo sapiens
  misc_RNA (1)...(19): siRNA sense strand
caagcucagucccagaaga

SEQ ID NO: 578980 - RNA, 19 nt, Homo sapiens
  misc_RNA (1)...(19): siRNA sense strand
ugauaguccuggaugcaaa

SEQ ID NO: 578981 - RNA, 19 nt, Homo sapiens
  misc_RNA (1)...(19): siRNA sense strand
gcugagauccuucgacuac

SEQ ID NO: 578982 - RNA, 19 nt, Homo sapiens
  misc_RNA (1)...(19): siRNA sense strand
aggaugccauguucuauga

SEQ ID NO: 578983 - RNA, 19 nt, Homo sapiens
  misc_RNA (1)...(19): siRNA sense strand
cgacuacgagcaauuuaga

SEQ ID NO: 578984 - RNA, 19 nt, Homo sapiens
  misc_RNA (1)...(19): siRNA sense strand
gagcccugcuggacagaga

SEQ ID NO: 578985 - RNA, 19 nt, Homo sapiens
  misc_RNA (1)...(19): siRNA sense strand
acaaucacgucucucacaa

SEQ ID NO: 578986 - RNA, 19 nt, Homo sapiens
  misc_RNA (1)...(19): siRNA sense strand
acucaggauuuacuugaaa

SEQ ID NO: 578987 - RNA, 19 nt, Homo sapiens
  misc_RNA (1)...(19): siRNA sense strand
ggacccagauagcaacaac

SEQ ID NO: 578988 - RNA, 19 nt, Homo sapiens
  misc_RNA (1)...(19): siRNA sense strand
gaaugggcagguugaaguu

SEQ ID NO: 578989 - RNA, 19 nt, Homo sapiens
  misc_RNA (1)...(19): siRNA sense strand
cgacgugcaugaccgagau

SEQ ID NO: 578990 - RNA, 19 nt, Homo sapiens
  misc_RNA (1)...(19): siRNA sense strand
caaaugacaacccaccaau

SEQ ID NO: 578991 - RNA, 19 nt, Homo sapiens
  misc_RNA (1)...(19): siRNA sense strand
caggagagcugugagaaaa

SEQ ID NO: 578992 - RNA, 19 nt, Homo sapiens
  misc_RNA (1)...(19): siRNA sense strand
auucggaccucacucugua

SEQ ID NO: 578993 - RNA, 19 nt, Homo sapiens
  misc_RNA (1)...(19): siRNA sense strand
ugucugaggagcuagauaa

SEQ ID NO: 578994 - RNA, 19 nt, Homo sapiens
  misc_RNA (1)...(19): siRNA sense strand
gagccuccaucuucucagu

SEQ ID NO: 578995 - RNA, 19 nt, Homo sapiens
  misc_RNA (1)...(19): siRNA sense strand
cugaggagcuagauaaagg

SEQ ID NO: 578996 - RNA, 19 nt, Homo sapiens
  misc_RNA (1)...(19): siRNA sense strand
gaggaugccauguucuaug

SEQ ID NO: 578997 - RNA, 19 nt, Homo sapiens
  misc_RNA (1)...(19): siRNA sense strand
uaaaaugccugggaaaauc

SEQ ID NO: 578998 - RNA, 19 nt, Homo sapiens
  misc_RNA (1)...(19): siRNA sense strand
gcauuaacucccugcagaa

SEQ ID NO: 578999 - RNA, 19 nt, Homo sapiens
  misc_RNA (1)...(19): siRNA sense strand
ggaagagccaccugauuuu

SEQ ID NO: 579000 - RNA, 19 nt, Homo sapiens
  misc_RNA (1)...(19): siRNA sense strand
uguccacucuggcaacuug

SEQ ID NO: 579001 - RNA, 19 nt, Homo sapiens
  misc_RNA (1)...(19): siRNA sense strand
gaucaauauuaccgcuuag

SEQ ID NO: 579002 - RNA, 19 nt, Homo sapiens
  misc_RNA (1)...(19): siRNA sense strand
gcggaagagccaccugauu

SEQ ID NO: 579003 - RNA, 19 nt, Homo sapiens
  misc_RNA (1)...(19): siRNA sense strand
ugagauccuucgacuacga

SEQ ID NO: 579004 - RNA, 19 nt, Homo sapiens
  misc_RNA (1)...(19): siRNA sense strand
cuccaacacuggcguccua

SEQ ID NO: 579005 - RNA, 19 nt, Homo sapiens
  misc_RNA (1)...(19): siRNA sense strand
cgcaucgucuccagaggua

SEQ ID NO: 579006 - RNA, 19 nt, Homo sapiens
  misc_RNA (1)...(19): siRNA sense strand
caacacuggcguccuauac

SEQ ID NO: 579007 - RNA, 19 nt, Homo sapiens
  misc_RNA (1)...(19): siRNA sense strand
gcgagccucuucugauaac

SEQ ID NO: 579008 - RNA, 19 nt, Homo sapiens
  misc_RNA (1)...(19): siRNA sense strand
ccaggagagcugugagaaa

SEQ ID NO: 579009 - RNA, 19 nt, Homo sapiens
  misc_RNA (1)...(19): siRNA sense strand
augcucaagugucuuauau

SEQ ID NO: 579010 - RNA, 19 nt, Homo sapiens
  misc_RNA (1)...(19): siRNA sense strand
ggagauuccaaccuacuuc

SEQ ID NO: 579011 - RNA, 19 nt, Homo sapiens
  misc_RNA (1)...(19): siRNA sense strand
gaaaugaaaggagauucca

SEQ ID NO: 579012 - RNA, 19 nt, Homo sapiens
  misc_RNA (1)...(19): siRNA sense strand
ggucaccgcggagaggaua

SEQ ID NO: 579013 - RNA, 19 nt, Homo sapiens
  misc_RNA (1)...(19): siRNA sense strand
acauucugguugaggauaa

SEQ ID NO: 579014 - RNA, 19 nt, Homo sapiens
  misc_RNA (1)...(19): siRNA sense strand
aaucugccauuuaaguuag

SEQ ID NO: 579015 - RNA, 19 nt, Homo sapiens
  misc_RNA (1)...(19): siRNA sense strand
uuaugaggaugccauguuc

SEQ ID NO: 579016 - RNA, 19 nt, Homo sapiens
  misc_RNA (1)...(19): siRNA sense strand
aaugacaacccaccaaugu

SEQ ID NO: 579017 - RNA, 19 nt, Homo sapiens
  misc_RNA (1)...(19): siRNA sense strand
gccuccaucuucucaguga

SEQ ID NO: 579018 - RNA, 19 nt, Homo sapiens
  misc_RNA (1)...(19): siRNA sense strand
ccuggaccgcgaacaaaua

SEQ ID NO: 579019 - RNA, 19 nt, Homo sapiens
  misc_RNA (1)...(19): siRNA sense strand
gagaaauugcucuuaucga

SEQ ID NO: 579020 - RNA, 19 nt, Homo sapiens
  misc_RNA (1)...(19): siRNA sense strand
caagugucuuauauucuag

SEQ ID NO: 579021 - RNA, 19 nt, Homo sapiens
  misc_RNA (1)...(19): siRNA sense strand
gcacauccaagugauaguc

SEQ ID NO: 579022 - RNA, 19 nt, Homo sapiens
  misc_RNA (1)...(19): siRNA sense strand
agagguaggacgcagcuuu

SEQ ID NO: 579023 - RNA, 19 nt, Homo sapiens
  misc_RNA (1)...(19): siRNA sense strand
aaauuacaaucacgucucu

SEQ ID NO: 579024 - RNA, 19 nt, Homo sapiens
  misc_RNA (1)...(19): siRNA sense strand
ggaugugaaugacaaugcu

SEQ ID NO: 579025 - RNA, 19 nt, Homo sapiens
  misc_RNA (1)...(19): siRNA sense strand
gauaaaaugccugggaaaa

SEQ ID NO: 579026 - RNA, 19 nt, Homo sapiens
  misc_RNA (1)...(19): siRNA sense strand
gagaaaagcgagccucuuc

SEQ ID NO: 579027 - RNA, 19 nt, Homo sapiens
  misc_RNA (1)...(19): siRNA sense strand
aacccgauuuccaauuaaa

SEQ ID NO: 579028 - RNA, 19 nt, Homo sapiens
  misc_RNA (1)...(19): siRNA sense strand
cagccugaguaccguguga

SEQ ID NO: 579029 - RNA, 19 nt, Homo sapiens
  misc_RNA (1)...(19): siRNA sense strand
gagauuccaaccuacuuca

SEQ ID NO: 579030 - RNA, 19 nt, Homo sapiens
  misc_RNA (1)...(19): siRNA sense strand
gauaacucaggauuuacuu

SEQ ID NO: 579031 - RNA, 19 nt, Homo sapiens
  misc_RNA (1)...(19): siRNA sense strand
uauacgcgcugagauccuu

SEQ ID NO: 579032 - RNA, 19 nt, Homo sapiens
  misc_RNA (1)...(19): siRNA sense strand
caccuucccucauuuaucc

SEQ ID NO: 579033 - RNA, 19 nt, Homo sapiens
  misc_RNA (1)...(19): siRNA sense strand
gaguaccgugugaguguuu

SEQ ID NO: 579034 - RNA, 19 nt, Homo sapiens
  misc_RNA (1)...(19): siRNA sense strand
aaagcgagccucuucugau

SEQ ID NO: 579035 - RNA, 19 nt, Homo sapiens
  misc_RNA (1)...(19): siRNA sense strand
cacccaccuucccucauuu

SEQ ID NO: 579036 - RNA, 19 nt, Homo sapiens
  misc_RNA (1)...(19): siRNA sense strand
gaggagcuagauaaagguu

SEQ ID NO: 579037 - RNA, 19 nt, Homo sapiens
  misc_RNA (1)...(19): siRNA sense strand
gcuccuaauuucccaacag

SEQ ID NO: 579038 - RNA, 19 nt, Homo sapiens
  misc_RNA (1)...(19): siRNA sense strand
gcuccagaaauuacaauca

SEQ ID NO: 579039 - RNA, 19 nt, Homo sapiens
  misc_RNA (1)...(19): siRNA sense strand
ccaacacuggcguccuaua

SEQ ID NO: 579040 - RNA, 19 nt, Homo sapiens
  misc_RNA (1)...(19): siRNA sense strand
acccagauguaggcauuaa

SEQ ID NO: 579041 - RNA, 19 nt, Homo sapiens
  misc_RNA (1)...(19): siRNA sense strand
gaaaggagauuccaaccua

SEQ ID NO: 579042 - RNA, 19 nt, Homo sapiens
  misc_RNA (1)...(19): siRNA sense strand
ugacaaugcuccagaaauu

SEQ ID NO: 579043 - RNA, 19 nt, Homo sapiens
  misc_RNA (1)...(19): siRNA sense strand
gcgaacaaauaucagaaua

SEQ ID NO: 579044 - RNA, 19 nt, Homo sapiens
  misc_RNA (1)...(19): siRNA sense strand
gcucaagugucuuauauuc

SEQ ID NO: 579045 - RNA, 19 nt, Homo sapiens
  misc_RNA (1)...(19): siRNA sense strand
gaacccgauuuccaauuaa

SEQ ID NO: 579046 - RNA, 19 nt, Homo sapiens
  misc_RNA (1)...(19): siRNA sense strand
cugcagaacuacaagcuua

SEQ ID NO: 579047 - RNA, 19 nt, Homo sapiens
  misc_RNA (1)...(19): siRNA sense strand
gaaugacaaugcuccagaa

SEQ ID NO: 579048 - RNA, 19 nt, Homo sapiens
  misc_RNA (1)...(19): siRNA sense strand
cagaggaauuggaaauaaa

SEQ ID NO: 579049 - RNA, 19 nt, Homo sapiens
  misc_RNA (1)...(19): siRNA sense strand
gaaacaggauccggucaga

SEQ ID NO: 579050 - RNA, 19 nt, Homo sapiens
  misc_RNA (1)...(19): siRNA sense strand
aagcgagccucuucugaua

SEQ ID NO: 579051 - RNA, 19 nt, Homo sapiens
  misc_RNA (1)...(19): siRNA sense strand
cgagcaauuuagagacuua

SEQ ID NO: 579052 - RNA, 19 nt, Homo sapiens
  misc_RNA (1)...(19): siRNA sense strand
acagaggaauuggaaauaa

SEQ ID NO: 579053 - RNA, 19 nt, Homo sapiens
  misc_RNA (1)...(19): siRNA sense strand
gaguggagaaguaucaaua

SEQ ID NO: 579054 - RNA, 19 nt, Homo sapiens
  misc_RNA (1)...(19): siRNA sense strand
cggaagagccaccugauuu

SEQ ID NO: 579055 - RNA, 19 nt, Homo sapiens
  misc_RNA (1)...(19): siRNA sense strand
ccacccaccuucccucauu

SEQ ID NO: 579056 - RNA, 19 nt, Homo sapiens
  misc_RNA (1)...(19): siRNA sense strand
gccauguucuaugaaauua

SEQ ID NO: 579057 - RNA, 19 nt, Homo sapiens
  misc_RNA (1)...(19): siRNA sense strand
ugacaacccaccaauguuu

SEQ ID NO: 579058 - RNA, 19 nt, Homo sapiens
  misc_RNA (1)...(19): siRNA sense strand
gaugccauguucuaugaaa

SEQ ID NO: 579059 - RNA, 19 nt, Homo sapiens
  misc_RNA (1)...(19): siRNA sense strand
guggagaaguaucaauauu

SEQ ID NO: 579060 - RNA, 19 nt, Homo sapiens
  misc_RNA (1)...(19): siRNA sense strand
ugauaaugcuccuaauuuc

SEQ ID NO: 579061 - RNA, 19 nt, Homo sapiens
  misc_RNA (1)...(19): siRNA sense strand
caacagaggaauuggaaau

SEQ ID NO: 579062 - RNA, 19 nt, Homo sapiens
  misc_RNA (1)...(19): siRNA sense strand
gggauucaaugcucaagug

SEQ ID NO: 579063 - RNA, 19 nt, Homo sapiens
  misc_RNA (1)...(19): siRNA sense strand
gacaaugcuccagaaauua

SEQ ID NO: 579064 - RNA, 19 nt, Homo sapiens
  misc_RNA (1)...(19): siRNA sense strand
uuaacucccugcagaacua

SEQ ID NO: 579065 - RNA, 19 nt, Homo sapiens
  misc_RNA (1)...(19): siRNA sense strand
agaucaauauuaccgcuua

SEQ ID NO: 579066 - RNA, 19 nt, Homo sapiens
  misc_RNA (1)...(19): siRNA sense strand
gaagagggcaccguuggaa

SEQ ID NO: 579067 - RNA, 19 nt, Homo sapiens
  misc_RNA (1)...(19): siRNA sense strand
ucaaugcucaagugucuua

SEQ ID NO: 579068 - RNA, 19 nt, Homo sapiens
  misc_RNA (1)...(19): siRNA sense strand
gguugaggauaaauugaaa

SEQ ID NO: 579069 - RNA, 19 nt, Homo sapiens
  misc_RNA (1)...(19): siRNA sense strand
gggcuuuccugcagaccua

SEQ ID NO: 579070 - RNA, 19 nt, Homo sapiens
  misc_RNA (1)...(19): siRNA sense strand
gacaacccaccaauguuua

SEQ ID NO: 579071 - RNA, 19 nt, Homo sapiens
  misc_RNA (1)...(19): siRNA sense strand
ugacccagauguaggcauu

SEQ ID NO: 579072 - RNA, 19 nt, Homo sapiens
  misc_RNA (1)...(19): siRNA sense strand
uaacucaggauuuacuuga

SEQ ID NO: 579073 - RNA, 19 nt, Homo sapiens
  misc_RNA (1)...(19): siRNA sense strand
caauauuaccgcuuaguga

SEQ ID NO: 579074 - RNA, 19 nt, Homo sapiens
  misc_RNA (1)...(19): siRNA sense strand
ggaccgcgaacaaauauca

SEQ ID NO: 579075 - RNA, 19 nt, Homo sapiens
  misc_RNA (1)...(19): siRNA sense strand
ggacgcagcuuuucucucu

SEQ ID NO: 579076 - RNA, 19 nt, Homo sapiens
  misc_RNA (1)...(19): siRNA sense strand
ggacagagacgcgcucaag

SEQ ID NO: 579077 - RNA, 19 nt, Homo sapiens
  misc_RNA (1)...(19): siRNA sense strand
gggcaccguuggaagagaa

SEQ ID NO: 579078 - RNA, 19 nt, Homo sapiens
  misc_RNA (1)...(19): siRNA sense strand
gcaaaugacaacccaccaa

SEQ ID NO: 579079 - RNA, 19 nt, Homo sapiens
  misc_RNA (1)...(19): siRNA sense strand
caagcucagucccagaaga

SEQ ID NO: 579080 - RNA, 19 nt, Homo sapiens
  misc_RNA (1)...(19): siRNA sense strand
ugauaguccuggaugcaaa

SEQ ID NO: 579081 - RNA, 19 nt, Homo sapiens
  misc_RNA (1)...(19): siRNA sense strand
gcugagauccuucgacuac

SEQ ID NO: 579082 - RNA, 19 nt, Homo sapiens
  misc_RNA (1)...(19): siRNA sense strand
aggaugccauguucuauga

SEQ ID NO: 579083 - RNA, 19 nt, Homo sapiens
  misc_RNA (1)...(19): siRNA sense strand
cgacuacgagcaauuuaga

SEQ ID NO: 579084 - RNA, 19 nt, Homo sapiens
  misc_RNA (1)...(19): siRNA sense strand
gagcccugcuggacagaga

SEQ ID NO: 579085 - RNA, 19 nt, Homo sapiens
  misc_RNA (1)...(19): siRNA sense strand
acaaucacgucucucacaa

SEQ ID NO: 579086 - RNA, 19 nt, Homo sapiens
  misc_RNA (1)...(19): siRNA sense strand
acucaggauuuacuugaaa

SEQ ID NO: 579087 - RNA, 19 nt, Homo sapiens
  misc_RNA (1)...(19): siRNA sense strand
ggacccagauagcaacaac

SEQ ID NO: 579088 - RNA, 19 nt, Homo sapiens
  misc_RNA (1)...(19): siRNA sense strand
gaaugggcagguugaaguu

SEQ ID NO: 579089 - RNA, 19 nt, Homo sapiens
  misc_RNA (1)...(19): siRNA sense strand
cgacgugcaugaccgagau

SEQ ID NO: 579090 - RNA, 19 nt, Homo sapiens
  misc_RNA (1)...(19): siRNA sense strand
caaaugacaacccaccaau

SEQ ID NO: 579091 - RNA, 19 nt, Homo sapiens
  misc_RNA (1)...(19): siRNA sense strand
caggagagcugugagaaaa

SEQ ID NO: 579092 - RNA, 19 nt, Homo sapiens
  misc_RNA (1)...(19): siRNA sense strand
auucggaccucacucugua

SEQ ID NO: 579093 - RNA, 19 nt, Homo sapiens
  misc_RNA (1)...(19): siRNA sense strand
ugucugaggagcuagauaa

SEQ ID NO: 579094 - RNA, 19 nt, Homo sapiens
  misc_RNA (1)...(19): siRNA sense strand
gagccuccaucuucucagu

SEQ ID NO: 579095 - RNA, 19 nt, Homo sapiens
  misc_RNA (1)...(19): siRNA sense strand
cugaggagcuagauaaagg

SEQ ID NO: 579096 - RNA, 19 nt, Homo sapiens
  misc_RNA (1)...(19): siRNA sense strand
gaggaugccauguucuaug

SEQ ID NO: 579097 - RNA, 19 nt, Homo sapiens
  misc_RNA (1)...(19): siRNA sense strand
uaaaaugccugggaaaauc

SEQ ID NO: 579098 - RNA, 19 nt, Homo sapiens
  misc_RNA (1)...(19): siRNA sense strand
gcauuaacucccugcagaa

SEQ ID NO: 579099 - RNA, 19 nt, Homo sapiens
  misc_RNA (1)...(19): siRNA sense strand
ggaagagccaccugauuuu

SEQ ID NO: 579100 - RNA, 19 nt, Homo sapiens
  misc_RNA (1)...(19): siRNA sense strand
uguccacucuggcaacuug

SEQ ID NO: 579101 - RNA, 19 nt, Homo sapiens
  misc_RNA (1)...(19): siRNA sense strand
gaucaauauuaccgcuuag

SEQ ID NO: 579102 - RNA, 19 nt, Homo sapiens
  misc_RNA (1)...(19): siRNA sense strand
gcggaagagccaccugauu

SEQ ID NO: 579103 - RNA, 19 nt, Homo sapiens
  misc_RNA (1)...(19): siRNA sense strand
ugagauccuucgacuacga

SEQ ID NO: 579104 - RNA, 19 nt, Homo sapiens
  misc_RNA (1)...(19): siRNA sense strand
cuccaacacuggcguccua

SEQ ID NO: 579105 - RNA, 19 nt, Homo sapiens
  misc_RNA (1)...(19): siRNA sense strand
cgcaucgucuccagaggua

SEQ ID NO: 579106 - RNA, 19 nt, Homo sapiens
  misc_RNA (1)...(19): siRNA sense strand
caacacuggcguccuauac

SEQ ID NO: 579107 - RNA, 19 nt, Homo sapiens
  misc_RNA (1)...(19): siRNA sense strand
gcgagccucuucugauaac

SEQ ID NO: 579108 - RNA, 19 nt, Homo sapiens
  misc_RNA (1)...(19): siRNA sense strand
ccaggagagcugugagaaa

SEQ ID NO: 579109 - RNA, 19 nt, Homo sapiens
  misc_RNA (1)...(19): siRNA sense strand
augcucaagugucuuauau

SEQ ID NO: 579110 - RNA, 19 nt, Homo sapiens
  misc_RNA (1)...(19): siRNA sense strand
ggagauuccaaccuacuuc

SEQ ID NO: 579111 - RNA, 19 nt, Homo sapiens
  misc_RNA (1)...(19): siRNA sense strand
gaaaugaaaggagauucca

SEQ ID NO: 579112 - RNA, 19 nt, Homo sapiens
  misc_RNA (1)...(19): siRNA sense strand
ggucaccgcggagaggaua

SEQ ID NO: 579113 - RNA, 19 nt, Homo sapiens
  misc_RNA (1)...(19): siRNA sense strand
acauucugguugaggauaa

SEQ ID NO: 579114 - RNA, 19 nt, Homo sapiens
  misc_RNA (1)...(19): siRNA sense strand
aaucugccauuuaaguuag

SEQ ID NO: 579115 - RNA, 19 nt, Homo sapiens
  misc_RNA (1)...(19): siRNA sense strand
uuaugaggaugccauguuc

SEQ ID NO: 579116 - RNA, 19 nt, Homo sapiens
  misc_RNA (1)...(19): siRNA sense strand
aaugacaacccaccaaugu

SEQ ID NO: 579117 - RNA, 19 nt, Homo sapiens
  misc_RNA (1)...(19): siRNA sense strand
gccuccaucuucucaguga

SEQ ID NO: 579118 - RNA, 19 nt, Homo sapiens
  misc_RNA (1)...(19): siRNA sense strand
ccuggaccgcgaacaaaua

SEQ ID NO: 579119 - RNA, 19 nt, Homo sapiens
  misc_RNA (1)...(19): siRNA sense strand
gagaaauugcucuuaucga

SEQ ID NO: 579120 - RNA, 19 nt, Homo sapiens
  misc_RNA (1)...(19): siRNA sense strand
caagugucuuauauucuag

SEQ ID NO: 579121 - RNA, 19 nt, Homo sapiens
  misc_RNA (1)...(19): siRNA sense strand
gcacauccaagugauaguc

SEQ ID NO: 579122 - RNA, 19 nt, Homo sapiens
  misc_RNA (1)...(19): siRNA sense strand
agagguaggacgcagcuuu

SEQ ID NO: 579123 - RNA, 19 nt, Homo sapiens
  misc_RNA (1)...(19): siRNA sense strand
aaauuacaaucacgucucu

SEQ ID NO: 579124 - RNA, 19 nt, Homo sapiens
  misc_RNA (1)...(19): siRNA sense strand
ggaugugaaugacaaugcu

SEQ ID NO: 579125 - RNA, 19 nt, Homo sapiens
  misc_RNA (1)...(19): siRNA sense strand
gauaaaaugccugggaaaa

SEQ ID NO: 579126 - RNA, 19 nt, Homo sapiens
  misc_RNA (1)...(19): siRNA sense strand
gagaaaagcgagccucuuc

SEQ ID NO: 579127 - RNA, 19 nt, Homo sapiens
  misc_RNA (1)...(19): siRNA sense strand
aacccgauuuccaauuaaa

SEQ ID NO: 579128 - RNA, 19 nt, Homo sapiens
  misc_RNA (1)...(19): siRNA sense strand
cagccugaguaccguguga

SEQ ID NO: 579129 - RNA, 19 nt, Homo sapiens
  misc_RNA (1)...(19): siRNA sense strand
gagauuccaaccuacuuca

SEQ ID NO: 579130 - RNA, 19 nt, Homo sapiens
  misc_RNA (1)...(19): siRNA sense strand
gauaacucaggauuuacuu

SEQ ID NO: 579131 - RNA, 19 nt, Homo sapiens
  misc_RNA (1)...(19): siRNA sense strand
uauacgcgcugagauccuu

SEQ ID NO: 579132 - RNA, 19 nt, Homo sapiens
  misc_RNA (1)...(19): siRNA sense strand
caccuucccucauuuaucc

SEQ ID NO: 579133 - RNA, 19 nt, Homo sapiens
  misc_RNA (1)...(19): siRNA sense strand
gaguaccgugugaguguuu

SEQ ID NO: 579134 - RNA, 19 nt, Homo sapiens
  misc_RNA (1)...(19): siRNA sense strand
aaagcgagccucuucugau

SEQ ID NO: 579135 - RNA, 19 nt, Homo sapiens
  misc_RNA (1)...(19): siRNA sense strand
cacccaccuucccucauuu

SEQ ID NO: 579136 - RNA, 19 nt, Homo sapiens
  misc_RNA (1)...(19): siRNA sense strand
gaggagcuagauaaagguu

SEQ ID NO: 579137 - RNA, 19 nt, Homo sapiens
  misc_RNA (1)...(19): siRNA sense strand
gcuccuaauuucccaacag

SEQ ID NO: 579138 - RNA, 19 nt, Homo sapiens
  misc_RNA (1)...(19): siRNA sense strand
gcuccagaaauuacaauca

SEQ ID NO: 579139 - RNA, 19 nt, Homo sapiens
  misc_RNA (1)...(19): siRNA sense strand
ccaacacuggcguccuaua

SEQ ID NO: 579140 - RNA, 19 nt, Homo sapiens
  misc_RNA (1)...(19): siRNA sense strand
acccagauguaggcauuaa

SEQ ID NO: 579141 - RNA, 19 nt, Homo sapiens
  misc_RNA (1)...(19): siRNA sense strand
gcacugcgcuccuuugauu

SEQ ID NO: 579142 - RNA, 19 nt, Homo sapiens
  misc_RNA (1)...(19): siRNA sense strand
caacgacaaugcucaugua

SEQ ID NO: 579143 - RNA, 19 nt, Homo sapiens
  misc_RNA (1)...(19): siRNA sense strand
cuacuacgcucaaguggua

SEQ ID NO: 579144 - RNA, 19 nt, Homo sapiens
  misc_RNA (1)...(19): siRNA sense strand
cgacagaggcuccuucgua

SEQ ID NO: 579145 - RNA, 19 nt, Homo sapiens
  misc_RNA (1)...(19): siRNA sense strand
gaugcuacauuccaugaaa

SEQ ID NO: 579146 - RNA, 19 nt, Homo sapiens
  misc_RNA (1)...(19): siRNA sense strand
uagaggaacuggagcuaaa

SEQ ID NO: 579147 - RNA, 19 nt, Homo sapiens
  misc_RNA (1)...(19): siRNA sense strand
ggagaacugacaaucauaa

SEQ ID NO: 579148 - RNA, 19 nt, Homo sapiens
  misc_RNA (1)...(19): siRNA sense strand
gcauaagcauuccggagaa

SEQ ID NO: 579149 - RNA, 19 nt, Homo sapiens
  misc_RNA (1)...(19): siRNA sense strand
cgacaaugcucauguaacu

SEQ ID NO: 579150 - RNA, 19 nt, Homo sapiens
  misc_RNA (1)...(19): siRNA sense strand
gagcugaugggaacaagua

SEQ ID NO: 579151 - RNA, 19 nt, Homo sapiens
  misc_RNA (1)...(19): siRNA sense strand
gaacaaguacccagaacug

SEQ ID NO: 579152 - RNA, 19 nt, Homo sapiens
  misc_RNA (1)...(19): siRNA sense strand
gagcuuaagucaacaucug

SEQ ID NO: 579153 - RNA, 19 nt, Homo sapiens
  misc_RNA (1)...(19): siRNA sense strand
cacccugucuguugaauuu

SEQ ID NO: 579154 - RNA, 19 nt, Homo sapiens
  misc_RNA (1)...(19): siRNA sense strand
acaaugcucauguaacuua

SEQ ID NO: 579155 - RNA, 19 nt, Homo sapiens
  misc_RNA (1)...(19): siRNA sense strand
ucagagguauuugagcuua

SEQ ID NO: 579156 - RNA, 19 nt, Homo sapiens
  misc_RNA (1)...(19): siRNA sense strand
agaaagagaagaaacguuu

SEQ ID NO: 579157 - RNA, 19 nt, Homo sapiens
  misc_RNA (1)...(19): siRNA sense strand
cggaagagccaccugauuu

SEQ ID NO: 579158 - RNA, 19 nt, Homo sapiens
  misc_RNA (1)...(19): siRNA sense strand
gaacgacaaugcgccuguu

SEQ ID NO: 579159 - RNA, 19 nt, Homo sapiens
  misc_RNA (1)...(19): siRNA sense strand
caacccaaaugaccacuuc

SEQ ID NO: 579160 - RNA, 19 nt, Homo sapiens
  misc_RNA (1)...(19): siRNA sense strand
gggcacccuuauccucuua

SEQ ID NO: 579161 - RNA, 19 nt, Homo sapiens
  misc_RNA (1)...(19): siRNA sense strand
gaagaagaaagagaagaaa

SEQ ID NO: 579162 - RNA, 19 nt, Homo sapiens
  misc_RNA (1)...(19): siRNA sense strand
gagcgcacccugucuguug

SEQ ID NO: 579163 - RNA, 19 nt, Homo sapiens
  misc_RNA (1)...(19): siRNA sense strand
acgcucaagugguauauuu

SEQ ID NO: 579164 - RNA, 19 nt, Homo sapiens
  misc_RNA (1)...(19): siRNA sense strand
cgaagaagaaagagaagaa

SEQ ID NO: 579165 - RNA, 19 nt, Homo sapiens
  misc_RNA (1)...(19): siRNA sense strand
gggcuuuccugcagaccua

SEQ ID NO: 579166 - RNA, 19 nt, Homo sapiens
  misc_RNA (1)...(19): siRNA sense strand
augcagagcucgcacuuug

SEQ ID NO: 579167 - RNA, 19 nt, Homo sapiens
  misc_RNA (1)...(19): siRNA sense strand
gagguggaaauaacagaua

SEQ ID NO: 579168 - RNA, 19 nt, Homo sapiens
  misc_RNA (1)...(19): siRNA sense strand
ggauuccggauuccucuua

SEQ ID NO: 579169 - RNA, 19 nt, Homo sapiens
  misc_RNA (1)...(19): siRNA sense strand
ccucuuacaucucuaucaa

SEQ ID NO: 579170 - RNA, 19 nt, Homo sapiens
  misc_RNA (1)...(19): siRNA sense strand
ggacagagacgcgcucaag

SEQ ID NO: 579171 - RNA, 19 nt, Homo sapiens
  misc_RNA (1)...(19): siRNA sense strand
ggaucuuccuuuuaaguua

SEQ ID NO: 579172 - RNA, 19 nt, Homo sapiens
  misc_RNA (1)...(19): siRNA sense strand
gucaacaucuggagaacug

SEQ ID NO: 579173 - RNA, 19 nt, Homo sapiens
  misc_RNA (1)...(19): siRNA sense strand
gagaaaagcccuggagaaa

SEQ ID NO: 579174 - RNA, 19 nt, Homo sapiens
  misc_RNA (1)...(19): siRNA sense strand
gcacauccuacuccaccua

SEQ ID NO: 579175 - RNA, 19 nt, Homo sapiens
  misc_RNA (1)...(19): siRNA sense strand
uggcagacaucaacgacaa

SEQ ID NO: 579176 - RNA, 19 nt, Homo sapiens
  misc_RNA (1)...(19): siRNA sense strand
gauuccggauuccucuuaa

SEQ ID NO: 579177 - RNA, 19 nt, Homo sapiens
  misc_RNA (1)...(19): siRNA sense strand
gcagagcucgcacuuugug

SEQ ID NO: 579178 - RNA, 19 nt, Homo sapiens
  misc_RNA (1)...(19): siRNA sense strand
guccacggaugcucacauu

SEQ ID NO: 579179 - RNA, 19 nt, Homo sapiens
  misc_RNA (1)...(19): siRNA sense strand
gagaacugacaaucauaaa

SEQ ID NO: 579180 - RNA, 19 nt, Homo sapiens
  misc_RNA (1)...(19): siRNA sense strand
ggugagaacgcccuucaga

SEQ ID NO: 579181 - RNA, 19 nt, Homo sapiens
  misc_RNA (1)...(19): siRNA sense strand
uacaugacaucugcuacua

SEQ ID NO: 579182 - RNA, 19 nt, Homo sapiens
  misc_RNA (1)...(19): siRNA sense strand
gagcccugcuggacagaga

SEQ ID NO: 579183 - RNA, 19 nt, Homo sapiens
  misc_RNA (1)...(19): siRNA sense strand
acauucugcuggaggauaa

SEQ ID NO: 579184 - RNA, 19 nt, Homo sapiens
  misc_RNA (1)...(19): siRNA sense strand
gcaacgacaaugcucaugu

SEQ ID NO: 579185 - RNA, 19 nt, Homo sapiens
  misc_RNA (1)...(19): siRNA sense strand
cuacauuccaugaaauuga

SEQ ID NO: 579186 - RNA, 19 nt, Homo sapiens
  misc_RNA (1)...(19): siRNA sense strand
caguagagguggaaauaac

SEQ ID NO: 579187 - RNA, 19 nt, Homo sapiens
  misc_RNA (1)...(19): siRNA sense strand
gaaaagcccuggagaaacc

SEQ ID NO: 579188 - RNA, 19 nt, Homo sapiens
  misc_RNA (1)...(19): siRNA sense strand
caggagagcugugagaaaa

SEQ ID NO: 579189 - RNA, 19 nt, Homo sapiens
  misc_RNA (1)...(19): siRNA sense strand
auucggaccucacucugua

SEQ ID NO: 579190 - RNA, 19 nt, Homo sapiens
  misc_RNA (1)...(19): siRNA sense strand
uaagucaacaucuggagaa

SEQ ID NO: 579191 - RNA, 19 nt, Homo sapiens
  misc_RNA (1)...(19): siRNA sense strand
cagagguauuugagcuuaa

SEQ ID NO: 579192 - RNA, 19 nt, Homo sapiens
  misc_RNA (1)...(19): siRNA sense strand
gagccucugucuucucagu

SEQ ID NO: 579193 - RNA, 19 nt, Homo sapiens
  misc_RNA (1)...(19): siRNA sense strand
ugacaaugccccagaauuu

SEQ ID NO: 579194 - RNA, 19 nt, Homo sapiens
  misc_RNA (1)...(19): siRNA sense strand
gcuauucugugcgggaaga

SEQ ID NO: 579195 - RNA, 19 nt, Homo sapiens
  misc_RNA (1)...(19): siRNA sense strand
gccucaaucucuacucgaa

SEQ ID NO: 579196 - RNA, 19 nt, Homo sapiens
  misc_RNA (1)...(19): siRNA sense strand
guccugcugugcuuccuuu

SEQ ID NO: 579197 - RNA, 19 nt, Homo sapiens
  misc_RNA (1)...(19): siRNA sense strand
gaagaaagagaagaaacgu

SEQ ID NO: 579198 - RNA, 19 nt, Homo sapiens
  misc_RNA (1)...(19): siRNA sense strand
uaucagcgccucaaucucu

SEQ ID NO: 579199 - RNA, 19 nt, Homo sapiens
  misc_RNA (1)...(19): siRNA sense strand
ggaagagccaccugauuuu

SEQ ID NO: 579200 - RNA, 19 nt, Homo sapiens
  misc_RNA (1)...(19): siRNA sense strand
ucuaaccgcuaaagaugga

SEQ ID NO: 579201 - RNA, 19 nt, Homo sapiens
  misc_RNA (1)...(19): siRNA sense strand
gaacaguuuuccuuuuaca

SEQ ID NO: 579202 - RNA, 19 nt, Homo sapiens
  misc_RNA (1)...(19): siRNA sense strand
gaacugacaaucauaaaag

SEQ ID NO: 579203 - RNA, 19 nt, Homo sapiens
  misc_RNA (1)...(19): siRNA sense strand
guagaggaacuggagcuaa

SEQ ID NO: 579204 - RNA, 19 nt, Homo sapiens
  misc_RNA (1)...(19): siRNA sense strand
cagaacgccuggcugucuu

SEQ ID NO: 579205 - RNA, 19 nt, Homo sapiens
  misc_RNA (1)...(19): siRNA sense strand
uuaugaggaugcuacauuc

SEQ ID NO: 579206 - RNA, 19 nt, Homo sapiens
  misc_RNA (1)...(19): siRNA sense strand
cgcaucgucuccagaggua

SEQ ID NO: 579207 - RNA, 19 nt, Homo sapiens
  misc_RNA (1)...(19): siRNA sense strand
gcggaagagccaccugauu

SEQ ID NO: 579208 - RNA, 19 nt, Homo sapiens
  misc_RNA (1)...(19): siRNA sense strand
ccacucaguagcaauguau

SEQ ID NO: 579209 - RNA, 19 nt, Homo sapiens
  misc_RNA (1)...(19): siRNA sense strand
gaguaccgcauaagcauuc

SEQ ID NO: 579210 - RNA, 19 nt, Homo sapiens
  misc_RNA (1)...(19): siRNA sense strand
ccaggagagcugugagaaa

SEQ ID NO: 579211 - RNA, 19 nt, Homo sapiens
  misc_RNA (1)...(19): siRNA sense strand
ccaccuacauucccgaaaa

SEQ ID NO: 579212 - RNA, 19 nt, Homo sapiens
  misc_RNA (1)...(19): siRNA sense strand
agaucuagauuaugaggau

SEQ ID NO: 579213 - RNA, 19 nt, Homo sapiens
  misc_RNA (1)...(19): siRNA sense strand
cuggagaacugacaaucau

SEQ ID NO: 579214 - RNA, 19 nt, Homo sapiens
  misc_RNA (1)...(19): siRNA sense strand
gaccgccacugacgcagau

SEQ ID NO: 579215 - RNA, 19 nt, Homo sapiens
  misc_RNA (1)...(19): siRNA sense strand
gaaugacaaugccccagaa

SEQ ID NO: 579216 - RNA, 19 nt, Homo sapiens
  misc_RNA (1)...(19): siRNA sense strand
gugagaacgcccuucagaa

SEQ ID NO: 579217 - RNA, 19 nt, Homo sapiens
  misc_RNA (1)...(19): siRNA sense strand
gccucugucuucucaguga

SEQ ID NO: 579218 - RNA, 19 nt, Homo sapiens
  misc_RNA (1)...(19): siRNA sense strand
ucccagcucuuugcucuga

SEQ ID NO: 579219 - RNA, 19 nt, Homo sapiens
  misc_RNA (1)...(19): siRNA sense strand
gggaacaaguacccagaac

SEQ ID NO: 579220 - RNA, 19 nt, Homo sapiens
  misc_RNA (1)...(19): siRNA sense strand
ggucacugcgaacaggaua

SEQ ID NO: 579221 - RNA, 19 nt, Homo sapiens
  misc_RNA (1)...(19): siRNA sense strand
cucaaucucuacucgaaga

SEQ ID NO: 579222 - RNA, 19 nt, Homo sapiens
  misc_RNA (1)...(19): siRNA sense strand
cgggaacccuccacucagu

SEQ ID NO: 579223 - RNA, 19 nt, Homo sapiens
  misc_RNA (1)...(19): siRNA sense strand
gcacccuuauccucuuaca

SEQ ID NO: 579224 - RNA, 19 nt, Homo sapiens
  misc_RNA (1)...(19): siRNA sense strand
caauuacuaccgacugguu

SEQ ID NO: 579225 - RNA, 19 nt, Homo sapiens
  misc_RNA (1)...(19): siRNA sense strand
uaggcaacaucgccaagga

SEQ ID NO: 579226 - RNA, 19 nt, Homo sapiens
  misc_RNA (1)...(19): siRNA sense strand
aaucucuacucgaagaaga

SEQ ID NO: 579227 - RNA, 19 nt, Homo sapiens
  misc_RNA (1)...(19): siRNA sense strand
ccacggaugcucacauuuu

SEQ ID NO: 579228 - RNA, 19 nt, Homo sapiens
  misc_RNA (1)...(19): siRNA sense strand
ggaaccauaauugggcuuu

SEQ ID NO: 579229 - RNA, 19 nt, Homo sapiens
  misc_RNA (1)...(19): siRNA sense strand
gacuauuuauucaguagag

SEQ ID NO: 579230 - RNA, 19 nt, Homo sapiens
  misc_RNA (1)...(19): siRNA sense strand
gcuggaggauaaauugacu

SEQ ID NO: 579231 - RNA, 19 nt, Homo sapiens
  misc_RNA (1)...(19): siRNA sense strand
gggaacccuccacucagua

SEQ ID NO: 579232 - RNA, 19 nt, Homo sapiens
  misc_RNA (1)...(19): siRNA sense strand
gauaaugccccucgcuuug

SEQ ID NO: 579233 - RNA, 19 nt, Homo sapiens
  misc_RNA (1)...(19): siRNA sense strand
gguauuugagcuuaaguca

SEQ ID NO: 579234 - RNA, 19 nt, Homo sapiens
  misc_RNA (1)...(19): siRNA sense strand
gggcuacuacgcucaagug

SEQ ID NO: 579235 - RNA, 19 nt, Homo sapiens
  misc_RNA (1)...(19): siRNA sense strand
aguacgcacucaacccaaa

SEQ ID NO: 579236 - RNA, 19 nt, Homo sapiens
  misc_RNA (1)...(19): siRNA sense strand
gaaagagaagaaacguuuu

SEQ ID NO: 579237 - RNA, 19 nt, Homo sapiens
  misc_RNA (1)...(19): siRNA sense strand
acaucacucuaaccgcuaa

SEQ ID NO: 579238 - RNA, 19 nt, Homo sapiens
  misc_RNA (1)...(19): siRNA sense strand
ucaguagagguggaaauaa

SEQ ID NO: 579239 - RNA, 19 nt, Homo sapiens
  misc_RNA (1)...(19): siRNA sense strand
gcacccugucuguugaauu

SEQ ID NO: 579240 - RNA, 19 nt, Homo sapiens
  misc_RNA (1)...(19): siRNA sense strand
cgacacuggaguacucuau

SEQ ID NO: 579241 - RNA, 19 nt, Homo sapiens
  misc_RNA (1)...(19): siRNA sense strand
gcacugcgcuccuuugauu

SEQ ID NO: 579242 - RNA, 19 nt, Homo sapiens
  misc_RNA (1)...(19): siRNA sense strand
caacgacaaugcucaugua

SEQ ID NO: 579243 - RNA, 19 nt, Homo sapiens
  misc_RNA (1)...(19): siRNA sense strand
cuacuacgcucaaguggua

SEQ ID NO: 579244 - RNA, 19 nt, Homo sapiens
  misc_RNA (1)...(19): siRNA sense strand
cgacagaggcuccuucgua

SEQ ID NO: 579245 - RNA, 19 nt, Homo sapiens
  misc_RNA (1)...(19): siRNA sense strand
gaugcuacauuccaugaaa

SEQ ID NO: 579246 - RNA, 19 nt, Homo sapiens
  misc_RNA (1)...(19): siRNA sense strand
uagaggaacuggagcuaaa

SEQ ID NO: 579247 - RNA, 19 nt, Homo sapiens
  misc_RNA (1)...(19): siRNA sense strand
ggagaacugacaaucauaa

SEQ ID NO: 579248 - RNA, 19 nt, Homo sapiens
  misc_RNA (1)...(19): siRNA sense strand
gcauaagcauuccggagaa

SEQ ID NO: 579249 - RNA, 19 nt, Homo sapiens
  misc_RNA (1)...(19): siRNA sense strand
cgacaaugcucauguaacu

SEQ ID NO: 579250 - RNA, 19 nt, Homo sapiens
  misc_RNA (1)...(19): siRNA sense strand
gagcugaugggaacaagua

SEQ ID NO: 579251 - RNA, 19 nt, Homo sapiens
  misc_RNA (1)...(19): siRNA sense strand
gaacaaguacccagaacug

SEQ ID NO: 579252 - RNA, 19 nt, Homo sapiens
  misc_RNA (1)...(19): siRNA sense strand
gagcuuaagucaacaucug

SEQ ID NO: 579253 - RNA, 19 nt, Homo sapiens
  misc_RNA (1)...(19): siRNA sense strand
cacccugucuguugaauuu

SEQ ID NO: 579254 - RNA, 19 nt, Homo sapiens
  misc_RNA (1)...(19): siRNA sense strand
acaaugcucauguaacuua

SEQ ID NO: 579255 - RNA, 19 nt, Homo sapiens
  misc_RNA (1)...(19): siRNA sense strand
ucagagguauuugagcuua

SEQ ID NO: 579256 - RNA, 19 nt, Homo sapiens
  misc_RNA (1)...(19): siRNA sense strand
agaaagagaagaaacguuu

SEQ ID NO: 579257 - RNA, 19 nt, Homo sapiens
  misc_RNA (1)...(19): siRNA sense strand
cggaagagccaccugauuu

SEQ ID NO: 579258 - RNA, 19 nt, Homo sapiens
  misc_RNA (1)...(19): siRNA sense strand
gaacgacaaugcgccuguu

SEQ ID NO: 579259 - RNA, 19 nt, Homo sapiens
  misc_RNA (1)...(19): siRNA sense strand
caacccaaaugaccacuuc

SEQ ID NO: 579260 - RNA, 19 nt, Homo sapiens
  misc_RNA (1)...(19): siRNA sense strand
gggcacccuuauccucuua

SEQ ID NO: 579261 - RNA, 19 nt, Homo sapiens
  misc_RNA (1)...(19): siRNA sense strand
gaagaagaaagagaagaaa

SEQ ID NO: 579262 - RNA, 19 nt, Homo sapiens
  misc_RNA (1)...(19): siRNA sense strand
gagcgcacccugucuguug

SEQ ID NO: 579263 - RNA, 19 nt, Homo sapiens
  misc_RNA (1)...(19): siRNA sense strand
acgcucaagugguauauuu

SEQ ID NO: 579264 - RNA, 19 nt, Homo sapiens
  misc_RNA (1)...(19): siRNA sense strand
cgaagaagaaagagaagaa

SEQ ID NO: 579265 - RNA, 19 nt, Homo sapiens
  misc_RNA (1)...(19): siRNA sense strand
gggcuuuccugcagaccua

SEQ ID NO: 579266 - RNA, 19 nt, Homo sapiens
  misc_RNA (1)...(19): siRNA sense strand
augcagagcucgcacuuug

SEQ ID NO: 579267 - RNA, 19 nt, Homo sapiens
  misc_RNA (1)...(19): siRNA sense strand
gagguggaaauaacagaua

SEQ ID NO: 579268 - RNA, 19 nt, Homo sapiens
  misc_RNA (1)...(19): siRNA sense strand
ggauuccggauuccucuua

SEQ ID NO: 579269 - RNA, 19 nt, Homo sapiens
  misc_RNA (1)...(19): siRNA sense strand
ccucuuacaucucuaucaa

SEQ ID NO: 579270 - RNA, 19 nt, Homo sapiens
  misc_RNA (1)...(19): siRNA sense strand
ggacagagacgcgcucaag

SEQ ID NO: 579271 - RNA, 19 nt, Homo sapiens
  misc_RNA (1)...(19): siRNA sense strand
ggaucuuccuuuuaaguua

SEQ ID NO: 579272 - RNA, 19 nt, Homo sapiens
  misc_RNA (1)...(19): siRNA sense strand
gucaacaucuggagaacug

SEQ ID NO: 579273 - RNA, 19 nt, Homo sapiens
  misc_RNA (1)...(19): siRNA sense strand
gagaaaagcccuggagaaa

SEQ ID NO: 579274 - RNA, 19 nt, Homo sapiens
  misc_RNA (1)...(19): siRNA sense strand
gcacauccuacuccaccua

SEQ ID NO: 579275 - RNA, 19 nt, Homo sapiens
  misc_RNA (1)...(19): siRNA sense strand
uggcagacaucaacgacaa

SEQ ID NO: 579276 - RNA, 19 nt, Homo sapiens
  misc_RNA (1)...(19): siRNA sense strand
gauuccggauuccucuuaa

SEQ ID NO: 579277 - RNA, 19 nt, Homo sapiens
  misc_RNA (1)...(19): siRNA sense strand
gcagagcucgcacuuugug

SEQ ID NO: 579278 - RNA, 19 nt, Homo sapiens
  misc_RNA (1)...(19): siRNA sense strand
guccacggaugcucacauu

SEQ ID NO: 579279 - RNA, 19 nt, Homo sapiens
  misc_RNA (1)...(19): siRNA sense strand
gagaacugacaaucauaaa

SEQ ID NO: 579280 - RNA, 19 nt, Homo sapiens
  misc_RNA (1)...(19): siRNA sense strand
ggugagaacgcccuucaga

SEQ ID NO: 579281 - RNA, 19 nt, Homo sapiens
  misc_RNA (1)...(19): siRNA sense strand
uacaugacaucugcuacua

SEQ ID NO: 579282 - RNA, 19 nt, Homo sapiens
  misc_RNA (1)...(19): siRNA sense strand
gagcccugcuggacagaga

SEQ ID NO: 579283 - RNA, 19 nt, Homo sapiens
  misc_RNA (1)...(19): siRNA sense strand
acauucugcuggaggauaa

SEQ ID NO: 579284 - RNA, 19 nt, Homo sapiens
  misc_RNA (1)...(19): siRNA sense strand
gcaacgacaaugcucaugu

SEQ ID NO: 579285 - RNA, 19 nt, Homo sapiens
  misc_RNA (1)...(19): siRNA sense strand
cuacauuccaugaaauuga

SEQ ID NO: 579286 - RNA, 19 nt, Homo sapiens
  misc_RNA (1)...(19): siRNA sense strand
caguagagguggaaauaac

SEQ ID NO: 579287 - RNA, 19 nt, Homo sapiens
  misc_RNA (1)...(19): siRNA sense strand
gaaaagcccuggagaaacc

SEQ ID NO: 579288 - RNA, 19 nt, Homo sapiens
  misc_RNA (1)...(19): siRNA sense strand
caggagagcugugagaaaa

SEQ ID NO: 579289 - RNA, 19 nt, Homo sapiens
  misc_RNA (1)...(19): siRNA sense strand
auucggaccucacucugua

SEQ ID NO: 579290 - RNA, 19 nt, Homo sapiens
  misc_RNA (1)...(19): siRNA sense strand
uaagucaacaucuggagaa

SEQ ID NO: 579291 - RNA, 19 nt, Homo sapiens
  misc_RNA (1)...(19): siRNA sense strand
cagagguauuugagcuuaa

SEQ ID NO: 579292 - RNA, 19 nt, Homo sapiens
  misc_RNA (1)...(19): siRNA sense strand
gagccucugucuucucagu

SEQ ID NO: 579293 - RNA, 19 nt, Homo sapiens
  misc_RNA (1)...(19): siRNA sense strand
ugacaaugccccagaauuu

SEQ ID NO: 579294 - RNA, 19 nt, Homo sapiens
  misc_RNA (1)...(19): siRNA sense strand
gcuauucugugcgggaaga

SEQ ID NO: 579295 - RNA, 19 nt, Homo sapiens
  misc_RNA (1)...(19): siRNA sense strand
gccucaaucucuacucgaa

SEQ ID NO: 579296 - RNA, 19 nt, Homo sapiens
  misc_RNA (1)...(19): siRNA sense strand
guccugcugugcuuccuuu

SEQ ID NO: 579297 - RNA, 19 nt, Homo sapiens
  misc_RNA (1)...(19): siRNA sense strand
gaagaaagagaagaaacgu

SEQ ID NO: 579298 - RNA, 19 nt, Homo sapiens
  misc_RNA (1)...(19): siRNA sense strand
uaucagcgccucaaucucu

SEQ ID NO: 579299 - RNA, 19 nt, Homo sapiens
  misc_RNA (1)...(19): siRNA sense strand
ggaagagccaccugauuuu

SEQ ID NO: 579300 - RNA, 19 nt, Homo sapiens
  misc_RNA (1)...(19): siRNA sense strand
ucuaaccgcuaaagaugga

SEQ ID NO: 579301 - RNA, 19 nt, Homo sapiens
  misc_RNA (1)...(19): siRNA sense strand
gaacaguuuuccuuuuaca

SEQ ID NO: 579302 - RNA, 19 nt, Homo sapiens
  misc_RNA (1)...(19): siRNA sense strand
gaacugacaaucauaaaag

SEQ ID NO: 579303 - RNA, 19 nt, Homo sapiens
  misc_RNA (1)...(19): siRNA sense strand
guagaggaacuggagcuaa

SEQ ID NO: 579304 - RNA, 19 nt, Homo sapiens
  misc_RNA (1)...(19): siRNA sense strand
cagaacgccuggcugucuu

SEQ ID NO: 579305 - RNA, 19 nt, Homo sapiens
  misc_RNA (1)...(19): siRNA sense strand
uuaugaggaugcuacauuc

SEQ ID NO: 579306 - RNA, 19 nt, Homo sapiens
  misc_RNA (1)...(19): siRNA sense strand
cgcaucgucuccagaggua

SEQ ID NO: 579307 - RNA, 19 nt, Homo sapiens
  misc_RNA (1)...(19): siRNA sense strand
gcggaagagccaccugauu

SEQ ID NO: 579308 - RNA, 19 nt, Homo sapiens
  misc_RNA (1)...(19): siRNA sense strand
ccacucaguagcaauguau

SEQ ID NO: 579309 - RNA, 19 nt, Homo sapiens
  misc_RNA (1)...(19): siRNA sense strand
gaguaccgcauaagcauuc

SEQ ID NO: 579310 - RNA, 19 nt, Homo sapiens
  misc_RNA (1)...(19): siRNA sense strand
ccaggagagcugugagaaa

SEQ ID NO: 579311 - RNA, 19 nt, Homo sapiens
  misc_RNA (1)...(19): siRNA sense strand
ccaccuacauucccgaaaa

SEQ ID NO: 579312 - RNA, 19 nt, Homo sapiens
  misc_RNA (1)...(19): siRNA sense strand
agaucuagauuaugaggau

SEQ ID NO: 579313 - RNA, 19 nt, Homo sapiens
  misc_RNA (1)...(19): siRNA sense strand
cuggagaacugacaaucau

SEQ ID NO: 579314 - RNA, 19 nt, Homo sapiens
  misc_RNA (1)...(19): siRNA sense strand
gaccgccacugacgcagau

SEQ ID NO: 579315 - RNA, 19 nt, Homo sapiens
  misc_RNA (1)...(19): siRNA sense strand
gaaugacaaugccccagaa

SEQ ID NO: 579316 - RNA, 19 nt, Homo sapiens
  misc_RNA (1)...(19): siRNA sense strand
gugagaacgcccuucagaa

SEQ ID NO: 579317 - RNA, 19 nt, Homo sapiens
  misc_RNA (1)...(19): siRNA sense strand
gccucugucuucucaguga

SEQ ID NO: 579318 - RNA, 19 nt, Homo sapiens
  misc_RNA (1)...(19): siRNA sense strand
ucccagcucuuugcucuga

SEQ ID NO: 579319 - RNA, 19 nt, Homo sapiens
  misc_RNA (1)...(19): siRNA sense strand
gggaacaaguacccagaac

SEQ ID NO: 579320 - RNA, 19 nt, Homo sapiens
  misc_RNA (1)...(19): siRNA sense strand
ggucacugcgaacaggaua

SEQ ID NO: 579321 - RNA, 19 nt, Homo sapiens
  misc_RNA (1)...(19): siRNA sense strand
cucaaucucuacucgaaga

SEQ ID NO: 579322 - RNA, 19 nt, Homo sapiens
  misc_RNA (1)...(19): siRNA sense strand
cgggaacccuccacucagu

SEQ ID NO: 579323 - RNA, 19 nt, Homo sapiens
  misc_RNA (1)...(19): siRNA sense strand
gcacccuuauccucuuaca

SEQ ID NO: 579324 - RNA, 19 nt, Homo sapiens
  misc_RNA (1)...(19): siRNA sense strand
caauuacuaccgacugguu

SEQ ID NO: 579325 - RNA, 19 nt, Homo sapiens
  misc_RNA (1)...(19): siRNA sense strand
uaggcaacaucgccaagga

SEQ ID NO: 579326 - RNA, 19 nt, Homo sapiens
  misc_RNA (1)...(19): siRNA sense strand
aaucucuacucgaagaaga

SEQ ID NO: 579327 - RNA, 19 nt, Homo sapiens
  misc_RNA (1)...(19): siRNA sense strand
ccacggaugcucacauuuu

SEQ ID NO: 579328 - RNA, 19 nt, Homo sapiens
  misc_RNA (1)...(19): siRNA sense strand
ggaaccauaauugggcuuu

SEQ ID NO: 579329 - RNA, 19 nt, Homo sapiens
  misc_RNA (1)...(19): siRNA sense strand
gacuauuuauucaguagag

SEQ ID NO: 579330 - RNA, 19 nt, Homo sapiens
  misc_RNA (1)...(19): siRNA sense strand
gcuggaggauaaauugacu

SEQ ID NO: 579331 - RNA, 19 nt, Homo sapiens
  misc_RNA (1)...(19): siRNA sense strand
gggaacccuccacucagua

SEQ ID NO: 579332 - RNA, 19 nt, Homo sapiens
  misc_RNA (1)...(19): siRNA sense strand
gauaaugccccucgcuuug

SEQ ID NO: 579333 - RNA, 19 nt, Homo sapiens
  misc_RNA (1)...(19): siRNA sense strand
gguauuugagcuuaaguca

SEQ ID NO: 579334 - RNA, 19 nt, Homo sapiens
  misc_RNA (1)...(19): siRNA sense strand
gggcuacuacgcucaagug

SEQ ID NO: 579335 - RNA, 19 nt, Homo sapiens
  misc_RNA (1)...(19): siRNA sense strand
aguacgcacucaacccaaa

SEQ ID NO: 579336 - RNA, 19 nt, Homo sapiens
  misc_RNA (1)...(19): siRNA sense strand
gaaagagaagaaacguuuu

SEQ ID NO: 579337 - RNA, 19 nt, Homo sapiens
  misc_RNA (1)...(19): siRNA sense strand
acaucacucuaaccgcuaa

SEQ ID NO: 579338 - RNA, 19 nt, Homo sapiens
  misc_RNA (1)...(19): siRNA sense strand
ucaguagagguggaaauaa

SEQ ID NO: 579339 - RNA, 19 nt, Homo sapiens
  misc_RNA (1)...(19): siRNA sense strand
gcacccugucuguugaauu

SEQ ID NO: 579340 - RNA, 19 nt, Homo sapiens
  misc_RNA (1)...(19): siRNA sense strand
cgacacuggaguacucuau

SEQ ID NO: 579341 - RNA, 19 nt, Homo sapiens
  misc_RNA (1)...(19): siRNA sense strand
gaaauaacgacuccaggua

SEQ ID NO: 579342 - RNA, 19 nt, Homo sapiens
  misc_RNA (1)...(19): siRNA sense strand
gaacuuaucucuggguaca

SEQ ID NO: 579343 - RNA, 19 nt, Homo sapiens
  misc_RNA (1)...(19): siRNA sense strand
ugacaauccuccagcauuu

SEQ ID NO: 579344 - RNA, 19 nt, Homo sapiens
  misc_RNA (1)...(19): siRNA sense strand
ccaaggaacuccagcucua

SEQ ID NO: 579345 - RNA, 19 nt, Homo sapiens
  misc_RNA (1)...(19): siRNA sense strand
ugacagauaucaaugacaa

SEQ ID NO: 579346 - RNA, 19 nt, Homo sapiens
  misc_RNA (1)...(19): siRNA sense strand
cagaguggcccaaauauuu

SEQ ID NO: 579347 - RNA, 19 nt, Homo sapiens
  misc_RNA (1)...(19): siRNA sense strand
aaagaacacuggacagaga

SEQ ID NO: 579348 - RNA, 19 nt, Homo sapiens
  misc_RNA (1)...(19): siRNA sense strand
gcacaauaccauauaaaug

SEQ ID NO: 579349 - RNA, 19 nt, Homo sapiens
  misc_RNA (1)...(19): siRNA sense strand
gcaaugagaaugcacaaau

SEQ ID NO: 579350 - RNA, 19 nt, Homo sapiens
  misc_RNA (1)...(19): siRNA sense strand
gcccaaauauuucguuuag

SEQ ID NO: 579351 - RNA, 19 nt, Homo sapiens
  misc_RNA (1)...(19): siRNA sense strand
gcacaagucacgucugcua

SEQ ID NO: 579352 - RNA, 19 nt, Homo sapiens
  misc_RNA (1)...(19): siRNA sense strand
gcucauggcuaaaguuaag

SEQ ID NO: 579353 - RNA, 19 nt, Homo sapiens
  misc_RNA (1)...(19): siRNA sense strand
guacucagcugcucauggu

SEQ ID NO: 579354 - RNA, 19 nt, Homo sapiens
  misc_RNA (1)...(19): siRNA sense strand
caaaucacuuacucccuaa

SEQ ID NO: 579355 - RNA, 19 nt, Homo sapiens
  misc_RNA (1)...(19): siRNA sense strand
uaaagaaccacuagauuuc

SEQ ID NO: 579356 - RNA, 19 nt, Homo sapiens
  misc_RNA (1)...(19): siRNA sense strand
guacuccuuucacaaugua

SEQ ID NO: 579357 - RNA, 19 nt, Homo sapiens
  misc_RNA (1)...(19): siRNA sense strand
cggaagagccaccugauuu

SEQ ID NO: 579358 - RNA, 19 nt, Homo sapiens
  misc_RNA (1)...(19): siRNA sense strand
uaauugcucuuaucagugu

SEQ ID NO: 579359 - RNA, 19 nt, Homo sapiens
  misc_RNA (1)...(19): siRNA sense strand
gaagagacagacaaagguu

SEQ ID NO: 579360 - RNA, 19 nt, Homo sapiens
  misc_RNA (1)...(19): siRNA sense strand
ugaacucacuccagagcua

SEQ ID NO: 579361 - RNA, 19 nt, Homo sapiens
  misc_RNA (1)...(19): siRNA sense strand
ccuggaaauuuacccuuua

SEQ ID NO: 579362 - RNA, 19 nt, Homo sapiens
  misc_RNA (1)...(19): siRNA sense strand
gcuaccaacucagcucuaa

SEQ ID NO: 579363 - RNA, 19 nt, Homo sapiens
  misc_RNA (1)...(19): siRNA sense strand
cacuagauuucgaagaaua

SEQ ID NO: 579364 - RNA, 19 nt, Homo sapiens
  misc_RNA (1)...(19): siRNA sense strand
gacaauggcuacaccacau

SEQ ID NO: 579365 - RNA, 19 nt, Homo sapiens
  misc_RNA (1)...(19): siRNA sense strand
ggguacaacaucacaauaa

SEQ ID NO: 579366 - RNA, 19 nt, Homo sapiens
  misc_RNA (1)...(19): siRNA sense strand
caaugagaaugcacaaauc

SEQ ID NO: 579367 - RNA, 19 nt, Homo sapiens
  misc_RNA (1)...(19): siRNA sense strand
caacaucgccaaggaccua

SEQ ID NO: 579368 - RNA, 19 nt, Homo sapiens
  misc_RNA (1)...(19): siRNA sense strand
gggcuuuccugcagaccua

SEQ ID NO: 579369 - RNA, 19 nt, Homo sapiens
  misc_RNA (1)...(19): siRNA sense strand
ggacagcaaugagaaugca

SEQ ID NO: 579370 - RNA, 19 nt, Homo sapiens
  misc_RNA (1)...(19): siRNA sense strand
gggcucauggcuaaaguua

SEQ ID NO: 579371 - RNA, 19 nt, Homo sapiens
  misc_RNA (1)...(19): siRNA sense strand
gcagagucccuuagacaga

SEQ ID NO: 579372 - RNA, 19 nt, Homo sapiens
  misc_RNA (1)...(19): siRNA sense strand
agaaugcacaaaucacuua

SEQ ID NO: 579373 - RNA, 19 nt, Homo sapiens
  misc_RNA (1)...(19): siRNA sense strand
ccagcucuaucuacugaaa

SEQ ID NO: 579374 - RNA, 19 nt, Homo sapiens
  misc_RNA (1)...(19): siRNA sense strand
ggacagagacgcgcucaag

SEQ ID NO: 579375 - RNA, 19 nt, Homo sapiens
  misc_RNA (1)...(19): siRNA sense strand
gagccuccaucuucucugu

SEQ ID NO: 579376 - RNA, 19 nt, Homo sapiens
  misc_RNA (1)...(19): siRNA sense strand
ugacaacacuccccaauuc

SEQ ID NO: 579377 - RNA, 19 nt, Homo sapiens
  misc_RNA (1)...(19): siRNA sense strand
guaacguacuccuuucaca

SEQ ID NO: 579378 - RNA, 19 nt, Homo sapiens
  misc_RNA (1)...(19): siRNA sense strand
caggcacaauaccauauaa

SEQ ID NO: 579379 - RNA, 19 nt, Homo sapiens
  misc_RNA (1)...(19): siRNA sense strand
ggaagagacagacaaaggu

SEQ ID NO: 579380 - RNA, 19 nt, Homo sapiens
  misc_RNA (1)...(19): siRNA sense strand
gacaauccuccagcauuua

SEQ ID NO: 579381 - RNA, 19 nt, Homo sapiens
  misc_RNA (1)...(19): siRNA sense strand
gacaugcaacugaaaguga

SEQ ID NO: 579382 - RNA, 19 nt, Homo sapiens
  misc_RNA (1)...(19): siRNA sense strand
ugccgugucucgugaguuu

SEQ ID NO: 579383 - RNA, 19 nt, Homo sapiens
  misc_RNA (1)...(19): siRNA sense strand
gaccaggacucaggagaca

SEQ ID NO: 579384 - RNA, 19 nt, Homo sapiens
  misc_RNA (1)...(19): siRNA sense strand
uuaagguacugaucaaagu

SEQ ID NO: 579385 - RNA, 19 nt, Homo sapiens
  misc_RNA (1)...(19): siRNA sense strand
cuccagagcuaccaacuca

SEQ ID NO: 579386 - RNA, 19 nt, Homo sapiens
  misc_RNA (1)...(19): siRNA sense strand
gagcccugcuggacagaga

SEQ ID NO: 579387 - RNA, 19 nt, Homo sapiens
  misc_RNA (1)...(19): siRNA sense strand
gguacaacaucacaauaac

SEQ ID NO: 579388 - RNA, 19 nt, Homo sapiens
  misc_RNA (1)...(19): siRNA sense strand
uuacacaggagaaauauca

SEQ ID NO: 579389 - RNA, 19 nt, Homo sapiens
  misc_RNA (1)...(19): siRNA sense strand
cuggaaauuuacccuuuaa

SEQ ID NO: 579390 - RNA, 19 nt, Homo sapiens
  misc_RNA (1)...(19): siRNA sense strand
gaacuccagcucuaucuac

SEQ ID NO: 579391 - RNA, 19 nt, Homo sapiens
  misc_RNA (1)...(19): siRNA sense strand
ugaaagaacacuggacaga

SEQ ID NO: 579392 - RNA, 19 nt, Homo sapiens
  misc_RNA (1)...(19): siRNA sense strand
uaacguacuccuuucacaa

SEQ ID NO: 579393 - RNA, 19 nt, Homo sapiens
  misc_RNA (1)...(19): siRNA sense strand
caggagagcugugagaaaa

SEQ ID NO: 579394 - RNA, 19 nt, Homo sapiens
  misc_RNA (1)...(19): siRNA sense strand
auucggaccucacucugua

SEQ ID NO: 579395 - RNA, 19 nt, Homo sapiens
  misc_RNA (1)...(19): siRNA sense strand
gagaaugcacaaaucacuu

SEQ ID NO: 579396 - RNA, 19 nt, Homo sapiens
  misc_RNA (1)...(19): siRNA sense strand
acacuggacagagaacuua

SEQ ID NO: 579397 - RNA, 19 nt, Homo sapiens
  misc_RNA (1)...(19): siRNA sense strand
caaauaaagaaccacuaga

SEQ ID NO: 579398 - RNA, 19 nt, Homo sapiens
  misc_RNA (1)...(19): siRNA sense strand
gggcugggaauauucacua

SEQ ID NO: 579399 - RNA, 19 nt, Homo sapiens
  misc_RNA (1)...(19): siRNA sense strand
ggaauauucacuacucagu

SEQ ID NO: 579400 - RNA, 19 nt, Homo sapiens
  misc_RNA (1)...(19): siRNA sense strand
cuacaccacauguuucauu

SEQ ID NO: 579401 - RNA, 19 nt, Homo sapiens
  misc_RNA (1)...(19): siRNA sense strand
accacuagauuucgaagaa

SEQ ID NO: 579402 - RNA, 19 nt, Homo sapiens
  misc_RNA (1)...(19): siRNA sense strand
ggacaugcaacugaaagug

SEQ ID NO: 579403 - RNA, 19 nt, Homo sapiens
  misc_RNA (1)...(19): siRNA sense strand
gcugcgauccuucgacuau

SEQ ID NO: 579404 - RNA, 19 nt, Homo sapiens
  misc_RNA (1)...(19): siRNA sense strand
ucacuuacucccuaauaga

SEQ ID NO: 579405 - RNA, 19 nt, Homo sapiens
  misc_RNA (1)...(19): siRNA sense strand
ggaacuccagcucuaucua

SEQ ID NO: 579406 - RNA, 19 nt, Homo sapiens
  misc_RNA (1)...(19): siRNA sense strand
guacaacaucacaauaaca

SEQ ID NO: 579407 - RNA, 19 nt, Homo sapiens
  misc_RNA (1)...(19): siRNA sense strand
ucaaauaaagaaccacuag

SEQ ID NO: 579408 - RNA, 19 nt, Homo sapiens
  misc_RNA (1)...(19): siRNA sense strand
ggaagagccaccugauuuu

SEQ ID NO: 579409 - RNA, 19 nt, Homo sapiens
  misc_RNA (1)...(19): siRNA sense strand
ucaggcacaauaccauaua

SEQ ID NO: 579410 - RNA, 19 nt, Homo sapiens
  misc_RNA (1)...(19): siRNA sense strand
gcucugaauccuagaagug

SEQ ID NO: 579411 - RNA, 19 nt, Homo sapiens
  misc_RNA (1)...(19): siRNA sense strand
gagguaggaugccgcuuuu

SEQ ID NO: 579412 - RNA, 19 nt, Homo sapiens
  misc_RNA (1)...(19): siRNA sense strand
ccacuagauuucgaagaau

SEQ ID NO: 579413 - RNA, 19 nt, Homo sapiens
  misc_RNA (1)...(19): siRNA sense strand
ggcacaauaccauauaaau

SEQ ID NO: 579414 - RNA, 19 nt, Homo sapiens
  misc_RNA (1)...(19): siRNA sense strand
gcucuaacccucauuucuc

SEQ ID NO: 579415 - RNA, 19 nt, Homo sapiens
  misc_RNA (1)...(19): siRNA sense strand
gcggaagagccaccugauu

SEQ ID NO: 579416 - RNA, 19 nt, Homo sapiens
  misc_RNA (1)...(19): siRNA sense strand
cuccuacucugccuacauu

SEQ ID NO: 579417 - RNA, 19 nt, Homo sapiens
  misc_RNA (1)...(19): siRNA sense strand
aaacucacauuucacuacu

SEQ ID NO: 579418 - RNA, 19 nt, Homo sapiens
  misc_RNA (1)...(19): siRNA sense strand
cuccagcucuaucuacuga

SEQ ID NO: 579419 - RNA, 19 nt, Homo sapiens
  misc_RNA (1)...(19): siRNA sense strand
agaaguggcagcuugauca

SEQ ID NO: 579420 - RNA, 19 nt, Homo sapiens
  misc_RNA (1)...(19): siRNA sense strand
cgcaucgucuccagaggua

SEQ ID NO: 579421 - RNA, 19 nt, Homo sapiens
  misc_RNA (1)...(19): siRNA sense strand
aaaguuaagguacugauca

SEQ ID NO: 579422 - RNA, 19 nt, Homo sapiens
  misc_RNA (1)...(19): siRNA sense strand
cauuuacucaggcacaaua

SEQ ID NO: 579423 - RNA, 19 nt, Homo sapiens
  misc_RNA (1)...(19): siRNA sense strand
ucguuuagauucuuacaca

SEQ ID NO: 579424 - RNA, 19 nt, Homo sapiens
  misc_RNA (1)...(19): siRNA sense strand
ccaggagagcugugagaaa

SEQ ID NO: 579425 - RNA, 19 nt, Homo sapiens
  misc_RNA (1)...(19): siRNA sense strand
caucacaauaacagcaaua

SEQ ID NO: 579426 - RNA, 19 nt, Homo sapiens
  misc_RNA (1)...(19): siRNA sense strand
ccacugcaguuccagaaaa

SEQ ID NO: 579427 - RNA, 19 nt, Homo sapiens
  misc_RNA (1)...(19): siRNA sense strand
uguauucaauggaaguuca

SEQ ID NO: 579428 - RNA, 19 nt, Homo sapiens
  misc_RNA (1)...(19): siRNA sense strand
aaucacuuacucccuaaua

SEQ ID NO: 579429 - RNA, 19 nt, Homo sapiens
  misc_RNA (1)...(19): siRNA sense strand
uuuagugacugaaagaaca

SEQ ID NO: 579430 - RNA, 19 nt, Homo sapiens
  misc_RNA (1)...(19): siRNA sense strand
gccuccaucuucucuguga

SEQ ID NO: 579431 - RNA, 19 nt, Homo sapiens
  misc_RNA (1)...(19): siRNA sense strand
agagguaggaugccgcuuu

SEQ ID NO: 579432 - RNA, 19 nt, Homo sapiens
  misc_RNA (1)...(19): siRNA sense strand
ugugagggcccacgacuug

SEQ ID NO: 579433 - RNA, 19 nt, Homo sapiens
  misc_RNA (1)...(19): siRNA sense strand
acagaguggcccaaauauu

SEQ ID NO: 579434 - RNA, 19 nt, Homo sapiens
  misc_RNA (1)...(19): siRNA sense strand
gaggauaaaaugaagcuuu

SEQ ID NO: 579435 - RNA, 19 nt, Homo sapiens
  misc_RNA (1)...(19): siRNA sense strand
uaggcaacaucgccaagga

SEQ ID NO: 579436 - RNA, 19 nt, Homo sapiens
  misc_RNA (1)...(19): siRNA sense strand
acacaggagaaauaucaaa

SEQ ID NO: 579437 - RNA, 19 nt, Homo sapiens
  misc_RNA (1)...(19): siRNA sense strand
ggcccaaauauuucguuua

SEQ ID NO: 579438 - RNA, 19 nt, Homo sapiens
  misc_RNA (1)...(19): siRNA sense strand
uaagguacugaucaaaguu

SEQ ID NO: 579439 - RNA, 19 nt, Homo sapiens
  misc_RNA (1)...(19): siRNA sense strand
cugccuaccucuccaucaa

SEQ ID NO: 579440 - RNA, 19 nt, Homo sapiens
  misc_RNA (1)...(19): siRNA sense strand
gggaccauaauugcucuua

SEQ ID NO: 579441 - RNA, 19 nt, Homo sapiens
  misc_RNA (1)...(19): siRNA sense strand
gaaauaacgacuccaggua

SEQ ID NO: 579442 - RNA, 19 nt, Homo sapiens
  misc_RNA (1)...(19): siRNA sense strand
gaacuuaucucuggguaca

SEQ ID NO: 579443 - RNA, 19 nt, Homo sapiens
  misc_RNA (1)...(19): siRNA sense strand
ugacaauccuccagcauuu

SEQ ID NO: 579444 - RNA, 19 nt, Homo sapiens
  misc_RNA (1)...(19): siRNA sense strand
ccaaggaacuccagcucua

SEQ ID NO: 579445 - RNA, 19 nt, Homo sapiens
  misc_RNA (1)...(19): siRNA sense strand
ugacagauaucaaugacaa

SEQ ID NO: 579446 - RNA, 19 nt, Homo sapiens
  misc_RNA (1)...(19): siRNA sense strand
cagaguggcccaaauauuu

SEQ ID NO: 579447 - RNA, 19 nt, Homo sapiens
  misc_RNA (1)...(19): siRNA sense strand
aaagaacacuggacagaga

SEQ ID NO: 579448 - RNA, 19 nt, Homo sapiens
  misc_RNA (1)...(19): siRNA sense strand
gcacaauaccauauaaaug

SEQ ID NO: 579449 - RNA, 19 nt, Homo sapiens
  misc_RNA (1)...(19): siRNA sense strand
gcaaugagaaugcacaaau

SEQ ID NO: 579450 - RNA, 19 nt, Homo sapiens
  misc_RNA (1)...(19): siRNA sense strand
gcccaaauauuucguuuag

SEQ ID NO: 579451 - RNA, 19 nt, Homo sapiens
  misc_RNA (1)...(19): siRNA sense strand
gcacaagucacgucugcua

SEQ ID NO: 579452 - RNA, 19 nt, Homo sapiens
  misc_RNA (1)...(19): siRNA sense strand
gcucauggcuaaaguuaag

SEQ ID NO: 579453 - RNA, 19 nt, Homo sapiens
  misc_RNA (1)...(19): siRNA sense strand
guacucagcugcucauggu

SEQ ID NO: 579454 - RNA, 19 nt, Homo sapiens
  misc_RNA (1)...(19): siRNA sense strand
caaaucacuuacucccuaa

SEQ ID NO: 579455 - RNA, 19 nt, Homo sapiens
  misc_RNA (1)...(19): siRNA sense strand
uaaagaaccacuagauuuc

SEQ ID NO: 579456 - RNA, 19 nt, Homo sapiens
  misc_RNA (1)...(19): siRNA sense strand
guacuccuuucacaaugua

SEQ ID NO: 579457 - RNA, 19 nt, Homo sapiens
  misc_RNA (1)...(19): siRNA sense strand
cggaagagccaccugauuu

SEQ ID NO: 579458 - RNA, 19 nt, Homo sapiens
  misc_RNA (1)...(19): siRNA sense strand
uaauugcucuuaucagugu

SEQ ID NO: 579459 - RNA, 19 nt, Homo sapiens
  misc_RNA (1)...(19): siRNA sense strand
gaagagacagacaaagguu

SEQ ID NO: 579460 - RNA, 19 nt, Homo sapiens
  misc_RNA (1)...(19): siRNA sense strand
ugaacucacuccagagcua

SEQ ID NO: 579461 - RNA, 19 nt, Homo sapiens
  misc_RNA (1)...(19): siRNA sense strand
ccuggaaauuuacccuuua

SEQ ID NO: 579462 - RNA, 19 nt, Homo sapiens
  misc_RNA (1)...(19): siRNA sense strand
gcuaccaacucagcucuaa

SEQ ID NO: 579463 - RNA, 19 nt, Homo sapiens
  misc_RNA (1)...(19): siRNA sense strand
cacuagauuucgaagaaua

SEQ ID NO: 579464 - RNA, 19 nt, Homo sapiens
  misc_RNA (1)...(19): siRNA sense strand
gacaauggcuacaccacau

SEQ ID NO: 579465 - RNA, 19 nt, Homo sapiens
  misc_RNA (1)...(19): siRNA sense strand
ggguacaacaucacaauaa

SEQ ID NO: 579466 - RNA, 19 nt, Homo sapiens
  misc_RNA (1)...(19): siRNA sense strand
caaugagaaugcacaaauc

SEQ ID NO: 579467 - RNA, 19 nt, Homo sapiens
  misc_RNA (1)...(19): siRNA sense strand
caacaucgccaaggaccua

SEQ ID NO: 579468 - RNA, 19 nt, Homo sapiens
  misc_RNA (1)...(19): siRNA sense strand
gggcuuuccugcagaccua

SEQ ID NO: 579469 - RNA, 19 nt, Homo sapiens
  misc_RNA (1)...(19): siRNA sense strand
ggacagcaaugagaaugca

SEQ ID NO: 579470 - RNA, 19 nt, Homo sapiens
  misc_RNA (1)...(19): siRNA sense strand
gggcucauggcuaaaguua

SEQ ID NO: 579471 - RNA, 19 nt, Homo sapiens
  misc_RNA (1)...(19): siRNA sense strand
gcagagucccuuagacaga

SEQ ID NO: 579472 - RNA, 19 nt, Homo sapiens
  misc_RNA (1)...(19): siRNA sense strand
agaaugcacaaaucacuua

SEQ ID NO: 579473 - RNA, 19 nt, Homo sapiens
  misc_RNA (1)...(19): siRNA sense strand
ccagcucuaucuacugaaa

SEQ ID NO: 579474 - RNA, 19 nt, Homo sapiens
  misc_RNA (1)...(19): siRNA sense strand
ggacagagacgcgcucaag

SEQ ID NO: 579475 - RNA, 19 nt, Homo sapiens
  misc_RNA (1)...(19): siRNA sense strand
gagccuccaucuucucugu

SEQ ID NO: 579476 - RNA, 19 nt, Homo sapiens
  misc_RNA (1)...(19): siRNA sense strand
ugacaacacuccccaauuc

SEQ ID NO: 579477 - RNA, 19 nt, Homo sapiens
  misc_RNA (1)...(19): siRNA sense strand
guaacguacuccuuucaca

SEQ ID NO: 579478 - RNA, 19 nt, Homo sapiens
  misc_RNA (1)...(19): siRNA sense strand
caggcacaauaccauauaa

SEQ ID NO: 579479 - RNA, 19 nt, Homo sapiens
  misc_RNA (1)...(19): siRNA sense strand
ggaagagacagacaaaggu

SEQ ID NO: 579480 - RNA, 19 nt, Homo sapiens
  misc_RNA (1)...(19): siRNA sense strand
gacaauccuccagcauuua

SEQ ID NO: 579481 - RNA, 19 nt, Homo sapiens
  misc_RNA (1)...(19): siRNA sense strand
gacaugcaacugaaaguga

SEQ ID NO: 579482 - RNA, 19 nt, Homo sapiens
  misc_RNA (1)...(19): siRNA sense strand
ugccgugucucgugaguuu

SEQ ID NO: 579483 - RNA, 19 nt, Homo sapiens
  misc_RNA (1)...(19): siRNA sense strand
gaccaggacucaggagaca

SEQ ID NO: 579484 - RNA, 19 nt, Homo sapiens
  misc_RNA (1)...(19): siRNA sense strand
uuaagguacugaucaaagu

SEQ ID NO: 579485 - RNA, 19 nt, Homo sapiens
  misc_RNA (1)...(19): siRNA sense strand
cuccagagcuaccaacuca

SEQ ID NO: 579486 - RNA, 19 nt, Homo sapiens
  misc_RNA (1)...(19): siRNA sense strand
gagcccugcuggacagaga

SEQ ID NO: 579487 - RNA, 19 nt, Homo sapiens
  misc_RNA (1)...(19): siRNA sense strand
gguacaacaucacaauaac

SEQ ID NO: 579488 - RNA, 19 nt, Homo sapiens
  misc_RNA (1)...(19): siRNA sense strand
uuacacaggagaaauauca

SEQ ID NO: 579489 - RNA, 19 nt, Homo sapiens
  misc_RNA (1)...(19): siRNA sense strand
cuggaaauuuacccuuuaa

SEQ ID NO: 579490 - RNA, 19 nt, Homo sapiens
  misc_RNA (1)...(19): siRNA sense strand
gaacuccagcucuaucuac

SEQ ID NO: 579491 - RNA, 19 nt, Homo sapiens
  misc_RNA (1)...(19): siRNA sense strand
ugaaagaacacuggacaga

SEQ ID NO: 579492 - RNA, 19 nt, Homo sapiens
  misc_RNA (1)...(19): siRNA sense strand
uaacguacuccuuucacaa

SEQ ID NO: 579493 - RNA, 19 nt, Homo sapiens
  misc_RNA (1)...(19): siRNA sense strand
caggagagcugugagaaaa

SEQ ID NO: 579494 - RNA, 19 nt, Homo sapiens
  misc_RNA (1)...(19): siRNA sense strand
auucggaccucacucugua

SEQ ID NO: 579495 - RNA, 19 nt, Homo sapiens
  misc_RNA (1)...(19): siRNA sense strand
gagaaugcacaaaucacuu

SEQ ID NO: 579496 - RNA, 19 nt, Homo sapiens
  misc_RNA (1)...(19): siRNA sense strand
acacuggacagagaacuua

SEQ ID NO: 579497 - RNA, 19 nt, Homo sapiens
  misc_RNA (1)...(19): siRNA sense strand
caaauaaagaaccacuaga

SEQ ID NO: 579498 - RNA, 19 nt, Homo sapiens
  misc_RNA (1)...(19): siRNA sense strand
gggcugggaauauucacua

SEQ ID NO: 579499 - RNA, 19 nt, Homo sapiens
  misc_RNA (1)...(19): siRNA sense strand
ggaauauucacuacucagu

SEQ ID NO: 579500 - RNA, 19 nt, Homo sapiens
  misc_RNA (1)...(19): siRNA sense strand
cuacaccacauguuucauu

SEQ ID NO: 579501 - RNA, 19 nt, Homo sapiens
  misc_RNA (1)...(19): siRNA sense strand
accacuagauuucgaagaa

SEQ ID NO: 579502 - RNA, 19 nt, Homo sapiens
  misc_RNA (1)...(19): siRNA sense strand
ggacaugcaacugaaagug

SEQ ID NO: 579503 - RNA, 19 nt, Homo sapiens
  misc_RNA (1)...(19): siRNA sense strand
gcugcgauccuucgacuau

SEQ ID NO: 579504 - RNA, 19 nt, Homo sapiens
  misc_RNA (1)...(19): siRNA sense strand
ucacuuacucccuaauaga

SEQ ID NO: 579505 - RNA, 19 nt, Homo sapiens
  misc_RNA (1)...(19): siRNA sense strand
ggaacuccagcucuaucua

SEQ ID NO: 579506 - RNA, 19 nt, Homo sapiens
  misc_RNA (1)...(19): siRNA sense strand
guacaacaucacaauaaca

SEQ ID NO: 579507 - RNA, 19 nt, Homo sapiens
  misc_RNA (1)...(19): siRNA sense strand
ucaaauaaagaaccacuag

SEQ ID NO: 579508 - RNA, 19 nt, Homo sapiens
  misc_RNA (1)...(19): siRNA sense strand
ggaagagccaccugauuuu

SEQ ID NO: 579509 - RNA, 19 nt, Homo sapiens
  misc_RNA (1)...(19): siRNA sense strand
ucaggcacaauaccauaua

SEQ ID NO: 579510 - RNA, 19 nt, Homo sapiens
  misc_RNA (1)...(19): siRNA sense strand
gcucugaauccuagaagug

SEQ ID NO: 579511 - RNA, 19 nt, Homo sapiens
  misc_RNA (1)...(19): siRNA sense strand
gagguaggaugccgcuuuu

SEQ ID NO: 579512 - RNA, 19 nt, Homo sapiens
  misc_RNA (1)...(19): siRNA sense strand
ccacuagauuucgaagaau

SEQ ID NO: 579513 - RNA, 19 nt, Homo sapiens
  misc_RNA (1)...(19): siRNA sense strand
ggcacaauaccauauaaau

SEQ ID NO: 579514 - RNA, 19 nt, Homo sapiens
  misc_RNA (1)...(19): siRNA sense strand
gcucuaacccucauuucuc

SEQ ID NO: 579515 - RNA, 19 nt, Homo sapiens
  misc_RNA (1)...(19): siRNA sense strand
gcggaagagccaccugauu

SEQ ID NO: 579516 - RNA, 19 nt, Homo sapiens
  misc_RNA (1)...(19): siRNA sense strand
cuccuacucugccuacauu

SEQ ID NO: 579517 - RNA, 19 nt, Homo sapiens
  misc_RNA (1)...(19): siRNA sense strand
aaacucacauuucacuacu

SEQ ID NO: 579518 - RNA, 19 nt, Homo sapiens
  misc_RNA (1)...(19): siRNA sense strand
cuccagcucuaucuacuga

SEQ ID NO: 579519 - RNA, 19 nt, Homo sapiens
  misc_RNA (1)...(19): siRNA sense strand
agaaguggcagcuugauca

SEQ ID NO: 579520 - RNA, 19 nt, Homo sapiens
  misc_RNA (1)...(19): siRNA sense strand
cgcaucgucuccagaggua

SEQ ID NO: 579521 - RNA, 19 nt, Homo sapiens
  misc_RNA (1)...(19): siRNA sense strand
aaaguuaagguacugauca

SEQ ID NO: 579522 - RNA, 19 nt, Homo sapiens
  misc_RNA (1)...(19): siRNA sense strand
cauuuacucaggcacaaua

SEQ ID NO: 579523 - RNA, 19 nt, Homo sapiens
  misc_RNA (1)...(19): siRNA sense strand
ucguuuagauucuuacaca

SEQ ID NO: 579524 - RNA, 19 nt, Homo sapiens
  misc_RNA (1)...(19): siRNA sense strand
ccaggagagcugugagaaa

SEQ ID NO: 579525 - RNA, 19 nt, Homo sapiens
  misc_RNA (1)...(19): siRNA sense strand
caucacaauaacagcaaua

SEQ ID NO: 579526 - RNA, 19 nt, Homo sapiens
  misc_RNA (1)...(19): siRNA sense strand
ccacugcaguuccagaaaa

SEQ ID NO: 579527 - RNA, 19 nt, Homo sapiens
  misc_RNA (1)...(19): siRNA sense strand
uguauucaauggaaguuca

SEQ ID NO: 579528 - RNA, 19 nt, Homo sapiens
  misc_RNA (1)...(19): siRNA sense strand
aaucacuuacucccuaaua

SEQ ID NO: 579529 - RNA, 19 nt, Homo sapiens
  misc_RNA (1)...(19): siRNA sense strand
uuuagugacugaaagaaca

SEQ ID NO: 579530 - RNA, 19 nt, Homo sapiens
  misc_RNA (1)...(19): siRNA sense strand
gccuccaucuucucuguga

SEQ ID NO: 579531 - RNA, 19 nt, Homo sapiens
  misc_RNA (1)...(19): siRNA sense strand
agagguaggaugccgcuuu

SEQ ID NO: 579532 - RNA, 19 nt, Homo sapiens
  misc_RNA (1)...(19): siRNA sense strand
ugugagggcccacgacuug

SEQ ID NO: 579533 - RNA, 19 nt, Homo sapiens
  misc_RNA (1)...(19): siRNA sense strand
acagaguggcccaaauauu

SEQ ID NO: 579534 - RNA, 19 nt, Homo sapiens
  misc_RNA (1)...(19): siRNA sense strand
gaggauaaaaugaagcuuu

SEQ ID NO: 579535 - RNA, 19 nt, Homo sapiens
  misc_RNA (1)...(19): siRNA sense strand
uaggcaacaucgccaagga

SEQ ID NO: 579536 - RNA, 19 nt, Homo sapiens
  misc_RNA (1)...(19): siRNA sense strand
acacaggagaaauaucaaa

SEQ ID NO: 579537 - RNA, 19 nt, Homo sapiens
  misc_RNA (1)...(19): siRNA sense strand
ggcccaaauauuucguuua

SEQ ID NO: 579538 - RNA, 19 nt, Homo sapiens
  misc_RNA (1)...(19): siRNA sense strand
uaagguacugaucaaaguu

SEQ ID NO: 579539 - RNA, 19 nt, Homo sapiens
  misc_RNA (1)...(19): siRNA sense strand
cugccuaccucuccaucaa

SEQ ID NO: 579540 - RNA, 19 nt, Homo sapiens
  misc_RNA (1)...(19): siRNA sense strand
gggaccauaauugcucuua

SEQ ID NO: 579541 - RNA, 19 nt, Homo sapiens
  misc_RNA (1)...(19): siRNA sense strand
gagaauugcuugauuauga

SEQ ID NO: 579542 - RNA, 19 nt, Homo sapiens
  misc_RNA (1)...(19): siRNA sense strand
ggaaguauccuauucauuu

SEQ ID NO: 579543 - RNA, 19 nt, Homo sapiens
  misc_RNA (1)...(19): siRNA sense strand
gaugaucccuuucagauuu

SEQ ID NO: 579544 - RNA, 19 nt, Homo sapiens
  misc_RNA (1)...(19): siRNA sense strand
ucagagaauugcuugauua

SEQ ID NO: 579545 - RNA, 19 nt, Homo sapiens
  misc_RNA (1)...(19): siRNA sense strand
gaacaaccuuucaaaucaa

SEQ ID NO: 579546 - RNA, 19 nt, Homo sapiens
  misc_RNA (1)...(19): siRNA sense strand
cgaacaaccuuucaaauca

SEQ ID NO: 579547 - RNA, 19 nt, Homo sapiens
  misc_RNA (1)...(19): siRNA sense strand
ggacuuaacgguauccaaa

SEQ ID NO: 579548 - RNA, 19 nt, Homo sapiens
  misc_RNA (1)...(19): siRNA sense strand
caugauauauccagagcua

SEQ ID NO: 579549 - RNA, 19 nt, Homo sapiens
  misc_RNA (1)...(19): siRNA sense strand
aaagaugguuugcuacauu

SEQ ID NO: 579550 - RNA, 19 nt, Homo sapiens
  misc_RNA (1)...(19): siRNA sense strand
ggacaacggccaccuguuc

SEQ ID NO: 579551 - RNA, 19 nt, Homo sapiens
  misc_RNA (1)...(19): siRNA sense strand
gaagcuguguggcccuaaa

SEQ ID NO: 579552 - RNA, 19 nt, Homo sapiens
  misc_RNA (1)...(19): siRNA sense strand
gaaagaugguuugcuacau

SEQ ID NO: 579553 - RNA, 19 nt, Homo sapiens
  misc_RNA (1)...(19): siRNA sense strand
gguaugggcagaagaugua

SEQ ID NO: 579554 - RNA, 19 nt, Homo sapiens
  misc_RNA (1)...(19): siRNA sense strand
ggacagcauuuagacuaga

SEQ ID NO: 579555 - RNA, 19 nt, Homo sapiens
  misc_RNA (1)...(19): siRNA sense strand
ccagugaguucaaguucuu

SEQ ID NO: 579556 - RNA, 19 nt, Homo sapiens
  misc_RNA (1)...(19): siRNA sense strand
aaucugccauuccuacuaa

SEQ ID NO: 579557 - RNA, 19 nt, Homo sapiens
  misc_RNA (1)...(19): siRNA sense strand
gaugaaggcaugauauauc

SEQ ID NO: 579558 - RNA, 19 nt, Homo sapiens
  misc_RNA (1)...(19): siRNA sense strand
ggcagaagauguagacucu

SEQ ID NO: 579559 - RNA, 19 nt, Homo sapiens
  misc_RNA (1)...(19): siRNA sense strand
ggaaagaugguuugcuaca

SEQ ID NO: 579560 - RNA, 19 nt, Homo sapiens
  misc_RNA (1)...(19): siRNA sense strand
ucagggauauaaaugauca

SEQ ID NO: 579561 - RNA, 19 nt, Homo sapiens
  misc_RNA (1)...(19): siRNA sense strand
ucaggucgcuggacuacga

SEQ ID NO: 579562 - RNA, 19 nt, Homo sapiens
  misc_RNA (1)...(19): siRNA sense strand
gaaaaccgagcacaacaua

SEQ ID NO: 579563 - RNA, 19 nt, Homo sapiens
  misc_RNA (1)...(19): siRNA sense strand
ggcaaaggaucugggacua

SEQ ID NO: 579564 - RNA, 19 nt, Homo sapiens
  misc_RNA (1)...(19): siRNA sense strand
ccaguuauuucggauauuc

SEQ ID NO: 579565 - RNA, 19 nt, Homo sapiens
  misc_RNA (1)...(19): siRNA sense strand
gugaugaaggcaugauaua

SEQ ID NO: 579566 - RNA, 19 nt, Homo sapiens
  misc_RNA (1)...(19): siRNA sense strand
gguuuccgaugauaacaaa

SEQ ID NO: 579567 - RNA, 19 nt, Homo sapiens
  misc_RNA (1)...(19): siRNA sense strand
ccagggugguuuccgauga

SEQ ID NO: 579568 - RNA, 19 nt, Homo sapiens
  misc_RNA (1)...(19): siRNA sense strand
ccgaugauaacaaacaaua

SEQ ID NO: 579569 - RNA, 19 nt, Homo sapiens
  misc_RNA (1)...(19): siRNA sense strand
gaucagagccgaguacaac

SEQ ID NO: 579570 - RNA, 19 nt, Homo sapiens
  misc_RNA (1)...(19): siRNA sense strand
guucuggguuuggacguua

SEQ ID NO: 579571 - RNA, 19 nt, Homo sapiens
  misc_RNA (1)...(19): siRNA sense strand
gaaacuggaccgagagaag

SEQ ID NO: 579572 - RNA, 19 nt, Homo sapiens
  misc_RNA (1)...(19): siRNA sense strand
gacagcauuuagacuagaa

SEQ ID NO: 579573 - RNA, 19 nt, Homo sapiens
  misc_RNA (1)...(19): siRNA sense strand
aauuccaccuuccgaaaua

SEQ ID NO: 579574 - RNA, 19 nt, Homo sapiens
  misc_RNA (1)...(19): siRNA sense strand
gaggaagggugaagaaaau

SEQ ID NO: 579575 - RNA, 19 nt, Homo sapiens
  misc_RNA (1)...(19): siRNA sense strand
gaguacaacaucacuauca

SEQ ID NO: 579576 - RNA, 19 nt, Homo sapiens
  misc_RNA (1)...(19): siRNA sense strand
gaaaauggaaagaugguuu

SEQ ID NO: 579577 - RNA, 19 nt, Homo sapiens
  misc_RNA (1)...(19): siRNA sense strand
auggaaagaugguuugcua

SEQ ID NO: 579578 - RNA, 19 nt, Homo sapiens
  misc_RNA (1)...(19): siRNA sense strand
gagagucagggauauaaau

SEQ ID NO: 579579 - RNA, 19 nt, Homo sapiens
  misc_RNA (1)...(19): siRNA sense strand
ucugcaagauguaggguuu

SEQ ID NO: 579580 - RNA, 19 nt, Homo sapiens
  misc_RNA (1)...(19): siRNA sense strand
ggaguguccuuggcagguu

SEQ ID NO: 579581 - RNA, 19 nt, Homo sapiens
  misc_RNA (1)...(19): siRNA sense strand
aggcaaguccuguuucuuu

SEQ ID NO: 579582 - RNA, 19 nt, Homo sapiens
  misc_RNA (1)...(19): siRNA sense strand
gccaguauuucaggacaaa

SEQ ID NO: 579583 - RNA, 19 nt, Homo sapiens
  misc_RNA (1)...(19): siRNA sense strand
gggacagcauuuagacuag

SEQ ID NO: 579584 - RNA, 19 nt, Homo sapiens
  misc_RNA (1)...(19): siRNA sense strand
acaaaggcaaguccuguuu

SEQ ID NO: 579585 - RNA, 19 nt, Homo sapiens
  misc_RNA (1)...(19): siRNA sense strand
ggaccagugaguucaaguu

SEQ ID NO: 579586 - RNA, 19 nt, Homo sapiens
  misc_RNA (1)...(19): siRNA sense strand
ucccagagcuaccaguaug

SEQ ID NO: 579587 - RNA, 19 nt, Homo sapiens
  misc_RNA (1)...(19): siRNA sense strand
gcggaaguauccuauucau

SEQ ID NO: 579588 - RNA, 19 nt, Homo sapiens
  misc_RNA (1)...(19): siRNA sense strand
gaagggacagcauuuagac

SEQ ID NO: 579589 - RNA, 19 nt, Homo sapiens
  misc_RNA (1)...(19): siRNA sense strand
ccauuggguuccuuauugu

SEQ ID NO: 579590 - RNA, 19 nt, Homo sapiens
  misc_RNA (1)...(19): siRNA sense strand
gagcuaguguuggacaaag

SEQ ID NO: 579591 - RNA, 19 nt, Homo sapiens
  misc_RNA (1)...(19): siRNA sense strand
gauccuuuguggucaaucu

SEQ ID NO: 579592 - RNA, 19 nt, Homo sapiens
  misc_RNA (1)...(19): siRNA sense strand
ccuuucaaaucaauccuuu

SEQ ID NO: 579593 - RNA, 19 nt, Homo sapiens
  misc_RNA (1)...(19): siRNA sense strand
ucgaacaaccuuucaaauc

SEQ ID NO: 579594 - RNA, 19 nt, Homo sapiens
  misc_RNA (1)...(19): siRNA sense strand
ugaagggacagcauuuaga

SEQ ID NO: 579595 - RNA, 19 nt, Homo sapiens
  misc_RNA (1)...(19): siRNA sense strand
gcuugauuaugaguuagua

SEQ ID NO: 579596 - RNA, 19 nt, Homo sapiens
  misc_RNA (1)...(19): siRNA sense strand
gcauuuagacuagaaagag

SEQ ID NO: 579597 - RNA, 19 nt, Homo sapiens
  misc_RNA (1)...(19): siRNA sense strand
ucacauaccgggaauuugc

SEQ ID NO: 579598 - RNA, 19 nt, Homo sapiens
  misc_RNA (1)...(19): siRNA sense strand
ccugcaggcuuucgaguuc

SEQ ID NO: 579599 - RNA, 19 nt, Homo sapiens
  misc_RNA (1)...(19): siRNA sense strand
acgaggcccugcaggcuuu

SEQ ID NO: 579600 - RNA, 19 nt, Homo sapiens
  misc_RNA (1)...(19): siRNA sense strand
gguggaggccuuucugcaa

SEQ ID NO: 579601 - RNA, 19 nt, Homo sapiens
  misc_RNA (1)...(19): siRNA sense strand
gacaaaggcaaguccuguu

SEQ ID NO: 579602 - RNA, 19 nt, Homo sapiens
  misc_RNA (1)...(19): siRNA sense strand
gagucagggauauaaauga

SEQ ID NO: 579603 - RNA, 19 nt, Homo sapiens
  misc_RNA (1)...(19): siRNA sense strand
gacguuauucggugacuga

SEQ ID NO: 579604 - RNA, 19 nt, Homo sapiens
  misc_RNA (1)...(19): siRNA sense strand
aaaggcaaguccuguuucu

SEQ ID NO: 579605 - RNA, 19 nt, Homo sapiens
  misc_RNA (1)...(19): siRNA sense strand
ggagucaacgcggaaguau

SEQ ID NO: 579606 - RNA, 19 nt, Homo sapiens
  misc_RNA (1)...(19): siRNA sense strand
ugaucacgcgccaguauuu

SEQ ID NO: 579607 - RNA, 19 nt, Homo sapiens
  misc_RNA (1)...(19): siRNA sense strand
ggugaugaaggcaugauau

SEQ ID NO: 579608 - RNA, 19 nt, Homo sapiens
  misc_RNA (1)...(19): siRNA sense strand
ggaggaagggugaagaaaa

SEQ ID NO: 579609 - RNA, 19 nt, Homo sapiens
  misc_RNA (1)...(19): siRNA sense strand
caacgcggaaguauccuau

SEQ ID NO: 579610 - RNA, 19 nt, Homo sapiens
  misc_RNA (1)...(19): siRNA sense strand
cuuggcagguucuggguuu

SEQ ID NO: 579611 - RNA, 19 nt, Homo sapiens
  misc_RNA (1)...(19): siRNA sense strand
uguaugcuguauuuccaaa

SEQ ID NO: 579612 - RNA, 19 nt, Homo sapiens
  misc_RNA (1)...(19): siRNA sense strand
aaccaguuauuucggauau

SEQ ID NO: 579613 - RNA, 19 nt, Homo sapiens
  misc_RNA (1)...(19): siRNA sense strand
uaaauauacaggcaaugga

SEQ ID NO: 579614 - RNA, 19 nt, Homo sapiens
  misc_RNA (1)...(19): siRNA sense strand
cagagaauugcuugauuau

SEQ ID NO: 579615 - RNA, 19 nt, Homo sapiens
  misc_RNA (1)...(19): siRNA sense strand
acgcggaaguauccuauuc

SEQ ID NO: 579616 - RNA, 19 nt, Homo sapiens
  misc_RNA (1)...(19): siRNA sense strand
uaagguaugggcagaagau

SEQ ID NO: 579617 - RNA, 19 nt, Homo sapiens
  misc_RNA (1)...(19): siRNA sense strand
ucugggaccucuacuguac

SEQ ID NO: 579618 - RNA, 19 nt, Homo sapiens
  misc_RNA (1)...(19): siRNA sense strand
gcaaaggaucugggacuag

SEQ ID NO: 579619 - RNA, 19 nt, Homo sapiens
  misc_RNA (1)...(19): siRNA sense strand
gaguugugcuucccaagac

SEQ ID NO: 579620 - RNA, 19 nt, Homo sapiens
  misc_RNA (1)...(19): siRNA sense strand
caaaggcaaguccuguuuc

SEQ ID NO: 579621 - RNA, 19 nt, Homo sapiens
  misc_RNA (1)...(19): siRNA sense strand
aagaugguuugcuacauuc

SEQ ID NO: 579622 - RNA, 19 nt, Homo sapiens
  misc_RNA (1)...(19): siRNA sense strand
agucagggauauaaaugau

SEQ ID NO: 579623 - RNA, 19 nt, Homo sapiens
  misc_RNA (1)...(19): siRNA sense strand
gagaaacuggaccgagaga

SEQ ID NO: 579624 - RNA, 19 nt, Homo sapiens
  misc_RNA (1)...(19): siRNA sense strand
uuaccgggcugagcugaga

SEQ ID NO: 579625 - RNA, 19 nt, Homo sapiens
  misc_RNA (1)...(19): siRNA sense strand
gaccagugaguucaaguuc

SEQ ID NO: 579626 - RNA, 19 nt, Homo sapiens
  misc_RNA (1)...(19): siRNA sense strand
cgucagcgccacagacaga

SEQ ID NO: 579627 - RNA, 19 nt, Homo sapiens
  misc_RNA (1)...(19): siRNA sense strand
ggcaaguccuguuucuuuu

SEQ ID NO: 579628 - RNA, 19 nt, Homo sapiens
  misc_RNA (1)...(19): siRNA sense strand
cucagagaauugcuugauu

SEQ ID NO: 579629 - RNA, 19 nt, Homo sapiens
  misc_RNA (1)...(19): siRNA sense strand
ugacaaugccccacaguuu

SEQ ID NO: 579630 - RNA, 19 nt, Homo sapiens
  misc_RNA (1)...(19): siRNA sense strand
aaaccgagcacaacauaac

SEQ ID NO: 579631 - RNA, 19 nt, Homo sapiens
  misc_RNA (1)...(19): siRNA sense strand
guucuugaaaccaguuauu

SEQ ID NO: 579632 - RNA, 19 nt, Homo sapiens
  misc_RNA (1)...(19): siRNA sense strand
agcccuguaugcuguauuu

SEQ ID NO: 579633 - RNA, 19 nt, Homo sapiens
  misc_RNA (1)...(19): siRNA sense strand
ccgacuugcucaccgucua

SEQ ID NO: 579634 - RNA, 19 nt, Homo sapiens
  misc_RNA (1)...(19): siRNA sense strand
uuggguuccuuauuguuaa

SEQ ID NO: 579635 - RNA, 19 nt, Homo sapiens
  misc_RNA (1)...(19): siRNA sense strand
gaucagccccaacucuuuu

SEQ ID NO: 579636 - RNA, 19 nt, Homo sapiens
  misc_RNA (1)...(19): siRNA sense strand
augaucccuuucagauuua

SEQ ID NO: 579637 - RNA, 19 nt, Homo sapiens
  misc_RNA (1)...(19): siRNA sense strand
agaauugcuugauuaugag

SEQ ID NO: 579638 - RNA, 19 nt, Homo sapiens
  misc_RNA (1)...(19): siRNA sense strand
gggaggaagggugaagaaa

SEQ ID NO: 579639 - RNA, 19 nt, Homo sapiens
  misc_RNA (1)...(19): siRNA sense strand
ucacuaucaccgucacuga

SEQ ID NO: 579640 - RNA, 19 nt, Homo sapiens
  misc_RNA (1)...(19): siRNA sense strand
ccgaguacaacaucacuau

SEQ ID NO: 579641 - RNA, 19 nt, Homo sapiens
  misc_RNA (1)...(19): siRNA sense strand
gagaauugcuugauuauga

SEQ ID NO: 579642 - RNA, 19 nt, Homo sapiens
  misc_RNA (1)...(19): siRNA sense strand
gaugaucccuuucagauuu

SEQ ID NO: 579643 - RNA, 19 nt, Homo sapiens
  misc_RNA (1)...(19): siRNA sense strand
ucagagaauugcuugauua

SEQ ID NO: 579644 - RNA, 19 nt, Homo sapiens
  misc_RNA (1)...(19): siRNA sense strand
gaaagacaauuugcuaugu

SEQ ID NO: 579645 - RNA, 19 nt, Homo sapiens
  misc_RNA (1)...(19): siRNA sense strand
gaaaccgucuguugacaau

SEQ ID NO: 579646 - RNA, 19 nt, Homo sapiens
  misc_RNA (1)...(19): siRNA sense strand
gagcaaagcugaguacaac

SEQ ID NO: 579647 - RNA, 19 nt, Homo sapiens
  misc_RNA (1)...(19): siRNA sense strand
ggacaauggccaccuguuu

SEQ ID NO: 579648 - RNA, 19 nt, Homo sapiens
  misc_RNA (1)...(19): siRNA sense strand
caugauauauccagagcua

SEQ ID NO: 579649 - RNA, 19 nt, Homo sapiens
  misc_RNA (1)...(19): siRNA sense strand
ggaaagaaauagaggaaaa

SEQ ID NO: 579650 - RNA, 19 nt, Homo sapiens
  misc_RNA (1)...(19): siRNA sense strand
uaaagugucugcaggagau

SEQ ID NO: 579651 - RNA, 19 nt, Homo sapiens
  misc_RNA (1)...(19): siRNA sense strand
ggaaagacaauuugcuaug

SEQ ID NO: 579652 - RNA, 19 nt, Homo sapiens
  misc_RNA (1)...(19): siRNA sense strand
gcagaaguauccuauucau

SEQ ID NO: 579653 - RNA, 19 nt, Homo sapiens
  misc_RNA (1)...(19): siRNA sense strand
gaagcuguguggcccuaaa

SEQ ID NO: 579654 - RNA, 19 nt, Homo sapiens
  misc_RNA (1)...(19): siRNA sense strand
gggauaguauuggcuguuu

SEQ ID NO: 579655 - RNA, 19 nt, Homo sapiens
  misc_RNA (1)...(19): siRNA sense strand
ggacagcauuuagacuaga

SEQ ID NO: 579656 - RNA, 19 nt, Homo sapiens
  misc_RNA (1)...(19): siRNA sense strand
ugaaaacucuccugggaua

SEQ ID NO: 579657 - RNA, 19 nt, Homo sapiens
  misc_RNA (1)...(19): siRNA sense strand
gacagagacuccggagaaa

SEQ ID NO: 579658 - RNA, 19 nt, Homo sapiens
  misc_RNA (1)...(19): siRNA sense strand
gaugaaggcaugauauauc

SEQ ID NO: 579659 - RNA, 19 nt, Homo sapiens
  misc_RNA (1)...(19): siRNA sense strand
ucugcaagauguacaguuu

SEQ ID NO: 579660 - RNA, 19 nt, Homo sapiens
  misc_RNA (1)...(19): siRNA sense strand
uaucaucacuuuccaacuc

SEQ ID NO: 579661 - RNA, 19 nt, Homo sapiens
  misc_RNA (1)...(19): siRNA sense strand
ugacaauccuccugaacug

SEQ ID NO: 579662 - RNA, 19 nt, Homo sapiens
  misc_RNA (1)...(19): siRNA sense strand
ucaggucgcuggacuacga

SEQ ID NO: 579663 - RNA, 19 nt, Homo sapiens
  misc_RNA (1)...(19): siRNA sense strand
agacagagacuccggagaa

SEQ ID NO: 579664 - RNA, 19 nt, Homo sapiens
  misc_RNA (1)...(19): siRNA sense strand
aaccgucuguugacaauuu

SEQ ID NO: 579665 - RNA, 19 nt, Homo sapiens
  misc_RNA (1)...(19): siRNA sense strand
ggcaaaggaucugggacua

SEQ ID NO: 579666 - RNA, 19 nt, Homo sapiens
  misc_RNA (1)...(19): siRNA sense strand
gacaauggccaccuguuug

SEQ ID NO: 579667 - RNA, 19 nt, Homo sapiens
  misc_RNA (1)...(19): siRNA sense strand
gcauuguggucuuggaugu

SEQ ID NO: 579668 - RNA, 19 nt, Homo sapiens
  misc_RNA (1)...(19): siRNA sense strand
gugaugaaggcaugauaua

SEQ ID NO: 579669 - RNA, 19 nt, Homo sapiens
  misc_RNA (1)...(19): siRNA sense strand
gguuuccgaugauaacaaa

SEQ ID NO: 579670 - RNA, 19 nt, Homo sapiens
  misc_RNA (1)...(19): siRNA sense strand
ccagggugguuuccgauga

SEQ ID NO: 579671 - RNA, 19 nt, Homo sapiens
  misc_RNA (1)...(19): siRNA sense strand
ccgaugauaacaaacaaua

SEQ ID NO: 579672 - RNA, 19 nt, Homo sapiens
  misc_RNA (1)...(19): siRNA sense strand
guucuggguuuggacguua

SEQ ID NO: 579673 - RNA, 19 nt, Homo sapiens
  misc_RNA (1)...(19): siRNA sense strand
aaacucuccugggauagua

SEQ ID NO: 579674 - RNA, 19 nt, Homo sapiens
  misc_RNA (1)...(19): siRNA sense strand
gaaacuggaccgagagaag

SEQ ID NO: 579675 - RNA, 19 nt, Homo sapiens
  misc_RNA (1)...(19): siRNA sense strand
gacagcauuuagacuagaa

SEQ ID NO: 579676 - RNA, 19 nt, Homo sapiens
  misc_RNA (1)...(19): siRNA sense strand
gcaggucuccgacgucaau

SEQ ID NO: 579677 - RNA, 19 nt, Homo sapiens
  misc_RNA (1)...(19): siRNA sense strand
aggagucaaugcagaagua

SEQ ID NO: 579678 - RNA, 19 nt, Homo sapiens
  misc_RNA (1)...(19): siRNA sense strand
caaugacaauccuccugaa

SEQ ID NO: 579679 - RNA, 19 nt, Homo sapiens
  misc_RNA (1)...(19): siRNA sense strand
gcaaagcugaguacaacau

SEQ ID NO: 579680 - RNA, 19 nt, Homo sapiens
  misc_RNA (1)...(19): siRNA sense strand
gaccuccacuauacgcauu

SEQ ID NO: 579681 - RNA, 19 nt, Homo sapiens
  misc_RNA (1)...(19): siRNA sense strand
ggaguguccuuggcagguu

SEQ ID NO: 579682 - RNA, 19 nt, Homo sapiens
  misc_RNA (1)...(19): siRNA sense strand
gaucauaucaucacuuucc

SEQ ID NO: 579683 - RNA, 19 nt, Homo sapiens
  misc_RNA (1)...(19): siRNA sense strand
aggcaaguccuguuucuuu

SEQ ID NO: 579684 - RNA, 19 nt, Homo sapiens
  misc_RNA (1)...(19): siRNA sense strand
gggacagcauuuagacuag

SEQ ID NO: 579685 - RNA, 19 nt, Homo sapiens
  misc_RNA (1)...(19): siRNA sense strand
gaaaaccgagcacagcaua

SEQ ID NO: 579686 - RNA, 19 nt, Homo sapiens
  misc_RNA (1)...(19): siRNA sense strand
ggacagagagagcaaagcu

SEQ ID NO: 579687 - RNA, 19 nt, Homo sapiens
  misc_RNA (1)...(19): siRNA sense strand
acaaaggcaaguccuguuu

SEQ ID NO: 579688 - RNA, 19 nt, Homo sapiens
  misc_RNA (1)...(19): siRNA sense strand
guucagcuuuccaagacaa

SEQ ID NO: 579689 - RNA, 19 nt, Homo sapiens
  misc_RNA (1)...(19): siRNA sense strand
gaagggacagcauuuagac

SEQ ID NO: 579690 - RNA, 19 nt, Homo sapiens
  misc_RNA (1)...(19): siRNA sense strand
ucugggaccuccacuauac

SEQ ID NO: 579691 - RNA, 19 nt, Homo sapiens
  misc_RNA (1)...(19): siRNA sense strand
gagcuaguguuggacaaag

SEQ ID NO: 579692 - RNA, 19 nt, Homo sapiens
  misc_RNA (1)...(19): siRNA sense strand
cguuucaaaucaauccuuu

SEQ ID NO: 579693 - RNA, 19 nt, Homo sapiens
  misc_RNA (1)...(19): siRNA sense strand
gaguacaacaucaccauca

SEQ ID NO: 579694 - RNA, 19 nt, Homo sapiens
  misc_RNA (1)...(19): siRNA sense strand
gauccuuuguggucaaucu

SEQ ID NO: 579695 - RNA, 19 nt, Homo sapiens
  misc_RNA (1)...(19): siRNA sense strand
ggguucagcuuuccaagac

SEQ ID NO: 579696 - RNA, 19 nt, Homo sapiens
  misc_RNA (1)...(19): siRNA sense strand
gcuugauuaugaguuagua

SEQ ID NO: 579697 - RNA, 19 nt, Homo sapiens
  misc_RNA (1)...(19): siRNA sense strand
gcauuuagacuagaaagag

SEQ ID NO: 579698 - RNA, 19 nt, Homo sapiens
  misc_RNA (1)...(19): siRNA sense strand
ugaagggacagcauuuaga

SEQ ID NO: 579699 - RNA, 19 nt, Homo sapiens
  misc_RNA (1)...(19): siRNA sense strand
ucacauaccgggaauuugc

SEQ ID NO: 579700 - RNA, 19 nt, Homo sapiens
  misc_RNA (1)...(19): siRNA sense strand
ccugcaggcuuucgacuuc

SEQ ID NO: 579701 - RNA, 19 nt, Homo sapiens
  misc_RNA (1)...(19): siRNA sense strand
acgaggcccugcaggcuuu

SEQ ID NO: 579702 - RNA, 19 nt, Homo sapiens
  misc_RNA (1)...(19): siRNA sense strand
gagagagcaaagcugagua

SEQ ID NO: 579703 - RNA, 19 nt, Homo sapiens
  misc_RNA (1)...(19): siRNA sense strand
aaggugcacuggacagaga

SEQ ID NO: 579704 - RNA, 19 nt, Homo sapiens
  misc_RNA (1)...(19): siRNA sense strand
guauuagauuccaaugaca

SEQ ID NO: 579705 - RNA, 19 nt, Homo sapiens
  misc_RNA (1)...(19): siRNA sense strand
augcagaaguauccuauuc

SEQ ID NO: 579706 - RNA, 19 nt, Homo sapiens
  misc_RNA (1)...(19): siRNA sense strand
gacaaaggcaaguccuguu

SEQ ID NO: 579707 - RNA, 19 nt, Homo sapiens
  misc_RNA (1)...(19): siRNA sense strand
cuccugaacugaucauauc

SEQ ID NO: 579708 - RNA, 19 nt, Homo sapiens
  misc_RNA (1)...(19): siRNA sense strand
gacguuauucggugacuga

SEQ ID NO: 579709 - RNA, 19 nt, Homo sapiens
  misc_RNA (1)...(19): siRNA sense strand
aagacaauuugcuauguuc

SEQ ID NO: 579710 - RNA, 19 nt, Homo sapiens
  misc_RNA (1)...(19): siRNA sense strand
aaaggcaaguccuguuucu

SEQ ID NO: 579711 - RNA, 19 nt, Homo sapiens
  misc_RNA (1)...(19): siRNA sense strand
cuuggcagguucuggguuu

SEQ ID NO: 579712 - RNA, 19 nt, Homo sapiens
  misc_RNA (1)...(19): siRNA sense strand
uguaugcuguauuuccaaa

SEQ ID NO: 579713 - RNA, 19 nt, Homo sapiens
  misc_RNA (1)...(19): siRNA sense strand
uaaauauacaggcaaugga

SEQ ID NO: 579714 - RNA, 19 nt, Homo sapiens
  misc_RNA (1)...(19): siRNA sense strand
cagagaauugcuugauuau

SEQ ID NO: 579715 - RNA, 19 nt, Homo sapiens
  misc_RNA (1)...(19): siRNA sense strand
gcaaaggaucugggacuag

SEQ ID NO: 579716 - RNA, 19 nt, Homo sapiens
  misc_RNA (1)...(19): siRNA sense strand
acgaucagcuccaacucuu

SEQ ID NO: 579717 - RNA, 19 nt, Homo sapiens
  misc_RNA (1)...(19): siRNA sense strand
gagaaacuggaccgagaga

SEQ ID NO: 579718 - RNA, 19 nt, Homo sapiens
  misc_RNA (1)...(19): siRNA sense strand
guucagagaccggcgaguu

SEQ ID NO: 579719 - RNA, 19 nt, Homo sapiens
  misc_RNA (1)...(19): siRNA sense strand
gacaauuugcuauguucaa

SEQ ID NO: 579720 - RNA, 19 nt, Homo sapiens
  misc_RNA (1)...(19): siRNA sense strand
caaugcagaaguauccuau

SEQ ID NO: 579721 - RNA, 19 nt, Homo sapiens
  misc_RNA (1)...(19): siRNA sense strand
caaaggcaaguccuguuuc

SEQ ID NO: 579722 - RNA, 19 nt, Homo sapiens
  misc_RNA (1)...(19): siRNA sense strand
gaucagcuccaacucuuuu

SEQ ID NO: 579723 - RNA, 19 nt, Homo sapiens
  misc_RNA (1)...(19): siRNA sense strand
uuaccgggcugagcugaga

SEQ ID NO: 579724 - RNA, 19 nt, Homo sapiens
  misc_RNA (1)...(19): siRNA sense strand
ggcaaguccuguuucuuuu

SEQ ID NO: 579725 - RNA, 19 nt, Homo sapiens
  misc_RNA (1)...(19): siRNA sense strand
aguauuagauuccaaugac

SEQ ID NO: 579726 - RNA, 19 nt, Homo sapiens
  misc_RNA (1)...(19): siRNA sense strand
cucagagaauugcuugauu

SEQ ID NO: 579727 - RNA, 19 nt, Homo sapiens
  misc_RNA (1)...(19): siRNA sense strand
cagaaguauccuauucauu

SEQ ID NO: 579728 - RNA, 19 nt, Homo sapiens
  misc_RNA (1)...(19): siRNA sense strand
ugacaaugccccacaguuu

SEQ ID NO: 579729 - RNA, 19 nt, Homo sapiens
  misc_RNA (1)...(19): siRNA sense strand
aaagcugaguacaacauca

SEQ ID NO: 579730 - RNA, 19 nt, Homo sapiens
  misc_RNA (1)...(19): siRNA sense strand
agcccuguaugcuguauuu

SEQ ID NO: 579731 - RNA, 19 nt, Homo sapiens
  misc_RNA (1)...(19): siRNA sense strand
gaccggcgaguucaaguuc

SEQ ID NO: 579732 - RNA, 19 nt, Homo sapiens
  misc_RNA (1)...(19): siRNA sense strand
ccgacuugcucaccgucua

SEQ ID NO: 579733 - RNA, 19 nt, Homo sapiens
  misc_RNA (1)...(19): siRNA sense strand
augaucccuuucagauuua

SEQ ID NO: 579734 - RNA, 19 nt, Homo sapiens
  misc_RNA (1)...(19): siRNA sense strand
agaauugcuugauuaugag

SEQ ID NO: 579735 - RNA, 19 nt, Homo sapiens
  misc_RNA (1)...(19): siRNA sense strand
gggaaagaaauagaggaaa

SEQ ID NO: 579736 - RNA, 19 nt, Homo sapiens
  misc_RNA (1)...(19): siRNA sense strand
acaauuugcuauguucaag

SEQ ID NO: 579737 - RNA, 19 nt, Homo sapiens
  misc_RNA (1)...(19): siRNA sense strand
ugaugaaggcaugauauau

SEQ ID NO: 579738 - RNA, 19 nt, Homo sapiens
  misc_RNA (1)...(19): siRNA sense strand
ugaaaccgucuguugacaa

SEQ ID NO: 579739 - RNA, 19 nt, Homo sapiens
  misc_RNA (1)...(19): siRNA sense strand
caauaccugcuccuggauu

SEQ ID NO: 579740 - RNA, 19 nt, Homo sapiens
  misc_RNA (1)...(19): siRNA sense strand
gacaauccuccugaacuga

SEQ ID NO: 579741 - RNA, 19 nt, Homo sapiens
  misc_RNA (1)...(19): siRNA sense strand
cgaccacucuccaguauuu

SEQ ID NO: 579742 - RNA, 19 nt, Homo sapiens
  misc_RNA (1)...(19): siRNA sense strand
gaaaauaaguugcuccauu

SEQ ID NO: 579743 - RNA, 19 nt, Homo sapiens
  misc_RNA (1)...(19): siRNA sense strand
gagagaugcuggaggcuuu

SEQ ID NO: 579744 - RNA, 19 nt, Homo sapiens
  misc_RNA (1)...(19): siRNA sense strand
gagauuuccuauucacuuu

SEQ ID NO: 579745 - RNA, 19 nt, Homo sapiens
  misc_RNA (1)...(19): siRNA sense strand
gagcucagguuaacacuca

SEQ ID NO: 579746 - RNA, 19 nt, Homo sapiens
  misc_RNA (1)...(19): siRNA sense strand
gagggcagcuccuuuguca

SEQ ID NO: 579747 - RNA, 19 nt, Homo sapiens
  misc_RNA (1)...(19): siRNA sense strand
ggagaaauucgacuaaaga

SEQ ID NO: 579748 - RNA, 19 nt, Homo sapiens
  misc_RNA (1)...(19): siRNA sense strand
caacacaucucaauaugac

SEQ ID NO: 579749 - RNA, 19 nt, Homo sapiens
  misc_RNA (1)...(19): siRNA sense strand
gacaacacaucucaauaug

SEQ ID NO: 579750 - RNA, 19 nt, Homo sapiens
  misc_RNA (1)...(19): siRNA sense strand
ggacugcguuuccucugaa

SEQ ID NO: 579751 - RNA, 19 nt, Homo sapiens
  misc_RNA (1)...(19): siRNA sense strand
gaaauucgacuaaagaaac

SEQ ID NO: 579752 - RNA, 19 nt, Homo sapiens
  misc_RNA (1)...(19): siRNA sense strand
gaaauuggaccgugaggau

SEQ ID NO: 579753 - RNA, 19 nt, Homo sapiens
  misc_RNA (1)...(19): siRNA sense strand
ugacaacacaucucaauau

SEQ ID NO: 579754 - RNA, 19 nt, Homo sapiens
  misc_RNA (1)...(19): siRNA sense strand
uaaggucgauuucuugaca

SEQ ID NO: 579755 - RNA, 19 nt, Homo sapiens
  misc_RNA (1)...(19): siRNA sense strand
ggagaccgcggauuuguug

SEQ ID NO: 579756 - RNA, 19 nt, Homo sapiens
  misc_RNA (1)...(19): siRNA sense strand
gcagugauggcaggaaaua

SEQ ID NO: 579757 - RNA, 19 nt, Homo sapiens
  misc_RNA (1)...(19): siRNA sense strand
ugaaaccaguauuaccuaa

SEQ ID NO: 579758 - RNA, 19 nt, Homo sapiens
  misc_RNA (1)...(19): siRNA sense strand
gcuccuuugucaccaauuu

SEQ ID NO: 579759 - RNA, 19 nt, Homo sapiens
  misc_RNA (1)...(19): siRNA sense strand
acggagagauuuccuauuc

SEQ ID NO: 579760 - RNA, 19 nt, Homo sapiens
  misc_RNA (1)...(19): siRNA sense strand
uaacagagacaccacuaga

SEQ ID NO: 579761 - RNA, 19 nt, Homo sapiens
  misc_RNA (1)...(19): siRNA sense strand
gagccugucucagaacuau

SEQ ID NO: 579762 - RNA, 19 nt, Homo sapiens
  misc_RNA (1)...(19): siRNA sense strand
gaaguuaccaugucugcau

SEQ ID NO: 579763 - RNA, 19 nt, Homo sapiens
  misc_RNA (1)...(19): siRNA sense strand
gaagcucauuugcagacaa

SEQ ID NO: 579764 - RNA, 19 nt, Homo sapiens
  misc_RNA (1)...(19): siRNA sense strand
ucaggucgcuggacuacga

SEQ ID NO: 579765 - RNA, 19 nt, Homo sapiens
  misc_RNA (1)...(19): siRNA sense strand
gauauaggccaaaacaaua

SEQ ID NO: 579766 - RNA, 19 nt, Homo sapiens
  misc_RNA (1)...(19): siRNA sense strand
caggagaaauucgacuaaa

SEQ ID NO: 579767 - RNA, 19 nt, Homo sapiens
  misc_RNA (1)...(19): siRNA sense strand
gagaaauucgacuaaagaa

SEQ ID NO: 579768 - RNA, 19 nt, Homo sapiens
  misc_RNA (1)...(19): siRNA sense strand
guuaccaugucugcauuua

SEQ ID NO: 579769 - RNA, 19 nt, Homo sapiens
  misc_RNA (1)...(19): siRNA sense strand
ggagucaacggagagauuu

SEQ ID NO: 579770 - RNA, 19 nt, Homo sapiens
  misc_RNA (1)...(19): siRNA sense strand
gguuucagccuucaguuaa

SEQ ID NO: 579771 - RNA, 19 nt, Homo sapiens
  misc_RNA (1)...(19): siRNA sense strand
caacggagagauuuccuau

SEQ ID NO: 579772 - RNA, 19 nt, Homo sapiens
  misc_RNA (1)...(19): siRNA sense strand
gggacugcguuuccucuga

SEQ ID NO: 579773 - RNA, 19 nt, Homo sapiens
  misc_RNA (1)...(19): siRNA sense strand
gagggaacaaacuacauuu

SEQ ID NO: 579774 - RNA, 19 nt, Homo sapiens
  misc_RNA (1)...(19): siRNA sense strand
ggaacaaaacucuaacuuu

SEQ ID NO: 579775 - RNA, 19 nt, Homo sapiens
  misc_RNA (1)...(19): siRNA sense strand
ggagaaaaugggaaaauaa

SEQ ID NO: 579776 - RNA, 19 nt, Homo sapiens
  misc_RNA (1)...(19): siRNA sense strand
gaaacugugguugcacuuu

SEQ ID NO: 579777 - RNA, 19 nt, Homo sapiens
  misc_RNA (1)...(19): siRNA sense strand
gaacgaccaugccccagaa

SEQ ID NO: 579778 - RNA, 19 nt, Homo sapiens
  misc_RNA (1)...(19): siRNA sense strand
ggagagauuuccuauucac

SEQ ID NO: 579779 - RNA, 19 nt, Homo sapiens
  misc_RNA (1)...(19): siRNA sense strand
aaacgaccacucuccagua

SEQ ID NO: 579780 - RNA, 19 nt, Homo sapiens
  misc_RNA (1)...(19): siRNA sense strand
gaguacaacgucacuauca

SEQ ID NO: 579781 - RNA, 19 nt, Homo sapiens
  misc_RNA (1)...(19): siRNA sense strand
agacaccacuagacagaga

SEQ ID NO: 579782 - RNA, 19 nt, Homo sapiens
  misc_RNA (1)...(19): siRNA sense strand
guugcuaaaugagaaauug

SEQ ID NO: 579783 - RNA, 19 nt, Homo sapiens
  misc_RNA (1)...(19): siRNA sense strand
gcauuuaccagcccaauac

SEQ ID NO: 579784 - RNA, 19 nt, Homo sapiens
  misc_RNA (1)...(19): siRNA sense strand
gcaaguaauagacauaaac

SEQ ID NO: 579785 - RNA, 19 nt, Homo sapiens
  misc_RNA (1)...(19): siRNA sense strand
cgacuaaagaaacaacuug

SEQ ID NO: 579786 - RNA, 19 nt, Homo sapiens
  misc_RNA (1)...(19): siRNA sense strand
ggccagaaauggaacaaaa

SEQ ID NO: 579787 - RNA, 19 nt, Homo sapiens
  misc_RNA (1)...(19): siRNA sense strand
agaaugcgccugaaacugu

SEQ ID NO: 579788 - RNA, 19 nt, Homo sapiens
  misc_RNA (1)...(19): siRNA sense strand
ccuaugaagucaauaucga

SEQ ID NO: 579789 - RNA, 19 nt, Homo sapiens
  misc_RNA (1)...(19): siRNA sense strand
gcacugcucaggucuacau

SEQ ID NO: 579790 - RNA, 19 nt, Homo sapiens
  misc_RNA (1)...(19): siRNA sense strand
aggaauggcuuugguuuca

SEQ ID NO: 579791 - RNA, 19 nt, Homo sapiens
  misc_RNA (1)...(19): siRNA sense strand
ggcggaaccuagaagcuau

SEQ ID NO: 579792 - RNA, 19 nt, Homo sapiens
  misc_RNA (1)...(19): siRNA sense strand
gagaaagcagagccgagua

SEQ ID NO: 579793 - RNA, 19 nt, Homo sapiens
  misc_RNA (1)...(19): siRNA sense strand
aaaauaaguugcuccauuc

SEQ ID NO: 579794 - RNA, 19 nt, Homo sapiens
  misc_RNA (1)...(19): siRNA sense strand
ccgcggauuuguugcuaaa

SEQ ID NO: 579795 - RNA, 19 nt, Homo sapiens
  misc_RNA (1)...(19): siRNA sense strand
gacaggagaaauucgacua

SEQ ID NO: 579796 - RNA, 19 nt, Homo sapiens
  misc_RNA (1)...(19): siRNA sense strand
caguauuucuggacaaaca

SEQ ID NO: 579797 - RNA, 19 nt, Homo sapiens
  misc_RNA (1)...(19): siRNA sense strand
gugcuacguuuccaagugu

SEQ ID NO: 579798 - RNA, 19 nt, Homo sapiens
  misc_RNA (1)...(19): siRNA sense strand
caauaagcuuccugguugu

SEQ ID NO: 579799 - RNA, 19 nt, Homo sapiens
  misc_RNA (1)...(19): siRNA sense strand
gaccuugauucaggagaaa

SEQ ID NO: 579800 - RNA, 19 nt, Homo sapiens
  misc_RNA (1)...(19): siRNA sense strand
ucaccaauuuagcaaagga

SEQ ID NO: 579801 - RNA, 19 nt, Homo sapiens
  misc_RNA (1)...(19): siRNA sense strand
guuucagccuucaguuaaa

SEQ ID NO: 579802 - RNA, 19 nt, Homo sapiens
  misc_RNA (1)...(19): siRNA sense strand
ugucuucgcucuuccucuu

SEQ ID NO: 579803 - RNA, 19 nt, Homo sapiens
  misc_RNA (1)...(19): siRNA sense strand
ugauucaagugauagaugu

SEQ ID NO: 579804 - RNA, 19 nt, Homo sapiens
  misc_RNA (1)...(19): siRNA sense strand
ccaagcuucagaugagaua

SEQ ID NO: 579805 - RNA, 19 nt, Homo sapiens
  misc_RNA (1)...(19): siRNA sense strand
caaauguuggugaaaguau

SEQ ID NO: 579806 - RNA, 19 nt, Homo sapiens
  misc_RNA (1)...(19): siRNA sense strand
gaccgcggauuuguugcua

SEQ ID NO: 579807 - RNA, 19 nt, Homo sapiens
  misc_RNA (1)...(19): siRNA sense strand
agagagucccuucgaguuu

SEQ ID NO: 579808 - RNA, 19 nt, Homo sapiens
  misc_RNA (1)...(19): siRNA sense strand
gcagcuccuuugucaccaa

SEQ ID NO: 579809 - RNA, 19 nt, Homo sapiens
  misc_RNA (1)...(19): siRNA sense strand
agacaacggccaccuguuc

SEQ ID NO: 579810 - RNA, 19 nt, Homo sapiens
  misc_RNA (1)...(19): siRNA sense strand
gcugacaacacaucucaau

SEQ ID NO: 579811 - RNA, 19 nt, Homo sapiens
  misc_RNA (1)...(19): siRNA sense strand
uaagcuuccugguugugaa

SEQ ID NO: 579812 - RNA, 19 nt, Homo sapiens
  misc_RNA (1)...(19): siRNA sense strand
gagagucccuucgaguuuu

SEQ ID NO: 579813 - RNA, 19 nt, Homo sapiens
  misc_RNA (1)...(19): siRNA sense strand
agaccuugauucaggagaa

SEQ ID NO: 579814 - RNA, 19 nt, Homo sapiens
  misc_RNA (1)...(19): siRNA sense strand
agacauaaacgaccacucu

SEQ ID NO: 579815 - RNA, 19 nt, Homo sapiens
  misc_RNA (1)...(19): siRNA sense strand
ccgggagccugucucagaa

SEQ ID NO: 579816 - RNA, 19 nt, Homo sapiens
  misc_RNA (1)...(19): siRNA sense strand
gcuggaggcuuuucuggaa

SEQ ID NO: 579817 - RNA, 19 nt, Homo sapiens
  misc_RNA (1)...(19): siRNA sense strand
ucaguccuaugaagucaau

SEQ ID NO: 579818 - RNA, 19 nt, Homo sapiens
  misc_RNA (1)...(19): siRNA sense strand
gacuaaagaaacaacuuga

SEQ ID NO: 579819 - RNA, 19 nt, Homo sapiens
  misc_RNA (1)...(19): siRNA sense strand
cacccaggcugacaacaca

SEQ ID NO: 579820 - RNA, 19 nt, Homo sapiens
  misc_RNA (1)...(19): siRNA sense strand
uagagagucccuucgaguu

SEQ ID NO: 579821 - RNA, 19 nt, Homo sapiens
  misc_RNA (1)...(19): siRNA sense strand
gcugcaaguaauagacaua

SEQ ID NO: 579822 - RNA, 19 nt, Homo sapiens
  misc_RNA (1)...(19): siRNA sense strand
ccgacucucucaccgucua

SEQ ID NO: 579823 - RNA, 19 nt, Homo sapiens
  misc_RNA (1)...(19): siRNA sense strand
agagggaacaaacuacauu

SEQ ID NO: 579824 - RNA, 19 nt, Homo sapiens
  misc_RNA (1)...(19): siRNA sense strand
aaacugugguugcacuuuu

SEQ ID NO: 579825 - RNA, 19 nt, Homo sapiens
  misc_RNA (1)...(19): siRNA sense strand
cggagagauuuccuauuca

SEQ ID NO: 579826 - RNA, 19 nt, Homo sapiens
  misc_RNA (1)...(19): siRNA sense strand
gagcugcaaguaauagaca

SEQ ID NO: 579827 - RNA, 19 nt, Homo sapiens
  misc_RNA (1)...(19): siRNA sense strand
ugucucagaacuaucagua

SEQ ID NO: 579828 - RNA, 19 nt, Homo sapiens
  misc_RNA (1)...(19): siRNA sense strand
cgucagcgccacagacaga

SEQ ID NO: 579829 - RNA, 19 nt, Homo sapiens
  misc_RNA (1)...(19): siRNA sense strand
gaaagcagagccgaguaca

SEQ ID NO: 579830 - RNA, 19 nt, Homo sapiens
  misc_RNA (1)...(19): siRNA sense strand
acgcagugauggcaggaaa

SEQ ID NO: 579831 - RNA, 19 nt, Homo sapiens
  misc_RNA (1)...(19): siRNA sense strand
acaacacaucucaauauga

SEQ ID NO: 579832 - RNA, 19 nt, Homo sapiens
  misc_RNA (1)...(19): siRNA sense strand
gaccaugccccagaaguua

SEQ ID NO: 579833 - RNA, 19 nt, Homo sapiens
  misc_RNA (1)...(19): siRNA sense strand
aggagaaauucgacuaaag

SEQ ID NO: 579834 - RNA, 19 nt, Homo sapiens
  misc_RNA (1)...(19): siRNA sense strand
ggaccgagaggaagaagcu

SEQ ID NO: 579835 - RNA, 19 nt, Homo sapiens
  misc_RNA (1)...(19): siRNA sense strand
aacgaccacucuccaguau

SEQ ID NO: 579836 - RNA, 19 nt, Homo sapiens
  misc_RNA (1)...(19): siRNA sense strand
uggcggugcugcuguguag

SEQ ID NO: 579837 - RNA, 19 nt, Homo sapiens
  misc_RNA (1)...(19): siRNA sense strand
agagacaccacuagacaga

SEQ ID NO: 579838 - RNA, 19 nt, Homo sapiens
  misc_RNA (1)...(19): siRNA sense strand
acaggagaaauucgacuaa

SEQ ID NO: 579839 - RNA, 19 nt, Homo sapiens
  misc_RNA (1)...(19): siRNA sense strand
ggaagcucauuugcagaca

SEQ ID NO: 579840 - RNA, 19 nt, Homo sapiens
  misc_RNA (1)...(19): siRNA sense strand
acaaauguuggugaaagua

SEQ ID NO: 579841 - RNA, 19 nt, Homo sapiens
  misc_RNA (1)...(19): siRNA sense strand
ggucuuagcuagagauaua

SEQ ID NO: 579842 - RNA, 19 nt, Homo sapiens
  misc_RNA (1)...(19): siRNA sense strand
ggacauaaaugaucacucu

SEQ ID NO: 579843 - RNA, 19 nt, Homo sapiens
  misc_RNA (1)...(19): siRNA sense strand
ugacaaugcuccugaguuu

SEQ ID NO: 579844 - RNA, 19 nt, Homo sapiens
  misc_RNA (1)...(19): siRNA sense strand
gaagagcucugugguccua

SEQ ID NO: 579845 - RNA, 19 nt, Homo sapiens
  misc_RNA (1)...(19): siRNA sense strand
gaaagaugauuugcucuau

SEQ ID NO: 579846 - RNA, 19 nt, Homo sapiens
  misc_RNA (1)...(19): siRNA sense strand
guucagaaauagcuuggua

SEQ ID NO: 579847 - RNA, 19 nt, Homo sapiens
  misc_RNA (1)...(19): siRNA sense strand
gaguguuucuuauggcuua

SEQ ID NO: 579848 - RNA, 19 nt, Homo sapiens
  misc_RNA (1)...(19): siRNA sense strand
ggaaagaugauuugcucua

SEQ ID NO: 579849 - RNA, 19 nt, Homo sapiens
  misc_RNA (1)...(19): siRNA sense strand
aaugaucacucuccaauau

SEQ ID NO: 579850 - RNA, 19 nt, Homo sapiens
  misc_RNA (1)...(19): siRNA sense strand
ggcaagaaauacccagauu

SEQ ID NO: 579851 - RNA, 19 nt, Homo sapiens
  misc_RNA (1)...(19): siRNA sense strand
ugaagucacgggagaaaua

SEQ ID NO: 579852 - RNA, 19 nt, Homo sapiens
  misc_RNA (1)...(19): siRNA sense strand
ggaggaggccuuucuggaa

SEQ ID NO: 579853 - RNA, 19 nt, Homo sapiens
  misc_RNA (1)...(19): siRNA sense strand
gagaggagcagccugaguu

SEQ ID NO: 579854 - RNA, 19 nt, Homo sapiens
  misc_RNA (1)...(19): siRNA sense strand
aaagggaagugcucuugaa

SEQ ID NO: 579855 - RNA, 19 nt, Homo sapiens
  misc_RNA (1)...(19): siRNA sense strand
agauagagauuccggagaa

SEQ ID NO: 579856 - RNA, 19 nt, Homo sapiens
  misc_RNA (1)...(19): siRNA sense strand
ggacaucaaugacaaugcu

SEQ ID NO: 579857 - RNA, 19 nt, Homo sapiens
  misc_RNA (1)...(19): siRNA sense strand
gaucugggccugggaauug

SEQ ID NO: 579858 - RNA, 19 nt, Homo sapiens
  misc_RNA (1)...(19): siRNA sense strand
ucauagaggugguggaugu

SEQ ID NO: 579859 - RNA, 19 nt, Homo sapiens
  misc_RNA (1)...(19): siRNA sense strand
aaaaggcacuguagucaua

SEQ ID NO: 579860 - RNA, 19 nt, Homo sapiens
  misc_RNA (1)...(19): siRNA sense strand
gaagugcucuugaaaauac

SEQ ID NO: 579861 - RNA, 19 nt, Homo sapiens
  misc_RNA (1)...(19): siRNA sense strand
gaaagggaagugcucuuga

SEQ ID NO: 579862 - RNA, 19 nt, Homo sapiens
  misc_RNA (1)...(19): siRNA sense strand
ggagggaaguuaaggaaaa

SEQ ID NO: 579863 - RNA, 19 nt, Homo sapiens
  misc_RNA (1)...(19): siRNA sense strand
uauagaugcuggaaacuuc

SEQ ID NO: 579864 - RNA, 19 nt, Homo sapiens
  misc_RNA (1)...(19): siRNA sense strand
gaaauugaggccacagaug

SEQ ID NO: 579865 - RNA, 19 nt, Homo sapiens
  misc_RNA (1)...(19): siRNA sense strand
guacugcauuuccaagugu

SEQ ID NO: 579866 - RNA, 19 nt, Homo sapiens
  misc_RNA (1)...(19): siRNA sense strand
ccuagacucuccaauuguu

SEQ ID NO: 579867 - RNA, 19 nt, Homo sapiens
  misc_RNA (1)...(19): siRNA sense strand
gggcagcaauggucuucaa

SEQ ID NO: 579868 - RNA, 19 nt, Homo sapiens
  misc_RNA (1)...(19): siRNA sense strand
gcucugugguccuauugaa

SEQ ID NO: 579869 - RNA, 19 nt, Homo sapiens
  misc_RNA (1)...(19): siRNA sense strand
gaacuuaucauaucuucac

SEQ ID NO: 579870 - RNA, 19 nt, Homo sapiens
  misc_RNA (1)...(19): siRNA sense strand
uaaaugaucacucuccaau

SEQ ID NO: 579871 - RNA, 19 nt, Homo sapiens
  misc_RNA (1)...(19): siRNA sense strand
ggacuggugaguucaaguu

SEQ ID NO: 579872 - RNA, 19 nt, Homo sapiens
  misc_RNA (1)...(19): siRNA sense strand
ucaggucgcuggacuacga

SEQ ID NO: 579873 - RNA, 19 nt, Homo sapiens
  misc_RNA (1)...(19): siRNA sense strand
aagaugauuugcucuauuc

SEQ ID NO: 579874 - RNA, 19 nt, Homo sapiens
  misc_RNA (1)...(19): siRNA sense strand
ggagaaauacuguugaaaa

SEQ ID NO: 579875 - RNA, 19 nt, Homo sapiens
  misc_RNA (1)...(19): siRNA sense strand
gauagagauuccggagaaa

SEQ ID NO: 579876 - RNA, 19 nt, Homo sapiens
  misc_RNA (1)...(19): siRNA sense strand
gcacggucaugguucgaau

SEQ ID NO: 579877 - RNA, 19 nt, Homo sapiens
  misc_RNA (1)...(19): siRNA sense strand
ugaagccaauauuuccuaa

SEQ ID NO: 579878 - RNA, 19 nt, Homo sapiens
  misc_RNA (1)...(19): siRNA sense strand
auagugagggcaagaaaua

SEQ ID NO: 579879 - RNA, 19 nt, Homo sapiens
  misc_RNA (1)...(19): siRNA sense strand
gcaggucuccgacgucaau

SEQ ID NO: 579880 - RNA, 19 nt, Homo sapiens
  misc_RNA (1)...(19): siRNA sense strand
ugaucacucuccaauauuc

SEQ ID NO: 579881 - RNA, 19 nt, Homo sapiens
  misc_RNA (1)...(19): siRNA sense strand
gggaagugcucuugaaaau

SEQ ID NO: 579882 - RNA, 19 nt, Homo sapiens
  misc_RNA (1)...(19): siRNA sense strand
ucuccaauauucccugaaa

SEQ ID NO: 579883 - RNA, 19 nt, Homo sapiens
  misc_RNA (1)...(19): siRNA sense strand
gcaaguguuggccuuuauu

SEQ ID NO: 579884 - RNA, 19 nt, Homo sapiens
  misc_RNA (1)...(19): siRNA sense strand
ccagccggguacucuauuu

SEQ ID NO: 579885 - RNA, 19 nt, Homo sapiens
  misc_RNA (1)...(19): siRNA sense strand
gaaacuagaccgggaagag

SEQ ID NO: 579886 - RNA, 19 nt, Homo sapiens
  misc_RNA (1)...(19): siRNA sense strand
gaccagcgcugaguacaac

SEQ ID NO: 579887 - RNA, 19 nt, Homo sapiens
  misc_RNA (1)...(19): siRNA sense strand
caaguguuggccuuuauuu

SEQ ID NO: 579888 - RNA, 19 nt, Homo sapiens
  misc_RNA (1)...(19): siRNA sense strand
ggacaaaccacuggaucga

SEQ ID NO: 579889 - RNA, 19 nt, Homo sapiens
  misc_RNA (1)...(19): siRNA sense strand
ggcaaguguuggccuuuau

SEQ ID NO: 579890 - RNA, 19 nt, Homo sapiens
  misc_RNA (1)...(19): siRNA sense strand
aagccaauauuuccuaauc

SEQ ID NO: 579891 - RNA, 19 nt, Homo sapiens
  misc_RNA (1)...(19): siRNA sense strand
ucaaguuccugaagccaau

SEQ ID NO: 579892 - RNA, 19 nt, Homo sapiens
  misc_RNA (1)...(19): siRNA sense strand
gccucgagccuauucguua

SEQ ID NO: 579893 - RNA, 19 nt, Homo sapiens
  misc_RNA (1)...(19): siRNA sense strand
cagaacuuaucauaucuuc

SEQ ID NO: 579894 - RNA, 19 nt, Homo sapiens
  misc_RNA (1)...(19): siRNA sense strand
cgggagaaauacuguugaa

SEQ ID NO: 579895 - RNA, 19 nt, Homo sapiens
  misc_RNA (1)...(19): siRNA sense strand
agauauagaugcuggaaac

SEQ ID NO: 579896 - RNA, 19 nt, Homo sapiens
  misc_RNA (1)...(19): siRNA sense strand
cgaauucgagauagagauu

SEQ ID NO: 579897 - RNA, 19 nt, Homo sapiens
  misc_RNA (1)...(19): siRNA sense strand
gauuugcucuauuccagau

SEQ ID NO: 579898 - RNA, 19 nt, Homo sapiens
  misc_RNA (1)...(19): siRNA sense strand
gagagaccagcgcugagua

SEQ ID NO: 579899 - RNA, 19 nt, Homo sapiens
  misc_RNA (1)...(19): siRNA sense strand
uagggagaauucauccaaa

SEQ ID NO: 579900 - RNA, 19 nt, Homo sapiens
  misc_RNA (1)...(19): siRNA sense strand
gcagcuggaucgucagacu

SEQ ID NO: 579901 - RNA, 19 nt, Homo sapiens
  misc_RNA (1)...(19): siRNA sense strand
gccaauauuuccuaaucuc

SEQ ID NO: 579902 - RNA, 19 nt, Homo sapiens
  misc_RNA (1)...(19): siRNA sense strand
gaagaagcuagggagaauu

SEQ ID NO: 579903 - RNA, 19 nt, Homo sapiens
  misc_RNA (1)...(19): siRNA sense strand
cagauuuggugcaggacaa

SEQ ID NO: 579904 - RNA, 19 nt, Homo sapiens
  misc_RNA (1)...(19): siRNA sense strand
ccucgagccuauucguuau

SEQ ID NO: 579905 - RNA, 19 nt, Homo sapiens
  misc_RNA (1)...(19): siRNA sense strand
agacaacggccaccuguuc

SEQ ID NO: 579906 - RNA, 19 nt, Homo sapiens
  misc_RNA (1)...(19): siRNA sense strand
cuuaucauaucuucacuca

SEQ ID NO: 579907 - RNA, 19 nt, Homo sapiens
  misc_RNA (1)...(19): siRNA sense strand
uagcccaucuggccaagga

SEQ ID NO: 579908 - RNA, 19 nt, Homo sapiens
  misc_RNA (1)...(19): siRNA sense strand
uggaaaugccggugcaauu

SEQ ID NO: 579909 - RNA, 19 nt, Homo sapiens
  misc_RNA (1)...(19): siRNA sense strand
auagcuugguauucaguua

SEQ ID NO: 579910 - RNA, 19 nt, Homo sapiens
  misc_RNA (1)...(19): siRNA sense strand
ugucgucgcucuuccucuu

SEQ ID NO: 579911 - RNA, 19 nt, Homo sapiens
  misc_RNA (1)...(19): siRNA sense strand
gucucuaucuuccgaauuc

SEQ ID NO: 579912 - RNA, 19 nt, Homo sapiens
  misc_RNA (1)...(19): siRNA sense strand
gacgguagucucuaucuuc

SEQ ID NO: 579913 - RNA, 19 nt, Homo sapiens
  misc_RNA (1)...(19): siRNA sense strand
ugaaagggaagugcucuug

SEQ ID NO: 579914 - RNA, 19 nt, Homo sapiens
  misc_RNA (1)...(19): siRNA sense strand
ccuauucguuauucugugu

SEQ ID NO: 579915 - RNA, 19 nt, Homo sapiens
  misc_RNA (1)...(19): siRNA sense strand
gaaccguguguacugcauu

SEQ ID NO: 579916 - RNA, 19 nt, Homo sapiens
  misc_RNA (1)...(19): siRNA sense strand
guuccugaagccaauauuu

SEQ ID NO: 579917 - RNA, 19 nt, Homo sapiens
  misc_RNA (1)...(19): siRNA sense strand
ccgacucucucaccgucua

SEQ ID NO: 579918 - RNA, 19 nt, Homo sapiens
  misc_RNA (1)...(19): siRNA sense strand
uagaggugguggaugugaa

SEQ ID NO: 579919 - RNA, 19 nt, Homo sapiens
  misc_RNA (1)...(19): siRNA sense strand
uagcugaggauuuggaugu

SEQ ID NO: 579920 - RNA, 19 nt, Homo sapiens
  misc_RNA (1)...(19): siRNA sense strand
aaccguguguacugcauuu

SEQ ID NO: 579921 - RNA, 19 nt, Homo sapiens
  misc_RNA (1)...(19): siRNA sense strand
uuccuaaucucuugguuca

SEQ ID NO: 579922 - RNA, 19 nt, Homo sapiens
  misc_RNA (1)...(19): siRNA sense strand
ggagaaaauggaaagauga

SEQ ID NO: 579923 - RNA, 19 nt, Homo sapiens
  misc_RNA (1)...(19): siRNA sense strand
guuagggucuuagcuagag

SEQ ID NO: 579924 - RNA, 19 nt, Homo sapiens
  misc_RNA (1)...(19): siRNA sense strand
gaagcuagggagaauucau

SEQ ID NO: 579925 - RNA, 19 nt, Homo sapiens
  misc_RNA (1)...(19): siRNA sense strand
ggagaauucauccaaacag

SEQ ID NO: 579926 - RNA, 19 nt, Homo sapiens
  misc_RNA (1)...(19): siRNA sense strand
gagauauagaugcuggaaa

SEQ ID NO: 579927 - RNA, 19 nt, Homo sapiens
  misc_RNA (1)...(19): siRNA sense strand
ggaagugcucuugaaaaua

SEQ ID NO: 579928 - RNA, 19 nt, Homo sapiens
  misc_RNA (1)...(19): siRNA sense strand
aaaugaucacucuccaaua

SEQ ID NO: 579929 - RNA, 19 nt, Homo sapiens
  misc_RNA (1)...(19): siRNA sense strand
gggagggaaguuaaggaaa

SEQ ID NO: 579930 - RNA, 19 nt, Homo sapiens
  misc_RNA (1)...(19): siRNA sense strand
uagcuugguauucaguuaa

SEQ ID NO: 579931 - RNA, 19 nt, Homo sapiens
  misc_RNA (1)...(19): siRNA sense strand
gauccaggacauaaaugau

SEQ ID NO: 579932 - RNA, 19 nt, Homo sapiens
  misc_RNA (1)...(19): siRNA sense strand
gaaaacccagcagaacaua

SEQ ID NO: 579933 - RNA, 19 nt, Homo sapiens
  misc_RNA (1)...(19): siRNA sense strand
cauccaaacaggcaagugu

SEQ ID NO: 579934 - RNA, 19 nt, Homo sapiens
  misc_RNA (1)...(19): siRNA sense strand
ggaaaaggcacuguaguca

SEQ ID NO: 579935 - RNA, 19 nt, Homo sapiens
  misc_RNA (1)...(19): siRNA sense strand
gaagucacgggagaaauac

SEQ ID NO: 579936 - RNA, 19 nt, Homo sapiens
  misc_RNA (1)...(19): siRNA sense strand
cuucgggaguguuucuuau

SEQ ID NO: 579937 - RNA, 19 nt, Homo sapiens
  misc_RNA (1)...(19): siRNA sense strand
gggagaauucauccaaaca

SEQ ID NO: 579938 - RNA, 19 nt, Homo sapiens
  misc_RNA (1)...(19): siRNA sense strand
uccaggacauaaaugauca

SEQ ID NO: 579939 - RNA, 19 nt, Homo sapiens
  misc_RNA (1)...(19): siRNA sense strand
uuugcucuauuccagauaa

SEQ ID NO: 579940 - RNA, 19 nt, Homo sapiens
  misc_RNA (1)...(19): siRNA sense strand
gaucgucagacuggagauu

SEQ ID NO: 579941 - RNA, 19 nt, Homo sapiens
  misc_RNA (1)...(19): siRNA sense strand
gaaaccaucuguagagaau

SEQ ID NO: 579942 - RNA, 19 nt, Homo sapiens
  misc_RNA (1)...(19): siRNA sense strand
ggacaacggccaccuguuu

SEQ ID NO: 579943 - RNA, 19 nt, Homo sapiens
  misc_RNA (1)...(19): siRNA sense strand
ggacaaaugaguucaaguu

SEQ ID NO: 579944 - RNA, 19 nt, Homo sapiens
  misc_RNA (1)...(19): siRNA sense strand
gaaguacccggaacuagua

SEQ ID NO: 579945 - RNA, 19 nt, Homo sapiens
  misc_RNA (1)...(19): siRNA sense strand
ggaggagagcgauuucuua

SEQ ID NO: 579946 - RNA, 19 nt, Homo sapiens
  misc_RNA (1)...(19): siRNA sense strand
gugauuugcuccugaauga

SEQ ID NO: 579947 - RNA, 19 nt, Homo sapiens
  misc_RNA (1)...(19): siRNA sense strand
cggaaagucuacagucaua

SEQ ID NO: 579948 - RNA, 19 nt, Homo sapiens
  misc_RNA (1)...(19): siRNA sense strand
cgacaaugcaccagaauuu

SEQ ID NO: 579949 - RNA, 19 nt, Homo sapiens
  misc_RNA (1)...(19): siRNA sense strand
gaagagcuuugaauucagu

SEQ ID NO: 579950 - RNA, 19 nt, Homo sapiens
  misc_RNA (1)...(19): siRNA sense strand
ggaagaaacagccuccaaa

SEQ ID NO: 579951 - RNA, 19 nt, Homo sapiens
  misc_RNA (1)...(19): siRNA sense strand
ugucucggcuucugacuua

SEQ ID NO: 579952 - RNA, 19 nt, Homo sapiens
  misc_RNA (1)...(19): siRNA sense strand
ggacuuggaugugggaaga

SEQ ID NO: 579953 - RNA, 19 nt, Homo sapiens
  misc_RNA (1)...(19): siRNA sense strand
gaaacagccuccaaaacua

SEQ ID NO: 579954 - RNA, 19 nt, Homo sapiens
  misc_RNA (1)...(19): siRNA sense strand
ggagagcgauuucuuagac

SEQ ID NO: 579955 - RNA, 19 nt, Homo sapiens
  misc_RNA (1)...(19): siRNA sense strand
gaaccaugcauacuacauu

SEQ ID NO: 579956 - RNA, 19 nt, Homo sapiens
  misc_RNA (1)...(19): siRNA sense strand
ggagacaacggaagaguga

SEQ ID NO: 579957 - RNA, 19 nt, Homo sapiens
  misc_RNA (1)...(19): siRNA sense strand
gggaaaugcugaggacuug

SEQ ID NO: 579958 - RNA, 19 nt, Homo sapiens
  misc_RNA (1)...(19): siRNA sense strand
gauaaacauccaggucuua

SEQ ID NO: 579959 - RNA, 19 nt, Homo sapiens
  misc_RNA (1)...(19): siRNA sense strand
auaugcaacuggucaaaua

SEQ ID NO: 579960 - RNA, 19 nt, Homo sapiens
  misc_RNA (1)...(19): siRNA sense strand
aaacgacaaugcaccagaa

SEQ ID NO: 579961 - RNA, 19 nt, Homo sapiens
  misc_RNA (1)...(19): siRNA sense strand
agagugauguguuccauug

SEQ ID NO: 579962 - RNA, 19 nt, Homo sapiens
  misc_RNA (1)...(19): siRNA sense strand
caaaggaucugggacuaag

SEQ ID NO: 579963 - RNA, 19 nt, Homo sapiens
  misc_RNA (1)...(19): siRNA sense strand
gaccuugucuucaguaaac

SEQ ID NO: 579964 - RNA, 19 nt, Homo sapiens
  misc_RNA (1)...(19): siRNA sense strand
ggaaguacccggaacuagu

SEQ ID NO: 579965 - RNA, 19 nt, Homo sapiens
  misc_RNA (1)...(19): siRNA sense strand
aggaagagcuuugaauuca

SEQ ID NO: 579966 - RNA, 19 nt, Homo sapiens
  misc_RNA (1)...(19): siRNA sense strand
caaacgagcuccguaucau

SEQ ID NO: 579967 - RNA, 19 nt, Homo sapiens
  misc_RNA (1)...(19): siRNA sense strand
gcaaaggaucugggacuaa

SEQ ID NO: 579968 - RNA, 19 nt, Homo sapiens
  misc_RNA (1)...(19): siRNA sense strand
ggacagcccagauaaacau

SEQ ID NO: 579969 - RNA, 19 nt, Homo sapiens
  misc_RNA (1)...(19): siRNA sense strand
gaucuagacucuggagaca

SEQ ID NO: 579970 - RNA, 19 nt, Homo sapiens
  misc_RNA (1)...(19): siRNA sense strand
gaaagcacucugccaggaa

SEQ ID NO: 579971 - RNA, 19 nt, Homo sapiens
  misc_RNA (1)...(19): siRNA sense strand
ucaggucgcuggacuacga

SEQ ID NO: 579972 - RNA, 19 nt, Homo sapiens
  misc_RNA (1)...(19): siRNA sense strand
aaccaucuguagagaauuu

SEQ ID NO: 579973 - RNA, 19 nt, Homo sapiens
  misc_RNA (1)...(19): siRNA sense strand
gaacuaguacuggauaaag

SEQ ID NO: 579974 - RNA, 19 nt, Homo sapiens
  misc_RNA (1)...(19): siRNA sense strand
gaagagugauguguuccau

SEQ ID NO: 579975 - RNA, 19 nt, Homo sapiens
  misc_RNA (1)...(19): siRNA sense strand
caaaugaguucaaguuccu

SEQ ID NO: 579976 - RNA, 19 nt, Homo sapiens
  misc_RNA (1)...(19): siRNA sense strand
gaaaaugaaaugcaucuga

SEQ ID NO: 579977 - RNA, 19 nt, Homo sapiens
  misc_RNA (1)...(19): siRNA sense strand
gagcuuugaauucaguuaa

SEQ ID NO: 579978 - RNA, 19 nt, Homo sapiens
  misc_RNA (1)...(19): siRNA sense strand
gaaaaccaaguacaacaua

SEQ ID NO: 579979 - RNA, 19 nt, Homo sapiens
  misc_RNA (1)...(19): siRNA sense strand
gcuccugaaugagaaauug

SEQ ID NO: 579980 - RNA, 19 nt, Homo sapiens
  misc_RNA (1)...(19): siRNA sense strand
ucaggaagagcuuugaauu

SEQ ID NO: 579981 - RNA, 19 nt, Homo sapiens
  misc_RNA (1)...(19): siRNA sense strand
gaaagucuacagucauagu

SEQ ID NO: 579982 - RNA, 19 nt, Homo sapiens
  misc_RNA (1)...(19): siRNA sense strand
gaaaugcugaggacuugga

SEQ ID NO: 579983 - RNA, 19 nt, Homo sapiens
  misc_RNA (1)...(19): siRNA sense strand
gaggagagcgauuucuuag

SEQ ID NO: 579984 - RNA, 19 nt, Homo sapiens
  misc_RNA (1)...(19): siRNA sense strand
ugcaacuggucaaauauuu

SEQ ID NO: 579985 - RNA, 19 nt, Homo sapiens
  misc_RNA (1)...(19): siRNA sense strand
aaccaugcauacuacauuu

SEQ ID NO: 579986 - RNA, 19 nt, Homo sapiens
  misc_RNA (1)...(19): siRNA sense strand
ucaguaaacagcccuauuc

SEQ ID NO: 579987 - RNA, 19 nt, Homo sapiens
  misc_RNA (1)...(19): siRNA sense strand
gaauucccacuuccacgua

SEQ ID NO: 579988 - RNA, 19 nt, Homo sapiens
  misc_RNA (1)...(19): siRNA sense strand
aaacgagcuccguaucaua

SEQ ID NO: 579989 - RNA, 19 nt, Homo sapiens
  misc_RNA (1)...(19): siRNA sense strand
cacagaaccaugcauacua

SEQ ID NO: 579990 - RNA, 19 nt, Homo sapiens
  misc_RNA (1)...(19): siRNA sense strand
gaagaaacagccuccaaaa

SEQ ID NO: 579991 - RNA, 19 nt, Homo sapiens
  misc_RNA (1)...(19): siRNA sense strand
ggaacuaguacuggauaaa

SEQ ID NO: 579992 - RNA, 19 nt, Homo sapiens
  misc_RNA (1)...(19): siRNA sense strand
ggaagagcuuugaauucag

SEQ ID NO: 579993 - RNA, 19 nt, Homo sapiens
  misc_RNA (1)...(19): siRNA sense strand
ucaaguuccugaagccaau

SEQ ID NO: 579994 - RNA, 19 nt, Homo sapiens
  misc_RNA (1)...(19): siRNA sense strand
uagccaaccuagcaaagga

SEQ ID NO: 579995 - RNA, 19 nt, Homo sapiens
  misc_RNA (1)...(19): siRNA sense strand
guacucacucgcagucgua

SEQ ID NO: 579996 - RNA, 19 nt, Homo sapiens
  misc_RNA (1)...(19): siRNA sense strand
ccugagaacucgggagaga

SEQ ID NO: 579997 - RNA, 19 nt, Homo sapiens
  misc_RNA (1)...(19): siRNA sense strand
uugcacagccgcucuauga

SEQ ID NO: 579998 - RNA, 19 nt, Homo sapiens
  misc_RNA (1)...(19): siRNA sense strand
gauuugcuccugaaugaga

SEQ ID NO: 579999 - RNA, 19 nt, Homo sapiens
  misc_RNA (1)...(19): siRNA sense strand
gaguacaacauuaccauca

SEQ ID NO: 580000 - RNA, 19 nt, Homo sapiens
  misc_RNA (1)...(19): siRNA sense strand
gaagaaauucgcaaaacuu

SEQ ID NO: 580001 - RNA, 19 nt, Homo sapiens
  misc_RNA (1)...(19): siRNA sense strand
cauccaggucuuagauaua

SEQ ID NO: 580002 - RNA, 19 nt, Homo sapiens
  misc_RNA (1)...(19): siRNA sense strand
auccaggucuuagauauaa

SEQ ID NO: 580003 - RNA, 19 nt, Homo sapiens
  misc_RNA (1)...(19): siRNA sense strand
cgaggcaaaucccaguuuc

SEQ ID NO: 580004 - RNA, 19 nt, Homo sapiens
  misc_RNA (1)...(19): siRNA sense strand
gagagcgauuucuuagaca

SEQ ID NO: 580005 - RNA, 19 nt, Homo sapiens
  misc_RNA (1)...(19): siRNA sense strand
ugucuucgcucuuccucuu

SEQ ID NO: 580006 - RNA, 19 nt, Homo sapiens
  misc_RNA (1)...(19): siRNA sense strand
caccggaacugaccuuguc

SEQ ID NO: 580007 - RNA, 19 nt, Homo sapiens
  misc_RNA (1)...(19): siRNA sense strand
acagaaccaugcauacuac

SEQ ID NO: 580008 - RNA, 19 nt, Homo sapiens
  misc_RNA (1)...(19): siRNA sense strand
caggaagagcuuugaauuc

SEQ ID NO: 580009 - RNA, 19 nt, Homo sapiens
  misc_RNA (1)...(19): siRNA sense strand
guacaacauuaccaucacu

SEQ ID NO: 580010 - RNA, 19 nt, Homo sapiens
  misc_RNA (1)...(19): siRNA sense strand
gcagccggaacucagcuua

SEQ ID NO: 580011 - RNA, 19 nt, Homo sapiens
  misc_RNA (1)...(19): siRNA sense strand
agauaaacauccaggucuu

SEQ ID NO: 580012 - RNA, 19 nt, Homo sapiens
  misc_RNA (1)...(19): siRNA sense strand
gcgaggcaaaucccaguuu

SEQ ID NO: 580013 - RNA, 19 nt, Homo sapiens
  misc_RNA (1)...(19): siRNA sense strand
gacaaaugaguucaaguuc

SEQ ID NO: 580014 - RNA, 19 nt, Homo sapiens
  misc_RNA (1)...(19): siRNA sense strand
gacaaugcaccagaauuug

SEQ ID NO: 580015 - RNA, 19 nt, Homo sapiens
  misc_RNA (1)...(19): siRNA sense strand
ucuccgguauucuuugaaa

SEQ ID NO: 580016 - RNA, 19 nt, Homo sapiens
  misc_RNA (1)...(19): siRNA sense strand
gacaacggccaccuguuug

SEQ ID NO: 580017 - RNA, 19 nt, Homo sapiens
  misc_RNA (1)...(19): siRNA sense strand
caacauuaccaucacuauc

SEQ ID NO: 580018 - RNA, 19 nt, Homo sapiens
  misc_RNA (1)...(19): siRNA sense strand
gugauguguuccauugaga

SEQ ID NO: 580019 - RNA, 19 nt, Homo sapiens
  misc_RNA (1)...(19): siRNA sense strand
gggaggagagcgauuucuu

SEQ ID NO: 580020 - RNA, 19 nt, Homo sapiens
  misc_RNA (1)...(19): siRNA sense strand
cccguuaacucugucauug

SEQ ID NO: 580021 - RNA, 19 nt, Homo sapiens
  misc_RNA (1)...(19): siRNA sense strand
ucuaugagguugcaguucu

SEQ ID NO: 580022 - RNA, 19 nt, Homo sapiens
  misc_RNA (1)...(19): siRNA sense strand
aaacauccaggucuuagau

SEQ ID NO: 580023 - RNA, 19 nt, Homo sapiens
  misc_RNA (1)...(19): siRNA sense strand
gagcgauuucuuagacaaa

SEQ ID NO: 580024 - RNA, 19 nt, Homo sapiens
  misc_RNA (1)...(19): siRNA sense strand
gggaagaaacagccuccaa

SEQ ID NO: 580025 - RNA, 19 nt, Homo sapiens
  misc_RNA (1)...(19): siRNA sense strand
uccaauuacuggugauaug

SEQ ID NO: 580026 - RNA, 19 nt, Homo sapiens
  misc_RNA (1)...(19): siRNA sense strand
cuaugagguugcaguucua

SEQ ID NO: 580027 - RNA, 19 nt, Homo sapiens
  misc_RNA (1)...(19): siRNA sense strand
acauccaggucuuagauau

SEQ ID NO: 580028 - RNA, 19 nt, Homo sapiens
  misc_RNA (1)...(19): siRNA sense strand
aaagggaacaaacagcauu

SEQ ID NO: 580029 - RNA, 19 nt, Homo sapiens
  misc_RNA (1)...(19): siRNA sense strand
gagagaccagauccgagua

SEQ ID NO: 580030 - RNA, 19 nt, Homo sapiens
  misc_RNA (1)...(19): siRNA sense strand
gaagcgauuaauaguuaug

SEQ ID NO: 580031 - RNA, 19 nt, Homo sapiens
  misc_RNA (1)...(19): siRNA sense strand
gaaggaaguacccggaacu

SEQ ID NO: 580032 - RNA, 19 nt, Homo sapiens
  misc_RNA (1)...(19): siRNA sense strand
caaaucccaguuucaggaa

SEQ ID NO: 580033 - RNA, 19 nt, Homo sapiens
  misc_RNA (1)...(19): siRNA sense strand
ggaacugaccuugucuuca

SEQ ID NO: 580034 - RNA, 19 nt, Homo sapiens
  misc_RNA (1)...(19): siRNA sense strand
gggcccaaguuguguccaa

SEQ ID NO: 580035 - RNA, 19 nt, Homo sapiens
  misc_RNA (1)...(19): siRNA sense strand
cggaacuaguacuggauaa

SEQ ID NO: 580036 - RNA, 19 nt, Homo sapiens
  misc_RNA (1)...(19): siRNA sense strand
ugaccauucuccgguauuc

SEQ ID NO: 580037 - RNA, 19 nt, Homo sapiens
  misc_RNA (1)...(19): siRNA sense strand
aacauuaccaucacuauca

SEQ ID NO: 580038 - RNA, 19 nt, Homo sapiens
  misc_RNA (1)...(19): siRNA sense strand
cgacaucgaggccaaggau

SEQ ID NO: 580039 - RNA, 19 nt, Homo sapiens
  misc_RNA (1)...(19): siRNA sense strand
gauaugcaacuggucaaau

SEQ ID NO: 580040 - RNA, 19 nt, Homo sapiens
  misc_RNA (1)...(19): siRNA sense strand
ucagcuaaauccaauuacu

SEQ ID NO: 580041 - RNA, 19 nt, Homo sapiens
  misc_RNA (1)...(19): siRNA sense strand
gaacuugugugguauuugu

SEQ ID NO: 580042 - RNA, 19 nt, Homo sapiens
  misc_RNA (1)...(19): siRNA sense strand
gaaaguaucacuccuggaa

SEQ ID NO: 580043 - RNA, 19 nt, Homo sapiens
  misc_RNA (1)...(19): siRNA sense strand
ccaagcaucugaagacauu

SEQ ID NO: 580044 - RNA, 19 nt, Homo sapiens
  misc_RNA (1)...(19): siRNA sense strand
uugcaaagcugcucuauga

SEQ ID NO: 580045 - RNA, 19 nt, Homo sapiens
  misc_RNA (1)...(19): siRNA sense strand
cuaacuaugucgacacuua

SEQ ID NO: 580046 - RNA, 19 nt, Homo sapiens
  misc_RNA (1)...(19): siRNA sense strand
ggaacuacuuucuuaauag

SEQ ID NO: 580047 - RNA, 19 nt, Homo sapiens
  misc_RNA (1)...(19): siRNA sense strand
ggagaaauaucuuaugcau

SEQ ID NO: 580048 - RNA, 19 nt, Homo sapiens
  misc_RNA (1)...(19): siRNA sense strand
ggacaaaugaguucaaguu

SEQ ID NO: 580049 - RNA, 19 nt, Homo sapiens
  misc_RNA (1)...(19): siRNA sense strand
guccugauauucuuuguuu

SEQ ID NO: 580050 - RNA, 19 nt, Homo sapiens
  misc_RNA (1)...(19): siRNA sense strand
ccaacagucuccaaaauua

SEQ ID NO: 580051 - RNA, 19 nt, Homo sapiens
  misc_RNA (1)...(19): siRNA sense strand
ggacaacggccaccuguuc

SEQ ID NO: 580052 - RNA, 19 nt, Homo sapiens
  misc_RNA (1)...(19): siRNA sense strand
ucgaauccauccagacaua

SEQ ID NO: 580053 - RNA, 19 nt, Homo sapiens
  misc_RNA (1)...(19): siRNA sense strand
gaauacaacaucaccauca

SEQ ID NO: 580054 - RNA, 19 nt, Homo sapiens
  misc_RNA (1)...(19): siRNA sense strand
gaagagcuuugaauucacu

SEQ ID NO: 580055 - RNA, 19 nt, Homo sapiens
  misc_RNA (1)...(19): siRNA sense strand
aaaggcaaguccugauauu

SEQ ID NO: 580056 - RNA, 19 nt, Homo sapiens
  misc_RNA (1)...(19): siRNA sense strand
cagucucgauggcauaaua

SEQ ID NO: 580057 - RNA, 19 nt, Homo sapiens
  misc_RNA (1)...(19): siRNA sense strand
aggaagagcuuugaauuca

SEQ ID NO: 580058 - RNA, 19 nt, Homo sapiens
  misc_RNA (1)...(19): siRNA sense strand
ugucgacacuuaucaauca

SEQ ID NO: 580059 - RNA, 19 nt, Homo sapiens
  misc_RNA (1)...(19): siRNA sense strand
gaacuaauggagaaauauc

SEQ ID NO: 580060 - RNA, 19 nt, Homo sapiens
  misc_RNA (1)...(19): siRNA sense strand
ugacaauccuccggaacua

SEQ ID NO: 580061 - RNA, 19 nt, Homo sapiens
  misc_RNA (1)...(19): siRNA sense strand
ugacaacgucccagaguuu

SEQ ID NO: 580062 - RNA, 19 nt, Homo sapiens
  misc_RNA (1)...(19): siRNA sense strand
gggccuaucuggaacuugu

SEQ ID NO: 580063 - RNA, 19 nt, Homo sapiens
  misc_RNA (1)...(19): siRNA sense strand
gcuccuuuguggccaauuu

SEQ ID NO: 580064 - RNA, 19 nt, Homo sapiens
  misc_RNA (1)...(19): siRNA sense strand
uaagacagaaacuggauuu

SEQ ID NO: 580065 - RNA, 19 nt, Homo sapiens
  misc_RNA (1)...(19): siRNA sense strand
ggauugaaguuguggacau

SEQ ID NO: 580066 - RNA, 19 nt, Homo sapiens
  misc_RNA (1)...(19): siRNA sense strand
gaaaaccgagcacaacaua

SEQ ID NO: 580067 - RNA, 19 nt, Homo sapiens
  misc_RNA (1)...(19): siRNA sense strand
uggaacuaauggagaaaua

SEQ ID NO: 580068 - RNA, 19 nt, Homo sapiens
  misc_RNA (1)...(19): siRNA sense strand
ugccagggauuuagacauu

SEQ ID NO: 580069 - RNA, 19 nt, Homo sapiens
  misc_RNA (1)...(19): siRNA sense strand
caaaugaguucaaguuccu

SEQ ID NO: 580070 - RNA, 19 nt, Homo sapiens
  misc_RNA (1)...(19): siRNA sense strand
gaaggagcgcguuccgaaa

SEQ ID NO: 580071 - RNA, 19 nt, Homo sapiens
  misc_RNA (1)...(19): siRNA sense strand
gaacugcuuuuaagacaga

SEQ ID NO: 580072 - RNA, 19 nt, Homo sapiens
  misc_RNA (1)...(19): siRNA sense strand
cacaaucagucccaauuuc

SEQ ID NO: 580073 - RNA, 19 nt, Homo sapiens
  misc_RNA (1)...(19): siRNA sense strand
gagcuuugaauucacuuaa

SEQ ID NO: 580074 - RNA, 19 nt, Homo sapiens
  misc_RNA (1)...(19): siRNA sense strand
ggaaccaacagucuccaaa

SEQ ID NO: 580075 - RNA, 19 nt, Homo sapiens
  misc_RNA (1)...(19): siRNA sense strand
ggcaaguccugauauucuu

SEQ ID NO: 580076 - RNA, 19 nt, Homo sapiens
  misc_RNA (1)...(19): siRNA sense strand
ucaggaagagcuuugaauu

SEQ ID NO: 580077 - RNA, 19 nt, Homo sapiens
  misc_RNA (1)...(19): siRNA sense strand
uccuggaacuacuuucuua

SEQ ID NO: 580078 - RNA, 19 nt, Homo sapiens
  misc_RNA (1)...(19): siRNA sense strand
gaccagauccgaauacaac

SEQ ID NO: 580079 - RNA, 19 nt, Homo sapiens
  misc_RNA (1)...(19): siRNA sense strand
gcaaguccugauauucuuu

SEQ ID NO: 580080 - RNA, 19 nt, Homo sapiens
  misc_RNA (1)...(19): siRNA sense strand
caaaggcaaguccugauau

SEQ ID NO: 580081 - RNA, 19 nt, Homo sapiens
  misc_RNA (1)...(19): siRNA sense strand
acaaaggcaaguccugaua

SEQ ID NO: 580082 - RNA, 19 nt, Homo sapiens
  misc_RNA (1)...(19): siRNA sense strand
ucaaucagaucccagaaaa

SEQ ID NO: 580083 - RNA, 19 nt, Homo sapiens
  misc_RNA (1)...(19): siRNA sense strand
ucaaguuccugaagccaau

SEQ ID NO: 580084 - RNA, 19 nt, Homo sapiens
  misc_RNA (1)...(19): siRNA sense strand
gaccggggauuuguuguua

SEQ ID NO: 580085 - RNA, 19 nt, Homo sapiens
  misc_RNA (1)...(19): siRNA sense strand
gcccaggacuuggauguag

SEQ ID NO: 580086 - RNA, 19 nt, Homo sapiens
  misc_RNA (1)...(19): siRNA sense strand
ggaacuaauggagaaauau

SEQ ID NO: 580087 - RNA, 19 nt, Homo sapiens
  misc_RNA (1)...(19): siRNA sense strand
ucucgauggcauaauauua

SEQ ID NO: 580088 - RNA, 19 nt, Homo sapiens
  misc_RNA (1)...(19): siRNA sense strand
cgaggcaaaucccaguuuc

SEQ ID NO: 580089 - RNA, 19 nt, Homo sapiens
  misc_RNA (1)...(19): siRNA sense strand
cgacacuuaucaaucagau

SEQ ID NO: 580090 - RNA, 19 nt, Homo sapiens
  misc_RNA (1)...(19): siRNA sense strand
gggccagggucguuuccaa

SEQ ID NO: 580091 - RNA, 19 nt, Homo sapiens
  misc_RNA (1)...(19): siRNA sense strand
ugucuucgcucuuccucuu

SEQ ID NO: 580092 - RNA, 19 nt, Homo sapiens
  misc_RNA (1)...(19): siRNA sense strand
gagaccagauccgaauaca

SEQ ID NO: 580093 - RNA, 19 nt, Homo sapiens
  misc_RNA (1)...(19): siRNA sense strand
gaaguuguggacaucaaug

SEQ ID NO: 580094 - RNA, 19 nt, Homo sapiens
  misc_RNA (1)...(19): siRNA sense strand
acacaaucagucccaauuu

SEQ ID NO: 580095 - RNA, 19 nt, Homo sapiens
  misc_RNA (1)...(19): siRNA sense strand
ggagauaggagaacuugcu

SEQ ID NO: 580096 - RNA, 19 nt, Homo sapiens
  misc_RNA (1)...(19): siRNA sense strand
caggaagagcuuugaauuc

SEQ ID NO: 580097 - RNA, 19 nt, Homo sapiens
  misc_RNA (1)...(19): siRNA sense strand
gcgaggagcagccugagau

SEQ ID NO: 580098 - RNA, 19 nt, Homo sapiens
  misc_RNA (1)...(19): siRNA sense strand
cagggucguuuccaaagga

SEQ ID NO: 580099 - RNA, 19 nt, Homo sapiens
  misc_RNA (1)...(19): siRNA sense strand
gauugaaguuguggacauc

SEQ ID NO: 580100 - RNA, 19 nt, Homo sapiens
  misc_RNA (1)...(19): siRNA sense strand
gcgaggcaaaucccaguuu

SEQ ID NO: 580101 - RNA, 19 nt, Homo sapiens
  misc_RNA (1)...(19): siRNA sense strand
gacaaaugaguucaaguuc

SEQ ID NO: 580102 - RNA, 19 nt, Homo sapiens
  misc_RNA (1)...(19): siRNA sense strand
ugauggauuugaaugacaa

SEQ ID NO: 580103 - RNA, 19 nt, Homo sapiens
  misc_RNA (1)...(19): siRNA sense strand
caagugauggauuugaaug

SEQ ID NO: 580104 - RNA, 19 nt, Homo sapiens
  misc_RNA (1)...(19): siRNA sense strand
uaaauauucaggcgacaga

SEQ ID NO: 580105 - RNA, 19 nt, Homo sapiens
  misc_RNA (1)...(19): siRNA sense strand
ccagacauacacaguaaau

SEQ ID NO: 580106 - RNA, 19 nt, Homo sapiens
  misc_RNA (1)...(19): siRNA sense strand
gagaacugcuuuuaagaca

SEQ ID NO: 580107 - RNA, 19 nt, Homo sapiens
  misc_RNA (1)...(19): siRNA sense strand
cgcaaaacguuucgauuaa

SEQ ID NO: 580108 - RNA, 19 nt, Homo sapiens
  misc_RNA (1)...(19): siRNA sense strand
gauccugacuccggagaca

SEQ ID NO: 580109 - RNA, 19 nt, Homo sapiens
  misc_RNA (1)...(19): siRNA sense strand
ggaagagcuuugaauucac

SEQ ID NO: 580110 - RNA, 19 nt, Homo sapiens
  misc_RNA (1)...(19): siRNA sense strand
cuugaaaccuucuguugag

SEQ ID NO: 580111 - RNA, 19 nt, Homo sapiens
  misc_RNA (1)...(19): siRNA sense strand
ucgcaaaacguuucgauua

SEQ ID NO: 580112 - RNA, 19 nt, Homo sapiens
  misc_RNA (1)...(19): siRNA sense strand
ggagcgcguuccgaaacaa

SEQ ID NO: 580113 - RNA, 19 nt, Homo sapiens
  misc_RNA (1)...(19): siRNA sense strand
cauccagacauacacagua

SEQ ID NO: 580114 - RNA, 19 nt, Homo sapiens
  misc_RNA (1)...(19): siRNA sense strand
gaaccaacagucuccaaaa

SEQ ID NO: 580115 - RNA, 19 nt, Homo sapiens
  misc_RNA (1)...(19): siRNA sense strand
ggacacccucauugcugua

SEQ ID NO: 580116 - RNA, 19 nt, Homo sapiens
  misc_RNA (1)...(19): siRNA sense strand
auccagacauacacaguaa

SEQ ID NO: 580117 - RNA, 19 nt, Homo sapiens
  misc_RNA (1)...(19): siRNA sense strand
uuccagguguuacuagaaa

SEQ ID NO: 580118 - RNA, 19 nt, Homo sapiens
  misc_RNA (1)...(19): siRNA sense strand
caaaucccaguuucaggaa

SEQ ID NO: 580119 - RNA, 19 nt, Homo sapiens
  misc_RNA (1)...(19): siRNA sense strand
guauucagcguuucagauc

SEQ ID NO: 580120 - RNA, 19 nt, Homo sapiens
  misc_RNA (1)...(19): siRNA sense strand
uaacuaugucgacacuuau

SEQ ID NO: 580121 - RNA, 19 nt, Homo sapiens
  misc_RNA (1)...(19): siRNA sense strand
gacaauccuccggaacuaa

SEQ ID NO: 580122 - RNA, 19 nt, Homo sapiens
  misc_RNA (1)...(19): siRNA sense strand
gugauggauuugaaugaca

SEQ ID NO: 580123 - RNA, 19 nt, Homo sapiens
  misc_RNA (1)...(19): siRNA sense strand
gauuuagacauuggaacua

SEQ ID NO: 580124 - RNA, 19 nt, Homo sapiens
  misc_RNA (1)...(19): siRNA sense strand
gaucccagguugccaucgu

SEQ ID NO: 580125 - RNA, 19 nt, Homo sapiens
  misc_RNA (1)...(19): siRNA sense strand
cuuuguggccaauuuguua

SEQ ID NO: 580126 - RNA, 19 nt, Homo sapiens
  misc_RNA (1)...(19): siRNA sense strand
gggagaccagauccgaaua

SEQ ID NO: 580127 - RNA, 19 nt, Homo sapiens
  misc_RNA (1)...(19): siRNA sense strand
gcaaaacguuucgauuaag

SEQ ID NO: 580128 - RNA, 19 nt, Homo sapiens
  misc_RNA (1)...(19): siRNA sense strand
ggauuuagacauuggaacu

SEQ ID NO: 580129 - RNA, 19 nt, Homo sapiens
  misc_RNA (1)...(19): siRNA sense strand
ccagggauuuagacauugg

SEQ ID NO: 580130 - RNA, 19 nt, Homo sapiens
  misc_RNA (1)...(19): siRNA sense strand
cgucagcgccacagacaga

SEQ ID NO: 580131 - RNA, 19 nt, Homo sapiens
  misc_RNA (1)...(19): siRNA sense strand
caauuuccacuuucaucuu

SEQ ID NO: 580132 - RNA, 19 nt, Homo sapiens
  misc_RNA (1)...(19): siRNA sense strand
aaaccgagcacaacauaac

SEQ ID NO: 580133 - RNA, 19 nt, Homo sapiens
  misc_RNA (1)...(19): siRNA sense strand
uggaacuugugugguauuu

SEQ ID NO: 580134 - RNA, 19 nt, Homo sapiens
  misc_RNA (1)...(19): siRNA sense strand
caaaacguuucgauuaagu

SEQ ID NO: 580135 - RNA, 19 nt, Homo sapiens
  misc_RNA (1)...(19): siRNA sense strand
ugugguauuuguccaagug

SEQ ID NO: 580136 - RNA, 19 nt, Homo sapiens
  misc_RNA (1)...(19): siRNA sense strand
aaucccaguuucaggaaga

SEQ ID NO: 580137 - RNA, 19 nt, Homo sapiens
  misc_RNA (1)...(19): siRNA sense strand
ccgacuugcucaccgucua

SEQ ID NO: 580138 - RNA, 19 nt, Homo sapiens
  misc_RNA (1)...(19): siRNA sense strand
caggcggagcuacggauua

SEQ ID NO: 580139 - RNA, 19 nt, Homo sapiens
  misc_RNA (1)...(19): siRNA sense strand
gcuggucuccgacgucaau

SEQ ID NO: 580140 - RNA, 19 nt, Homo sapiens
  misc_RNA (1)...(19): siRNA sense strand
ggccagggucguuuccaaa

SEQ ID NO: 580141 - RNA, 19 nt, Homo sapiens
  misc_RNA (1)...(19): siRNA sense strand
gcaaaucaguggcggaaag

SEQ ID NO: 580142 - RNA, 19 nt, Homo sapiens
  misc_RNA (1)...(19): siRNA sense strand
gaagaguuugugcgaauga

SEQ ID NO: 580143 - RNA, 19 nt, Homo sapiens
  misc_RNA (1)...(19): siRNA sense strand
gcagagacggcagacauga

SEQ ID NO: 580144 - RNA, 19 nt, Homo sapiens
  misc_RNA (1)...(19): siRNA sense strand
ucgaagaguuugugcgaau

SEQ ID NO: 580145 - RNA, 19 nt, Homo sapiens
  misc_RNA (1)...(19): siRNA sense strand
gggacggucuggucgacuu

SEQ ID NO: 580146 - RNA, 19 nt, Homo sapiens
  misc_RNA (1)...(19): siRNA sense strand
ccaccgagauggagcucau

SEQ ID NO: 580147 - RNA, 19 nt, Homo sapiens
  misc_RNA (1)...(19): siRNA sense strand
cgaagaguuugugcgaaug

SEQ ID NO: 580148 - RNA, 19 nt, Homo sapiens
  misc_RNA (1)...(19): siRNA sense strand
cuacaugcccaccgagaug

SEQ ID NO: 580149 - RNA, 19 nt, Homo sapiens
  misc_RNA (1)...(19): siRNA sense strand
aucgagaucucacagcaaa

SEQ ID NO: 580150 - RNA, 19 nt, Homo sapiens
  misc_RNA (1)...(19): siRNA sense strand
gaucucacagcaaaucagu

SEQ ID NO: 580151 - RNA, 19 nt, Homo sapiens
  misc_RNA (1)...(19): siRNA sense strand
cgagaucucacagcaaauc

SEQ ID NO: 580152 - RNA, 19 nt, Homo sapiens
  misc_RNA (1)...(19): siRNA sense strand
gaguuugugcgaaugaugu

SEQ ID NO: 580153 - RNA, 19 nt, Homo sapiens
  misc_RNA (1)...(19): siRNA sense strand
gcaaaucaguggcggaaag

SEQ ID NO: 580154 - RNA, 19 nt, Homo sapiens
  misc_RNA (1)...(19): siRNA sense strand
gaagaguuugugcgaauga

SEQ ID NO: 580155 - RNA, 19 nt, Homo sapiens
  misc_RNA (1)...(19): siRNA sense strand
gcagagacggcagacauga

SEQ ID NO: 580156 - RNA, 19 nt, Homo sapiens
  misc_RNA (1)...(19): siRNA sense strand
ucgaagaguuugugcgaau

SEQ ID NO: 580157 - RNA, 19 nt, Homo sapiens
  misc_RNA (1)...(19): siRNA sense strand
gggacggucuggucgacuu

SEQ ID NO: 580158 - RNA, 19 nt, Homo sapiens
  misc_RNA (1)...(19): siRNA sense strand
ccaccgagauggagcucau

SEQ ID NO: 580159 - RNA, 19 nt, Homo sapiens
  misc_RNA (1)...(19): siRNA sense strand
cgaagaguuugugcgaaug

SEQ ID NO: 580160 - RNA, 19 nt, Homo sapiens
  misc_RNA (1)...(19): siRNA sense strand
cuacaugcccaccgagaug

SEQ ID NO: 580161 - RNA, 19 nt, Homo sapiens
  misc_RNA (1)...(19): siRNA sense strand
aucgagaucucacagcaaa

SEQ ID NO: 580162 - RNA, 19 nt, Homo sapiens
  misc_RNA (1)...(19): siRNA sense strand
gaucucacagcaaaucagu

SEQ ID NO: 580163 - RNA, 19 nt, Homo sapiens
  misc_RNA (1)...(19): siRNA sense strand
cgagaucucacagcaaauc

SEQ ID NO: 580164 - RNA, 19 nt, Homo sapiens
  misc_RNA (1)...(19): siRNA sense strand
gaguuugugcgaaugaugu

SEQ ID NO: 580165 - RNA, 19 nt, Homo sapiens
  misc_RNA (1)...(19): siRNA sense strand
gaagaaccacugacugugu

SEQ ID NO: 580166 - RNA, 19 nt, Homo sapiens
  misc_RNA (1)...(19): siRNA sense strand
ccagugacccgaagaagaa

SEQ ID NO: 580167 - RNA, 19 nt, Homo sapiens
  misc_RNA (1)...(19): siRNA sense strand
cuaccaagguggccgagaa

SEQ ID NO: 580168 - RNA, 19 nt, Homo sapiens
  misc_RNA (1)...(19): siRNA sense strand
cgaagaagaagacuaccaa

SEQ ID NO: 580169 - RNA, 19 nt, Homo sapiens
  misc_RNA (1)...(19): siRNA sense strand
ggagagcgagguggaagaa

SEQ ID NO: 580170 - RNA, 19 nt, Homo sapiens
  misc_RNA (1)...(19): siRNA sense strand
gaaaggggcugcgacaaag

SEQ ID NO: 580171 - RNA, 19 nt, Homo sapiens
  misc_RNA (1)...(19): siRNA sense strand
agaagaagacuaccaaggu

SEQ ID NO: 580172 - RNA, 19 nt, Homo sapiens
  misc_RNA (1)...(19): siRNA sense strand
uggaagaaccacugacugu

SEQ ID NO: 580173 - RNA, 19 nt, Homo sapiens
  misc_RNA (1)...(19): siRNA sense strand
gggaaaagcaguucguaga

SEQ ID NO: 580174 - RNA, 19 nt, Homo sapiens
  misc_RNA (1)...(19): siRNA sense strand
gggagacgcgggaagaaag

SEQ ID NO: 580175 - RNA, 19 nt, Homo sapiens
  misc_RNA (1)...(19): siRNA sense strand
gagggagacgcgggaagaa

SEQ ID NO: 580176 - RNA, 19 nt, Homo sapiens
  misc_RNA (1)...(19): siRNA sense strand
guucagaccuuacccuuua

SEQ ID NO: 580177 - RNA, 19 nt, Homo sapiens
  misc_RNA (1)...(19): siRNA sense strand
ugacaacucuccuagcuuu

SEQ ID NO: 580178 - RNA, 19 nt, Homo sapiens
  misc_RNA (1)...(19): siRNA sense strand
gaccugccauuucagauua

SEQ ID NO: 580179 - RNA, 19 nt, Homo sapiens
  misc_RNA (1)...(19): siRNA sense strand
gcuaauccguguagaggua

SEQ ID NO: 580180 - RNA, 19 nt, Homo sapiens
  misc_RNA (1)...(19): siRNA sense strand
ggaccacccuuaucucugu

SEQ ID NO: 580181 - RNA, 19 nt, Homo sapiens
  misc_RNA (1)...(19): siRNA sense strand
ggagucacguuucuaugaa

SEQ ID NO: 580182 - RNA, 19 nt, Homo sapiens
  misc_RNA (1)...(19): siRNA sense strand
gaagugagccuugauaucu

SEQ ID NO: 580183 - RNA, 19 nt, Homo sapiens
  misc_RNA (1)...(19): siRNA sense strand
uuacacugcuuacauccua

SEQ ID NO: 580184 - RNA, 19 nt, Homo sapiens
  misc_RNA (1)...(19): siRNA sense strand
ggacucagguagaaauggu

SEQ ID NO: 580185 - RNA, 19 nt, Homo sapiens
  misc_RNA (1)...(19): siRNA sense strand
gacaucagcuggugcuuac

SEQ ID NO: 580186 - RNA, 19 nt, Homo sapiens
  misc_RNA (1)...(19): siRNA sense strand
caacuagacuauucuuuug

SEQ ID NO: 580187 - RNA, 19 nt, Homo sapiens
  misc_RNA (1)...(19): siRNA sense strand
gaggccacaucccacuaua

SEQ ID NO: 580188 - RNA, 19 nt, Homo sapiens
  misc_RNA (1)...(19): siRNA sense strand
gaccgggacucagguagaa

SEQ ID NO: 580189 - RNA, 19 nt, Homo sapiens
  misc_RNA (1)...(19): siRNA sense strand
gaggauggacggaucuuug

SEQ ID NO: 580190 - RNA, 19 nt, Homo sapiens
  misc_RNA (1)...(19): siRNA sense strand
ccaucaggcucaacauuuc

SEQ ID NO: 580191 - RNA, 19 nt, Homo sapiens
  misc_RNA (1)...(19): siRNA sense strand
ccacagugcugcugguucu

SEQ ID NO: 580192 - RNA, 19 nt, Homo sapiens
  misc_RNA (1)...(19): siRNA sense strand
ccacuucucucugaaugug

SEQ ID NO: 580193 - RNA, 19 nt, Homo sapiens
  misc_RNA (1)...(19): siRNA sense strand
ugacuucacuuuucuaaga

SEQ ID NO: 580194 - RNA, 19 nt, Homo sapiens
  misc_RNA (1)...(19): siRNA sense strand
cagcguaccuuugacuaug

SEQ ID NO: 580195 - RNA, 19 nt, Homo sapiens
  misc_RNA (1)...(19): siRNA sense strand
caagugcugugcauguugu

SEQ ID NO: 580196 - RNA, 19 nt, Homo sapiens
  misc_RNA (1)...(19): siRNA sense strand
gcaccaauacugugagcuu

SEQ ID NO: 580197 - RNA, 19 nt, Homo sapiens
  misc_RNA (1)...(19): siRNA sense strand
ggagggccacugugugauu

SEQ ID NO: 580198 - RNA, 19 nt, Homo sapiens
  misc_RNA (1)...(19): siRNA sense strand
gggccuuacuggaggauga

SEQ ID NO: 580199 - RNA, 19 nt, Homo sapiens
  misc_RNA (1)...(19): siRNA sense strand
ggugaagugagccuugaua

SEQ ID NO: 580200 - RNA, 19 nt, Homo sapiens
  misc_RNA (1)...(19): siRNA sense strand
gcuuuacacugcuuacauc

SEQ ID NO: 580201 - RNA, 19 nt, Homo sapiens
  misc_RNA (1)...(19): siRNA sense strand
ccaauacugugagcuuuua

SEQ ID NO: 580202 - RNA, 19 nt, Homo sapiens
  misc_RNA (1)...(19): siRNA sense strand
cuagucaccuucaccuuuc

SEQ ID NO: 580203 - RNA, 19 nt, Homo sapiens
  misc_RNA (1)...(19): siRNA sense strand
ugaggacccugaggaaaug

SEQ ID NO: 580204 - RNA, 19 nt, Homo sapiens
  misc_RNA (1)...(19): siRNA sense strand
gcacuguggcugccucaga

SEQ ID NO: 580205 - RNA, 19 nt, Homo sapiens
  misc_RNA (1)...(19): siRNA sense strand
acaaacaucucaccaucag

SEQ ID NO: 580206 - RNA, 19 nt, Homo sapiens
  misc_RNA (1)...(19): siRNA sense strand
gaauguugcucaggaucug

SEQ ID NO: 580207 - RNA, 19 nt, Homo sapiens
  misc_RNA (1)...(19): siRNA sense strand
ggcaagugcugugcauguu

SEQ ID NO: 580208 - RNA, 19 nt, Homo sapiens
  misc_RNA (1)...(19): siRNA sense strand
gaaccucuuuggccuagac

SEQ ID NO: 580209 - RNA, 19 nt, Homo sapiens
  misc_RNA (1)...(19): siRNA sense strand
ccagugacuuccucauaca

SEQ ID NO: 580210 - RNA, 19 nt, Homo sapiens
  misc_RNA (1)...(19): siRNA sense strand
gcccaaauccagugacuuc

SEQ ID NO: 580211 - RNA, 19 nt, Homo sapiens
  misc_RNA (1)...(19): siRNA sense strand
guagugggguuguuuaaug

SEQ ID NO: 580212 - RNA, 19 nt, Homo sapiens
  misc_RNA (1)...(19): siRNA sense strand
caccaauacugugagcuuu

SEQ ID NO: 580213 - RNA, 19 nt, Homo sapiens
  misc_RNA (1)...(19): siRNA sense strand
gcaagugcugugcauguug

SEQ ID NO: 580214 - RNA, 19 nt, Homo sapiens
  misc_RNA (1)...(19): siRNA sense strand
ugucugggcagcuucguua

SEQ ID NO: 580215 - RNA, 19 nt, Homo sapiens
  misc_RNA (1)...(19): siRNA sense strand
ggaugaggacccugaggaa

SEQ ID NO: 580216 - RNA, 19 nt, Homo sapiens
  misc_RNA (1)...(19): siRNA sense strand
gaaccacuacucgcugcua

SEQ ID NO: 580217 - RNA, 19 nt, Homo sapiens
  misc_RNA (1)...(19): siRNA sense strand
ccuagucaccuucaccuuu

SEQ ID NO: 580218 - RNA, 19 nt, Homo sapiens
  misc_RNA (1)...(19): siRNA sense strand
gaugaggacccugaggaaa

SEQ ID NO: 580219 - RNA, 19 nt, Homo sapiens
  misc_RNA (1)...(19): siRNA sense strand
agacaucagcuggugcuua

SEQ ID NO: 580220 - RNA, 19 nt, Homo sapiens
  misc_RNA (1)...(19): siRNA sense strand
ggacggcacgcucaaguac

SEQ ID NO: 580221 - RNA, 19 nt, Homo sapiens
  misc_RNA (1)...(19): siRNA sense strand
cugaggaaaugcccaaauc

SEQ ID NO: 580222 - RNA, 19 nt, Homo sapiens
  misc_RNA (1)...(19): siRNA sense strand
gcacaccagugggcacagu

SEQ ID NO: 580223 - RNA, 19 nt, Homo sapiens
  misc_RNA (1)...(19): siRNA sense strand
gaugugggcaccaauacug

SEQ ID NO: 580224 - RNA, 19 nt, Homo sapiens
  misc_RNA (1)...(19): siRNA sense strand
gcuucaaccagcagcuuua

SEQ ID NO: 580225 - RNA, 19 nt, Homo sapiens
  misc_RNA (1)...(19): siRNA sense strand
caccuucccuacacaaaca

SEQ ID NO: 580226 - RNA, 19 nt, Homo sapiens
  misc_RNA (1)...(19): siRNA sense strand
ggaucucaaugacaacucu

SEQ ID NO: 580227 - RNA, 19 nt, Homo sapiens
  misc_RNA (1)...(19): siRNA sense strand
gagggccacugugugauuc

SEQ ID NO: 580228 - RNA, 19 nt, Homo sapiens
  misc_RNA (1)...(19): siRNA sense strand
ggaggccacaucccacuau

SEQ ID NO: 580229 - RNA, 19 nt, Homo sapiens
  misc_RNA (1)...(19): siRNA sense strand
aacagccacuucucucuga

SEQ ID NO: 580230 - RNA, 19 nt, Homo sapiens
  misc_RNA (1)...(19): siRNA sense strand
ccacaucccacuauaucau

SEQ ID NO: 580231 - RNA, 19 nt, Homo sapiens
  misc_RNA (1)...(19): siRNA sense strand
ggccacaucccacuauauc

SEQ ID NO: 580232 - RNA, 19 nt, Homo sapiens
  misc_RNA (1)...(19): siRNA sense strand
ccaacuagacuauucuuuu

SEQ ID NO: 580233 - RNA, 19 nt, Homo sapiens
  misc_RNA (1)...(19): siRNA sense strand
gaggagaaugggcgcuauu

SEQ ID NO: 580234 - RNA, 19 nt, Homo sapiens
  misc_RNA (1)...(19): siRNA sense strand
ggacuguuccucgugucua

SEQ ID NO: 580235 - RNA, 19 nt, Homo sapiens
  misc_RNA (1)...(19): siRNA sense strand
cucaggaucugggcuuaaa

SEQ ID NO: 580236 - RNA, 19 nt, Homo sapiens
  misc_RNA (1)...(19): siRNA sense strand
gaggaaaugcccaaaucca

SEQ ID NO: 580237 - RNA, 19 nt, Homo sapiens
  misc_RNA (1)...(19): siRNA sense strand
cgccucaccuacuccauug

SEQ ID NO: 580238 - RNA, 19 nt, Homo sapiens
  misc_RNA (1)...(19): siRNA sense strand
ugaggagucacguuucuau

SEQ ID NO: 580239 - RNA, 19 nt, Homo sapiens
  misc_RNA (1)...(19): siRNA sense strand
uaccuuugacuaugaauug

SEQ ID NO: 580240 - RNA, 19 nt, Homo sapiens
  misc_RNA (1)...(19): siRNA sense strand
gaccgucagucucuuaucc

SEQ ID NO: 580241 - RNA, 19 nt, Homo sapiens
  misc_RNA (1)...(19): siRNA sense strand
aaugacaacucuccuagcu

SEQ ID NO: 580242 - RNA, 19 nt, Homo sapiens
  misc_RNA (1)...(19): siRNA sense strand
gcucuccuacucacuguug

SEQ ID NO: 580243 - RNA, 19 nt, Homo sapiens
  misc_RNA (1)...(19): siRNA sense strand
ggaauguugcucaggaucu

SEQ ID NO: 580244 - RNA, 19 nt, Homo sapiens
  misc_RNA (1)...(19): siRNA sense strand
aaccacuacucgcugcuaa

SEQ ID NO: 580245 - RNA, 19 nt, Homo sapiens
  misc_RNA (1)...(19): siRNA sense strand
agguagaaauggugaagug

SEQ ID NO: 580246 - RNA, 19 nt, Homo sapiens
  misc_RNA (1)...(19): siRNA sense strand
gcagugcggaaccucuuug

SEQ ID NO: 580247 - RNA, 19 nt, Homo sapiens
  misc_RNA (1)...(19): siRNA sense strand
gcuccaaccuuccaauccu

SEQ ID NO: 580248 - RNA, 19 nt, Homo sapiens
  misc_RNA (1)...(19): siRNA sense strand
ccucaccuacuccauugua

SEQ ID NO: 580249 - RNA, 19 nt, Homo sapiens
  misc_RNA (1)...(19): siRNA sense strand
caccuucaccuuucuguca

SEQ ID NO: 580250 - RNA, 19 nt, Homo sapiens
  misc_RNA (1)...(19): siRNA sense strand
gcauguguuuguccuagac

SEQ ID NO: 580251 - RNA, 19 nt, Homo sapiens
  misc_RNA (1)...(19): siRNA sense strand
gcguaccuuugacuaugaa

SEQ ID NO: 580252 - RNA, 19 nt, Homo sapiens
  misc_RNA (1)...(19): siRNA sense strand
aggagucacguuucuauga

SEQ ID NO: 580253 - RNA, 19 nt, Homo sapiens
  misc_RNA (1)...(19): siRNA sense strand
caggaucugggcuuaaaga

SEQ ID NO: 580254 - RNA, 19 nt, Homo sapiens
  misc_RNA (1)...(19): siRNA sense strand
guccuagacgagaaugaua

SEQ ID NO: 580255 - RNA, 19 nt, Homo sapiens
  misc_RNA (1)...(19): siRNA sense strand
gugaagugagccuugauau

SEQ ID NO: 580256 - RNA, 19 nt, Homo sapiens
  misc_RNA (1)...(19): siRNA sense strand
gugaagacccuaaaagaug

SEQ ID NO: 580257 - RNA, 19 nt, Homo sapiens
  misc_RNA (1)...(19): siRNA sense strand
guaccuuugacuaugaauu

SEQ ID NO: 580258 - RNA, 19 nt, Homo sapiens
  misc_RNA (1)...(19): siRNA sense strand
ugaagugagccuugauauc

SEQ ID NO: 580259 - RNA, 19 nt, Homo sapiens
  misc_RNA (1)...(19): siRNA sense strand
cuuccaauccucaguucua

SEQ ID NO: 580260 - RNA, 19 nt, Homo sapiens
  misc_RNA (1)...(19): siRNA sense strand
ugaaugugaagacccuaaa

SEQ ID NO: 580261 - RNA, 19 nt, Homo sapiens
  misc_RNA (1)...(19): siRNA sense strand
gguagaaauggugaaguga

SEQ ID NO: 580262 - RNA, 19 nt, Homo sapiens
  misc_RNA (1)...(19): siRNA sense strand
ggagaaugggcgcuauuuu

SEQ ID NO: 580263 - RNA, 19 nt, Homo sapiens
  misc_RNA (1)...(19): siRNA sense strand
caaggugacagccguggau

SEQ ID NO: 580264 - RNA, 19 nt, Homo sapiens
  misc_RNA (1)...(19): siRNA sense strand
ugaccgagaaagccuaugu

SEQ ID NO: 580265 - RNA, 19 nt, Homo sapiens
  misc_RNA (1)...(19): siRNA sense strand
caccaucaggcucaacauu

SEQ ID NO: 580266 - RNA, 19 nt, Homo sapiens
  misc_RNA (1)...(19): siRNA sense strand
gccacugugugauucaagu

SEQ ID NO: 580267 - RNA, 19 nt, Homo sapiens
  misc_RNA (1)...(19): siRNA sense strand
gcucaggaucugggcuuaa

SEQ ID NO: 580268 - RNA, 19 nt, Homo sapiens
  misc_RNA (1)...(19): siRNA sense strand
gaggagucacguuucuaug

SEQ ID NO: 580269 - RNA, 19 nt, Homo sapiens
  misc_RNA (1)...(19): siRNA sense strand
ccggaugugggcaccaaua

SEQ ID NO: 580270 - RNA, 19 nt, Homo sapiens
  misc_RNA (1)...(19): siRNA sense strand
uccagugacuuccucauac

SEQ ID NO: 580271 - RNA, 19 nt, Homo sapiens
  misc_RNA (1)...(19): siRNA sense strand
acuaugaauugcugcagau

SEQ ID NO: 580272 - RNA, 19 nt, Homo sapiens
  misc_RNA (1)...(19): siRNA sense strand
ccuccuccuuuguguaugu

SEQ ID NO: 580273 - RNA, 19 nt, Homo sapiens
  misc_RNA (1)...(19): siRNA sense strand
cacuguggcugccucagau

SEQ ID NO: 580274 - RNA, 19 nt, Homo sapiens
  misc_RNA (1)...(19): siRNA sense strand
ggagcuaauccguguagag

SEQ ID NO: 580275 - RNA, 19 nt, Homo sapiens
  misc_RNA (1)...(19): siRNA sense strand
ucaucgugcuggacaucaa

SEQ ID NO: 580276 - RNA, 19 nt, Homo sapiens
  misc_RNA (1)...(19): siRNA sense strand
guucagaccuuacccuuua

SEQ ID NO: 580277 - RNA, 19 nt, Homo sapiens
  misc_RNA (1)...(19): siRNA sense strand
ugacaacucuccuagcuuu

SEQ ID NO: 580278 - RNA, 19 nt, Homo sapiens
  misc_RNA (1)...(19): siRNA sense strand
gaccugccauuucagauua

SEQ ID NO: 580279 - RNA, 19 nt, Homo sapiens
  misc_RNA (1)...(19): siRNA sense strand
gcuaauccguguagaggua

SEQ ID NO: 580280 - RNA, 19 nt, Homo sapiens
  misc_RNA (1)...(19): siRNA sense strand
ggaccacccuuaucucugu

SEQ ID NO: 580281 - RNA, 19 nt, Homo sapiens
  misc_RNA (1)...(19): siRNA sense strand
ggagucacguuucuaugaa

SEQ ID NO: 580282 - RNA, 19 nt, Homo sapiens
  misc_RNA (1)...(19): siRNA sense strand
gaagugagccuugauaucu

SEQ ID NO: 580283 - RNA, 19 nt, Homo sapiens
  misc_RNA (1)...(19): siRNA sense strand
uuacacugcuuacauccua

SEQ ID NO: 580284 - RNA, 19 nt, Homo sapiens
  misc_RNA (1)...(19): siRNA sense strand
ggacucagguagaaauggu

SEQ ID NO: 580285 - RNA, 19 nt, Homo sapiens
  misc_RNA (1)...(19): siRNA sense strand
gacaucagcuggugcuuac

SEQ ID NO: 580286 - RNA, 19 nt, Homo sapiens
  misc_RNA (1)...(19): siRNA sense strand
caacuagacuauucuuuug

SEQ ID NO: 580287 - RNA, 19 nt, Homo sapiens
  misc_RNA (1)...(19): siRNA sense strand
gaggccacaucccacuaua

SEQ ID NO: 580288 - RNA, 19 nt, Homo sapiens
  misc_RNA (1)...(19): siRNA sense strand
gaccgggacucagguagaa

SEQ ID NO: 580289 - RNA, 19 nt, Homo sapiens
  misc_RNA (1)...(19): siRNA sense strand
gaggauggacggaucuuug

SEQ ID NO: 580290 - RNA, 19 nt, Homo sapiens
  misc_RNA (1)...(19): siRNA sense strand
ccaucaggcucaacauuuc

SEQ ID NO: 580291 - RNA, 19 nt, Homo sapiens
  misc_RNA (1)...(19): siRNA sense strand
ccacagugcugcugguucu

SEQ ID NO: 580292 - RNA, 19 nt, Homo sapiens
  misc_RNA (1)...(19): siRNA sense strand
ccacuucucucugaaugug

SEQ ID NO: 580293 - RNA, 19 nt, Homo sapiens
  misc_RNA (1)...(19): siRNA sense strand
ugacuucacuuuucuaaga

SEQ ID NO: 580294 - RNA, 19 nt, Homo sapiens
  misc_RNA (1)...(19): siRNA sense strand
cagcguaccuuugacuaug

SEQ ID NO: 580295 - RNA, 19 nt, Homo sapiens
  misc_RNA (1)...(19): siRNA sense strand
caagugcugugcauguugu

SEQ ID NO: 580296 - RNA, 19 nt, Homo sapiens
  misc_RNA (1)...(19): siRNA sense strand
gcaccaauacugugagcuu

SEQ ID NO: 580297 - RNA, 19 nt, Homo sapiens
  misc_RNA (1)...(19): siRNA sense strand
ggagggccacugugugauu

SEQ ID NO: 580298 - RNA, 19 nt, Homo sapiens
  misc_RNA (1)...(19): siRNA sense strand
gggccuuacuggaggauga

SEQ ID NO: 580299 - RNA, 19 nt, Homo sapiens
  misc_RNA (1)...(19): siRNA sense strand
ggugaagugagccuugaua

SEQ ID NO: 580300 - RNA, 19 nt, Homo sapiens
  misc_RNA (1)...(19): siRNA sense strand
gcuuuacacugcuuacauc

SEQ ID NO: 580301 - RNA, 19 nt, Homo sapiens
  misc_RNA (1)...(19): siRNA sense strand
ccaauacugugagcuuuua

SEQ ID NO: 580302 - RNA, 19 nt, Homo sapiens
  misc_RNA (1)...(19): siRNA sense strand
cuagucaccuucaccuuuc

SEQ ID NO: 580303 - RNA, 19 nt, Homo sapiens
  misc_RNA (1)...(19): siRNA sense strand
ugaggacccugaggaaaug

SEQ ID NO: 580304 - RNA, 19 nt, Homo sapiens
  misc_RNA (1)...(19): siRNA sense strand
gcacuguggcugccucaga

SEQ ID NO: 580305 - RNA, 19 nt, Homo sapiens
  misc_RNA (1)...(19): siRNA sense strand
acaaacaucucaccaucag

SEQ ID NO: 580306 - RNA, 19 nt, Homo sapiens
  misc_RNA (1)...(19): siRNA sense strand
gaauguugcucaggaucug

SEQ ID NO: 580307 - RNA, 19 nt, Homo sapiens
  misc_RNA (1)...(19): siRNA sense strand
ggcaagugcugugcauguu

SEQ ID NO: 580308 - RNA, 19 nt, Homo sapiens
  misc_RNA (1)...(19): siRNA sense strand
gaaccucuuuggccuagac

SEQ ID NO: 580309 - RNA, 19 nt, Homo sapiens
  misc_RNA (1)...(19): siRNA sense strand
ccagugacuuccucauaca

SEQ ID NO: 580310 - RNA, 19 nt, Homo sapiens
  misc_RNA (1)...(19): siRNA sense strand
gcccaaauccagugacuuc

SEQ ID NO: 580311 - RNA, 19 nt, Homo sapiens
  misc_RNA (1)...(19): siRNA sense strand
guagugggguuguuuaaug

SEQ ID NO: 580312 - RNA, 19 nt, Homo sapiens
  misc_RNA (1)...(19): siRNA sense strand
caccaauacugugagcuuu

SEQ ID NO: 580313 - RNA, 19 nt, Homo sapiens
  misc_RNA (1)...(19): siRNA sense strand
gcaagugcugugcauguug

SEQ ID NO: 580314 - RNA, 19 nt, Homo sapiens
  misc_RNA (1)...(19): siRNA sense strand
ugucugggcagcuucguua

SEQ ID NO: 580315 - RNA, 19 nt, Homo sapiens
  misc_RNA (1)...(19): siRNA sense strand
ggaugaggacccugaggaa

SEQ ID NO: 580316 - RNA, 19 nt, Homo sapiens
  misc_RNA (1)...(19): siRNA sense strand
gaaccacuacucgcugcua

SEQ ID NO: 580317 - RNA, 19 nt, Homo sapiens
  misc_RNA (1)...(19): siRNA sense strand
ccuagucaccuucaccuuu

SEQ ID NO: 580318 - RNA, 19 nt, Homo sapiens
  misc_RNA (1)...(19): siRNA sense strand
gaugaggacccugaggaaa

SEQ ID NO: 580319 - RNA, 19 nt, Homo sapiens
  misc_RNA (1)...(19): siRNA sense strand
agacaucagcuggugcuua

SEQ ID NO: 580320 - RNA, 19 nt, Homo sapiens
  misc_RNA (1)...(19): siRNA sense strand
ggacggcacgcucaaguac

SEQ ID NO: 580321 - RNA, 19 nt, Homo sapiens
  misc_RNA (1)...(19): siRNA sense strand
cugaggaaaugcccaaauc

SEQ ID NO: 580322 - RNA, 19 nt, Homo sapiens
  misc_RNA (1)...(19): siRNA sense strand
gcacaccagugggcacagu

SEQ ID NO: 580323 - RNA, 19 nt, Homo sapiens
  misc_RNA (1)...(19): siRNA sense strand
gaugugggcaccaauacug

SEQ ID NO: 580324 - RNA, 19 nt, Homo sapiens
  misc_RNA (1)...(19): siRNA sense strand
gcuucaaccagcagcuuua

SEQ ID NO: 580325 - RNA, 19 nt, Homo sapiens
  misc_RNA (1)...(19): siRNA sense strand
caccuucccuacacaaaca

SEQ ID NO: 580326 - RNA, 19 nt, Homo sapiens
  misc_RNA (1)...(19): siRNA sense strand
ggaucucaaugacaacucu

SEQ ID NO: 580327 - RNA, 19 nt, Homo sapiens
  misc_RNA (1)...(19): siRNA sense strand
gagggccacugugugauuc

SEQ ID NO: 580328 - RNA, 19 nt, Homo sapiens
  misc_RNA (1)...(19): siRNA sense strand
ggaggccacaucccacuau

SEQ ID NO: 580329 - RNA, 19 nt, Homo sapiens
  misc_RNA (1)...(19): siRNA sense strand
aacagccacuucucucuga

SEQ ID NO: 580330 - RNA, 19 nt, Homo sapiens
  misc_RNA (1)...(19): siRNA sense strand
ccacaucccacuauaucau

SEQ ID NO: 580331 - RNA, 19 nt, Homo sapiens
  misc_RNA (1)...(19): siRNA sense strand
ggccacaucccacuauauc

SEQ ID NO: 580332 - RNA, 19 nt, Homo sapiens
  misc_RNA (1)...(19): siRNA sense strand
ccaacuagacuauucuuuu

SEQ ID NO: 580333 - RNA, 19 nt, Homo sapiens
  misc_RNA (1)...(19): siRNA sense strand
gaggagaaugggcgcuauu

SEQ ID NO: 580334 - RNA, 19 nt, Homo sapiens
  misc_RNA (1)...(19): siRNA sense strand
ggacuguuccucgugucua

SEQ ID NO: 580335 - RNA, 19 nt, Homo sapiens
  misc_RNA (1)...(19): siRNA sense strand
cucaggaucugggcuuaaa

SEQ ID NO: 580336 - RNA, 19 nt, Homo sapiens
  misc_RNA (1)...(19): siRNA sense strand
gaggaaaugcccaaaucca

SEQ ID NO: 580337 - RNA, 19 nt, Homo sapiens
  misc_RNA (1)...(19): siRNA sense strand
cgccucaccuacuccauug

SEQ ID NO: 580338 - RNA, 19 nt, Homo sapiens
  misc_RNA (1)...(19): siRNA sense strand
ugaggagucacguuucuau

SEQ ID NO: 580339 - RNA, 19 nt, Homo sapiens
  misc_RNA (1)...(19): siRNA sense strand
uaccuuugacuaugaauug

SEQ ID NO: 580340 - RNA, 19 nt, Homo sapiens
  misc_RNA (1)...(19): siRNA sense strand
gaccgucagucucuuaucc

SEQ ID NO: 580341 - RNA, 19 nt, Homo sapiens
  misc_RNA (1)...(19): siRNA sense strand
aaugacaacucuccuagcu

SEQ ID NO: 580342 - RNA, 19 nt, Homo sapiens
  misc_RNA (1)...(19): siRNA sense strand
gcucuccuacucacuguug

SEQ ID NO: 580343 - RNA, 19 nt, Homo sapiens
  misc_RNA (1)...(19): siRNA sense strand
ggaauguugcucaggaucu

SEQ ID NO: 580344 - RNA, 19 nt, Homo sapiens
  misc_RNA (1)...(19): siRNA sense strand
aaccacuacucgcugcuaa

SEQ ID NO: 580345 - RNA, 19 nt, Homo sapiens
  misc_RNA (1)...(19): siRNA sense strand
agguagaaauggugaagug

SEQ ID NO: 580346 - RNA, 19 nt, Homo sapiens
  misc_RNA (1)...(19): siRNA sense strand
gcagugcggaaccucuuug

SEQ ID NO: 580347 - RNA, 19 nt, Homo sapiens
  misc_RNA (1)...(19): siRNA sense strand
gcuccaaccuuccaauccu

SEQ ID NO: 580348 - RNA, 19 nt, Homo sapiens
  misc_RNA (1)...(19): siRNA sense strand
ccucaccuacuccauugua

SEQ ID NO: 580349 - RNA, 19 nt, Homo sapiens
  misc_RNA (1)...(19): siRNA sense strand
caccuucaccuuucuguca

SEQ ID NO: 580350 - RNA, 19 nt, Homo sapiens
  misc_RNA (1)...(19): siRNA sense strand
gcauguguuuguccuagac

SEQ ID NO: 580351 - RNA, 19 nt, Homo sapiens
  misc_RNA (1)...(19): siRNA sense strand
gcguaccuuugacuaugaa

SEQ ID NO: 580352 - RNA, 19 nt, Homo sapiens
  misc_RNA (1)...(19): siRNA sense strand
aggagucacguuucuauga

SEQ ID NO: 580353 - RNA, 19 nt, Homo sapiens
  misc_RNA (1)...(19): siRNA sense strand
caggaucugggcuuaaaga

SEQ ID NO: 580354 - RNA, 19 nt, Homo sapiens
  misc_RNA (1)...(19): siRNA sense strand
guccuagacgagaaugaua

SEQ ID NO: 580355 - RNA, 19 nt, Homo sapiens
  misc_RNA (1)...(19): siRNA sense strand
gugaagugagccuugauau

SEQ ID NO: 580356 - RNA, 19 nt, Homo sapiens
  misc_RNA (1)...(19): siRNA sense strand
gugaagacccuaaaagaug

SEQ ID NO: 580357 - RNA, 19 nt, Homo sapiens
  misc_RNA (1)...(19): siRNA sense strand
guaccuuugacuaugaauu

SEQ ID NO: 580358 - RNA, 19 nt, Homo sapiens
  misc_RNA (1)...(19): siRNA sense strand
ugaagugagccuugauauc

SEQ ID NO: 580359 - RNA, 19 nt, Homo sapiens
  misc_RNA (1)...(19): siRNA sense strand
cuuccaauccucaguucua

SEQ ID NO: 580360 - RNA, 19 nt, Homo sapiens
  misc_RNA (1)...(19): siRNA sense strand
ugaaugugaagacccuaaa

SEQ ID NO: 580361 - RNA, 19 nt, Homo sapiens
  misc_RNA (1)...(19): siRNA sense strand
gguagaaauggugaaguga

SEQ ID NO: 580362 - RNA, 19 nt, Homo sapiens
  misc_RNA (1)...(19): siRNA sense strand
ggagaaugggcgcuauuuu

SEQ ID NO: 580363 - RNA, 19 nt, Homo sapiens
  misc_RNA (1)...(19): siRNA sense strand
caaggugacagccguggau

SEQ ID NO: 580364 - RNA, 19 nt, Homo sapiens
  misc_RNA (1)...(19): siRNA sense strand
ugaccgagaaagccuaugu

SEQ ID NO: 580365 - RNA, 19 nt, Homo sapiens
  misc_RNA (1)...(19): siRNA sense strand
caccaucaggcucaacauu

SEQ ID NO: 580366 - RNA, 19 nt, Homo sapiens
  misc_RNA (1)...(19): siRNA sense strand
gccacugugugauucaagu

SEQ ID NO: 580367 - RNA, 19 nt, Homo sapiens
  misc_RNA (1)...(19): siRNA sense strand
gcucaggaucugggcuuaa

SEQ ID NO: 580368 - RNA, 19 nt, Homo sapiens
  misc_RNA (1)...(19): siRNA sense strand
gaggagucacguuucuaug

SEQ ID NO: 580369 - RNA, 19 nt, Homo sapiens
  misc_RNA (1)...(19): siRNA sense strand
ccggaugugggcaccaaua

SEQ ID NO: 580370 - RNA, 19 nt, Homo sapiens
  misc_RNA (1)...(19): siRNA sense strand
uccagugacuuccucauac

SEQ ID NO: 580371 - RNA, 19 nt, Homo sapiens
  misc_RNA (1)...(19): siRNA sense strand
acuaugaauugcugcagau

SEQ ID NO: 580372 - RNA, 19 nt, Homo sapiens
  misc_RNA (1)...(19): siRNA sense strand
ccuccuccuuuguguaugu

SEQ ID NO: 580373 - RNA, 19 nt, Homo sapiens
  misc_RNA (1)...(19): siRNA sense strand
cacuguggcugccucagau

SEQ ID NO: 580374 - RNA, 19 nt, Homo sapiens
  misc_RNA (1)...(19): siRNA sense strand
ggagcuaauccguguagag

SEQ ID NO: 580375 - RNA, 19 nt, Homo sapiens
  misc_RNA (1)...(19): siRNA sense strand
ucaucgugcuggacaucaa

SEQ ID NO: 580376 - RNA, 19 nt, Homo sapiens
  misc_RNA (1)...(19): siRNA sense strand
gaaugucgcucaagauuuc

SEQ ID NO: 580377 - RNA, 19 nt, Homo sapiens
  misc_RNA (1)...(19): siRNA sense strand
ggaagacacucauccaguu

SEQ ID NO: 580378 - RNA, 19 nt, Homo sapiens
  misc_RNA (1)...(19): siRNA sense strand
gugagaagcuggacagaaa

SEQ ID NO: 580379 - RNA, 19 nt, Homo sapiens
  misc_RNA (1)...(19): siRNA sense strand
ugaaugcgcuuaucuccua

SEQ ID NO: 580380 - RNA, 19 nt, Homo sapiens
  misc_RNA (1)...(19): siRNA sense strand
gagcuccaaugaacacuuu

SEQ ID NO: 580381 - RNA, 19 nt, Homo sapiens
  misc_RNA (1)...(19): siRNA sense strand
uguaacaguucgucuauuu

SEQ ID NO: 580382 - RNA, 19 nt, Homo sapiens
  misc_RNA (1)...(19): siRNA sense strand
ggacuuggauucagguuac

SEQ ID NO: 580383 - RNA, 19 nt, Homo sapiens
  misc_RNA (1)...(19): siRNA sense strand
cacagaagcuggucauugu

SEQ ID NO: 580384 - RNA, 19 nt, Homo sapiens
  misc_RNA (1)...(19): siRNA sense strand
gaucguagaugugaaugau

SEQ ID NO: 580385 - RNA, 19 nt, Homo sapiens
  misc_RNA (1)...(19): siRNA sense strand
gcacugugguggcacuuau

SEQ ID NO: 580386 - RNA, 19 nt, Homo sapiens
  misc_RNA (1)...(19): siRNA sense strand
caagauuuccugcuggaua

SEQ ID NO: 580387 - RNA, 19 nt, Homo sapiens
  misc_RNA (1)...(19): siRNA sense strand
gcccaggaaucgagaugua

SEQ ID NO: 580388 - RNA, 19 nt, Homo sapiens
  misc_RNA (1)...(19): siRNA sense strand
gaugugagccuccgcauuc

SEQ ID NO: 580389 - RNA, 19 nt, Homo sapiens
  misc_RNA (1)...(19): siRNA sense strand
gagagaagcaaucggacua

SEQ ID NO: 580390 - RNA, 19 nt, Homo sapiens
  misc_RNA (1)...(19): siRNA sense strand
cagaugacccuaucaaguu

SEQ ID NO: 580391 - RNA, 19 nt, Homo sapiens
  misc_RNA (1)...(19): siRNA sense strand
ggaaugucgcucaagauuu

SEQ ID NO: 580392 - RNA, 19 nt, Homo sapiens
  misc_RNA (1)...(19): siRNA sense strand
ccucugaucuucucuaugg

SEQ ID NO: 580393 - RNA, 19 nt, Homo sapiens
  misc_RNA (1)...(19): siRNA sense strand
cagcuggacuuggaaauug

SEQ ID NO: 580394 - RNA, 19 nt, Homo sapiens
  misc_RNA (1)...(19): siRNA sense strand
ggagaagccuuuggaucga

SEQ ID NO: 580395 - RNA, 19 nt, Homo sapiens
  misc_RNA (1)...(19): siRNA sense strand
ccaaugggauccuccgaau

SEQ ID NO: 580396 - RNA, 19 nt, Homo sapiens
  misc_RNA (1)...(19): siRNA sense strand
gaggucacaugagguguuu

SEQ ID NO: 580397 - RNA, 19 nt, Homo sapiens
  misc_RNA (1)...(19): siRNA sense strand
gagugagaauuacuaugaa

SEQ ID NO: 580398 - RNA, 19 nt, Homo sapiens
  misc_RNA (1)...(19): siRNA sense strand
gggaaugucgcucaagauu

SEQ ID NO: 580399 - RNA, 19 nt, Homo sapiens
  misc_RNA (1)...(19): siRNA sense strand
guagagaucguagauguga

SEQ ID NO: 580400 - RNA, 19 nt, Homo sapiens
  misc_RNA (1)...(19): siRNA sense strand
gagcagagguagagaucgu

SEQ ID NO: 580401 - RNA, 19 nt, Homo sapiens
  misc_RNA (1)...(19): siRNA sense strand
gcuauaggcugagcuccaa

SEQ ID NO: 580402 - RNA, 19 nt, Homo sapiens
  misc_RNA (1)...(19): siRNA sense strand
agagugagaauuacuauga

SEQ ID NO: 580403 - RNA, 19 nt, Homo sapiens
  misc_RNA (1)...(19): siRNA sense strand
ccaccuggguuacguuugu

SEQ ID NO: 580404 - RNA, 19 nt, Homo sapiens
  misc_RNA (1)...(19): siRNA sense strand
gaagacacucauccaguug

SEQ ID NO: 580405 - RNA, 19 nt, Homo sapiens
  misc_RNA (1)...(19): siRNA sense strand
uguaucagcuuccucuuuc

SEQ ID NO: 580406 - RNA, 19 nt, Homo sapiens
  misc_RNA (1)...(19): siRNA sense strand
ccgcauuccugaccacuug

SEQ ID NO: 580407 - RNA, 19 nt, Homo sapiens
  misc_RNA (1)...(19): siRNA sense strand
gguaaaggauagugguagu

SEQ ID NO: 580408 - RNA, 19 nt, Homo sapiens
  misc_RNA (1)...(19): siRNA sense strand
ccacagaagcuggucauug

SEQ ID NO: 580409 - RNA, 19 nt, Homo sapiens
  misc_RNA (1)...(19): siRNA sense strand
agaugacccuaucaaguuu

SEQ ID NO: 580410 - RNA, 19 nt, Homo sapiens
  misc_RNA (1)...(19): siRNA sense strand
gaauccagcuagggucaga

SEQ ID NO: 580411 - RNA, 19 nt, Homo sapiens
  misc_RNA (1)...(19): siRNA sense strand
cuacaggauuaguguguug

SEQ ID NO: 580412 - RNA, 19 nt, Homo sapiens
  misc_RNA (1)...(19): siRNA sense strand
cccagacacugcaguuuga

SEQ ID NO: 580413 - RNA, 19 nt, Homo sapiens
  misc_RNA (1)...(19): siRNA sense strand
gaagcuggucauuguggua

SEQ ID NO: 580414 - RNA, 19 nt, Homo sapiens
  misc_RNA (1)...(19): siRNA sense strand
uagggaaugucgcucaaga

SEQ ID NO: 580415 - RNA, 19 nt, Homo sapiens
  misc_RNA (1)...(19): siRNA sense strand
uaacaguucgucuauuugu

SEQ ID NO: 580416 - RNA, 19 nt, Homo sapiens
  misc_RNA (1)...(19): siRNA sense strand
ccugaccacuugccauuug

SEQ ID NO: 580417 - RNA, 19 nt, Homo sapiens
  misc_RNA (1)...(19): siRNA sense strand
gcagcuggacuuggaaauu

SEQ ID NO: 580418 - RNA, 19 nt, Homo sapiens
  misc_RNA (1)...(19): siRNA sense strand
gugguaacgucaccuuuua

SEQ ID NO: 580419 - RNA, 19 nt, Homo sapiens
  misc_RNA (1)...(19): siRNA sense strand
gcggacggcuguuccuauc

SEQ ID NO: 580420 - RNA, 19 nt, Homo sapiens
  misc_RNA (1)...(19): siRNA sense strand
ugacugcuguggacuugga

SEQ ID NO: 580421 - RNA, 19 nt, Homo sapiens
  misc_RNA (1)...(19): siRNA sense strand
uaauccacccucuuucuuu

SEQ ID NO: 580422 - RNA, 19 nt, Homo sapiens
  misc_RNA (1)...(19): siRNA sense strand
gauaauccacccucuuucu

SEQ ID NO: 580423 - RNA, 19 nt, Homo sapiens
  misc_RNA (1)...(19): siRNA sense strand
gcugacugcugucgaugga

SEQ ID NO: 580424 - RNA, 19 nt, Homo sapiens
  misc_RNA (1)...(19): siRNA sense strand
ggauucagguuacaaugcu

SEQ ID NO: 580425 - RNA, 19 nt, Homo sapiens
  misc_RNA (1)...(19): siRNA sense strand
acuuugagagugagaauua

SEQ ID NO: 580426 - RNA, 19 nt, Homo sapiens
  misc_RNA (1)...(19): siRNA sense strand
ggagugauagcuucaugau

SEQ ID NO: 580427 - RNA, 19 nt, Homo sapiens
  misc_RNA (1)...(19): siRNA sense strand
ggugacugcuguggacuug

SEQ ID NO: 580428 - RNA, 19 nt, Homo sapiens
  misc_RNA (1)...(19): siRNA sense strand
ggccaaaucuagcuaugac

SEQ ID NO: 580429 - RNA, 19 nt, Homo sapiens
  misc_RNA (1)...(19): siRNA sense strand
ggaaaaggcucaggaugca

SEQ ID NO: 580430 - RNA, 19 nt, Homo sapiens
  misc_RNA (1)...(19): siRNA sense strand
gcugggaacccuccucuca

SEQ ID NO: 580431 - RNA, 19 nt, Homo sapiens
  misc_RNA (1)...(19): siRNA sense strand
aaaucuagcuaugacauca

SEQ ID NO: 580432 - RNA, 19 nt, Homo sapiens
  misc_RNA (1)...(19): siRNA sense strand
gaucgagaggccaaaucua

SEQ ID NO: 580433 - RNA, 19 nt, Homo sapiens
  misc_RNA (1)...(19): siRNA sense strand
uauccgugcuggacguaaa

SEQ ID NO: 580434 - RNA, 19 nt, Homo sapiens
  misc_RNA (1)...(19): siRNA sense strand
ucguagaugugaaugauca

SEQ ID NO: 580435 - RNA, 19 nt, Homo sapiens
  misc_RNA (1)...(19): siRNA sense strand
caauuugcuuugucuccuu

SEQ ID NO: 580436 - RNA, 19 nt, Homo sapiens
  misc_RNA (1)...(19): siRNA sense strand
gaggccaaaucuagcuaug

SEQ ID NO: 580437 - RNA, 19 nt, Homo sapiens
  misc_RNA (1)...(19): siRNA sense strand
gggagcaauucgauuagca

SEQ ID NO: 580438 - RNA, 19 nt, Homo sapiens
  misc_RNA (1)...(19): siRNA sense strand
aggcugagcuccaaugaac

SEQ ID NO: 580439 - RNA, 19 nt, Homo sapiens
  misc_RNA (1)...(19): siRNA sense strand
ggaccucaaugacaaugcu

SEQ ID NO: 580440 - RNA, 19 nt, Homo sapiens
  misc_RNA (1)...(19): siRNA sense strand
agguagagaucguagaugu

SEQ ID NO: 580441 - RNA, 19 nt, Homo sapiens
  misc_RNA (1)...(19): siRNA sense strand
gacccuaucaaguuuguug

SEQ ID NO: 580442 - RNA, 19 nt, Homo sapiens
  misc_RNA (1)...(19): siRNA sense strand
ucagaugacccuaucaagu

SEQ ID NO: 580443 - RNA, 19 nt, Homo sapiens
  misc_RNA (1)...(19): siRNA sense strand
guaacaguucgucuauuug

SEQ ID NO: 580444 - RNA, 19 nt, Homo sapiens
  misc_RNA (1)...(19): siRNA sense strand
gcuacaggauuaguguguu

SEQ ID NO: 580445 - RNA, 19 nt, Homo sapiens
  misc_RNA (1)...(19): siRNA sense strand
cuggagaggugaaccaaag

SEQ ID NO: 580446 - RNA, 19 nt, Homo sapiens
  misc_RNA (1)...(19): siRNA sense strand
ccagaucccagccuguuug

SEQ ID NO: 580447 - RNA, 19 nt, Homo sapiens
  misc_RNA (1)...(19): siRNA sense strand
gcuacucgauccuuugacu

SEQ ID NO: 580448 - RNA, 19 nt, Homo sapiens
  misc_RNA (1)...(19): siRNA sense strand
ucacaugagguguuuguuc

SEQ ID NO: 580449 - RNA, 19 nt, Homo sapiens
  misc_RNA (1)...(19): siRNA sense strand
uaaaugacaaugccccuua

SEQ ID NO: 580450 - RNA, 19 nt, Homo sapiens
  misc_RNA (1)...(19): siRNA sense strand
gauccagacucagggucaa

SEQ ID NO: 580451 - RNA, 19 nt, Homo sapiens
  misc_RNA (1)...(19): siRNA sense strand
cauggucacugcuucugau

SEQ ID NO: 580452 - RNA, 19 nt, Homo sapiens
  misc_RNA (1)...(19): siRNA sense strand
gagaagcuggacagaaauc

SEQ ID NO: 580453 - RNA, 19 nt, Homo sapiens
  misc_RNA (1)...(19): siRNA sense strand
ugucccagaucuucgagaa

SEQ ID NO: 580454 - RNA, 19 nt, Homo sapiens
  misc_RNA (1)...(19): siRNA sense strand
augcuuggguuuccuauca

SEQ ID NO: 580455 - RNA, 19 nt, Homo sapiens
  misc_RNA (1)...(19): siRNA sense strand
ucaagucugccuucaggaa

SEQ ID NO: 580456 - RNA, 19 nt, Homo sapiens
  misc_RNA (1)...(19): siRNA sense strand
ggugcugacugcugucgau

SEQ ID NO: 580457 - RNA, 19 nt, Homo sapiens
  misc_RNA (1)...(19): siRNA sense strand
gugccugucucaccagauc

SEQ ID NO: 580458 - RNA, 19 nt, Homo sapiens
  misc_RNA (1)...(19): siRNA sense strand
ucaugcuacucgauccuuu

SEQ ID NO: 580459 - RNA, 19 nt, Homo sapiens
  misc_RNA (1)...(19): siRNA sense strand
aauccacccucuuucuuuc

SEQ ID NO: 580460 - RNA, 19 nt, Homo sapiens
  misc_RNA (1)...(19): siRNA sense strand
ggucacugcuucugaugcu

SEQ ID NO: 580461 - RNA, 19 nt, Homo sapiens
  misc_RNA (1)...(19): siRNA sense strand
uggaucugcuggacguaaa

SEQ ID NO: 580462 - RNA, 19 nt, Homo sapiens
  misc_RNA (1)...(19): siRNA sense strand
ucccagaucuucgagaauc

SEQ ID NO: 580463 - RNA, 19 nt, Homo sapiens
  misc_RNA (1)...(19): siRNA sense strand
ggucacaugagguguuugu

SEQ ID NO: 580464 - RNA, 19 nt, Homo sapiens
  misc_RNA (1)...(19): siRNA sense strand
cucaauauuucagauguga

SEQ ID NO: 580465 - RNA, 19 nt, Homo sapiens
  misc_RNA (1)...(19): siRNA sense strand
gggaacccuccucucagua

SEQ ID NO: 580466 - RNA, 19 nt, Homo sapiens
  misc_RNA (1)...(19): siRNA sense strand
ucguggcacuacucucuaa

SEQ ID NO: 580467 - RNA, 19 nt, Homo sapiens
  misc_RNA (1)...(19): siRNA sense strand
gguaguccaccacucucua

SEQ ID NO: 580468 - RNA, 19 nt, Homo sapiens
  misc_RNA (1)...(19): siRNA sense strand
ggugagaagcuggacagaa

SEQ ID NO: 580469 - RNA, 19 nt, Homo sapiens
  misc_RNA (1)...(19): siRNA sense strand
cccuagacuuugagaguga

SEQ ID NO: 580470 - RNA, 19 nt, Homo sapiens
  misc_RNA (1)...(19): siRNA sense strand
caagcugcccacccucuga

SEQ ID NO: 580471 - RNA, 19 nt, Homo sapiens
  misc_RNA (1)...(19): siRNA sense strand
uaccucuguuacucucuua

SEQ ID NO: 580472 - RNA, 19 nt, Homo sapiens
  misc_RNA (1)...(19): siRNA sense strand
gcugaccucccaccacaga

SEQ ID NO: 580473 - RNA, 19 nt, Homo sapiens
  misc_RNA (1)...(19): siRNA sense strand
uguuugcagucucucgaua

SEQ ID NO: 580474 - RNA, 19 nt, Homo sapiens
  misc_RNA (1)...(19): siRNA sense strand
ggaacccuccucucaguac

SEQ ID NO: 580475 - RNA, 19 nt, Homo sapiens
  misc_RNA (1)...(19): siRNA sense strand
gagaggccaaaucuagcua

SEQ ID NO: 580476 - RNA, 19 nt, Homo sapiens
  misc_RNA (1)...(19): siRNA sense strand
gaaugucgcucaagauuuc

SEQ ID NO: 580477 - RNA, 19 nt, Homo sapiens
  misc_RNA (1)...(19): siRNA sense strand
ggaagacacucauccaguu

SEQ ID NO: 580478 - RNA, 19 nt, Homo sapiens
  misc_RNA (1)...(19): siRNA sense strand
gugagaagcuggacagaaa

SEQ ID NO: 580479 - RNA, 19 nt, Homo sapiens
  misc_RNA (1)...(19): siRNA sense strand
ugaaugcgcuuaucuccua

SEQ ID NO: 580480 - RNA, 19 nt, Homo sapiens
  misc_RNA (1)...(19): siRNA sense strand
gagcuccaaugaacacuuu

SEQ ID NO: 580481 - RNA, 19 nt, Homo sapiens
  misc_RNA (1)...(19): siRNA sense strand
uguaacaguucgucuauuu

SEQ ID NO: 580482 - RNA, 19 nt, Homo sapiens
  misc_RNA (1)...(19): siRNA sense strand
ggacuuggauucagguuac

SEQ ID NO: 580483 - RNA, 19 nt, Homo sapiens
  misc_RNA (1)...(19): siRNA sense strand
cacagaagcuggucauugu

SEQ ID NO: 580484 - RNA, 19 nt, Homo sapiens
  misc_RNA (1)...(19): siRNA sense strand
gaucguagaugugaaugau

SEQ ID NO: 580485 - RNA, 19 nt, Homo sapiens
  misc_RNA (1)...(19): siRNA sense strand
gcacugugguggcacuuau

SEQ ID NO: 580486 - RNA, 19 nt, Homo sapiens
  misc_RNA (1)...(19): siRNA sense strand
caagauuuccugcuggaua

SEQ ID NO: 580487 - RNA, 19 nt, Homo sapiens
  misc_RNA (1)...(19): siRNA sense strand
gcccaggaaucgagaugua

SEQ ID NO: 580488 - RNA, 19 nt, Homo sapiens
  misc_RNA (1)...(19): siRNA sense strand
gaugugagccuccgcauuc

SEQ ID NO: 580489 - RNA, 19 nt, Homo sapiens
  misc_RNA (1)...(19): siRNA sense strand
gagagaagcaaucggacua

SEQ ID NO: 580490 - RNA, 19 nt, Homo sapiens
  misc_RNA (1)...(19): siRNA sense strand
cagaugacccuaucaaguu

SEQ ID NO: 580491 - RNA, 19 nt, Homo sapiens
  misc_RNA (1)...(19): siRNA sense strand
ggaaugucgcucaagauuu

SEQ ID NO: 580492 - RNA, 19 nt, Homo sapiens
  misc_RNA (1)...(19): siRNA sense strand
ccucugaucuucucuaugg

SEQ ID NO: 580493 - RNA, 19 nt, Homo sapiens
  misc_RNA (1)...(19): siRNA sense strand
cagcuggacuuggaaauug

SEQ ID NO: 580494 - RNA, 19 nt, Homo sapiens
  misc_RNA (1)...(19): siRNA sense strand
ggagaagccuuuggaucga

SEQ ID NO: 580495 - RNA, 19 nt, Homo sapiens
  misc_RNA (1)...(19): siRNA sense strand
ccaaugggauccuccgaau

SEQ ID NO: 580496 - RNA, 19 nt, Homo sapiens
  misc_RNA (1)...(19): siRNA sense strand
gaggucacaugagguguuu

SEQ ID NO: 580497 - RNA, 19 nt, Homo sapiens
  misc_RNA (1)...(19): siRNA sense strand
gagugagaauuacuaugaa

SEQ ID NO: 580498 - RNA, 19 nt, Homo sapiens
  misc_RNA (1)...(19): siRNA sense strand
gggaaugucgcucaagauu

SEQ ID NO: 580499 - RNA, 19 nt, Homo sapiens
  misc_RNA (1)...(19): siRNA sense strand
guagagaucguagauguga

SEQ ID NO: 580500 - RNA, 19 nt, Homo sapiens
  misc_RNA (1)...(19): siRNA sense strand
gagcagagguagagaucgu

SEQ ID NO: 580501 - RNA, 19 nt, Homo sapiens
  misc_RNA (1)...(19): siRNA sense strand
gcuauaggcugagcuccaa

SEQ ID NO: 580502 - RNA, 19 nt, Homo sapiens
  misc_RNA (1)...(19): siRNA sense strand
agagugagaauuacuauga

SEQ ID NO: 580503 - RNA, 19 nt, Homo sapiens
  misc_RNA (1)...(19): siRNA sense strand
ccaccuggguuacguuugu

SEQ ID NO: 580504 - RNA, 19 nt, Homo sapiens
  misc_RNA (1)...(19): siRNA sense strand
gaagacacucauccaguug

SEQ ID NO: 580505 - RNA, 19 nt, Homo sapiens
  misc_RNA (1)...(19): siRNA sense strand
uguaucagcuuccucuuuc

SEQ ID NO: 580506 - RNA, 19 nt, Homo sapiens
  misc_RNA (1)...(19): siRNA sense strand
ccgcauuccugaccacuug

SEQ ID NO: 580507 - RNA, 19 nt, Homo sapiens
  misc_RNA (1)...(19): siRNA sense strand
gguaaaggauagugguagu

SEQ ID NO: 580508 - RNA, 19 nt, Homo sapiens
  misc_RNA (1)...(19): siRNA sense strand
ccacagaagcuggucauug

SEQ ID NO: 580509 - RNA, 19 nt, Homo sapiens
  misc_RNA (1)...(19): siRNA sense strand
agaugacccuaucaaguuu

SEQ ID NO: 580510 - RNA, 19 nt, Homo sapiens
  misc_RNA (1)...(19): siRNA sense strand
gaauccagcuagggucaga

SEQ ID NO: 580511 - RNA, 19 nt, Homo sapiens
  misc_RNA (1)...(19): siRNA sense strand
cuacaggauuaguguguug

SEQ ID NO: 580512 - RNA, 19 nt, Homo sapiens
  misc_RNA (1)...(19): siRNA sense strand
cccagacacugcaguuuga

SEQ ID NO: 580513 - RNA, 19 nt, Homo sapiens
  misc_RNA (1)...(19): siRNA sense strand
gaagcuggucauuguggua

SEQ ID NO: 580514 - RNA, 19 nt, Homo sapiens
  misc_RNA (1)...(19): siRNA sense strand
uagggaaugucgcucaaga

SEQ ID NO: 580515 - RNA, 19 nt, Homo sapiens
  misc_RNA (1)...(19): siRNA sense strand
uaacaguucgucuauuugu

SEQ ID NO: 580516 - RNA, 19 nt, Homo sapiens
  misc_RNA (1)...(19): siRNA sense strand
ccugaccacuugccauuug

SEQ ID NO: 580517 - RNA, 19 nt, Homo sapiens
  misc_RNA (1)...(19): siRNA sense strand
gcagcuggacuuggaaauu

SEQ ID NO: 580518 - RNA, 19 nt, Homo sapiens
  misc_RNA (1)...(19): siRNA sense strand
gugguaacgucaccuuuua

SEQ ID NO: 580519 - RNA, 19 nt, Homo sapiens
  misc_RNA (1)...(19): siRNA sense strand
gcggacggcuguuccuauc

SEQ ID NO: 580520 - RNA, 19 nt, Homo sapiens
  misc_RNA (1)...(19): siRNA sense strand
ugacugcuguggacuugga

SEQ ID NO: 580521 - RNA, 19 nt, Homo sapiens
  misc_RNA (1)...(19): siRNA sense strand
uaauccacccucuuucuuu

SEQ ID NO: 580522 - RNA, 19 nt, Homo sapiens
  misc_RNA (1)...(19): siRNA sense strand
gauaauccacccucuuucu

SEQ ID NO: 580523 - RNA, 19 nt, Homo sapiens
  misc_RNA (1)...(19): siRNA sense strand
gcugacugcugucgaugga

SEQ ID NO: 580524 - RNA, 19 nt, Homo sapiens
  misc_RNA (1)...(19): siRNA sense strand
ggauucagguuacaaugcu

SEQ ID NO: 580525 - RNA, 19 nt, Homo sapiens
  misc_RNA (1)...(19): siRNA sense strand
acuuugagagugagaauua

SEQ ID NO: 580526 - RNA, 19 nt, Homo sapiens
  misc_RNA (1)...(19): siRNA sense strand
ggagugauagcuucaugau

SEQ ID NO: 580527 - RNA, 19 nt, Homo sapiens
  misc_RNA (1)...(19): siRNA sense strand
ggugacugcuguggacuug

SEQ ID NO: 580528 - RNA, 19 nt, Homo sapiens
  misc_RNA (1)...(19): siRNA sense strand
ggccaaaucuagcuaugac

SEQ ID NO: 580529 - RNA, 19 nt, Homo sapiens
  misc_RNA (1)...(19): siRNA sense strand
ggaaaaggcucaggaugca

SEQ ID NO: 580530 - RNA, 19 nt, Homo sapiens
  misc_RNA (1)...(19): siRNA sense strand
gcugggaacccuccucuca

SEQ ID NO: 580531 - RNA, 19 nt, Homo sapiens
  misc_RNA (1)...(19): siRNA sense strand
aaaucuagcuaugacauca

SEQ ID NO: 580532 - RNA, 19 nt, Homo sapiens
  misc_RNA (1)...(19): siRNA sense strand
gaucgagaggccaaaucua

SEQ ID NO: 580533 - RNA, 19 nt, Homo sapiens
  misc_RNA (1)...(19): siRNA sense strand
uauccgugcuggacguaaa

SEQ ID NO: 580534 - RNA, 19 nt, Homo sapiens
  misc_RNA (1)...(19): siRNA sense strand
ucguagaugugaaugauca

SEQ ID NO: 580535 - RNA, 19 nt, Homo sapiens
  misc_RNA (1)...(19): siRNA sense strand
caauuugcuuugucuccuu

SEQ ID NO: 580536 - RNA, 19 nt, Homo sapiens
  misc_RNA (1)...(19): siRNA sense strand
gaggccaaaucuagcuaug

SEQ ID NO: 580537 - RNA, 19 nt, Homo sapiens
  misc_RNA (1)...(19): siRNA sense strand
gggagcaauucgauuagca

SEQ ID NO: 580538 - RNA, 19 nt, Homo sapiens
  misc_RNA (1)...(19): siRNA sense strand
aggcugagcuccaaugaac

SEQ ID NO: 580539 - RNA, 19 nt, Homo sapiens
  misc_RNA (1)...(19): siRNA sense strand
ggaccucaaugacaaugcu

SEQ ID NO: 580540 - RNA, 19 nt, Homo sapiens
  misc_RNA (1)...(19): siRNA sense strand
agguagagaucguagaugu

SEQ ID NO: 580541 - RNA, 19 nt, Homo sapiens
  misc_RNA (1)...(19): siRNA sense strand
gacccuaucaaguuuguug

SEQ ID NO: 580542 - RNA, 19 nt, Homo sapiens
  misc_RNA (1)...(19): siRNA sense strand
ucagaugacccuaucaagu

SEQ ID NO: 580543 - RNA, 19 nt, Homo sapiens
  misc_RNA (1)...(19): siRNA sense strand
guaacaguucgucuauuug

SEQ ID NO: 580544 - RNA, 19 nt, Homo sapiens
  misc_RNA (1)...(19): siRNA sense strand
gcuacaggauuaguguguu

SEQ ID NO: 580545 - RNA, 19 nt, Homo sapiens
  misc_RNA (1)...(19): siRNA sense strand
cuggagaggugaaccaaag

SEQ ID NO: 580546 - RNA, 19 nt, Homo sapiens
  misc_RNA (1)...(19): siRNA sense strand
ccagaucccagccuguuug

SEQ ID NO: 580547 - RNA, 19 nt, Homo sapiens
  misc_RNA (1)...(19): siRNA sense strand
gcuacucgauccuuugacu

SEQ ID NO: 580548 - RNA, 19 nt, Homo sapiens
  misc_RNA (1)...(19): siRNA sense strand
ucacaugagguguuuguuc

SEQ ID NO: 580549 - RNA, 19 nt, Homo sapiens
  misc_RNA (1)...(19): siRNA sense strand
uaaaugacaaugccccuua

SEQ ID NO: 580550 - RNA, 19 nt, Homo sapiens
  misc_RNA (1)...(19): siRNA sense strand
gauccagacucagggucaa

SEQ ID NO: 580551 - RNA, 19 nt, Homo sapiens
  misc_RNA (1)...(19): siRNA sense strand
cauggucacugcuucugau

SEQ ID NO: 580552 - RNA, 19 nt, Homo sapiens
  misc_RNA (1)...(19): siRNA sense strand
gagaagcuggacagaaauc

SEQ ID NO: 580553 - RNA, 19 nt, Homo sapiens
  misc_RNA (1)...(19): siRNA sense strand
ugucccagaucuucgagaa

SEQ ID NO: 580554 - RNA, 19 nt, Homo sapiens
  misc_RNA (1)...(19): siRNA sense strand
augcuuggguuuccuauca

SEQ ID NO: 580555 - RNA, 19 nt, Homo sapiens
  misc_RNA (1)...(19): siRNA sense strand
ucaagucugccuucaggaa

SEQ ID NO: 580556 - RNA, 19 nt, Homo sapiens
  misc_RNA (1)...(19): siRNA sense strand
ggugcugacugcugucgau

SEQ ID NO: 580557 - RNA, 19 nt, Homo sapiens
  misc_RNA (1)...(19): siRNA sense strand
gugccugucucaccagauc

SEQ ID NO: 580558 - RNA, 19 nt, Homo sapiens
  misc_RNA (1)...(19): siRNA sense strand
ucaugcuacucgauccuuu

SEQ ID NO: 580559 - RNA, 19 nt, Homo sapiens
  misc_RNA (1)...(19): siRNA sense strand
aauccacccucuuucuuuc

SEQ ID NO: 580560 - RNA, 19 nt, Homo sapiens
  misc_RNA (1)...(19): siRNA sense strand
ggucacugcuucugaugcu

SEQ ID NO: 580561 - RNA, 19 nt, Homo sapiens
  misc_RNA (1)...(19): siRNA sense strand
uggaucugcuggacguaaa

SEQ ID NO: 580562 - RNA, 19 nt, Homo sapiens
  misc_RNA (1)...(19): siRNA sense strand
ucccagaucuucgagaauc

SEQ ID NO: 580563 - RNA, 19 nt, Homo sapiens
  misc_RNA (1)...(19): siRNA sense strand
ggucacaugagguguuugu

SEQ ID NO: 580564 - RNA, 19 nt, Homo sapiens
  misc_RNA (1)...(19): siRNA sense strand
cucaauauuucagauguga

SEQ ID NO: 580565 - RNA, 19 nt, Homo sapiens
  misc_RNA (1)...(19): siRNA sense strand
gggaacccuccucucagua

SEQ ID NO: 580566 - RNA, 19 nt, Homo sapiens
  misc_RNA (1)...(19): siRNA sense strand
ucguggcacuacucucuaa

SEQ ID NO: 580567 - RNA, 19 nt, Homo sapiens
  misc_RNA (1)...(19): siRNA sense strand
gguaguccaccacucucua

SEQ ID NO: 580568 - RNA, 19 nt, Homo sapiens
  misc_RNA (1)...(19): siRNA sense strand
ggugagaagcuggacagaa

SEQ ID NO: 580569 - RNA, 19 nt, Homo sapiens
  misc_RNA (1)...(19): siRNA sense strand
cccuagacuuugagaguga

SEQ ID NO: 580570 - RNA, 19 nt, Homo sapiens
  misc_RNA (1)...(19): siRNA sense strand
caagcugcccacccucuga

SEQ ID NO: 580571 - RNA, 19 nt, Homo sapiens
  misc_RNA (1)...(19): siRNA sense strand
uaccucuguuacucucuua

SEQ ID NO: 580572 - RNA, 19 nt, Homo sapiens
  misc_RNA (1)...(19): siRNA sense strand
gcugaccucccaccacaga

SEQ ID NO: 580573 - RNA, 19 nt, Homo sapiens
  misc_RNA (1)...(19): siRNA sense strand
uguuugcagucucucgaua

SEQ ID NO: 580574 - RNA, 19 nt, Homo sapiens
  misc_RNA (1)...(19): siRNA sense strand
ggaacccuccucucaguac

SEQ ID NO: 580575 - RNA, 19 nt, Homo sapiens
  misc_RNA (1)...(19): siRNA sense strand
gagaggccaaaucuagcua

SEQ ID NO: 580576 - RNA, 19 nt, Homo sapiens
  misc_RNA (1)...(19): siRNA sense strand
gaagucagguguagcuuaa

SEQ ID NO: 580577 - RNA, 19 nt, Homo sapiens
  misc_RNA (1)...(19): siRNA sense strand
gcagagcgcucaccacuug

SEQ ID NO: 580578 - RNA, 19 nt, Homo sapiens
  misc_RNA (1)...(19): siRNA sense strand
uggcaaauauccagaauua

SEQ ID NO: 580579 - RNA, 19 nt, Homo sapiens
  misc_RNA (1)...(19): siRNA sense strand
gagcaaauaugcaaagaga

SEQ ID NO: 580580 - RNA, 19 nt, Homo sapiens
  misc_RNA (1)...(19): siRNA sense strand
ugaauucgcugagcaaaua

SEQ ID NO: 580581 - RNA, 19 nt, Homo sapiens
  misc_RNA (1)...(19): siRNA sense strand
guagagguguuccauuuaa

SEQ ID NO: 580582 - RNA, 19 nt, Homo sapiens
  misc_RNA (1)...(19): siRNA sense strand
gcacauuacugacgucaau

SEQ ID NO: 580583 - RNA, 19 nt, Homo sapiens
  misc_RNA (1)...(19): siRNA sense strand
uaacgaguauuucucauug

SEQ ID NO: 580584 - RNA, 19 nt, Homo sapiens
  misc_RNA (1)...(19): siRNA sense strand
gaauuaguauugcagaaga

SEQ ID NO: 580585 - RNA, 19 nt, Homo sapiens
  misc_RNA (1)...(19): siRNA sense strand
ucacaucuguugaucauug

SEQ ID NO: 580586 - RNA, 19 nt, Homo sapiens
  misc_RNA (1)...(19): siRNA sense strand
aagauaaccucaacaaaga

SEQ ID NO: 580587 - RNA, 19 nt, Homo sapiens
  misc_RNA (1)...(19): siRNA sense strand
gcaaauauccagaauuagu

SEQ ID NO: 580588 - RNA, 19 nt, Homo sapiens
  misc_RNA (1)...(19): siRNA sense strand
gacaacagcccagaaauaa

SEQ ID NO: 580589 - RNA, 19 nt, Homo sapiens
  misc_RNA (1)...(19): siRNA sense strand
gaucacuuauuccuucuuu

SEQ ID NO: 580590 - RNA, 19 nt, Homo sapiens
  misc_RNA (1)...(19): siRNA sense strand
gauaagaauccugguaaua

SEQ ID NO: 580591 - RNA, 19 nt, Homo sapiens
  misc_RNA (1)...(19): siRNA sense strand
gaaccucgcuaaggaucua

SEQ ID NO: 580592 - RNA, 19 nt, Homo sapiens
  misc_RNA (1)...(19): siRNA sense strand
cgacaacagcccagaaaua

SEQ ID NO: 580593 - RNA, 19 nt, Homo sapiens
  misc_RNA (1)...(19): siRNA sense strand
gcaaauaugcaaagagaga

SEQ ID NO: 580594 - RNA, 19 nt, Homo sapiens
  misc_RNA (1)...(19): siRNA sense strand
gcagaagauccugauauua

SEQ ID NO: 580595 - RNA, 19 nt, Homo sapiens
  misc_RNA (1)...(19): siRNA sense strand
uaagaauccugguaauaga

SEQ ID NO: 580596 - RNA, 19 nt, Homo sapiens
  misc_RNA (1)...(19): siRNA sense strand
gaaagacaauccugauggu

SEQ ID NO: 580597 - RNA, 19 nt, Homo sapiens
  misc_RNA (1)...(19): siRNA sense strand
acucagagaucacuuauuc

SEQ ID NO: 580598 - RNA, 19 nt, Homo sapiens
  misc_RNA (1)...(19): siRNA sense strand
gaagaugugaguugcaauu

SEQ ID NO: 580599 - RNA, 19 nt, Homo sapiens
  misc_RNA (1)...(19): siRNA sense strand
gcuagucgcuguaagagau

SEQ ID NO: 580600 - RNA, 19 nt, Homo sapiens
  misc_RNA (1)...(19): siRNA sense strand
gaauagaccgugagcaaau

SEQ ID NO: 580601 - RNA, 19 nt, Homo sapiens
  misc_RNA (1)...(19): siRNA sense strand
caagauaaccucaacaaag

SEQ ID NO: 580602 - RNA, 19 nt, Homo sapiens
  misc_RNA (1)...(19): siRNA sense strand
ggaagucagguguagcuua

SEQ ID NO: 580603 - RNA, 19 nt, Homo sapiens
  misc_RNA (1)...(19): siRNA sense strand
gagcaaauaccaacuaagu

SEQ ID NO: 580604 - RNA, 19 nt, Homo sapiens
  misc_RNA (1)...(19): siRNA sense strand
gagaagaagaugugaguug

SEQ ID NO: 580605 - RNA, 19 nt, Homo sapiens
  misc_RNA (1)...(19): siRNA sense strand
aaguagagguguuccauuu

SEQ ID NO: 580606 - RNA, 19 nt, Homo sapiens
  misc_RNA (1)...(19): siRNA sense strand
caggaaacauucuaacuca

SEQ ID NO: 580607 - RNA, 19 nt, Homo sapiens
  misc_RNA (1)...(19): siRNA sense strand
gaugugaguugcaauugga

SEQ ID NO: 580608 - RNA, 19 nt, Homo sapiens
  misc_RNA (1)...(19): siRNA sense strand
gaagauccugauauuagua

SEQ ID NO: 580609 - RNA, 19 nt, Homo sapiens
  misc_RNA (1)...(19): siRNA sense strand
ucacgucacucucugauca

SEQ ID NO: 580610 - RNA, 19 nt, Homo sapiens
  misc_RNA (1)...(19): siRNA sense strand
gguaauagaugccaaugac

SEQ ID NO: 580611 - RNA, 19 nt, Homo sapiens
  misc_RNA (1)...(19): siRNA sense strand
cagaagauccugauauuag

SEQ ID NO: 580612 - RNA, 19 nt, Homo sapiens
  misc_RNA (1)...(19): siRNA sense strand
gauaaccucaacaaagaua

SEQ ID NO: 580613 - RNA, 19 nt, Homo sapiens
  misc_RNA (1)...(19): siRNA sense strand
caacagcccagaaauaauc

SEQ ID NO: 580614 - RNA, 19 nt, Homo sapiens
  misc_RNA (1)...(19): siRNA sense strand
cgauaaacauagaagcaaa

SEQ ID NO: 580615 - RNA, 19 nt, Homo sapiens
  misc_RNA (1)...(19): siRNA sense strand
gauucuagcuauugcucua

SEQ ID NO: 580616 - RNA, 19 nt, Homo sapiens
  misc_RNA (1)...(19): siRNA sense strand
ccggaaagaugaaauaaac

SEQ ID NO: 580617 - RNA, 19 nt, Homo sapiens
  misc_RNA (1)...(19): siRNA sense strand
ugcagaagauccugauauu

SEQ ID NO: 580618 - RNA, 19 nt, Homo sapiens
  misc_RNA (1)...(19): siRNA sense strand
gguguuccauuuaagauuc

SEQ ID NO: 580619 - RNA, 19 nt, Homo sapiens
  misc_RNA (1)...(19): siRNA sense strand
cagauaagaauccugguaa

SEQ ID NO: 580620 - RNA, 19 nt, Homo sapiens
  misc_RNA (1)...(19): siRNA sense strand
guacugaccgccuuagaug

SEQ ID NO: 580621 - RNA, 19 nt, Homo sapiens
  misc_RNA (1)...(19): siRNA sense strand
gcaaagagagaagaagaug

SEQ ID NO: 580622 - RNA, 19 nt, Homo sapiens
  misc_RNA (1)...(19): siRNA sense strand
aagcgguacugcucagaua

SEQ ID NO: 580623 - RNA, 19 nt, Homo sapiens
  misc_RNA (1)...(19): siRNA sense strand
ugaagcagauaagaagauu

SEQ ID NO: 580624 - RNA, 19 nt, Homo sapiens
  misc_RNA (1)...(19): siRNA sense strand
aauagaccgugagcaaaua

SEQ ID NO: 580625 - RNA, 19 nt, Homo sapiens
  misc_RNA (1)...(19): siRNA sense strand
uguagaaguuguagacgaa

SEQ ID NO: 580626 - RNA, 19 nt, Homo sapiens
  misc_RNA (1)...(19): siRNA sense strand
gguguaaaguaauuguaga

SEQ ID NO: 580627 - RNA, 19 nt, Homo sapiens
  misc_RNA (1)...(19): siRNA sense strand
ccgaggaucucucucaaca

SEQ ID NO: 580628 - RNA, 19 nt, Homo sapiens
  misc_RNA (1)...(19): siRNA sense strand
ggagaaagacaauccugau

SEQ ID NO: 580629 - RNA, 19 nt, Homo sapiens
  misc_RNA (1)...(19): siRNA sense strand
gaaguagaaagauauacga

SEQ ID NO: 580630 - RNA, 19 nt, Homo sapiens
  misc_RNA (1)...(19): siRNA sense strand
gaucaaaugaauccagaau

SEQ ID NO: 580631 - RNA, 19 nt, Homo sapiens
  misc_RNA (1)...(19): siRNA sense strand
ccauaacccugcacauuac

SEQ ID NO: 580632 - RNA, 19 nt, Homo sapiens
  misc_RNA (1)...(19): siRNA sense strand
gagagaagaagaugugagu

SEQ ID NO: 580633 - RNA, 19 nt, Homo sapiens
  misc_RNA (1)...(19): siRNA sense strand
aagagguacugccggauuu

SEQ ID NO: 580634 - RNA, 19 nt, Homo sapiens
  misc_RNA (1)...(19): siRNA sense strand
gcaccuccauccugagagu

SEQ ID NO: 580635 - RNA, 19 nt, Homo sapiens
  misc_RNA (1)...(19): siRNA sense strand
guacugcucagauaagaau

SEQ ID NO: 580636 - RNA, 19 nt, Homo sapiens
  misc_RNA (1)...(19): siRNA sense strand
gagaaagacaauccugaug

SEQ ID NO: 580637 - RNA, 19 nt, Homo sapiens
  misc_RNA (1)...(19): siRNA sense strand
ugauugaggauguuaauga

SEQ ID NO: 580638 - RNA, 19 nt, Homo sapiens
  misc_RNA (1)...(19): siRNA sense strand
ggacgagggcaucaacuca

SEQ ID NO: 580639 - RNA, 19 nt, Homo sapiens
  misc_RNA (1)...(19): siRNA sense strand
accauaacccugcacauua

SEQ ID NO: 580640 - RNA, 19 nt, Homo sapiens
  misc_RNA (1)...(19): siRNA sense strand
gaccgaggaucucucucaa

SEQ ID NO: 580641 - RNA, 19 nt, Homo sapiens
  misc_RNA (1)...(19): siRNA sense strand
gggaacaauucuugagucu

SEQ ID NO: 580642 - RNA, 19 nt, Homo sapiens
  misc_RNA (1)...(19): siRNA sense strand
gggacuuacuugugaagga

SEQ ID NO: 580643 - RNA, 19 nt, Homo sapiens
  misc_RNA (1)...(19): siRNA sense strand
uaacucagcagccuuugga

SEQ ID NO: 580644 - RNA, 19 nt, Homo sapiens
  misc_RNA (1)...(19): siRNA sense strand
cagaauuaguauugcagaa

SEQ ID NO: 580645 - RNA, 19 nt, Homo sapiens
  misc_RNA (1)...(19): siRNA sense strand
ggcagguacuauuuccuuu

SEQ ID NO: 580646 - RNA, 19 nt, Homo sapiens
  misc_RNA (1)...(19): siRNA sense strand
ucaguucucugcuccaagu

SEQ ID NO: 580647 - RNA, 19 nt, Homo sapiens
  misc_RNA (1)...(19): siRNA sense strand
caagagguacugccggauu

SEQ ID NO: 580648 - RNA, 19 nt, Homo sapiens
  misc_RNA (1)...(19): siRNA sense strand
aaagagagaagaagaugug

SEQ ID NO: 580649 - RNA, 19 nt, Homo sapiens
  misc_RNA (1)...(19): siRNA sense strand
ucaacucagagaucacuua

SEQ ID NO: 580650 - RNA, 19 nt, Homo sapiens
  misc_RNA (1)...(19): siRNA sense strand
caggacguguacaggguua

SEQ ID NO: 580651 - RNA, 19 nt, Homo sapiens
  misc_RNA (1)...(19): siRNA sense strand
uaauagaugccaaugacaa

SEQ ID NO: 580652 - RNA, 19 nt, Homo sapiens
  misc_RNA (1)...(19): siRNA sense strand
gggaugggaacaauucuug

SEQ ID NO: 580653 - RNA, 19 nt, Homo sapiens
  misc_RNA (1)...(19): siRNA sense strand
agaagauccugauauuagu

SEQ ID NO: 580654 - RNA, 19 nt, Homo sapiens
  misc_RNA (1)...(19): siRNA sense strand
aggcugagaugcaguuuua

SEQ ID NO: 580655 - RNA, 19 nt, Homo sapiens
  misc_RNA (1)...(19): siRNA sense strand
ggauuacacuacaggaaac

SEQ ID NO: 580656 - RNA, 19 nt, Homo sapiens
  misc_RNA (1)...(19): siRNA sense strand
gcagguacuauuuccuuug

SEQ ID NO: 580657 - RNA, 19 nt, Homo sapiens
  misc_RNA (1)...(19): siRNA sense strand
ggcaucaacucagagauca

SEQ ID NO: 580658 - RNA, 19 nt, Homo sapiens
  misc_RNA (1)...(19): siRNA sense strand
uaaguccuaacgaguauuu

SEQ ID NO: 580659 - RNA, 19 nt, Homo sapiens
  misc_RNA (1)...(19): siRNA sense strand
gcugagcaaauaccaacua

SEQ ID NO: 580660 - RNA, 19 nt, Homo sapiens
  misc_RNA (1)...(19): siRNA sense strand
uagcuuaaguagagguguu

SEQ ID NO: 580661 - RNA, 19 nt, Homo sapiens
  misc_RNA (1)...(19): siRNA sense strand
caacucagagaucacuuau

SEQ ID NO: 580662 - RNA, 19 nt, Homo sapiens
  misc_RNA (1)...(19): siRNA sense strand
ucagauaagaauccuggua

SEQ ID NO: 580663 - RNA, 19 nt, Homo sapiens
  misc_RNA (1)...(19): siRNA sense strand
gauccugauauuaguauga

SEQ ID NO: 580664 - RNA, 19 nt, Homo sapiens
  misc_RNA (1)...(19): siRNA sense strand
ccgaauagaccgugagcaa

SEQ ID NO: 580665 - RNA, 19 nt, Homo sapiens
  misc_RNA (1)...(19): siRNA sense strand
cugagcaaauaccaacuaa

SEQ ID NO: 580666 - RNA, 19 nt, Homo sapiens
  misc_RNA (1)...(19): siRNA sense strand
aagaagaugugaguugcaa

SEQ ID NO: 580667 - RNA, 19 nt, Homo sapiens
  misc_RNA (1)...(19): siRNA sense strand
gguggaaaauccuuuaaau

SEQ ID NO: 580668 - RNA, 19 nt, Homo sapiens
  misc_RNA (1)...(19): siRNA sense strand
guucgcagauagcuugcaa

SEQ ID NO: 580669 - RNA, 19 nt, Homo sapiens
  misc_RNA (1)...(19): siRNA sense strand
cgaauagaccgugagcaaa

SEQ ID NO: 580670 - RNA, 19 nt, Homo sapiens
  misc_RNA (1)...(19): siRNA sense strand
gcucuacgccugcgacagu

SEQ ID NO: 580671 - RNA, 19 nt, Homo sapiens
  misc_RNA (1)...(19): siRNA sense strand
gauugaggauguuaaugac

SEQ ID NO: 580672 - RNA, 19 nt, Homo sapiens
  misc_RNA (1)...(19): siRNA sense strand
gaucagauuauggaggauu

SEQ ID NO: 580673 - RNA, 19 nt, Homo sapiens
  misc_RNA (1)...(19): siRNA sense strand
gguggcaaauauccagaau

SEQ ID NO: 580674 - RNA, 19 nt, Homo sapiens
  misc_RNA (1)...(19): siRNA sense strand
ccgauccgcuacucgauuc

SEQ ID NO: 580675 - RNA, 19 nt, Homo sapiens
  misc_RNA (1)...(19): siRNA sense strand
cacaagauaaccucaacaa

SEQ ID NO: 580676 - RNA, 19 nt, Homo sapiens
  misc_RNA (1)...(19): siRNA sense strand
gaagucagguguagcuuaa

SEQ ID NO: 580677 - RNA, 19 nt, Homo sapiens
  misc_RNA (1)...(19): siRNA sense strand
gcagagcgcucaccacuug

SEQ ID NO: 580678 - RNA, 19 nt, Homo sapiens
  misc_RNA (1)...(19): siRNA sense strand
uggcaaauauccagaauua

SEQ ID NO: 580679 - RNA, 19 nt, Homo sapiens
  misc_RNA (1)...(19): siRNA sense strand
gagcaaauaugcaaagaga

SEQ ID NO: 580680 - RNA, 19 nt, Homo sapiens
  misc_RNA (1)...(19): siRNA sense strand
ugaauucgcugagcaaaua

SEQ ID NO: 580681 - RNA, 19 nt, Homo sapiens
  misc_RNA (1)...(19): siRNA sense strand
guagagguguuccauuuaa

SEQ ID NO: 580682 - RNA, 19 nt, Homo sapiens
  misc_RNA (1)...(19): siRNA sense strand
gcacauuacugacgucaau

SEQ ID NO: 580683 - RNA, 19 nt, Homo sapiens
  misc_RNA (1)...(19): siRNA sense strand
uaacgaguauuucucauug

SEQ ID NO: 580684 - RNA, 19 nt, Homo sapiens
  misc_RNA (1)...(19): siRNA sense strand
gaauuaguauugcagaaga

SEQ ID NO: 580685 - RNA, 19 nt, Homo sapiens
  misc_RNA (1)...(19): siRNA sense strand
ucacaucuguugaucauug

SEQ ID NO: 580686 - RNA, 19 nt, Homo sapiens
  misc_RNA (1)...(19): siRNA sense strand
aagauaaccucaacaaaga

SEQ ID NO: 580687 - RNA, 19 nt, Homo sapiens
  misc_RNA (1)...(19): siRNA sense strand
gcaaauauccagaauuagu

SEQ ID NO: 580688 - RNA, 19 nt, Homo sapiens
  misc_RNA (1)...(19): siRNA sense strand
gacaacagcccagaaauaa

SEQ ID NO: 580689 - RNA, 19 nt, Homo sapiens
  misc_RNA (1)...(19): siRNA sense strand
gaucacuuauuccuucuuu

SEQ ID NO: 580690 - RNA, 19 nt, Homo sapiens
  misc_RNA (1)...(19): siRNA sense strand
gauaagaauccugguaaua

SEQ ID NO: 580691 - RNA, 19 nt, Homo sapiens
  misc_RNA (1)...(19): siRNA sense strand
gaaccucgcuaaggaucua

SEQ ID NO: 580692 - RNA, 19 nt, Homo sapiens
  misc_RNA (1)...(19): siRNA sense strand
cgacaacagcccagaaaua

SEQ ID NO: 580693 - RNA, 19 nt, Homo sapiens
  misc_RNA (1)...(19): siRNA sense strand
gcaaauaugcaaagagaga

SEQ ID NO: 580694 - RNA, 19 nt, Homo sapiens
  misc_RNA (1)...(19): siRNA sense strand
gcagaagauccugauauua

SEQ ID NO: 580695 - RNA, 19 nt, Homo sapiens
  misc_RNA (1)...(19): siRNA sense strand
uaagaauccugguaauaga

SEQ ID NO: 580696 - RNA, 19 nt, Homo sapiens
  misc_RNA (1)...(19): siRNA sense strand
gaaagacaauccugauggu

SEQ ID NO: 580697 - RNA, 19 nt, Homo sapiens
  misc_RNA (1)...(19): siRNA sense strand
acucagagaucacuuauuc

SEQ ID NO: 580698 - RNA, 19 nt, Homo sapiens
  misc_RNA (1)...(19): siRNA sense strand
gaagaugugaguugcaauu

SEQ ID NO: 580699 - RNA, 19 nt, Homo sapiens
  misc_RNA (1)...(19): siRNA sense strand
gcuagucgcuguaagagau

SEQ ID NO: 580700 - RNA, 19 nt, Homo sapiens
  misc_RNA (1)...(19): siRNA sense strand
gaauagaccgugagcaaau

SEQ ID NO: 580701 - RNA, 19 nt, Homo sapiens
  misc_RNA (1)...(19): siRNA sense strand
caagauaaccucaacaaag

SEQ ID NO: 580702 - RNA, 19 nt, Homo sapiens
  misc_RNA (1)...(19): siRNA sense strand
ggaagucagguguagcuua

SEQ ID NO: 580703 - RNA, 19 nt, Homo sapiens
  misc_RNA (1)...(19): siRNA sense strand
gagcaaauaccaacuaagu

SEQ ID NO: 580704 - RNA, 19 nt, Homo sapiens
  misc_RNA (1)...(19): siRNA sense strand
gagaagaagaugugaguug

SEQ ID NO: 580705 - RNA, 19 nt, Homo sapiens
  misc_RNA (1)...(19): siRNA sense strand
aaguagagguguuccauuu

SEQ ID NO: 580706 - RNA, 19 nt, Homo sapiens
  misc_RNA (1)...(19): siRNA sense strand
caggaaacauucuaacuca

SEQ ID NO: 580707 - RNA, 19 nt, Homo sapiens
  misc_RNA (1)...(19): siRNA sense strand
gaugugaguugcaauugga

SEQ ID NO: 580708 - RNA, 19 nt, Homo sapiens
  misc_RNA (1)...(19): siRNA sense strand
gaagauccugauauuagua

SEQ ID NO: 580709 - RNA, 19 nt, Homo sapiens
  misc_RNA (1)...(19): siRNA sense strand
ucacgucacucucugauca

SEQ ID NO: 580710 - RNA, 19 nt, Homo sapiens
  misc_RNA (1)...(19): siRNA sense strand
gguaauagaugccaaugac

SEQ ID NO: 580711 - RNA, 19 nt, Homo sapiens
  misc_RNA (1)...(19): siRNA sense strand
cagaagauccugauauuag

SEQ ID NO: 580712 - RNA, 19 nt, Homo sapiens
  misc_RNA (1)...(19): siRNA sense strand
gauaaccucaacaaagaua

SEQ ID NO: 580713 - RNA, 19 nt, Homo sapiens
  misc_RNA (1)...(19): siRNA sense strand
caacagcccagaaauaauc

SEQ ID NO: 580714 - RNA, 19 nt, Homo sapiens
  misc_RNA (1)...(19): siRNA sense strand
cgauaaacauagaagcaaa

SEQ ID NO: 580715 - RNA, 19 nt, Homo sapiens
  misc_RNA (1)...(19): siRNA sense strand
gauucuagcuauugcucua

SEQ ID NO: 580716 - RNA, 19 nt, Homo sapiens
  misc_RNA (1)...(19): siRNA sense strand
ccggaaagaugaaauaaac

SEQ ID NO: 580717 - RNA, 19 nt, Homo sapiens
  misc_RNA (1)...(19): siRNA sense strand
ugcagaagauccugauauu

SEQ ID NO: 580718 - RNA, 19 nt, Homo sapiens
  misc_RNA (1)...(19): siRNA sense strand
gguguuccauuuaagauuc

SEQ ID NO: 580719 - RNA, 19 nt, Homo sapiens
  misc_RNA (1)...(19): siRNA sense strand
cagauaagaauccugguaa

SEQ ID NO: 580720 - RNA, 19 nt, Homo sapiens
  misc_RNA (1)...(19): siRNA sense strand
guacugaccgccuuagaug

SEQ ID NO: 580721 - RNA, 19 nt, Homo sapiens
  misc_RNA (1)...(19): siRNA sense strand
gcaaagagagaagaagaug

SEQ ID NO: 580722 - RNA, 19 nt, Homo sapiens
  misc_RNA (1)...(19): siRNA sense strand
aagcgguacugcucagaua

SEQ ID NO: 580723 - RNA, 19 nt, Homo sapiens
  misc_RNA (1)...(19): siRNA sense strand
ugaagcagauaagaagauu

SEQ ID NO: 580724 - RNA, 19 nt, Homo sapiens
  misc_RNA (1)...(19): siRNA sense strand
aauagaccgugagcaaaua

SEQ ID NO: 580725 - RNA, 19 nt, Homo sapiens
  misc_RNA (1)...(19): siRNA sense strand
uguagaaguuguagacgaa

SEQ ID NO: 580726 - RNA, 19 nt, Homo sapiens
  misc_RNA (1)...(19): siRNA sense strand
gguguaaaguaauuguaga

SEQ ID NO: 580727 - RNA, 19 nt, Homo sapiens
  misc_RNA (1)...(19): siRNA sense strand
ccgaggaucucucucaaca

SEQ ID NO: 580728 - RNA, 19 nt, Homo sapiens
  misc_RNA (1)...(19): siRNA sense strand
ggagaaagacaauccugau

SEQ ID NO: 580729 - RNA, 19 nt, Homo sapiens
  misc_RNA (1)...(19): siRNA sense strand
gaaguagaaagauauacga

SEQ ID NO: 580730 - RNA, 19 nt, Homo sapiens
  misc_RNA (1)...(19): siRNA sense strand
gaucaaaugaauccagaau

SEQ ID NO: 580731 - RNA, 19 nt, Homo sapiens
  misc_RNA (1)...(19): siRNA sense strand
ccauaacccugcacauuac

SEQ ID NO: 580732 - RNA, 19 nt, Homo sapiens
  misc_RNA (1)...(19): siRNA sense strand
gagagaagaagaugugagu

SEQ ID NO: 580733 - RNA, 19 nt, Homo sapiens
  misc_RNA (1)...(19): siRNA sense strand
aagagguacugccggauuu

SEQ ID NO: 580734 - RNA, 19 nt, Homo sapiens
  misc_RNA (1)...(19): siRNA sense strand
gcaccuccauccugagagu

SEQ ID NO: 580735 - RNA, 19 nt, Homo sapiens
  misc_RNA (1)...(19): siRNA sense strand
guacugcucagauaagaau

SEQ ID NO: 580736 - RNA, 19 nt, Homo sapiens
  misc_RNA (1)...(19): siRNA sense strand
gagaaagacaauccugaug

SEQ ID NO: 580737 - RNA, 19 nt, Homo sapiens
  misc_RNA (1)...(19): siRNA sense strand
ugauugaggauguuaauga

SEQ ID NO: 580738 - RNA, 19 nt, Homo sapiens
  misc_RNA (1)...(19): siRNA sense strand
ggacgagggcaucaacuca

SEQ ID NO: 580739 - RNA, 19 nt, Homo sapiens
  misc_RNA (1)...(19): siRNA sense strand
accauaacccugcacauua

SEQ ID NO: 580740 - RNA, 19 nt, Homo sapiens
  misc_RNA (1)...(19): siRNA sense strand
gaccgaggaucucucucaa

SEQ ID NO: 580741 - RNA, 19 nt, Homo sapiens
  misc_RNA (1)...(19): siRNA sense strand
gggaacaauucuugagucu

SEQ ID NO: 580742 - RNA, 19 nt, Homo sapiens
  misc_RNA (1)...(19): siRNA sense strand
gggacuuacuugugaagga

SEQ ID NO: 580743 - RNA, 19 nt, Homo sapiens
  misc_RNA (1)...(19): siRNA sense strand
uaacucagcagccuuugga

SEQ ID NO: 580744 - RNA, 19 nt, Homo sapiens
  misc_RNA (1)...(19): siRNA sense strand
cagaauuaguauugcagaa

SEQ ID NO: 580745 - RNA, 19 nt, Homo sapiens
  misc_RNA (1)...(19): siRNA sense strand
ggcagguacuauuuccuuu

SEQ ID NO: 580746 - RNA, 19 nt, Homo sapiens
  misc_RNA (1)...(19): siRNA sense strand
ucaguucucugcuccaagu

SEQ ID NO: 580747 - RNA, 19 nt, Homo sapiens
  misc_RNA (1)...(19): siRNA sense strand
caagagguacugccggauu

SEQ ID NO: 580748 - RNA, 19 nt, Homo sapiens
  misc_RNA (1)...(19): siRNA sense strand
aaagagagaagaagaugug

SEQ ID NO: 580749 - RNA, 19 nt, Homo sapiens
  misc_RNA (1)...(19): siRNA sense strand
ucaacucagagaucacuua

SEQ ID NO: 580750 - RNA, 19 nt, Homo sapiens
  misc_RNA (1)...(19): siRNA sense strand
caggacguguacaggguua

SEQ ID NO: 580751 - RNA, 19 nt, Homo sapiens
  misc_RNA (1)...(19): siRNA sense strand
uaauagaugccaaugacaa

SEQ ID NO: 580752 - RNA, 19 nt, Homo sapiens
  misc_RNA (1)...(19): siRNA sense strand
gggaugggaacaauucuug

SEQ ID NO: 580753 - RNA, 19 nt, Homo sapiens
  misc_RNA (1)...(19): siRNA sense strand
agaagauccugauauuagu

SEQ ID NO: 580754 - RNA, 19 nt, Homo sapiens
  misc_RNA (1)...(19): siRNA sense strand
aggcugagaugcaguuuua

SEQ ID NO: 580755 - RNA, 19 nt, Homo sapiens
  misc_RNA (1)...(19): siRNA sense strand
ggauuacacuacaggaaac

SEQ ID NO: 580756 - RNA, 19 nt, Homo sapiens
  misc_RNA (1)...(19): siRNA sense strand
gcagguacuauuuccuuug

SEQ ID NO: 580757 - RNA, 19 nt, Homo sapiens
  misc_RNA (1)...(19): siRNA sense strand
ggcaucaacucagagauca

SEQ ID NO: 580758 - RNA, 19 nt, Homo sapiens
  misc_RNA (1)...(19): siRNA sense strand
uaaguccuaacgaguauuu

SEQ ID NO: 580759 - RNA, 19 nt, Homo sapiens
  misc_RNA (1)...(19): siRNA sense strand
gcugagcaaauaccaacua

SEQ ID NO: 580760 - RNA, 19 nt, Homo sapiens
  misc_RNA (1)...(19): siRNA sense strand
uagcuuaaguagagguguu

SEQ ID NO: 580761 - RNA, 19 nt, Homo sapiens
  misc_RNA (1)...(19): siRNA sense strand
caacucagagaucacuuau

SEQ ID NO: 580762 - RNA, 19 nt, Homo sapiens
  misc_RNA (1)...(19): siRNA sense strand
ucagauaagaauccuggua

SEQ ID NO: 580763 - RNA, 19 nt, Homo sapiens
  misc_RNA (1)...(19): siRNA sense strand
gauccugauauuaguauga

SEQ ID NO: 580764 - RNA, 19 nt, Homo sapiens
  misc_RNA (1)...(19): siRNA sense strand
ccgaauagaccgugagcaa

SEQ ID NO: 580765 - RNA, 19 nt, Homo sapiens
  misc_RNA (1)...(19): siRNA sense strand
cugagcaaauaccaacuaa

SEQ ID NO: 580766 - RNA, 19 nt, Homo sapiens
  misc_RNA (1)...(19): siRNA sense strand
aagaagaugugaguugcaa

SEQ ID NO: 580767 - RNA, 19 nt, Homo sapiens
  misc_RNA (1)...(19): siRNA sense strand
gguggaaaauccuuuaaau

SEQ ID NO: 580768 - RNA, 19 nt, Homo sapiens
  misc_RNA (1)...(19): siRNA sense strand
guucgcagauagcuugcaa

SEQ ID NO: 580769 - RNA, 19 nt, Homo sapiens
  misc_RNA (1)...(19): siRNA sense strand
cgaauagaccgugagcaaa

SEQ ID NO: 580770 - RNA, 19 nt, Homo sapiens
  misc_RNA (1)...(19): siRNA sense strand
gcucuacgccugcgacagu

SEQ ID NO: 580771 - RNA, 19 nt, Homo sapiens
  misc_RNA (1)...(19): siRNA sense strand
gauugaggauguuaaugac

SEQ ID NO: 580772 - RNA, 19 nt, Homo sapiens
  misc_RNA (1)...(19): siRNA sense strand
gaucagauuauggaggauu

SEQ ID NO: 580773 - RNA, 19 nt, Homo sapiens
  misc_RNA (1)...(19): siRNA sense strand
gguggcaaauauccagaau

SEQ ID NO: 580774 - RNA, 19 nt, Homo sapiens
  misc_RNA (1)...(19): siRNA sense strand
ccgauccgcuacucgauuc

SEQ ID NO: 580775 - RNA, 19 nt, Homo sapiens
  misc_RNA (1)...(19): siRNA sense strand
cacaagauaaccucaacaa

SEQ ID NO: 580776 - RNA, 19 nt, Homo sapiens
  misc_RNA (1)...(19): siRNA sense strand
gaacagagaucucauagcu

SEQ ID NO: 580777 - RNA, 19 nt, Homo sapiens
  misc_RNA (1)...(19): siRNA sense strand
ggacuuugccuuauucuua

SEQ ID NO: 580778 - RNA, 19 nt, Homo sapiens
  misc_RNA (1)...(19): siRNA sense strand
gaagucagguguaauauag

SEQ ID NO: 580779 - RNA, 19 nt, Homo sapiens
  misc_RNA (1)...(19): siRNA sense strand
gagcaaauaugcaaagaga

SEQ ID NO: 580780 - RNA, 19 nt, Homo sapiens
  misc_RNA (1)...(19): siRNA sense strand
ucucauagcuugauauuga

SEQ ID NO: 580781 - RNA, 19 nt, Homo sapiens
  misc_RNA (1)...(19): siRNA sense strand
gcagacaacuugcaagaga

SEQ ID NO: 580782 - RNA, 19 nt, Homo sapiens
  misc_RNA (1)...(19): siRNA sense strand
ggagaagucagguguaaua

SEQ ID NO: 580783 - RNA, 19 nt, Homo sapiens
  misc_RNA (1)...(19): siRNA sense strand
gaagaacagagaucucaua

SEQ ID NO: 580784 - RNA, 19 nt, Homo sapiens
  misc_RNA (1)...(19): siRNA sense strand
gacauuccauucaagauuu

SEQ ID NO: 580785 - RNA, 19 nt, Homo sapiens
  misc_RNA (1)...(19): siRNA sense strand
guagaagcaucaccuugua

SEQ ID NO: 580786 - RNA, 19 nt, Homo sapiens
  misc_RNA (1)...(19): siRNA sense strand
aaacagacauuccauucaa

SEQ ID NO: 580787 - RNA, 19 nt, Homo sapiens
  misc_RNA (1)...(19): siRNA sense strand
ggacggagguggucucucu

SEQ ID NO: 580788 - RNA, 19 nt, Homo sapiens
  misc_RNA (1)...(19): siRNA sense strand
ccacaucuccuacucuaua

SEQ ID NO: 580789 - RNA, 19 nt, Homo sapiens
  misc_RNA (1)...(19): siRNA sense strand
gacaacagcccagaaauaa

SEQ ID NO: 580790 - RNA, 19 nt, Homo sapiens
  misc_RNA (1)...(19): siRNA sense strand
gaaccucgcuaaggaucua

SEQ ID NO: 580791 - RNA, 19 nt, Homo sapiens
  misc_RNA (1)...(19): siRNA sense strand
cgacaacagcccagaaaua

SEQ ID NO: 580792 - RNA, 19 nt, Homo sapiens
  misc_RNA (1)...(19): siRNA sense strand
gcaaauaugcaaagagaga

SEQ ID NO: 580793 - RNA, 19 nt, Homo sapiens
  misc_RNA (1)...(19): siRNA sense strand
ccacggauccugauauaaa

SEQ ID NO: 580794 - RNA, 19 nt, Homo sapiens
  misc_RNA (1)...(19): siRNA sense strand
gcaaauacccagaguuauc

SEQ ID NO: 580795 - RNA, 19 nt, Homo sapiens
  misc_RNA (1)...(19): siRNA sense strand
gaagaugugaguugcaauu

SEQ ID NO: 580796 - RNA, 19 nt, Homo sapiens
  misc_RNA (1)...(19): siRNA sense strand
ucaaggauaccaaugauaa

SEQ ID NO: 580797 - RNA, 19 nt, Homo sapiens
  misc_RNA (1)...(19): siRNA sense strand
gaauagaccgugagcaaau

SEQ ID NO: 580798 - RNA, 19 nt, Homo sapiens
  misc_RNA (1)...(19): siRNA sense strand
ucacuucucucucugauca

SEQ ID NO: 580799 - RNA, 19 nt, Homo sapiens
  misc_RNA (1)...(19): siRNA sense strand
gagaagaagaugugaguug

SEQ ID NO: 580800 - RNA, 19 nt, Homo sapiens
  misc_RNA (1)...(19): siRNA sense strand
gaugugaguugcaauugga

SEQ ID NO: 580801 - RNA, 19 nt, Homo sapiens
  misc_RNA (1)...(19): siRNA sense strand
gaaauaaucaucacuucuc

SEQ ID NO: 580802 - RNA, 19 nt, Homo sapiens
  misc_RNA (1)...(19): siRNA sense strand
guacacgacuaucgcuuga

SEQ ID NO: 580803 - RNA, 19 nt, Homo sapiens
  misc_RNA (1)...(19): siRNA sense strand
gagagcagacaccagaaua

SEQ ID NO: 580804 - RNA, 19 nt, Homo sapiens
  misc_RNA (1)...(19): siRNA sense strand
gacaugguuugcaguguuu

SEQ ID NO: 580805 - RNA, 19 nt, Homo sapiens
  misc_RNA (1)...(19): siRNA sense strand
uggcaaauacccagaguua

SEQ ID NO: 580806 - RNA, 19 nt, Homo sapiens
  misc_RNA (1)...(19): siRNA sense strand
caacagcccagaaauaauc

SEQ ID NO: 580807 - RNA, 19 nt, Homo sapiens
  misc_RNA (1)...(19): siRNA sense strand
cagcagagacgaauauaga

SEQ ID NO: 580808 - RNA, 19 nt, Homo sapiens
  misc_RNA (1)...(19): siRNA sense strand
gaaacagacauuccauuca

SEQ ID NO: 580809 - RNA, 19 nt, Homo sapiens
  misc_RNA (1)...(19): siRNA sense strand
ggccacaucuccuacucua

SEQ ID NO: 580810 - RNA, 19 nt, Homo sapiens
  misc_RNA (1)...(19): siRNA sense strand
gcaagccgccucuuucuuc

SEQ ID NO: 580811 - RNA, 19 nt, Homo sapiens
  misc_RNA (1)...(19): siRNA sense strand
gagaaaacagguaugauua

SEQ ID NO: 580812 - RNA, 19 nt, Homo sapiens
  misc_RNA (1)...(19): siRNA sense strand
gguguaauauagaaacaga

SEQ ID NO: 580813 - RNA, 19 nt, Homo sapiens
  misc_RNA (1)...(19): siRNA sense strand
ugucaagucuggaccugua

SEQ ID NO: 580814 - RNA, 19 nt, Homo sapiens
  misc_RNA (1)...(19): siRNA sense strand
gcagacaccagaauacaau

SEQ ID NO: 580815 - RNA, 19 nt, Homo sapiens
  misc_RNA (1)...(19): siRNA sense strand
gggacuuacuugugaagaa

SEQ ID NO: 580816 - RNA, 19 nt, Homo sapiens
  misc_RNA (1)...(19): siRNA sense strand
agaauaaccagucauuuga

SEQ ID NO: 580817 - RNA, 19 nt, Homo sapiens
  misc_RNA (1)...(19): siRNA sense strand
gagaucucauagcuugaua

SEQ ID NO: 580818 - RNA, 19 nt, Homo sapiens
  misc_RNA (1)...(19): siRNA sense strand
gaaauuucugucaaggaua

SEQ ID NO: 580819 - RNA, 19 nt, Homo sapiens
  misc_RNA (1)...(19): siRNA sense strand
cagaaauaaucaucacuuc

SEQ ID NO: 580820 - RNA, 19 nt, Homo sapiens
  misc_RNA (1)...(19): siRNA sense strand
gcaaagagagaagaagaug

SEQ ID NO: 580821 - RNA, 19 nt, Homo sapiens
  misc_RNA (1)...(19): siRNA sense strand
ugagauaaacuacuacuuc

SEQ ID NO: 580822 - RNA, 19 nt, Homo sapiens
  misc_RNA (1)...(19): siRNA sense strand
gacuuugccuuauucuuau

SEQ ID NO: 580823 - RNA, 19 nt, Homo sapiens
  misc_RNA (1)...(19): siRNA sense strand
gauuaagaauaaccaguca

SEQ ID NO: 580824 - RNA, 19 nt, Homo sapiens
  misc_RNA (1)...(19): siRNA sense strand
aauagaccgugagcaaaua

SEQ ID NO: 580825 - RNA, 19 nt, Homo sapiens
  misc_RNA (1)...(19): siRNA sense strand
uugaagauguagaaaggua

SEQ ID NO: 580826 - RNA, 19 nt, Homo sapiens
  misc_RNA (1)...(19): siRNA sense strand
aagaauaaccagucauuug

SEQ ID NO: 580827 - RNA, 19 nt, Homo sapiens
  misc_RNA (1)...(19): siRNA sense strand
gaucucauagcuugauauu

SEQ ID NO: 580828 - RNA, 19 nt, Homo sapiens
  misc_RNA (1)...(19): siRNA sense strand
ggcaggugcuauuuccuuu

SEQ ID NO: 580829 - RNA, 19 nt, Homo sapiens
  misc_RNA (1)...(19): siRNA sense strand
ggucaaugcugagauaaac

SEQ ID NO: 580830 - RNA, 19 nt, Homo sapiens
  misc_RNA (1)...(19): siRNA sense strand
agacaugguuugcaguguu

SEQ ID NO: 580831 - RNA, 19 nt, Homo sapiens
  misc_RNA (1)...(19): siRNA sense strand
ggauccugauauaaacaua

SEQ ID NO: 580832 - RNA, 19 nt, Homo sapiens
  misc_RNA (1)...(19): siRNA sense strand
gggaggauuugacuucaca

SEQ ID NO: 580833 - RNA, 19 nt, Homo sapiens
  misc_RNA (1)...(19): siRNA sense strand
aaacacgggaucuggauuu

SEQ ID NO: 580834 - RNA, 19 nt, Homo sapiens
  misc_RNA (1)...(19): siRNA sense strand
aaucaucacuucucucucu

SEQ ID NO: 580835 - RNA, 19 nt, Homo sapiens
  misc_RNA (1)...(19): siRNA sense strand
gagagaagaagaugugagu

SEQ ID NO: 580836 - RNA, 19 nt, Homo sapiens
  misc_RNA (1)...(19): siRNA sense strand
gcagagacgaauauagaau

SEQ ID NO: 580837 - RNA, 19 nt, Homo sapiens
  misc_RNA (1)...(19): siRNA sense strand
gaaucugcauccgcuggua

SEQ ID NO: 580838 - RNA, 19 nt, Homo sapiens
  misc_RNA (1)...(19): siRNA sense strand
ugauugaggauguuaauga

SEQ ID NO: 580839 - RNA, 19 nt, Homo sapiens
  misc_RNA (1)...(19): siRNA sense strand
ugccacggauccugauaua

SEQ ID NO: 580840 - RNA, 19 nt, Homo sapiens
  misc_RNA (1)...(19): siRNA sense strand
ggacuuacuugugaagaac

SEQ ID NO: 580841 - RNA, 19 nt, Homo sapiens
  misc_RNA (1)...(19): siRNA sense strand
ugccaccgcucacauagaa

SEQ ID NO: 580842 - RNA, 19 nt, Homo sapiens
  misc_RNA (1)...(19): siRNA sense strand
gcuccgcguucuucgauau

SEQ ID NO: 580843 - RNA, 19 nt, Homo sapiens
  misc_RNA (1)...(19): siRNA sense strand
uaauuccgaugguggcaaa

SEQ ID NO: 580844 - RNA, 19 nt, Homo sapiens
  misc_RNA (1)...(19): siRNA sense strand
augcugagauaaacuacua

SEQ ID NO: 580845 - RNA, 19 nt, Homo sapiens
  misc_RNA (1)...(19): siRNA sense strand
cagagacgaauauagaauu

SEQ ID NO: 580846 - RNA, 19 nt, Homo sapiens
  misc_RNA (1)...(19): siRNA sense strand
aaagagagaagaagaugug

SEQ ID NO: 580847 - RNA, 19 nt, Homo sapiens
  misc_RNA (1)...(19): siRNA sense strand
ccaaugaagacaugguuug

SEQ ID NO: 580848 - RNA, 19 nt, Homo sapiens
  misc_RNA (1)...(19): siRNA sense strand
agaagucagguguaauaua

SEQ ID NO: 580849 - RNA, 19 nt, Homo sapiens
  misc_RNA (1)...(19): siRNA sense strand
gaucagauuuuggagaauu

SEQ ID NO: 580850 - RNA, 19 nt, Homo sapiens
  misc_RNA (1)...(19): siRNA sense strand
gcacugcccagagcacaaa

SEQ ID NO: 580851 - RNA, 19 nt, Homo sapiens
  misc_RNA (1)...(19): siRNA sense strand
ucaaugcugagauaaacua

SEQ ID NO: 580852 - RNA, 19 nt, Homo sapiens
  misc_RNA (1)...(19): siRNA sense strand
acuacaaacuggugacaga

SEQ ID NO: 580853 - RNA, 19 nt, Homo sapiens
  misc_RNA (1)...(19): siRNA sense strand
ccagaaauaaucaucacuu

SEQ ID NO: 580854 - RNA, 19 nt, Homo sapiens
  misc_RNA (1)...(19): siRNA sense strand
gaauaaccagucauuugau

SEQ ID NO: 580855 - RNA, 19 nt, Homo sapiens
  misc_RNA (1)...(19): siRNA sense strand
gaaaacagguaugauuaag

SEQ ID NO: 580856 - RNA, 19 nt, Homo sapiens
  misc_RNA (1)...(19): siRNA sense strand
gcccagagcacaaaacaua

SEQ ID NO: 580857 - RNA, 19 nt, Homo sapiens
  misc_RNA (1)...(19): siRNA sense strand
gggaagaacagagaucuca

SEQ ID NO: 580858 - RNA, 19 nt, Homo sapiens
  misc_RNA (1)...(19): siRNA sense strand
agucagguguaauauagaa

SEQ ID NO: 580859 - RNA, 19 nt, Homo sapiens
  misc_RNA (1)...(19): siRNA sense strand
gaucuggauuucggaggaa

SEQ ID NO: 580860 - RNA, 19 nt, Homo sapiens
  misc_RNA (1)...(19): siRNA sense strand
gagaauucaccuccaggaa

SEQ ID NO: 580861 - RNA, 19 nt, Homo sapiens
  misc_RNA (1)...(19): siRNA sense strand
cggaggaaauggagaaguc

SEQ ID NO: 580862 - RNA, 19 nt, Homo sapiens
  misc_RNA (1)...(19): siRNA sense strand
agacaacuugcaagagaua

SEQ ID NO: 580863 - RNA, 19 nt, Homo sapiens
  misc_RNA (1)...(19): siRNA sense strand
cauagaaauccuugaugaa

SEQ ID NO: 580864 - RNA, 19 nt, Homo sapiens
  misc_RNA (1)...(19): siRNA sense strand
ccgaauagaccgugagcaa

SEQ ID NO: 580865 - RNA, 19 nt, Homo sapiens
  misc_RNA (1)...(19): siRNA sense strand
aagaagaugugaguugcaa

SEQ ID NO: 580866 - RNA, 19 nt, Homo sapiens
  misc_RNA (1)...(19): siRNA sense strand
gagcagacaccagaauaca

SEQ ID NO: 580867 - RNA, 19 nt, Homo sapiens
  misc_RNA (1)...(19): siRNA sense strand
caauaacuacuacaaacug

SEQ ID NO: 580868 - RNA, 19 nt, Homo sapiens
  misc_RNA (1)...(19): siRNA sense strand
agacauuccauucaagauu

SEQ ID NO: 580869 - RNA, 19 nt, Homo sapiens
  misc_RNA (1)...(19): siRNA sense strand
agaaacagacauuccauuc

SEQ ID NO: 580870 - RNA, 19 nt, Homo sapiens
  misc_RNA (1)...(19): siRNA sense strand
gguggaaaauccuuuaaau

SEQ ID NO: 580871 - RNA, 19 nt, Homo sapiens
  misc_RNA (1)...(19): siRNA sense strand
cgaccgcccuguacucucu

SEQ ID NO: 580872 - RNA, 19 nt, Homo sapiens
  misc_RNA (1)...(19): siRNA sense strand
ucaauggccacaucuccua

SEQ ID NO: 580873 - RNA, 19 nt, Homo sapiens
  misc_RNA (1)...(19): siRNA sense strand
gaagcaucaccuuguaugu

SEQ ID NO: 580874 - RNA, 19 nt, Homo sapiens
  misc_RNA (1)...(19): siRNA sense strand
gacagccacugaccaggau

SEQ ID NO: 580875 - RNA, 19 nt, Homo sapiens
  misc_RNA (1)...(19): siRNA sense strand
gagccuccauugcgcaagu

SEQ ID NO: 580876 - RNA, 19 nt, Homo sapiens
  misc_RNA (1)...(19): siRNA sense strand
gaacagagaucucauagcu

SEQ ID NO: 580877 - RNA, 19 nt, Homo sapiens
  misc_RNA (1)...(19): siRNA sense strand
ggacuuugccuuauucuua

SEQ ID NO: 580878 - RNA, 19 nt, Homo sapiens
  misc_RNA (1)...(19): siRNA sense strand
gaagucagguguaauauag

SEQ ID NO: 580879 - RNA, 19 nt, Homo sapiens
  misc_RNA (1)...(19): siRNA sense strand
gagcaaauaugcaaagaga

SEQ ID NO: 580880 - RNA, 19 nt, Homo sapiens
  misc_RNA (1)...(19): siRNA sense strand
ucucauagcuugauauuga

SEQ ID NO: 580881 - RNA, 19 nt, Homo sapiens
  misc_RNA (1)...(19): siRNA sense strand
gcagacaacuugcaagaga

SEQ ID NO: 580882 - RNA, 19 nt, Homo sapiens
  misc_RNA (1)...(19): siRNA sense strand
ggagaagucagguguaaua

SEQ ID NO: 580883 - RNA, 19 nt, Homo sapiens
  misc_RNA (1)...(19): siRNA sense strand
gaagaacagagaucucaua

SEQ ID NO: 580884 - RNA, 19 nt, Homo sapiens
  misc_RNA (1)...(19): siRNA sense strand
gacauuccauucaagauuu

SEQ ID NO: 580885 - RNA, 19 nt, Homo sapiens
  misc_RNA (1)...(19): siRNA sense strand
guagaagcaucaccuugua

SEQ ID NO: 580886 - RNA, 19 nt, Homo sapiens
  misc_RNA (1)...(19): siRNA sense strand
aaacagacauuccauucaa

SEQ ID NO: 580887 - RNA, 19 nt, Homo sapiens
  misc_RNA (1)...(19): siRNA sense strand
ggacggagguggucucucu

SEQ ID NO: 580888 - RNA, 19 nt, Homo sapiens
  misc_RNA (1)...(19): siRNA sense strand
ccacaucuccuacucuaua

SEQ ID NO: 580889 - RNA, 19 nt, Homo sapiens
  misc_RNA (1)...(19): siRNA sense strand
gacaacagcccagaaauaa

SEQ ID NO: 580890 - RNA, 19 nt, Homo sapiens
  misc_RNA (1)...(19): siRNA sense strand
gaaccucgcuaaggaucua

SEQ ID NO: 580891 - RNA, 19 nt, Homo sapiens
  misc_RNA (1)...(19): siRNA sense strand
cgacaacagcccagaaaua

SEQ ID NO: 580892 - RNA, 19 nt, Homo sapiens
  misc_RNA (1)...(19): siRNA sense strand
gcaaauaugcaaagagaga

SEQ ID NO: 580893 - RNA, 19 nt, Homo sapiens
  misc_RNA (1)...(19): siRNA sense strand
ccacggauccugauauaaa

SEQ ID NO: 580894 - RNA, 19 nt, Homo sapiens
  misc_RNA (1)...(19): siRNA sense strand
gcaaauacccagaguuauc

SEQ ID NO: 580895 - RNA, 19 nt, Homo sapiens
  misc_RNA (1)...(19): siRNA sense strand
gaagaugugaguugcaauu

SEQ ID NO: 580896 - RNA, 19 nt, Homo sapiens
  misc_RNA (1)...(19): siRNA sense strand
ucaaggauaccaaugauaa

SEQ ID NO: 580897 - RNA, 19 nt, Homo sapiens
  misc_RNA (1)...(19): siRNA sense strand
gaauagaccgugagcaaau

SEQ ID NO: 580898 - RNA, 19 nt, Homo sapiens
  misc_RNA (1)...(19): siRNA sense strand
ucacuucucucucugauca

SEQ ID NO: 580899 - RNA, 19 nt, Homo sapiens
  misc_RNA (1)...(19): siRNA sense strand
gagaagaagaugugaguug

SEQ ID NO: 580900 - RNA, 19 nt, Homo sapiens
  misc_RNA (1)...(19): siRNA sense strand
gaugugaguugcaauugga

SEQ ID NO: 580901 - RNA, 19 nt, Homo sapiens
  misc_RNA (1)...(19): siRNA sense strand
gaaauaaucaucacuucuc

SEQ ID NO: 580902 - RNA, 19 nt, Homo sapiens
  misc_RNA (1)...(19): siRNA sense strand
guacacgacuaucgcuuga

SEQ ID NO: 580903 - RNA, 19 nt, Homo sapiens
  misc_RNA (1)...(19): siRNA sense strand
gagagcagacaccagaaua

SEQ ID NO: 580904 - RNA, 19 nt, Homo sapiens
  misc_RNA (1)...(19): siRNA sense strand
gacaugguuugcaguguuu

SEQ ID NO: 580905 - RNA, 19 nt, Homo sapiens
  misc_RNA (1)...(19): siRNA sense strand
uggcaaauacccagaguua

SEQ ID NO: 580906 - RNA, 19 nt, Homo sapiens
  misc_RNA (1)...(19): siRNA sense strand
caacagcccagaaauaauc

SEQ ID NO: 580907 - RNA, 19 nt, Homo sapiens
  misc_RNA (1)...(19): siRNA sense strand
cagcagagacgaauauaga

SEQ ID NO: 580908 - RNA, 19 nt, Homo sapiens
  misc_RNA (1)...(19): siRNA sense strand
gaaacagacauuccauuca

SEQ ID NO: 580909 - RNA, 19 nt, Homo sapiens
  misc_RNA (1)...(19): siRNA sense strand
ggccacaucuccuacucua

SEQ ID NO: 580910 - RNA, 19 nt, Homo sapiens
  misc_RNA (1)...(19): siRNA sense strand
gcaagccgccucuuucuuc

SEQ ID NO: 580911 - RNA, 19 nt, Homo sapiens
  misc_RNA (1)...(19): siRNA sense strand
gagaaaacagguaugauua

SEQ ID NO: 580912 - RNA, 19 nt, Homo sapiens
  misc_RNA (1)...(19): siRNA sense strand
gguguaauauagaaacaga

SEQ ID NO: 580913 - RNA, 19 nt, Homo sapiens
  misc_RNA (1)...(19): siRNA sense strand
ugucaagucuggaccugua

SEQ ID NO: 580914 - RNA, 19 nt, Homo sapiens
  misc_RNA (1)...(19): siRNA sense strand
gcagacaccagaauacaau

SEQ ID NO: 580915 - RNA, 19 nt, Homo sapiens
  misc_RNA (1)...(19): siRNA sense strand
gggacuuacuugugaagaa

SEQ ID NO: 580916 - RNA, 19 nt, Homo sapiens
  misc_RNA (1)...(19): siRNA sense strand
agaauaaccagucauuuga

SEQ ID NO: 580917 - RNA, 19 nt, Homo sapiens
  misc_RNA (1)...(19): siRNA sense strand
gagaucucauagcuugaua

SEQ ID NO: 580918 - RNA, 19 nt, Homo sapiens
  misc_RNA (1)...(19): siRNA sense strand
gaaauuucugucaaggaua

SEQ ID NO: 580919 - RNA, 19 nt, Homo sapiens
  misc_RNA (1)...(19): siRNA sense strand
cagaaauaaucaucacuuc

SEQ ID NO: 580920 - RNA, 19 nt, Homo sapiens
  misc_RNA (1)...(19): siRNA sense strand
gcaaagagagaagaagaug

SEQ ID NO: 580921 - RNA, 19 nt, Homo sapiens
  misc_RNA (1)...(19): siRNA sense strand
ugagauaaacuacuacuuc

SEQ ID NO: 580922 - RNA, 19 nt, Homo sapiens
  misc_RNA (1)...(19): siRNA sense strand
gacuuugccuuauucuuau

SEQ ID NO: 580923 - RNA, 19 nt, Homo sapiens
  misc_RNA (1)...(19): siRNA sense strand
gauuaagaauaaccaguca

SEQ ID NO: 580924 - RNA, 19 nt, Homo sapiens
  misc_RNA (1)...(19): siRNA sense strand
aauagaccgugagcaaaua

SEQ ID NO: 580925 - RNA, 19 nt, Homo sapiens
  misc_RNA (1)...(19): siRNA sense strand
uugaagauguagaaaggua

SEQ ID NO: 580926 - RNA, 19 nt, Homo sapiens
  misc_RNA (1)...(19): siRNA sense strand
aagaauaaccagucauuug

SEQ ID NO: 580927 - RNA, 19 nt, Homo sapiens
  misc_RNA (1)...(19): siRNA sense strand
gaucucauagcuugauauu

SEQ ID NO: 580928 - RNA, 19 nt, Homo sapiens
  misc_RNA (1)...(19): siRNA sense strand
ggcaggugcuauuuccuuu

SEQ ID NO: 580929 - RNA, 19 nt, Homo sapiens
  misc_RNA (1)...(19): siRNA sense strand
ggucaaugcugagauaaac

SEQ ID NO: 580930 - RNA, 19 nt, Homo sapiens
  misc_RNA (1)...(19): siRNA sense strand
agacaugguuugcaguguu

SEQ ID NO: 580931 - RNA, 19 nt, Homo sapiens
  misc_RNA (1)...(19): siRNA sense strand
ggauccugauauaaacaua

SEQ ID NO: 580932 - RNA, 19 nt, Homo sapiens
  misc_RNA (1)...(19): siRNA sense strand
gggaggauuugacuucaca

SEQ ID NO: 580933 - RNA, 19 nt, Homo sapiens
  misc_RNA (1)...(19): siRNA sense strand
aaacacgggaucuggauuu

SEQ ID NO: 580934 - RNA, 19 nt, Homo sapiens
  misc_RNA (1)...(19): siRNA sense strand
aaucaucacuucucucucu

SEQ ID NO: 580935 - RNA, 19 nt, Homo sapiens
  misc_RNA (1)...(19): siRNA sense strand
gagagaagaagaugugagu

SEQ ID NO: 580936 - RNA, 19 nt, Homo sapiens
  misc_RNA (1)...(19): siRNA sense strand
gcagagacgaauauagaau

SEQ ID NO: 580937 - RNA, 19 nt, Homo sapiens
  misc_RNA (1)...(19): siRNA sense strand
gaaucugcauccgcuggua

SEQ ID NO: 580938 - RNA, 19 nt, Homo sapiens
  misc_RNA (1)...(19): siRNA sense strand
ugauugaggauguuaauga

SEQ ID NO: 580939 - RNA, 19 nt, Homo sapiens
  misc_RNA (1)...(19): siRNA sense strand
ugccacggauccugauaua

SEQ ID NO: 580940 - RNA, 19 nt, Homo sapiens
  misc_RNA (1)...(19): siRNA sense strand
ggacuuacuugugaagaac

SEQ ID NO: 580941 - RNA, 19 nt, Homo sapiens
  misc_RNA (1)...(19): siRNA sense strand
ugccaccgcucacauagaa

SEQ ID NO: 580942 - RNA, 19 nt, Homo sapiens
  misc_RNA (1)...(19): siRNA sense strand
gcuccgcguucuucgauau

SEQ ID NO: 580943 - RNA, 19 nt, Homo sapiens
  misc_RNA (1)...(19): siRNA sense strand
uaauuccgaugguggcaaa

SEQ ID NO: 580944 - RNA, 19 nt, Homo sapiens
  misc_RNA (1)...(19): siRNA sense strand
augcugagauaaacuacua

SEQ ID NO: 580945 - RNA, 19 nt, Homo sapiens
  misc_RNA (1)...(19): siRNA sense strand
cagagacgaauauagaauu

SEQ ID NO: 580946 - RNA, 19 nt, Homo sapiens
  misc_RNA (1)...(19): siRNA sense strand
aaagagagaagaagaugug

SEQ ID NO: 580947 - RNA, 19 nt, Homo sapiens
  misc_RNA (1)...(19): siRNA sense strand
ccaaugaagacaugguuug

SEQ ID NO: 580948 - RNA, 19 nt, Homo sapiens
  misc_RNA (1)...(19): siRNA sense strand
agaagucagguguaauaua

SEQ ID NO: 580949 - RNA, 19 nt, Homo sapiens
  misc_RNA (1)...(19): siRNA sense strand
gaucagauuuuggagaauu

SEQ ID NO: 580950 - RNA, 19 nt, Homo sapiens
  misc_RNA (1)...(19): siRNA sense strand
gcacugcccagagcacaaa

SEQ ID NO: 580951 - RNA, 19 nt, Homo sapiens
  misc_RNA (1)...(19): siRNA sense strand
ucaaugcugagauaaacua

SEQ ID NO: 580952 - RNA, 19 nt, Homo sapiens
  misc_RNA (1)...(19): siRNA sense strand
acuacaaacuggugacaga

SEQ ID NO: 580953 - RNA, 19 nt, Homo sapiens
  misc_RNA (1)...(19): siRNA sense strand
ccagaaauaaucaucacuu

SEQ ID NO: 580954 - RNA, 19 nt, Homo sapiens
  misc_RNA (1)...(19): siRNA sense strand
gaauaaccagucauuugau

SEQ ID NO: 580955 - RNA, 19 nt, Homo sapiens
  misc_RNA (1)...(19): siRNA sense strand
gaaaacagguaugauuaag

SEQ ID NO: 580956 - RNA, 19 nt, Homo sapiens
  misc_RNA (1)...(19): siRNA sense strand
gcccagagcacaaaacaua

SEQ ID NO: 580957 - RNA, 19 nt, Homo sapiens
  misc_RNA (1)...(19): siRNA sense strand
gggaagaacagagaucuca

SEQ ID NO: 580958 - RNA, 19 nt, Homo sapiens
  misc_RNA (1)...(19): siRNA sense strand
agucagguguaauauagaa

SEQ ID NO: 580959 - RNA, 19 nt, Homo sapiens
  misc_RNA (1)...(19): siRNA sense strand
gaucuggauuucggaggaa

SEQ ID NO: 580960 - RNA, 19 nt, Homo sapiens
  misc_RNA (1)...(19): siRNA sense strand
gagaauucaccuccaggaa

SEQ ID NO: 580961 - RNA, 19 nt, Homo sapiens
  misc_RNA (1)...(19): siRNA sense strand
cggaggaaauggagaaguc

SEQ ID NO: 580962 - RNA, 19 nt, Homo sapiens
  misc_RNA (1)...(19): siRNA sense strand
agacaacuugcaagagaua

SEQ ID NO: 580963 - RNA, 19 nt, Homo sapiens
  misc_RNA (1)...(19): siRNA sense strand
cauagaaauccuugaugaa

SEQ ID NO: 580964 - RNA, 19 nt, Homo sapiens
  misc_RNA (1)...(19): siRNA sense strand
ccgaauagaccgugagcaa

SEQ ID NO: 580965 - RNA, 19 nt, Homo sapiens
  misc_RNA (1)...(19): siRNA sense strand
aagaagaugugaguugcaa

SEQ ID NO: 580966 - RNA, 19 nt, Homo sapiens
  misc_RNA (1)...(19): siRNA sense strand
gagcagacaccagaauaca

SEQ ID NO: 580967 - RNA, 19 nt, Homo sapiens
  misc_RNA (1)...(19): siRNA sense strand
caauaacuacuacaaacug

SEQ ID NO: 580968 - RNA, 19 nt, Homo sapiens
  misc_RNA (1)...(19): siRNA sense strand
agacauuccauucaagauu

SEQ ID NO: 580969 - RNA, 19 nt, Homo sapiens
  misc_RNA (1)...(19): siRNA sense strand
agaaacagacauuccauuc

SEQ ID NO: 580970 - RNA, 19 nt, Homo sapiens
  misc_RNA (1)...(19): siRNA sense strand
gguggaaaauccuuuaaau

SEQ ID NO: 580971 - RNA, 19 nt, Homo sapiens
  misc_RNA (1)...(19): siRNA sense strand
cgaccgcccuguacucucu

SEQ ID NO: 580972 - RNA, 19 nt, Homo sapiens
  misc_RNA (1)...(19): siRNA sense strand
ucaauggccacaucuccua

SEQ ID NO: 580973 - RNA, 19 nt, Homo sapiens
  misc_RNA (1)...(19): siRNA sense strand
gaagcaucaccuuguaugu

SEQ ID NO: 580974 - RNA, 19 nt, Homo sapiens
  misc_RNA (1)...(19): siRNA sense strand
gacagccacugaccaggau

SEQ ID NO: 580975 - RNA, 19 nt, Homo sapiens
  misc_RNA (1)...(19): siRNA sense strand
gagccuccauugcgcaagu

SEQ ID NO: 580976 - RNA, 19 nt, Homo sapiens
  misc_RNA (1)...(19): siRNA sense strand
gggcaaaucuuuagucuga

SEQ ID NO: 580977 - RNA, 19 nt, Homo sapiens
  misc_RNA (1)...(19): siRNA sense strand
gaaagacggaguuuaauuu

SEQ ID NO: 580978 - RNA, 19 nt, Homo sapiens
  misc_RNA (1)...(19): siRNA sense strand
gacaauagcccagaaguua

SEQ ID NO: 580979 - RNA, 19 nt, Homo sapiens
  misc_RNA (1)...(19): siRNA sense strand
ucaaagagcggagaaauua

SEQ ID NO: 580980 - RNA, 19 nt, Homo sapiens
  misc_RNA (1)...(19): siRNA sense strand
uaaacucucugcagaagua

SEQ ID NO: 580981 - RNA, 19 nt, Homo sapiens
  misc_RNA (1)...(19): siRNA sense strand
uaacccaaguuucucauua

SEQ ID NO: 580982 - RNA, 19 nt, Homo sapiens
  misc_RNA (1)...(19): siRNA sense strand
ggcaucaacucagaaauua

SEQ ID NO: 580983 - RNA, 19 nt, Homo sapiens
  misc_RNA (1)...(19): siRNA sense strand
ucagagacgucaacgauaa

SEQ ID NO: 580984 - RNA, 19 nt, Homo sapiens
  misc_RNA (1)...(19): siRNA sense strand
caacagaguuaccaucguu

SEQ ID NO: 580985 - RNA, 19 nt, Homo sapiens
  misc_RNA (1)...(19): siRNA sense strand
caaggaauauucaaugguu

SEQ ID NO: 580986 - RNA, 19 nt, Homo sapiens
  misc_RNA (1)...(19): siRNA sense strand
gcacaagauuuauacuaga

SEQ ID NO: 580987 - RNA, 19 nt, Homo sapiens
  misc_RNA (1)...(19): siRNA sense strand
gcucugcgcucuucgauau

SEQ ID NO: 580988 - RNA, 19 nt, Homo sapiens
  misc_RNA (1)...(19): siRNA sense strand
gauuaucucuucauccaaa

SEQ ID NO: 580989 - RNA, 19 nt, Homo sapiens
  misc_RNA (1)...(19): siRNA sense strand
ggaaagacggaguuuaauu

SEQ ID NO: 580990 - RNA, 19 nt, Homo sapiens
  misc_RNA (1)...(19): siRNA sense strand
gcaauugaguucaggacaa

SEQ ID NO: 580991 - RNA, 19 nt, Homo sapiens
  misc_RNA (1)...(19): siRNA sense strand
ggacuuugccuuauuccua

SEQ ID NO: 580992 - RNA, 19 nt, Homo sapiens
  misc_RNA (1)...(19): siRNA sense strand
gaaguuacauuccauucuc

SEQ ID NO: 580993 - RNA, 19 nt, Homo sapiens
  misc_RNA (1)...(19): siRNA sense strand
gcaaaucuuuagucugaau

SEQ ID NO: 580994 - RNA, 19 nt, Homo sapiens
  misc_RNA (1)...(19): siRNA sense strand
gaacacuaauugcuuugau

SEQ ID NO: 580995 - RNA, 19 nt, Homo sapiens
  misc_RNA (1)...(19): siRNA sense strand
gcggagaaauuaccacuca

SEQ ID NO: 580996 - RNA, 19 nt, Homo sapiens
  misc_RNA (1)...(19): siRNA sense strand
caggaaagacggaguuuaa

SEQ ID NO: 580997 - RNA, 19 nt, Homo sapiens
  misc_RNA (1)...(19): siRNA sense strand
gaagagaccaaggaauauu

SEQ ID NO: 580998 - RNA, 19 nt, Homo sapiens
  misc_RNA (1)...(19): siRNA sense strand
gaaauuaccacucaaaaga

SEQ ID NO: 580999 - RNA, 19 nt, Homo sapiens
  misc_RNA (1)...(19): siRNA sense strand
gggcaucaacucagaaauu

SEQ ID NO: 581000 - RNA, 19 nt, Homo sapiens
  misc_RNA (1)...(19): siRNA sense strand
ccaccaggcguccuacuua

SEQ ID NO: 581001 - RNA, 19 nt, Homo sapiens
  misc_RNA (1)...(19): siRNA sense strand
caaaauacaugaccaagau

SEQ ID NO: 581002 - RNA, 19 nt, Homo sapiens
  misc_RNA (1)...(19): siRNA sense strand
ggagaaauuaccacucaaa

SEQ ID NO: 581003 - RNA, 19 nt, Homo sapiens
  misc_RNA (1)...(19): siRNA sense strand
ggccaagucuccuacucua

SEQ ID NO: 581004 - RNA, 19 nt, Homo sapiens
  misc_RNA (1)...(19): siRNA sense strand
gaggagauaugcgggaaga

SEQ ID NO: 581005 - RNA, 19 nt, Homo sapiens
  misc_RNA (1)...(19): siRNA sense strand
cguauaaguugguaacaga

SEQ ID NO: 581006 - RNA, 19 nt, Homo sapiens
  misc_RNA (1)...(19): siRNA sense strand
gaagucccuuuuaagauua

SEQ ID NO: 581007 - RNA, 19 nt, Homo sapiens
  misc_RNA (1)...(19): siRNA sense strand
uaaccgacgccaaugauaa

SEQ ID NO: 581008 - RNA, 19 nt, Homo sapiens
  misc_RNA (1)...(19): siRNA sense strand
gcagaaguauaaacucucu

SEQ ID NO: 581009 - RNA, 19 nt, Homo sapiens
  misc_RNA (1)...(19): siRNA sense strand
ggcacaagauuuauacuag

SEQ ID NO: 581010 - RNA, 19 nt, Homo sapiens
  misc_RNA (1)...(19): siRNA sense strand
ggagaucgaggacauuaau

SEQ ID NO: 581011 - RNA, 19 nt, Homo sapiens
  misc_RNA (1)...(19): siRNA sense strand
uugaagagaccaaggaaua

SEQ ID NO: 581012 - RNA, 19 nt, Homo sapiens
  misc_RNA (1)...(19): siRNA sense strand
cagccuggcacaagauuua

SEQ ID NO: 581013 - RNA, 19 nt, Homo sapiens
  misc_RNA (1)...(19): siRNA sense strand
cgaagucccuuuuaagauu

SEQ ID NO: 581014 - RNA, 19 nt, Homo sapiens
  misc_RNA (1)...(19): siRNA sense strand
cagcauaagcgucauccua

SEQ ID NO: 581015 - RNA, 19 nt, Homo sapiens
  misc_RNA (1)...(19): siRNA sense strand
agaugcagauauuggcuua

SEQ ID NO: 581016 - RNA, 19 nt, Homo sapiens
  misc_RNA (1)...(19): siRNA sense strand
aggcugagcugcaguuuua

SEQ ID NO: 581017 - RNA, 19 nt, Homo sapiens
  misc_RNA (1)...(19): siRNA sense strand
gcaccacuguguugcaagu

SEQ ID NO: 581018 - RNA, 19 nt, Homo sapiens
  misc_RNA (1)...(19): siRNA sense strand
gaaccgggcaaaucuuuag

SEQ ID NO: 581019 - RNA, 19 nt, Homo sapiens
  misc_RNA (1)...(19): siRNA sense strand
guagugagcaauugaguuc

SEQ ID NO: 581020 - RNA, 19 nt, Homo sapiens
  misc_RNA (1)...(19): siRNA sense strand
gaccaaggaauauucaaug

SEQ ID NO: 581021 - RNA, 19 nt, Homo sapiens
  misc_RNA (1)...(19): siRNA sense strand
gcauaagcgucauccuaca

SEQ ID NO: 581022 - RNA, 19 nt, Homo sapiens
  misc_RNA (1)...(19): siRNA sense strand
agcagaagaugcagauauu

SEQ ID NO: 581023 - RNA, 19 nt, Homo sapiens
  misc_RNA (1)...(19): siRNA sense strand
ggacugguugcacaaugua

SEQ ID NO: 581024 - RNA, 19 nt, Homo sapiens
  misc_RNA (1)...(19): siRNA sense strand
aacccaaguuucucauuaa

SEQ ID NO: 581025 - RNA, 19 nt, Homo sapiens
  misc_RNA (1)...(19): siRNA sense strand
gaaacuggauuuugaagag

SEQ ID NO: 581026 - RNA, 19 nt, Homo sapiens
  misc_RNA (1)...(19): siRNA sense strand
gaguucaggacaagacaua

SEQ ID NO: 581027 - RNA, 19 nt, Homo sapiens
  misc_RNA (1)...(19): siRNA sense strand
ggauggugguggacugguu

SEQ ID NO: 581028 - RNA, 19 nt, Homo sapiens
  misc_RNA (1)...(19): siRNA sense strand
ggaacuggcacuggagaaa

SEQ ID NO: 581029 - RNA, 19 nt, Homo sapiens
  misc_RNA (1)...(19): siRNA sense strand
ggccuuauuuccacuuugu

SEQ ID NO: 581030 - RNA, 19 nt, Homo sapiens
  misc_RNA (1)...(19): siRNA sense strand
caagucuccuacucuauca

SEQ ID NO: 581031 - RNA, 19 nt, Homo sapiens
  misc_RNA (1)...(19): siRNA sense strand
gaacuuuuaucacgugaau

SEQ ID NO: 581032 - RNA, 19 nt, Homo sapiens
  misc_RNA (1)...(19): siRNA sense strand
uauaaacucucucuuaacc

SEQ ID NO: 581033 - RNA, 19 nt, Homo sapiens
  misc_RNA (1)...(19): siRNA sense strand
agacauacuuuguggugau

SEQ ID NO: 581034 - RNA, 19 nt, Homo sapiens
  misc_RNA (1)...(19): siRNA sense strand
cuggaacacuaauugcuuu

SEQ ID NO: 581035 - RNA, 19 nt, Homo sapiens
  misc_RNA (1)...(19): siRNA sense strand
guaaccgacgccaaugaua

SEQ ID NO: 581036 - RNA, 19 nt, Homo sapiens
  misc_RNA (1)...(19): siRNA sense strand
ccacugagcuccggaucca

SEQ ID NO: 581037 - RNA, 19 nt, Homo sapiens
  misc_RNA (1)...(19): siRNA sense strand
cuugugcucuggaauuuga

SEQ ID NO: 581038 - RNA, 19 nt, Homo sapiens
  misc_RNA (1)...(19): siRNA sense strand
gacauacuuuguggugauu

SEQ ID NO: 581039 - RNA, 19 nt, Homo sapiens
  misc_RNA (1)...(19): siRNA sense strand
ucaguucggagaagccuua

SEQ ID NO: 581040 - RNA, 19 nt, Homo sapiens
  misc_RNA (1)...(19): siRNA sense strand
uaucagagacgucaacgau

SEQ ID NO: 581041 - RNA, 19 nt, Homo sapiens
  misc_RNA (1)...(19): siRNA sense strand
gaguuaccaucguuuaguc

SEQ ID NO: 581042 - RNA, 19 nt, Homo sapiens
  misc_RNA (1)...(19): siRNA sense strand
uaucauggccagcgaccua

SEQ ID NO: 581043 - RNA, 19 nt, Homo sapiens
  misc_RNA (1)...(19): siRNA sense strand
gcccagaaguuacauucca

SEQ ID NO: 581044 - RNA, 19 nt, Homo sapiens
  misc_RNA (1)...(19): siRNA sense strand
cagaaccgggcaaaucuuu

SEQ ID NO: 581045 - RNA, 19 nt, Homo sapiens
  misc_RNA (1)...(19): siRNA sense strand
uagcagaagaugcagauau

SEQ ID NO: 581046 - RNA, 19 nt, Homo sapiens
  misc_RNA (1)...(19): siRNA sense strand
gcacaauguacaguugaaa

SEQ ID NO: 581047 - RNA, 19 nt, Homo sapiens
  misc_RNA (1)...(19): siRNA sense strand
guucagcguccaggaguua

SEQ ID NO: 581048 - RNA, 19 nt, Homo sapiens
  misc_RNA (1)...(19): siRNA sense strand
caaccgagacguguacaga

SEQ ID NO: 581049 - RNA, 19 nt, Homo sapiens
  misc_RNA (1)...(19): siRNA sense strand
gcagauauuggcuuaaacu

SEQ ID NO: 581050 - RNA, 19 nt, Homo sapiens
  misc_RNA (1)...(19): siRNA sense strand
gcagaagaugcagauauug

SEQ ID NO: 581051 - RNA, 19 nt, Homo sapiens
  misc_RNA (1)...(19): siRNA sense strand
uacauuccauucucuacuu

SEQ ID NO: 581052 - RNA, 19 nt, Homo sapiens
  misc_RNA (1)...(19): siRNA sense strand
ggaauauucaaugguugua

SEQ ID NO: 581053 - RNA, 19 nt, Homo sapiens
  misc_RNA (1)...(19): siRNA sense strand
cuacagaaccgggcaaauc

SEQ ID NO: 581054 - RNA, 19 nt, Homo sapiens
  misc_RNA (1)...(19): siRNA sense strand
guggagaucgaggacauua

SEQ ID NO: 581055 - RNA, 19 nt, Homo sapiens
  misc_RNA (1)...(19): siRNA sense strand
cgacuucccauccugaguu

SEQ ID NO: 581056 - RNA, 19 nt, Homo sapiens
  misc_RNA (1)...(19): siRNA sense strand
uaagcgucauccuacauau

SEQ ID NO: 581057 - RNA, 19 nt, Homo sapiens
  misc_RNA (1)...(19): siRNA sense strand
uuaaugaccacacgccaaa

SEQ ID NO: 581058 - RNA, 19 nt, Homo sapiens
  misc_RNA (1)...(19): siRNA sense strand
caauugaguucaggacaag

SEQ ID NO: 581059 - RNA, 19 nt, Homo sapiens
  misc_RNA (1)...(19): siRNA sense strand
uaacagauggaacccuaga

SEQ ID NO: 581060 - RNA, 19 nt, Homo sapiens
  misc_RNA (1)...(19): siRNA sense strand
ugacaauagcccagaaguu

SEQ ID NO: 581061 - RNA, 19 nt, Homo sapiens
  misc_RNA (1)...(19): siRNA sense strand
ggagauaugcgggaagaag

SEQ ID NO: 581062 - RNA, 19 nt, Homo sapiens
  misc_RNA (1)...(19): siRNA sense strand
acagaguuaccaucguuua

SEQ ID NO: 581063 - RNA, 19 nt, Homo sapiens
  misc_RNA (1)...(19): siRNA sense strand
gagcuccggauccagguaa

SEQ ID NO: 581064 - RNA, 19 nt, Homo sapiens
  misc_RNA (1)...(19): siRNA sense strand
gacggaguuuaauuuccua

SEQ ID NO: 581065 - RNA, 19 nt, Homo sapiens
  misc_RNA (1)...(19): siRNA sense strand
ccaagucuccuacucuauc

SEQ ID NO: 581066 - RNA, 19 nt, Homo sapiens
  misc_RNA (1)...(19): siRNA sense strand
guugcacaauguacaguug

SEQ ID NO: 581067 - RNA, 19 nt, Homo sapiens
  misc_RNA (1)...(19): siRNA sense strand
agagucagccuucgggaaa

SEQ ID NO: 581068 - RNA, 19 nt, Homo sapiens
  misc_RNA (1)...(19): siRNA sense strand
ccagguaaccgacgccaau

SEQ ID NO: 581069 - RNA, 19 nt, Homo sapiens
  misc_RNA (1)...(19): siRNA sense strand
gcacagccuggcacaagau

SEQ ID NO: 581070 - RNA, 19 nt, Homo sapiens
  misc_RNA (1)...(19): siRNA sense strand
gaaaauggggagguuaauu

SEQ ID NO: 581071 - RNA, 19 nt, Homo sapiens
  misc_RNA (1)...(19): siRNA sense strand
gagggcaucaacucagaaa

SEQ ID NO: 581072 - RNA, 19 nt, Homo sapiens
  misc_RNA (1)...(19): siRNA sense strand
cagcuugugcucuggaauu

SEQ ID NO: 581073 - RNA, 19 nt, Homo sapiens
  misc_RNA (1)...(19): siRNA sense strand
augcagauauuggcuuaaa

SEQ ID NO: 581074 - RNA, 19 nt, Homo sapiens
  misc_RNA (1)...(19): siRNA sense strand
agaaguagcagaagaugca

SEQ ID NO: 581075 - RNA, 19 nt, Homo sapiens
  misc_RNA (1)...(19): siRNA sense strand
ggaacacuaauugcuuuga

SEQ ID NO: 581076 - RNA, 19 nt, Homo sapiens
  misc_RNA (1)...(19): siRNA sense strand
gggcaaaucuuuagucuga

SEQ ID NO: 581077 - RNA, 19 nt, Homo sapiens
  misc_RNA (1)...(19): siRNA sense strand
gaaagacggaguuuaauuu

SEQ ID NO: 581078 - RNA, 19 nt, Homo sapiens
  misc_RNA (1)...(19): siRNA sense strand
gacaauagcccagaaguua

SEQ ID NO: 581079 - RNA, 19 nt, Homo sapiens
  misc_RNA (1)...(19): siRNA sense strand
ucaaagagcggagaaauua

SEQ ID NO: 581080 - RNA, 19 nt, Homo sapiens
  misc_RNA (1)...(19): siRNA sense strand
uaaacucucugcagaagua

SEQ ID NO: 581081 - RNA, 19 nt, Homo sapiens
  misc_RNA (1)...(19): siRNA sense strand
uaacccaaguuucucauua

SEQ ID NO: 581082 - RNA, 19 nt, Homo sapiens
  misc_RNA (1)...(19): siRNA sense strand
ggcaucaacucagaaauua

SEQ ID NO: 581083 - RNA, 19 nt, Homo sapiens
  misc_RNA (1)...(19): siRNA sense strand
ucagagacgucaacgauaa

SEQ ID NO: 581084 - RNA, 19 nt, Homo sapiens
  misc_RNA (1)...(19): siRNA sense strand
caacagaguuaccaucguu

SEQ ID NO: 581085 - RNA, 19 nt, Homo sapiens
  misc_RNA (1)...(19): siRNA sense strand
caaggaauauucaaugguu

SEQ ID NO: 581086 - RNA, 19 nt, Homo sapiens
  misc_RNA (1)...(19): siRNA sense strand
gcacaagauuuauacuaga

SEQ ID NO: 581087 - RNA, 19 nt, Homo sapiens
  misc_RNA (1)...(19): siRNA sense strand
gcucugcgcucuucgauau

SEQ ID NO: 581088 - RNA, 19 nt, Homo sapiens
  misc_RNA (1)...(19): siRNA sense strand
gauuaucucuucauccaaa

SEQ ID NO: 581089 - RNA, 19 nt, Homo sapiens
  misc_RNA (1)...(19): siRNA sense strand
ggaaagacggaguuuaauu

SEQ ID NO: 581090 - RNA, 19 nt, Homo sapiens
  misc_RNA (1)...(19): siRNA sense strand
gcaauugaguucaggacaa

SEQ ID NO: 581091 - RNA, 19 nt, Homo sapiens
  misc_RNA (1)...(19): siRNA sense strand
ggacuuugccuuauuccua

SEQ ID NO: 581092 - RNA, 19 nt, Homo sapiens
  misc_RNA (1)...(19): siRNA sense strand
gaaguuacauuccauucuc

SEQ ID NO: 581093 - RNA, 19 nt, Homo sapiens
  misc_RNA (1)...(19): siRNA sense strand
gcaaaucuuuagucugaau

SEQ ID NO: 581094 - RNA, 19 nt, Homo sapiens
  misc_RNA (1)...(19): siRNA sense strand
gaacacuaauugcuuugau

SEQ ID NO: 581095 - RNA, 19 nt, Homo sapiens
  misc_RNA (1)...(19): siRNA sense strand
gcggagaaauuaccacuca

SEQ ID NO: 581096 - RNA, 19 nt, Homo sapiens
  misc_RNA (1)...(19): siRNA sense strand
caggaaagacggaguuuaa

SEQ ID NO: 581097 - RNA, 19 nt, Homo sapiens
  misc_RNA (1)...(19): siRNA sense strand
gaagagaccaaggaauauu

SEQ ID NO: 581098 - RNA, 19 nt, Homo sapiens
  misc_RNA (1)...(19): siRNA sense strand
gaaauuaccacucaaaaga

SEQ ID NO: 581099 - RNA, 19 nt, Homo sapiens
  misc_RNA (1)...(19): siRNA sense strand
gggcaucaacucagaaauu

SEQ ID NO: 581100 - RNA, 19 nt, Homo sapiens
  misc_RNA (1)...(19): siRNA sense strand
ccaccaggcguccuacuua

SEQ ID NO: 581101 - RNA, 19 nt, Homo sapiens
  misc_RNA (1)...(19): siRNA sense strand
caaaauacaugaccaagau

SEQ ID NO: 581102 - RNA, 19 nt, Homo sapiens
  misc_RNA (1)...(19): siRNA sense strand
ggagaaauuaccacucaaa

SEQ ID NO: 581103 - RNA, 19 nt, Homo sapiens
  misc_RNA (1)...(19): siRNA sense strand
ggccaagucuccuacucua

SEQ ID NO: 581104 - RNA, 19 nt, Homo sapiens
  misc_RNA (1)...(19): siRNA sense strand
gaggagauaugcgggaaga

SEQ ID NO: 581105 - RNA, 19 nt, Homo sapiens
  misc_RNA (1)...(19): siRNA sense strand
cguauaaguugguaacaga

SEQ ID NO: 581106 - RNA, 19 nt, Homo sapiens
  misc_RNA (1)...(19): siRNA sense strand
gaagucccuuuuaagauua

SEQ ID NO: 581107 - RNA, 19 nt, Homo sapiens
  misc_RNA (1)...(19): siRNA sense strand
uaaccgacgccaaugauaa

SEQ ID NO: 581108 - RNA, 19 nt, Homo sapiens
  misc_RNA (1)...(19): siRNA sense strand
gcagaaguauaaacucucu

SEQ ID NO: 581109 - RNA, 19 nt, Homo sapiens
  misc_RNA (1)...(19): siRNA sense strand
ggcacaagauuuauacuag

SEQ ID NO: 581110 - RNA, 19 nt, Homo sapiens
  misc_RNA (1)...(19): siRNA sense strand
ggagaucgaggacauuaau

SEQ ID NO: 581111 - RNA, 19 nt, Homo sapiens
  misc_RNA (1)...(19): siRNA sense strand
uugaagagaccaaggaaua

SEQ ID NO: 581112 - RNA, 19 nt, Homo sapiens
  misc_RNA (1)...(19): siRNA sense strand
cagccuggcacaagauuua

SEQ ID NO: 581113 - RNA, 19 nt, Homo sapiens
  misc_RNA (1)...(19): siRNA sense strand
cgaagucccuuuuaagauu

SEQ ID NO: 581114 - RNA, 19 nt, Homo sapiens
  misc_RNA (1)...(19): siRNA sense strand
cagcauaagcgucauccua

SEQ ID NO: 581115 - RNA, 19 nt, Homo sapiens
  misc_RNA (1)...(19): siRNA sense strand
agaugcagauauuggcuua

SEQ ID NO: 581116 - RNA, 19 nt, Homo sapiens
  misc_RNA (1)...(19): siRNA sense strand
aggcugagcugcaguuuua

SEQ ID NO: 581117 - RNA, 19 nt, Homo sapiens
  misc_RNA (1)...(19): siRNA sense strand
gcaccacuguguugcaagu

SEQ ID NO: 581118 - RNA, 19 nt, Homo sapiens
  misc_RNA (1)...(19): siRNA sense strand
gaaccgggcaaaucuuuag

SEQ ID NO: 581119 - RNA, 19 nt, Homo sapiens
  misc_RNA (1)...(19): siRNA sense strand
guagugagcaauugaguuc

SEQ ID NO: 581120 - RNA, 19 nt, Homo sapiens
  misc_RNA (1)...(19): siRNA sense strand
gaccaaggaauauucaaug

SEQ ID NO: 581121 - RNA, 19 nt, Homo sapiens
  misc_RNA (1)...(19): siRNA sense strand
gcauaagcgucauccuaca

SEQ ID NO: 581122 - RNA, 19 nt, Homo sapiens
  misc_RNA (1)...(19): siRNA sense strand
agcagaagaugcagauauu

SEQ ID NO: 581123 - RNA, 19 nt, Homo sapiens
  misc_RNA (1)...(19): siRNA sense strand
ggacugguugcacaaugua

SEQ ID NO: 581124 - RNA, 19 nt, Homo sapiens
  misc_RNA (1)...(19): siRNA sense strand
aacccaaguuucucauuaa

SEQ ID NO: 581125 - RNA, 19 nt, Homo sapiens
  misc_RNA (1)...(19): siRNA sense strand
gaaacuggauuuugaagag

SEQ ID NO: 581126 - RNA, 19 nt, Homo sapiens
  misc_RNA (1)...(19): siRNA sense strand
gaguucaggacaagacaua

SEQ ID NO: 581127 - RNA, 19 nt, Homo sapiens
  misc_RNA (1)...(19): siRNA sense strand
ggauggugguggacugguu

SEQ ID NO: 581128 - RNA, 19 nt, Homo sapiens
  misc_RNA (1)...(19): siRNA sense strand
ggaacuggcacuggagaaa

SEQ ID NO: 581129 - RNA, 19 nt, Homo sapiens
  misc_RNA (1)...(19): siRNA sense strand
ggccuuauuuccacuuugu

SEQ ID NO: 581130 - RNA, 19 nt, Homo sapiens
  misc_RNA (1)...(19): siRNA sense strand
caagucuccuacucuauca

SEQ ID NO: 581131 - RNA, 19 nt, Homo sapiens
  misc_RNA (1)...(19): siRNA sense strand
gaacuuuuaucacgugaau

SEQ ID NO: 581132 - RNA, 19 nt, Homo sapiens
  misc_RNA (1)...(19): siRNA sense strand
uauaaacucucucuuaacc

SEQ ID NO: 581133 - RNA, 19 nt, Homo sapiens
  misc_RNA (1)...(19): siRNA sense strand
agacauacuuuguggugau

SEQ ID NO: 581134 - RNA, 19 nt, Homo sapiens
  misc_RNA (1)...(19): siRNA sense strand
cuggaacacuaauugcuuu

SEQ ID NO: 581135 - RNA, 19 nt, Homo sapiens
  misc_RNA (1)...(19): siRNA sense strand
guaaccgacgccaaugaua

SEQ ID NO: 581136 - RNA, 19 nt, Homo sapiens
  misc_RNA (1)...(19): siRNA sense strand
ccacugagcuccggaucca

SEQ ID NO: 581137 - RNA, 19 nt, Homo sapiens
  misc_RNA (1)...(19): siRNA sense strand
cuugugcucuggaauuuga

SEQ ID NO: 581138 - RNA, 19 nt, Homo sapiens
  misc_RNA (1)...(19): siRNA sense strand
gacauacuuuguggugauu

SEQ ID NO: 581139 - RNA, 19 nt, Homo sapiens
  misc_RNA (1)...(19): siRNA sense strand
ucaguucggagaagccuua

SEQ ID NO: 581140 - RNA, 19 nt, Homo sapiens
  misc_RNA (1)...(19): siRNA sense strand
uaucagagacgucaacgau

SEQ ID NO: 581141 - RNA, 19 nt, Homo sapiens
  misc_RNA (1)...(19): siRNA sense strand
gaguuaccaucguuuaguc

SEQ ID NO: 581142 - RNA, 19 nt, Homo sapiens
  misc_RNA (1)...(19): siRNA sense strand
uaucauggccagcgaccua

SEQ ID NO: 581143 - RNA, 19 nt, Homo sapiens
  misc_RNA (1)...(19): siRNA sense strand
gcccagaaguuacauucca

SEQ ID NO: 581144 - RNA, 19 nt, Homo sapiens
  misc_RNA (1)...(19): siRNA sense strand
cagaaccgggcaaaucuuu

SEQ ID NO: 581145 - RNA, 19 nt, Homo sapiens
  misc_RNA (1)...(19): siRNA sense strand
uagcagaagaugcagauau

SEQ ID NO: 581146 - RNA, 19 nt, Homo sapiens
  misc_RNA (1)...(19): siRNA sense strand
gcacaauguacaguugaaa

SEQ ID NO: 581147 - RNA, 19 nt, Homo sapiens
  misc_RNA (1)...(19): siRNA sense strand
guucagcguccaggaguua

SEQ ID NO: 581148 - RNA, 19 nt, Homo sapiens
  misc_RNA (1)...(19): siRNA sense strand
caaccgagacguguacaga

SEQ ID NO: 581149 - RNA, 19 nt, Homo sapiens
  misc_RNA (1)...(19): siRNA sense strand
gcagauauuggcuuaaacu

SEQ ID NO: 581150 - RNA, 19 nt, Homo sapiens
  misc_RNA (1)...(19): siRNA sense strand
gcagaagaugcagauauug

SEQ ID NO: 581151 - RNA, 19 nt, Homo sapiens
  misc_RNA (1)...(19): siRNA sense strand
uacauuccauucucuacuu

SEQ ID NO: 581152 - RNA, 19 nt, Homo sapiens
  misc_RNA (1)...(19): siRNA sense strand
ggaauauucaaugguugua

SEQ ID NO: 581153 - RNA, 19 nt, Homo sapiens
  misc_RNA (1)...(19): siRNA sense strand
cuacagaaccgggcaaauc

SEQ ID NO: 581154 - RNA, 19 nt, Homo sapiens
  misc_RNA (1)...(19): siRNA sense strand
guggagaucgaggacauua

SEQ ID NO: 581155 - RNA, 19 nt, Homo sapiens
  misc_RNA (1)...(19): siRNA sense strand
cgacuucccauccugaguu

SEQ ID NO: 581156 - RNA, 19 nt, Homo sapiens
  misc_RNA (1)...(19): siRNA sense strand
uaagcgucauccuacauau

SEQ ID NO: 581157 - RNA, 19 nt, Homo sapiens
  misc_RNA (1)...(19): siRNA sense strand
uuaaugaccacacgccaaa

SEQ ID NO: 581158 - RNA, 19 nt, Homo sapiens
  misc_RNA (1)...(19): siRNA sense strand
caauugaguucaggacaag

SEQ ID NO: 581159 - RNA, 19 nt, Homo sapiens
  misc_RNA (1)...(19): siRNA sense strand
uaacagauggaacccuaga

SEQ ID NO: 581160 - RNA, 19 nt, Homo sapiens
  misc_RNA (1)...(19): siRNA sense strand
ugacaauagcccagaaguu

SEQ ID NO: 581161 - RNA, 19 nt, Homo sapiens
  misc_RNA (1)...(19): siRNA sense strand
ggagauaugcgggaagaag

SEQ ID NO: 581162 - RNA, 19 nt, Homo sapiens
  misc_RNA (1)...(19): siRNA sense strand
acagaguuaccaucguuua

SEQ ID NO: 581163 - RNA, 19 nt, Homo sapiens
  misc_RNA (1)...(19): siRNA sense strand
gagcuccggauccagguaa

SEQ ID NO: 581164 - RNA, 19 nt, Homo sapiens
  misc_RNA (1)...(19): siRNA sense strand
gacggaguuuaauuuccua

SEQ ID NO: 581165 - RNA, 19 nt, Homo sapiens
  misc_RNA (1)...(19): siRNA sense strand
ccaagucuccuacucuauc

SEQ ID NO: 581166 - RNA, 19 nt, Homo sapiens
  misc_RNA (1)...(19): siRNA sense strand
guugcacaauguacaguug

SEQ ID NO: 581167 - RNA, 19 nt, Homo sapiens
  misc_RNA (1)...(19): siRNA sense strand
agagucagccuucgggaaa

SEQ ID NO: 581168 - RNA, 19 nt, Homo sapiens
  misc_RNA (1)...(19): siRNA sense strand
ccagguaaccgacgccaau

SEQ ID NO: 581169 - RNA, 19 nt, Homo sapiens
  misc_RNA (1)...(19): siRNA sense strand
gcacagccuggcacaagau

SEQ ID NO: 581170 - RNA, 19 nt, Homo sapiens
  misc_RNA (1)...(19): siRNA sense strand
gaaaauggggagguuaauu

SEQ ID NO: 581171 - RNA, 19 nt, Homo sapiens
  misc_RNA (1)...(19): siRNA sense strand
gagggcaucaacucagaaa

SEQ ID NO: 581172 - RNA, 19 nt, Homo sapiens
  misc_RNA (1)...(19): siRNA sense strand
cagcuugugcucuggaauu

SEQ ID NO: 581173 - RNA, 19 nt, Homo sapiens
  misc_RNA (1)...(19): siRNA sense strand
augcagauauuggcuuaaa

SEQ ID NO: 581174 - RNA, 19 nt, Homo sapiens
  misc_RNA (1)...(19): siRNA sense strand
agaaguagcagaagaugca

SEQ ID NO: 581175 - RNA, 19 nt, Homo sapiens
  misc_RNA (1)...(19): siRNA sense strand
ggaacacuaauugcuuuga

SEQ ID NO: 581176 - RNA, 19 nt, Homo sapiens
  misc_RNA (1)...(19): siRNA sense strand
gcagauagcuugcaagaga

SEQ ID NO: 581177 - RNA, 19 nt, Homo sapiens
  misc_RNA (1)...(19): siRNA sense strand
gaaauccuaugccaacuaa

SEQ ID NO: 581178 - RNA, 19 nt, Homo sapiens
  misc_RNA (1)...(19): siRNA sense strand
gaucacagcuaccgacaaa

SEQ ID NO: 581179 - RNA, 19 nt, Homo sapiens
  misc_RNA (1)...(19): siRNA sense strand
ggaaauagcuccggaugga

SEQ ID NO: 581180 - RNA, 19 nt, Homo sapiens
  misc_RNA (1)...(19): siRNA sense strand
agagauagcuacacaauug

SEQ ID NO: 581181 - RNA, 19 nt, Homo sapiens
  misc_RNA (1)...(19): siRNA sense strand
gaacuggacuuugaagaga

SEQ ID NO: 581182 - RNA, 19 nt, Homo sapiens
  misc_RNA (1)...(19): siRNA sense strand
gcucugcgcucuucgauau

SEQ ID NO: 581183 - RNA, 19 nt, Homo sapiens
  misc_RNA (1)...(19): siRNA sense strand
gaugaagccucuugguuug

SEQ ID NO: 581184 - RNA, 19 nt, Homo sapiens
  misc_RNA (1)...(19): siRNA sense strand
gaucuagauucuggauuua

SEQ ID NO: 581185 - RNA, 19 nt, Homo sapiens
  misc_RNA (1)...(19): siRNA sense strand
gauccgcacuucucuuuga

SEQ ID NO: 581186 - RNA, 19 nt, Homo sapiens
  misc_RNA (1)...(19): siRNA sense strand
gcauguagcugagaacaau

SEQ ID NO: 581187 - RNA, 19 nt, Homo sapiens
  misc_RNA (1)...(19): siRNA sense strand
ggacuuugccuuauuccua

SEQ ID NO: 581188 - RNA, 19 nt, Homo sapiens
  misc_RNA (1)...(19): siRNA sense strand
ccaccgaccuuuagccaaa

SEQ ID NO: 581189 - RNA, 19 nt, Homo sapiens
  misc_RNA (1)...(19): siRNA sense strand
gaaaucaucuaugccuuca

SEQ ID NO: 581190 - RNA, 19 nt, Homo sapiens
  misc_RNA (1)...(19): siRNA sense strand
cgacguguguucuggaauu

SEQ ID NO: 581191 - RNA, 19 nt, Homo sapiens
  misc_RNA (1)...(19): siRNA sense strand
ugaucuagauucuggauuu

SEQ ID NO: 581192 - RNA, 19 nt, Homo sapiens
  misc_RNA (1)...(19): siRNA sense strand
aaugggaacuuacuuguga

SEQ ID NO: 581193 - RNA, 19 nt, Homo sapiens
  misc_RNA (1)...(19): siRNA sense strand
cuaauggccuugucuccua

SEQ ID NO: 581194 - RNA, 19 nt, Homo sapiens
  misc_RNA (1)...(19): siRNA sense strand
gcaagauccugauguaggu

SEQ ID NO: 581195 - RNA, 19 nt, Homo sapiens
  misc_RNA (1)...(19): siRNA sense strand
ccucuugguuugaaaguaa

SEQ ID NO: 581196 - RNA, 19 nt, Homo sapiens
  misc_RNA (1)...(19): siRNA sense strand
gcaagaagucgacgugugu

SEQ ID NO: 581197 - RNA, 19 nt, Homo sapiens
  misc_RNA (1)...(19): siRNA sense strand
ggacaucacacugcauauu

SEQ ID NO: 581198 - RNA, 19 nt, Homo sapiens
  misc_RNA (1)...(19): siRNA sense strand
gaagugagacaacuguuca

SEQ ID NO: 581199 - RNA, 19 nt, Homo sapiens
  misc_RNA (1)...(19): siRNA sense strand
gggaagagcagccacauca

SEQ ID NO: 581200 - RNA, 19 nt, Homo sapiens
  misc_RNA (1)...(19): siRNA sense strand
gcuacaguuucaccuagua

SEQ ID NO: 581201 - RNA, 19 nt, Homo sapiens
  misc_RNA (1)...(19): siRNA sense strand
uaaugacaauccagaaaug

SEQ ID NO: 581202 - RNA, 19 nt, Homo sapiens
  misc_RNA (1)...(19): siRNA sense strand
gcagaucccagaauacaau

SEQ ID NO: 581203 - RNA, 19 nt, Homo sapiens
  misc_RNA (1)...(19): siRNA sense strand
gggcagaggcgaaugcuau

SEQ ID NO: 581204 - RNA, 19 nt, Homo sapiens
  misc_RNA (1)...(19): siRNA sense strand
gaaaugccuucuaauucag

SEQ ID NO: 581205 - RNA, 19 nt, Homo sapiens
  misc_RNA (1)...(19): siRNA sense strand
ugaugaagccucuugguuu

SEQ ID NO: 581206 - RNA, 19 nt, Homo sapiens
  misc_RNA (1)...(19): siRNA sense strand
agauaacccuggcuucuga

SEQ ID NO: 581207 - RNA, 19 nt, Homo sapiens
  misc_RNA (1)...(19): siRNA sense strand
uuggagaacuggacuuuga

SEQ ID NO: 581208 - RNA, 19 nt, Homo sapiens
  misc_RNA (1)...(19): siRNA sense strand
uguucaagcuggacaguaa

SEQ ID NO: 581209 - RNA, 19 nt, Homo sapiens
  misc_RNA (1)...(19): siRNA sense strand
gaggagauuuguggcaaga

SEQ ID NO: 581210 - RNA, 19 nt, Homo sapiens
  misc_RNA (1)...(19): siRNA sense strand
gagauacaaccugaccuua

SEQ ID NO: 581211 - RNA, 19 nt, Homo sapiens
  misc_RNA (1)...(19): siRNA sense strand
gaagagagagauagcuaca

SEQ ID NO: 581212 - RNA, 19 nt, Homo sapiens
  misc_RNA (1)...(19): siRNA sense strand
ggagauuuguggcaagaag

SEQ ID NO: 581213 - RNA, 19 nt, Homo sapiens
  misc_RNA (1)...(19): siRNA sense strand
gcaaggaagugagacaacu

SEQ ID NO: 581214 - RNA, 19 nt, Homo sapiens
  misc_RNA (1)...(19): siRNA sense strand
gauacaaccugaccuuagc

SEQ ID NO: 581215 - RNA, 19 nt, Homo sapiens
  misc_RNA (1)...(19): siRNA sense strand
gagcagaucccagaauaca

SEQ ID NO: 581216 - RNA, 19 nt, Homo sapiens
  misc_RNA (1)...(19): siRNA sense strand
caacauauacaagaagaug

SEQ ID NO: 581217 - RNA, 19 nt, Homo sapiens
  misc_RNA (1)...(19): siRNA sense strand
gacaucacacugcauauug

SEQ ID NO: 581218 - RNA, 19 nt, Homo sapiens
  misc_RNA (1)...(19): siRNA sense strand
gcacuucucuuugauucag

SEQ ID NO: 581219 - RNA, 19 nt, Homo sapiens
  misc_RNA (1)...(19): siRNA sense strand
guaaugacaauccagaaau

SEQ ID NO: 581220 - RNA, 19 nt, Homo sapiens
  misc_RNA (1)...(19): siRNA sense strand
caaaacacaugaucuagau

SEQ ID NO: 581221 - RNA, 19 nt, Homo sapiens
  misc_RNA (1)...(19): siRNA sense strand
agagagagauagcuacaca

SEQ ID NO: 581222 - RNA, 19 nt, Homo sapiens
  misc_RNA (1)...(19): siRNA sense strand
uagggaaccucgccaagga

SEQ ID NO: 581223 - RNA, 19 nt, Homo sapiens
  misc_RNA (1)...(19): siRNA sense strand
gaccaucacucugcacauc

SEQ ID NO: 581224 - RNA, 19 nt, Homo sapiens
  misc_RNA (1)...(19): siRNA sense strand
aaauaucacugagcuggaa

SEQ ID NO: 581225 - RNA, 19 nt, Homo sapiens
  misc_RNA (1)...(19): siRNA sense strand
ggacugccguugcccugau

SEQ ID NO: 581226 - RNA, 19 nt, Homo sapiens
  misc_RNA (1)...(19): siRNA sense strand
gcuucugaaucccaacaua

SEQ ID NO: 581227 - RNA, 19 nt, Homo sapiens
  misc_RNA (1)...(19): siRNA sense strand
uaaaagugauggccauuga

SEQ ID NO: 581228 - RNA, 19 nt, Homo sapiens
  misc_RNA (1)...(19): siRNA sense strand
gacaacccaccgaccuuua

SEQ ID NO: 581229 - RNA, 19 nt, Homo sapiens
  misc_RNA (1)...(19): siRNA sense strand
cacugcauauuguaaagua

SEQ ID NO: 581230 - RNA, 19 nt, Homo sapiens
  misc_RNA (1)...(19): siRNA sense strand
ugagacaacuguucaagcu

SEQ ID NO: 581231 - RNA, 19 nt, Homo sapiens
  misc_RNA (1)...(19): siRNA sense strand
ggaagugagacaacuguuc

SEQ ID NO: 581232 - RNA, 19 nt, Homo sapiens
  misc_RNA (1)...(19): siRNA sense strand
ccacugagggcuacuuuca

SEQ ID NO: 581233 - RNA, 19 nt, Homo sapiens
  misc_RNA (1)...(19): siRNA sense strand
gagagauagcuacacaauu

SEQ ID NO: 581234 - RNA, 19 nt, Homo sapiens
  misc_RNA (1)...(19): siRNA sense strand
caagaucuucuaugugaug

SEQ ID NO: 581235 - RNA, 19 nt, Homo sapiens
  misc_RNA (1)...(19): siRNA sense strand
gagccuccauugcgcaugu

SEQ ID NO: 581236 - RNA, 19 nt, Homo sapiens
  misc_RNA (1)...(19): siRNA sense strand
gaaaaugggaacuuacuug

SEQ ID NO: 581237 - RNA, 19 nt, Homo sapiens
  misc_RNA (1)...(19): siRNA sense strand
ucgcagaugcaaaugauaa

SEQ ID NO: 581238 - RNA, 19 nt, Homo sapiens
  misc_RNA (1)...(19): siRNA sense strand
gaagccucuugguuugaaa

SEQ ID NO: 581239 - RNA, 19 nt, Homo sapiens
  misc_RNA (1)...(19): siRNA sense strand
ggagcuacaguuucaccua

SEQ ID NO: 581240 - RNA, 19 nt, Homo sapiens
  misc_RNA (1)...(19): siRNA sense strand
aggcggagcuacaguuuca

SEQ ID NO: 581241 - RNA, 19 nt, Homo sapiens
  misc_RNA (1)...(19): siRNA sense strand
aaacacaugaucuagauuc

SEQ ID NO: 581242 - RNA, 19 nt, Homo sapiens
  misc_RNA (1)...(19): siRNA sense strand
caucaauauuggcaaggaa

SEQ ID NO: 581243 - RNA, 19 nt, Homo sapiens
  misc_RNA (1)...(19): siRNA sense strand
ucuaugccuucaucaauau

SEQ ID NO: 581244 - RNA, 19 nt, Homo sapiens
  misc_RNA (1)...(19): siRNA sense strand
aaucaucuaugccuucauc

SEQ ID NO: 581245 - RNA, 19 nt, Homo sapiens
  misc_RNA (1)...(19): siRNA sense strand
gacguguguucuggaauuu

SEQ ID NO: 581246 - RNA, 19 nt, Homo sapiens
  misc_RNA (1)...(19): siRNA sense strand
ugaagccucuugguuugaa

SEQ ID NO: 581247 - RNA, 19 nt, Homo sapiens
  misc_RNA (1)...(19): siRNA sense strand
acaccgaguuuaaauuucu

SEQ ID NO: 581248 - RNA, 19 nt, Homo sapiens
  misc_RNA (1)...(19): siRNA sense strand
ccuggugucugcuucaaga

SEQ ID NO: 581249 - RNA, 19 nt, Homo sapiens
  misc_RNA (1)...(19): siRNA sense strand
caucaaugccgaaaucauc

SEQ ID NO: 581250 - RNA, 19 nt, Homo sapiens
  misc_RNA (1)...(19): siRNA sense strand
cguguguucuggaauuuga

SEQ ID NO: 581251 - RNA, 19 nt, Homo sapiens
  misc_RNA (1)...(19): siRNA sense strand
gaauacaaugugacgauca

SEQ ID NO: 581252 - RNA, 19 nt, Homo sapiens
  misc_RNA (1)...(19): siRNA sense strand
gcagaggcgaaugcuauuu

SEQ ID NO: 581253 - RNA, 19 nt, Homo sapiens
  misc_RNA (1)...(19): siRNA sense strand
acccagagcuaguacugaa

SEQ ID NO: 581254 - RNA, 19 nt, Homo sapiens
  misc_RNA (1)...(19): siRNA sense strand
cauacagguuggugacaga

SEQ ID NO: 581255 - RNA, 19 nt, Homo sapiens
  misc_RNA (1)...(19): siRNA sense strand
ggagauaacccuggcuucu

SEQ ID NO: 581256 - RNA, 19 nt, Homo sapiens
  misc_RNA (1)...(19): siRNA sense strand
ggaacucaccacuauugga

SEQ ID NO: 581257 - RNA, 19 nt, Homo sapiens
  misc_RNA (1)...(19): siRNA sense strand
caucuaugccuucaucaau

SEQ ID NO: 581258 - RNA, 19 nt, Homo sapiens
  misc_RNA (1)...(19): siRNA sense strand
gggucaauguugcagagaa

SEQ ID NO: 581259 - RNA, 19 nt, Homo sapiens
  misc_RNA (1)...(19): siRNA sense strand
ggccuugucuccuacuaca

SEQ ID NO: 581260 - RNA, 19 nt, Homo sapiens
  misc_RNA (1)...(19): siRNA sense strand
ucacacugcauauuguaaa

SEQ ID NO: 581261 - RNA, 19 nt, Homo sapiens
  misc_RNA (1)...(19): siRNA sense strand
guggacaucacacugcaua

SEQ ID NO: 581262 - RNA, 19 nt, Homo sapiens
  misc_RNA (1)...(19): siRNA sense strand
ccgcacuucucuuugauuc

SEQ ID NO: 581263 - RNA, 19 nt, Homo sapiens
  misc_RNA (1)...(19): siRNA sense strand
ucucuuugauucagaagga

SEQ ID NO: 581264 - RNA, 19 nt, Homo sapiens
  misc_RNA (1)...(19): siRNA sense strand
ucauguaacugugcugauc

SEQ ID NO: 581265 - RNA, 19 nt, Homo sapiens
  misc_RNA (1)...(19): siRNA sense strand
caucacacugcauauugua

SEQ ID NO: 581266 - RNA, 19 nt, Homo sapiens
  misc_RNA (1)...(19): siRNA sense strand
ugauguaggugucaauucg

SEQ ID NO: 581267 - RNA, 19 nt, Homo sapiens
  misc_RNA (1)...(19): siRNA sense strand
cgacaacccaccgaccuuu

SEQ ID NO: 581268 - RNA, 19 nt, Homo sapiens
  misc_RNA (1)...(19): siRNA sense strand
cccaacauauacaagaaga

SEQ ID NO: 581269 - RNA, 19 nt, Homo sapiens
  misc_RNA (1)...(19): siRNA sense strand
gugaugaagccucuugguu

SEQ ID NO: 581270 - RNA, 19 nt, Homo sapiens
  misc_RNA (1)...(19): siRNA sense strand
accacaagaucuucuaugu

SEQ ID NO: 581271 - RNA, 19 nt, Homo sapiens
  misc_RNA (1)...(19): siRNA sense strand
guaguggcguuggccuuga

SEQ ID NO: 581272 - RNA, 19 nt, Homo sapiens
  misc_RNA (1)...(19): siRNA sense strand
cagaauacaaugugacgau

SEQ ID NO: 581273 - RNA, 19 nt, Homo sapiens
  misc_RNA (1)...(19): siRNA sense strand
ugaaaguaaugacaaucca

SEQ ID NO: 581274 - RNA, 19 nt, Homo sapiens
  misc_RNA (1)...(19): siRNA sense strand
ugaaaaugcugcaccacaa

SEQ ID NO: 581275 - RNA, 19 nt, Homo sapiens
  misc_RNA (1)...(19): siRNA sense strand
ggacgaccgcaacgacaau

SEQ ID NO: 581276 - RNA, 19 nt, Homo sapiens
  misc_RNA (1)...(19): siRNA sense strand
gcagauagcuugcaagaga

SEQ ID NO: 581277 - RNA, 19 nt, Homo sapiens
  misc_RNA (1)...(19): siRNA sense strand
gaaauccuaugccaacuaa

SEQ ID NO: 581278 - RNA, 19 nt, Homo sapiens
  misc_RNA (1)...(19): siRNA sense strand
gaucacagcuaccgacaaa

SEQ ID NO: 581279 - RNA, 19 nt, Homo sapiens
  misc_RNA (1)...(19): siRNA sense strand
ggaaauagcuccggaugga

SEQ ID NO: 581280 - RNA, 19 nt, Homo sapiens
  misc_RNA (1)...(19): siRNA sense strand
agagauagcuacacaauug

SEQ ID NO: 581281 - RNA, 19 nt, Homo sapiens
  misc_RNA (1)...(19): siRNA sense strand
gaacuggacuuugaagaga

SEQ ID NO: 581282 - RNA, 19 nt, Homo sapiens
  misc_RNA (1)...(19): siRNA sense strand
gcucugcgcucuucgauau

SEQ ID NO: 581283 - RNA, 19 nt, Homo sapiens
  misc_RNA (1)...(19): siRNA sense strand
gaugaagccucuugguuug

SEQ ID NO: 581284 - RNA, 19 nt, Homo sapiens
  misc_RNA (1)...(19): siRNA sense strand
gaucuagauucuggauuua

SEQ ID NO: 581285 - RNA, 19 nt, Homo sapiens
  misc_RNA (1)...(19): siRNA sense strand
gauccgcacuucucuuuga

SEQ ID NO: 581286 - RNA, 19 nt, Homo sapiens
  misc_RNA (1)...(19): siRNA sense strand
gcauguagcugagaacaau

SEQ ID NO: 581287 - RNA, 19 nt, Homo sapiens
  misc_RNA (1)...(19): siRNA sense strand
ggacuuugccuuauuccua

SEQ ID NO: 581288 - RNA, 19 nt, Homo sapiens
  misc_RNA (1)...(19): siRNA sense strand
ccaccgaccuuuagccaaa

SEQ ID NO: 581289 - RNA, 19 nt, Homo sapiens
  misc_RNA (1)...(19): siRNA sense strand
gaaaucaucuaugccuuca

SEQ ID NO: 581290 - RNA, 19 nt, Homo sapiens
  misc_RNA (1)...(19): siRNA sense strand
cgacguguguucuggaauu

SEQ ID NO: 581291 - RNA, 19 nt, Homo sapiens
  misc_RNA (1)...(19): siRNA sense strand
ugaucuagauucuggauuu

SEQ ID NO: 581292 - RNA, 19 nt, Homo sapiens
  misc_RNA (1)...(19): siRNA sense strand
aaugggaacuuacuuguga

SEQ ID NO: 581293 - RNA, 19 nt, Homo sapiens
  misc_RNA (1)...(19): siRNA sense strand
cuaauggccuugucuccua

SEQ ID NO: 581294 - RNA, 19 nt, Homo sapiens
  misc_RNA (1)...(19): siRNA sense strand
gcaagauccugauguaggu

SEQ ID NO: 581295 - RNA, 19 nt, Homo sapiens
  misc_RNA (1)...(19): siRNA sense strand
ccucuugguuugaaaguaa

SEQ ID NO: 581296 - RNA, 19 nt, Homo sapiens
  misc_RNA (1)...(19): siRNA sense strand
gcaagaagucgacgugugu

SEQ ID NO: 581297 - RNA, 19 nt, Homo sapiens
  misc_RNA (1)...(19): siRNA sense strand
ggacaucacacugcauauu

SEQ ID NO: 581298 - RNA, 19 nt, Homo sapiens
  misc_RNA (1)...(19): siRNA sense strand
gaagugagacaacuguuca

SEQ ID NO: 581299 - RNA, 19 nt, Homo sapiens
  misc_RNA (1)...(19): siRNA sense strand
gggaagagcagccacauca

SEQ ID NO: 581300 - RNA, 19 nt, Homo sapiens
  misc_RNA (1)...(19): siRNA sense strand
gcuacaguuucaccuagua

SEQ ID NO: 581301 - RNA, 19 nt, Homo sapiens
  misc_RNA (1)...(19): siRNA sense strand
uaaugacaauccagaaaug

SEQ ID NO: 581302 - RNA, 19 nt, Homo sapiens
  misc_RNA (1)...(19): siRNA sense strand
gcagaucccagaauacaau

SEQ ID NO: 581303 - RNA, 19 nt, Homo sapiens
  misc_RNA (1)...(19): siRNA sense strand
gggcagaggcgaaugcuau

SEQ ID NO: 581304 - RNA, 19 nt, Homo sapiens
  misc_RNA (1)...(19): siRNA sense strand
gaaaugccuucuaauucag

SEQ ID NO: 581305 - RNA, 19 nt, Homo sapiens
  misc_RNA (1)...(19): siRNA sense strand
ugaugaagccucuugguuu

SEQ ID NO: 581306 - RNA, 19 nt, Homo sapiens
  misc_RNA (1)...(19): siRNA sense strand
agauaacccuggcuucuga

SEQ ID NO: 581307 - RNA, 19 nt, Homo sapiens
  misc_RNA (1)...(19): siRNA sense strand
uuggagaacuggacuuuga

SEQ ID NO: 581308 - RNA, 19 nt, Homo sapiens
  misc_RNA (1)...(19): siRNA sense strand
uguucaagcuggacaguaa

SEQ ID NO: 581309 - RNA, 19 nt, Homo sapiens
  misc_RNA (1)...(19): siRNA sense strand
gaggagauuuguggcaaga

SEQ ID NO: 581310 - RNA, 19 nt, Homo sapiens
  misc_RNA (1)...(19): siRNA sense strand
gagauacaaccugaccuua

SEQ ID NO: 581311 - RNA, 19 nt, Homo sapiens
  misc_RNA (1)...(19): siRNA sense strand
gaagagagagauagcuaca

SEQ ID NO: 581312 - RNA, 19 nt, Homo sapiens
  misc_RNA (1)...(19): siRNA sense strand
ggagauuuguggcaagaag

SEQ ID NO: 581313 - RNA, 19 nt, Homo sapiens
  misc_RNA (1)...(19): siRNA sense strand
gcaaggaagugagacaacu

SEQ ID NO: 581314 - RNA, 19 nt, Homo sapiens
  misc_RNA (1)...(19): siRNA sense strand
gauacaaccugaccuuagc

SEQ ID NO: 581315 - RNA, 19 nt, Homo sapiens
  misc_RNA (1)...(19): siRNA sense strand
gagcagaucccagaauaca

SEQ ID NO: 581316 - RNA, 19 nt, Homo sapiens
  misc_RNA (1)...(19): siRNA sense strand
caacauauacaagaagaug

SEQ ID NO: 581317 - RNA, 19 nt, Homo sapiens
  misc_RNA (1)...(19): siRNA sense strand
gacaucacacugcauauug

SEQ ID NO: 581318 - RNA, 19 nt, Homo sapiens
  misc_RNA (1)...(19): siRNA sense strand
gcacuucucuuugauucag

SEQ ID NO: 581319 - RNA, 19 nt, Homo sapiens
  misc_RNA (1)...(19): siRNA sense strand
guaaugacaauccagaaau

SEQ ID NO: 581320 - RNA, 19 nt, Homo sapiens
  misc_RNA (1)...(19): siRNA sense strand
caaaacacaugaucuagau

SEQ ID NO: 581321 - RNA, 19 nt, Homo sapiens
  misc_RNA (1)...(19): siRNA sense strand
agagagagauagcuacaca

SEQ ID NO: 581322 - RNA, 19 nt, Homo sapiens
  misc_RNA (1)...(19): siRNA sense strand
uagggaaccucgccaagga

SEQ ID NO: 581323 - RNA, 19 nt, Homo sapiens
  misc_RNA (1)...(19): siRNA sense strand
gaccaucacucugcacauc

SEQ ID NO: 581324 - RNA, 19 nt, Homo sapiens
  misc_RNA (1)...(19): siRNA sense strand
aaauaucacugagcuggaa

SEQ ID NO: 581325 - RNA, 19 nt, Homo sapiens
  misc_RNA (1)...(19): siRNA sense strand
ggacugccguugcccugau

SEQ ID NO: 581326 - RNA, 19 nt, Homo sapiens
  misc_RNA (1)...(19): siRNA sense strand
gcuucugaaucccaacaua

SEQ ID NO: 581327 - RNA, 19 nt, Homo sapiens
  misc_RNA (1)...(19): siRNA sense strand
uaaaagugauggccauuga

SEQ ID NO: 581328 - RNA, 19 nt, Homo sapiens
  misc_RNA (1)...(19): siRNA sense strand
gacaacccaccgaccuuua

SEQ ID NO: 581329 - RNA, 19 nt, Homo sapiens
  misc_RNA (1)...(19): siRNA sense strand
cacugcauauuguaaagua

SEQ ID NO: 581330 - RNA, 19 nt, Homo sapiens
  misc_RNA (1)...(19): siRNA sense strand
ugagacaacuguucaagcu

SEQ ID NO: 581331 - RNA, 19 nt, Homo sapiens
  misc_RNA (1)...(19): siRNA sense strand
ggaagugagacaacuguuc

SEQ ID NO: 581332 - RNA, 19 nt, Homo sapiens
  misc_RNA (1)...(19): siRNA sense strand
ccacugagggcuacuuuca

SEQ ID NO: 581333 - RNA, 19 nt, Homo sapiens
  misc_RNA (1)...(19): siRNA sense strand
gagagauagcuacacaauu

SEQ ID NO: 581334 - RNA, 19 nt, Homo sapiens
  misc_RNA (1)...(19): siRNA sense strand
caagaucuucuaugugaug

SEQ ID NO: 581335 - RNA, 19 nt, Homo sapiens
  misc_RNA (1)...(19): siRNA sense strand
gagccuccauugcgcaugu

SEQ ID NO: 581336 - RNA, 19 nt, Homo sapiens
  misc_RNA (1)...(19): siRNA sense strand
gaaaaugggaacuuacuug

SEQ ID NO: 581337 - RNA, 19 nt, Homo sapiens
  misc_RNA (1)...(19): siRNA sense strand
ucgcagaugcaaaugauaa

SEQ ID NO: 581338 - RNA, 19 nt, Homo sapiens
  misc_RNA (1)...(19): siRNA sense strand
gaagccucuugguuugaaa

SEQ ID NO: 581339 - RNA, 19 nt, Homo sapiens
  misc_RNA (1)...(19): siRNA sense strand
ggagcuacaguuucaccua

SEQ ID NO: 581340 - RNA, 19 nt, Homo sapiens
  misc_RNA (1)...(19): siRNA sense strand
aggcggagcuacaguuuca

SEQ ID NO: 581341 - RNA, 19 nt, Homo sapiens
  misc_RNA (1)...(19): siRNA sense strand
aaacacaugaucuagauuc

SEQ ID NO: 581342 - RNA, 19 nt, Homo sapiens
  misc_RNA (1)...(19): siRNA sense strand
caucaauauuggcaaggaa

SEQ ID NO: 581343 - RNA, 19 nt, Homo sapiens
  misc_RNA (1)...(19): siRNA sense strand
ucuaugccuucaucaauau

SEQ ID NO: 581344 - RNA, 19 nt, Homo sapiens
  misc_RNA (1)...(19): siRNA sense strand
aaucaucuaugccuucauc

SEQ ID NO: 581345 - RNA, 19 nt, Homo sapiens
  misc_RNA (1)...(19): siRNA sense strand
gacguguguucuggaauuu

SEQ ID NO: 581346 - RNA, 19 nt, Homo sapiens
  misc_RNA (1)...(19): siRNA sense strand
ugaagccucuugguuugaa

SEQ ID NO: 581347 - RNA, 19 nt, Homo sapiens
  misc_RNA (1)...(19): siRNA sense strand
acaccgaguuuaaauuucu

SEQ ID NO: 581348 - RNA, 19 nt, Homo sapiens
  misc_RNA (1)...(19): siRNA sense strand
ccuggugucugcuucaaga

SEQ ID NO: 581349 - RNA, 19 nt, Homo sapiens
  misc_RNA (1)...(19): siRNA sense strand
caucaaugccgaaaucauc

SEQ ID NO: 581350 - RNA, 19 nt, Homo sapiens
  misc_RNA (1)...(19): siRNA sense strand
cguguguucuggaauuuga

SEQ ID NO: 581351 - RNA, 19 nt, Homo sapiens
  misc_RNA (1)...(19): siRNA sense strand
gaauacaaugugacgauca

SEQ ID NO: 581352 - RNA, 19 nt, Homo sapiens
  misc_RNA (1)...(19): siRNA sense strand
gcagaggcgaaugcuauuu

SEQ ID NO: 581353 - RNA, 19 nt, Homo sapiens
  misc_RNA (1)...(19): siRNA sense strand
acccagagcuaguacugaa

SEQ ID NO: 581354 - RNA, 19 nt, Homo sapiens
  misc_RNA (1)...(19): siRNA sense strand
cauacagguuggugacaga

SEQ ID NO: 581355 - RNA, 19 nt, Homo sapiens
  misc_RNA (1)...(19): siRNA sense strand
ggagauaacccuggcuucu

SEQ ID NO: 581356 - RNA, 19 nt, Homo sapiens
  misc_RNA (1)...(19): siRNA sense strand
ggaacucaccacuauugga

SEQ ID NO: 581357 - RNA, 19 nt, Homo sapiens
  misc_RNA (1)...(19): siRNA sense strand
caucuaugccuucaucaau

SEQ ID NO: 581358 - RNA, 19 nt, Homo sapiens
  misc_RNA (1)...(19): siRNA sense strand
gggucaauguugcagagaa

SEQ ID NO: 581359 - RNA, 19 nt, Homo sapiens
  misc_RNA (1)...(19): siRNA sense strand
ggccuugucuccuacuaca

SEQ ID NO: 581360 - RNA, 19 nt, Homo sapiens
  misc_RNA (1)...(19): siRNA sense strand
ucacacugcauauuguaaa

SEQ ID NO: 581361 - RNA, 19 nt, Homo sapiens
  misc_RNA (1)...(19): siRNA sense strand
guggacaucacacugcaua

SEQ ID NO: 581362 - RNA, 19 nt, Homo sapiens
  misc_RNA (1)...(19): siRNA sense strand
ccgcacuucucuuugauuc

SEQ ID NO: 581363 - RNA, 19 nt, Homo sapiens
  misc_RNA (1)...(19): siRNA sense strand
ucucuuugauucagaagga

SEQ ID NO: 581364 - RNA, 19 nt, Homo sapiens
  misc_RNA (1)...(19): siRNA sense strand
ucauguaacugugcugauc

SEQ ID NO: 581365 - RNA, 19 nt, Homo sapiens
  misc_RNA (1)...(19): siRNA sense strand
caucacacugcauauugua

SEQ ID NO: 581366 - RNA, 19 nt, Homo sapiens
  misc_RNA (1)...(19): siRNA sense strand
ugauguaggugucaauucg

SEQ ID NO: 581367 - RNA, 19 nt, Homo sapiens
  misc_RNA (1)...(19): siRNA sense strand
cgacaacccaccgaccuuu

SEQ ID NO: 581368 - RNA, 19 nt, Homo sapiens
  misc_RNA (1)...(19): siRNA sense strand
cccaacauauacaagaaga

SEQ ID NO: 581369 - RNA, 19 nt, Homo sapiens
  misc_RNA (1)...(19): siRNA sense strand
gugaugaagccucuugguu

SEQ ID NO: 581370 - RNA, 19 nt, Homo sapiens
  misc_RNA (1)...(19): siRNA sense strand
accacaagaucuucuaugu

SEQ ID NO: 581371 - RNA, 19 nt, Homo sapiens
  misc_RNA (1)...(19): siRNA sense strand
guaguggcguuggccuuga

SEQ ID NO: 581372 - RNA, 19 nt, Homo sapiens
  misc_RNA (1)...(19): siRNA sense strand
cagaauacaaugugacgau

SEQ ID NO: 581373 - RNA, 19 nt, Homo sapiens
  misc_RNA (1)...(19): siRNA sense strand
ugaaaguaaugacaaucca

SEQ ID NO: 581374 - RNA, 19 nt, Homo sapiens
  misc_RNA (1)...(19): siRNA sense strand
ugaaaaugcugcaccacaa

SEQ ID NO: 581375 - RNA, 19 nt, Homo sapiens
  misc_RNA (1)...(19): siRNA sense strand
ggacgaccgcaacgacaau

SEQ ID NO: 581376 - RNA, 19 nt, Homo sapiens
  misc_RNA (1)...(19): siRNA sense strand
gaaggaauauuucacagua

SEQ ID NO: 581377 - RNA, 19 nt, Homo sapiens
  misc_RNA (1)...(19): siRNA sense strand
cuacaaagauaccaccuua

SEQ ID NO: 581378 - RNA, 19 nt, Homo sapiens
  misc_RNA (1)...(19): siRNA sense strand
gcaaguaguuacacucuga

SEQ ID NO: 581379 - RNA, 19 nt, Homo sapiens
  misc_RNA (1)...(19): siRNA sense strand
gguccuaacucacuacaaa

SEQ ID NO: 581380 - RNA, 19 nt, Homo sapiens
  misc_RNA (1)...(19): siRNA sense strand
gaacagugaucgccuugau

SEQ ID NO: 581381 - RNA, 19 nt, Homo sapiens
  misc_RNA (1)...(19): siRNA sense strand
gagcacaguuuacaucaau

SEQ ID NO: 581382 - RNA, 19 nt, Homo sapiens
  misc_RNA (1)...(19): siRNA sense strand
gaaguuuacugccaagugu

SEQ ID NO: 581383 - RNA, 19 nt, Homo sapiens
  misc_RNA (1)...(19): siRNA sense strand
guaaauauccugaguugau

SEQ ID NO: 581384 - RNA, 19 nt, Homo sapiens
  misc_RNA (1)...(19): siRNA sense strand
aaagauaccaccuuaauga

SEQ ID NO: 581385 - RNA, 19 nt, Homo sapiens
  misc_RNA (1)...(19): siRNA sense strand
guacaacauuuccacuuga

SEQ ID NO: 581386 - RNA, 19 nt, Homo sapiens
  misc_RNA (1)...(19): siRNA sense strand
caggagaaaucacgacaaa

SEQ ID NO: 581387 - RNA, 19 nt, Homo sapiens
  misc_RNA (1)...(19): siRNA sense strand
guacauugcccuauuccua

SEQ ID NO: 581388 - RNA, 19 nt, Homo sapiens
  misc_RNA (1)...(19): siRNA sense strand
gcgcggagaaggaauauuu

SEQ ID NO: 581389 - RNA, 19 nt, Homo sapiens
  misc_RNA (1)...(19): siRNA sense strand
gaaacagacuccagauggu

SEQ ID NO: 581390 - RNA, 19 nt, Homo sapiens
  misc_RNA (1)...(19): siRNA sense strand
gguacaacauuuccacuug

SEQ ID NO: 581391 - RNA, 19 nt, Homo sapiens
  misc_RNA (1)...(19): siRNA sense strand
ggaagcagccucugugugu

SEQ ID NO: 581392 - RNA, 19 nt, Homo sapiens
  misc_RNA (1)...(19): siRNA sense strand
cuaacucacuacaaagaua

SEQ ID NO: 581393 - RNA, 19 nt, Homo sapiens
  misc_RNA (1)...(19): siRNA sense strand
cgcaagaucucgucuguga

SEQ ID NO: 581394 - RNA, 19 nt, Homo sapiens
  misc_RNA (1)...(19): siRNA sense strand
gauaccaccuuaaugacaa

SEQ ID NO: 581395 - RNA, 19 nt, Homo sapiens
  misc_RNA (1)...(19): siRNA sense strand
gagacuuacuugugaguga

SEQ ID NO: 581396 - RNA, 19 nt, Homo sapiens
  misc_RNA (1)...(19): siRNA sense strand
cgaccgggaugaaggcaua

SEQ ID NO: 581397 - RNA, 19 nt, Homo sapiens
  misc_RNA (1)...(19): siRNA sense strand
uaggaaaccucgccaagga

SEQ ID NO: 581398 - RNA, 19 nt, Homo sapiens
  misc_RNA (1)...(19): siRNA sense strand
gaacauaaccccggaauug

SEQ ID NO: 581399 - RNA, 19 nt, Homo sapiens
  misc_RNA (1)...(19): siRNA sense strand
gaagagcacaguuuacauc

SEQ ID NO: 581400 - RNA, 19 nt, Homo sapiens
  misc_RNA (1)...(19): siRNA sense strand
cagagaagagcacaguuua

SEQ ID NO: 581401 - RNA, 19 nt, Homo sapiens
  misc_RNA (1)...(19): siRNA sense strand
uaagccagguacaacauuu

SEQ ID NO: 581402 - RNA, 19 nt, Homo sapiens
  misc_RNA (1)...(19): siRNA sense strand
ccaacagacuuccuacaug

SEQ ID NO: 581403 - RNA, 19 nt, Homo sapiens
  misc_RNA (1)...(19): siRNA sense strand
gagaucaccuacuccuuuc

SEQ ID NO: 581404 - RNA, 19 nt, Homo sapiens
  misc_RNA (1)...(19): siRNA sense strand
cagauccgcuauucaauuc

SEQ ID NO: 581405 - RNA, 19 nt, Homo sapiens
  misc_RNA (1)...(19): siRNA sense strand
cuacauagcaguaauugug

SEQ ID NO: 581406 - RNA, 19 nt, Homo sapiens
  misc_RNA (1)...(19): siRNA sense strand
caccuaaucuucgcggaua

SEQ ID NO: 581407 - RNA, 19 nt, Homo sapiens
  misc_RNA (1)...(19): siRNA sense strand
ggagaaaucacgacaaagg

SEQ ID NO: 581408 - RNA, 19 nt, Homo sapiens
  misc_RNA (1)...(19): siRNA sense strand
cgauaacccuccaguguuc

SEQ ID NO: 581409 - RNA, 19 nt, Homo sapiens
  misc_RNA (1)...(19): siRNA sense strand
ucacggaugccaacgauaa

SEQ ID NO: 581410 - RNA, 19 nt, Homo sapiens
  misc_RNA (1)...(19): siRNA sense strand
caaaguggcacgacccaaa

SEQ ID NO: 581411 - RNA, 19 nt, Homo sapiens
  misc_RNA (1)...(19): siRNA sense strand
ggagaucccagaauacaau

SEQ ID NO: 581412 - RNA, 19 nt, Homo sapiens
  misc_RNA (1)...(19): siRNA sense strand
ccaagacagaguucaauuu

SEQ ID NO: 581413 - RNA, 19 nt, Homo sapiens
  misc_RNA (1)...(19): siRNA sense strand
uauccugaguugauucuaa

SEQ ID NO: 581414 - RNA, 19 nt, Homo sapiens
  misc_RNA (1)...(19): siRNA sense strand
ccacugcaguauccaaguu

SEQ ID NO: 581415 - RNA, 19 nt, Homo sapiens
  misc_RNA (1)...(19): siRNA sense strand
gcaguaauugugcaggaua

SEQ ID NO: 581416 - RNA, 19 nt, Homo sapiens
  misc_RNA (1)...(19): siRNA sense strand
gcuccgcccucuucgauau

SEQ ID NO: 581417 - RNA, 19 nt, Homo sapiens
  misc_RNA (1)...(19): siRNA sense strand
gagaagagcacaguuuaca

SEQ ID NO: 581418 - RNA, 19 nt, Homo sapiens
  misc_RNA (1)...(19): siRNA sense strand
ggagaaggaauauuucaca

SEQ ID NO: 581419 - RNA, 19 nt, Homo sapiens
  misc_RNA (1)...(19): siRNA sense strand
gcacaguuuacaucaauug

SEQ ID NO: 581420 - RNA, 19 nt, Homo sapiens
  misc_RNA (1)...(19): siRNA sense strand
gaaagcggagacuuacuug

SEQ ID NO: 581421 - RNA, 19 nt, Homo sapiens
  misc_RNA (1)...(19): siRNA sense strand
gaucucgucugugacaaug

SEQ ID NO: 581422 - RNA, 19 nt, Homo sapiens
  misc_RNA (1)...(19): siRNA sense strand
gcacaucuccgacgucaac

SEQ ID NO: 581423 - RNA, 19 nt, Homo sapiens
  misc_RNA (1)...(19): siRNA sense strand
gaagcagccucuguguguu

SEQ ID NO: 581424 - RNA, 19 nt, Homo sapiens
  misc_RNA (1)...(19): siRNA sense strand
gaauagaccgagaacagau

SEQ ID NO: 581425 - RNA, 19 nt, Homo sapiens
  misc_RNA (1)...(19): siRNA sense strand
gaauacaaucucaccauca

SEQ ID NO: 581426 - RNA, 19 nt, Homo sapiens
  misc_RNA (1)...(19): siRNA sense strand
ccucaaagaacuauuacaa

SEQ ID NO: 581427 - RNA, 19 nt, Homo sapiens
  misc_RNA (1)...(19): siRNA sense strand
acagugaucgccuugauaa

SEQ ID NO: 581428 - RNA, 19 nt, Homo sapiens
  misc_RNA (1)...(19): siRNA sense strand
caacgauugugcaccugaa

SEQ ID NO: 581429 - RNA, 19 nt, Homo sapiens
  misc_RNA (1)...(19): siRNA sense strand
ccagauccgcuauucaauu

SEQ ID NO: 581430 - RNA, 19 nt, Homo sapiens
  misc_RNA (1)...(19): siRNA sense strand
ggucguaaauauccugagu

SEQ ID NO: 581431 - RNA, 19 nt, Homo sapiens
  misc_RNA (1)...(19): siRNA sense strand
caaagauaccaccuuaaug

SEQ ID NO: 581432 - RNA, 19 nt, Homo sapiens
  misc_RNA (1)...(19): siRNA sense strand
acaaagauaccaccuuaau

SEQ ID NO: 581433 - RNA, 19 nt, Homo sapiens
  misc_RNA (1)...(19): siRNA sense strand
guaauugugcaggauauaa

SEQ ID NO: 581434 - RNA, 19 nt, Homo sapiens
  misc_RNA (1)...(19): siRNA sense strand
agagaucaccuacuccuuu

SEQ ID NO: 581435 - RNA, 19 nt, Homo sapiens
  misc_RNA (1)...(19): siRNA sense strand
ucuccgacgucaacgauaa

SEQ ID NO: 581436 - RNA, 19 nt, Homo sapiens
  misc_RNA (1)...(19): siRNA sense strand
gcaccugaaguuauuguga

SEQ ID NO: 581437 - RNA, 19 nt, Homo sapiens
  misc_RNA (1)...(19): siRNA sense strand
ucguaaauauccugaguug

SEQ ID NO: 581438 - RNA, 19 nt, Homo sapiens
  misc_RNA (1)...(19): siRNA sense strand
ggacagagaagagcacagu

SEQ ID NO: 581439 - RNA, 19 nt, Homo sapiens
  misc_RNA (1)...(19): siRNA sense strand
gagaaaucacgacaaagga

SEQ ID NO: 581440 - RNA, 19 nt, Homo sapiens
  misc_RNA (1)...(19): siRNA sense strand
gagaaacagacuccagaug

SEQ ID NO: 581441 - RNA, 19 nt, Homo sapiens
  misc_RNA (1)...(19): siRNA sense strand
ucaccuacuccuuucauaa

SEQ ID NO: 581442 - RNA, 19 nt, Homo sapiens
  misc_RNA (1)...(19): siRNA sense strand
acagagaagagcacaguuu

SEQ ID NO: 581443 - RNA, 19 nt, Homo sapiens
  misc_RNA (1)...(19): siRNA sense strand
caaauccgaaucaaaguca

SEQ ID NO: 581444 - RNA, 19 nt, Homo sapiens
  misc_RNA (1)...(19): siRNA sense strand
caagaucucgucugugaca

SEQ ID NO: 581445 - RNA, 19 nt, Homo sapiens
  misc_RNA (1)...(19): siRNA sense strand
gaggagaucccagaauaca

SEQ ID NO: 581446 - RNA, 19 nt, Homo sapiens
  misc_RNA (1)...(19): siRNA sense strand
cccagaaagcggagacuua

SEQ ID NO: 581447 - RNA, 19 nt, Homo sapiens
  misc_RNA (1)...(19): siRNA sense strand
ucacgacaaaggaugauuu

SEQ ID NO: 581448 - RNA, 19 nt, Homo sapiens
  misc_RNA (1)...(19): siRNA sense strand
gugcaggauauaaaugaua

SEQ ID NO: 581449 - RNA, 19 nt, Homo sapiens
  misc_RNA (1)...(19): siRNA sense strand
gagaaaauggagaaguuua

SEQ ID NO: 581450 - RNA, 19 nt, Homo sapiens
  misc_RNA (1)...(19): siRNA sense strand
cagaauagaccgagaacag

SEQ ID NO: 581451 - RNA, 19 nt, Homo sapiens
  misc_RNA (1)...(19): siRNA sense strand
caagacagaguucaauuuu

SEQ ID NO: 581452 - RNA, 19 nt, Homo sapiens
  misc_RNA (1)...(19): siRNA sense strand
gggaaaugccaaguuuauu

SEQ ID NO: 581453 - RNA, 19 nt, Homo sapiens
  misc_RNA (1)...(19): siRNA sense strand
gauugugcaccugaaguua

SEQ ID NO: 581454 - RNA, 19 nt, Homo sapiens
  misc_RNA (1)...(19): siRNA sense strand
gcugaaaauccacuaaaua

SEQ ID NO: 581455 - RNA, 19 nt, Homo sapiens
  misc_RNA (1)...(19): siRNA sense strand
ggagacccaccucaaagug

SEQ ID NO: 581456 - RNA, 19 nt, Homo sapiens
  misc_RNA (1)...(19): siRNA sense strand
gcgccucuaucgcucaaau

SEQ ID NO: 581457 - RNA, 19 nt, Homo sapiens
  misc_RNA (1)...(19): siRNA sense strand
gacaacgaguacuuugauc

SEQ ID NO: 581458 - RNA, 19 nt, Homo sapiens
  misc_RNA (1)...(19): siRNA sense strand
uauugugacuucaguaucu

SEQ ID NO: 581459 - RNA, 19 nt, Homo sapiens
  misc_RNA (1)...(19): siRNA sense strand
acgcagagaucaccuacuc

SEQ ID NO: 581460 - RNA, 19 nt, Homo sapiens
  misc_RNA (1)...(19): siRNA sense strand
guccagauccgcuauucaa

SEQ ID NO: 581461 - RNA, 19 nt, Homo sapiens
  misc_RNA (1)...(19): siRNA sense strand
ugacagaauagaccgagaa

SEQ ID NO: 581462 - RNA, 19 nt, Homo sapiens
  misc_RNA (1)...(19): siRNA sense strand
gaucucagugcucuucuuc

SEQ ID NO: 581463 - RNA, 19 nt, Homo sapiens
  misc_RNA (1)...(19): siRNA sense strand
agaaagcggagacuuacuu

SEQ ID NO: 581464 - RNA, 19 nt, Homo sapiens
  misc_RNA (1)...(19): siRNA sense strand
ugacaacgaguacuuugau

SEQ ID NO: 581465 - RNA, 19 nt, Homo sapiens
  misc_RNA (1)...(19): siRNA sense strand
caguaauugugcaggauau

SEQ ID NO: 581466 - RNA, 19 nt, Homo sapiens
  misc_RNA (1)...(19): siRNA sense strand
caaugccucuugggaacaa

SEQ ID NO: 581467 - RNA, 19 nt, Homo sapiens
  misc_RNA (1)...(19): siRNA sense strand
gccaagacagaguucaauu

SEQ ID NO: 581468 - RNA, 19 nt, Homo sapiens
  misc_RNA (1)...(19): siRNA sense strand
ggauagccugcaagaggua

SEQ ID NO: 581469 - RNA, 19 nt, Homo sapiens
  misc_RNA (1)...(19): siRNA sense strand
gacccaaauccgaaucaaa

SEQ ID NO: 581470 - RNA, 19 nt, Homo sapiens
  misc_RNA (1)...(19): siRNA sense strand
uccagauggucguaaauau

SEQ ID NO: 581471 - RNA, 19 nt, Homo sapiens
  misc_RNA (1)...(19): siRNA sense strand
auucagauguugguccuaa

SEQ ID NO: 581472 - RNA, 19 nt, Homo sapiens
  misc_RNA (1)...(19): siRNA sense strand
gauccgcuauucaauucca

SEQ ID NO: 581473 - RNA, 19 nt, Homo sapiens
  misc_RNA (1)...(19): siRNA sense strand
uaauguggacgaacaagug

SEQ ID NO: 581474 - RNA, 19 nt, Homo sapiens
  misc_RNA (1)...(19): siRNA sense strand
ccagauggucguaaauauc

SEQ ID NO: 581475 - RNA, 19 nt, Homo sapiens
  misc_RNA (1)...(19): siRNA sense strand
gacuccagauggucguaaa

SEQ ID NO: 581476 - RNA, 19 nt, Homo sapiens
  misc_RNA (1)...(19): siRNA sense strand
gaaggaauauuucacagua

SEQ ID NO: 581477 - RNA, 19 nt, Homo sapiens
  misc_RNA (1)...(19): siRNA sense strand
cuacaaagauaccaccuua

SEQ ID NO: 581478 - RNA, 19 nt, Homo sapiens
  misc_RNA (1)...(19): siRNA sense strand
gcaaguaguuacacucuga

SEQ ID NO: 581479 - RNA, 19 nt, Homo sapiens
  misc_RNA (1)...(19): siRNA sense strand
gguccuaacucacuacaaa

SEQ ID NO: 581480 - RNA, 19 nt, Homo sapiens
  misc_RNA (1)...(19): siRNA sense strand
gaacagugaucgccuugau

SEQ ID NO: 581481 - RNA, 19 nt, Homo sapiens
  misc_RNA (1)...(19): siRNA sense strand
gagcacaguuuacaucaau

SEQ ID NO: 581482 - RNA, 19 nt, Homo sapiens
  misc_RNA (1)...(19): siRNA sense strand
gaaguuuacugccaagugu

SEQ ID NO: 581483 - RNA, 19 nt, Homo sapiens
  misc_RNA (1)...(19): siRNA sense strand
guaaauauccugaguugau

SEQ ID NO: 581484 - RNA, 19 nt, Homo sapiens
  misc_RNA (1)...(19): siRNA sense strand
aaagauaccaccuuaauga

SEQ ID NO: 581485 - RNA, 19 nt, Homo sapiens
  misc_RNA (1)...(19): siRNA sense strand
guacaacauuuccacuuga

SEQ ID NO: 581486 - RNA, 19 nt, Homo sapiens
  misc_RNA (1)...(19): siRNA sense strand
caggagaaaucacgacaaa

SEQ ID NO: 581487 - RNA, 19 nt, Homo sapiens
  misc_RNA (1)...(19): siRNA sense strand
guacauugcccuauuccua

SEQ ID NO: 581488 - RNA, 19 nt, Homo sapiens
  misc_RNA (1)...(19): siRNA sense strand
gcgcggagaaggaauauuu

SEQ ID NO: 581489 - RNA, 19 nt, Homo sapiens
  misc_RNA (1)...(19): siRNA sense strand
gaaacagacuccagauggu

SEQ ID NO: 581490 - RNA, 19 nt, Homo sapiens
  misc_RNA (1)...(19): siRNA sense strand
gguacaacauuuccacuug

SEQ ID NO: 581491 - RNA, 19 nt, Homo sapiens
  misc_RNA (1)...(19): siRNA sense strand
ggaagcagccucugugugu

SEQ ID NO: 581492 - RNA, 19 nt, Homo sapiens
  misc_RNA (1)...(19): siRNA sense strand
cuaacucacuacaaagaua

SEQ ID NO: 581493 - RNA, 19 nt, Homo sapiens
  misc_RNA (1)...(19): siRNA sense strand
cgcaagaucucgucuguga

SEQ ID NO: 581494 - RNA, 19 nt, Homo sapiens
  misc_RNA (1)...(19): siRNA sense strand
gauaccaccuuaaugacaa

SEQ ID NO: 581495 - RNA, 19 nt, Homo sapiens
  misc_RNA (1)...(19): siRNA sense strand
gagacuuacuugugaguga

SEQ ID NO: 581496 - RNA, 19 nt, Homo sapiens
  misc_RNA (1)...(19): siRNA sense strand
cgaccgggaugaaggcaua

SEQ ID NO: 581497 - RNA, 19 nt, Homo sapiens
  misc_RNA (1)...(19): siRNA sense strand
uaggaaaccucgccaagga

SEQ ID NO: 581498 - RNA, 19 nt, Homo sapiens
  misc_RNA (1)...(19): siRNA sense strand
gaacauaaccccggaauug

SEQ ID NO: 581499 - RNA, 19 nt, Homo sapiens
  misc_RNA (1)...(19): siRNA sense strand
gaagagcacaguuuacauc

SEQ ID NO: 581500 - RNA, 19 nt, Homo sapiens
  misc_RNA (1)...(19): siRNA sense strand
cagagaagagcacaguuua

SEQ ID NO: 581501 - RNA, 19 nt, Homo sapiens
  misc_RNA (1)...(19): siRNA sense strand
uaagccagguacaacauuu

SEQ ID NO: 581502 - RNA, 19 nt, Homo sapiens
  misc_RNA (1)...(19): siRNA sense strand
ccaacagacuuccuacaug

SEQ ID NO: 581503 - RNA, 19 nt, Homo sapiens
  misc_RNA (1)...(19): siRNA sense strand
gagaucaccuacuccuuuc

SEQ ID NO: 581504 - RNA, 19 nt, Homo sapiens
  misc_RNA (1)...(19): siRNA sense strand
cagauccgcuauucaauuc

SEQ ID NO: 581505 - RNA, 19 nt, Homo sapiens
  misc_RNA (1)...(19): siRNA sense strand
cuacauagcaguaauugug

SEQ ID NO: 581506 - RNA, 19 nt, Homo sapiens
  misc_RNA (1)...(19): siRNA sense strand
caccuaaucuucgcggaua

SEQ ID NO: 581507 - RNA, 19 nt, Homo sapiens
  misc_RNA (1)...(19): siRNA sense strand
ggagaaaucacgacaaagg

SEQ ID NO: 581508 - RNA, 19 nt, Homo sapiens
  misc_RNA (1)...(19): siRNA sense strand
cgauaacccuccaguguuc

SEQ ID NO: 581509 - RNA, 19 nt, Homo sapiens
  misc_RNA (1)...(19): siRNA sense strand
ucacggaugccaacgauaa

SEQ ID NO: 581510 - RNA, 19 nt, Homo sapiens
  misc_RNA (1)...(19): siRNA sense strand
caaaguggcacgacccaaa

SEQ ID NO: 581511 - RNA, 19 nt, Homo sapiens
  misc_RNA (1)...(19): siRNA sense strand
ggagaucccagaauacaau

SEQ ID NO: 581512 - RNA, 19 nt, Homo sapiens
  misc_RNA (1)...(19): siRNA sense strand
ccaagacagaguucaauuu

SEQ ID NO: 581513 - RNA, 19 nt, Homo sapiens
  misc_RNA (1)...(19): siRNA sense strand
uauccugaguugauucuaa

SEQ ID NO: 581514 - RNA, 19 nt, Homo sapiens
  misc_RNA (1)...(19): siRNA sense strand
ccacugcaguauccaaguu

SEQ ID NO: 581515 - RNA, 19 nt, Homo sapiens
  misc_RNA (1)...(19): siRNA sense strand
gcaguaauugugcaggaua

SEQ ID NO: 581516 - RNA, 19 nt, Homo sapiens
  misc_RNA (1)...(19): siRNA sense strand
gcuccgcccucuucgauau

SEQ ID NO: 581517 - RNA, 19 nt, Homo sapiens
  misc_RNA (1)...(19): siRNA sense strand
gagaagagcacaguuuaca

SEQ ID NO: 581518 - RNA, 19 nt, Homo sapiens
  misc_RNA (1)...(19): siRNA sense strand
ggagaaggaauauuucaca

SEQ ID NO: 581519 - RNA, 19 nt, Homo sapiens
  misc_RNA (1)...(19): siRNA sense strand
gcacaguuuacaucaauug

SEQ ID NO: 581520 - RNA, 19 nt, Homo sapiens
  misc_RNA (1)...(19): siRNA sense strand
gaaagcggagacuuacuug

SEQ ID NO: 581521 - RNA, 19 nt, Homo sapiens
  misc_RNA (1)...(19): siRNA sense strand
gaucucgucugugacaaug

SEQ ID NO: 581522 - RNA, 19 nt, Homo sapiens
  misc_RNA (1)...(19): siRNA sense strand
gcacaucuccgacgucaac

SEQ ID NO: 581523 - RNA, 19 nt, Homo sapiens
  misc_RNA (1)...(19): siRNA sense strand
gaagcagccucuguguguu

SEQ ID NO: 581524 - RNA, 19 nt, Homo sapiens
  misc_RNA (1)...(19): siRNA sense strand
gaauagaccgagaacagau

SEQ ID NO: 581525 - RNA, 19 nt, Homo sapiens
  misc_RNA (1)...(19): siRNA sense strand
gaauacaaucucaccauca

SEQ ID NO: 581526 - RNA, 19 nt, Homo sapiens
  misc_RNA (1)...(19): siRNA sense strand
ccucaaagaacuauuacaa

SEQ ID NO: 581527 - RNA, 19 nt, Homo sapiens
  misc_RNA (1)...(19): siRNA sense strand
acagugaucgccuugauaa

SEQ ID NO: 581528 - RNA, 19 nt, Homo sapiens
  misc_RNA (1)...(19): siRNA sense strand
caacgauugugcaccugaa

SEQ ID NO: 581529 - RNA, 19 nt, Homo sapiens
  misc_RNA (1)...(19): siRNA sense strand
ccagauccgcuauucaauu

SEQ ID NO: 581530 - RNA, 19 nt, Homo sapiens
  misc_RNA (1)...(19): siRNA sense strand
ggucguaaauauccugagu

SEQ ID NO: 581531 - RNA, 19 nt, Homo sapiens
  misc_RNA (1)...(19): siRNA sense strand
caaagauaccaccuuaaug

SEQ ID NO: 581532 - RNA, 19 nt, Homo sapiens
  misc_RNA (1)...(19): siRNA sense strand
acaaagauaccaccuuaau

SEQ ID NO: 581533 - RNA, 19 nt, Homo sapiens
  misc_RNA (1)...(19): siRNA sense strand
guaauugugcaggauauaa

SEQ ID NO: 581534 - RNA, 19 nt, Homo sapiens
  misc_RNA (1)...(19): siRNA sense strand
agagaucaccuacuccuuu

SEQ ID NO: 581535 - RNA, 19 nt, Homo sapiens
  misc_RNA (1)...(19): siRNA sense strand
ucuccgacgucaacgauaa

SEQ ID NO: 581536 - RNA, 19 nt, Homo sapiens
  misc_RNA (1)...(19): siRNA sense strand
gcaccugaaguuauuguga

SEQ ID NO: 581537 - RNA, 19 nt, Homo sapiens
  misc_RNA (1)...(19): siRNA sense strand
ucguaaauauccugaguug

SEQ ID NO: 581538 - RNA, 19 nt, Homo sapiens
  misc_RNA (1)...(19): siRNA sense strand
ggacagagaagagcacagu

SEQ ID NO: 581539 - RNA, 19 nt, Homo sapiens
  misc_RNA (1)...(19): siRNA sense strand
gagaaaucacgacaaagga

SEQ ID NO: 581540 - RNA, 19 nt, Homo sapiens
  misc_RNA (1)...(19): siRNA sense strand
gagaaacagacuccagaug

SEQ ID NO: 581541 - RNA, 19 nt, Homo sapiens
  misc_RNA (1)...(19): siRNA sense strand
ucaccuacuccuuucauaa

SEQ ID NO: 581542 - RNA, 19 nt, Homo sapiens
  misc_RNA (1)...(19): siRNA sense strand
acagagaagagcacaguuu

SEQ ID NO: 581543 - RNA, 19 nt, Homo sapiens
  misc_RNA (1)...(19): siRNA sense strand
caaauccgaaucaaaguca

SEQ ID NO: 581544 - RNA, 19 nt, Homo sapiens
  misc_RNA (1)...(19): siRNA sense strand
caagaucucgucugugaca

SEQ ID NO: 581545 - RNA, 19 nt, Homo sapiens
  misc_RNA (1)...(19): siRNA sense strand
gaggagaucccagaauaca

SEQ ID NO: 581546 - RNA, 19 nt, Homo sapiens
  misc_RNA (1)...(19): siRNA sense strand
cccagaaagcggagacuua

SEQ ID NO: 581547 - RNA, 19 nt, Homo sapiens
  misc_RNA (1)...(19): siRNA sense strand
ucacgacaaaggaugauuu

SEQ ID NO: 581548 - RNA, 19 nt, Homo sapiens
  misc_RNA (1)...(19): siRNA sense strand
gugcaggauauaaaugaua

SEQ ID NO: 581549 - RNA, 19 nt, Homo sapiens
  misc_RNA (1)...(19): siRNA sense strand
gagaaaauggagaaguuua

SEQ ID NO: 581550 - RNA, 19 nt, Homo sapiens
  misc_RNA (1)...(19): siRNA sense strand
cagaauagaccgagaacag

SEQ ID NO: 581551 - RNA, 19 nt, Homo sapiens
  misc_RNA (1)...(19): siRNA sense strand
caagacagaguucaauuuu

SEQ ID NO: 581552 - RNA, 19 nt, Homo sapiens
  misc_RNA (1)...(19): siRNA sense strand
gggaaaugccaaguuuauu

SEQ ID NO: 581553 - RNA, 19 nt, Homo sapiens
  misc_RNA (1)...(19): siRNA sense strand
gauugugcaccugaaguua

SEQ ID NO: 581554 - RNA, 19 nt, Homo sapiens
  misc_RNA (1)...(19): siRNA sense strand
gcugaaaauccacuaaaua

SEQ ID NO: 581555 - RNA, 19 nt, Homo sapiens
  misc_RNA (1)...(19): siRNA sense strand
ggagacccaccucaaagug

SEQ ID NO: 581556 - RNA, 19 nt, Homo sapiens
  misc_RNA (1)...(19): siRNA sense strand
gcgccucuaucgcucaaau

SEQ ID NO: 581557 - RNA, 19 nt, Homo sapiens
  misc_RNA (1)...(19): siRNA sense strand
gacaacgaguacuuugauc

SEQ ID NO: 581558 - RNA, 19 nt, Homo sapiens
  misc_RNA (1)...(19): siRNA sense strand
uauugugacuucaguaucu

SEQ ID NO: 581559 - RNA, 19 nt, Homo sapiens
  misc_RNA (1)...(19): siRNA sense strand
acgcagagaucaccuacuc

SEQ ID NO: 581560 - RNA, 19 nt, Homo sapiens
  misc_RNA (1)...(19): siRNA sense strand
guccagauccgcuauucaa

SEQ ID NO: 581561 - RNA, 19 nt, Homo sapiens
  misc_RNA (1)...(19): siRNA sense strand
ugacagaauagaccgagaa

SEQ ID NO: 581562 - RNA, 19 nt, Homo sapiens
  misc_RNA (1)...(19): siRNA sense strand
gaucucagugcucuucuuc

SEQ ID NO: 581563 - RNA, 19 nt, Homo sapiens
  misc_RNA (1)...(19): siRNA sense strand
agaaagcggagacuuacuu

SEQ ID NO: 581564 - RNA, 19 nt, Homo sapiens
  misc_RNA (1)...(19): siRNA sense strand
ugacaacgaguacuuugau

SEQ ID NO: 581565 - RNA, 19 nt, Homo sapiens
  misc_RNA (1)...(19): siRNA sense strand
caguaauugugcaggauau

SEQ ID NO: 581566 - RNA, 19 nt, Homo sapiens
  misc_RNA (1)...(19): siRNA sense strand
caaugccucuugggaacaa

SEQ ID NO: 581567 - RNA, 19 nt, Homo sapiens
  misc_RNA (1)...(19): siRNA sense strand
gccaagacagaguucaauu

SEQ ID NO: 581568 - RNA, 19 nt, Homo sapiens
  misc_RNA (1)...(19): siRNA sense strand
ggauagccugcaagaggua

SEQ ID NO: 581569 - RNA, 19 nt, Homo sapiens
  misc_RNA (1)...(19): siRNA sense strand
gacccaaauccgaaucaaa

SEQ ID NO: 581570 - RNA, 19 nt, Homo sapiens
  misc_RNA (1)...(19): siRNA sense strand
uccagauggucguaaauau

SEQ ID NO: 581571 - RNA, 19 nt, Homo sapiens
  misc_RNA (1)...(19): siRNA sense strand
auucagauguugguccuaa

SEQ ID NO: 581572 - RNA, 19 nt, Homo sapiens
  misc_RNA (1)...(19): siRNA sense strand
gauccgcuauucaauucca

SEQ ID NO: 581573 - RNA, 19 nt, Homo sapiens
  misc_RNA (1)...(19): siRNA sense strand
uaauguggacgaacaagug

SEQ ID NO: 581574 - RNA, 19 nt, Homo sapiens
  misc_RNA (1)...(19): siRNA sense strand
ccagauggucguaaauauc

SEQ ID NO: 581575 - RNA, 19 nt, Homo sapiens
  misc_RNA (1)...(19): siRNA sense strand
gacuccagauggucguaaa

SEQ ID NO: 581576 - RNA, 19 nt, Homo sapiens
  misc_RNA (1)...(19): siRNA sense strand
ucagagcucucaucgcuua

SEQ ID NO: 581577 - RNA, 19 nt, Homo sapiens
  misc_RNA (1)...(19): siRNA sense strand
ggaaguaaauauccgguau

SEQ ID NO: 581578 - RNA, 19 nt, Homo sapiens
  misc_RNA (1)...(19): siRNA sense strand
guagauauguguugagugu

SEQ ID NO: 581579 - RNA, 19 nt, Homo sapiens
  misc_RNA (1)...(19): siRNA sense strand
gcaaagacagaguuuaauu

SEQ ID NO: 581580 - RNA, 19 nt, Homo sapiens
  misc_RNA (1)...(19): siRNA sense strand
gaauccaccucgaagaauu

SEQ ID NO: 581581 - RNA, 19 nt, Homo sapiens
  misc_RNA (1)...(19): siRNA sense strand
ggcauugacuuagaaauuu

SEQ ID NO: 581582 - RNA, 19 nt, Homo sapiens
  misc_RNA (1)...(19): siRNA sense strand
ggaaaguccugauggaagu

SEQ ID NO: 581583 - RNA, 19 nt, Homo sapiens
  misc_RNA (1)...(19): siRNA sense strand
gaggauuauuucaacguua

SEQ ID NO: 581584 - RNA, 19 nt, Homo sapiens
  misc_RNA (1)...(19): siRNA sense strand
gaaguuccuuucaaauuag

SEQ ID NO: 581585 - RNA, 19 nt, Homo sapiens
  misc_RNA (1)...(19): siRNA sense strand
gaagagacaaguagauaug

SEQ ID NO: 581586 - RNA, 19 nt, Homo sapiens
  misc_RNA (1)...(19): siRNA sense strand
ggacuuugcccuauuccua

SEQ ID NO: 581587 - RNA, 19 nt, Homo sapiens
  misc_RNA (1)...(19): siRNA sense strand
ugauaaugcucccguguuu

SEQ ID NO: 581588 - RNA, 19 nt, Homo sapiens
  misc_RNA (1)...(19): siRNA sense strand
ccaccucgaagaauuauua

SEQ ID NO: 581589 - RNA, 19 nt, Homo sapiens
  misc_RNA (1)...(19): siRNA sense strand
gcauugacuuagaaauuug

SEQ ID NO: 581590 - RNA, 19 nt, Homo sapiens
  misc_RNA (1)...(19): siRNA sense strand
gagaagauuugcggaagga

SEQ ID NO: 581591 - RNA, 19 nt, Homo sapiens
  misc_RNA (1)...(19): siRNA sense strand
caacgacaaugcaccuguu

SEQ ID NO: 581592 - RNA, 19 nt, Homo sapiens
  misc_RNA (1)...(19): siRNA sense strand
cagagaagccgaaaugaug

SEQ ID NO: 581593 - RNA, 19 nt, Homo sapiens
  misc_RNA (1)...(19): siRNA sense strand
gaagaaguuccuuucaaau

SEQ ID NO: 581594 - RNA, 19 nt, Homo sapiens
  misc_RNA (1)...(19): siRNA sense strand
ccacgugguuguuguaauc

SEQ ID NO: 581595 - RNA, 19 nt, Homo sapiens
  misc_RNA (1)...(19): siRNA sense strand
guaccagccucuucaaucu

SEQ ID NO: 581596 - RNA, 19 nt, Homo sapiens
  misc_RNA (1)...(19): siRNA sense strand
caggagguauacaggguua

SEQ ID NO: 581597 - RNA, 19 nt, Homo sapiens
  misc_RNA (1)...(19): siRNA sense strand
caccuaaucuucgcggaua

SEQ ID NO: 581598 - RNA, 19 nt, Homo sapiens
  misc_RNA (1)...(19): siRNA sense strand
gaagauuugcggaaggaaa

SEQ ID NO: 581599 - RNA, 19 nt, Homo sapiens
  misc_RNA (1)...(19): siRNA sense strand
acugagggcugcuuucaaa

SEQ ID NO: 581600 - RNA, 19 nt, Homo sapiens
  misc_RNA (1)...(19): siRNA sense strand
gaacaucagagcucucauc

SEQ ID NO: 581601 - RNA, 19 nt, Homo sapiens
  misc_RNA (1)...(19): siRNA sense strand
uaggauagaucgagagaag

SEQ ID NO: 581602 - RNA, 19 nt, Homo sapiens
  misc_RNA (1)...(19): siRNA sense strand
caaagacagaguuuaauuc

SEQ ID NO: 581603 - RNA, 19 nt, Homo sapiens
  misc_RNA (1)...(19): siRNA sense strand
gcuccgcccucuucgauau

SEQ ID NO: 581604 - RNA, 19 nt, Homo sapiens
  misc_RNA (1)...(19): siRNA sense strand
gcacaucuccgacaucaac

SEQ ID NO: 581605 - RNA, 19 nt, Homo sapiens
  misc_RNA (1)...(19): siRNA sense strand
uuacggaugccaaugauaa

SEQ ID NO: 581606 - RNA, 19 nt, Homo sapiens
  misc_RNA (1)...(19): siRNA sense strand
caaaaggcauugacuuaga

SEQ ID NO: 581607 - RNA, 19 nt, Homo sapiens
  misc_RNA (1)...(19): siRNA sense strand
acaaguagauauguguuga

SEQ ID NO: 581608 - RNA, 19 nt, Homo sapiens
  misc_RNA (1)...(19): siRNA sense strand
gauaaugcucccguguuua

SEQ ID NO: 581609 - RNA, 19 nt, Homo sapiens
  misc_RNA (1)...(19): siRNA sense strand
cuacaacgucacaaucaua

SEQ ID NO: 581610 - RNA, 19 nt, Homo sapiens
  misc_RNA (1)...(19): siRNA sense strand
guaaaauucucucuggauu

SEQ ID NO: 581611 - RNA, 19 nt, Homo sapiens
  misc_RNA (1)...(19): siRNA sense strand
aaucaauacuucucucugu

SEQ ID NO: 581612 - RNA, 19 nt, Homo sapiens
  misc_RNA (1)...(19): siRNA sense strand
uagaaauuguugacgagaa

SEQ ID NO: 581613 - RNA, 19 nt, Homo sapiens
  misc_RNA (1)...(19): siRNA sense strand
cgcgggagcuguuguccua

SEQ ID NO: 581614 - RNA, 19 nt, Homo sapiens
  misc_RNA (1)...(19): siRNA sense strand
gacaugcuauacucaggaa

SEQ ID NO: 581615 - RNA, 19 nt, Homo sapiens
  misc_RNA (1)...(19): siRNA sense strand
ggagagcggggauuuguua

SEQ ID NO: 581616 - RNA, 19 nt, Homo sapiens
  misc_RNA (1)...(19): siRNA sense strand
cugcaaagacagaguuuaa

SEQ ID NO: 581617 - RNA, 19 nt, Homo sapiens
  misc_RNA (1)...(19): siRNA sense strand
agaaauuguugacgagaau

SEQ ID NO: 581618 - RNA, 19 nt, Homo sapiens
  misc_RNA (1)...(19): siRNA sense strand
ggauagaucgagagaagau

SEQ ID NO: 581619 - RNA, 19 nt, Homo sapiens
  misc_RNA (1)...(19): siRNA sense strand
gcagauccgauacacgauu

SEQ ID NO: 581620 - RNA, 19 nt, Homo sapiens
  misc_RNA (1)...(19): siRNA sense strand
cucaggaucugcuguguga

SEQ ID NO: 581621 - RNA, 19 nt, Homo sapiens
  misc_RNA (1)...(19): siRNA sense strand
gcagacagcagacuacaac

SEQ ID NO: 581622 - RNA, 19 nt, Homo sapiens
  misc_RNA (1)...(19): siRNA sense strand
guccuucucuaaccagauu

SEQ ID NO: 581623 - RNA, 19 nt, Homo sapiens
  misc_RNA (1)...(19): siRNA sense strand
uguaauagcccucauaaaa

SEQ ID NO: 581624 - RNA, 19 nt, Homo sapiens
  misc_RNA (1)...(19): siRNA sense strand
gaaguuauacaccaucaac

SEQ ID NO: 581625 - RNA, 19 nt, Homo sapiens
  misc_RNA (1)...(19): siRNA sense strand
gugcagaggauuauuucaa

SEQ ID NO: 581626 - RNA, 19 nt, Homo sapiens
  misc_RNA (1)...(19): siRNA sense strand
gaaaguccugauggaagua

SEQ ID NO: 581627 - RNA, 19 nt, Homo sapiens
  misc_RNA (1)...(19): siRNA sense strand
gcaccacguuucguugcaa

SEQ ID NO: 581628 - RNA, 19 nt, Homo sapiens
  misc_RNA (1)...(19): siRNA sense strand
ccuccagccucgacacuga

SEQ ID NO: 581629 - RNA, 19 nt, Homo sapiens
  misc_RNA (1)...(19): siRNA sense strand
ccucgaagaauuauuacaa

SEQ ID NO: 581630 - RNA, 19 nt, Homo sapiens
  misc_RNA (1)...(19): siRNA sense strand
uagaauccaccucgaagaa

SEQ ID NO: 581631 - RNA, 19 nt, Homo sapiens
  misc_RNA (1)...(19): siRNA sense strand
gaguuacggaugccaauga

SEQ ID NO: 581632 - RNA, 19 nt, Homo sapiens
  misc_RNA (1)...(19): siRNA sense strand
gagcucucaucgcuuaauc

SEQ ID NO: 581633 - RNA, 19 nt, Homo sapiens
  misc_RNA (1)...(19): siRNA sense strand
guuagugaacgguaggaua

SEQ ID NO: 581634 - RNA, 19 nt, Homo sapiens
  misc_RNA (1)...(19): siRNA sense strand
gguuguaugugccaguaau

SEQ ID NO: 581635 - RNA, 19 nt, Homo sapiens
  misc_RNA (1)...(19): siRNA sense strand
gacaaggauucugggcaaa

SEQ ID NO: 581636 - RNA, 19 nt, Homo sapiens
  misc_RNA (1)...(19): siRNA sense strand
gaaaagucagguacuguuu

SEQ ID NO: 581637 - RNA, 19 nt, Homo sapiens
  misc_RNA (1)...(19): siRNA sense strand
cuuagaaauuugugaguca

SEQ ID NO: 581638 - RNA, 19 nt, Homo sapiens
  misc_RNA (1)...(19): siRNA sense strand
ugaugauccuucuaugguu

SEQ ID NO: 581639 - RNA, 19 nt, Homo sapiens
  misc_RNA (1)...(19): siRNA sense strand
ccagagaagccgaaaugau

SEQ ID NO: 581640 - RNA, 19 nt, Homo sapiens
  misc_RNA (1)...(19): siRNA sense strand
gaacuguaauagcccucau

SEQ ID NO: 581641 - RNA, 19 nt, Homo sapiens
  misc_RNA (1)...(19): siRNA sense strand
gagacaaguagauaugugu

SEQ ID NO: 581642 - RNA, 19 nt, Homo sapiens
  misc_RNA (1)...(19): siRNA sense strand
caauacuucucucugucaa

SEQ ID NO: 581643 - RNA, 19 nt, Homo sapiens
  misc_RNA (1)...(19): siRNA sense strand
ggauucugcucaagaugca

SEQ ID NO: 581644 - RNA, 19 nt, Homo sapiens
  misc_RNA (1)...(19): siRNA sense strand
aggguuagccuccaagaaa

SEQ ID NO: 581645 - RNA, 19 nt, Homo sapiens
  misc_RNA (1)...(19): siRNA sense strand
cagauccgauacacgauuc

SEQ ID NO: 581646 - RNA, 19 nt, Homo sapiens
  misc_RNA (1)...(19): siRNA sense strand
ccuaugccuuccucaauuc

SEQ ID NO: 581647 - RNA, 19 nt, Homo sapiens
  misc_RNA (1)...(19): siRNA sense strand
ucuucaaucucaauccaaa

SEQ ID NO: 581648 - RNA, 19 nt, Homo sapiens
  misc_RNA (1)...(19): siRNA sense strand
gcuuaugacccuucuuugu

SEQ ID NO: 581649 - RNA, 19 nt, Homo sapiens
  misc_RNA (1)...(19): siRNA sense strand
gagaagccgaaaugaugaa

SEQ ID NO: 581650 - RNA, 19 nt, Homo sapiens
  misc_RNA (1)...(19): siRNA sense strand
ugaagagacaaguagauau

SEQ ID NO: 581651 - RNA, 19 nt, Homo sapiens
  misc_RNA (1)...(19): siRNA sense strand
ucaagaugcagauguggaa

SEQ ID NO: 581652 - RNA, 19 nt, Homo sapiens
  misc_RNA (1)...(19): siRNA sense strand
ggauagccugcaagaggua

SEQ ID NO: 581653 - RNA, 19 nt, Homo sapiens
  misc_RNA (1)...(19): siRNA sense strand
ccacgugucugagaacaac

SEQ ID NO: 581654 - RNA, 19 nt, Homo sapiens
  misc_RNA (1)...(19): siRNA sense strand
gacuacaacgucacaauca

SEQ ID NO: 581655 - RNA, 19 nt, Homo sapiens
  misc_RNA (1)...(19): siRNA sense strand
uaauagcccucauaaaagu

SEQ ID NO: 581656 - RNA, 19 nt, Homo sapiens
  misc_RNA (1)...(19): siRNA sense strand
ggauggaggaguacacaca

SEQ ID NO: 581657 - RNA, 19 nt, Homo sapiens
  misc_RNA (1)...(19): siRNA sense strand
guuguuguaauccaagaua

SEQ ID NO: 581658 - RNA, 19 nt, Homo sapiens
  misc_RNA (1)...(19): siRNA sense strand
acucuauucuggccaguga

SEQ ID NO: 581659 - RNA, 19 nt, Homo sapiens
  misc_RNA (1)...(19): siRNA sense strand
aaucauagccaccgacaag

SEQ ID NO: 581660 - RNA, 19 nt, Homo sapiens
  misc_RNA (1)...(19): siRNA sense strand
gacaaguagauauguguug

SEQ ID NO: 581661 - RNA, 19 nt, Homo sapiens
  misc_RNA (1)...(19): siRNA sense strand
agaggauuauuucaacguu

SEQ ID NO: 581662 - RNA, 19 nt, Homo sapiens
  misc_RNA (1)...(19): siRNA sense strand
agagacaaguagauaugug

SEQ ID NO: 581663 - RNA, 19 nt, Homo sapiens
  misc_RNA (1)...(19): siRNA sense strand
cauaucuggauccgaguua

SEQ ID NO: 581664 - RNA, 19 nt, Homo sapiens
  misc_RNA (1)...(19): siRNA sense strand
cuaagcggcaccacccaua

SEQ ID NO: 581665 - RNA, 19 nt, Homo sapiens
  misc_RNA (1)...(19): siRNA sense strand
guggaaggcaauucacuga

SEQ ID NO: 581666 - RNA, 19 nt, Homo sapiens
  misc_RNA (1)...(19): siRNA sense strand
aggcauugacuuagaaauu

SEQ ID NO: 581667 - RNA, 19 nt, Homo sapiens
  misc_RNA (1)...(19): siRNA sense strand
gcaccacccauaucuggau

SEQ ID NO: 581668 - RNA, 19 nt, Homo sapiens
  misc_RNA (1)...(19): siRNA sense strand
uguauugccucucauucug

SEQ ID NO: 581669 - RNA, 19 nt, Homo sapiens
  misc_RNA (1)...(19): siRNA sense strand
gggagcagacagcagacua

SEQ ID NO: 581670 - RNA, 19 nt, Homo sapiens
  misc_RNA (1)...(19): siRNA sense strand
aauccaccucgaagaauua

SEQ ID NO: 581671 - RNA, 19 nt, Homo sapiens
  misc_RNA (1)...(19): siRNA sense strand
uaaccagauuccagaggau

SEQ ID NO: 581672 - RNA, 19 nt, Homo sapiens
  misc_RNA (1)...(19): siRNA sense strand
augcagagaucaccuaugc

SEQ ID NO: 581673 - RNA, 19 nt, Homo sapiens
  misc_RNA (1)...(19): siRNA sense strand
uuagugcagaggauuauuu

SEQ ID NO: 581674 - RNA, 19 nt, Homo sapiens
  misc_RNA (1)...(19): siRNA sense strand
gugaugauccuucuauggu

SEQ ID NO: 581675 - RNA, 19 nt, Homo sapiens
  misc_RNA (1)...(19): siRNA sense strand
cgacaucaacgacaaugca

SEQ ID NO: 581676 - RNA, 19 nt, Homo sapiens
  misc_RNA (1)...(19): siRNA sense strand
ucagagcucucaucgcuua

SEQ ID NO: 581677 - RNA, 19 nt, Homo sapiens
  misc_RNA (1)...(19): siRNA sense strand
ggaaguaaauauccgguau

SEQ ID NO: 581678 - RNA, 19 nt, Homo sapiens
  misc_RNA (1)...(19): siRNA sense strand
guagauauguguugagugu

SEQ ID NO: 581679 - RNA, 19 nt, Homo sapiens
  misc_RNA (1)...(19): siRNA sense strand
gcaaagacagaguuuaauu

SEQ ID NO: 581680 - RNA, 19 nt, Homo sapiens
  misc_RNA (1)...(19): siRNA sense strand
gaauccaccucgaagaauu

SEQ ID NO: 581681 - RNA, 19 nt, Homo sapiens
  misc_RNA (1)...(19): siRNA sense strand
ggcauugacuuagaaauuu

SEQ ID NO: 581682 - RNA, 19 nt, Homo sapiens
  misc_RNA (1)...(19): siRNA sense strand
ggaaaguccugauggaagu

SEQ ID NO: 581683 - RNA, 19 nt, Homo sapiens
  misc_RNA (1)...(19): siRNA sense strand
gaggauuauuucaacguua

SEQ ID NO: 581684 - RNA, 19 nt, Homo sapiens
  misc_RNA (1)...(19): siRNA sense strand
gaaguuccuuucaaauuag

SEQ ID NO: 581685 - RNA, 19 nt, Homo sapiens
  misc_RNA (1)...(19): siRNA sense strand
gaagagacaaguagauaug

SEQ ID NO: 581686 - RNA, 19 nt, Homo sapiens
  misc_RNA (1)...(19): siRNA sense strand
ggacuuugcccuauuccua

SEQ ID NO: 581687 - RNA, 19 nt, Homo sapiens
  misc_RNA (1)...(19): siRNA sense strand
ugauaaugcucccguguuu

SEQ ID NO: 581688 - RNA, 19 nt, Homo sapiens
  misc_RNA (1)...(19): siRNA sense strand
ccaccucgaagaauuauua

SEQ ID NO: 581689 - RNA, 19 nt, Homo sapiens
  misc_RNA (1)...(19): siRNA sense strand
gcauugacuuagaaauuug

SEQ ID NO: 581690 - RNA, 19 nt, Homo sapiens
  misc_RNA (1)...(19): siRNA sense strand
gagaagauuugcggaagga

SEQ ID NO: 581691 - RNA, 19 nt, Homo sapiens
  misc_RNA (1)...(19): siRNA sense strand
caacgacaaugcaccuguu

SEQ ID NO: 581692 - RNA, 19 nt, Homo sapiens
  misc_RNA (1)...(19): siRNA sense strand
cagagaagccgaaaugaug

SEQ ID NO: 581693 - RNA, 19 nt, Homo sapiens
  misc_RNA (1)...(19): siRNA sense strand
gaagaaguuccuuucaaau

SEQ ID NO: 581694 - RNA, 19 nt, Homo sapiens
  misc_RNA (1)...(19): siRNA sense strand
ccacgugguuguuguaauc

SEQ ID NO: 581695 - RNA, 19 nt, Homo sapiens
  misc_RNA (1)...(19): siRNA sense strand
guaccagccucuucaaucu

SEQ ID NO: 581696 - RNA, 19 nt, Homo sapiens
  misc_RNA (1)...(19): siRNA sense strand
caggagguauacaggguua

SEQ ID NO: 581697 - RNA, 19 nt, Homo sapiens
  misc_RNA (1)...(19): siRNA sense strand
caccuaaucuucgcggaua

SEQ ID NO: 581698 - RNA, 19 nt, Homo sapiens
  misc_RNA (1)...(19): siRNA sense strand
gaagauuugcggaaggaaa

SEQ ID NO: 581699 - RNA, 19 nt, Homo sapiens
  misc_RNA (1)...(19): siRNA sense strand
acugagggcugcuuucaaa

SEQ ID NO: 581700 - RNA, 19 nt, Homo sapiens
  misc_RNA (1)...(19): siRNA sense strand
gaacaucagagcucucauc

SEQ ID NO: 581701 - RNA, 19 nt, Homo sapiens
  misc_RNA (1)...(19): siRNA sense strand
uaggauagaucgagagaag

SEQ ID NO: 581702 - RNA, 19 nt, Homo sapiens
  misc_RNA (1)...(19): siRNA sense strand
caaagacagaguuuaauuc

SEQ ID NO: 581703 - RNA, 19 nt, Homo sapiens
  misc_RNA (1)...(19): siRNA sense strand
gcuccgcccucuucgauau

SEQ ID NO: 581704 - RNA, 19 nt, Homo sapiens
  misc_RNA (1)...(19): siRNA sense strand
gcacaucuccgacaucaac

SEQ ID NO: 581705 - RNA, 19 nt, Homo sapiens
  misc_RNA (1)...(19): siRNA sense strand
uuacggaugccaaugauaa

SEQ ID NO: 581706 - RNA, 19 nt, Homo sapiens
  misc_RNA (1)...(19): siRNA sense strand
caaaaggcauugacuuaga

SEQ ID NO: 581707 - RNA, 19 nt, Homo sapiens
  misc_RNA (1)...(19): siRNA sense strand
acaaguagauauguguuga

SEQ ID NO: 581708 - RNA, 19 nt, Homo sapiens
  misc_RNA (1)...(19): siRNA sense strand
gauaaugcucccguguuua

SEQ ID NO: 581709 - RNA, 19 nt, Homo sapiens
  misc_RNA (1)...(19): siRNA sense strand
cuacaacgucacaaucaua

SEQ ID NO: 581710 - RNA, 19 nt, Homo sapiens
  misc_RNA (1)...(19): siRNA sense strand
guaaaauucucucuggauu

SEQ ID NO: 581711 - RNA, 19 nt, Homo sapiens
  misc_RNA (1)...(19): siRNA sense strand
aaucaauacuucucucugu

SEQ ID NO: 581712 - RNA, 19 nt, Homo sapiens
  misc_RNA (1)...(19): siRNA sense strand
uagaaauuguugacgagaa

SEQ ID NO: 581713 - RNA, 19 nt, Homo sapiens
  misc_RNA (1)...(19): siRNA sense strand
cgcgggagcuguuguccua

SEQ ID NO: 581714 - RNA, 19 nt, Homo sapiens
  misc_RNA (1)...(19): siRNA sense strand
gacaugcuauacucaggaa

SEQ ID NO: 581715 - RNA, 19 nt, Homo sapiens
  misc_RNA (1)...(19): siRNA sense strand
ggagagcggggauuuguua

SEQ ID NO: 581716 - RNA, 19 nt, Homo sapiens
  misc_RNA (1)...(19): siRNA sense strand
cugcaaagacagaguuuaa

SEQ ID NO: 581717 - RNA, 19 nt, Homo sapiens
  misc_RNA (1)...(19): siRNA sense strand
agaaauuguugacgagaau

SEQ ID NO: 581718 - RNA, 19 nt, Homo sapiens
  misc_RNA (1)...(19): siRNA sense strand
ggauagaucgagagaagau

SEQ ID NO: 581719 - RNA, 19 nt, Homo sapiens
  misc_RNA (1)...(19): siRNA sense strand
gcagauccgauacacgauu

SEQ ID NO: 581720 - RNA, 19 nt, Homo sapiens
  misc_RNA (1)...(19): siRNA sense strand
cucaggaucugcuguguga

SEQ ID NO: 581721 - RNA, 19 nt, Homo sapiens
  misc_RNA (1)...(19): siRNA sense strand
gcagacagcagacuacaac

SEQ ID NO: 581722 - RNA, 19 nt, Homo sapiens
  misc_RNA (1)...(19): siRNA sense strand
guccuucucuaaccagauu

SEQ ID NO: 581723 - RNA, 19 nt, Homo sapiens
  misc_RNA (1)...(19): siRNA sense strand
uguaauagcccucauaaaa

SEQ ID NO: 581724 - RNA, 19 nt, Homo sapiens
  misc_RNA (1)...(19): siRNA sense strand
gaaguuauacaccaucaac

SEQ ID NO: 581725 - RNA, 19 nt, Homo sapiens
  misc_RNA (1)...(19): siRNA sense strand
gugcagaggauuauuucaa

SEQ ID NO: 581726 - RNA, 19 nt, Homo sapiens
  misc_RNA (1)...(19): siRNA sense strand
gaaaguccugauggaagua

SEQ ID NO: 581727 - RNA, 19 nt, Homo sapiens
  misc_RNA (1)...(19): siRNA sense strand
gcaccacguuucguugcaa

SEQ ID NO: 581728 - RNA, 19 nt, Homo sapiens
  misc_RNA (1)...(19): siRNA sense strand
ccuccagccucgacacuga

SEQ ID NO: 581729 - RNA, 19 nt, Homo sapiens
  misc_RNA (1)...(19): siRNA sense strand
ccucgaagaauuauuacaa

SEQ ID NO: 581730 - RNA, 19 nt, Homo sapiens
  misc_RNA (1)...(19): siRNA sense strand
uagaauccaccucgaagaa

SEQ ID NO: 581731 - RNA, 19 nt, Homo sapiens
  misc_RNA (1)...(19): siRNA sense strand
gaguuacggaugccaauga

SEQ ID NO: 581732 - RNA, 19 nt, Homo sapiens
  misc_RNA (1)...(19): siRNA sense strand
gagcucucaucgcuuaauc

SEQ ID NO: 581733 - RNA, 19 nt, Homo sapiens
  misc_RNA (1)...(19): siRNA sense strand
guuagugaacgguaggaua

SEQ ID NO: 581734 - RNA, 19 nt, Homo sapiens
  misc_RNA (1)...(19): siRNA sense strand
gguuguaugugccaguaau

SEQ ID NO: 581735 - RNA, 19 nt, Homo sapiens
  misc_RNA (1)...(19): siRNA sense strand
gacaaggauucugggcaaa

SEQ ID NO: 581736 - RNA, 19 nt, Homo sapiens
  misc_RNA (1)...(19): siRNA sense strand
gaaaagucagguacuguuu

SEQ ID NO: 581737 - RNA, 19 nt, Homo sapiens
  misc_RNA (1)...(19): siRNA sense strand
cuuagaaauuugugaguca

SEQ ID NO: 581738 - RNA, 19 nt, Homo sapiens
  misc_RNA (1)...(19): siRNA sense strand
ugaugauccuucuaugguu

SEQ ID NO: 581739 - RNA, 19 nt, Homo sapiens
  misc_RNA (1)...(19): siRNA sense strand
ccagagaagccgaaaugau

SEQ ID NO: 581740 - RNA, 19 nt, Homo sapiens
  misc_RNA (1)...(19): siRNA sense strand
gaacuguaauagcccucau

SEQ ID NO: 581741 - RNA, 19 nt, Homo sapiens
  misc_RNA (1)...(19): siRNA sense strand
gagacaaguagauaugugu

SEQ ID NO: 581742 - RNA, 19 nt, Homo sapiens
  misc_RNA (1)...(19): siRNA sense strand
caauacuucucucugucaa

SEQ ID NO: 581743 - RNA, 19 nt, Homo sapiens
  misc_RNA (1)...(19): siRNA sense strand
ggauucugcucaagaugca

SEQ ID NO: 581744 - RNA, 19 nt, Homo sapiens
  misc_RNA (1)...(19): siRNA sense strand
aggguuagccuccaagaaa

SEQ ID NO: 581745 - RNA, 19 nt, Homo sapiens
  misc_RNA (1)...(19): siRNA sense strand
cagauccgauacacgauuc

SEQ ID NO: 581746 - RNA, 19 nt, Homo sapiens
  misc_RNA (1)...(19): siRNA sense strand
ccuaugccuuccucaauuc

SEQ ID NO: 581747 - RNA, 19 nt, Homo sapiens
  misc_RNA (1)...(19): siRNA sense strand
ucuucaaucucaauccaaa

SEQ ID NO: 581748 - RNA, 19 nt, Homo sapiens
  misc_RNA (1)...(19): siRNA sense strand
gcuuaugacccuucuuugu

SEQ ID NO: 581749 - RNA, 19 nt, Homo sapiens
  misc_RNA (1)...(19): siRNA sense strand
gagaagccgaaaugaugaa

SEQ ID NO: 581750 - RNA, 19 nt, Homo sapiens
  misc_RNA (1)...(19): siRNA sense strand
ugaagagacaaguagauau

SEQ ID NO: 581751 - RNA, 19 nt, Homo sapiens
  misc_RNA (1)...(19): siRNA sense strand
ucaagaugcagauguggaa

SEQ ID NO: 581752 - RNA, 19 nt, Homo sapiens
  misc_RNA (1)...(19): siRNA sense strand
ggauagccugcaagaggua

SEQ ID NO: 581753 - RNA, 19 nt, Homo sapiens
  misc_RNA (1)...(19): siRNA sense strand
ccacgugucugagaacaac

SEQ ID NO: 581754 - RNA, 19 nt, Homo sapiens
  misc_RNA (1)...(19): siRNA sense strand
gacuacaacgucacaauca

SEQ ID NO: 581755 - RNA, 19 nt, Homo sapiens
  misc_RNA (1)...(19): siRNA sense strand
uaauagcccucauaaaagu

SEQ ID NO: 581756 - RNA, 19 nt, Homo sapiens
  misc_RNA (1)...(19): siRNA sense strand
ggauggaggaguacacaca

SEQ ID NO: 581757 - RNA, 19 nt, Homo sapiens
  misc_RNA (1)...(19): siRNA sense strand
guuguuguaauccaagaua

SEQ ID NO: 581758 - RNA, 19 nt, Homo sapiens
  misc_RNA (1)...(19): siRNA sense strand
acucuauucuggccaguga

SEQ ID NO: 581759 - RNA, 19 nt, Homo sapiens
  misc_RNA (1)...(19): siRNA sense strand
aaucauagccaccgacaag

SEQ ID NO: 581760 - RNA, 19 nt, Homo sapiens
  misc_RNA (1)...(19): siRNA sense strand
gacaaguagauauguguug

SEQ ID NO: 581761 - RNA, 19 nt, Homo sapiens
  misc_RNA (1)...(19): siRNA sense strand
agaggauuauuucaacguu

SEQ ID NO: 581762 - RNA, 19 nt, Homo sapiens
  misc_RNA (1)...(19): siRNA sense strand
agagacaaguagauaugug

SEQ ID NO: 581763 - RNA, 19 nt, Homo sapiens
  misc_RNA (1)...(19): siRNA sense strand
cauaucuggauccgaguua

SEQ ID NO: 581764 - RNA, 19 nt, Homo sapiens
  misc_RNA (1)...(19): siRNA sense strand
cuaagcggcaccacccaua

SEQ ID NO: 581765 - RNA, 19 nt, Homo sapiens
  misc_RNA (1)...(19): siRNA sense strand
guggaaggcaauucacuga

SEQ ID NO: 581766 - RNA, 19 nt, Homo sapiens
  misc_RNA (1)...(19): siRNA sense strand
aggcauugacuuagaaauu

SEQ ID NO: 581767 - RNA, 19 nt, Homo sapiens
  misc_RNA (1)...(19): siRNA sense strand
gcaccacccauaucuggau

SEQ ID NO: 581768 - RNA, 19 nt, Homo sapiens
  misc_RNA (1)...(19): siRNA sense strand
uguauugccucucauucug

SEQ ID NO: 581769 - RNA, 19 nt, Homo sapiens
  misc_RNA (1)...(19): siRNA sense strand
gggagcagacagcagacua

SEQ ID NO: 581770 - RNA, 19 nt, Homo sapiens
  misc_RNA (1)...(19): siRNA sense strand
aauccaccucgaagaauua

SEQ ID NO: 581771 - RNA, 19 nt, Homo sapiens
  misc_RNA (1)...(19): siRNA sense strand
uaaccagauuccagaggau

SEQ ID NO: 581772 - RNA, 19 nt, Homo sapiens
  misc_RNA (1)...(19): siRNA sense strand
augcagagaucaccuaugc

SEQ ID NO: 581773 - RNA, 19 nt, Homo sapiens
  misc_RNA (1)...(19): siRNA sense strand
uuagugcagaggauuauuu

SEQ ID NO: 581774 - RNA, 19 nt, Homo sapiens
  misc_RNA (1)...(19): siRNA sense strand
gugaugauccuucuauggu

SEQ ID NO: 581775 - RNA, 19 nt, Homo sapiens
  misc_RNA (1)...(19): siRNA sense strand
cgacaucaacgacaaugca

SEQ ID NO: 581776 - RNA, 19 nt, Homo sapiens
  misc_RNA (1)...(19): siRNA sense strand
gaagacaccuugaagauuu

SEQ ID NO: 581777 - RNA, 19 nt, Homo sapiens
  misc_RNA (1)...(19): siRNA sense strand
ugauaacgcuccagaaaua

SEQ ID NO: 581778 - RNA, 19 nt, Homo sapiens
  misc_RNA (1)...(19): siRNA sense strand
guccagagcuacaauauaa

SEQ ID NO: 581779 - RNA, 19 nt, Homo sapiens
  misc_RNA (1)...(19): siRNA sense strand
agaaugcccuggucacuua

SEQ ID NO: 581780 - RNA, 19 nt, Homo sapiens
  misc_RNA (1)...(19): siRNA sense strand
acuaucaccucuucuauua

SEQ ID NO: 581781 - RNA, 19 nt, Homo sapiens
  misc_RNA (1)...(19): siRNA sense strand
gauauucggugccagaaga

SEQ ID NO: 581782 - RNA, 19 nt, Homo sapiens
  misc_RNA (1)...(19): siRNA sense strand
ggucaagucuccuguuuua

SEQ ID NO: 581783 - RNA, 19 nt, Homo sapiens
  misc_RNA (1)...(19): siRNA sense strand
ccaccugccuuuuaaauua

SEQ ID NO: 581784 - RNA, 19 nt, Homo sapiens
  misc_RNA (1)...(19): siRNA sense strand
cagcucagcccuaauaauu

SEQ ID NO: 581785 - RNA, 19 nt, Homo sapiens
  misc_RNA (1)...(19): siRNA sense strand
gaguggagguggaaauaau

SEQ ID NO: 581786 - RNA, 19 nt, Homo sapiens
  misc_RNA (1)...(19): siRNA sense strand
ccucacagcuuuagaugga

SEQ ID NO: 581787 - RNA, 19 nt, Homo sapiens
  misc_RNA (1)...(19): siRNA sense strand
ggaagacaccuugaagauu

SEQ ID NO: 581788 - RNA, 19 nt, Homo sapiens
  misc_RNA (1)...(19): siRNA sense strand
ccaauuggauucacaaacu

SEQ ID NO: 581789 - RNA, 19 nt, Homo sapiens
  misc_RNA (1)...(19): siRNA sense strand
caaggcuucugaaauauuc

SEQ ID NO: 581790 - RNA, 19 nt, Homo sapiens
  misc_RNA (1)...(19): siRNA sense strand
ccuccuaugucucuauuaa

SEQ ID NO: 581791 - RNA, 19 nt, Homo sapiens
  misc_RNA (1)...(19): siRNA sense strand
ucuaugagauggaaauuca

SEQ ID NO: 581792 - RNA, 19 nt, Homo sapiens
  misc_RNA (1)...(19): siRNA sense strand
gaucacggcaggcaggaua

SEQ ID NO: 581793 - RNA, 19 nt, Homo sapiens
  misc_RNA (1)...(19): siRNA sense strand
gaacucgggugcugauggu

SEQ ID NO: 581794 - RNA, 19 nt, Homo sapiens
  misc_RNA (1)...(19): siRNA sense strand
gaaauucaaggccaagaug

SEQ ID NO: 581795 - RNA, 19 nt, Homo sapiens
  misc_RNA (1)...(19): siRNA sense strand
gcaaggcuucugaaauauu

SEQ ID NO: 581796 - RNA, 19 nt, Homo sapiens
  misc_RNA (1)...(19): siRNA sense strand
ugauugcucuucuaaaugu

SEQ ID NO: 581797 - RNA, 19 nt, Homo sapiens
  misc_RNA (1)...(19): siRNA sense strand
gcgauuugcucuuccuaau

SEQ ID NO: 581798 - RNA, 19 nt, Homo sapiens
  misc_RNA (1)...(19): siRNA sense strand
ggccaagaauccagagcua

SEQ ID NO: 581799 - RNA, 19 nt, Homo sapiens
  misc_RNA (1)...(19): siRNA sense strand
gaugguggaggucucuuua

SEQ ID NO: 581800 - RNA, 19 nt, Homo sapiens
  misc_RNA (1)...(19): siRNA sense strand
gagguggaaauaauagaua

SEQ ID NO: 581801 - RNA, 19 nt, Homo sapiens
  misc_RNA (1)...(19): siRNA sense strand
gcuaccagcucagcccuaa

SEQ ID NO: 581802 - RNA, 19 nt, Homo sapiens
  misc_RNA (1)...(19): siRNA sense strand
ugaacucccuccagagcua

SEQ ID NO: 581803 - RNA, 19 nt, Homo sapiens
  misc_RNA (1)...(19): siRNA sense strand
aaauaacuaucaccucuuc

SEQ ID NO: 581804 - RNA, 19 nt, Homo sapiens
  misc_RNA (1)...(19): siRNA sense strand
uaaaugaucacaucccaau

SEQ ID NO: 581805 - RNA, 19 nt, Homo sapiens
  misc_RNA (1)...(19): siRNA sense strand
ugagcaguuucgagacuua

SEQ ID NO: 581806 - RNA, 19 nt, Homo sapiens
  misc_RNA (1)...(19): siRNA sense strand
guacagugauugcucuucu

SEQ ID NO: 581807 - RNA, 19 nt, Homo sapiens
  misc_RNA (1)...(19): siRNA sense strand
gggaguugguccagagcua

SEQ ID NO: 581808 - RNA, 19 nt, Homo sapiens
  misc_RNA (1)...(19): siRNA sense strand
uacaauccuucgacuauga

SEQ ID NO: 581809 - RNA, 19 nt, Homo sapiens
  misc_RNA (1)...(19): siRNA sense strand
gauuugcucuuccuaaugc

SEQ ID NO: 581810 - RNA, 19 nt, Homo sapiens
  misc_RNA (1)...(19): siRNA sense strand
gaaauaacuaucaccucuu

SEQ ID NO: 581811 - RNA, 19 nt, Homo sapiens
  misc_RNA (1)...(19): siRNA sense strand
aagacaccuugaagauuua

SEQ ID NO: 581812 - RNA, 19 nt, Homo sapiens
  misc_RNA (1)...(19): siRNA sense strand
guugaucacuguuguggau

SEQ ID NO: 581813 - RNA, 19 nt, Homo sapiens
  misc_RNA (1)...(19): siRNA sense strand
ccaggcagauccgauauuc

SEQ ID NO: 581814 - RNA, 19 nt, Homo sapiens
  misc_RNA (1)...(19): siRNA sense strand
ggaggacgaaguggagaua

SEQ ID NO: 581815 - RNA, 19 nt, Homo sapiens
  misc_RNA (1)...(19): siRNA sense strand
acucaugucuggcugaaug

SEQ ID NO: 581816 - RNA, 19 nt, Homo sapiens
  misc_RNA (1)...(19): siRNA sense strand
agugauugcucuucuaaau

SEQ ID NO: 581817 - RNA, 19 nt, Homo sapiens
  misc_RNA (1)...(19): siRNA sense strand
gguccucgauguaaaugau

SEQ ID NO: 581818 - RNA, 19 nt, Homo sapiens
  misc_RNA (1)...(19): siRNA sense strand
uaccagcucagcccuaaua

SEQ ID NO: 581819 - RNA, 19 nt, Homo sapiens
  misc_RNA (1)...(19): siRNA sense strand
gguccagagcuacaauaua

SEQ ID NO: 581820 - RNA, 19 nt, Homo sapiens
  misc_RNA (1)...(19): siRNA sense strand
gauaacgcuccagaaauaa

SEQ ID NO: 581821 - RNA, 19 nt, Homo sapiens
  misc_RNA (1)...(19): siRNA sense strand
guauaucgcgugaguguuc

SEQ ID NO: 581822 - RNA, 19 nt, Homo sapiens
  misc_RNA (1)...(19): siRNA sense strand
ggaguggagguggaaauaa

SEQ ID NO: 581823 - RNA, 19 nt, Homo sapiens
  misc_RNA (1)...(19): siRNA sense strand
caagaauccagagcuagua

SEQ ID NO: 581824 - RNA, 19 nt, Homo sapiens
  misc_RNA (1)...(19): siRNA sense strand
cgacgauguugaucacugu

SEQ ID NO: 581825 - RNA, 19 nt, Homo sapiens
  misc_RNA (1)...(19): siRNA sense strand
gaggcgaucccauccgaaa

SEQ ID NO: 581826 - RNA, 19 nt, Homo sapiens
  misc_RNA (1)...(19): siRNA sense strand
ggcugaauguggcagauga

SEQ ID NO: 581827 - RNA, 19 nt, Homo sapiens
  misc_RNA (1)...(19): siRNA sense strand
aaugauaacgcuccagaaa

SEQ ID NO: 581828 - RNA, 19 nt, Homo sapiens
  misc_RNA (1)...(19): siRNA sense strand
ucugaaauauuccaauugg

SEQ ID NO: 581829 - RNA, 19 nt, Homo sapiens
  misc_RNA (1)...(19): siRNA sense strand
gagacgguguccuccuguu

SEQ ID NO: 581830 - RNA, 19 nt, Homo sapiens
  misc_RNA (1)...(19): siRNA sense strand
uggcagaugacaacgauaa

SEQ ID NO: 581831 - RNA, 19 nt, Homo sapiens
  misc_RNA (1)...(19): siRNA sense strand
uaacuaucaccucuucuau

SEQ ID NO: 581832 - RNA, 19 nt, Homo sapiens
  misc_RNA (1)...(19): siRNA sense strand
ggaaauucaaggccaagau

SEQ ID NO: 581833 - RNA, 19 nt, Homo sapiens
  misc_RNA (1)...(19): siRNA sense strand
uaaaugugcaagaucaaga

SEQ ID NO: 581834 - RNA, 19 nt, Homo sapiens
  misc_RNA (1)...(19): siRNA sense strand
gggccaggcagauccgaua

SEQ ID NO: 581835 - RNA, 19 nt, Homo sapiens
  misc_RNA (1)...(19): siRNA sense strand
ggagguggaaauaauagau

SEQ ID NO: 581836 - RNA, 19 nt, Homo sapiens
  misc_RNA (1)...(19): siRNA sense strand
ccuacaauccuucgacuau

SEQ ID NO: 581837 - RNA, 19 nt, Homo sapiens
  misc_RNA (1)...(19): siRNA sense strand
cuuacucucugacggauga

SEQ ID NO: 581838 - RNA, 19 nt, Homo sapiens
  misc_RNA (1)...(19): siRNA sense strand
gaauguggcagaugacaac

SEQ ID NO: 581839 - RNA, 19 nt, Homo sapiens
  misc_RNA (1)...(19): siRNA sense strand
uauggaacuucucguggaa

SEQ ID NO: 581840 - RNA, 19 nt, Homo sapiens
  misc_RNA (1)...(19): siRNA sense strand
caauuggauucacaaacug

SEQ ID NO: 581841 - RNA, 19 nt, Homo sapiens
  misc_RNA (1)...(19): siRNA sense strand
uuguggaugugaaugauaa

SEQ ID NO: 581842 - RNA, 19 nt, Homo sapiens
  misc_RNA (1)...(19): siRNA sense strand
aggacgaaguggagauaaa

SEQ ID NO: 581843 - RNA, 19 nt, Homo sapiens
  misc_RNA (1)...(19): siRNA sense strand
cuacaauccuucgacuaug

SEQ ID NO: 581844 - RNA, 19 nt, Homo sapiens
  misc_RNA (1)...(19): siRNA sense strand
aaacucaugucuggcugaa

SEQ ID NO: 581845 - RNA, 19 nt, Homo sapiens
  misc_RNA (1)...(19): siRNA sense strand
gaaugauaacgcuccagaa

SEQ ID NO: 581846 - RNA, 19 nt, Homo sapiens
  misc_RNA (1)...(19): siRNA sense strand
gaacggauggggccaagaa

SEQ ID NO: 581847 - RNA, 19 nt, Homo sapiens
  misc_RNA (1)...(19): siRNA sense strand
gcaguuucgagacuuagaa

SEQ ID NO: 581848 - RNA, 19 nt, Homo sapiens
  misc_RNA (1)...(19): siRNA sense strand
aaagggcgcaguucccauu

SEQ ID NO: 581849 - RNA, 19 nt, Homo sapiens
  misc_RNA (1)...(19): siRNA sense strand
cuaaccaccugccuuuuaa

SEQ ID NO: 581850 - RNA, 19 nt, Homo sapiens
  misc_RNA (1)...(19): siRNA sense strand
ccaagaauccagagcuagu

SEQ ID NO: 581851 - RNA, 19 nt, Homo sapiens
  misc_RNA (1)...(19): siRNA sense strand
uuucgagacuuagaacuga

SEQ ID NO: 581852 - RNA, 19 nt, Homo sapiens
  misc_RNA (1)...(19): siRNA sense strand
gggugccucuguccuccua

SEQ ID NO: 581853 - RNA, 19 nt, Homo sapiens
  misc_RNA (1)...(19): siRNA sense strand
gccuccaucuucucaguga

SEQ ID NO: 581854 - RNA, 19 nt, Homo sapiens
  misc_RNA (1)...(19): siRNA sense strand
ccacgacgauguugaucac

SEQ ID NO: 581855 - RNA, 19 nt, Homo sapiens
  misc_RNA (1)...(19): siRNA sense strand
guccguauaucgcgugagu

SEQ ID NO: 581856 - RNA, 19 nt, Homo sapiens
  misc_RNA (1)...(19): siRNA sense strand
cuucgacuaugagcaguuu

SEQ ID NO: 581857 - RNA, 19 nt, Homo sapiens
  misc_RNA (1)...(19): siRNA sense strand
uggaagacaccuugaagau

SEQ ID NO: 581858 - RNA, 19 nt, Homo sapiens
  misc_RNA (1)...(19): siRNA sense strand
acagugauugcucuucuaa

SEQ ID NO: 581859 - RNA, 19 nt, Homo sapiens
  misc_RNA (1)...(19): siRNA sense strand
uacagugauugcucuucua

SEQ ID NO: 581860 - RNA, 19 nt, Homo sapiens
  misc_RNA (1)...(19): siRNA sense strand
ucgcgugaguguuccagaa

SEQ ID NO: 581861 - RNA, 19 nt, Homo sapiens
  misc_RNA (1)...(19): siRNA sense strand
cgauguugaucacuguugu

SEQ ID NO: 581862 - RNA, 19 nt, Homo sapiens
  misc_RNA (1)...(19): siRNA sense strand
ucuaugcccuacaauccuu

SEQ ID NO: 581863 - RNA, 19 nt, Homo sapiens
  misc_RNA (1)...(19): siRNA sense strand
auaacuaucaccucuucua

SEQ ID NO: 581864 - RNA, 19 nt, Homo sapiens
  misc_RNA (1)...(19): siRNA sense strand
caagucuccuguuuuauuc

SEQ ID NO: 581865 - RNA, 19 nt, Homo sapiens
  misc_RNA (1)...(19): siRNA sense strand
gaauccagagcuaguacug

SEQ ID NO: 581866 - RNA, 19 nt, Homo sapiens
  misc_RNA (1)...(19): siRNA sense strand
ugguugcgguggacaaaga

SEQ ID NO: 581867 - RNA, 19 nt, Homo sapiens
  misc_RNA (1)...(19): siRNA sense strand
ggacgaaguggagauaaaa

SEQ ID NO: 581868 - RNA, 19 nt, Homo sapiens
  misc_RNA (1)...(19): siRNA sense strand
uaacguugacagccacaga

SEQ ID NO: 581869 - RNA, 19 nt, Homo sapiens
  misc_RNA (1)...(19): siRNA sense strand
gugauugcucuucuaaaug

SEQ ID NO: 581870 - RNA, 19 nt, Homo sapiens
  misc_RNA (1)...(19): siRNA sense strand
ucaccucuucuauuaauuc

SEQ ID NO: 581871 - RNA, 19 nt, Homo sapiens
  misc_RNA (1)...(19): siRNA sense strand
gcuccagaaauaacuauca

SEQ ID NO: 581872 - RNA, 19 nt, Homo sapiens
  misc_RNA (1)...(19): siRNA sense strand
gaucacuguuguggaugug

SEQ ID NO: 581873 - RNA, 19 nt, Homo sapiens
  misc_RNA (1)...(19): siRNA sense strand
cggaguggagguggaaaua

SEQ ID NO: 581874 - RNA, 19 nt, Homo sapiens
  misc_RNA (1)...(19): siRNA sense strand
guggaagacaccuugaaga

SEQ ID NO: 581875 - RNA, 19 nt, Homo sapiens
  misc_RNA (1)...(19): siRNA sense strand
gacuuagaacugagaguga

SEQ ID NO: 581876 - RNA, 19 nt, Homo sapiens
  misc_RNA (1)...(19): siRNA sense strand
gaagacaccuugaagauuu

SEQ ID NO: 581877 - RNA, 19 nt, Homo sapiens
  misc_RNA (1)...(19): siRNA sense strand
ugauaacgcuccagaaaua

SEQ ID NO: 581878 - RNA, 19 nt, Homo sapiens
  misc_RNA (1)...(19): siRNA sense strand
guccagagcuacaauauaa

SEQ ID NO: 581879 - RNA, 19 nt, Homo sapiens
  misc_RNA (1)...(19): siRNA sense strand
agaaugcccuggucacuua

SEQ ID NO: 581880 - RNA, 19 nt, Homo sapiens
  misc_RNA (1)...(19): siRNA sense strand
acuaucaccucuucuauua

SEQ ID NO: 581881 - RNA, 19 nt, Homo sapiens
  misc_RNA (1)...(19): siRNA sense strand
gauauucggugccagaaga

SEQ ID NO: 581882 - RNA, 19 nt, Homo sapiens
  misc_RNA (1)...(19): siRNA sense strand
ggucaagucuccuguuuua

SEQ ID NO: 581883 - RNA, 19 nt, Homo sapiens
  misc_RNA (1)...(19): siRNA sense strand
ccaccugccuuuuaaauua

SEQ ID NO: 581884 - RNA, 19 nt, Homo sapiens
  misc_RNA (1)...(19): siRNA sense strand
cagcucagcccuaauaauu

SEQ ID NO: 581885 - RNA, 19 nt, Homo sapiens
  misc_RNA (1)...(19): siRNA sense strand
gaguggagguggaaauaau

SEQ ID NO: 581886 - RNA, 19 nt, Homo sapiens
  misc_RNA (1)...(19): siRNA sense strand
ccucacagcuuuagaugga

SEQ ID NO: 581887 - RNA, 19 nt, Homo sapiens
  misc_RNA (1)...(19): siRNA sense strand
ggaagacaccuugaagauu

SEQ ID NO: 581888 - RNA, 19 nt, Homo sapiens
  misc_RNA (1)...(19): siRNA sense strand
ccaauuggauucacaaacu

SEQ ID NO: 581889 - RNA, 19 nt, Homo sapiens
  misc_RNA (1)...(19): siRNA sense strand
caaggcuucugaaauauuc

SEQ ID NO: 581890 - RNA, 19 nt, Homo sapiens
  misc_RNA (1)...(19): siRNA sense strand
ccuccuaugucucuauuaa

SEQ ID NO: 581891 - RNA, 19 nt, Homo sapiens
  misc_RNA (1)...(19): siRNA sense strand
ucuaugagauggaaauuca

SEQ ID NO: 581892 - RNA, 19 nt, Homo sapiens
  misc_RNA (1)...(19): siRNA sense strand
gaucacggcaggcaggaua

SEQ ID NO: 581893 - RNA, 19 nt, Homo sapiens
  misc_RNA (1)...(19): siRNA sense strand
gaacucgggugcugauggu

SEQ ID NO: 581894 - RNA, 19 nt, Homo sapiens
  misc_RNA (1)...(19): siRNA sense strand
gaaauucaaggccaagaug

SEQ ID NO: 581895 - RNA, 19 nt, Homo sapiens
  misc_RNA (1)...(19): siRNA sense strand
gcaaggcuucugaaauauu

SEQ ID NO: 581896 - RNA, 19 nt, Homo sapiens
  misc_RNA (1)...(19): siRNA sense strand
ugauugcucuucuaaaugu

SEQ ID NO: 581897 - RNA, 19 nt, Homo sapiens
  misc_RNA (1)...(19): siRNA sense strand
gcgauuugcucuuccuaau

SEQ ID NO: 581898 - RNA, 19 nt, Homo sapiens
  misc_RNA (1)...(19): siRNA sense strand
ggccaagaauccagagcua

SEQ ID NO: 581899 - RNA, 19 nt, Homo sapiens
  misc_RNA (1)...(19): siRNA sense strand
gaugguggaggucucuuua

SEQ ID NO: 581900 - RNA, 19 nt, Homo sapiens
  misc_RNA (1)...(19): siRNA sense strand
gagguggaaauaauagaua

SEQ ID NO: 581901 - RNA, 19 nt, Homo sapiens
  misc_RNA (1)...(19): siRNA sense strand
gcuaccagcucagcccuaa

SEQ ID NO: 581902 - RNA, 19 nt, Homo sapiens
  misc_RNA (1)...(19): siRNA sense strand
ugaacucccuccagagcua

SEQ ID NO: 581903 - RNA, 19 nt, Homo sapiens
  misc_RNA (1)...(19): siRNA sense strand
aaauaacuaucaccucuuc

SEQ ID NO: 581904 - RNA, 19 nt, Homo sapiens
  misc_RNA (1)...(19): siRNA sense strand
uaaaugaucacaucccaau

SEQ ID NO: 581905 - RNA, 19 nt, Homo sapiens
  misc_RNA (1)...(19): siRNA sense strand
ugagcaguuucgagacuua

SEQ ID NO: 581906 - RNA, 19 nt, Homo sapiens
  misc_RNA (1)...(19): siRNA sense strand
guacagugauugcucuucu

SEQ ID NO: 581907 - RNA, 19 nt, Homo sapiens
  misc_RNA (1)...(19): siRNA sense strand
gggaguugguccagagcua

SEQ ID NO: 581908 - RNA, 19 nt, Homo sapiens
  misc_RNA (1)...(19): siRNA sense strand
uacaauccuucgacuauga

SEQ ID NO: 581909 - RNA, 19 nt, Homo sapiens
  misc_RNA (1)...(19): siRNA sense strand
gauuugcucuuccuaaugc

SEQ ID NO: 581910 - RNA, 19 nt, Homo sapiens
  misc_RNA (1)...(19): siRNA sense strand
gaaauaacuaucaccucuu

SEQ ID NO: 581911 - RNA, 19 nt, Homo sapiens
  misc_RNA (1)...(19): siRNA sense strand
aagacaccuugaagauuua

SEQ ID NO: 581912 - RNA, 19 nt, Homo sapiens
  misc_RNA (1)...(19): siRNA sense strand
guugaucacuguuguggau

SEQ ID NO: 581913 - RNA, 19 nt, Homo sapiens
  misc_RNA (1)...(19): siRNA sense strand
ccaggcagauccgauauuc

SEQ ID NO: 581914 - RNA, 19 nt, Homo sapiens
  misc_RNA (1)...(19): siRNA sense strand
ggaggacgaaguggagaua

SEQ ID NO: 581915 - RNA, 19 nt, Homo sapiens
  misc_RNA (1)...(19): siRNA sense strand
acucaugucuggcugaaug

SEQ ID NO: 581916 - RNA, 19 nt, Homo sapiens
  misc_RNA (1)...(19): siRNA sense strand
agugauugcucuucuaaau

SEQ ID NO: 581917 - RNA, 19 nt, Homo sapiens
  misc_RNA (1)...(19): siRNA sense strand
gguccucgauguaaaugau

SEQ ID NO: 581918 - RNA, 19 nt, Homo sapiens
  misc_RNA (1)...(19): siRNA sense strand
uaccagcucagcccuaaua

SEQ ID NO: 581919 - RNA, 19 nt, Homo sapiens
  misc_RNA (1)...(19): siRNA sense strand
gguccagagcuacaauaua

SEQ ID NO: 581920 - RNA, 19 nt, Homo sapiens
  misc_RNA (1)...(19): siRNA sense strand
gauaacgcuccagaaauaa

SEQ ID NO: 581921 - RNA, 19 nt, Homo sapiens
  misc_RNA (1)...(19): siRNA sense strand
guauaucgcgugaguguuc

SEQ ID NO: 581922 - RNA, 19 nt, Homo sapiens
  misc_RNA (1)...(19): siRNA sense strand
ggaguggagguggaaauaa

SEQ ID NO: 581923 - RNA, 19 nt, Homo sapiens
  misc_RNA (1)...(19): siRNA sense strand
caagaauccagagcuagua

SEQ ID NO: 581924 - RNA, 19 nt, Homo sapiens
  misc_RNA (1)...(19): siRNA sense strand
cgacgauguugaucacugu

SEQ ID NO: 581925 - RNA, 19 nt, Homo sapiens
  misc_RNA (1)...(19): siRNA sense strand
gaggcgaucccauccgaaa

SEQ ID NO: 581926 - RNA, 19 nt, Homo sapiens
  misc_RNA (1)...(19): siRNA sense strand
ggcugaauguggcagauga

SEQ ID NO: 581927 - RNA, 19 nt, Homo sapiens
  misc_RNA (1)...(19): siRNA sense strand
aaugauaacgcuccagaaa

SEQ ID NO: 581928 - RNA, 19 nt, Homo sapiens
  misc_RNA (1)...(19): siRNA sense strand
ucugaaauauuccaauugg

SEQ ID NO: 581929 - RNA, 19 nt, Homo sapiens
  misc_RNA (1)...(19): siRNA sense strand
gagacgguguccuccuguu

SEQ ID NO: 581930 - RNA, 19 nt, Homo sapiens
  misc_RNA (1)...(19): siRNA sense strand
uggcagaugacaacgauaa

SEQ ID NO: 581931 - RNA, 19 nt, Homo sapiens
  misc_RNA (1)...(19): siRNA sense strand
uaacuaucaccucuucuau

SEQ ID NO: 581932 - RNA, 19 nt, Homo sapiens
  misc_RNA (1)...(19): siRNA sense strand
ggaaauucaaggccaagau

SEQ ID NO: 581933 - RNA, 19 nt, Homo sapiens
  misc_RNA (1)...(19): siRNA sense strand
uaaaugugcaagaucaaga

SEQ ID NO: 581934 - RNA, 19 nt, Homo sapiens
  misc_RNA (1)...(19): siRNA sense strand
gggccaggcagauccgaua

SEQ ID NO: 581935 - RNA, 19 nt, Homo sapiens
  misc_RNA (1)...(19): siRNA sense strand
ggagguggaaauaauagau

SEQ ID NO: 581936 - RNA, 19 nt, Homo sapiens
  misc_RNA (1)...(19): siRNA sense strand
ccuacaauccuucgacuau

SEQ ID NO: 581937 - RNA, 19 nt, Homo sapiens
  misc_RNA (1)...(19): siRNA sense strand
cuuacucucugacggauga

SEQ ID NO: 581938 - RNA, 19 nt, Homo sapiens
  misc_RNA (1)...(19): siRNA sense strand
gaauguggcagaugacaac

SEQ ID NO: 581939 - RNA, 19 nt, Homo sapiens
  misc_RNA (1)...(19): siRNA sense strand
uauggaacuucucguggaa

SEQ ID NO: 581940 - RNA, 19 nt, Homo sapiens
  misc_RNA (1)...(19): siRNA sense strand
caauuggauucacaaacug

SEQ ID NO: 581941 - RNA, 19 nt, Homo sapiens
  misc_RNA (1)...(19): siRNA sense strand
uuguggaugugaaugauaa

SEQ ID NO: 581942 - RNA, 19 nt, Homo sapiens
  misc_RNA (1)...(19): siRNA sense strand
aggacgaaguggagauaaa

SEQ ID NO: 581943 - RNA, 19 nt, Homo sapiens
  misc_RNA (1)...(19): siRNA sense strand
cuacaauccuucgacuaug

SEQ ID NO: 581944 - RNA, 19 nt, Homo sapiens
  misc_RNA (1)...(19): siRNA sense strand
aaacucaugucuggcugaa

SEQ ID NO: 581945 - RNA, 19 nt, Homo sapiens
  misc_RNA (1)...(19): siRNA sense strand
gaaugauaacgcuccagaa

SEQ ID NO: 581946 - RNA, 19 nt, Homo sapiens
  misc_RNA (1)...(19): siRNA sense strand
gaacggauggggccaagaa

SEQ ID NO: 581947 - RNA, 19 nt, Homo sapiens
  misc_RNA (1)...(19): siRNA sense strand
gcaguuucgagacuuagaa

SEQ ID NO: 581948 - RNA, 19 nt, Homo sapiens
  misc_RNA (1)...(19): siRNA sense strand
aaagggcgcaguucccauu

SEQ ID NO: 581949 - RNA, 19 nt, Homo sapiens
  misc_RNA (1)...(19): siRNA sense strand
cuaaccaccugccuuuuaa

SEQ ID NO: 581950 - RNA, 19 nt, Homo sapiens
  misc_RNA (1)...(19): siRNA sense strand
ccaagaauccagagcuagu

SEQ ID NO: 581951 - RNA, 19 nt, Homo sapiens
  misc_RNA (1)...(19): siRNA sense strand
uuucgagacuuagaacuga

SEQ ID NO: 581952 - RNA, 19 nt, Homo sapiens
  misc_RNA (1)...(19): siRNA sense strand
gggugccucuguccuccua

SEQ ID NO: 581953 - RNA, 19 nt, Homo sapiens
  misc_RNA (1)...(19): siRNA sense strand
gccuccaucuucucaguga

SEQ ID NO: 581954 - RNA, 19 nt, Homo sapiens
  misc_RNA (1)...(19): siRNA sense strand
ccacgacgauguugaucac

SEQ ID NO: 581955 - RNA, 19 nt, Homo sapiens
  misc_RNA (1)...(19): siRNA sense strand
guccguauaucgcgugagu

SEQ ID NO: 581956 - RNA, 19 nt, Homo sapiens
  misc_RNA (1)...(19): siRNA sense strand
cuucgacuaugagcaguuu

SEQ ID NO: 581957 - RNA, 19 nt, Homo sapiens
  misc_RNA (1)...(19): siRNA sense strand
uggaagacaccuugaagau

SEQ ID NO: 581958 - RNA, 19 nt, Homo sapiens
  misc_RNA (1)...(19): siRNA sense strand
acagugauugcucuucuaa

SEQ ID NO: 581959 - RNA, 19 nt, Homo sapiens
  misc_RNA (1)...(19): siRNA sense strand
uacagugauugcucuucua

SEQ ID NO: 581960 - RNA, 19 nt, Homo sapiens
  misc_RNA (1)...(19): siRNA sense strand
ucgcgugaguguuccagaa

SEQ ID NO: 581961 - RNA, 19 nt, Homo sapiens
  misc_RNA (1)...(19): siRNA sense strand
cgauguugaucacuguugu

SEQ ID NO: 581962 - RNA, 19 nt, Homo sapiens
  misc_RNA (1)...(19): siRNA sense strand
ucuaugcccuacaauccuu

SEQ ID NO: 581963 - RNA, 19 nt, Homo sapiens
  misc_RNA (1)...(19): siRNA sense strand
auaacuaucaccucuucua

SEQ ID NO: 581964 - RNA, 19 nt, Homo sapiens
  misc_RNA (1)...(19): siRNA sense strand
caagucuccuguuuuauuc

SEQ ID NO: 581965 - RNA, 19 nt, Homo sapiens
  misc_RNA (1)...(19): siRNA sense strand
gaauccagagcuaguacug

SEQ ID NO: 581966 - RNA, 19 nt, Homo sapiens
  misc_RNA (1)...(19): siRNA sense strand
ugguugcgguggacaaaga

SEQ ID NO: 581967 - RNA, 19 nt, Homo sapiens
  misc_RNA (1)...(19): siRNA sense strand
ggacgaaguggagauaaaa

SEQ ID NO: 581968 - RNA, 19 nt, Homo sapiens
  misc_RNA (1)...(19): siRNA sense strand
uaacguugacagccacaga

SEQ ID NO: 581969 - RNA, 19 nt, Homo sapiens
  misc_RNA (1)...(19): siRNA sense strand
gugauugcucuucuaaaug

SEQ ID NO: 581970 - RNA, 19 nt, Homo sapiens
  misc_RNA (1)...(19): siRNA sense strand
ucaccucuucuauuaauuc

SEQ ID NO: 581971 - RNA, 19 nt, Homo sapiens
  misc_RNA (1)...(19): siRNA sense strand
gcuccagaaauaacuauca

SEQ ID NO: 581972 - RNA, 19 nt, Homo sapiens
  misc_RNA (1)...(19): siRNA sense strand
gaucacuguuguggaugug

SEQ ID NO: 581973 - RNA, 19 nt, Homo sapiens
  misc_RNA (1)...(19): siRNA sense strand
cggaguggagguggaaaua

SEQ ID NO: 581974 - RNA, 19 nt, Homo sapiens
  misc_RNA (1)...(19): siRNA sense strand
guggaagacaccuugaaga

SEQ ID NO: 581975 - RNA, 19 nt, Homo sapiens
  misc_RNA (1)...(19): siRNA sense strand
gacuuagaacugagaguga

SEQ ID NO: 581976 - RNA, 19 nt, Homo sapiens
  misc_RNA (1)...(19): siRNA sense strand
gaagacaccuugaagauuu

SEQ ID NO: 581977 - RNA, 19 nt, Homo sapiens
  misc_RNA (1)...(19): siRNA sense strand
ugauaacgcuccagaaaua

SEQ ID NO: 581978 - RNA, 19 nt, Homo sapiens
  misc_RNA (1)...(19): siRNA sense strand
guccagagcuacaauauaa

SEQ ID NO: 581979 - RNA, 19 nt, Homo sapiens
  misc_RNA (1)...(19): siRNA sense strand
agaaugcccuggucacuua

SEQ ID NO: 581980 - RNA, 19 nt, Homo sapiens
  misc_RNA (1)...(19): siRNA sense strand
acuaucaccucuucuauua

SEQ ID NO: 581981 - RNA, 19 nt, Homo sapiens
  misc_RNA (1)...(19): siRNA sense strand
gauauucggugccagaaga

SEQ ID NO: 581982 - RNA, 19 nt, Homo sapiens
  misc_RNA (1)...(19): siRNA sense strand
ggucaagucuccuguuuua

SEQ ID NO: 581983 - RNA, 19 nt, Homo sapiens
  misc_RNA (1)...(19): siRNA sense strand
ccaccugccuuuuaaauua

SEQ ID NO: 581984 - RNA, 19 nt, Homo sapiens
  misc_RNA (1)...(19): siRNA sense strand
cagcucagcccuaauaauu

SEQ ID NO: 581985 - RNA, 19 nt, Homo sapiens
  misc_RNA (1)...(19): siRNA sense strand
gaguggagguggaaauaau

SEQ ID NO: 581986 - RNA, 19 nt, Homo sapiens
  misc_RNA (1)...(19): siRNA sense strand
ccucacagcuuuagaugga

SEQ ID NO: 581987 - RNA, 19 nt, Homo sapiens
  misc_RNA (1)...(19): siRNA sense strand
ggaagacaccuugaagauu

SEQ ID NO: 581988 - RNA, 19 nt, Homo sapiens
  misc_RNA (1)...(19): siRNA sense strand
ccaauuggauucacaaacu

SEQ ID NO: 581989 - RNA, 19 nt, Homo sapiens
  misc_RNA (1)...(19): siRNA sense strand
caaggcuucugaaauauuc

SEQ ID NO: 581990 - RNA, 19 nt, Homo sapiens
  misc_RNA (1)...(19): siRNA sense strand
ccuccuaugucucuauuaa

SEQ ID NO: 581991 - RNA, 19 nt, Homo sapiens
  misc_RNA (1)...(19): siRNA sense strand
ucuaugagauggaaauuca

SEQ ID NO: 581992 - RNA, 19 nt, Homo sapiens
  misc_RNA (1)...(19): siRNA sense strand
gaucacggcaggcaggaua

SEQ ID NO: 581993 - RNA, 19 nt, Homo sapiens
  misc_RNA (1)...(19): siRNA sense strand
gaacucgggugcugauggu

SEQ ID NO: 581994 - RNA, 19 nt, Homo sapiens
  misc_RNA (1)...(19): siRNA sense strand
gaaauucaaggccaagaug

SEQ ID NO: 581995 - RNA, 19 nt, Homo sapiens
  misc_RNA (1)...(19): siRNA sense strand
gcaaggcuucugaaauauu

SEQ ID NO: 581996 - RNA, 19 nt, Homo sapiens
  misc_RNA (1)...(19): siRNA sense strand
ugauugcucuucuaaaugu

SEQ ID NO: 581997 - RNA, 19 nt, Homo sapiens
  misc_RNA (1)...(19): siRNA sense strand
gcgauuugcucuuccuaau

SEQ ID NO: 581998 - RNA, 19 nt, Homo sapiens
  misc_RNA (1)...(19): siRNA sense strand
ggccaagaauccagagcua

SEQ ID NO: 581999 - RNA, 19 nt, Homo sapiens
  misc_RNA (1)...(19): siRNA sense strand
gaugguggaggucucuuua

SEQ ID NO: 582000 - RNA, 19 nt, Homo sapiens
  misc_RNA (1)...(19): siRNA sense strand
gagguggaaauaauagaua

SEQ ID NO: 582001 - RNA, 19 nt, Homo sapiens
  misc_RNA (1)...(19): siRNA sense strand
gcuaccagcucagcccuaa

SEQ ID NO: 582002 - RNA, 19 nt, Homo sapiens
  misc_RNA (1)...(19): siRNA sense strand
ugaacucccuccagagcua

SEQ ID NO: 582003 - RNA, 19 nt, Homo sapiens
  misc_RNA (1)...(19): siRNA sense strand
aaauaacuaucaccucuuc

SEQ ID NO: 582004 - RNA, 19 nt, Homo sapiens
  misc_RNA (1)...(19): siRNA sense strand
uaaaugaucacaucccaau

SEQ ID NO: 582005 - RNA, 19 nt, Homo sapiens
  misc_RNA (1)...(19): siRNA sense strand
ugagcaguuucgagacuua

SEQ ID NO: 582006 - RNA, 19 nt, Homo sapiens
  misc_RNA (1)...(19): siRNA sense strand
guacagugauugcucuucu

SEQ ID NO: 582007 - RNA, 19 nt, Homo sapiens
  misc_RNA (1)...(19): siRNA sense strand
gggaguugguccagagcua

SEQ ID NO: 582008 - RNA, 19 nt, Homo sapiens
  misc_RNA (1)...(19): siRNA sense strand
uacaauccuucgacuauga

SEQ ID NO: 582009 - RNA, 19 nt, Homo sapiens
  misc_RNA (1)...(19): siRNA sense strand
gauuugcucuuccuaaugc

SEQ ID NO: 582010 - RNA, 19 nt, Homo sapiens
  misc_RNA (1)...(19): siRNA sense strand
gaaauaacuaucaccucuu

SEQ ID NO: 582011 - RNA, 19 nt, Homo sapiens
  misc_RNA (1)...(19): siRNA sense strand
aagacaccuugaagauuua

SEQ ID NO: 582012 - RNA, 19 nt, Homo sapiens
  misc_RNA (1)...(19): siRNA sense strand
guugaucacuguuguggau

SEQ ID NO: 582013 - RNA, 19 nt, Homo sapiens
  misc_RNA (1)...(19): siRNA sense strand
ccaggcagauccgauauuc

SEQ ID NO: 582014 - RNA, 19 nt, Homo sapiens
  misc_RNA (1)...(19): siRNA sense strand
ggaggacgaaguggagaua

SEQ ID NO: 582015 - RNA, 19 nt, Homo sapiens
  misc_RNA (1)...(19): siRNA sense strand
acucaugucuggcugaaug

SEQ ID NO: 582016 - RNA, 19 nt, Homo sapiens
  misc_RNA (1)...(19): siRNA sense strand
agugauugcucuucuaaau

SEQ ID NO: 582017 - RNA, 19 nt, Homo sapiens
  misc_RNA (1)...(19): siRNA sense strand
gguccucgauguaaaugau

SEQ ID NO: 582018 - RNA, 19 nt, Homo sapiens
  misc_RNA (1)...(19): siRNA sense strand
uaccagcucagcccuaaua

SEQ ID NO: 582019 - RNA, 19 nt, Homo sapiens
  misc_RNA (1)...(19): siRNA sense strand
gguccagagcuacaauaua

SEQ ID NO: 582020 - RNA, 19 nt, Homo sapiens
  misc_RNA (1)...(19): siRNA sense strand
gauaacgcuccagaaauaa

SEQ ID NO: 582021 - RNA, 19 nt, Homo sapiens
  misc_RNA (1)...(19): siRNA sense strand
guauaucgcgugaguguuc

SEQ ID NO: 582022 - RNA, 19 nt, Homo sapiens
  misc_RNA (1)...(19): siRNA sense strand
ggaguggagguggaaauaa

SEQ ID NO: 582023 - RNA, 19 nt, Homo sapiens
  misc_RNA (1)...(19): siRNA sense strand
caagaauccagagcuagua

SEQ ID NO: 582024 - RNA, 19 nt, Homo sapiens
  misc_RNA (1)...(19): siRNA sense strand
cgacgauguugaucacugu

SEQ ID NO: 582025 - RNA, 19 nt, Homo sapiens
  misc_RNA (1)...(19): siRNA sense strand
gaggcgaucccauccgaaa

SEQ ID NO: 582026 - RNA, 19 nt, Homo sapiens
  misc_RNA (1)...(19): siRNA sense strand
ggcugaauguggcagauga

SEQ ID NO: 582027 - RNA, 19 nt, Homo sapiens
  misc_RNA (1)...(19): siRNA sense strand
aaugauaacgcuccagaaa

SEQ ID NO: 582028 - RNA, 19 nt, Homo sapiens
  misc_RNA (1)...(19): siRNA sense strand
ucugaaauauuccaauugg

SEQ ID NO: 582029 - RNA, 19 nt, Homo sapiens
  misc_RNA (1)...(19): siRNA sense strand
gagacgguguccuccuguu

SEQ ID NO: 582030 - RNA, 19 nt, Homo sapiens
  misc_RNA (1)...(19): siRNA sense strand
uggcagaugacaacgauaa

SEQ ID NO: 582031 - RNA, 19 nt, Homo sapiens
  misc_RNA (1)...(19): siRNA sense strand
uaacuaucaccucuucuau

SEQ ID NO: 582032 - RNA, 19 nt, Homo sapiens
  misc_RNA (1)...(19): siRNA sense strand
ggaaauucaaggccaagau

SEQ ID NO: 582033 - RNA, 19 nt, Homo sapiens
  misc_RNA (1)...(19): siRNA sense strand
uaaaugugcaagaucaaga

SEQ ID NO: 582034 - RNA, 19 nt, Homo sapiens
  misc_RNA (1)...(19): siRNA sense strand
gggccaggcagauccgaua

SEQ ID NO: 582035 - RNA, 19 nt, Homo sapiens
  misc_RNA (1)...(19): siRNA sense strand
ggagguggaaauaauagau

SEQ ID NO: 582036 - RNA, 19 nt, Homo sapiens
  misc_RNA (1)...(19): siRNA sense strand
ccuacaauccuucgacuau

SEQ ID NO: 582037 - RNA, 19 nt, Homo sapiens
  misc_RNA (1)...(19): siRNA sense strand
cuuacucucugacggauga

SEQ ID NO: 582038 - RNA, 19 nt, Homo sapiens
  misc_RNA (1)...(19): siRNA sense strand
gaauguggcagaugacaac

SEQ ID NO: 582039 - RNA, 19 nt, Homo sapiens
  misc_RNA (1)...(19): siRNA sense strand
uauggaacuucucguggaa

SEQ ID NO: 582040 - RNA, 19 nt, Homo sapiens
  misc_RNA (1)...(19): siRNA sense strand
caauuggauucacaaacug

SEQ ID NO: 582041 - RNA, 19 nt, Homo sapiens
  misc_RNA (1)...(19): siRNA sense strand
uuguggaugugaaugauaa

SEQ ID NO: 582042 - RNA, 19 nt, Homo sapiens
  misc_RNA (1)...(19): siRNA sense strand
aggacgaaguggagauaaa

SEQ ID NO: 582043 - RNA, 19 nt, Homo sapiens
  misc_RNA (1)...(19): siRNA sense strand
cuacaauccuucgacuaug

SEQ ID NO: 582044 - RNA, 19 nt, Homo sapiens
  misc_RNA (1)...(19): siRNA sense strand
aaacucaugucuggcugaa

SEQ ID NO: 582045 - RNA, 19 nt, Homo sapiens
  misc_RNA (1)...(19): siRNA sense strand
gaaugauaacgcuccagaa

SEQ ID NO: 582046 - RNA, 19 nt, Homo sapiens
  misc_RNA (1)...(19): siRNA sense strand
gaacggauggggccaagaa

SEQ ID NO: 582047 - RNA, 19 nt, Homo sapiens
  misc_RNA (1)...(19): siRNA sense strand
gcaguuucgagacuuagaa

SEQ ID NO: 582048 - RNA, 19 nt, Homo sapiens
  misc_RNA (1)...(19): siRNA sense strand
aaagggcgcaguucccauu

SEQ ID NO: 582049 - RNA, 19 nt, Homo sapiens
  misc_RNA (1)...(19): siRNA sense strand
cuaaccaccugccuuuuaa

SEQ ID NO: 582050 - RNA, 19 nt, Homo sapiens
  misc_RNA (1)...(19): siRNA sense strand
ccaagaauccagagcuagu

SEQ ID NO: 582051 - RNA, 19 nt, Homo sapiens
  misc_RNA (1)...(19): siRNA sense strand
uuucgagacuuagaacuga

SEQ ID NO: 582052 - RNA, 19 nt, Homo sapiens
  misc_RNA (1)...(19): siRNA sense strand
gggugccucuguccuccua

SEQ ID NO: 582053 - RNA, 19 nt, Homo sapiens
  misc_RNA (1)...(19): siRNA sense strand
gccuccaucuucucaguga

SEQ ID NO: 582054 - RNA, 19 nt, Homo sapiens
  misc_RNA (1)...(19): siRNA sense strand
ccacgacgauguugaucac

SEQ ID NO: 582055 - RNA, 19 nt, Homo sapiens
  misc_RNA (1)...(19): siRNA sense strand
guccguauaucgcgugagu

SEQ ID NO: 582056 - RNA, 19 nt, Homo sapiens
  misc_RNA (1)...(19): siRNA sense strand
cuucgacuaugagcaguuu

SEQ ID NO: 582057 - RNA, 19 nt, Homo sapiens
  misc_RNA (1)...(19): siRNA sense strand
uggaagacaccuugaagau

SEQ ID NO: 582058 - RNA, 19 nt, Homo sapiens
  misc_RNA (1)...(19): siRNA sense strand
acagugauugcucuucuaa

SEQ ID NO: 582059 - RNA, 19 nt, Homo sapiens
  misc_RNA (1)...(19): siRNA sense strand
uacagugauugcucuucua

SEQ ID NO: 582060 - RNA, 19 nt, Homo sapiens
  misc_RNA (1)...(19): siRNA sense strand
ucgcgugaguguuccagaa

SEQ ID NO: 582061 - RNA, 19 nt, Homo sapiens
  misc_RNA (1)...(19): siRNA sense strand
cgauguugaucacuguugu

SEQ ID NO: 582062 - RNA, 19 nt, Homo sapiens
  misc_RNA (1)...(19): siRNA sense strand
ucuaugcccuacaauccuu

SEQ ID NO: 582063 - RNA, 19 nt, Homo sapiens
  misc_RNA (1)...(19): siRNA sense strand
auaacuaucaccucuucua

SEQ ID NO: 582064 - RNA, 19 nt, Homo sapiens
  misc_RNA (1)...(19): siRNA sense strand
caagucuccuguuuuauuc

SEQ ID NO: 582065 - RNA, 19 nt, Homo sapiens
  misc_RNA (1)...(19): siRNA sense strand
gaauccagagcuaguacug

SEQ ID NO: 582066 - RNA, 19 nt, Homo sapiens
  misc_RNA (1)...(19): siRNA sense strand
ugguugcgguggacaaaga

SEQ ID NO: 582067 - RNA, 19 nt, Homo sapiens
  misc_RNA (1)...(19): siRNA sense strand
ggacgaaguggagauaaaa

SEQ ID NO: 582068 - RNA, 19 nt, Homo sapiens
  misc_RNA (1)...(19): siRNA sense strand
uaacguugacagccacaga

SEQ ID NO: 582069 - RNA, 19 nt, Homo sapiens
  misc_RNA (1)...(19): siRNA sense strand
gugauugcucuucuaaaug

SEQ ID NO: 582070 - RNA, 19 nt, Homo sapiens
  misc_RNA (1)...(19): siRNA sense strand
ucaccucuucuauuaauuc

SEQ ID NO: 582071 - RNA, 19 nt, Homo sapiens
  misc_RNA (1)...(19): siRNA sense strand
gcuccagaaauaacuauca

SEQ ID NO: 582072 - RNA, 19 nt, Homo sapiens
  misc_RNA (1)...(19): siRNA sense strand
gaucacuguuguggaugug

SEQ ID NO: 582073 - RNA, 19 nt, Homo sapiens
  misc_RNA (1)...(19): siRNA sense strand
cggaguggagguggaaaua

SEQ ID NO: 582074 - RNA, 19 nt, Homo sapiens
  misc_RNA (1)...(19): siRNA sense strand
guggaagacaccuugaaga

SEQ ID NO: 582075 - RNA, 19 nt, Homo sapiens
  misc_RNA (1)...(19): siRNA sense strand
gacuuagaacugagaguga

SEQ ID NO: 582076 - RNA, 19 nt, Homo sapiens
  misc_RNA (1)...(19): siRNA sense strand
gggaacagguauccucuua

SEQ ID NO: 582077 - RNA, 19 nt, Homo sapiens
  misc_RNA (1)...(19): siRNA sense strand
gaacagguauccucuuaca

SEQ ID NO: 582078 - RNA, 19 nt, Homo sapiens
  misc_RNA (1)...(19): siRNA sense strand
ggacgaaggugccaaugga

SEQ ID NO: 582079 - RNA, 19 nt, Homo sapiens
  misc_RNA (1)...(19): siRNA sense strand
gaagacagggugaaacuuu

SEQ ID NO: 582080 - RNA, 19 nt, Homo sapiens
  misc_RNA (1)...(19): siRNA sense strand
gagaaugcccagauuauuu

SEQ ID NO: 582081 - RNA, 19 nt, Homo sapiens
  misc_RNA (1)...(19): siRNA sense strand
caaagagaaugcccagauu

SEQ ID NO: 582082 - RNA, 19 nt, Homo sapiens
  misc_RNA (1)...(19): siRNA sense strand
gcagaucuccuacucaauu

SEQ ID NO: 582083 - RNA, 19 nt, Homo sapiens
  misc_RNA (1)...(19): siRNA sense strand
aauaagcacuucucccuaa

SEQ ID NO: 582084 - RNA, 19 nt, Homo sapiens
  misc_RNA (1)...(19): siRNA sense strand
gaccaucacgucucuauuu

SEQ ID NO: 582085 - RNA, 19 nt, Homo sapiens
  misc_RNA (1)...(19): siRNA sense strand
gcacuucucccuaagaguu

SEQ ID NO: 582086 - RNA, 19 nt, Homo sapiens
  misc_RNA (1)...(19): siRNA sense strand
gggaaguccuccucuauca

SEQ ID NO: 582087 - RNA, 19 nt, Homo sapiens
  misc_RNA (1)...(19): siRNA sense strand
uggcguaucuaccauuuaa

SEQ ID NO: 582088 - RNA, 19 nt, Homo sapiens
  misc_RNA (1)...(19): siRNA sense strand
ugacaguuauuacagauug

SEQ ID NO: 582089 - RNA, 19 nt, Homo sapiens
  misc_RNA (1)...(19): siRNA sense strand
cagguauccucuuacaaua

SEQ ID NO: 582090 - RNA, 19 nt, Homo sapiens
  misc_RNA (1)...(19): siRNA sense strand
gcaaagagaaugcccagau

SEQ ID NO: 582091 - RNA, 19 nt, Homo sapiens
  misc_RNA (1)...(19): siRNA sense strand
caacggaagcucacuuuau

SEQ ID NO: 582092 - RNA, 19 nt, Homo sapiens
  misc_RNA (1)...(19): siRNA sense strand
agaaugcccagauuauuua

SEQ ID NO: 582093 - RNA, 19 nt, Homo sapiens
  misc_RNA (1)...(19): siRNA sense strand
ggguaccucuguccucaua

SEQ ID NO: 582094 - RNA, 19 nt, Homo sapiens
  misc_RNA (1)...(19): siRNA sense strand
ucagauccuucgacuauga

SEQ ID NO: 582095 - RNA, 19 nt, Homo sapiens
  misc_RNA (1)...(19): siRNA sense strand
aaagagaaugcccagauua

SEQ ID NO: 582096 - RNA, 19 nt, Homo sapiens
  misc_RNA (1)...(19): siRNA sense strand
gagacgcgcucaagcaaag

SEQ ID NO: 582097 - RNA, 19 nt, Homo sapiens
  misc_RNA (1)...(19): siRNA sense strand
aaaaguccauugacaguua

SEQ ID NO: 582098 - RNA, 19 nt, Homo sapiens
  misc_RNA (1)...(19): siRNA sense strand
ccaccuaccuucucucaag

SEQ ID NO: 582099 - RNA, 19 nt, Homo sapiens
  misc_RNA (1)...(19): siRNA sense strand
gagaagugacauauucauu

SEQ ID NO: 582100 - RNA, 19 nt, Homo sapiens
  misc_RNA (1)...(19): siRNA sense strand
gauucgaaguuuccuauag

SEQ ID NO: 582101 - RNA, 19 nt, Homo sapiens
  misc_RNA (1)...(19): siRNA sense strand
gguauccucuuacaauauc

SEQ ID NO: 582102 - RNA, 19 nt, Homo sapiens
  misc_RNA (1)...(19): siRNA sense strand
ugaacucccugcagagcua

SEQ ID NO: 582103 - RNA, 19 nt, Homo sapiens
  misc_RNA (1)...(19): siRNA sense strand
gcgaaagagucaccugauc

SEQ ID NO: 582104 - RNA, 19 nt, Homo sapiens
  misc_RNA (1)...(19): siRNA sense strand
gagcagaauggacagguaa

SEQ ID NO: 582105 - RNA, 19 nt, Homo sapiens
  misc_RNA (1)...(19): siRNA sense strand
gaagugacauauucauucc

SEQ ID NO: 582106 - RNA, 19 nt, Homo sapiens
  misc_RNA (1)...(19): siRNA sense strand
cggcagaucuccuacucaa

SEQ ID NO: 582107 - RNA, 19 nt, Homo sapiens
  misc_RNA (1)...(19): siRNA sense strand
ucaaaggaaucgcucaaag

SEQ ID NO: 582108 - RNA, 19 nt, Homo sapiens
  misc_RNA (1)...(19): siRNA sense strand
gggcuuuccugcagaccua

SEQ ID NO: 582109 - RNA, 19 nt, Homo sapiens
  misc_RNA (1)...(19): siRNA sense strand
caucacgucucuauuuagu

SEQ ID NO: 582110 - RNA, 19 nt, Homo sapiens
  misc_RNA (1)...(19): siRNA sense strand
uggcagauaucaaugacaa

SEQ ID NO: 582111 - RNA, 19 nt, Homo sapiens
  misc_RNA (1)...(19): siRNA sense strand
cgcauagucuccagaggua

SEQ ID NO: 582112 - RNA, 19 nt, Homo sapiens
  misc_RNA (1)...(19): siRNA sense strand
guuagaugauucgaaguuu

SEQ ID NO: 582113 - RNA, 19 nt, Homo sapiens
  misc_RNA (1)...(19): siRNA sense strand
aacggaagcucacuuuaug

SEQ ID NO: 582114 - RNA, 19 nt, Homo sapiens
  misc_RNA (1)...(19): siRNA sense strand
ggaggagcauaucuugcaa

SEQ ID NO: 582115 - RNA, 19 nt, Homo sapiens
  misc_RNA (1)...(19): siRNA sense strand
ugacaaugcuccaaaauuc

SEQ ID NO: 582116 - RNA, 19 nt, Homo sapiens
  misc_RNA (1)...(19): siRNA sense strand
uuaauauccuuguggaaga

SEQ ID NO: 582117 - RNA, 19 nt, Homo sapiens
  misc_RNA (1)...(19): siRNA sense strand
ggacgcagcuuuucucucu

SEQ ID NO: 582118 - RNA, 19 nt, Homo sapiens
  misc_RNA (1)...(19): siRNA sense strand
ggacagagacgcgcucaag

SEQ ID NO: 582119 - RNA, 19 nt, Homo sapiens
  misc_RNA (1)...(19): siRNA sense strand
gcucaaaggaaucaaagga

SEQ ID NO: 582120 - RNA, 19 nt, Homo sapiens
  misc_RNA (1)...(19): siRNA sense strand
acacgcaauuguugaaguu

SEQ ID NO: 582121 - RNA, 19 nt, Homo sapiens
  misc_RNA (1)...(19): siRNA sense strand
ugaguguuccugagaauuu

SEQ ID NO: 582122 - RNA, 19 nt, Homo sapiens
  misc_RNA (1)...(19): siRNA sense strand
aggaaucgcucaaaggaau

SEQ ID NO: 582123 - RNA, 19 nt, Homo sapiens
  misc_RNA (1)...(19): siRNA sense strand
ggauagaaauagaaguaac

SEQ ID NO: 582124 - RNA, 19 nt, Homo sapiens
  misc_RNA (1)...(19): siRNA sense strand
uuaccuauaucccagagaa

SEQ ID NO: 582125 - RNA, 19 nt, Homo sapiens
  misc_RNA (1)...(19): siRNA sense strand
ccucauacauauccaucaa

SEQ ID NO: 582126 - RNA, 19 nt, Homo sapiens
  misc_RNA (1)...(19): siRNA sense strand
gaaguaacugauaucaaug

SEQ ID NO: 582127 - RNA, 19 nt, Homo sapiens
  misc_RNA (1)...(19): siRNA sense strand
accaucacgucucuauuua

SEQ ID NO: 582128 - RNA, 19 nt, Homo sapiens
  misc_RNA (1)...(19): siRNA sense strand
gaaauacaagcagaagaug

SEQ ID NO: 582129 - RNA, 19 nt, Homo sapiens
  misc_RNA (1)...(19): siRNA sense strand
gagugaguguuccugagaa

SEQ ID NO: 582130 - RNA, 19 nt, Homo sapiens
  misc_RNA (1)...(19): siRNA sense strand
cagaaaaucuagacguaaa

SEQ ID NO: 582131 - RNA, 19 nt, Homo sapiens
  misc_RNA (1)...(19): siRNA sense strand
ccucuguccucauacauau

SEQ ID NO: 582132 - RNA, 19 nt, Homo sapiens
  misc_RNA (1)...(19): siRNA sense strand
gauggaggagcauaucuug

SEQ ID NO: 582133 - RNA, 19 nt, Homo sapiens
  misc_RNA (1)...(19): siRNA sense strand
aaacgauccuuugucuuug

SEQ ID NO: 582134 - RNA, 19 nt, Homo sapiens
  misc_RNA (1)...(19): siRNA sense strand
ugagcagaauggacaggua

SEQ ID NO: 582135 - RNA, 19 nt, Homo sapiens
  misc_RNA (1)...(19): siRNA sense strand
guucagagccgugccaaug

SEQ ID NO: 582136 - RNA, 19 nt, Homo sapiens
  misc_RNA (1)...(19): siRNA sense strand
gagcccugcuggacagaga

SEQ ID NO: 582137 - RNA, 19 nt, Homo sapiens
  misc_RNA (1)...(19): siRNA sense strand
acucagauccuucgacuau

SEQ ID NO: 582138 - RNA, 19 nt, Homo sapiens
  misc_RNA (1)...(19): siRNA sense strand
guaccucuguccucauaca

SEQ ID NO: 582139 - RNA, 19 nt, Homo sapiens
  misc_RNA (1)...(19): siRNA sense strand
aaaggaaucgcucaaagga

SEQ ID NO: 582140 - RNA, 19 nt, Homo sapiens
  misc_RNA (1)...(19): siRNA sense strand
gaacagucguagcccuuuu

SEQ ID NO: 582141 - RNA, 19 nt, Homo sapiens
  misc_RNA (1)...(19): siRNA sense strand
caguagaagauguaaauga

SEQ ID NO: 582142 - RNA, 19 nt, Homo sapiens
  misc_RNA (1)...(19): siRNA sense strand
gaauaccgagugaguguuc

SEQ ID NO: 582143 - RNA, 19 nt, Homo sapiens
  misc_RNA (1)...(19): siRNA sense strand
caacccaccuaccuucucu

SEQ ID NO: 582144 - RNA, 19 nt, Homo sapiens
  misc_RNA (1)...(19): siRNA sense strand
acauauccaucaacucaga

SEQ ID NO: 582145 - RNA, 19 nt, Homo sapiens
  misc_RNA (1)...(19): siRNA sense strand
auacauauccaucaacuca

SEQ ID NO: 582146 - RNA, 19 nt, Homo sapiens
  misc_RNA (1)...(19): siRNA sense strand
ucuccuacuuuaccuauau

SEQ ID NO: 582147 - RNA, 19 nt, Homo sapiens
  misc_RNA (1)...(19): siRNA sense strand
ugacauauucauuccgaaa

SEQ ID NO: 582148 - RNA, 19 nt, Homo sapiens
  misc_RNA (1)...(19): siRNA sense strand
caggagagcugugagaaaa

SEQ ID NO: 582149 - RNA, 19 nt, Homo sapiens
  misc_RNA (1)...(19): siRNA sense strand
acagguauccucuuacaau

SEQ ID NO: 582150 - RNA, 19 nt, Homo sapiens
  misc_RNA (1)...(19): siRNA sense strand
gaagauggaggagcauauc

SEQ ID NO: 582151 - RNA, 19 nt, Homo sapiens
  misc_RNA (1)...(19): siRNA sense strand
ugggauagaaauagaagua

SEQ ID NO: 582152 - RNA, 19 nt, Homo sapiens
  misc_RNA (1)...(19): siRNA sense strand
cauugacaguuauuacaga

SEQ ID NO: 582153 - RNA, 19 nt, Homo sapiens
  misc_RNA (1)...(19): siRNA sense strand
gcaaaaguguugauuacag

SEQ ID NO: 582154 - RNA, 19 nt, Homo sapiens
  misc_RNA (1)...(19): siRNA sense strand
agaaauacaagcagaagau

SEQ ID NO: 582155 - RNA, 19 nt, Homo sapiens
  misc_RNA (1)...(19): siRNA sense strand
ccaauggagaagugacaua

SEQ ID NO: 582156 - RNA, 19 nt, Homo sapiens
  misc_RNA (1)...(19): siRNA sense strand
ucaaugacaaugcuccaaa

SEQ ID NO: 582157 - RNA, 19 nt, Homo sapiens
  misc_RNA (1)...(19): siRNA sense strand
gaguguuccugagaauuug

SEQ ID NO: 582158 - RNA, 19 nt, Homo sapiens
  misc_RNA (1)...(19): siRNA sense strand
acaaguggcagauaucaau

SEQ ID NO: 582159 - RNA, 19 nt, Homo sapiens
  misc_RNA (1)...(19): siRNA sense strand
ggaagcucacuuuaugcua

SEQ ID NO: 582160 - RNA, 19 nt, Homo sapiens
  misc_RNA (1)...(19): siRNA sense strand
aaaugucgcugcgggaaug

SEQ ID NO: 582161 - RNA, 19 nt, Homo sapiens
  misc_RNA (1)...(19): siRNA sense strand
gaaguccuccucuaucaac

SEQ ID NO: 582162 - RNA, 19 nt, Homo sapiens
  misc_RNA (1)...(19): siRNA sense strand
ggaaguccuccucuaucaa

SEQ ID NO: 582163 - RNA, 19 nt, Homo sapiens
  misc_RNA (1)...(19): siRNA sense strand
caaaggaaucgcucaaagg

SEQ ID NO: 582164 - RNA, 19 nt, Homo sapiens
  misc_RNA (1)...(19): siRNA sense strand
auggagaagugacauauuc

SEQ ID NO: 582165 - RNA, 19 nt, Homo sapiens
  misc_RNA (1)...(19): siRNA sense strand
cagaauaccgagugagugu

SEQ ID NO: 582166 - RNA, 19 nt, Homo sapiens
  misc_RNA (1)...(19): siRNA sense strand
gauccuuugucuuuguuag

SEQ ID NO: 582167 - RNA, 19 nt, Homo sapiens
  misc_RNA (1)...(19): siRNA sense strand
aaaacgauccuuugucuuu

SEQ ID NO: 582168 - RNA, 19 nt, Homo sapiens
  misc_RNA (1)...(19): siRNA sense strand
gcguaucuaccauuuaaau

SEQ ID NO: 582169 - RNA, 19 nt, Homo sapiens
  misc_RNA (1)...(19): siRNA sense strand
ggaacagucguagcccuuu

SEQ ID NO: 582170 - RNA, 19 nt, Homo sapiens
  misc_RNA (1)...(19): siRNA sense strand
agaagugacauauucauuc

SEQ ID NO: 582171 - RNA, 19 nt, Homo sapiens
  misc_RNA (1)...(19): siRNA sense strand
gacacgcaauuguugaagu

SEQ ID NO: 582172 - RNA, 19 nt, Homo sapiens
  misc_RNA (1)...(19): siRNA sense strand
cagaucuccuacucaauuc

SEQ ID NO: 582173 - RNA, 19 nt, Homo sapiens
  misc_RNA (1)...(19): siRNA sense strand
caagcaaagccucguagug

SEQ ID NO: 582174 - RNA, 19 nt, Homo sapiens
  misc_RNA (1)...(19): siRNA sense strand
gggauagaaauagaaguaa

SEQ ID NO: 582175 - RNA, 19 nt, Homo sapiens
  misc_RNA (1)...(19): siRNA sense strand
agauguaaaugacaacagu

SEQ ID NO: 582176 - RNA, 19 nt, Homo sapiens
  misc_RNA (1)...(19): siRNA sense strand
gggaacagguauccucuua

SEQ ID NO: 582177 - RNA, 19 nt, Homo sapiens
  misc_RNA (1)...(19): siRNA sense strand
gaacagguauccucuuaca

SEQ ID NO: 582178 - RNA, 19 nt, Homo sapiens
  misc_RNA (1)...(19): siRNA sense strand
ggacgaaggugccaaugga

SEQ ID NO: 582179 - RNA, 19 nt, Homo sapiens
  misc_RNA (1)...(19): siRNA sense strand
gaagacagggugaaacuuu

SEQ ID NO: 582180 - RNA, 19 nt, Homo sapiens
  misc_RNA (1)...(19): siRNA sense strand
gagaaugcccagauuauuu

SEQ ID NO: 582181 - RNA, 19 nt, Homo sapiens
  misc_RNA (1)...(19): siRNA sense strand
caaagagaaugcccagauu

SEQ ID NO: 582182 - RNA, 19 nt, Homo sapiens
  misc_RNA (1)...(19): siRNA sense strand
gcagaucuccuacucaauu

SEQ ID NO: 582183 - RNA, 19 nt, Homo sapiens
  misc_RNA (1)...(19): siRNA sense strand
aauaagcacuucucccuaa

SEQ ID NO: 582184 - RNA, 19 nt, Homo sapiens
  misc_RNA (1)...(19): siRNA sense strand
gaccaucacgucucuauuu

SEQ ID NO: 582185 - RNA, 19 nt, Homo sapiens
  misc_RNA (1)...(19): siRNA sense strand
gcacuucucccuaagaguu

SEQ ID NO: 582186 - RNA, 19 nt, Homo sapiens
  misc_RNA (1)...(19): siRNA sense strand
gggaaguccuccucuauca

SEQ ID NO: 582187 - RNA, 19 nt, Homo sapiens
  misc_RNA (1)...(19): siRNA sense strand
uggcguaucuaccauuuaa

SEQ ID NO: 582188 - RNA, 19 nt, Homo sapiens
  misc_RNA (1)...(19): siRNA sense strand
ugacaguuauuacagauug

SEQ ID NO: 582189 - RNA, 19 nt, Homo sapiens
  misc_RNA (1)...(19): siRNA sense strand
cagguauccucuuacaaua

SEQ ID NO: 582190 - RNA, 19 nt, Homo sapiens
  misc_RNA (1)...(19): siRNA sense strand
gcaaagagaaugcccagau

SEQ ID NO: 582191 - RNA, 19 nt, Homo sapiens
  misc_RNA (1)...(19): siRNA sense strand
caacggaagcucacuuuau

SEQ ID NO: 582192 - RNA, 19 nt, Homo sapiens
  misc_RNA (1)...(19): siRNA sense strand
agaaugcccagauuauuua

SEQ ID NO: 582193 - RNA, 19 nt, Homo sapiens
  misc_RNA (1)...(19): siRNA sense strand
ggguaccucuguccucaua

SEQ ID NO: 582194 - RNA, 19 nt, Homo sapiens
  misc_RNA (1)...(19): siRNA sense strand
ucagauccuucgacuauga

SEQ ID NO: 582195 - RNA, 19 nt, Homo sapiens
  misc_RNA (1)...(19): siRNA sense strand
aaagagaaugcccagauua

SEQ ID NO: 582196 - RNA, 19 nt, Homo sapiens
  misc_RNA (1)...(19): siRNA sense strand
gagacgcgcucaagcaaag

SEQ ID NO: 582197 - RNA, 19 nt, Homo sapiens
  misc_RNA (1)...(19): siRNA sense strand
aaaaguccauugacaguua

SEQ ID NO: 582198 - RNA, 19 nt, Homo sapiens
  misc_RNA (1)...(19): siRNA sense strand
ccaccuaccuucucucaag

SEQ ID NO: 582199 - RNA, 19 nt, Homo sapiens
  misc_RNA (1)...(19): siRNA sense strand
gagaagugacauauucauu

SEQ ID NO: 582200 - RNA, 19 nt, Homo sapiens
  misc_RNA (1)...(19): siRNA sense strand
gauucgaaguuuccuauag

SEQ ID NO: 582201 - RNA, 19 nt, Homo sapiens
  misc_RNA (1)...(19): siRNA sense strand
gguauccucuuacaauauc

SEQ ID NO: 582202 - RNA, 19 nt, Homo sapiens
  misc_RNA (1)...(19): siRNA sense strand
ugaacucccugcagagcua

SEQ ID NO: 582203 - RNA, 19 nt, Homo sapiens
  misc_RNA (1)...(19): siRNA sense strand
gcgaaagagucaccugauc

SEQ ID NO: 582204 - RNA, 19 nt, Homo sapiens
  misc_RNA (1)...(19): siRNA sense strand
gagcagaauggacagguaa

SEQ ID NO: 582205 - RNA, 19 nt, Homo sapiens
  misc_RNA (1)...(19): siRNA sense strand
gaagugacauauucauucc

SEQ ID NO: 582206 - RNA, 19 nt, Homo sapiens
  misc_RNA (1)...(19): siRNA sense strand
cggcagaucuccuacucaa

SEQ ID NO: 582207 - RNA, 19 nt, Homo sapiens
  misc_RNA (1)...(19): siRNA sense strand
ucaaaggaaucgcucaaag

SEQ ID NO: 582208 - RNA, 19 nt, Homo sapiens
  misc_RNA (1)...(19): siRNA sense strand
gggcuuuccugcagaccua

SEQ ID NO: 582209 - RNA, 19 nt, Homo sapiens
  misc_RNA (1)...(19): siRNA sense strand
caucacgucucuauuuagu

SEQ ID NO: 582210 - RNA, 19 nt, Homo sapiens
  misc_RNA (1)...(19): siRNA sense strand
uggcagauaucaaugacaa

SEQ ID NO: 582211 - RNA, 19 nt, Homo sapiens
  misc_RNA (1)...(19): siRNA sense strand
cgcauagucuccagaggua

SEQ ID NO: 582212 - RNA, 19 nt, Homo sapiens
  misc_RNA (1)...(19): siRNA sense strand
guuagaugauucgaaguuu

SEQ ID NO: 582213 - RNA, 19 nt, Homo sapiens
  misc_RNA (1)...(19): siRNA sense strand
aacggaagcucacuuuaug

SEQ ID NO: 582214 - RNA, 19 nt, Homo sapiens
  misc_RNA (1)...(19): siRNA sense strand
ggaggagcauaucuugcaa

SEQ ID NO: 582215 - RNA, 19 nt, Homo sapiens
  misc_RNA (1)...(19): siRNA sense strand
ugacaaugcuccaaaauuc

SEQ ID NO: 582216 - RNA, 19 nt, Homo sapiens
  misc_RNA (1)...(19): siRNA sense strand
uuaauauccuuguggaaga

SEQ ID NO: 582217 - RNA, 19 nt, Homo sapiens
  misc_RNA (1)...(19): siRNA sense strand
ggacgcagcuuuucucucu

SEQ ID NO: 582218 - RNA, 19 nt, Homo sapiens
  misc_RNA (1)...(19): siRNA sense strand
ggacagagacgcgcucaag

SEQ ID NO: 582219 - RNA, 19 nt, Homo sapiens
  misc_RNA (1)...(19): siRNA sense strand
gcucaaaggaaucaaagga

SEQ ID NO: 582220 - RNA, 19 nt, Homo sapiens
  misc_RNA (1)...(19): siRNA sense strand
acacgcaauuguugaaguu

SEQ ID NO: 582221 - RNA, 19 nt, Homo sapiens
  misc_RNA (1)...(19): siRNA sense strand
ugaguguuccugagaauuu

SEQ ID NO: 582222 - RNA, 19 nt, Homo sapiens
  misc_RNA (1)...(19): siRNA sense strand
aggaaucgcucaaaggaau

SEQ ID NO: 582223 - RNA, 19 nt, Homo sapiens
  misc_RNA (1)...(19): siRNA sense strand
ggauagaaauagaaguaac

SEQ ID NO: 582224 - RNA, 19 nt, Homo sapiens
  misc_RNA (1)...(19): siRNA sense strand
uuaccuauaucccagagaa

SEQ ID NO: 582225 - RNA, 19 nt, Homo sapiens
  misc_RNA (1)...(19): siRNA sense strand
ccucauacauauccaucaa

SEQ ID NO: 582226 - RNA, 19 nt, Homo sapiens
  misc_RNA (1)...(19): siRNA sense strand
gaaguaacugauaucaaug

SEQ ID NO: 582227 - RNA, 19 nt, Homo sapiens
  misc_RNA (1)...(19): siRNA sense strand
accaucacgucucuauuua

SEQ ID NO: 582228 - RNA, 19 nt, Homo sapiens
  misc_RNA (1)...(19): siRNA sense strand
gaaauacaagcagaagaug

SEQ ID NO: 582229 - RNA, 19 nt, Homo sapiens
  misc_RNA (1)...(19): siRNA sense strand
gagugaguguuccugagaa

SEQ ID NO: 582230 - RNA, 19 nt, Homo sapiens
  misc_RNA (1)...(19): siRNA sense strand
cagaaaaucuagacguaaa

SEQ ID NO: 582231 - RNA, 19 nt, Homo sapiens
  misc_RNA (1)...(19): siRNA sense strand
ccucuguccucauacauau

SEQ ID NO: 582232 - RNA, 19 nt, Homo sapiens
  misc_RNA (1)...(19): siRNA sense strand
gauggaggagcauaucuug

SEQ ID NO: 582233 - RNA, 19 nt, Homo sapiens
  misc_RNA (1)...(19): siRNA sense strand
ugagcagaauggacaggua

SEQ ID NO: 582234 - RNA, 19 nt, Homo sapiens
  misc_RNA (1)...(19): siRNA sense strand
guucagagccgugccaaug

SEQ ID NO: 582235 - RNA, 19 nt, Homo sapiens
  misc_RNA (1)...(19): siRNA sense strand
gagcccugcuggacagaga

SEQ ID NO: 582236 - RNA, 19 nt, Homo sapiens
  misc_RNA (1)...(19): siRNA sense strand
acucagauccuucgacuau

SEQ ID NO: 582237 - RNA, 19 nt, Homo sapiens
  misc_RNA (1)...(19): siRNA sense strand
guaccucuguccucauaca

SEQ ID NO: 582238 - RNA, 19 nt, Homo sapiens
  misc_RNA (1)...(19): siRNA sense strand
aaaggaaucgcucaaagga

SEQ ID NO: 582239 - RNA, 19 nt, Homo sapiens
  misc_RNA (1)...(19): siRNA sense strand
gaacagucguagcccuuuu

SEQ ID NO: 582240 - RNA, 19 nt, Homo sapiens
  misc_RNA (1)...(19): siRNA sense strand
caguagaagauguaaauga

SEQ ID NO: 582241 - RNA, 19 nt, Homo sapiens
  misc_RNA (1)...(19): siRNA sense strand
gaauaccgagugaguguuc

SEQ ID NO: 582242 - RNA, 19 nt, Homo sapiens
  misc_RNA (1)...(19): siRNA sense strand
caacccaccuaccuucucu

SEQ ID NO: 582243 - RNA, 19 nt, Homo sapiens
  misc_RNA (1)...(19): siRNA sense strand
acauauccaucaacucaga

SEQ ID NO: 582244 - RNA, 19 nt, Homo sapiens
  misc_RNA (1)...(19): siRNA sense strand
auacauauccaucaacuca

SEQ ID NO: 582245 - RNA, 19 nt, Homo sapiens
  misc_RNA (1)...(19): siRNA sense strand
ucuccuacuuuaccuauau

SEQ ID NO: 582246 - RNA, 19 nt, Homo sapiens
  misc_RNA (1)...(19): siRNA sense strand
ugacauauucauuccgaaa

SEQ ID NO: 582247 - RNA, 19 nt, Homo sapiens
  misc_RNA (1)...(19): siRNA sense strand
caggagagcugugagaaaa

SEQ ID NO: 582248 - RNA, 19 nt, Homo sapiens
  misc_RNA (1)...(19): siRNA sense strand
acagguauccucuuacaau

SEQ ID NO: 582249 - RNA, 19 nt, Homo sapiens
  misc_RNA (1)...(19): siRNA sense strand
gaagauggaggagcauauc

SEQ ID NO: 582250 - RNA, 19 nt, Homo sapiens
  misc_RNA (1)...(19): siRNA sense strand
ugggauagaaauagaagua

SEQ ID NO: 582251 - RNA, 19 nt, Homo sapiens
  misc_RNA (1)...(19): siRNA sense strand
cauugacaguuauuacaga

SEQ ID NO: 582252 - RNA, 19 nt, Homo sapiens
  misc_RNA (1)...(19): siRNA sense strand
gcaaaaguguugauuacag

SEQ ID NO: 582253 - RNA, 19 nt, Homo sapiens
  misc_RNA (1)...(19): siRNA sense strand
agaaauacaagcagaagau

SEQ ID NO: 582254 - RNA, 19 nt, Homo sapiens
  misc_RNA (1)...(19): siRNA sense strand
ccaauggagaagugacaua

SEQ ID NO: 582255 - RNA, 19 nt, Homo sapiens
  misc_RNA (1)...(19): siRNA sense strand
ucaaugacaaugcuccaaa

SEQ ID NO: 582256 - RNA, 19 nt, Homo sapiens
  misc_RNA (1)...(19): siRNA sense strand
gaguguuccugagaauuug

SEQ ID NO: 582257 - RNA, 19 nt, Homo sapiens
  misc_RNA (1)...(19): siRNA sense strand
acaaguggcagauaucaau

SEQ ID NO: 582258 - RNA, 19 nt, Homo sapiens
  misc_RNA (1)...(19): siRNA sense strand
ggaagcucacuuuaugcua

SEQ ID NO: 582259 - RNA, 19 nt, Homo sapiens
  misc_RNA (1)...(19): siRNA sense strand
aaaugucgcugcgggaaug

SEQ ID NO: 582260 - RNA, 19 nt, Homo sapiens
  misc_RNA (1)...(19): siRNA sense strand
gaaguccuccucuaucaac

SEQ ID NO: 582261 - RNA, 19 nt, Homo sapiens
  misc_RNA (1)...(19): siRNA sense strand
ggaaguccuccucuaucaa

SEQ ID NO: 582262 - RNA, 19 nt, Homo sapiens
  misc_RNA (1)...(19): siRNA sense strand
auggagaagugacauauuc

SEQ ID NO: 582263 - RNA, 19 nt, Homo sapiens
  misc_RNA (1)...(19): siRNA sense strand
caaaggaaucgcucaaagg

SEQ ID NO: 582264 - RNA, 19 nt, Homo sapiens
  misc_RNA (1)...(19): siRNA sense strand
cagaauaccgagugagugu

SEQ ID NO: 582265 - RNA, 19 nt, Homo sapiens
  misc_RNA (1)...(19): siRNA sense strand
gcguaucuaccauuuaaau

SEQ ID NO: 582266 - RNA, 19 nt, Homo sapiens
  misc_RNA (1)...(19): siRNA sense strand
ggaacagucguagcccuuu

SEQ ID NO: 582267 - RNA, 19 nt, Homo sapiens
  misc_RNA (1)...(19): siRNA sense strand
agaagugacauauucauuc

SEQ ID NO: 582268 - RNA, 19 nt, Homo sapiens
  misc_RNA (1)...(19): siRNA sense strand
gggauagaaauagaaguaa

SEQ ID NO: 582269 - RNA, 19 nt, Homo sapiens
  misc_RNA (1)...(19): siRNA sense strand
cagaucuccuacucaauuc

SEQ ID NO: 582270 - RNA, 19 nt, Homo sapiens
  misc_RNA (1)...(19): siRNA sense strand
caagcaaagccucguagug

SEQ ID NO: 582271 - RNA, 19 nt, Homo sapiens
  misc_RNA (1)...(19): siRNA sense strand
agauguaaaugacaacagu

SEQ ID NO: 582272 - RNA, 19 nt, Homo sapiens
  misc_RNA (1)...(19): siRNA sense strand
gacacgcaauuguugaagu

SEQ ID NO: 582273 - RNA, 19 nt, Homo sapiens
  misc_RNA (1)...(19): siRNA sense strand
cgaaagagucaccugaucu

SEQ ID NO: 582274 - RNA, 19 nt, Homo sapiens
  misc_RNA (1)...(19): siRNA sense strand
auucgaaguuuccuauaga

SEQ ID NO: 582275 - RNA, 19 nt, Homo sapiens
  misc_RNA (1)...(19): siRNA sense strand
ccaggagagcugugagaaa

SEQ ID NO: 582276 - RNA, 19 nt, Homo sapiens
  misc_RNA (1)...(19): siRNA sense strand
ugacagagcugguggagua

SEQ ID NO: 582277 - RNA, 19 nt, Homo sapiens
  misc_RNA (1)...(19): siRNA sense strand
gggaggaguuugagaguuu

SEQ ID NO: 582278 - RNA, 19 nt, Homo sapiens
  misc_RNA (1)...(19): siRNA sense strand
gcaagaaccgcuacaagaa

SEQ ID NO: 582279 - RNA, 19 nt, Homo sapiens
  misc_RNA (1)...(19): siRNA sense strand
gaacaaaugcgucccauac

SEQ ID NO: 582280 - RNA, 19 nt, Homo sapiens
  misc_RNA (1)...(19): siRNA sense strand
gagaaaggccggaacaaau

SEQ ID NO: 582281 - RNA, 19 nt, Homo sapiens
  misc_RNA (1)...(19): siRNA sense strand
ccaagggccuggacuguga

SEQ ID NO: 582282 - RNA, 19 nt, Homo sapiens
  misc_RNA (1)...(19): siRNA sense strand
gggaucaggugacccauau

SEQ ID NO: 582283 - RNA, 19 nt, Homo sapiens
  misc_RNA (1)...(19): siRNA sense strand
ugacacaaccgaauacaaa

SEQ ID NO: 582284 - RNA, 19 nt, Homo sapiens
  misc_RNA (1)...(19): siRNA sense strand
ggauuucuaugaccuguau

SEQ ID NO: 582285 - RNA, 19 nt, Homo sapiens
  misc_RNA (1)...(19): siRNA sense strand
ggagaaaggccggaacaaa

SEQ ID NO: 582286 - RNA, 19 nt, Homo sapiens
  misc_RNA (1)...(19): siRNA sense strand
ggacaauggagaccugauu

SEQ ID NO: 582287 - RNA, 19 nt, Homo sapiens
  misc_RNA (1)...(19): siRNA sense strand
gcacaggcaccaucauugu

SEQ ID NO: 582288 - RNA, 19 nt, Homo sapiens
  misc_RNA (1)...(19): siRNA sense strand
gaacaagagggaggagaaa

SEQ ID NO: 582289 - RNA, 19 nt, Homo sapiens
  misc_RNA (1)...(19): siRNA sense strand
augagaaccugcacacuaa

SEQ ID NO: 582290 - RNA, 19 nt, Homo sapiens
  misc_RNA (1)...(19): siRNA sense strand
ggcaagaaccgcuacaaga

SEQ ID NO: 582291 - RNA, 19 nt, Homo sapiens
  misc_RNA (1)...(19): siRNA sense strand
acaaggaggauguguauga

SEQ ID NO: 582292 - RNA, 19 nt, Homo sapiens
  misc_RNA (1)...(19): siRNA sense strand
gggagaaguuugcgacucu

SEQ ID NO: 582293 - RNA, 19 nt, Homo sapiens
  misc_RNA (1)...(19): siRNA sense strand
uaugagaaccugcacacua

SEQ ID NO: 582294 - RNA, 19 nt, Homo sapiens
  misc_RNA (1)...(19): siRNA sense strand
gcuccgaucccacuaguga

SEQ ID NO: 582295 - RNA, 19 nt, Homo sapiens
  misc_RNA (1)...(19): siRNA sense strand
gaucaggugacccauauuc

SEQ ID NO: 582296 - RNA, 19 nt, Homo sapiens
  misc_RNA (1)...(19): siRNA sense strand
cuacaucaaugccaacuac

SEQ ID NO: 582297 - RNA, 19 nt, Homo sapiens
  misc_RNA (1)...(19): siRNA sense strand
auacaaacuccguaccuua

SEQ ID NO: 582298 - RNA, 19 nt, Homo sapiens
  misc_RNA (1)...(19): siRNA sense strand
ggaacaaaugcgucccaua

SEQ ID NO: 582299 - RNA, 19 nt, Homo sapiens
  misc_RNA (1)...(19): siRNA sense strand
ccaacuacaucaagaacca

SEQ ID NO: 582300 - RNA, 19 nt, Homo sapiens
  misc_RNA (1)...(19): siRNA sense strand
acaaaugcgucccauacug

SEQ ID NO: 582301 - RNA, 19 nt, Homo sapiens
  misc_RNA (1)...(19): siRNA sense strand
gagcaugacacaaccgaau

SEQ ID NO: 582302 - RNA, 19 nt, Homo sapiens
  misc_RNA (1)...(19): siRNA sense strand
ucaaguacccgcugaacug

SEQ ID NO: 582303 - RNA, 19 nt, Homo sapiens
  misc_RNA (1)...(19): siRNA sense strand
gggaggagaaagugaagaa

SEQ ID NO: 582304 - RNA, 19 nt, Homo sapiens
  misc_RNA (1)...(19): siRNA sense strand
ggccuggacugugacauug

SEQ ID NO: 582305 - RNA, 19 nt, Homo sapiens
  misc_RNA (1)...(19): siRNA sense strand
agaaaggccggaacaaaug

SEQ ID NO: 582306 - RNA, 19 nt, Homo sapiens
  misc_RNA (1)...(19): siRNA sense strand
gcuaggcccugaugagaac

SEQ ID NO: 582307 - RNA, 19 nt, Homo sapiens
  misc_RNA (1)...(19): siRNA sense strand
cagagcugguggaguacua

SEQ ID NO: 582308 - RNA, 19 nt, Homo sapiens
  misc_RNA (1)...(19): siRNA sense strand
gcaagaaccagggugacuu

SEQ ID NO: 582309 - RNA, 19 nt, Homo sapiens
  misc_RNA (1)...(19): siRNA sense strand
ggaggaguuugagaguuug

SEQ ID NO: 582310 - RNA, 19 nt, Homo sapiens
  misc_RNA (1)...(19): siRNA sense strand
ggagaacagccgugucauc

SEQ ID NO: 582311 - RNA, 19 nt, Homo sapiens
  misc_RNA (1)...(19): siRNA sense strand
aggaggauguguaugagaa

SEQ ID NO: 582312 - RNA, 19 nt, Homo sapiens
  misc_RNA (1)...(19): siRNA sense strand
gacauugacauccagaaga

SEQ ID NO: 582313 - RNA, 19 nt, Homo sapiens
  misc_RNA (1)...(19): siRNA sense strand
ucauugaaaccacuaagaa

SEQ ID NO: 582314 - RNA, 19 nt, Homo sapiens
  misc_RNA (1)...(19): siRNA sense strand
ggccaucgcccaguucauu

SEQ ID NO: 582315 - RNA, 19 nt, Homo sapiens
  misc_RNA (1)...(19): siRNA sense strand
gcaugcagcgugcuuaugg

SEQ ID NO: 582316 - RNA, 19 nt, Homo sapiens
  misc_RNA (1)...(19): siRNA sense strand
gaacucaggggauuucuau

SEQ ID NO: 582317 - RNA, 19 nt, Homo sapiens
  misc_RNA (1)...(19): siRNA sense strand
gagaaccugcacacuaaga

SEQ ID NO: 582318 - RNA, 19 nt, Homo sapiens
  misc_RNA (1)...(19): siRNA sense strand
agacggaggcgcaguacaa

SEQ ID NO: 582319 - RNA, 19 nt, Homo sapiens
  misc_RNA (1)...(19): siRNA sense strand
uaugggcccuacucuguga

SEQ ID NO: 582320 - RNA, 19 nt, Homo sapiens
  misc_RNA (1)...(19): siRNA sense strand
aagaaccgcuacaagaaca

SEQ ID NO: 582321 - RNA, 19 nt, Homo sapiens
  misc_RNA (1)...(19): siRNA sense strand
gcaccaucauugucaucga

SEQ ID NO: 582322 - RNA, 19 nt, Homo sapiens
  misc_RNA (1)...(19): siRNA sense strand
aagcaggaguccgaggaua

SEQ ID NO: 582323 - RNA, 19 nt, Homo sapiens
  misc_RNA (1)...(19): siRNA sense strand
gaaccgcuacaagaacauu

SEQ ID NO: 582324 - RNA, 19 nt, Homo sapiens
  misc_RNA (1)...(19): siRNA sense strand
caagaaccagggugacuuc

SEQ ID NO: 582325 - RNA, 19 nt, Homo sapiens
  misc_RNA (1)...(19): siRNA sense strand
caaggaggauguguaugag

SEQ ID NO: 582326 - RNA, 19 nt, Homo sapiens
  misc_RNA (1)...(19): siRNA sense strand
gaaguuugcgacucugaca

SEQ ID NO: 582327 - RNA, 19 nt, Homo sapiens
  misc_RNA (1)...(19): siRNA sense strand
gcaccaucauccaccucaa

SEQ ID NO: 582328 - RNA, 19 nt, Homo sapiens
  misc_RNA (1)...(19): siRNA sense strand
gggccuggacugugacauu

SEQ ID NO: 582329 - RNA, 19 nt, Homo sapiens
  misc_RNA (1)...(19): siRNA sense strand
agcaggaggugaagaacuu

SEQ ID NO: 582330 - RNA, 19 nt, Homo sapiens
  misc_RNA (1)...(19): siRNA sense strand
gcuacacagugggugguuu

SEQ ID NO: 582331 - RNA, 19 nt, Homo sapiens
  misc_RNA (1)...(19): siRNA sense strand
caggagaacagccguguca

SEQ ID NO: 582332 - RNA, 19 nt, Homo sapiens
  misc_RNA (1)...(19): siRNA sense strand
ggacugugacauugacauc

SEQ ID NO: 582333 - RNA, 19 nt, Homo sapiens
  misc_RNA (1)...(19): siRNA sense strand
agaagcaggaggugaagaa

SEQ ID NO: 582334 - RNA, 19 nt, Homo sapiens
  misc_RNA (1)...(19): siRNA sense strand
ggucagcagacaaggagaa

SEQ ID NO: 582335 - RNA, 19 nt, Homo sapiens
  misc_RNA (1)...(19): siRNA sense strand
uucgggagaucuggcauua

SEQ ID NO: 582336 - RNA, 19 nt, Homo sapiens
  misc_RNA (1)...(19): siRNA sense strand
gacaauggagaccugauuc

SEQ ID NO: 582337 - RNA, 19 nt, Homo sapiens
  misc_RNA (1)...(19): siRNA sense strand
gcccugaugagaacgcuaa

SEQ ID NO: 582338 - RNA, 19 nt, Homo sapiens
  misc_RNA (1)...(19): siRNA sense strand
aggagaaagugaagaagca

SEQ ID NO: 582339 - RNA, 19 nt, Homo sapiens
  misc_RNA (1)...(19): siRNA sense strand
ugaaaccacuaagaagaag

SEQ ID NO: 582340 - RNA, 19 nt, Homo sapiens
  misc_RNA (1)...(19): siRNA sense strand
cggaggcgcaguacaaguu

SEQ ID NO: 582341 - RNA, 19 nt, Homo sapiens
  misc_RNA (1)...(19): siRNA sense strand
caucaaugccaacuacauc

SEQ ID NO: 582342 - RNA, 19 nt, Homo sapiens
  misc_RNA (1)...(19): siRNA sense strand
caagagggaggagaaagug

SEQ ID NO: 582343 - RNA, 19 nt, Homo sapiens
  misc_RNA (1)...(19): siRNA sense strand
gcaguacaaguucaucuac

SEQ ID NO: 582344 - RNA, 19 nt, Homo sapiens
  misc_RNA (1)...(19): siRNA sense strand
aauacaaacuccguaccuu

SEQ ID NO: 582345 - RNA, 19 nt, Homo sapiens
  misc_RNA (1)...(19): siRNA sense strand
gagaaguuugcgacucuga

SEQ ID NO: 582346 - RNA, 19 nt, Homo sapiens
  misc_RNA (1)...(19): siRNA sense strand
gaaaggccggaacaaaugc

SEQ ID NO: 582347 - RNA, 19 nt, Homo sapiens
  misc_RNA (1)...(19): siRNA sense strand
gaaccgaguguuggaacug

SEQ ID NO: 582348 - RNA, 19 nt, Homo sapiens
  misc_RNA (1)...(19): siRNA sense strand
guacgggaacaucaccuau

SEQ ID NO: 582349 - RNA, 19 nt, Homo sapiens
  misc_RNA (1)...(19): siRNA sense strand
cccgagagguggagaaagg

SEQ ID NO: 582350 - RNA, 19 nt, Homo sapiens
  misc_RNA (1)...(19): siRNA sense strand
caagaaccgcuacaagaac

SEQ ID NO: 582351 - RNA, 19 nt, Homo sapiens
  misc_RNA (1)...(19): siRNA sense strand
gaagcaggaguccgaggau

SEQ ID NO: 582352 - RNA, 19 nt, Homo sapiens
  misc_RNA (1)...(19): siRNA sense strand
caaacuccguaccuuacag

SEQ ID NO: 582353 - RNA, 19 nt, Homo sapiens
  misc_RNA (1)...(19): siRNA sense strand
gaauacaaacuccguaccu

SEQ ID NO: 582354 - RNA, 19 nt, Homo sapiens
  misc_RNA (1)...(19): siRNA sense strand
gcaggaguccgaggauaca

SEQ ID NO: 582355 - RNA, 19 nt, Homo sapiens
  misc_RNA (1)...(19): siRNA sense strand
agaacaagagggaggagaa

SEQ ID NO: 582356 - RNA, 19 nt, Homo sapiens
  misc_RNA (1)...(19): siRNA sense strand
ccgcacaggcaccaucauu

SEQ ID NO: 582357 - RNA, 19 nt, Homo sapiens
  misc_RNA (1)...(19): siRNA sense strand
gggcaagaaccgcuacaag

SEQ ID NO: 582358 - RNA, 19 nt, Homo sapiens
  misc_RNA (1)...(19): siRNA sense strand
caucaagaaccagcugcua

SEQ ID NO: 582359 - RNA, 19 nt, Homo sapiens
  misc_RNA (1)...(19): siRNA sense strand
uugaaaccacuaagaagaa

SEQ ID NO: 582360 - RNA, 19 nt, Homo sapiens
  misc_RNA (1)...(19): siRNA sense strand
caucauccaccucaaguac

SEQ ID NO: 582361 - RNA, 19 nt, Homo sapiens
  misc_RNA (1)...(19): siRNA sense strand
gggcaugcagcgugcuuau

SEQ ID NO: 582362 - RNA, 19 nt, Homo sapiens
  misc_RNA (1)...(19): siRNA sense strand
ccagagaacaagggcaaga

SEQ ID NO: 582363 - RNA, 19 nt, Homo sapiens
  misc_RNA (1)...(19): siRNA sense strand
cagcagacaaggagaagag

SEQ ID NO: 582364 - RNA, 19 nt, Homo sapiens
  misc_RNA (1)...(19): siRNA sense strand
gaaccugcacacuaagaac

SEQ ID NO: 582365 - RNA, 19 nt, Homo sapiens
  misc_RNA (1)...(19): siRNA sense strand
gaucaaccagcggcaggaa

SEQ ID NO: 582366 - RNA, 19 nt, Homo sapiens
  misc_RNA (1)...(19): siRNA sense strand
cuacacagugggugguuug

SEQ ID NO: 582367 - RNA, 19 nt, Homo sapiens
  misc_RNA (1)...(19): siRNA sense strand
aaugccaacuacaucaaga

SEQ ID NO: 582368 - RNA, 19 nt, Homo sapiens
  misc_RNA (1)...(19): siRNA sense strand
cuuaugggcccuacucugu

SEQ ID NO: 582369 - RNA, 19 nt, Homo sapiens
  misc_RNA (1)...(19): siRNA sense strand
aagcagcggucagcagaca

SEQ ID NO: 582370 - RNA, 19 nt, Homo sapiens
  misc_RNA (1)...(19): siRNA sense strand
gaggcgcaguacaaguuca

SEQ ID NO: 582371 - RNA, 19 nt, Homo sapiens
  misc_RNA (1)...(19): siRNA sense strand
gcaugacacaaccgaauac

SEQ ID NO: 582372 - RNA, 19 nt, Homo sapiens
  misc_RNA (1)...(19): siRNA sense strand
cagagaacaagggcaagaa

SEQ ID NO: 582373 - RNA, 19 nt, Homo sapiens
  misc_RNA (1)...(19): siRNA sense strand
cagacaaggagaagagcaa

SEQ ID NO: 582374 - RNA, 19 nt, Homo sapiens
  misc_RNA (1)...(19): siRNA sense strand
acauugacauccagaagac

SEQ ID NO: 582375 - RNA, 19 nt, Homo sapiens
  misc_RNA (1)...(19): siRNA sense strand
agagggaggagaaagugaa

SEQ ID NO: 582376 - RNA, 19 nt, Homo sapiens
  misc_RNA (1)...(19): siRNA sense strand
ugacagagcugguggagua

SEQ ID NO: 582377 - RNA, 19 nt, Homo sapiens
  misc_RNA (1)...(19): siRNA sense strand
gggaggaguuugagaguuu

SEQ ID NO: 582378 - RNA, 19 nt, Homo sapiens
  misc_RNA (1)...(19): siRNA sense strand
gcaagaaccgcuacaagaa

SEQ ID NO: 582379 - RNA, 19 nt, Homo sapiens
  misc_RNA (1)...(19): siRNA sense strand
gaacaaaugcgucccauac

SEQ ID NO: 582380 - RNA, 19 nt, Homo sapiens
  misc_RNA (1)...(19): siRNA sense strand
gagaaaggccggaacaaau

SEQ ID NO: 582381 - RNA, 19 nt, Homo sapiens
  misc_RNA (1)...(19): siRNA sense strand
ccaagggccuggacuguga

SEQ ID NO: 582382 - RNA, 19 nt, Homo sapiens
  misc_RNA (1)...(19): siRNA sense strand
gggaucaggugacccauau

SEQ ID NO: 582383 - RNA, 19 nt, Homo sapiens
  misc_RNA (1)...(19): siRNA sense strand
ugacacaaccgaauacaaa

SEQ ID NO: 582384 - RNA, 19 nt, Homo sapiens
  misc_RNA (1)...(19): siRNA sense strand
ggauuucuaugaccuguau

SEQ ID NO: 582385 - RNA, 19 nt, Homo sapiens
  misc_RNA (1)...(19): siRNA sense strand
ggagaaaggccggaacaaa

SEQ ID NO: 582386 - RNA, 19 nt, Homo sapiens
  misc_RNA (1)...(19): siRNA sense strand
ggacaauggagaccugauu

SEQ ID NO: 582387 - RNA, 19 nt, Homo sapiens
  misc_RNA (1)...(19): siRNA sense strand
gcacaggcaccaucauugu

SEQ ID NO: 582388 - RNA, 19 nt, Homo sapiens
  misc_RNA (1)...(19): siRNA sense strand
gaacaagagggaggagaaa

SEQ ID NO: 582389 - RNA, 19 nt, Homo sapiens
  misc_RNA (1)...(19): siRNA sense strand
augagaaccugcacacuaa

SEQ ID NO: 582390 - RNA, 19 nt, Homo sapiens
  misc_RNA (1)...(19): siRNA sense strand
ggcaagaaccgcuacaaga

SEQ ID NO: 582391 - RNA, 19 nt, Homo sapiens
  misc_RNA (1)...(19): siRNA sense strand
acaaggaggauguguauga

SEQ ID NO: 582392 - RNA, 19 nt, Homo sapiens
  misc_RNA (1)...(19): siRNA sense strand
gggagaaguuugcgacucu

SEQ ID NO: 582393 - RNA, 19 nt, Homo sapiens
  misc_RNA (1)...(19): siRNA sense strand
uaugagaaccugcacacua

SEQ ID NO: 582394 - RNA, 19 nt, Homo sapiens
  misc_RNA (1)...(19): siRNA sense strand
gcuccgaucccacuaguga

SEQ ID NO: 582395 - RNA, 19 nt, Homo sapiens
  misc_RNA (1)...(19): siRNA sense strand
gaucaggugacccauauuc

SEQ ID NO: 582396 - RNA, 19 nt, Homo sapiens
  misc_RNA (1)...(19): siRNA sense strand
cuacaucaaugccaacuac

SEQ ID NO: 582397 - RNA, 19 nt, Homo sapiens
  misc_RNA (1)...(19): siRNA sense strand
auacaaacuccguaccuua

SEQ ID NO: 582398 - RNA, 19 nt, Homo sapiens
  misc_RNA (1)...(19): siRNA sense strand
ggaacaaaugcgucccaua

SEQ ID NO: 582399 - RNA, 19 nt, Homo sapiens
  misc_RNA (1)...(19): siRNA sense strand
ccaacuacaucaagaacca

SEQ ID NO: 582400 - RNA, 19 nt, Homo sapiens
  misc_RNA (1)...(19): siRNA sense strand
acaaaugcgucccauacug

SEQ ID NO: 582401 - RNA, 19 nt, Homo sapiens
  misc_RNA (1)...(19): siRNA sense strand
gagcaugacacaaccgaau

SEQ ID NO: 582402 - RNA, 19 nt, Homo sapiens
  misc_RNA (1)...(19): siRNA sense strand
ucaaguacccgcugaacug

SEQ ID NO: 582403 - RNA, 19 nt, Homo sapiens
  misc_RNA (1)...(19): siRNA sense strand
gggaggagaaagugaagaa

SEQ ID NO: 582404 - RNA, 19 nt, Homo sapiens
  misc_RNA (1)...(19): siRNA sense strand
ggccuggacugugacauug

SEQ ID NO: 582405 - RNA, 19 nt, Homo sapiens
  misc_RNA (1)...(19): siRNA sense strand
agaaaggccggaacaaaug

SEQ ID NO: 582406 - RNA, 19 nt, Homo sapiens
  misc_RNA (1)...(19): siRNA sense strand
gcuaggcccugaugagaac

SEQ ID NO: 582407 - RNA, 19 nt, Homo sapiens
  misc_RNA (1)...(19): siRNA sense strand
cagagcugguggaguacua

SEQ ID NO: 582408 - RNA, 19 nt, Homo sapiens
  misc_RNA (1)...(19): siRNA sense strand
gcaagaaccagggugacuu

SEQ ID NO: 582409 - RNA, 19 nt, Homo sapiens
  misc_RNA (1)...(19): siRNA sense strand
ggaggaguuugagaguuug

SEQ ID NO: 582410 - RNA, 19 nt, Homo sapiens
  misc_RNA (1)...(19): siRNA sense strand
ggagaacagccgugucauc

SEQ ID NO: 582411 - RNA, 19 nt, Homo sapiens
  misc_RNA (1)...(19): siRNA sense strand
aggaggauguguaugagaa

SEQ ID NO: 582412 - RNA, 19 nt, Homo sapiens
  misc_RNA (1)...(19): siRNA sense strand
gacauugacauccagaaga

SEQ ID NO: 582413 - RNA, 19 nt, Homo sapiens
  misc_RNA (1)...(19): siRNA sense strand
ucauugaaaccacuaagaa

SEQ ID NO: 582414 - RNA, 19 nt, Homo sapiens
  misc_RNA (1)...(19): siRNA sense strand
ggccaucgcccaguucauu

SEQ ID NO: 582415 - RNA, 19 nt, Homo sapiens
  misc_RNA (1)...(19): siRNA sense strand
gcaugcagcgugcuuaugg

SEQ ID NO: 582416 - RNA, 19 nt, Homo sapiens
  misc_RNA (1)...(19): siRNA sense strand
gaacucaggggauuucuau

SEQ ID NO: 582417 - RNA, 19 nt, Homo sapiens
  misc_RNA (1)...(19): siRNA sense strand
gagaaccugcacacuaaga

SEQ ID NO: 582418 - RNA, 19 nt, Homo sapiens
  misc_RNA (1)...(19): siRNA sense strand
agacggaggcgcaguacaa

SEQ ID NO: 582419 - RNA, 19 nt, Homo sapiens
  misc_RNA (1)...(19): siRNA sense strand
uaugggcccuacucuguga

SEQ ID NO: 582420 - RNA, 19 nt, Homo sapiens
  misc_RNA (1)...(19): siRNA sense strand
aagaaccgcuacaagaaca

SEQ ID NO: 582421 - RNA, 19 nt, Homo sapiens
  misc_RNA (1)...(19): siRNA sense strand
gcaccaucauugucaucga

SEQ ID NO: 582422 - RNA, 19 nt, Homo sapiens
  misc_RNA (1)...(19): siRNA sense strand
aagcaggaguccgaggaua

SEQ ID NO: 582423 - RNA, 19 nt, Homo sapiens
  misc_RNA (1)...(19): siRNA sense strand
gaaccgcuacaagaacauu

SEQ ID NO: 582424 - RNA, 19 nt, Homo sapiens
  misc_RNA (1)...(19): siRNA sense strand
caagaaccagggugacuuc

SEQ ID NO: 582425 - RNA, 19 nt, Homo sapiens
  misc_RNA (1)...(19): siRNA sense strand
caaggaggauguguaugag

SEQ ID NO: 582426 - RNA, 19 nt, Homo sapiens
  misc_RNA (1)...(19): siRNA sense strand
gaaguuugcgacucugaca

SEQ ID NO: 582427 - RNA, 19 nt, Homo sapiens
  misc_RNA (1)...(19): siRNA sense strand
gcaccaucauccaccucaa

SEQ ID NO: 582428 - RNA, 19 nt, Homo sapiens
  misc_RNA (1)...(19): siRNA sense strand
gggccuggacugugacauu

SEQ ID NO: 582429 - RNA, 19 nt, Homo sapiens
  misc_RNA (1)...(19): siRNA sense strand
agcaggaggugaagaacuu

SEQ ID NO: 582430 - RNA, 19 nt, Homo sapiens
  misc_RNA (1)...(19): siRNA sense strand
gcuacacagugggugguuu

SEQ ID NO: 582431 - RNA, 19 nt, Homo sapiens
  misc_RNA (1)...(19): siRNA sense strand
caggagaacagccguguca

SEQ ID NO: 582432 - RNA, 19 nt, Homo sapiens
  misc_RNA (1)...(19): siRNA sense strand
ggacugugacauugacauc

SEQ ID NO: 582433 - RNA, 19 nt, Homo sapiens
  misc_RNA (1)...(19): siRNA sense strand
agaagcaggaggugaagaa

SEQ ID NO: 582434 - RNA, 19 nt, Homo sapiens
  misc_RNA (1)...(19): siRNA sense strand
ggucagcagacaaggagaa

SEQ ID NO: 582435 - RNA, 19 nt, Homo sapiens
  misc_RNA (1)...(19): siRNA sense strand
uucgggagaucuggcauua

SEQ ID NO: 582436 - RNA, 19 nt, Homo sapiens
  misc_RNA (1)...(19): siRNA sense strand
gacaauggagaccugauuc

SEQ ID NO: 582437 - RNA, 19 nt, Homo sapiens
  misc_RNA (1)...(19): siRNA sense strand
gcccugaugagaacgcuaa

SEQ ID NO: 582438 - RNA, 19 nt, Homo sapiens
  misc_RNA (1)...(19): siRNA sense strand
aggagaaagugaagaagca

SEQ ID NO: 582439 - RNA, 19 nt, Homo sapiens
  misc_RNA (1)...(19): siRNA sense strand
ugaaaccacuaagaagaag

SEQ ID NO: 582440 - RNA, 19 nt, Homo sapiens
  misc_RNA (1)...(19): siRNA sense strand
cggaggcgcaguacaaguu

SEQ ID NO: 582441 - RNA, 19 nt, Homo sapiens
  misc_RNA (1)...(19): siRNA sense strand
caucaaugccaacuacauc

SEQ ID NO: 582442 - RNA, 19 nt, Homo sapiens
  misc_RNA (1)...(19): siRNA sense strand
caagagggaggagaaagug

SEQ ID NO: 582443 - RNA, 19 nt, Homo sapiens
  misc_RNA (1)...(19): siRNA sense strand
gcaguacaaguucaucuac

SEQ ID NO: 582444 - RNA, 19 nt, Homo sapiens
  misc_RNA (1)...(19): siRNA sense strand
aauacaaacuccguaccuu

SEQ ID NO: 582445 - RNA, 19 nt, Homo sapiens
  misc_RNA (1)...(19): siRNA sense strand
gagaaguuugcgacucuga

SEQ ID NO: 582446 - RNA, 19 nt, Homo sapiens
  misc_RNA (1)...(19): siRNA sense strand
gaaaggccggaacaaaugc

SEQ ID NO: 582447 - RNA, 19 nt, Homo sapiens
  misc_RNA (1)...(19): siRNA sense strand
gaaccgaguguuggaacug

SEQ ID NO: 582448 - RNA, 19 nt, Homo sapiens
  misc_RNA (1)...(19): siRNA sense strand
guacgggaacaucaccuau

SEQ ID NO: 582449 - RNA, 19 nt, Homo sapiens
  misc_RNA (1)...(19): siRNA sense strand
cccgagagguggagaaagg

SEQ ID NO: 582450 - RNA, 19 nt, Homo sapiens
  misc_RNA (1)...(19): siRNA sense strand
caagaaccgcuacaagaac

SEQ ID NO: 582451 - RNA, 19 nt, Homo sapiens
  misc_RNA (1)...(19): siRNA sense strand
gaagcaggaguccgaggau

SEQ ID NO: 582452 - RNA, 19 nt, Homo sapiens
  misc_RNA (1)...(19): siRNA sense strand
caaacuccguaccuuacag

SEQ ID NO: 582453 - RNA, 19 nt, Homo sapiens
  misc_RNA (1)...(19): siRNA sense strand
gaauacaaacuccguaccu

SEQ ID NO: 582454 - RNA, 19 nt, Homo sapiens
  misc_RNA (1)...(19): siRNA sense strand
gcaggaguccgaggauaca

SEQ ID NO: 582455 - RNA, 19 nt, Homo sapiens
  misc_RNA (1)...(19): siRNA sense strand
agaacaagagggaggagaa

SEQ ID NO: 582456 - RNA, 19 nt, Homo sapiens
  misc_RNA (1)...(19): siRNA sense strand
ccgcacaggcaccaucauu

SEQ ID NO: 582457 - RNA, 19 nt, Homo sapiens
  misc_RNA (1)...(19): siRNA sense strand
gggcaagaaccgcuacaag

SEQ ID NO: 582458 - RNA, 19 nt, Homo sapiens
  misc_RNA (1)...(19): siRNA sense strand
caucaagaaccagcugcua

SEQ ID NO: 582459 - RNA, 19 nt, Homo sapiens
  misc_RNA (1)...(19): siRNA sense strand
uugaaaccacuaagaagaa

SEQ ID NO: 582460 - RNA, 19 nt, Homo sapiens
  misc_RNA (1)...(19): siRNA sense strand
caucauccaccucaaguac

SEQ ID NO: 582461 - RNA, 19 nt, Homo sapiens
  misc_RNA (1)...(19): siRNA sense strand
gggcaugcagcgugcuuau

SEQ ID NO: 582462 - RNA, 19 nt, Homo sapiens
  misc_RNA (1)...(19): siRNA sense strand
ccagagaacaagggcaaga

SEQ ID NO: 582463 - RNA, 19 nt, Homo sapiens
  misc_RNA (1)...(19): siRNA sense strand
cagcagacaaggagaagag

SEQ ID NO: 582464 - RNA, 19 nt, Homo sapiens
  misc_RNA (1)...(19): siRNA sense strand
gaaccugcacacuaagaac

SEQ ID NO: 582465 - RNA, 19 nt, Homo sapiens
  misc_RNA (1)...(19): siRNA sense strand
gaucaaccagcggcaggaa

SEQ ID NO: 582466 - RNA, 19 nt, Homo sapiens
  misc_RNA (1)...(19): siRNA sense strand
cuacacagugggugguuug

SEQ ID NO: 582467 - RNA, 19 nt, Homo sapiens
  misc_RNA (1)...(19): siRNA sense strand
aaugccaacuacaucaaga

SEQ ID NO: 582468 - RNA, 19 nt, Homo sapiens
  misc_RNA (1)...(19): siRNA sense strand
cuuaugggcccuacucugu

SEQ ID NO: 582469 - RNA, 19 nt, Homo sapiens
  misc_RNA (1)...(19): siRNA sense strand
aagcagcggucagcagaca

SEQ ID NO: 582470 - RNA, 19 nt, Homo sapiens
  misc_RNA (1)...(19): siRNA sense strand
gaggcgcaguacaaguuca

SEQ ID NO: 582471 - RNA, 19 nt, Homo sapiens
  misc_RNA (1)...(19): siRNA sense strand
gcaugacacaaccgaauac

SEQ ID NO: 582472 - RNA, 19 nt, Homo sapiens
  misc_RNA (1)...(19): siRNA sense strand
cagagaacaagggcaagaa

SEQ ID NO: 582473 - RNA, 19 nt, Homo sapiens
  misc_RNA (1)...(19): siRNA sense strand
cagacaaggagaagagcaa

SEQ ID NO: 582474 - RNA, 19 nt, Homo sapiens
  misc_RNA (1)...(19): siRNA sense strand
acauugacauccagaagac

SEQ ID NO: 582475 - RNA, 19 nt, Homo sapiens
  misc_RNA (1)...(19): siRNA sense strand
agagggaggagaaagugaa

SEQ ID NO: 582476 - RNA, 19 nt, Homo sapiens
  misc_RNA (1)...(19): siRNA sense strand
ugacagagcugguggagua

SEQ ID NO: 582477 - RNA, 19 nt, Homo sapiens
  misc_RNA (1)...(19): siRNA sense strand
gggaggaguuugagaguuu

SEQ ID NO: 582478 - RNA, 19 nt, Homo sapiens
  misc_RNA (1)...(19): siRNA sense strand
gcaagaaccgcuacaagaa

SEQ ID NO: 582479 - RNA, 19 nt, Homo sapiens
  misc_RNA (1)...(19): siRNA sense strand
gaacaaaugcgucccauac

SEQ ID NO: 582480 - RNA, 19 nt, Homo sapiens
  misc_RNA (1)...(19): siRNA sense strand
gagaaaggccggaacaaau

SEQ ID NO: 582481 - RNA, 19 nt, Homo sapiens
  misc_RNA (1)...(19): siRNA sense strand
ccaagggccuggacuguga

SEQ ID NO: 582482 - RNA, 19 nt, Homo sapiens
  misc_RNA (1)...(19): siRNA sense strand
gggaucaggugacccauau

SEQ ID NO: 582483 - RNA, 19 nt, Homo sapiens
  misc_RNA (1)...(19): siRNA sense strand
ugacacaaccgaauacaaa

SEQ ID NO: 582484 - RNA, 19 nt, Homo sapiens
  misc_RNA (1)...(19): siRNA sense strand
ggauuucuaugaccuguau

SEQ ID NO: 582485 - RNA, 19 nt, Homo sapiens
  misc_RNA (1)...(19): siRNA sense strand
ggagaaaggccggaacaaa

SEQ ID NO: 582486 - RNA, 19 nt, Homo sapiens
  misc_RNA (1)...(19): siRNA sense strand
ggacaauggagaccugauu

SEQ ID NO: 582487 - RNA, 19 nt, Homo sapiens
  misc_RNA (1)...(19): siRNA sense strand
gcacaggcaccaucauugu

SEQ ID NO: 582488 - RNA, 19 nt, Homo sapiens
  misc_RNA (1)...(19): siRNA sense strand
gaacaagagggaggagaaa

SEQ ID NO: 582489 - RNA, 19 nt, Homo sapiens
  misc_RNA (1)...(19): siRNA sense strand
augagaaccugcacacuaa

SEQ ID NO: 582490 - RNA, 19 nt, Homo sapiens
  misc_RNA (1)...(19): siRNA sense strand
ggcaagaaccgcuacaaga

SEQ ID NO: 582491 - RNA, 19 nt, Homo sapiens
  misc_RNA (1)...(19): siRNA sense strand
acaaggaggauguguauga

SEQ ID NO: 582492 - RNA, 19 nt, Homo sapiens
  misc_RNA (1)...(19): siRNA sense strand
gggagaaguuugcgacucu

SEQ ID NO: 582493 - RNA, 19 nt, Homo sapiens
  misc_RNA (1)...(19): siRNA sense strand
uaugagaaccugcacacua

SEQ ID NO: 582494 - RNA, 19 nt, Homo sapiens
  misc_RNA (1)...(19): siRNA sense strand
gcuccgaucccacuaguga

SEQ ID NO: 582495 - RNA, 19 nt, Homo sapiens
  misc_RNA (1)...(19): siRNA sense strand
gaucaggugacccauauuc

SEQ ID NO: 582496 - RNA, 19 nt, Homo sapiens
  misc_RNA (1)...(19): siRNA sense strand
cuacaucaaugccaacuac

SEQ ID NO: 582497 - RNA, 19 nt, Homo sapiens
  misc_RNA (1)...(19): siRNA sense strand
auacaaacuccguaccuua

SEQ ID NO: 582498 - RNA, 19 nt, Homo sapiens
  misc_RNA (1)...(19): siRNA sense strand
ggaacaaaugcgucccaua

SEQ ID NO: 582499 - RNA, 19 nt, Homo sapiens
  misc_RNA (1)...(19): siRNA sense strand
ccaacuacaucaagaacca

SEQ ID NO: 582500 - RNA, 19 nt, Homo sapiens
  misc_RNA (1)...(19): siRNA sense strand
acaaaugcgucccauacug

SEQ ID NO: 582501 - RNA, 19 nt, Homo sapiens
  misc_RNA (1)...(19): siRNA sense strand
gagcaugacacaaccgaau

SEQ ID NO: 582502 - RNA, 19 nt, Homo sapiens
  misc_RNA (1)...(19): siRNA sense strand
ucaaguacccgcugaacug

SEQ ID NO: 582503 - RNA, 19 nt, Homo sapiens
  misc_RNA (1)...(19): siRNA sense strand
ggccuggacugugacauug

SEQ ID NO: 582504 - RNA, 19 nt, Homo sapiens
  misc_RNA (1)...(19): siRNA sense strand
agaaaggccggaacaaaug

SEQ ID NO: 582505 - RNA, 19 nt, Homo sapiens
  misc_RNA (1)...(19): siRNA sense strand
gcuaggcccugaugagaac

SEQ ID NO: 582506 - RNA, 19 nt, Homo sapiens
  misc_RNA (1)...(19): siRNA sense strand
cagagcugguggaguacua

SEQ ID NO: 582507 - RNA, 19 nt, Homo sapiens
  misc_RNA (1)...(19): siRNA sense strand
gcaagaaccagggugacuu

SEQ ID NO: 582508 - RNA, 19 nt, Homo sapiens
  misc_RNA (1)...(19): siRNA sense strand
ggaggaguuugagaguuug

SEQ ID NO: 582509 - RNA, 19 nt, Homo sapiens
  misc_RNA (1)...(19): siRNA sense strand
ggagaacagccgugucauc

SEQ ID NO: 582510 - RNA, 19 nt, Homo sapiens
  misc_RNA (1)...(19): siRNA sense strand
aggaggauguguaugagaa

SEQ ID NO: 582511 - RNA, 19 nt, Homo sapiens
  misc_RNA (1)...(19): siRNA sense strand
gacauugacauccagaaga

SEQ ID NO: 582512 - RNA, 19 nt, Homo sapiens
  misc_RNA (1)...(19): siRNA sense strand
ucauugaaaccacuaagaa

SEQ ID NO: 582513 - RNA, 19 nt, Homo sapiens
  misc_RNA (1)...(19): siRNA sense strand
ggccaucgcccaguucauu

SEQ ID NO: 582514 - RNA, 19 nt, Homo sapiens
  misc_RNA (1)...(19): siRNA sense strand
gcaugcagcgugcuuaugg

SEQ ID NO: 582515 - RNA, 19 nt, Homo sapiens
  misc_RNA (1)...(19): siRNA sense strand
gagaaccugcacacuaaga

SEQ ID NO: 582516 - RNA, 19 nt, Homo sapiens
  misc_RNA (1)...(19): siRNA sense strand
agacggaggcgcaguacaa

SEQ ID NO: 582517 - RNA, 19 nt, Homo sapiens
  misc_RNA (1)...(19): siRNA sense strand
gaacucaggggauuucuau

SEQ ID NO: 582518 - RNA, 19 nt, Homo sapiens
  misc_RNA (1)...(19): siRNA sense strand
uaugggcccuacucuguga

SEQ ID NO: 582519 - RNA, 19 nt, Homo sapiens
  misc_RNA (1)...(19): siRNA sense strand
aagaaccgcuacaagaaca

SEQ ID NO: 582520 - RNA, 19 nt, Homo sapiens
  misc_RNA (1)...(19): siRNA sense strand
gcaccaucauugucaucga

SEQ ID NO: 582521 - RNA, 19 nt, Homo sapiens
  misc_RNA (1)...(19): siRNA sense strand
aagcaggaguccgaggaua

SEQ ID NO: 582522 - RNA, 19 nt, Homo sapiens
  misc_RNA (1)...(19): siRNA sense strand
gaaccgcuacaagaacauu

SEQ ID NO: 582523 - RNA, 19 nt, Homo sapiens
  misc_RNA (1)...(19): siRNA sense strand
gaaguuugcgacucugaca

SEQ ID NO: 582524 - RNA, 19 nt, Homo sapiens
  misc_RNA (1)...(19): siRNA sense strand
caaggaggauguguaugag

SEQ ID NO: 582525 - RNA, 19 nt, Homo sapiens
  misc_RNA (1)...(19): siRNA sense strand
caagaaccagggugacuuc

SEQ ID NO: 582526 - RNA, 19 nt, Homo sapiens
  misc_RNA (1)...(19): siRNA sense strand
gcaccaucauccaccucaa

SEQ ID NO: 582527 - RNA, 19 nt, Homo sapiens
  misc_RNA (1)...(19): siRNA sense strand
gggccuggacugugacauu

SEQ ID NO: 582528 - RNA, 19 nt, Homo sapiens
  misc_RNA (1)...(19): siRNA sense strand
agcaggaggugaagaacuu

SEQ ID NO: 582529 - RNA, 19 nt, Homo sapiens
  misc_RNA (1)...(19): siRNA sense strand
gcuacacagugggugguuu

SEQ ID NO: 582530 - RNA, 19 nt, Homo sapiens
  misc_RNA (1)...(19): siRNA sense strand
caggagaacagccguguca

SEQ ID NO: 582531 - RNA, 19 nt, Homo sapiens
  misc_RNA (1)...(19): siRNA sense strand
ggacugugacauugacauc

SEQ ID NO: 582532 - RNA, 19 nt, Homo sapiens
  misc_RNA (1)...(19): siRNA sense strand
agaagcaggaggugaagaa

SEQ ID NO: 582533 - RNA, 19 nt, Homo sapiens
  misc_RNA (1)...(19): siRNA sense strand
uucgggagaucuggcauua

SEQ ID NO: 582534 - RNA, 19 nt, Homo sapiens
  misc_RNA (1)...(19): siRNA sense strand
gacaauggagaccugauuc

SEQ ID NO: 582535 - RNA, 19 nt, Homo sapiens
  misc_RNA (1)...(19): siRNA sense strand
gcccugaugagaacgcuaa

SEQ ID NO: 582536 - RNA, 19 nt, Homo sapiens
  misc_RNA (1)...(19): siRNA sense strand
ugaaaccacuaagaagaag

SEQ ID NO: 582537 - RNA, 19 nt, Homo sapiens
  misc_RNA (1)...(19): siRNA sense strand
cggaggcgcaguacaaguu

SEQ ID NO: 582538 - RNA, 19 nt, Homo sapiens
  misc_RNA (1)...(19): siRNA sense strand
caucaaugccaacuacauc

SEQ ID NO: 582539 - RNA, 19 nt, Homo sapiens
  misc_RNA (1)...(19): siRNA sense strand
caagagggaggagaaagug

SEQ ID NO: 582540 - RNA, 19 nt, Homo sapiens
  misc_RNA (1)...(19): siRNA sense strand
gcaguacaaguucaucuac

SEQ ID NO: 582541 - RNA, 19 nt, Homo sapiens
  misc_RNA (1)...(19): siRNA sense strand
gagaaguuugcgacucuga

SEQ ID NO: 582542 - RNA, 19 nt, Homo sapiens
  misc_RNA (1)...(19): siRNA sense strand
aauacaaacuccguaccuu

SEQ ID NO: 582543 - RNA, 19 nt, Homo sapiens
  misc_RNA (1)...(19): siRNA sense strand
gaaaggccggaacaaaugc

SEQ ID NO: 582544 - RNA, 19 nt, Homo sapiens
  misc_RNA (1)...(19): siRNA sense strand
gaaccgaguguuggaacug

SEQ ID NO: 582545 - RNA, 19 nt, Homo sapiens
  misc_RNA (1)...(19): siRNA sense strand
guacgggaacaucaccuau

SEQ ID NO: 582546 - RNA, 19 nt, Homo sapiens
  misc_RNA (1)...(19): siRNA sense strand
cccgagagguggagaaagg

SEQ ID NO: 582547 - RNA, 19 nt, Homo sapiens
  misc_RNA (1)...(19): siRNA sense strand
caagaaccgcuacaagaac

SEQ ID NO: 582548 - RNA, 19 nt, Homo sapiens
  misc_RNA (1)...(19): siRNA sense strand
gaagcaggaguccgaggau

SEQ ID NO: 582549 - RNA, 19 nt, Homo sapiens
  misc_RNA (1)...(19): siRNA sense strand
caaacuccguaccuuacag

SEQ ID NO: 582550 - RNA, 19 nt, Homo sapiens
  misc_RNA (1)...(19): siRNA sense strand
gaauacaaacuccguaccu

SEQ ID NO: 582551 - RNA, 19 nt, Homo sapiens
  misc_RNA (1)...(19): siRNA sense strand
gcaggaguccgaggauaca

SEQ ID NO: 582552 - RNA, 19 nt, Homo sapiens
  misc_RNA (1)...(19): siRNA sense strand
agaacaagagggaggagaa

SEQ ID NO: 582553 - RNA, 19 nt, Homo sapiens
  misc_RNA (1)...(19): siRNA sense strand
ccgcacaggcaccaucauu

SEQ ID NO: 582554 - RNA, 19 nt, Homo sapiens
  misc_RNA (1)...(19): siRNA sense strand
gggcaagaaccgcuacaag

SEQ ID NO: 582555 - RNA, 19 nt, Homo sapiens
  misc_RNA (1)...(19): siRNA sense strand
caucaagaaccagcugcua

SEQ ID NO: 582556 - RNA, 19 nt, Homo sapiens
  misc_RNA (1)...(19): siRNA sense strand
caucauccaccucaaguac

SEQ ID NO: 582557 - RNA, 19 nt, Homo sapiens
  misc_RNA (1)...(19): siRNA sense strand
uugaaaccacuaagaagaa

SEQ ID NO: 582558 - RNA, 19 nt, Homo sapiens
  misc_RNA (1)...(19): siRNA sense strand
gggcaugcagcgugcuuau

SEQ ID NO: 582559 - RNA, 19 nt, Homo sapiens
  misc_RNA (1)...(19): siRNA sense strand
ccagagaacaagggcaaga

SEQ ID NO: 582560 - RNA, 19 nt, Homo sapiens
  misc_RNA (1)...(19): siRNA sense strand
gaaccugcacacuaagaac

SEQ ID NO: 582561 - RNA, 19 nt, Homo sapiens
  misc_RNA (1)...(19): siRNA sense strand
gaucaaccagcggcaggaa

SEQ ID NO: 582562 - RNA, 19 nt, Homo sapiens
  misc_RNA (1)...(19): siRNA sense strand
aaugccaacuacaucaaga

SEQ ID NO: 582563 - RNA, 19 nt, Homo sapiens
  misc_RNA (1)...(19): siRNA sense strand
cuacacagugggugguuug

SEQ ID NO: 582564 - RNA, 19 nt, Homo sapiens
  misc_RNA (1)...(19): siRNA sense strand
cuuaugggcccuacucugu

SEQ ID NO: 582565 - RNA, 19 nt, Homo sapiens
  misc_RNA (1)...(19): siRNA sense strand
gaggcgcaguacaaguuca

SEQ ID NO: 582566 - RNA, 19 nt, Homo sapiens
  misc_RNA (1)...(19): siRNA sense strand
gcaugacacaaccgaauac

SEQ ID NO: 582567 - RNA, 19 nt, Homo sapiens
  misc_RNA (1)...(19): siRNA sense strand
cagagaacaagggcaagaa

SEQ ID NO: 582568 - RNA, 19 nt, Homo sapiens
  misc_RNA (1)...(19): siRNA sense strand
acauugacauccagaagac

SEQ ID NO: 582569 - RNA, 19 nt, Homo sapiens
  misc_RNA (1)...(19): siRNA sense strand
ucaaugccaacuacaucaa

SEQ ID NO: 582570 - RNA, 19 nt, Homo sapiens
  misc_RNA (1)...(19): siRNA sense strand
acaagagggaggagaaagu

SEQ ID NO: 582571 - RNA, 19 nt, Homo sapiens
  misc_RNA (1)...(19): siRNA sense strand
ggaggcgcaguacaaguuc

SEQ ID NO: 582572 - RNA, 19 nt, Homo sapiens
  misc_RNA (1)...(19): siRNA sense strand
cgggagaucuggcauuacc

SEQ ID NO: 582573 - RNA, 19 nt, Homo sapiens
  misc_RNA (1)...(19): siRNA sense strand
uggaggccacggucaauga

SEQ ID NO: 582574 - RNA, 19 nt, Homo sapiens
  misc_RNA (1)...(19): siRNA sense strand
gaaagagcaugaguuguua

SEQ ID NO: 582575 - RNA, 19 nt, Homo sapiens
  misc_RNA (1)...(19): siRNA sense strand
gaauugcccuuaagacuuu

SEQ ID NO: 582576 - RNA, 19 nt, Homo sapiens
  misc_RNA (1)...(19): siRNA sense strand
uuacaagucucucugauua

SEQ ID NO: 582577 - RNA, 19 nt, Homo sapiens
  misc_RNA (1)...(19): siRNA sense strand
gcagguggcuacagugaua

SEQ ID NO: 582578 - RNA, 19 nt, Homo sapiens
  misc_RNA (1)...(19): siRNA sense strand
gaucacaguuggaguugua

SEQ ID NO: 582579 - RNA, 19 nt, Homo sapiens
  misc_RNA (1)...(19): siRNA sense strand
gaagaaacagagcagauua

SEQ ID NO: 582580 - RNA, 19 nt, Homo sapiens
  misc_RNA (1)...(19): siRNA sense strand
agaaauaucuuaccugaug

SEQ ID NO: 582581 - RNA, 19 nt, Homo sapiens
  misc_RNA (1)...(19): siRNA sense strand
gagaagaccucccgaaucu

SEQ ID NO: 582582 - RNA, 19 nt, Homo sapiens
  misc_RNA (1)...(19): siRNA sense strand
gaacauauugcuaccagua

SEQ ID NO: 582583 - RNA, 19 nt, Homo sapiens
  misc_RNA (1)...(19): siRNA sense strand
aagcagagcuggcagaauu

SEQ ID NO: 582584 - RNA, 19 nt, Homo sapiens
  misc_RNA (1)...(19): siRNA sense strand
cagaggauguuguaucuuu

SEQ ID NO: 582585 - RNA, 19 nt, Homo sapiens
  misc_RNA (1)...(19): siRNA sense strand
ggacuauguugauaaaguu

SEQ ID NO: 582586 - RNA, 19 nt, Homo sapiens
  misc_RNA (1)...(19): siRNA sense strand
gaaaagaaaugccagaaga

SEQ ID NO: 582587 - RNA, 19 nt, Homo sapiens
  misc_RNA (1)...(19): siRNA sense strand
gcucuuggaugaagccaua

SEQ ID NO: 582588 - RNA, 19 nt, Homo sapiens
  misc_RNA (1)...(19): siRNA sense strand
aaacaacaguggagauauu

SEQ ID NO: 582589 - RNA, 19 nt, Homo sapiens
  misc_RNA (1)...(19): siRNA sense strand
gacaagacaugccuucaga

SEQ ID NO: 582590 - RNA, 19 nt, Homo sapiens
  misc_RNA (1)...(19): siRNA sense strand
aaacagagcagauuaacaa

SEQ ID NO: 582591 - RNA, 19 nt, Homo sapiens
  misc_RNA (1)...(19): siRNA sense strand
gaaggaaaguggcagaucu

SEQ ID NO: 582592 - RNA, 19 nt, Homo sapiens
  misc_RNA (1)...(19): siRNA sense strand
uaaaguggaugacaaaugg

SEQ ID NO: 582593 - RNA, 19 nt, Homo sapiens
  misc_RNA (1)...(19): siRNA sense strand
ggaaggauauuuugaaaga

SEQ ID NO: 582594 - RNA, 19 nt, Homo sapiens
  misc_RNA (1)...(19): siRNA sense strand
guuguuaugugcuuaguaa

SEQ ID NO: 582595 - RNA, 19 nt, Homo sapiens
  misc_RNA (1)...(19): siRNA sense strand
uaucuuaccugaugaagga

SEQ ID NO: 582596 - RNA, 19 nt, Homo sapiens
  misc_RNA (1)...(19): siRNA sense strand
guguaaauguggaacguua

SEQ ID NO: 582597 - RNA, 19 nt, Homo sapiens
  misc_RNA (1)...(19): siRNA sense strand
acacagaaauugucucuca

SEQ ID NO: 582598 - RNA, 19 nt, Homo sapiens
  misc_RNA (1)...(19): siRNA sense strand
caaaggaacucaccagacu

SEQ ID NO: 582599 - RNA, 19 nt, Homo sapiens
  misc_RNA (1)...(19): siRNA sense strand
gcagaucucuacgaacuug

SEQ ID NO: 582600 - RNA, 19 nt, Homo sapiens
  misc_RNA (1)...(19): siRNA sense strand
gaccagcaguacuugauuu

SEQ ID NO: 582601 - RNA, 19 nt, Homo sapiens
  misc_RNA (1)...(19): siRNA sense strand
gagcaugaguuguuaugug

SEQ ID NO: 582602 - RNA, 19 nt, Homo sapiens
  misc_RNA (1)...(19): siRNA sense strand
gaaauaucuuaccugauga

SEQ ID NO: 582603 - RNA, 19 nt, Homo sapiens
  misc_RNA (1)...(19): siRNA sense strand
aaauaccaguugacacuua

SEQ ID NO: 582604 - RNA, 19 nt, Homo sapiens
  misc_RNA (1)...(19): siRNA sense strand
ggacauagccgagauagag

SEQ ID NO: 582605 - RNA, 19 nt, Homo sapiens
  misc_RNA (1)...(19): siRNA sense strand
gaagagaugccuggacaaa

SEQ ID NO: 582606 - RNA, 19 nt, Homo sapiens
  misc_RNA (1)...(19): siRNA sense strand
gaaaguggcagaucucuac

SEQ ID NO: 582607 - RNA, 19 nt, Homo sapiens
  misc_RNA (1)...(19): siRNA sense strand
ugauuaaucuugccaugaa

SEQ ID NO: 582608 - RNA, 19 nt, Homo sapiens
  misc_RNA (1)...(19): siRNA sense strand
gcucaacuuugcagaaaug

SEQ ID NO: 582609 - RNA, 19 nt, Homo sapiens
  misc_RNA (1)...(19): siRNA sense strand
gccaacagaugaagaaaca

SEQ ID NO: 582610 - RNA, 19 nt, Homo sapiens
  misc_RNA (1)...(19): siRNA sense strand
agacaagaacugagaauuu

SEQ ID NO: 582611 - RNA, 19 nt, Homo sapiens
  misc_RNA (1)...(19): siRNA sense strand
ucuacgaacuuguacagua

SEQ ID NO: 582612 - RNA, 19 nt, Homo sapiens
  misc_RNA (1)...(19): siRNA sense strand
cagagcagauuaacaaaca

SEQ ID NO: 582613 - RNA, 19 nt, Homo sapiens
  misc_RNA (1)...(19): siRNA sense strand
gugaagaacauaaucauug

SEQ ID NO: 582614 - RNA, 19 nt, Homo sapiens
  misc_RNA (1)...(19): siRNA sense strand
agaaacaacuggugacauc

SEQ ID NO: 582615 - RNA, 19 nt, Homo sapiens
  misc_RNA (1)...(19): siRNA sense strand
agaaagagcaugaguuguu

SEQ ID NO: 582616 - RNA, 19 nt, Homo sapiens
  misc_RNA (1)...(19): siRNA sense strand
gacaagaacugagaauuuu

SEQ ID NO: 582617 - RNA, 19 nt, Homo sapiens
  misc_RNA (1)...(19): siRNA sense strand
caccaaagaguuacuauga

SEQ ID NO: 582618 - RNA, 19 nt, Homo sapiens
  misc_RNA (1)...(19): siRNA sense strand
guagugcaguuucaaagga

SEQ ID NO: 582619 - RNA, 19 nt, Homo sapiens
  misc_RNA (1)...(19): siRNA sense strand
cuacgaacuuguacaguau

SEQ ID NO: 582620 - RNA, 19 nt, Homo sapiens
  misc_RNA (1)...(19): siRNA sense strand
gaucagggccgagcuguga

SEQ ID NO: 582621 - RNA, 19 nt, Homo sapiens
  misc_RNA (1)...(19): siRNA sense strand
agaagacccugauccagaa

SEQ ID NO: 582622 - RNA, 19 nt, Homo sapiens
  misc_RNA (1)...(19): siRNA sense strand
ccagaaagagcaugaguug

SEQ ID NO: 582623 - RNA, 19 nt, Homo sapiens
  misc_RNA (1)...(19): siRNA sense strand
acaguaugcuggaaacauu

SEQ ID NO: 582624 - RNA, 19 nt, Homo sapiens
  misc_RNA (1)...(19): siRNA sense strand
gaacuccggacuucuaugu

SEQ ID NO: 582625 - RNA, 19 nt, Homo sapiens
  misc_RNA (1)...(19): siRNA sense strand
uaaaccagcuuauccaaaa

SEQ ID NO: 582626 - RNA, 19 nt, Homo sapiens
  misc_RNA (1)...(19): siRNA sense strand
gaacguuacaaacagauug

SEQ ID NO: 582627 - RNA, 19 nt, Homo sapiens
  misc_RNA (1)...(19): siRNA sense strand
ugacagaugaguuugcuaa

SEQ ID NO: 582628 - RNA, 19 nt, Homo sapiens
  misc_RNA (1)...(19): siRNA sense strand
ccaaagaguuacuaugaac

SEQ ID NO: 582629 - RNA, 19 nt, Homo sapiens
  misc_RNA (1)...(19): siRNA sense strand
acuccggacuucuauguua

SEQ ID NO: 582630 - RNA, 19 nt, Homo sapiens
  misc_RNA (1)...(19): siRNA sense strand
agacaugccuucagaggau

SEQ ID NO: 582631 - RNA, 19 nt, Homo sapiens
  misc_RNA (1)...(19): siRNA sense strand
auaacacacuggagcauuu

SEQ ID NO: 582632 - RNA, 19 nt, Homo sapiens
  misc_RNA (1)...(19): siRNA sense strand
gacagucgcauaugaauuc

SEQ ID NO: 582633 - RNA, 19 nt, Homo sapiens
  misc_RNA (1)...(19): siRNA sense strand
cugaugaacugcacuacuu

SEQ ID NO: 582634 - RNA, 19 nt, Homo sapiens
  misc_RNA (1)...(19): siRNA sense strand
cagaugaguuugcuaaagg

SEQ ID NO: 582635 - RNA, 19 nt, Homo sapiens
  misc_RNA (1)...(19): siRNA sense strand
cagaaauugucucucaaga

SEQ ID NO: 582636 - RNA, 19 nt, Homo sapiens
  misc_RNA (1)...(19): siRNA sense strand
aaacaugcuucuaauaugc

SEQ ID NO: 582637 - RNA, 19 nt, Homo sapiens
  misc_RNA (1)...(19): siRNA sense strand
agaggauguuguaucuuua

SEQ ID NO: 582638 - RNA, 19 nt, Homo sapiens
  misc_RNA (1)...(19): siRNA sense strand
gaauguaaaugugaagaac

SEQ ID NO: 582639 - RNA, 19 nt, Homo sapiens
  misc_RNA (1)...(19): siRNA sense strand
gaauuucaccuccagacuu

SEQ ID NO: 582640 - RNA, 19 nt, Homo sapiens
  misc_RNA (1)...(19): siRNA sense strand
guuggaagguguaaaugug

SEQ ID NO: 582641 - RNA, 19 nt, Homo sapiens
  misc_RNA (1)...(19): siRNA sense strand
gaaagacaagaacugagaa

SEQ ID NO: 582642 - RNA, 19 nt, Homo sapiens
  misc_RNA (1)...(19): siRNA sense strand
gaaggagagccaacagaug

SEQ ID NO: 582643 - RNA, 19 nt, Homo sapiens
  misc_RNA (1)...(19): siRNA sense strand
gaauaucucauggagugua

SEQ ID NO: 582644 - RNA, 19 nt, Homo sapiens
  misc_RNA (1)...(19): siRNA sense strand
guuaugugcuuaguaaugu

SEQ ID NO: 582645 - RNA, 19 nt, Homo sapiens
  misc_RNA (1)...(19): siRNA sense strand
gaaacaacaguggagauau

SEQ ID NO: 582646 - RNA, 19 nt, Homo sapiens
  misc_RNA (1)...(19): siRNA sense strand
gagcagauuaacaaacauu

SEQ ID NO: 582647 - RNA, 19 nt, Homo sapiens
  misc_RNA (1)...(19): siRNA sense strand
gaaaagcucuuggaugaag

SEQ ID NO: 582648 - RNA, 19 nt, Homo sapiens
  misc_RNA (1)...(19): siRNA sense strand
gauuaaucuugccaugaaa

SEQ ID NO: 582649 - RNA, 19 nt, Homo sapiens
  misc_RNA (1)...(19): siRNA sense strand
ggugaacuccggacuucua

SEQ ID NO: 582650 - RNA, 19 nt, Homo sapiens
  misc_RNA (1)...(19): siRNA sense strand
caugaaauguuacccugau

SEQ ID NO: 582651 - RNA, 19 nt, Homo sapiens
  misc_RNA (1)...(19): siRNA sense strand
aauuucaccuccagacuuu

SEQ ID NO: 582652 - RNA, 19 nt, Homo sapiens
  misc_RNA (1)...(19): siRNA sense strand
ggaaaguggcagaucucua

SEQ ID NO: 582653 - RNA, 19 nt, Homo sapiens
  misc_RNA (1)...(19): siRNA sense strand
gaaacagagcagauuaaca

SEQ ID NO: 582654 - RNA, 19 nt, Homo sapiens
  misc_RNA (1)...(19): siRNA sense strand
ucagccagaucaaccugua

SEQ ID NO: 582655 - RNA, 19 nt, Homo sapiens
  misc_RNA (1)...(19): siRNA sense strand
acaagucucucugauuaau

SEQ ID NO: 582656 - RNA, 19 nt, Homo sapiens
  misc_RNA (1)...(19): siRNA sense strand
cauauuggagcaaguugua

SEQ ID NO: 582657 - RNA, 19 nt, Homo sapiens
  misc_RNA (1)...(19): siRNA sense strand
aggaaaagcucuuggauga

SEQ ID NO: 582658 - RNA, 19 nt, Homo sapiens
  misc_RNA (1)...(19): siRNA sense strand
ggccauuucugaugaacug

SEQ ID NO: 582659 - RNA, 19 nt, Homo sapiens
  misc_RNA (1)...(19): siRNA sense strand
ugaauccagugaagaaaca

SEQ ID NO: 582660 - RNA, 19 nt, Homo sapiens
  misc_RNA (1)...(19): siRNA sense strand
aaagaaaugccagaagauu

SEQ ID NO: 582661 - RNA, 19 nt, Homo sapiens
  misc_RNA (1)...(19): siRNA sense strand
agaaacaacaguggagaua

SEQ ID NO: 582662 - RNA, 19 nt, Homo sapiens
  misc_RNA (1)...(19): siRNA sense strand
gugcugaguuacaccagaa

SEQ ID NO: 582663 - RNA, 19 nt, Homo sapiens
  misc_RNA (1)...(19): siRNA sense strand
cgagaaagacaagaacuga

SEQ ID NO: 582664 - RNA, 19 nt, Homo sapiens
  misc_RNA (1)...(19): siRNA sense strand
aaggagagccaacagauga

SEQ ID NO: 582665 - RNA, 19 nt, Homo sapiens
  misc_RNA (1)...(19): siRNA sense strand
cagaucaaccuguagaaga

SEQ ID NO: 582666 - RNA, 19 nt, Homo sapiens
  misc_RNA (1)...(19): siRNA sense strand
ugaauuugguauccacguu

SEQ ID NO: 582667 - RNA, 19 nt, Homo sapiens
  misc_RNA (1)...(19): siRNA sense strand
gaacucaccagacuuuuga

SEQ ID NO: 582668 - RNA, 19 nt, Homo sapiens
  misc_RNA (1)...(19): siRNA sense strand
gggaugcuuuggcucaaga

SEQ ID NO: 582669 - RNA, 19 nt, Homo sapiens
  misc_RNA (1)...(19): siRNA sense strand
ucagugauuccauggauuu

SEQ ID NO: 582670 - RNA, 19 nt, Homo sapiens
  misc_RNA (1)...(19): siRNA sense strand
gaagaaacaacuggugaca

SEQ ID NO: 582671 - RNA, 19 nt, Homo sapiens
  misc_RNA (1)...(19): siRNA sense strand
ugaagaacauaaucauugc

SEQ ID NO: 582672 - RNA, 19 nt, Homo sapiens
  misc_RNA (1)...(19): siRNA sense strand
gaacacagcacgaaaacau

SEQ ID NO: 582673 - RNA, 19 nt, Homo sapiens
  misc_RNA (1)...(19): siRNA sense strand
cagcggauauuaaacuuuu

SEQ ID NO: 582674 - RNA, 19 nt, Homo sapiens
  misc_RNA (1)...(19): siRNA sense strand
gacgagaucuugucugaug

SEQ ID NO: 582675 - RNA, 19 nt, Homo sapiens
  misc_RNA (1)...(19): siRNA sense strand
gauuggagguggacacaaa

SEQ ID NO: 582676 - RNA, 19 nt, Homo sapiens
  misc_RNA (1)...(19): siRNA sense strand
caacagcgcccacuacuuc

SEQ ID NO: 582677 - RNA, 19 nt, Homo sapiens
  misc_RNA (1)...(19): siRNA sense strand
gcaucuagacuuugguuua

SEQ ID NO: 582678 - RNA, 19 nt, Homo sapiens
  misc_RNA (1)...(19): siRNA sense strand
cuacgacacucuccgguuu

SEQ ID NO: 582679 - RNA, 19 nt, Homo sapiens
  misc_RNA (1)...(19): siRNA sense strand
gaagaugaagacuuugaaa

SEQ ID NO: 582680 - RNA, 19 nt, Homo sapiens
  misc_RNA (1)...(19): siRNA sense strand
gagcugaggucaccaacag

SEQ ID NO: 582681 - RNA, 19 nt, Homo sapiens
  misc_RNA (1)...(19): siRNA sense strand
cucagaagaugaagacuuu

SEQ ID NO: 582682 - RNA, 19 nt, Homo sapiens
  misc_RNA (1)...(19): siRNA sense strand
gaggugcccugcccauguu

SEQ ID NO: 582683 - RNA, 19 nt, Homo sapiens
  misc_RNA (1)...(19): siRNA sense strand
uugcugaguuugaagauuu

SEQ ID NO: 582684 - RNA, 19 nt, Homo sapiens
  misc_RNA (1)...(19): siRNA sense strand
ggacaguuacuacuccauu

SEQ ID NO: 582685 - RNA, 19 nt, Homo sapiens
  misc_RNA (1)...(19): siRNA sense strand
uagagcgacuggaaagauu

SEQ ID NO: 582686 - RNA, 19 nt, Homo sapiens
  misc_RNA (1)...(19): siRNA sense strand
cagcuacucugaccuacga

SEQ ID NO: 582687 - RNA, 19 nt, Homo sapiens
  misc_RNA (1)...(19): siRNA sense strand
gaggaaaucagaagguugu

SEQ ID NO: 582688 - RNA, 19 nt, Homo sapiens
  misc_RNA (1)...(19): siRNA sense strand
cuacuccauucaccagaua

SEQ ID NO: 582689 - RNA, 19 nt, Homo sapiens
  misc_RNA (1)...(19): siRNA sense strand
gaugaagacuuugaaaucc

SEQ ID NO: 582690 - RNA, 19 nt, Homo sapiens
  misc_RNA (1)...(19): siRNA sense strand
gacaguuacuacuccauuc

SEQ ID NO: 582691 - RNA, 19 nt, Homo sapiens
  misc_RNA (1)...(19): siRNA sense strand
aggacgagaucuugucuga

SEQ ID NO: 582692 - RNA, 19 nt, Homo sapiens
  misc_RNA (1)...(19): siRNA sense strand
gcaccuaggccgagauugg

SEQ ID NO: 582693 - RNA, 19 nt, Homo sapiens
  misc_RNA (1)...(19): siRNA sense strand
ccucagagcccguuuggau

SEQ ID NO: 582694 - RNA, 19 nt, Homo sapiens
  misc_RNA (1)...(19): siRNA sense strand
ggagguggacacaaaggaa

SEQ ID NO: 582695 - RNA, 19 nt, Homo sapiens
  misc_RNA (1)...(19): siRNA sense strand
agacuuugguuuacauaca

SEQ ID NO: 582696 - RNA, 19 nt, Homo sapiens
  misc_RNA (1)...(19): siRNA sense strand
ggaaggacaguuacuacuc

SEQ ID NO: 582697 - RNA, 19 nt, Homo sapiens
  misc_RNA (1)...(19): siRNA sense strand
cagaagaugaagacuuuga

SEQ ID NO: 582698 - RNA, 19 nt, Homo sapiens
  misc_RNA (1)...(19): siRNA sense strand
caucuagacuuugguuuac

SEQ ID NO: 582699 - RNA, 19 nt, Homo sapiens
  misc_RNA (1)...(19): siRNA sense strand
ucuguaagacugaagauga

SEQ ID NO: 582700 - RNA, 19 nt, Homo sapiens
  misc_RNA (1)...(19): siRNA sense strand
gauguagagcgacuggaaa

SEQ ID NO: 582701 - RNA, 19 nt, Homo sapiens
  misc_RNA (1)...(19): siRNA sense strand
uuugaaauccugucccuuu

SEQ ID NO: 582702 - RNA, 19 nt, Homo sapiens
  misc_RNA (1)...(19): siRNA sense strand
agaugaagacuuugaaauc

SEQ ID NO: 582703 - RNA, 19 nt, Homo sapiens
  misc_RNA (1)...(19): siRNA sense strand
guagagcgacuggaaagau

SEQ ID NO: 582704 - RNA, 19 nt, Homo sapiens
  misc_RNA (1)...(19): siRNA sense strand
ugaaauccugucccuuuga

SEQ ID NO: 582705 - RNA, 19 nt, Homo sapiens
  misc_RNA (1)...(19): siRNA sense strand
uggaggaaaucagaagguu

SEQ ID NO: 582706 - RNA, 19 nt, Homo sapiens
  misc_RNA (1)...(19): siRNA sense strand
uugaaauccugucccuuug

SEQ ID NO: 582707 - RNA, 19 nt, Homo sapiens
  misc_RNA (1)...(19): siRNA sense strand
gcagccagacagcuacuuc

SEQ ID NO: 582708 - RNA, 19 nt, Homo sapiens
  misc_RNA (1)...(19): siRNA sense strand
gcugcgguguggacagaug

SEQ ID NO: 582709 - RNA, 19 nt, Homo sapiens
  misc_RNA (1)...(19): siRNA sense strand
ucgacaggaaggacaguua

SEQ ID NO: 582710 - RNA, 19 nt, Homo sapiens
  misc_RNA (1)...(19): siRNA sense strand
ucuccgguuugcugaguuu

SEQ ID NO: 582711 - RNA, 19 nt, Homo sapiens
  misc_RNA (1)...(19): siRNA sense strand
acaggaaggacaguuacua

SEQ ID NO: 582712 - RNA, 19 nt, Homo sapiens
  misc_RNA (1)...(19): siRNA sense strand
gaaaaggacgagaucuugu

SEQ ID NO: 582713 - RNA, 19 nt, Homo sapiens
  misc_RNA (1)...(19): siRNA sense strand
ugauguagagcgacuggaa

SEQ ID NO: 582714 - RNA, 19 nt, Homo sapiens
  misc_RNA (1)...(19): siRNA sense strand
agaggcagccagacagcua

SEQ ID NO: 582715 - RNA, 19 nt, Homo sapiens
  misc_RNA (1)...(19): siRNA sense strand
ccgguuugcugaguuugaa

SEQ ID NO: 582716 - RNA, 19 nt, Homo sapiens
  misc_RNA (1)...(19): siRNA sense strand
gacuuugguuuacauacag

SEQ ID NO: 582717 - RNA, 19 nt, Homo sapiens
  misc_RNA (1)...(19): siRNA sense strand
gauacuggguagaaaauac

SEQ ID NO: 582718 - RNA, 19 nt, Homo sapiens
  misc_RNA (1)...(19): siRNA sense strand
acgcauucaucgacaggaa

SEQ ID NO: 582719 - RNA, 19 nt, Homo sapiens
  misc_RNA (1)...(19): siRNA sense strand
caccagauagcgcaaaugg

SEQ ID NO: 582720 - RNA, 19 nt, Homo sapiens
  misc_RNA (1)...(19): siRNA sense strand
agaagaugaagacuuugaa

SEQ ID NO: 582721 - RNA, 19 nt, Homo sapiens
  misc_RNA (1)...(19): siRNA sense strand
guaagacugaagaugacuu

SEQ ID NO: 582722 - RNA, 19 nt, Homo sapiens
  misc_RNA (1)...(19): siRNA sense strand
ucuagacuuugguuuacau

SEQ ID NO: 582723 - RNA, 19 nt, Homo sapiens
  misc_RNA (1)...(19): siRNA sense strand
cgacucagaagaugaagac

SEQ ID NO: 582724 - RNA, 19 nt, Homo sapiens
  misc_RNA (1)...(19): siRNA sense strand
ucagagcccguuuggauac

SEQ ID NO: 582725 - RNA, 19 nt, Homo sapiens
  misc_RNA (1)...(19): siRNA sense strand
ccaacagcgcccacuacuu

SEQ ID NO: 582726 - RNA, 19 nt, Homo sapiens
  misc_RNA (1)...(19): siRNA sense strand
gacgagaucuugucugaug

SEQ ID NO: 582727 - RNA, 19 nt, Homo sapiens
  misc_RNA (1)...(19): siRNA sense strand
gauuggagguggacacaaa

SEQ ID NO: 582728 - RNA, 19 nt, Homo sapiens
  misc_RNA (1)...(19): siRNA sense strand
caacagcgcccacuacuuc

SEQ ID NO: 582729 - RNA, 19 nt, Homo sapiens
  misc_RNA (1)...(19): siRNA sense strand
gcaucuagacuuugguuua

SEQ ID NO: 582730 - RNA, 19 nt, Homo sapiens
  misc_RNA (1)...(19): siRNA sense strand
cuacgacacucuccgguuu

SEQ ID NO: 582731 - RNA, 19 nt, Homo sapiens
  misc_RNA (1)...(19): siRNA sense strand
gagcugaggucaccaacag

SEQ ID NO: 582732 - RNA, 19 nt, Homo sapiens
  misc_RNA (1)...(19): siRNA sense strand
gaggugcccugcccauguu

SEQ ID NO: 582733 - RNA, 19 nt, Homo sapiens
  misc_RNA (1)...(19): siRNA sense strand
uugcugaguuugaagauuu

SEQ ID NO: 582734 - RNA, 19 nt, Homo sapiens
  misc_RNA (1)...(19): siRNA sense strand
ggacaguuacuacuccauu

SEQ ID NO: 582735 - RNA, 19 nt, Homo sapiens
  misc_RNA (1)...(19): siRNA sense strand
cagcuacucugaccuacga

SEQ ID NO: 582736 - RNA, 19 nt, Homo sapiens
  misc_RNA (1)...(19): siRNA sense strand
gaggaaaucagaagguugu

SEQ ID NO: 582737 - RNA, 19 nt, Homo sapiens
  misc_RNA (1)...(19): siRNA sense strand
cuacuccauucaccagaua

SEQ ID NO: 582738 - RNA, 19 nt, Homo sapiens
  misc_RNA (1)...(19): siRNA sense strand
gacaguuacuacuccauuc

SEQ ID NO: 582739 - RNA, 19 nt, Homo sapiens
  misc_RNA (1)...(19): siRNA sense strand
aggacgagaucuugucuga

SEQ ID NO: 582740 - RNA, 19 nt, Homo sapiens
  misc_RNA (1)...(19): siRNA sense strand
gcaccuaggccgagauugg

SEQ ID NO: 582741 - RNA, 19 nt, Homo sapiens
  misc_RNA (1)...(19): siRNA sense strand
ccucagagcccguuuggau

SEQ ID NO: 582742 - RNA, 19 nt, Homo sapiens
  misc_RNA (1)...(19): siRNA sense strand
ggagguggacacaaaggaa

SEQ ID NO: 582743 - RNA, 19 nt, Homo sapiens
  misc_RNA (1)...(19): siRNA sense strand
agacuuugguuuacauaca

SEQ ID NO: 582744 - RNA, 19 nt, Homo sapiens
  misc_RNA (1)...(19): siRNA sense strand
ggaaggacaguuacuacuc

SEQ ID NO: 582745 - RNA, 19 nt, Homo sapiens
  misc_RNA (1)...(19): siRNA sense strand
caucuagacuuugguuuac

SEQ ID NO: 582746 - RNA, 19 nt, Homo sapiens
  misc_RNA (1)...(19): siRNA sense strand
ucuguaagacugaagauga

SEQ ID NO: 582747 - RNA, 19 nt, Homo sapiens
  misc_RNA (1)...(19): siRNA sense strand
uggaggaaaucagaagguu

SEQ ID NO: 582748 - RNA, 19 nt, Homo sapiens
  misc_RNA (1)...(19): siRNA sense strand
gcagccagacagcuacuuc

SEQ ID NO: 582749 - RNA, 19 nt, Homo sapiens
  misc_RNA (1)...(19): siRNA sense strand
gcugcgguguggacagaug

SEQ ID NO: 582750 - RNA, 19 nt, Homo sapiens
  misc_RNA (1)...(19): siRNA sense strand
ucgacaggaaggacaguua

SEQ ID NO: 582751 - RNA, 19 nt, Homo sapiens
  misc_RNA (1)...(19): siRNA sense strand
ucuccgguuugcugaguuu

SEQ ID NO: 582752 - RNA, 19 nt, Homo sapiens
  misc_RNA (1)...(19): siRNA sense strand
acaggaaggacaguuacua

SEQ ID NO: 582753 - RNA, 19 nt, Homo sapiens
  misc_RNA (1)...(19): siRNA sense strand
gaaaaggacgagaucuugu

SEQ ID NO: 582754 - RNA, 19 nt, Homo sapiens
  misc_RNA (1)...(19): siRNA sense strand
ccgguuugcugaguuugaa

SEQ ID NO: 582755 - RNA, 19 nt, Homo sapiens
  misc_RNA (1)...(19): siRNA sense strand
agaggcagccagacagcua

SEQ ID NO: 582756 - RNA, 19 nt, Homo sapiens
  misc_RNA (1)...(19): siRNA sense strand
gauacuggguagaaaauac

SEQ ID NO: 582757 - RNA, 19 nt, Homo sapiens
  misc_RNA (1)...(19): siRNA sense strand
acgcauucaucgacaggaa

SEQ ID NO: 582758 - RNA, 19 nt, Homo sapiens
  misc_RNA (1)...(19): siRNA sense strand
gacuuugguuuacauacag

SEQ ID NO: 582759 - RNA, 19 nt, Homo sapiens
  misc_RNA (1)...(19): siRNA sense strand
caccagauagcgcaaaugg

SEQ ID NO: 582760 - RNA, 19 nt, Homo sapiens
  misc_RNA (1)...(19): siRNA sense strand
guaagacugaagaugacuu

SEQ ID NO: 582761 - RNA, 19 nt, Homo sapiens
  misc_RNA (1)...(19): siRNA sense strand
ucagagcccguuuggauac

SEQ ID NO: 582762 - RNA, 19 nt, Homo sapiens
  misc_RNA (1)...(19): siRNA sense strand
ccaacagcgcccacuacuu

SEQ ID NO: 582763 - RNA, 19 nt, Homo sapiens
  misc_RNA (1)...(19): siRNA sense strand
ucuagacuuugguuuacau

SEQ ID NO: 582764 - RNA, 19 nt, Homo sapiens
  misc_RNA (1)...(19): siRNA sense strand
cuaccaagguggccaagaa

SEQ ID NO: 582765 - RNA, 19 nt, Homo sapiens
  misc_RNA (1)...(19): siRNA sense strand
ccagugacccgaagaagaa

SEQ ID NO: 582766 - RNA, 19 nt, Homo sapiens
  misc_RNA (1)...(19): siRNA sense strand
cgaagaagaagacuaccaa

SEQ ID NO: 582767 - RNA, 19 nt, Homo sapiens
  misc_RNA (1)...(19): siRNA sense strand
gaaaggggcugcgacaaag

SEQ ID NO: 582768 - RNA, 19 nt, Homo sapiens
  misc_RNA (1)...(19): siRNA sense strand
agaagaagacuaccaaggu

SEQ ID NO: 582769 - RNA, 19 nt, Homo sapiens
  misc_RNA (1)...(19): siRNA sense strand
ggagagcgagauggaagaa

SEQ ID NO: 582770 - RNA, 19 nt, Homo sapiens
  misc_RNA (1)...(19): siRNA sense strand
ggagagccagguggaagaa

SEQ ID NO: 582771 - RNA, 19 nt, Homo sapiens
  misc_RNA (1)...(19): siRNA sense strand
uggaagaaccacugaguca

SEQ ID NO: 582772 - RNA, 19 nt, Homo sapiens
  misc_RNA (1)...(19): siRNA sense strand
gggaaaagcaguucguaga

SEQ ID NO: 582773 - RNA, 19 nt, Homo sapiens
  misc_RNA (1)...(19): siRNA sense strand
gggagacgcgggaagaaag

SEQ ID NO: 582774 - RNA, 19 nt, Homo sapiens
  misc_RNA (1)...(19): siRNA sense strand
ggagagccagguggaggaa

SEQ ID NO: 582775 - RNA, 19 nt, Homo sapiens
  misc_RNA (1)...(19): siRNA sense strand
ggagagccagguggaggaa

SEQ ID NO: 582776 - RNA, 19 nt, Homo sapiens
  misc_RNA (1)...(19): siRNA sense strand
gagggagacgcgggaagaa

SEQ ID NO: 582777 - RNA, 19 nt, Homo sapiens
  misc_RNA (1)...(19): siRNA sense strand
ggaaaccgauguggaagac

SEQ ID NO: 582778 - RNA, 19 nt, Homo sapiens
  misc_RNA (1)...(19): siRNA sense strand
uccgagggcuuccugaugu

SEQ ID NO: 582779 - RNA, 19 nt, Homo sapiens
  misc_RNA (1)...(19): siRNA sense strand
ugaagaggcagcccuggau

SEQ ID NO: 582780 - RNA, 19 nt, Homo sapiens
  misc_RNA (1)...(19): siRNA sense strand
ggaaaccgauguggaagac

SEQ ID NO: 582781 - RNA, 19 nt, Homo sapiens
  misc_RNA (1)...(19): siRNA sense strand
uccgagggcuuccugaugu

SEQ ID NO: 582782 - RNA, 19 nt, Homo sapiens
  misc_RNA (1)...(19): siRNA sense strand
ugaagaggcagcccuggau

SEQ ID NO: 582783 - RNA, 19 nt, Homo sapiens
  misc_RNA (1)...(19): siRNA sense strand
caacauagcuguggacaaa

SEQ ID NO: 582784 - RNA, 19 nt, Homo sapiens
  misc_RNA (1)...(19): siRNA sense strand
acaaagcgcuccaacuaua

SEQ ID NO: 582785 - RNA, 19 nt, Homo sapiens
  misc_RNA (1)...(19): siRNA sense strand
ggacaaagccaaccuggaa

SEQ ID NO: 582786 - RNA, 19 nt, Homo sapiens
  misc_RNA (1)...(19): siRNA sense strand
ugaagaauuuggacgauuu

SEQ ID NO: 582787 - RNA, 19 nt, Homo sapiens
  misc_RNA (1)...(19): siRNA sense strand
ugacaaagcgcuccaacua

SEQ ID NO: 582788 - RNA, 19 nt, Homo sapiens
  misc_RNA (1)...(19): siRNA sense strand
ccaacguccucaucuguuu

SEQ ID NO: 582789 - RNA, 19 nt, Homo sapiens
  misc_RNA (1)...(19): siRNA sense strand
ggaaucaugggcuaucaaa

SEQ ID NO: 582790 - RNA, 19 nt, Homo sapiens
  misc_RNA (1)...(19): siRNA sense strand
caaagaagaacaugugauc

SEQ ID NO: 582791 - RNA, 19 nt, Homo sapiens
  misc_RNA (1)...(19): siRNA sense strand
gggaccaucuucaucauca

SEQ ID NO: 582792 - RNA, 19 nt, Homo sapiens
  misc_RNA (1)...(19): siRNA sense strand
ucacguggcuucgaaaugg

SEQ ID NO: 582793 - RNA, 19 nt, Homo sapiens
  misc_RNA (1)...(19): siRNA sense strand
caacugaggacguuuacga

SEQ ID NO: 582794 - RNA, 19 nt, Homo sapiens
  misc_RNA (1)...(19): siRNA sense strand
caggcgaguuuauguuuga

SEQ ID NO: 582795 - RNA, 19 nt, Homo sapiens
  misc_RNA (1)...(19): siRNA sense strand
gaguuuauguuugacuuug

SEQ ID NO: 582796 - RNA, 19 nt, Homo sapiens
  misc_RNA (1)...(19): siRNA sense strand
ggucuggugggcaucauua

SEQ ID NO: 582797 - RNA, 19 nt, Homo sapiens
  misc_RNA (1)...(19): siRNA sense strand
caaaagcaaugcagcagaa

SEQ ID NO: 582798 - RNA, 19 nt, Homo sapiens
  misc_RNA (1)...(19): siRNA sense strand
ugaccaaucaggcgaguuu

SEQ ID NO: 582799 - RNA, 19 nt, Homo sapiens
  misc_RNA (1)...(19): siRNA sense strand
aaucaugggcuaucaaaga

SEQ ID NO: 582800 - RNA, 19 nt, Homo sapiens
  misc_RNA (1)...(19): siRNA sense strand
gaagaauuuggacgauuug

SEQ ID NO: 582801 - RNA, 19 nt, Homo sapiens
  misc_RNA (1)...(19): siRNA sense strand
gacaaagcgcuccaacuau

SEQ ID NO: 582802 - RNA, 19 nt, Homo sapiens
  misc_RNA (1)...(19): siRNA sense strand
caugggcuaucaaagaaga

SEQ ID NO: 582803 - RNA, 19 nt, Homo sapiens
  misc_RNA (1)...(19): siRNA sense strand
uaucaaagaagaacaugug

SEQ ID NO: 582804 - RNA, 19 nt, Homo sapiens
  misc_RNA (1)...(19): siRNA sense strand
gcgaguuuauguuugacuu

SEQ ID NO: 582805 - RNA, 19 nt, Homo sapiens
  misc_RNA (1)...(19): siRNA sense strand
ucuggcggcuugaagaauu

SEQ ID NO: 582806 - RNA, 19 nt, Homo sapiens
  misc_RNA (1)...(19): siRNA sense strand
agaagaacaugugaucauc

SEQ ID NO: 582807 - RNA, 19 nt, Homo sapiens
  misc_RNA (1)...(19): siRNA sense strand
ucugaauccugaccaauca

SEQ ID NO: 582808 - RNA, 19 nt, Homo sapiens
  misc_RNA (1)...(19): siRNA sense strand
auacuccgaucaccaaugu

SEQ ID NO: 582809 - RNA, 19 nt, Homo sapiens
  misc_RNA (1)...(19): siRNA sense strand
gaucauccaggccgaguuc

SEQ ID NO: 582810 - RNA, 19 nt, Homo sapiens
  misc_RNA (1)...(19): siRNA sense strand
ggaccaucuucaucaucaa

SEQ ID NO: 582811 - RNA, 19 nt, Homo sapiens
  misc_RNA (1)...(19): siRNA sense strand
ucaggcgaguuuauguuug

SEQ ID NO: 582812 - RNA, 19 nt, Homo sapiens
  misc_RNA (1)...(19): siRNA sense strand
gugaugagauuuuccaugu

SEQ ID NO: 582813 - RNA, 19 nt, Homo sapiens
  misc_RNA (1)...(19): siRNA sense strand
gacaaagccaaccuggaaa

SEQ ID NO: 582814 - RNA, 19 nt, Homo sapiens
  misc_RNA (1)...(19): siRNA sense strand
ugacuuugauggugaugag

SEQ ID NO: 582815 - RNA, 19 nt, Homo sapiens
  misc_RNA (1)...(19): siRNA sense strand
ccaaucaggcgaguuuaug

SEQ ID NO: 582816 - RNA, 19 nt, Homo sapiens
  misc_RNA (1)...(19): siRNA sense strand
caaggugcauuggccaaca

SEQ ID NO: 582817 - RNA, 19 nt, Homo sapiens
  misc_RNA (1)...(19): siRNA sense strand
ucccagagacuacagagaa

SEQ ID NO: 582818 - RNA, 19 nt, Homo sapiens
  misc_RNA (1)...(19): siRNA sense strand
uggacgauuugccagcuuu

SEQ ID NO: 582819 - RNA, 19 nt, Homo sapiens
  misc_RNA (1)...(19): siRNA sense strand
aagccaaccuggaaaucau

SEQ ID NO: 582820 - RNA, 19 nt, Homo sapiens
  misc_RNA (1)...(19): siRNA sense strand
ggucuggcggcuugaagaa

SEQ ID NO: 582821 - RNA, 19 nt, Homo sapiens
  misc_RNA (1)...(19): siRNA sense strand
aucaugggcuaucaaagaa

SEQ ID NO: 582822 - RNA, 19 nt, Homo sapiens
  misc_RNA (1)...(19): siRNA sense strand
aaugucacguggcuucgaa

SEQ ID NO: 582823 - RNA, 19 nt, Homo sapiens
  misc_RNA (1)...(19): siRNA sense strand
caaucaggcgaguuuaugu

SEQ ID NO: 582824 - RNA, 19 nt, Homo sapiens
  misc_RNA (1)...(19): siRNA sense strand
caggaaucaugggcuauca

SEQ ID NO: 582825 - RNA, 19 nt, Homo sapiens
  misc_RNA (1)...(19): siRNA sense strand
aagaagaacaugugaucau

SEQ ID NO: 582826 - RNA, 19 nt, Homo sapiens
  misc_RNA (1)...(19): siRNA sense strand
gccgaguucuaucugaauc

SEQ ID NO: 582827 - RNA, 19 nt, Homo sapiens
  misc_RNA (1)...(19): siRNA sense strand
aagaacaugugaucaucca

SEQ ID NO: 582828 - RNA, 19 nt, Homo sapiens
  misc_RNA (1)...(19): siRNA sense strand
uugaagaauuuggacgauu

SEQ ID NO: 582829 - RNA, 19 nt, Homo sapiens
  misc_RNA (1)...(19): siRNA sense strand
cuggugggcaucauuauug

SEQ ID NO: 582830 - RNA, 19 nt, Homo sapiens
  misc_RNA (1)...(19): siRNA sense strand
gcacugggaguuugaugcu

SEQ ID NO: 582831 - RNA, 19 nt, Homo sapiens
  misc_RNA (1)...(19): siRNA sense strand
caggccgaguucuaucuga

SEQ ID NO: 582832 - RNA, 19 nt, Homo sapiens
  misc_RNA (1)...(19): siRNA sense strand
cauccaggccgaguucuau

SEQ ID NO: 582833 - RNA, 19 nt, Homo sapiens
  misc_RNA (1)...(19): siRNA sense strand
gcccaacguccucaucugu

SEQ ID NO: 582834 - RNA, 19 nt, Homo sapiens
  misc_RNA (1)...(19): siRNA sense strand
gaccaaucaggcgaguuua

SEQ ID NO: 582835 - RNA, 19 nt, Homo sapiens
  misc_RNA (1)...(19): siRNA sense strand
guaacugugcucacgaaca

SEQ ID NO: 582836 - RNA, 19 nt, Homo sapiens
  misc_RNA (1)...(19): siRNA sense strand
uggagucccugugcuagga

SEQ ID NO: 582837 - RNA, 19 nt, Homo sapiens
  misc_RNA (1)...(19): siRNA sense strand
cgaguuuauguuugacuuu

SEQ ID NO: 582838 - RNA, 19 nt, Homo sapiens
  misc_RNA (1)...(19): siRNA sense strand
caaagcgcuccaacuauac

SEQ ID NO: 582839 - RNA, 19 nt, Homo sapiens
  misc_RNA (1)...(19): siRNA sense strand
acaaagccaaccuggaaau

SEQ ID NO: 582840 - RNA, 19 nt, Homo sapiens
  misc_RNA (1)...(19): siRNA sense strand
ucaaagaagaacaugugau

SEQ ID NO: 582841 - RNA, 19 nt, Homo sapiens
  misc_RNA (1)...(19): siRNA sense strand
gagucccugugcuaggauu

SEQ ID NO: 582842 - RNA, 19 nt, Homo sapiens
  misc_RNA (1)...(19): siRNA sense strand
accuggaaaucaugacaaa

SEQ ID NO: 582843 - RNA, 19 nt, Homo sapiens
  misc_RNA (1)...(19): siRNA sense strand
caaccuggaaaucaugaca

SEQ ID NO: 582844 - RNA, 19 nt, Homo sapiens
  misc_RNA (1)...(19): siRNA sense strand
caaagccaaccuggaaauc

SEQ ID NO: 582845 - RNA, 19 nt, Homo sapiens
  misc_RNA (1)...(19): siRNA sense strand
ggacgauuugccagcuuug

SEQ ID NO: 582846 - RNA, 19 nt, Homo sapiens
  misc_RNA (1)...(19): siRNA sense strand
ggacauguguaacuacuug

SEQ ID NO: 582847 - RNA, 19 nt, Homo sapiens
  misc_RNA (1)...(19): siRNA sense strand
caaaggugcugguagaaga

SEQ ID NO: 582848 - RNA, 19 nt, Homo sapiens
  misc_RNA (1)...(19): siRNA sense strand
guacagggcugggcacuga

SEQ ID NO: 582849 - RNA, 19 nt, Homo sapiens
  misc_RNA (1)...(19): siRNA sense strand
ggccauggcugaugccuuu

SEQ ID NO: 582850 - RNA, 19 nt, Homo sapiens
  misc_RNA (1)...(19): siRNA sense strand
ccaaggagcagcuguuuga

SEQ ID NO: 582851 - RNA, 19 nt, Homo sapiens
  misc_RNA (1)...(19): siRNA sense strand
gagcacgucugguucuaug

SEQ ID NO: 582852 - RNA, 19 nt, Homo sapiens
  misc_RNA (1)...(19): siRNA sense strand
gaggugagccggaucuuga

SEQ ID NO: 582853 - RNA, 19 nt, Homo sapiens
  misc_RNA (1)...(19): siRNA sense strand
ggacacagauauggaggau

SEQ ID NO: 582854 - RNA, 19 nt, Homo sapiens
  misc_RNA (1)...(19): siRNA sense strand
ggagggccguucagugaug

SEQ ID NO: 582855 - RNA, 19 nt, Homo sapiens
  misc_RNA (1)...(19): siRNA sense strand
gaugcaggaugaaggaaga

SEQ ID NO: 582856 - RNA, 19 nt, Homo sapiens
  misc_RNA (1)...(19): siRNA sense strand
uggaggagguauucuugua

SEQ ID NO: 582857 - RNA, 19 nt, Homo sapiens
  misc_RNA (1)...(19): siRNA sense strand
ggacccagccgugguguuu

SEQ ID NO: 582858 - RNA, 19 nt, Homo sapiens
  misc_RNA (1)...(19): siRNA sense strand
gcucagguguccuucuuca

SEQ ID NO: 582859 - RNA, 19 nt, Homo sapiens
  misc_RNA (1)...(19): siRNA sense strand
cuacuggcuuggcaacuuu

SEQ ID NO: 582860 - RNA, 19 nt, Homo sapiens
  misc_RNA (1)...(19): siRNA sense strand
cuaagaagugggugaauga

SEQ ID NO: 582861 - RNA, 19 nt, Homo sapiens
  misc_RNA (1)...(19): siRNA sense strand
guacccagccuccuucuuc

SEQ ID NO: 582862 - RNA, 19 nt, Homo sapiens
  misc_RNA (1)...(19): siRNA sense strand
guuugaggcugcauugaug

SEQ ID NO: 582863 - RNA, 19 nt, Homo sapiens
  misc_RNA (1)...(19): siRNA sense strand
ccaccacccuguccaucuu

SEQ ID NO: 582864 - RNA, 19 nt, Homo sapiens
  misc_RNA (1)...(19): siRNA sense strand
gagaggaggacgaggaugu

SEQ ID NO: 582865 - RNA, 19 nt, Homo sapiens
  misc_RNA (1)...(19): siRNA sense strand
gccggaaccugucugacuu

SEQ ID NO: 582866 - RNA, 19 nt, Homo sapiens
  misc_RNA (1)...(19): siRNA sense strand
caucuugaguggccucuuc

SEQ ID NO: 582867 - RNA, 19 nt, Homo sapiens
  misc_RNA (1)...(19): siRNA sense strand
gcagaugcaggaugaagga

SEQ ID NO: 582868 - RNA, 19 nt, Homo sapiens
  misc_RNA (1)...(19): siRNA sense strand
gcucaggacagucucaaga

SEQ ID NO: 582869 - RNA, 19 nt, Homo sapiens
  misc_RNA (1)...(19): siRNA sense strand
agaaguuccugcugaagug

SEQ ID NO: 582870 - RNA, 19 nt, Homo sapiens
  misc_RNA (1)...(19): siRNA sense strand
gcucaaauaccgagaaggu

SEQ ID NO: 582871 - RNA, 19 nt, Homo sapiens
  misc_RNA (1)...(19): siRNA sense strand
cucaagaucugguucaaca

SEQ ID NO: 582872 - RNA, 19 nt, Homo sapiens
  misc_RNA (1)...(19): siRNA sense strand
ugcuugagcucuucucuga

SEQ ID NO: 582873 - RNA, 19 nt, Homo sapiens
  misc_RNA (1)...(19): siRNA sense strand
uaagaucagggacagguuu

SEQ ID NO: 582874 - RNA, 19 nt, Homo sapiens
  misc_RNA (1)...(19): siRNA sense strand
gaucacaccgcucauguac

SEQ ID NO: 582875 - RNA, 19 nt, Homo sapiens
  misc_RNA (1)...(19): siRNA sense strand
gugcucagguguccuucuu

SEQ ID NO: 582876 - RNA, 19 nt, Homo sapiens
  misc_RNA (1)...(19): siRNA sense strand
ccucgaccguguccugaaa

SEQ ID NO: 582877 - RNA, 19 nt, Homo sapiens
  misc_RNA (1)...(19): siRNA sense strand
gagguauucuuguacuucu

SEQ ID NO: 582878 - RNA, 19 nt, Homo sapiens
  misc_RNA (1)...(19): siRNA sense strand
ucacgaggaccaauaagau

SEQ ID NO: 582879 - RNA, 19 nt, Homo sapiens
  misc_RNA (1)...(19): siRNA sense strand
gaggagguauucuuguacu

SEQ ID NO: 582880 - RNA, 19 nt, Homo sapiens
  misc_RNA (1)...(19): siRNA sense strand
ggaagcauggccaccuuug

SEQ ID NO: 582881 - RNA, 19 nt, Homo sapiens
  misc_RNA (1)...(19): siRNA sense strand
ccggccagcuucacucuug

SEQ ID NO: 582882 - RNA, 19 nt, Homo sapiens
  misc_RNA (1)...(19): siRNA sense strand
ucacucuuguccucauuga

SEQ ID NO: 582883 - RNA, 19 nt, Homo sapiens
  misc_RNA (1)...(19): siRNA sense strand
ccaagcaccugcagcucau

SEQ ID NO: 582884 - RNA, 19 nt, Homo sapiens
  misc_RNA (1)...(19): siRNA sense strand
gaucugguucaacaacaaa

SEQ ID NO: 582885 - RNA, 19 nt, Homo sapiens
  misc_RNA (1)...(19): siRNA sense strand
ucagccaguuccucgauga

SEQ ID NO: 582886 - RNA, 19 nt, Homo sapiens
  misc_RNA (1)...(19): siRNA sense strand
aguacaacgugcuguuuga

SEQ ID NO: 582887 - RNA, 19 nt, Homo sapiens
  misc_RNA (1)...(19): siRNA sense strand
cgugcugccugcccucuuu

SEQ ID NO: 582888 - RNA, 19 nt, Homo sapiens
  misc_RNA (1)...(19): siRNA sense strand
cggagugccuguccuugga

SEQ ID NO: 582889 - RNA, 19 nt, Homo sapiens
  misc_RNA (1)...(19): siRNA sense strand
ccaaacgcgucagccaguu

SEQ ID NO: 582890 - RNA, 19 nt, Homo sapiens
  misc_RNA (1)...(19): siRNA sense strand
ggagguauucuuguacuuc

SEQ ID NO: 582891 - RNA, 19 nt, Homo sapiens
  misc_RNA (1)...(19): siRNA sense strand
gggagguggucggcaagaa

SEQ ID NO: 582892 - RNA, 19 nt, Homo sapiens
  misc_RNA (1)...(19): siRNA sense strand
ucaggacagucucaagauc

SEQ ID NO: 582893 - RNA, 19 nt, Homo sapiens
  misc_RNA (1)...(19): siRNA sense strand
gggcgucuguccucaguac

SEQ ID NO: 582894 - RNA, 19 nt, Homo sapiens
  misc_RNA (1)...(19): siRNA sense strand
acccaaaggugcugguaga

SEQ ID NO: 582895 - RNA, 19 nt, Homo sapiens
  misc_RNA (1)...(19): siRNA sense strand
gucugggacucucauggua

SEQ ID NO: 582896 - RNA, 19 nt, Homo sapiens
  misc_RNA (1)...(19): siRNA sense strand
cuguauggcuggucgauca

SEQ ID NO: 582897 - RNA, 19 nt, Homo sapiens
  misc_RNA (1)...(19): siRNA sense strand
gaagcuguccguggccauu

SEQ ID NO: 582898 - RNA, 19 nt, Homo sapiens
  misc_RNA (1)...(19): siRNA sense strand
acuaagaagugggugaaug

SEQ ID NO: 582899 - RNA, 19 nt, Homo sapiens
  misc_RNA (1)...(19): siRNA sense strand
ggacgaggacaccgaagag

SEQ ID NO: 582900 - RNA, 19 nt, Homo sapiens
  misc_RNA (1)...(19): siRNA sense strand
gaagcauggccaccuuugu

SEQ ID NO: 582901 - RNA, 19 nt, Homo sapiens
  misc_RNA (1)...(19): siRNA sense strand
caucguggugcucaucuuu

SEQ ID NO: 582902 - RNA, 19 nt, Homo sapiens
  misc_RNA (1)...(19): siRNA sense strand
ucugggacauguguaacua

SEQ ID NO: 582903 - RNA, 19 nt, Homo sapiens
  misc_RNA (1)...(19): siRNA sense strand
cagcuucgccacacucuuc

SEQ ID NO: 582904 - RNA, 19 nt, Homo sapiens
  misc_RNA (1)...(19): siRNA sense strand
gcuggaggagguauucuug

SEQ ID NO: 582905 - RNA, 19 nt, Homo sapiens
  misc_RNA (1)...(19): siRNA sense strand
cuugagcucuucucugauc

SEQ ID NO: 582906 - RNA, 19 nt, Homo sapiens
  misc_RNA (1)...(19): siRNA sense strand
gagaaggucgcacgcugau

SEQ ID NO: 582907 - RNA, 19 nt, Homo sapiens
  misc_RNA (1)...(19): siRNA sense strand
gcaggacgcacacgcugau

SEQ ID NO: 582908 - RNA, 19 nt, Homo sapiens
  misc_RNA (1)...(19): siRNA sense strand
ccucuuggccauggugaua

SEQ ID NO: 582909 - RNA, 19 nt, Homo sapiens
  misc_RNA (1)...(19): siRNA sense strand
gcaucguggugcucaucuu

SEQ ID NO: 582910 - RNA, 19 nt, Homo sapiens
  misc_RNA (1)...(19): siRNA sense strand
gcaacuuucucugggacau

SEQ ID NO: 582911 - RNA, 19 nt, Homo sapiens
  misc_RNA (1)...(19): siRNA sense strand
caacgugcuguuugacaug

SEQ ID NO: 582912 - RNA, 19 nt, Homo sapiens
  misc_RNA (1)...(19): siRNA sense strand
ggaggugagccggaucuug

SEQ ID NO: 582913 - RNA, 19 nt, Homo sapiens
  misc_RNA (1)...(19): siRNA sense strand
acaccagccucgaggagau

SEQ ID NO: 582914 - RNA, 19 nt, Homo sapiens
  misc_RNA (1)...(19): siRNA sense strand
ccacccaccaccuggauga

SEQ ID NO: 582915 - RNA, 19 nt, Homo sapiens
  misc_RNA (1)...(19): siRNA sense strand
acaacgugcuguuugacau

SEQ ID NO: 582916 - RNA, 19 nt, Homo sapiens
  misc_RNA (1)...(19): siRNA sense strand
cgaucacaccgcucaugua

SEQ ID NO: 582917 - RNA, 19 nt, Homo sapiens
  misc_RNA (1)...(19): siRNA sense strand
gaaggcugacacugacaug

SEQ ID NO: 582918 - RNA, 19 nt, Homo sapiens
  misc_RNA (1)...(19): siRNA sense strand
ucuacuggcuuggcaacuu

SEQ ID NO: 582919 - RNA, 19 nt, Homo sapiens
  misc_RNA (1)...(19): siRNA sense strand
gggcguggucuuccuguuc

SEQ ID NO: 582920 - RNA, 19 nt, Homo sapiens
  misc_RNA (1)...(19): siRNA sense strand
ggaggagguauucuuguac

SEQ ID NO: 582921 - RNA, 19 nt, Homo sapiens
  misc_RNA (1)...(19): siRNA sense strand
ggucuuugccauguccuuu

SEQ ID NO: 582922 - RNA, 19 nt, Homo sapiens
  misc_RNA (1)...(19): siRNA sense strand
gggugaaugaggucaggua

SEQ ID NO: 582923 - RNA, 19 nt, Homo sapiens
  misc_RNA (1)...(19): siRNA sense strand
gccugaagacuaagaagug

SEQ ID NO: 582924 - RNA, 19 nt, Homo sapiens
  misc_RNA (1)...(19): siRNA sense strand
ggacccaaaggugcuggua

SEQ ID NO: 582925 - RNA, 19 nt, Homo sapiens
  misc_RNA (1)...(19): siRNA sense strand
ucaguacaacgugcuguuu

SEQ ID NO: 582926 - RNA, 19 nt, Homo sapiens
  misc_RNA (1)...(19): siRNA sense strand
cuacagcggagggaacaaa

SEQ ID NO: 582927 - RNA, 19 nt, Homo sapiens
  misc_RNA (1)...(19): siRNA sense strand
cagaggaugccagcuguug

SEQ ID NO: 582928 - RNA, 19 nt, Homo sapiens
  misc_RNA (1)...(19): siRNA sense strand
gugcucaccugcauaaacc

SEQ ID NO: 582929 - RNA, 19 nt, Homo sapiens
  misc_RNA (1)...(19): siRNA sense strand
gcuacucuuugcaccagau

SEQ ID NO: 582930 - RNA, 19 nt, Homo sapiens
  misc_RNA (1)...(19): siRNA sense strand
cuccaucuguguggucuuu

SEQ ID NO: 582931 - RNA, 19 nt, Homo sapiens
  misc_RNA (1)...(19): siRNA sense strand
cagaaguuccugcugaagu

SEQ ID NO: 582932 - RNA, 19 nt, Homo sapiens
  misc_RNA (1)...(19): siRNA sense strand
ggagacagcgcuggagaac

SEQ ID NO: 582933 - RNA, 19 nt, Homo sapiens
  misc_RNA (1)...(19): siRNA sense strand
guccguggccauugccuuu

SEQ ID NO: 582934 - RNA, 19 nt, Homo sapiens
  misc_RNA (1)...(19): siRNA sense strand
aaauccgcauggacauuga

SEQ ID NO: 582935 - RNA, 19 nt, Homo sapiens
  misc_RNA (1)...(19): siRNA sense strand
gaaccaggccauggcugau

SEQ ID NO: 582936 - RNA, 19 nt, Homo sapiens
  misc_RNA (1)...(19): siRNA sense strand
caagaucugguucaacaac

SEQ ID NO: 582937 - RNA, 19 nt, Homo sapiens
  misc_RNA (1)...(19): siRNA sense strand
ucagguguccuucuucagu

SEQ ID NO: 582938 - RNA, 19 nt, Homo sapiens
  misc_RNA (1)...(19): siRNA sense strand
gugcugcggacacagauau

SEQ ID NO: 582939 - RNA, 19 nt, Homo sapiens
  misc_RNA (1)...(19): siRNA sense strand
ucgggaagcuacucuuugc

SEQ ID NO: 582940 - RNA, 19 nt, Homo sapiens
  misc_RNA (1)...(19): siRNA sense strand
augagaaggcugacacuga

SEQ ID NO: 582941 - RNA, 19 nt, Homo sapiens
  misc_RNA (1)...(19): siRNA sense strand
gcucauggcccaggucaac

SEQ ID NO: 582942 - RNA, 19 nt, Homo sapiens
  misc_RNA (1)...(19): siRNA sense strand
gcagaggaugccagcuguu

SEQ ID NO: 582943 - RNA, 19 nt, Homo sapiens
  misc_RNA (1)...(19): siRNA sense strand
aagcauggccaccuuugug

SEQ ID NO: 582944 - RNA, 19 nt, Homo sapiens
  misc_RNA (1)...(19): siRNA sense strand
caccaaggagcagcuguuu

SEQ ID NO: 582945 - RNA, 19 nt, Homo sapiens
  misc_RNA (1)...(19): siRNA sense strand
ccucuuccuucucuucaca

SEQ ID NO: 582946 - RNA, 19 nt, Homo sapiens
  misc_RNA (1)...(19): siRNA sense strand
ggacauguguaacuacuug

SEQ ID NO: 582947 - RNA, 19 nt, Homo sapiens
  misc_RNA (1)...(19): siRNA sense strand
caaaggugcugguagaaga

SEQ ID NO: 582948 - RNA, 19 nt, Homo sapiens
  misc_RNA (1)...(19): siRNA sense strand
guacagggcugggcacuga

SEQ ID NO: 582949 - RNA, 19 nt, Homo sapiens
  misc_RNA (1)...(19): siRNA sense strand
ggccauggcugaugccuuu

SEQ ID NO: 582950 - RNA, 19 nt, Homo sapiens
  misc_RNA (1)...(19): siRNA sense strand
ccaaggagcagcuguuuga

SEQ ID NO: 582951 - RNA, 19 nt, Homo sapiens
  misc_RNA (1)...(19): siRNA sense strand
gagcacgucugguucuaug

SEQ ID NO: 582952 - RNA, 19 nt, Homo sapiens
  misc_RNA (1)...(19): siRNA sense strand
gaggugagccggaucuuga

SEQ ID NO: 582953 - RNA, 19 nt, Homo sapiens
  misc_RNA (1)...(19): siRNA sense strand
ggacacagauauggaggau

SEQ ID NO: 582954 - RNA, 19 nt, Homo sapiens
  misc_RNA (1)...(19): siRNA sense strand
ggagggccguucagugaug

SEQ ID NO: 582955 - RNA, 19 nt, Homo sapiens
  misc_RNA (1)...(19): siRNA sense strand
gaugcaggaugaaggaaga

SEQ ID NO: 582956 - RNA, 19 nt, Homo sapiens
  misc_RNA (1)...(19): siRNA sense strand
uggaggagguauucuugua

SEQ ID NO: 582957 - RNA, 19 nt, Homo sapiens
  misc_RNA (1)...(19): siRNA sense strand
ggacccagccgugguguuu

SEQ ID NO: 582958 - RNA, 19 nt, Homo sapiens
  misc_RNA (1)...(19): siRNA sense strand
gcucagguguccuucuuca

SEQ ID NO: 582959 - RNA, 19 nt, Homo sapiens
  misc_RNA (1)...(19): siRNA sense strand
cuacuggcuuggcaacuuu

SEQ ID NO: 582960 - RNA, 19 nt, Homo sapiens
  misc_RNA (1)...(19): siRNA sense strand
cuaagaagugggugaauga

SEQ ID NO: 582961 - RNA, 19 nt, Homo sapiens
  misc_RNA (1)...(19): siRNA sense strand
guacccagccuccuucuuc

SEQ ID NO: 582962 - RNA, 19 nt, Homo sapiens
  misc_RNA (1)...(19): siRNA sense strand
guuugaggcugcauugaug

SEQ ID NO: 582963 - RNA, 19 nt, Homo sapiens
  misc_RNA (1)...(19): siRNA sense strand
ccaccacccuguccaucuu

SEQ ID NO: 582964 - RNA, 19 nt, Homo sapiens
  misc_RNA (1)...(19): siRNA sense strand
gagaggaggacgaggaugu

SEQ ID NO: 582965 - RNA, 19 nt, Homo sapiens
  misc_RNA (1)...(19): siRNA sense strand
gccggaaccugucugacuu

SEQ ID NO: 582966 - RNA, 19 nt, Homo sapiens
  misc_RNA (1)...(19): siRNA sense strand
caucuugaguggccucuuc

SEQ ID NO: 582967 - RNA, 19 nt, Homo sapiens
  misc_RNA (1)...(19): siRNA sense strand
gcagaugcaggaugaagga

SEQ ID NO: 582968 - RNA, 19 nt, Homo sapiens
  misc_RNA (1)...(19): siRNA sense strand
gcucaggacagucucaaga

SEQ ID NO: 582969 - RNA, 19 nt, Homo sapiens
  misc_RNA (1)...(19): siRNA sense strand
agaaguuccugcugaagug

SEQ ID NO: 582970 - RNA, 19 nt, Homo sapiens
  misc_RNA (1)...(19): siRNA sense strand
gcucaaauaccgagaaggu

SEQ ID NO: 582971 - RNA, 19 nt, Homo sapiens
  misc_RNA (1)...(19): siRNA sense strand
cucaagaucugguucaaca

SEQ ID NO: 582972 - RNA, 19 nt, Homo sapiens
  misc_RNA (1)...(19): siRNA sense strand
ugcuugagcucuucucuga

SEQ ID NO: 582973 - RNA, 19 nt, Homo sapiens
  misc_RNA (1)...(19): siRNA sense strand
uaagaucagggacagguuu

SEQ ID NO: 582974 - RNA, 19 nt, Homo sapiens
  misc_RNA (1)...(19): siRNA sense strand
gaucacaccgcucauguac

SEQ ID NO: 582975 - RNA, 19 nt, Homo sapiens
  misc_RNA (1)...(19): siRNA sense strand
gugcucagguguccuucuu

SEQ ID NO: 582976 - RNA, 19 nt, Homo sapiens
  misc_RNA (1)...(19): siRNA sense strand
ccucgaccguguccugaaa

SEQ ID NO: 582977 - RNA, 19 nt, Homo sapiens
  misc_RNA (1)...(19): siRNA sense strand
gagguauucuuguacuucu

SEQ ID NO: 582978 - RNA, 19 nt, Homo sapiens
  misc_RNA (1)...(19): siRNA sense strand
ucacgaggaccaauaagau

SEQ ID NO: 582979 - RNA, 19 nt, Homo sapiens
  misc_RNA (1)...(19): siRNA sense strand
gaggagguauucuuguacu

SEQ ID NO: 582980 - RNA, 19 nt, Homo sapiens
  misc_RNA (1)...(19): siRNA sense strand
ggaagcauggccaccuuug

SEQ ID NO: 582981 - RNA, 19 nt, Homo sapiens
  misc_RNA (1)...(19): siRNA sense strand
ccggccagcuucacucuug

SEQ ID NO: 582982 - RNA, 19 nt, Homo sapiens
  misc_RNA (1)...(19): siRNA sense strand
ucacucuuguccucauuga

SEQ ID NO: 582983 - RNA, 19 nt, Homo sapiens
  misc_RNA (1)...(19): siRNA sense strand
ccaagcaccugcagcucau

SEQ ID NO: 582984 - RNA, 19 nt, Homo sapiens
  misc_RNA (1)...(19): siRNA sense strand
gaucugguucaacaacaaa

SEQ ID NO: 582985 - RNA, 19 nt, Homo sapiens
  misc_RNA (1)...(19): siRNA sense strand
ucagccaguuccucgauga

SEQ ID NO: 582986 - RNA, 19 nt, Homo sapiens
  misc_RNA (1)...(19): siRNA sense strand
aguacaacgugcuguuuga

SEQ ID NO: 582987 - RNA, 19 nt, Homo sapiens
  misc_RNA (1)...(19): siRNA sense strand
cgugcugccugcccucuuu

SEQ ID NO: 582988 - RNA, 19 nt, Homo sapiens
  misc_RNA (1)...(19): siRNA sense strand
cggagugccuguccuugga

SEQ ID NO: 582989 - RNA, 19 nt, Homo sapiens
  misc_RNA (1)...(19): siRNA sense strand
ccaaacgcgucagccaguu

SEQ ID NO: 582990 - RNA, 19 nt, Homo sapiens
  misc_RNA (1)...(19): siRNA sense strand
ggagguauucuuguacuuc

SEQ ID NO: 582991 - RNA, 19 nt, Homo sapiens
  misc_RNA (1)...(19): siRNA sense strand
gggagguggucggcaagaa

SEQ ID NO: 582992 - RNA, 19 nt, Homo sapiens
  misc_RNA (1)...(19): siRNA sense strand
ucaggacagucucaagauc

SEQ ID NO: 582993 - RNA, 19 nt, Homo sapiens
  misc_RNA (1)...(19): siRNA sense strand
gggcgucuguccucaguac

SEQ ID NO: 582994 - RNA, 19 nt, Homo sapiens
  misc_RNA (1)...(19): siRNA sense strand
acccaaaggugcugguaga

SEQ ID NO: 582995 - RNA, 19 nt, Homo sapiens
  misc_RNA (1)...(19): siRNA sense strand
gucugggacucucauggua

SEQ ID NO: 582996 - RNA, 19 nt, Homo sapiens
  misc_RNA (1)...(19): siRNA sense strand
cuguauggcuggucgauca

SEQ ID NO: 582997 - RNA, 19 nt, Homo sapiens
  misc_RNA (1)...(19): siRNA sense strand
gaagcuguccguggccauu

SEQ ID NO: 582998 - RNA, 19 nt, Homo sapiens
  misc_RNA (1)...(19): siRNA sense strand
acuaagaagugggugaaug

SEQ ID NO: 582999 - RNA, 19 nt, Homo sapiens
  misc_RNA (1)...(19): siRNA sense strand
ggacgaggacaccgaagag

SEQ ID NO: 583000 - RNA, 19 nt, Homo sapiens
  misc_RNA (1)...(19): siRNA sense strand
gaagcauggccaccuuugu

SEQ ID NO: 583001 - RNA, 19 nt, Homo sapiens
  misc_RNA (1)...(19): siRNA sense strand
caucguggugcucaucuuu

SEQ ID NO: 583002 - RNA, 19 nt, Homo sapiens
  misc_RNA (1)...(19): siRNA sense strand
ucugggacauguguaacua

SEQ ID NO: 583003 - RNA, 19 nt, Homo sapiens
  misc_RNA (1)...(19): siRNA sense strand
cagcuucgccacacucuuc

SEQ ID NO: 583004 - RNA, 19 nt, Homo sapiens
  misc_RNA (1)...(19): siRNA sense strand
gcuggaggagguauucuug

SEQ ID NO: 583005 - RNA, 19 nt, Homo sapiens
  misc_RNA (1)...(19): siRNA sense strand
cuugagcucuucucugauc

SEQ ID NO: 583006 - RNA, 19 nt, Homo sapiens
  misc_RNA (1)...(19): siRNA sense strand
gagaaggucgcacgcugau

SEQ ID NO: 583007 - RNA, 19 nt, Homo sapiens
  misc_RNA (1)...(19): siRNA sense strand
gcaggacgcacacgcugau

SEQ ID NO: 583008 - RNA, 19 nt, Homo sapiens
  misc_RNA (1)...(19): siRNA sense strand
ccucuuggccauggugaua

SEQ ID NO: 583009 - RNA, 19 nt, Homo sapiens
  misc_RNA (1)...(19): siRNA sense strand
gcaucguggugcucaucuu

SEQ ID NO: 583010 - RNA, 19 nt, Homo sapiens
  misc_RNA (1)...(19): siRNA sense strand
gcaacuuucucugggacau

SEQ ID NO: 583011 - RNA, 19 nt, Homo sapiens
  misc_RNA (1)...(19): siRNA sense strand
caacgugcuguuugacaug

SEQ ID NO: 583012 - RNA, 19 nt, Homo sapiens
  misc_RNA (1)...(19): siRNA sense strand
ggaggugagccggaucuug

SEQ ID NO: 583013 - RNA, 19 nt, Homo sapiens
  misc_RNA (1)...(19): siRNA sense strand
acaccagccucgaggagau

SEQ ID NO: 583014 - RNA, 19 nt, Homo sapiens
  misc_RNA (1)...(19): siRNA sense strand
ccacccaccaccuggauga

SEQ ID NO: 583015 - RNA, 19 nt, Homo sapiens
  misc_RNA (1)...(19): siRNA sense strand
acaacgugcuguuugacau

SEQ ID NO: 583016 - RNA, 19 nt, Homo sapiens
  misc_RNA (1)...(19): siRNA sense strand
cgaucacaccgcucaugua

SEQ ID NO: 583017 - RNA, 19 nt, Homo sapiens
  misc_RNA (1)...(19): siRNA sense strand
gaaggcugacacugacaug

SEQ ID NO: 583018 - RNA, 19 nt, Homo sapiens
  misc_RNA (1)...(19): siRNA sense strand
ucuacuggcuuggcaacuu

SEQ ID NO: 583019 - RNA, 19 nt, Homo sapiens
  misc_RNA (1)...(19): siRNA sense strand
gggcguggucuuccuguuc

SEQ ID NO: 583020 - RNA, 19 nt, Homo sapiens
  misc_RNA (1)...(19): siRNA sense strand
ggaggagguauucuuguac

SEQ ID NO: 583021 - RNA, 19 nt, Homo sapiens
  misc_RNA (1)...(19): siRNA sense strand
ggucuuugccauguccuuu

SEQ ID NO: 583022 - RNA, 19 nt, Homo sapiens
  misc_RNA (1)...(19): siRNA sense strand
gggugaaugaggucaggua

SEQ ID NO: 583023 - RNA, 19 nt, Homo sapiens
  misc_RNA (1)...(19): siRNA sense strand
gccugaagacuaagaagug

SEQ ID NO: 583024 - RNA, 19 nt, Homo sapiens
  misc_RNA (1)...(19): siRNA sense strand
ggacccaaaggugcuggua

SEQ ID NO: 583025 - RNA, 19 nt, Homo sapiens
  misc_RNA (1)...(19): siRNA sense strand
ucaguacaacgugcuguuu

SEQ ID NO: 583026 - RNA, 19 nt, Homo sapiens
  misc_RNA (1)...(19): siRNA sense strand
cuacagcggagggaacaaa

SEQ ID NO: 583027 - RNA, 19 nt, Homo sapiens
  misc_RNA (1)...(19): siRNA sense strand
cagaggaugccagcuguug

SEQ ID NO: 583028 - RNA, 19 nt, Homo sapiens
  misc_RNA (1)...(19): siRNA sense strand
gugcucaccugcauaaacc

SEQ ID NO: 583029 - RNA, 19 nt, Homo sapiens
  misc_RNA (1)...(19): siRNA sense strand
gcuacucuuugcaccagau

SEQ ID NO: 583030 - RNA, 19 nt, Homo sapiens
  misc_RNA (1)...(19): siRNA sense strand
cuccaucuguguggucuuu

SEQ ID NO: 583031 - RNA, 19 nt, Homo sapiens
  misc_RNA (1)...(19): siRNA sense strand
cagaaguuccugcugaagu

SEQ ID NO: 583032 - RNA, 19 nt, Homo sapiens
  misc_RNA (1)...(19): siRNA sense strand
ggagacagcgcuggagaac

SEQ ID NO: 583033 - RNA, 19 nt, Homo sapiens
  misc_RNA (1)...(19): siRNA sense strand
guccguggccauugccuuu

SEQ ID NO: 583034 - RNA, 19 nt, Homo sapiens
  misc_RNA (1)...(19): siRNA sense strand
aaauccgcauggacauuga

SEQ ID NO: 583035 - RNA, 19 nt, Homo sapiens
  misc_RNA (1)...(19): siRNA sense strand
gaaccaggccauggcugau

SEQ ID NO: 583036 - RNA, 19 nt, Homo sapiens
  misc_RNA (1)...(19): siRNA sense strand
caagaucugguucaacaac

SEQ ID NO: 583037 - RNA, 19 nt, Homo sapiens
  misc_RNA (1)...(19): siRNA sense strand
ucagguguccuucuucagu

SEQ ID NO: 583038 - RNA, 19 nt, Homo sapiens
  misc_RNA (1)...(19): siRNA sense strand
gugcugcggacacagauau

SEQ ID NO: 583039 - RNA, 19 nt, Homo sapiens
  misc_RNA (1)...(19): siRNA sense strand
ucgggaagcuacucuuugc

SEQ ID NO: 583040 - RNA, 19 nt, Homo sapiens
  misc_RNA (1)...(19): siRNA sense strand
augagaaggcugacacuga

SEQ ID NO: 583041 - RNA, 19 nt, Homo sapiens
  misc_RNA (1)...(19): siRNA sense strand
gcucauggcccaggucaac

SEQ ID NO: 583042 - RNA, 19 nt, Homo sapiens
  misc_RNA (1)...(19): siRNA sense strand
gcagaggaugccagcuguu

SEQ ID NO: 583043 - RNA, 19 nt, Homo sapiens
  misc_RNA (1)...(19): siRNA sense strand
aagcauggccaccuuugug

SEQ ID NO: 583044 - RNA, 19 nt, Homo sapiens
  misc_RNA (1)...(19): siRNA sense strand
caccaaggagcagcuguuu

SEQ ID NO: 583045 - RNA, 19 nt, Homo sapiens
  misc_RNA (1)...(19): siRNA sense strand
ccucuuccuucucuucaca

SEQ ID NO: 583046 - RNA, 19 nt, Homo sapiens
  misc_RNA (1)...(19): siRNA sense strand
ggacaaauaugcuguguuu

SEQ ID NO: 583047 - RNA, 19 nt, Homo sapiens
  misc_RNA (1)...(19): siRNA sense strand
cagcaaauuugacuucuua

SEQ ID NO: 583048 - RNA, 19 nt, Homo sapiens
  misc_RNA (1)...(19): siRNA sense strand
ggagaaagcuuugcagaau

SEQ ID NO: 583049 - RNA, 19 nt, Homo sapiens
  misc_RNA (1)...(19): siRNA sense strand
uaagaaguaucccaguuua

SEQ ID NO: 583050 - RNA, 19 nt, Homo sapiens
  misc_RNA (1)...(19): siRNA sense strand
gaggagaucuuaagcaugu

SEQ ID NO: 583051 - RNA, 19 nt, Homo sapiens
  misc_RNA (1)...(19): siRNA sense strand
gaaauccagugaagaaaug

SEQ ID NO: 583052 - RNA, 19 nt, Homo sapiens
  misc_RNA (1)...(19): siRNA sense strand
gaacuuagcagaccuagau

SEQ ID NO: 583053 - RNA, 19 nt, Homo sapiens
  misc_RNA (1)...(19): siRNA sense strand
ggacaucgauaaaguaugg

SEQ ID NO: 583054 - RNA, 19 nt, Homo sapiens
  misc_RNA (1)...(19): siRNA sense strand
gaacagacagcagagaaua

SEQ ID NO: 583055 - RNA, 19 nt, Homo sapiens
  misc_RNA (1)...(19): siRNA sense strand
caaauaugaugcccuuaaa

SEQ ID NO: 583056 - RNA, 19 nt, Homo sapiens
  misc_RNA (1)...(19): siRNA sense strand
ccaauacucugaaugagaa

SEQ ID NO: 583057 - RNA, 19 nt, Homo sapiens
  misc_RNA (1)...(19): siRNA sense strand
gaguagagaugaugcuuug

SEQ ID NO: 583058 - RNA, 19 nt, Homo sapiens
  misc_RNA (1)...(19): siRNA sense strand
gagaaagcuuugcagaauu

SEQ ID NO: 583059 - RNA, 19 nt, Homo sapiens
  misc_RNA (1)...(19): siRNA sense strand
gaaauaagccguucuucuc

SEQ ID NO: 583060 - RNA, 19 nt, Homo sapiens
  misc_RNA (1)...(19): siRNA sense strand
uugaagaccugaaagauaa

SEQ ID NO: 583061 - RNA, 19 nt, Homo sapiens
  misc_RNA (1)...(19): siRNA sense strand
gggaaugccuuaccuagga

SEQ ID NO: 583062 - RNA, 19 nt, Homo sapiens
  misc_RNA (1)...(19): siRNA sense strand
caaguacgaugucuucaga

SEQ ID NO: 583063 - RNA, 19 nt, Homo sapiens
  misc_RNA (1)...(19): siRNA sense strand
ggaaacucuuggacagaua

SEQ ID NO: 583064 - RNA, 19 nt, Homo sapiens
  misc_RNA (1)...(19): siRNA sense strand
ugauagcucuuuggauuua

SEQ ID NO: 583065 - RNA, 19 nt, Homo sapiens
  misc_RNA (1)...(19): siRNA sense strand
ucugauagcucuuuggauu

SEQ ID NO: 583066 - RNA, 19 nt, Homo sapiens
  misc_RNA (1)...(19): siRNA sense strand
ugacaucucucuccaaagu

SEQ ID NO: 583067 - RNA, 19 nt, Homo sapiens
  misc_RNA (1)...(19): siRNA sense strand
ggaagggucuggacuaggu

SEQ ID NO: 583068 - RNA, 19 nt, Homo sapiens
  misc_RNA (1)...(19): siRNA sense strand
gaaggacaucgauaaagua

SEQ ID NO: 583069 - RNA, 19 nt, Homo sapiens
  misc_RNA (1)...(19): siRNA sense strand
aaagugagcuggcaaccuu

SEQ ID NO: 583070 - RNA, 19 nt, Homo sapiens
  misc_RNA (1)...(19): siRNA sense strand
caaagaagacucugcauca

SEQ ID NO: 583071 - RNA, 19 nt, Homo sapiens
  misc_RNA (1)...(19): siRNA sense strand
cagaaugccuccuuggauu

SEQ ID NO: 583072 - RNA, 19 nt, Homo sapiens
  misc_RNA (1)...(19): siRNA sense strand
gcagaaaacucucuccauu

SEQ ID NO: 583073 - RNA, 19 nt, Homo sapiens
  misc_RNA (1)...(19): siRNA sense strand
ggaauauucuggucuagca

SEQ ID NO: 583074 - RNA, 19 nt, Homo sapiens
  misc_RNA (1)...(19): siRNA sense strand
gaugaugguuucaccgauu

SEQ ID NO: 583075 - RNA, 19 nt, Homo sapiens
  misc_RNA (1)...(19): siRNA sense strand
uagcagaccuagauauguu

SEQ ID NO: 583076 - RNA, 19 nt, Homo sapiens
  misc_RNA (1)...(19): siRNA sense strand
guucaaggaucacacaaga

SEQ ID NO: 583077 - RNA, 19 nt, Homo sapiens
  misc_RNA (1)...(19): siRNA sense strand
ggacagauaugggccuuag

SEQ ID NO: 583078 - RNA, 19 nt, Homo sapiens
  misc_RNA (1)...(19): siRNA sense strand
uaacgaccuuuguaaguga

SEQ ID NO: 583079 - RNA, 19 nt, Homo sapiens
  misc_RNA (1)...(19): siRNA sense strand
ucaagaugcuucuaaguca

SEQ ID NO: 583080 - RNA, 19 nt, Homo sapiens
  misc_RNA (1)...(19): siRNA sense strand
guaagaaguaucccaguuu

SEQ ID NO: 583081 - RNA, 19 nt, Homo sapiens
  misc_RNA (1)...(19): siRNA sense strand
ugaaggacaucgauaaagu

SEQ ID NO: 583082 - RNA, 19 nt, Homo sapiens
  misc_RNA (1)...(19): siRNA sense strand
caaaugauaccuuaaaugg

SEQ ID NO: 583083 - RNA, 19 nt, Homo sapiens
  misc_RNA (1)...(19): siRNA sense strand
caugacaucucucuccaaa

SEQ ID NO: 583084 - RNA, 19 nt, Homo sapiens
  misc_RNA (1)...(19): siRNA sense strand
gcgagaaaccauugucuuu

SEQ ID NO: 583085 - RNA, 19 nt, Homo sapiens
  misc_RNA (1)...(19): siRNA sense strand
caaccuacccugcaaauca

SEQ ID NO: 583086 - RNA, 19 nt, Homo sapiens
  misc_RNA (1)...(19): siRNA sense strand
gaucaaaaccugucaauug

SEQ ID NO: 583087 - RNA, 19 nt, Homo sapiens
  misc_RNA (1)...(19): siRNA sense strand
ggaugacuuuggagaguuu

SEQ ID NO: 583088 - RNA, 19 nt, Homo sapiens
  misc_RNA (1)...(19): siRNA sense strand
guaacgaccuuuguaagug

SEQ ID NO: 583089 - RNA, 19 nt, Homo sapiens
  misc_RNA (1)...(19): siRNA sense strand
gaagaugcacucucuguuc

SEQ ID NO: 583090 - RNA, 19 nt, Homo sapiens
  misc_RNA (1)...(19): siRNA sense strand
gcaaggaggacucugaaga

SEQ ID NO: 583091 - RNA, 19 nt, Homo sapiens
  misc_RNA (1)...(19): siRNA sense strand
gaauucagaucugcaggaa

SEQ ID NO: 583092 - RNA, 19 nt, Homo sapiens
  misc_RNA (1)...(19): siRNA sense strand
ggaggcggcuucauguuuc

SEQ ID NO: 583093 - RNA, 19 nt, Homo sapiens
  misc_RNA (1)...(19): siRNA sense strand
gcugacaaguccucugaaa

SEQ ID NO: 583094 - RNA, 19 nt, Homo sapiens
  misc_RNA (1)...(19): siRNA sense strand
ccaaggaccuauugcuaug

SEQ ID NO: 583095 - RNA, 19 nt, Homo sapiens
  misc_RNA (1)...(19): siRNA sense strand
guagauggauguguaagug

SEQ ID NO: 583096 - RNA, 19 nt, Homo sapiens
  misc_RNA (1)...(19): siRNA sense strand
gagccuuggugauaaagaa

SEQ ID NO: 583097 - RNA, 19 nt, Homo sapiens
  misc_RNA (1)...(19): siRNA sense strand
cagcagagaauaaaccuuu

SEQ ID NO: 583098 - RNA, 19 nt, Homo sapiens
  misc_RNA (1)...(19): siRNA sense strand
ggauuuacaaugagaguuu

SEQ ID NO: 583099 - RNA, 19 nt, Homo sapiens
  misc_RNA (1)...(19): siRNA sense strand
gagugugccucuugaaugu

SEQ ID NO: 583100 - RNA, 19 nt, Homo sapiens
  misc_RNA (1)...(19): siRNA sense strand
gcaaaugauaccuuaaaug

SEQ ID NO: 583101 - RNA, 19 nt, Homo sapiens
  misc_RNA (1)...(19): siRNA sense strand
guugaagaccugaaagaua

SEQ ID NO: 583102 - RNA, 19 nt, Homo sapiens
  misc_RNA (1)...(19): siRNA sense strand
ggaggacucugaagaugca

SEQ ID NO: 583103 - RNA, 19 nt, Homo sapiens
  misc_RNA (1)...(19): siRNA sense strand
gaaugccuccuuggauuua

SEQ ID NO: 583104 - RNA, 19 nt, Homo sapiens
  misc_RNA (1)...(19): siRNA sense strand
gaugaaaacucgcuggauu

SEQ ID NO: 583105 - RNA, 19 nt, Homo sapiens
  misc_RNA (1)...(19): siRNA sense strand
gggaggagaucuuaagcau

SEQ ID NO: 583106 - RNA, 19 nt, Homo sapiens
  misc_RNA (1)...(19): siRNA sense strand
ggugauaaauauagugcuu

SEQ ID NO: 583107 - RNA, 19 nt, Homo sapiens
  misc_RNA (1)...(19): siRNA sense strand
aaugaguccugaugcuuua

SEQ ID NO: 583108 - RNA, 19 nt, Homo sapiens
  misc_RNA (1)...(19): siRNA sense strand
uggaauagauacugccaaa

SEQ ID NO: 583109 - RNA, 19 nt, Homo sapiens
  misc_RNA (1)...(19): siRNA sense strand
gauaugggccuuagcuaau

SEQ ID NO: 583110 - RNA, 19 nt, Homo sapiens
  misc_RNA (1)...(19): siRNA sense strand
gaucaacugugucgaacca

SEQ ID NO: 583111 - RNA, 19 nt, Homo sapiens
  misc_RNA (1)...(19): siRNA sense strand
gcauaugaauggcagagau

SEQ ID NO: 583112 - RNA, 19 nt, Homo sapiens
  misc_RNA (1)...(19): siRNA sense strand
agaaagcuuugcagaauuc

SEQ ID NO: 583113 - RNA, 19 nt, Homo sapiens
  misc_RNA (1)...(19): siRNA sense strand
ggagagaagaguagagaug

SEQ ID NO: 583114 - RNA, 19 nt, Homo sapiens
  misc_RNA (1)...(19): siRNA sense strand
gagauccuggugauaaaua

SEQ ID NO: 583115 - RNA, 19 nt, Homo sapiens
  misc_RNA (1)...(19): siRNA sense strand
aagaugacuuccaggauuu

SEQ ID NO: 583116 - RNA, 19 nt, Homo sapiens
  misc_RNA (1)...(19): siRNA sense strand
gaauagauacugccaaacu

SEQ ID NO: 583117 - RNA, 19 nt, Homo sapiens
  misc_RNA (1)...(19): siRNA sense strand
ccaguuuaauggccaguaa

SEQ ID NO: 583118 - RNA, 19 nt, Homo sapiens
  misc_RNA (1)...(19): siRNA sense strand
gaaguaucccaguuuaaug

SEQ ID NO: 583119 - RNA, 19 nt, Homo sapiens
  misc_RNA (1)...(19): siRNA sense strand
cagcuccuauuccaacuuu

SEQ ID NO: 583120 - RNA, 19 nt, Homo sapiens
  misc_RNA (1)...(19): siRNA sense strand
gauaaaguauggaauaacc

SEQ ID NO: 583121 - RNA, 19 nt, Homo sapiens
  misc_RNA (1)...(19): siRNA sense strand
caggaugacuuugcagauu

SEQ ID NO: 583122 - RNA, 19 nt, Homo sapiens
  misc_RNA (1)...(19): siRNA sense strand
uuaaguggcuuuucuauga

SEQ ID NO: 583123 - RNA, 19 nt, Homo sapiens
  misc_RNA (1)...(19): siRNA sense strand
gagagaagaguagagauga

SEQ ID NO: 583124 - RNA, 19 nt, Homo sapiens
  misc_RNA (1)...(19): siRNA sense strand
cucaaggcauggaauauuu

SEQ ID NO: 583125 - RNA, 19 nt, Homo sapiens
  misc_RNA (1)...(19): siRNA sense strand
gggaggcggcuucauguuu

SEQ ID NO: 583126 - RNA, 19 nt, Homo sapiens
  misc_RNA (1)...(19): siRNA sense strand
ucccagcucuugccaguuu

SEQ ID NO: 583127 - RNA, 19 nt, Homo sapiens
  misc_RNA (1)...(19): siRNA sense strand
gagcacacuuacaagcuau

SEQ ID NO: 583128 - RNA, 19 nt, Homo sapiens
  misc_RNA (1)...(19): siRNA sense strand
gacaugaaauuggcugaug

SEQ ID NO: 583129 - RNA, 19 nt, Homo sapiens
  misc_RNA (1)...(19): siRNA sense strand
ugccuucaauggacaaaua

SEQ ID NO: 583130 - RNA, 19 nt, Homo sapiens
  misc_RNA (1)...(19): siRNA sense strand
acaaauaugaugcccuuaa

SEQ ID NO: 583131 - RNA, 19 nt, Homo sapiens
  misc_RNA (1)...(19): siRNA sense strand
ggagugugccucuugaaug

SEQ ID NO: 583132 - RNA, 19 nt, Homo sapiens
  misc_RNA (1)...(19): siRNA sense strand
gagcuugccuguggagugu

SEQ ID NO: 583133 - RNA, 19 nt, Homo sapiens
  misc_RNA (1)...(19): siRNA sense strand
uaaauggaaucaguaguag

SEQ ID NO: 583134 - RNA, 19 nt, Homo sapiens
  misc_RNA (1)...(19): siRNA sense strand
ggcaaaugauaccuuaaau

SEQ ID NO: 583135 - RNA, 19 nt, Homo sapiens
  misc_RNA (1)...(19): siRNA sense strand
ugagcacacuuacaagcua

SEQ ID NO: 583136 - RNA, 19 nt, Homo sapiens
  misc_RNA (1)...(19): siRNA sense strand
gggaaacucuuggacagau

SEQ ID NO: 583137 - RNA, 19 nt, Homo sapiens
  misc_RNA (1)...(19): siRNA sense strand
aaacaacaaacacaaguga

SEQ ID NO: 583138 - RNA, 19 nt, Homo sapiens
  misc_RNA (1)...(19): siRNA sense strand
ucagugauuuccaagaguu

SEQ ID NO: 583139 - RNA, 19 nt, Homo sapiens
  misc_RNA (1)...(19): siRNA sense strand
caaugaguccugaugcuuu

SEQ ID NO: 583140 - RNA, 19 nt, Homo sapiens
  misc_RNA (1)...(19): siRNA sense strand
gaaacaacaaacacaagug

SEQ ID NO: 583141 - RNA, 19 nt, Homo sapiens
  misc_RNA (1)...(19): siRNA sense strand
gcucaaggcauggaauauu

SEQ ID NO: 583142 - RNA, 19 nt, Homo sapiens
  misc_RNA (1)...(19): siRNA sense strand
ggagugcccugaaugucau

SEQ ID NO: 583143 - RNA, 19 nt, Homo sapiens
  misc_RNA (1)...(19): siRNA sense strand
agaaagagacuucauuugg

SEQ ID NO: 583144 - RNA, 19 nt, Homo sapiens
  misc_RNA (1)...(19): siRNA sense strand
ucagugaaguccuuagauc

SEQ ID NO: 583145 - RNA, 19 nt, Homo sapiens
  misc_RNA (1)...(19): siRNA sense strand
aaagccggaugacaaauau

SEQ ID NO: 583146 - RNA, 19 nt, Homo sapiens
  misc_RNA (1)...(19): siRNA sense strand
ggacaaauaugcuguguuu

SEQ ID NO: 583147 - RNA, 19 nt, Homo sapiens
  misc_RNA (1)...(19): siRNA sense strand
cagcaaauuugacuucuua

SEQ ID NO: 583148 - RNA, 19 nt, Homo sapiens
  misc_RNA (1)...(19): siRNA sense strand
ggagaaagcuuugcagaau

SEQ ID NO: 583149 - RNA, 19 nt, Homo sapiens
  misc_RNA (1)...(19): siRNA sense strand
uaagaaguaucccaguuua

SEQ ID NO: 583150 - RNA, 19 nt, Homo sapiens
  misc_RNA (1)...(19): siRNA sense strand
gaggagaucuuaagcaugu

SEQ ID NO: 583151 - RNA, 19 nt, Homo sapiens
  misc_RNA (1)...(19): siRNA sense strand
gaaauccagugaagaaaug

SEQ ID NO: 583152 - RNA, 19 nt, Homo sapiens
  misc_RNA (1)...(19): siRNA sense strand
gaacuuagcagaccuagau

SEQ ID NO: 583153 - RNA, 19 nt, Homo sapiens
  misc_RNA (1)...(19): siRNA sense strand
ggacaucgauaaaguaugg

SEQ ID NO: 583154 - RNA, 19 nt, Homo sapiens
  misc_RNA (1)...(19): siRNA sense strand
gaacagacagcagagaaua

SEQ ID NO: 583155 - RNA, 19 nt, Homo sapiens
  misc_RNA (1)...(19): siRNA sense strand
caaauaugaugcccuuaaa

SEQ ID NO: 583156 - RNA, 19 nt, Homo sapiens
  misc_RNA (1)...(19): siRNA sense strand
ccaauacucugaaugagaa

SEQ ID NO: 583157 - RNA, 19 nt, Homo sapiens
  misc_RNA (1)...(19): siRNA sense strand
gaguagagaugaugcuuug

SEQ ID NO: 583158 - RNA, 19 nt, Homo sapiens
  misc_RNA (1)...(19): siRNA sense strand
gagaaagcuuugcagaauu

SEQ ID NO: 583159 - RNA, 19 nt, Homo sapiens
  misc_RNA (1)...(19): siRNA sense strand
gaaauaagccguucuucuc

SEQ ID NO: 583160 - RNA, 19 nt, Homo sapiens
  misc_RNA (1)...(19): siRNA sense strand
uugaagaccugaaagauaa

SEQ ID NO: 583161 - RNA, 19 nt, Homo sapiens
  misc_RNA (1)...(19): siRNA sense strand
gggaaugccuuaccuagga

SEQ ID NO: 583162 - RNA, 19 nt, Homo sapiens
  misc_RNA (1)...(19): siRNA sense strand
caaguacgaugucuucaga

SEQ ID NO: 583163 - RNA, 19 nt, Homo sapiens
  misc_RNA (1)...(19): siRNA sense strand
ggaaacucuuggacagaua

SEQ ID NO: 583164 - RNA, 19 nt, Homo sapiens
  misc_RNA (1)...(19): siRNA sense strand
ugauagcucuuuggauuua

SEQ ID NO: 583165 - RNA, 19 nt, Homo sapiens
  misc_RNA (1)...(19): siRNA sense strand
ucugauagcucuuuggauu

SEQ ID NO: 583166 - RNA, 19 nt, Homo sapiens
  misc_RNA (1)...(19): siRNA sense strand
ugacaucucucuccaaagu

SEQ ID NO: 583167 - RNA, 19 nt, Homo sapiens
  misc_RNA (1)...(19): siRNA sense strand
ggaagggucuggacuaggu

SEQ ID NO: 583168 - RNA, 19 nt, Homo sapiens
  misc_RNA (1)...(19): siRNA sense strand
gaaggacaucgauaaagua

SEQ ID NO: 583169 - RNA, 19 nt, Homo sapiens
  misc_RNA (1)...(19): siRNA sense strand
aaagugagcuggcaaccuu

SEQ ID NO: 583170 - RNA, 19 nt, Homo sapiens
  misc_RNA (1)...(19): siRNA sense strand
caaagaagacucugcauca

SEQ ID NO: 583171 - RNA, 19 nt, Homo sapiens
  misc_RNA (1)...(19): siRNA sense strand
cagaaugccuccuuggauu

SEQ ID NO: 583172 - RNA, 19 nt, Homo sapiens
  misc_RNA (1)...(19): siRNA sense strand
gcagaaaacucucuccauu

SEQ ID NO: 583173 - RNA, 19 nt, Homo sapiens
  misc_RNA (1)...(19): siRNA sense strand
ggaauauucuggucuagca

SEQ ID NO: 583174 - RNA, 19 nt, Homo sapiens
  misc_RNA (1)...(19): siRNA sense strand
gaugaugguuucaccgauu

SEQ ID NO: 583175 - RNA, 19 nt, Homo sapiens
  misc_RNA (1)...(19): siRNA sense strand
uagcagaccuagauauguu

SEQ ID NO: 583176 - RNA, 19 nt, Homo sapiens
  misc_RNA (1)...(19): siRNA sense strand
guucaaggaucacacaaga

SEQ ID NO: 583177 - RNA, 19 nt, Homo sapiens
  misc_RNA (1)...(19): siRNA sense strand
ggacagauaugggccuuag

SEQ ID NO: 583178 - RNA, 19 nt, Homo sapiens
  misc_RNA (1)...(19): siRNA sense strand
uaacgaccuuuguaaguga

SEQ ID NO: 583179 - RNA, 19 nt, Homo sapiens
  misc_RNA (1)...(19): siRNA sense strand
ucaagaugcuucuaaguca

SEQ ID NO: 583180 - RNA, 19 nt, Homo sapiens
  misc_RNA (1)...(19): siRNA sense strand
guaagaaguaucccaguuu

SEQ ID NO: 583181 - RNA, 19 nt, Homo sapiens
  misc_RNA (1)...(19): siRNA sense strand
ugaaggacaucgauaaagu

SEQ ID NO: 583182 - RNA, 19 nt, Homo sapiens
  misc_RNA (1)...(19): siRNA sense strand
caaaugauaccuuaaaugg

SEQ ID NO: 583183 - RNA, 19 nt, Homo sapiens
  misc_RNA (1)...(19): siRNA sense strand
caugacaucucucuccaaa

SEQ ID NO: 583184 - RNA, 19 nt, Homo sapiens
  misc_RNA (1)...(19): siRNA sense strand
gcgagaaaccauugucuuu

SEQ ID NO: 583185 - RNA, 19 nt, Homo sapiens
  misc_RNA (1)...(19): siRNA sense strand
caaccuacccugcaaauca

SEQ ID NO: 583186 - RNA, 19 nt, Homo sapiens
  misc_RNA (1)...(19): siRNA sense strand
gaucaaaaccugucaauug

SEQ ID NO: 583187 - RNA, 19 nt, Homo sapiens
  misc_RNA (1)...(19): siRNA sense strand
ggaugacuuuggagaguuu

SEQ ID NO: 583188 - RNA, 19 nt, Homo sapiens
  misc_RNA (1)...(19): siRNA sense strand
guaacgaccuuuguaagug

SEQ ID NO: 583189 - RNA, 19 nt, Homo sapiens
  misc_RNA (1)...(19): siRNA sense strand
gaagaugcacucucuguuc

SEQ ID NO: 583190 - RNA, 19 nt, Homo sapiens
  misc_RNA (1)...(19): siRNA sense strand
gcaaggaggacucugaaga

SEQ ID NO: 583191 - RNA, 19 nt, Homo sapiens
  misc_RNA (1)...(19): siRNA sense strand
gaauucagaucugcaggaa

SEQ ID NO: 583192 - RNA, 19 nt, Homo sapiens
  misc_RNA (1)...(19): siRNA sense strand
ggaggcggcuucauguuuc

SEQ ID NO: 583193 - RNA, 19 nt, Homo sapiens
  misc_RNA (1)...(19): siRNA sense strand
gcugacaaguccucugaaa

SEQ ID NO: 583194 - RNA, 19 nt, Homo sapiens
  misc_RNA (1)...(19): siRNA sense strand
ccaaggaccuauugcuaug

SEQ ID NO: 583195 - RNA, 19 nt, Homo sapiens
  misc_RNA (1)...(19): siRNA sense strand
guagauggauguguaagug

SEQ ID NO: 583196 - RNA, 19 nt, Homo sapiens
  misc_RNA (1)...(19): siRNA sense strand
gagccuuggugauaaagaa

SEQ ID NO: 583197 - RNA, 19 nt, Homo sapiens
  misc_RNA (1)...(19): siRNA sense strand
cagcagagaauaaaccuuu

SEQ ID NO: 583198 - RNA, 19 nt, Homo sapiens
  misc_RNA (1)...(19): siRNA sense strand
ggauuuacaaugagaguuu

SEQ ID NO: 583199 - RNA, 19 nt, Homo sapiens
  misc_RNA (1)...(19): siRNA sense strand
gagugugccucuugaaugu

SEQ ID NO: 583200 - RNA, 19 nt, Homo sapiens
  misc_RNA (1)...(19): siRNA sense strand
gcaaaugauaccuuaaaug

SEQ ID NO: 583201 - RNA, 19 nt, Homo sapiens
  misc_RNA (1)...(19): siRNA sense strand
guugaagaccugaaagaua

SEQ ID NO: 583202 - RNA, 19 nt, Homo sapiens
  misc_RNA (1)...(19): siRNA sense strand
ggaggacucugaagaugca

SEQ ID NO: 583203 - RNA, 19 nt, Homo sapiens
  misc_RNA (1)...(19): siRNA sense strand
gaaugccuccuuggauuua

SEQ ID NO: 583204 - RNA, 19 nt, Homo sapiens
  misc_RNA (1)...(19): siRNA sense strand
gaugaaaacucgcuggauu

SEQ ID NO: 583205 - RNA, 19 nt, Homo sapiens
  misc_RNA (1)...(19): siRNA sense strand
gggaggagaucuuaagcau

SEQ ID NO: 583206 - RNA, 19 nt, Homo sapiens
  misc_RNA (1)...(19): siRNA sense strand
ggugauaaauauagugcuu

SEQ ID NO: 583207 - RNA, 19 nt, Homo sapiens
  misc_RNA (1)...(19): siRNA sense strand
aaugaguccugaugcuuua

SEQ ID NO: 583208 - RNA, 19 nt, Homo sapiens
  misc_RNA (1)...(19): siRNA sense strand
uggaauagauacugccaaa

SEQ ID NO: 583209 - RNA, 19 nt, Homo sapiens
  misc_RNA (1)...(19): siRNA sense strand
gauaugggccuuagcuaau

SEQ ID NO: 583210 - RNA, 19 nt, Homo sapiens
  misc_RNA (1)...(19): siRNA sense strand
gaucaacugugucgaacca

SEQ ID NO: 583211 - RNA, 19 nt, Homo sapiens
  misc_RNA (1)...(19): siRNA sense strand
gcauaugaauggcagagau

SEQ ID NO: 583212 - RNA, 19 nt, Homo sapiens
  misc_RNA (1)...(19): siRNA sense strand
agaaagcuuugcagaauuc

SEQ ID NO: 583213 - RNA, 19 nt, Homo sapiens
  misc_RNA (1)...(19): siRNA sense strand
ggagagaagaguagagaug

SEQ ID NO: 583214 - RNA, 19 nt, Homo sapiens
  misc_RNA (1)...(19): siRNA sense strand
gagauccuggugauaaaua

SEQ ID NO: 583215 - RNA, 19 nt, Homo sapiens
  misc_RNA (1)...(19): siRNA sense strand
aagaugacuuccaggauuu

SEQ ID NO: 583216 - RNA, 19 nt, Homo sapiens
  misc_RNA (1)...(19): siRNA sense strand
gaauagauacugccaaacu

SEQ ID NO: 583217 - RNA, 19 nt, Homo sapiens
  misc_RNA (1)...(19): siRNA sense strand
ccaguuuaauggccaguaa

SEQ ID NO: 583218 - RNA, 19 nt, Homo sapiens
  misc_RNA (1)...(19): siRNA sense strand
gaaguaucccaguuuaaug

SEQ ID NO: 583219 - RNA, 19 nt, Homo sapiens
  misc_RNA (1)...(19): siRNA sense strand
cagcuccuauuccaacuuu

SEQ ID NO: 583220 - RNA, 19 nt, Homo sapiens
  misc_RNA (1)...(19): siRNA sense strand
gauaaaguauggaauaacc

SEQ ID NO: 583221 - RNA, 19 nt, Homo sapiens
  misc_RNA (1)...(19): siRNA sense strand
caggaugacuuugcagauu

SEQ ID NO: 583222 - RNA, 19 nt, Homo sapiens
  misc_RNA (1)...(19): siRNA sense strand
uuaaguggcuuuucuauga

SEQ ID NO: 583223 - RNA, 19 nt, Homo sapiens
  misc_RNA (1)...(19): siRNA sense strand
gagagaagaguagagauga

SEQ ID NO: 583224 - RNA, 19 nt, Homo sapiens
  misc_RNA (1)...(19): siRNA sense strand
cucaaggcauggaauauuu

SEQ ID NO: 583225 - RNA, 19 nt, Homo sapiens
  misc_RNA (1)...(19): siRNA sense strand
gggaggcggcuucauguuu

SEQ ID NO: 583226 - RNA, 19 nt, Homo sapiens
  misc_RNA (1)...(19): siRNA sense strand
ucccagcucuugccaguuu

SEQ ID NO: 583227 - RNA, 19 nt, Homo sapiens
  misc_RNA (1)...(19): siRNA sense strand
gagcacacuuacaagcuau

SEQ ID NO: 583228 - RNA, 19 nt, Homo sapiens
  misc_RNA (1)...(19): siRNA sense strand
gacaugaaauuggcugaug

SEQ ID NO: 583229 - RNA, 19 nt, Homo sapiens
  misc_RNA (1)...(19): siRNA sense strand
ugccuucaauggacaaaua

SEQ ID NO: 583230 - RNA, 19 nt, Homo sapiens
  misc_RNA (1)...(19): siRNA sense strand
acaaauaugaugcccuuaa

SEQ ID NO: 583231 - RNA, 19 nt, Homo sapiens
  misc_RNA (1)...(19): siRNA sense strand
ggagugugccucuugaaug

SEQ ID NO: 583232 - RNA, 19 nt, Homo sapiens
  misc_RNA (1)...(19): siRNA sense strand
gagcuugccuguggagugu

SEQ ID NO: 583233 - RNA, 19 nt, Homo sapiens
  misc_RNA (1)...(19): siRNA sense strand
uaaauggaaucaguaguag

SEQ ID NO: 583234 - RNA, 19 nt, Homo sapiens
  misc_RNA (1)...(19): siRNA sense strand
ggcaaaugauaccuuaaau

SEQ ID NO: 583235 - RNA, 19 nt, Homo sapiens
  misc_RNA (1)...(19): siRNA sense strand
ugagcacacuuacaagcua

SEQ ID NO: 583236 - RNA, 19 nt, Homo sapiens
  misc_RNA (1)...(19): siRNA sense strand
gggaaacucuuggacagau

SEQ ID NO: 583237 - RNA, 19 nt, Homo sapiens
  misc_RNA (1)...(19): siRNA sense strand
aaacaacaaacacaaguga

SEQ ID NO: 583238 - RNA, 19 nt, Homo sapiens
  misc_RNA (1)...(19): siRNA sense strand
ucagugauuuccaagaguu

SEQ ID NO: 583239 - RNA, 19 nt, Homo sapiens
  misc_RNA (1)...(19): siRNA sense strand
caaugaguccugaugcuuu

SEQ ID NO: 583240 - RNA, 19 nt, Homo sapiens
  misc_RNA (1)...(19): siRNA sense strand
gaaacaacaaacacaagug

SEQ ID NO: 583241 - RNA, 19 nt, Homo sapiens
  misc_RNA (1)...(19): siRNA sense strand
gcucaaggcauggaauauu

SEQ ID NO: 583242 - RNA, 19 nt, Homo sapiens
  misc_RNA (1)...(19): siRNA sense strand
ggagugcccugaaugucau

SEQ ID NO: 583243 - RNA, 19 nt, Homo sapiens
  misc_RNA (1)...(19): siRNA sense strand
agaaagagacuucauuugg

SEQ ID NO: 583244 - RNA, 19 nt, Homo sapiens
  misc_RNA (1)...(19): siRNA sense strand
ucagugaaguccuuagauc

SEQ ID NO: 583245 - RNA, 19 nt, Homo sapiens
  misc_RNA (1)...(19): siRNA sense strand
aaagccggaugacaaauau

SEQ ID NO: 583246 - RNA, 19 nt, Homo sapiens
  misc_RNA (1)...(19): siRNA sense strand
ggacaaauaugcuguguuu

SEQ ID NO: 583247 - RNA, 19 nt, Homo sapiens
  misc_RNA (1)...(19): siRNA sense strand
cagcaaauuugacuucuua

SEQ ID NO: 583248 - RNA, 19 nt, Homo sapiens
  misc_RNA (1)...(19): siRNA sense strand
ggagaaagcuuugcagaau

SEQ ID NO: 583249 - RNA, 19 nt, Homo sapiens
  misc_RNA (1)...(19): siRNA sense strand
uaagaaguaucccaguuua

SEQ ID NO: 583250 - RNA, 19 nt, Homo sapiens
  misc_RNA (1)...(19): siRNA sense strand
gaggagaucuuaagcaugu

SEQ ID NO: 583251 - RNA, 19 nt, Homo sapiens
  misc_RNA (1)...(19): siRNA sense strand
gaaauccagugaagaaaug

SEQ ID NO: 583252 - RNA, 19 nt, Homo sapiens
  misc_RNA (1)...(19): siRNA sense strand
gaacuuagcagaccuagau

SEQ ID NO: 583253 - RNA, 19 nt, Homo sapiens
  misc_RNA (1)...(19): siRNA sense strand
ggacaucgauaaaguaugg

SEQ ID NO: 583254 - RNA, 19 nt, Homo sapiens
  misc_RNA (1)...(19): siRNA sense strand
gaacagacagcagagaaua

SEQ ID NO: 583255 - RNA, 19 nt, Homo sapiens
  misc_RNA (1)...(19): siRNA sense strand
caaauaugaugcccuuaaa

SEQ ID NO: 583256 - RNA, 19 nt, Homo sapiens
  misc_RNA (1)...(19): siRNA sense strand
ccaauacucugaaugagaa

SEQ ID NO: 583257 - RNA, 19 nt, Homo sapiens
  misc_RNA (1)...(19): siRNA sense strand
gaguagagaugaugcuuug

SEQ ID NO: 583258 - RNA, 19 nt, Homo sapiens
  misc_RNA (1)...(19): siRNA sense strand
gagaaagcuuugcagaauu

SEQ ID NO: 583259 - RNA, 19 nt, Homo sapiens
  misc_RNA (1)...(19): siRNA sense strand
gaaauaagccguucuucuc

SEQ ID NO: 583260 - RNA, 19 nt, Homo sapiens
  misc_RNA (1)...(19): siRNA sense strand
uugaagaccugaaagauaa

SEQ ID NO: 583261 - RNA, 19 nt, Homo sapiens
  misc_RNA (1)...(19): siRNA sense strand
gggaaugccuuaccuagga

SEQ ID NO: 583262 - RNA, 19 nt, Homo sapiens
  misc_RNA (1)...(19): siRNA sense strand
caaguacgaugucuucaga

SEQ ID NO: 583263 - RNA, 19 nt, Homo sapiens
  misc_RNA (1)...(19): siRNA sense strand
ggaaacucuuggacagaua

SEQ ID NO: 583264 - RNA, 19 nt, Homo sapiens
  misc_RNA (1)...(19): siRNA sense strand
ugauagcucuuuggauuua

SEQ ID NO: 583265 - RNA, 19 nt, Homo sapiens
  misc_RNA (1)...(19): siRNA sense strand
ucugauagcucuuuggauu

SEQ ID NO: 583266 - RNA, 19 nt, Homo sapiens
  misc_RNA (1)...(19): siRNA sense strand
ugacaucucucuccaaagu

SEQ ID NO: 583267 - RNA, 19 nt, Homo sapiens
  misc_RNA (1)...(19): siRNA sense strand
ggaagggucuggacuaggu

SEQ ID NO: 583268 - RNA, 19 nt, Homo sapiens
  misc_RNA (1)...(19): siRNA sense strand
gaaggacaucgauaaagua

SEQ ID NO: 583269 - RNA, 19 nt, Homo sapiens
  misc_RNA (1)...(19): siRNA sense strand
aaagugagcuggcaaccuu

SEQ ID NO: 583270 - RNA, 19 nt, Homo sapiens
  misc_RNA (1)...(19): siRNA sense strand
caaagaagacucugcauca

SEQ ID NO: 583271 - RNA, 19 nt, Homo sapiens
  misc_RNA (1)...(19): siRNA sense strand
cagaaugccuccuuggauu

SEQ ID NO: 583272 - RNA, 19 nt, Homo sapiens
  misc_RNA (1)...(19): siRNA sense strand
gcagaaaacucucuccauu

SEQ ID NO: 583273 - RNA, 19 nt, Homo sapiens
  misc_RNA (1)...(19): siRNA sense strand
ggaauauucuggucuagca

SEQ ID NO: 583274 - RNA, 19 nt, Homo sapiens
  misc_RNA (1)...(19): siRNA sense strand
gaugaugguuucaccgauu

SEQ ID NO: 583275 - RNA, 19 nt, Homo sapiens
  misc_RNA (1)...(19): siRNA sense strand
uagcagaccuagauauguu

SEQ ID NO: 583276 - RNA, 19 nt, Homo sapiens
  misc_RNA (1)...(19): siRNA sense strand
guucaaggaucacacaaga

SEQ ID NO: 583277 - RNA, 19 nt, Homo sapiens
  misc_RNA (1)...(19): siRNA sense strand
ggacagauaugggccuuag

SEQ ID NO: 583278 - RNA, 19 nt, Homo sapiens
  misc_RNA (1)...(19): siRNA sense strand
uaacgaccuuuguaaguga

SEQ ID NO: 583279 - RNA, 19 nt, Homo sapiens
  misc_RNA (1)...(19): siRNA sense strand
ucaagaugcuucuaaguca

SEQ ID NO: 583280 - RNA, 19 nt, Homo sapiens
  misc_RNA (1)...(19): siRNA sense strand
guaagaaguaucccaguuu

SEQ ID NO: 583281 - RNA, 19 nt, Homo sapiens
  misc_RNA (1)...(19): siRNA sense strand
ugaaggacaucgauaaagu

SEQ ID NO: 583282 - RNA, 19 nt, Homo sapiens
  misc_RNA (1)...(19): siRNA sense strand
caaaugauaccuuaaaugg

SEQ ID NO: 583283 - RNA, 19 nt, Homo sapiens
  misc_RNA (1)...(19): siRNA sense strand
caugacaucucucuccaaa

SEQ ID NO: 583284 - RNA, 19 nt, Homo sapiens
  misc_RNA (1)...(19): siRNA sense strand
gcgagaaaccauugucuuu

SEQ ID NO: 583285 - RNA, 19 nt, Homo sapiens
  misc_RNA (1)...(19): siRNA sense strand
caaccuacccugcaaauca

SEQ ID NO: 583286 - RNA, 19 nt, Homo sapiens
  misc_RNA (1)...(19): siRNA sense strand
gaucaaaaccugucaauug

SEQ ID NO: 583287 - RNA, 19 nt, Homo sapiens
  misc_RNA (1)...(19): siRNA sense strand
ggaugacuuuggagaguuu

SEQ ID NO: 583288 - RNA, 19 nt, Homo sapiens
  misc_RNA (1)...(19): siRNA sense strand
guaacgaccuuuguaagug

SEQ ID NO: 583289 - RNA, 19 nt, Homo sapiens
  misc_RNA (1)...(19): siRNA sense strand
gaagaugcacucucuguuc

SEQ ID NO: 583290 - RNA, 19 nt, Homo sapiens
  misc_RNA (1)...(19): siRNA sense strand
gcaaggaggacucugaaga

SEQ ID NO: 583291 - RNA, 19 nt, Homo sapiens
  misc_RNA (1)...(19): siRNA sense strand
gaauucagaucugcaggaa

SEQ ID NO: 583292 - RNA, 19 nt, Homo sapiens
  misc_RNA (1)...(19): siRNA sense strand
ggaggcggcuucauguuuc

SEQ ID NO: 583293 - RNA, 19 nt, Homo sapiens
  misc_RNA (1)...(19): siRNA sense strand
gcugacaaguccucugaaa

SEQ ID NO: 583294 - RNA, 19 nt, Homo sapiens
  misc_RNA (1)...(19): siRNA sense strand
ccaaggaccuauugcuaug

SEQ ID NO: 583295 - RNA, 19 nt, Homo sapiens
  misc_RNA (1)...(19): siRNA sense strand
guagauggauguguaagug

SEQ ID NO: 583296 - RNA, 19 nt, Homo sapiens
  misc_RNA (1)...(19): siRNA sense strand
gagccuuggugauaaagaa

SEQ ID NO: 583297 - RNA, 19 nt, Homo sapiens
  misc_RNA (1)...(19): siRNA sense strand
cagcagagaauaaaccuuu

SEQ ID NO: 583298 - RNA, 19 nt, Homo sapiens
  misc_RNA (1)...(19): siRNA sense strand
ggauuuacaaugagaguuu

SEQ ID NO: 583299 - RNA, 19 nt, Homo sapiens
  misc_RNA (1)...(19): siRNA sense strand
gagugugccucuugaaugu

SEQ ID NO: 583300 - RNA, 19 nt, Homo sapiens
  misc_RNA (1)...(19): siRNA sense strand
gcaaaugauaccuuaaaug

SEQ ID NO: 583301 - RNA, 19 nt, Homo sapiens
  misc_RNA (1)...(19): siRNA sense strand
guugaagaccugaaagaua

SEQ ID NO: 583302 - RNA, 19 nt, Homo sapiens
  misc_RNA (1)...(19): siRNA sense strand
ggaggacucugaagaugca

SEQ ID NO: 583303 - RNA, 19 nt, Homo sapiens
  misc_RNA (1)...(19): siRNA sense strand
gaaugccuccuuggauuua

SEQ ID NO: 583304 - RNA, 19 nt, Homo sapiens
  misc_RNA (1)...(19): siRNA sense strand
gaugaaaacucgcuggauu

SEQ ID NO: 583305 - RNA, 19 nt, Homo sapiens
  misc_RNA (1)...(19): siRNA sense strand
gggaggagaucuuaagcau

SEQ ID NO: 583306 - RNA, 19 nt, Homo sapiens
  misc_RNA (1)...(19): siRNA sense strand
ggugauaaauauagugcuu

SEQ ID NO: 583307 - RNA, 19 nt, Homo sapiens
  misc_RNA (1)...(19): siRNA sense strand
aaugaguccugaugcuuua

SEQ ID NO: 583308 - RNA, 19 nt, Homo sapiens
  misc_RNA (1)...(19): siRNA sense strand
uggaauagauacugccaaa

SEQ ID NO: 583309 - RNA, 19 nt, Homo sapiens
  misc_RNA (1)...(19): siRNA sense strand
gauaugggccuuagcuaau

SEQ ID NO: 583310 - RNA, 19 nt, Homo sapiens
  misc_RNA (1)...(19): siRNA sense strand
gaucaacugugucgaacca

SEQ ID NO: 583311 - RNA, 19 nt, Homo sapiens
  misc_RNA (1)...(19): siRNA sense strand
gcauaugaauggcagagau

SEQ ID NO: 583312 - RNA, 19 nt, Homo sapiens
  misc_RNA (1)...(19): siRNA sense strand
agaaagcuuugcagaauuc

SEQ ID NO: 583313 - RNA, 19 nt, Homo sapiens
  misc_RNA (1)...(19): siRNA sense strand
ggagagaagaguagagaug

SEQ ID NO: 583314 - RNA, 19 nt, Homo sapiens
  misc_RNA (1)...(19): siRNA sense strand
gagauccuggugauaaaua

SEQ ID NO: 583315 - RNA, 19 nt, Homo sapiens
  misc_RNA (1)...(19): siRNA sense strand
aagaugacuuccaggauuu

SEQ ID NO: 583316 - RNA, 19 nt, Homo sapiens
  misc_RNA (1)...(19): siRNA sense strand
gaauagauacugccaaacu

SEQ ID NO: 583317 - RNA, 19 nt, Homo sapiens
  misc_RNA (1)...(19): siRNA sense strand
ccaguuuaauggccaguaa

SEQ ID NO: 583318 - RNA, 19 nt, Homo sapiens
  misc_RNA (1)...(19): siRNA sense strand
gaaguaucccaguuuaaug

SEQ ID NO: 583319 - RNA, 19 nt, Homo sapiens
  misc_RNA (1)...(19): siRNA sense strand
cagcuccuauuccaacuuu

SEQ ID NO: 583320 - RNA, 19 nt, Homo sapiens
  misc_RNA (1)...(19): siRNA sense strand
gauaaaguauggaauaacc

SEQ ID NO: 583321 - RNA, 19 nt, Homo sapiens
  misc_RNA (1)...(19): siRNA sense strand
caggaugacuuugcagauu

SEQ ID NO: 583322 - RNA, 19 nt, Homo sapiens
  misc_RNA (1)...(19): siRNA sense strand
uuaaguggcuuuucuauga

SEQ ID NO: 583323 - RNA, 19 nt, Homo sapiens
  misc_RNA (1)...(19): siRNA sense strand
gagagaagaguagagauga

SEQ ID NO: 583324 - RNA, 19 nt, Homo sapiens
  misc_RNA (1)...(19): siRNA sense strand
cucaaggcauggaauauuu

SEQ ID NO: 583325 - RNA, 19 nt, Homo sapiens
  misc_RNA (1)...(19): siRNA sense strand
gggaggcggcuucauguuu

SEQ ID NO: 583326 - RNA, 19 nt, Homo sapiens
  misc_RNA (1)...(19): siRNA sense strand
ucccagcucuugccaguuu

SEQ ID NO: 583327 - RNA, 19 nt, Homo sapiens
  misc_RNA (1)...(19): siRNA sense strand
gagcacacuuacaagcuau

SEQ ID NO: 583328 - RNA, 19 nt, Homo sapiens
  misc_RNA (1)...(19): siRNA sense strand
gacaugaaauuggcugaug

SEQ ID NO: 583329 - RNA, 19 nt, Homo sapiens
  misc_RNA (1)...(19): siRNA sense strand
ugccuucaauggacaaaua

SEQ ID NO: 583330 - RNA, 19 nt, Homo sapiens
  misc_RNA (1)...(19): siRNA sense strand
acaaauaugaugcccuuaa

SEQ ID NO: 583331 - RNA, 19 nt, Homo sapiens
  misc_RNA (1)...(19): siRNA sense strand
ggagugugccucuugaaug

SEQ ID NO: 583332 - RNA, 19 nt, Homo sapiens
  misc_RNA (1)...(19): siRNA sense strand
gagcuugccuguggagugu

SEQ ID NO: 583333 - RNA, 19 nt, Homo sapiens
  misc_RNA (1)...(19): siRNA sense strand
uaaauggaaucaguaguag

SEQ ID NO: 583334 - RNA, 19 nt, Homo sapiens
  misc_RNA (1)...(19): siRNA sense strand
ggcaaaugauaccuuaaau

SEQ ID NO: 583335 - RNA, 19 nt, Homo sapiens
  misc_RNA (1)...(19): siRNA sense strand
ugagcacacuuacaagcua

SEQ ID NO: 583336 - RNA, 19 nt, Homo sapiens
  misc_RNA (1)...(19): siRNA sense strand
gggaaacucuuggacagau

SEQ ID NO: 583337 - RNA, 19 nt, Homo sapiens
  misc_RNA (1)...(19): siRNA sense strand
aaacaacaaacacaaguga

SEQ ID NO: 583338 - RNA, 19 nt, Homo sapiens
  misc_RNA (1)...(19): siRNA sense strand
ucagugauuuccaagaguu

SEQ ID NO: 583339 - RNA, 19 nt, Homo sapiens
  misc_RNA (1)...(19): siRNA sense strand
caaugaguccugaugcuuu

SEQ ID NO: 583340 - RNA, 19 nt, Homo sapiens
  misc_RNA (1)...(19): siRNA sense strand
gaaacaacaaacacaagug

SEQ ID NO: 583341 - RNA, 19 nt, Homo sapiens
  misc_RNA (1)...(19): siRNA sense strand
gcucaaggcauggaauauu

SEQ ID NO: 583342 - RNA, 19 nt, Homo sapiens
  misc_RNA (1)...(19): siRNA sense strand
ggagugcccugaaugucau

SEQ ID NO: 583343 - RNA, 19 nt, Homo sapiens
  misc_RNA (1)...(19): siRNA sense strand
agaaagagacuucauuugg

SEQ ID NO: 583344 - RNA, 19 nt, Homo sapiens
  misc_RNA (1)...(19): siRNA sense strand
ucagugaaguccuuagauc

SEQ ID NO: 583345 - RNA, 19 nt, Homo sapiens
  misc_RNA (1)...(19): siRNA sense strand
aaagccggaugacaaauau

SEQ ID NO: 583346 - RNA, 19 nt, Homo sapiens
  misc_RNA (1)...(19): siRNA sense strand
ggacaaauaugcuguguuu

SEQ ID NO: 583347 - RNA, 19 nt, Homo sapiens
  misc_RNA (1)...(19): siRNA sense strand
cagcaaauuugacuucuua

SEQ ID NO: 583348 - RNA, 19 nt, Homo sapiens
  misc_RNA (1)...(19): siRNA sense strand
ggagaaagcuuugcagaau

SEQ ID NO: 583349 - RNA, 19 nt, Homo sapiens
  misc_RNA (1)...(19): siRNA sense strand
uaagaaguaucccaguuua

SEQ ID NO: 583350 - RNA, 19 nt, Homo sapiens
  misc_RNA (1)...(19): siRNA sense strand
gaggagaucuuaagcaugu

SEQ ID NO: 583351 - RNA, 19 nt, Homo sapiens
  misc_RNA (1)...(19): siRNA sense strand
gaaauccagugaagaaaug

SEQ ID NO: 583352 - RNA, 19 nt, Homo sapiens
  misc_RNA (1)...(19): siRNA sense strand
gaacuuagcagaccuagau

SEQ ID NO: 583353 - RNA, 19 nt, Homo sapiens
  misc_RNA (1)...(19): siRNA sense strand
ggacaucgauaaaguaugg

SEQ ID NO: 583354 - RNA, 19 nt, Homo sapiens
  misc_RNA (1)...(19): siRNA sense strand
gaacagacagcagagaaua

SEQ ID NO: 583355 - RNA, 19 nt, Homo sapiens
  misc_RNA (1)...(19): siRNA sense strand
caaauaugaugcccuuaaa

SEQ ID NO: 583356 - RNA, 19 nt, Homo sapiens
  misc_RNA (1)...(19): siRNA sense strand
ccaauacucugaaugagaa

SEQ ID NO: 583357 - RNA, 19 nt, Homo sapiens
  misc_RNA (1)...(19): siRNA sense strand
gaguagagaugaugcuuug

SEQ ID NO: 583358 - RNA, 19 nt, Homo sapiens
  misc_RNA (1)...(19): siRNA sense strand
gagaaagcuuugcagaauu

SEQ ID NO: 583359 - RNA, 19 nt, Homo sapiens
  misc_RNA (1)...(19): siRNA sense strand
gaaauaagccguucuucuc

SEQ ID NO: 583360 - RNA, 19 nt, Homo sapiens
  misc_RNA (1)...(19): siRNA sense strand
uugaagaccugaaagauaa

SEQ ID NO: 583361 - RNA, 19 nt, Homo sapiens
  misc_RNA (1)...(19): siRNA sense strand
gggaaugccuuaccuagga

SEQ ID NO: 583362 - RNA, 19 nt, Homo sapiens
  misc_RNA (1)...(19): siRNA sense strand
caaguacgaugucuucaga

SEQ ID NO: 583363 - RNA, 19 nt, Homo sapiens
  misc_RNA (1)...(19): siRNA sense strand
ggaaacucuuggacagaua

SEQ ID NO: 583364 - RNA, 19 nt, Homo sapiens
  misc_RNA (1)...(19): siRNA sense strand
ugauagcucuuuggauuua

SEQ ID NO: 583365 - RNA, 19 nt, Homo sapiens
  misc_RNA (1)...(19): siRNA sense strand
ucugauagcucuuuggauu

SEQ ID NO: 583366 - RNA, 19 nt, Homo sapiens
  misc_RNA (1)...(19): siRNA sense strand
ugacaucucucuccaaagu

SEQ ID NO: 583367 - RNA, 19 nt, Homo sapiens
  misc_RNA (1)...(19): siRNA sense strand
ggaagggucuggacuaggu

SEQ ID NO: 583368 - RNA, 19 nt, Homo sapiens
  misc_RNA (1)...(19): siRNA sense strand
gaaggacaucgauaaagua

SEQ ID NO: 583369 - RNA, 19 nt, Homo sapiens
  misc_RNA (1)...(19): siRNA sense strand
aaagugagcuggcaaccuu

SEQ ID NO: 583370 - RNA, 19 nt, Homo sapiens
  misc_RNA (1)...(19): siRNA sense strand
caaagaagacucugcauca

SEQ ID NO: 583371 - RNA, 19 nt, Homo sapiens
  misc_RNA (1)...(19): siRNA sense strand
cagaaugccuccuuggauu

SEQ ID NO: 583372 - RNA, 19 nt, Homo sapiens
  misc_RNA (1)...(19): siRNA sense strand
gcagaaaacucucuccauu

SEQ ID NO: 583373 - RNA, 19 nt, Homo sapiens
  misc_RNA (1)...(19): siRNA sense strand
ggaauauucuggucuagca

SEQ ID NO: 583374 - RNA, 19 nt, Homo sapiens
  misc_RNA (1)...(19): siRNA sense strand
gaugaugguuucaccgauu

SEQ ID NO: 583375 - RNA, 19 nt, Homo sapiens
  misc_RNA (1)...(19): siRNA sense strand
uagcagaccuagauauguu

SEQ ID NO: 583376 - RNA, 19 nt, Homo sapiens
  misc_RNA (1)...(19): siRNA sense strand
guucaaggaucacacaaga

SEQ ID NO: 583377 - RNA, 19 nt, Homo sapiens
  misc_RNA (1)...(19): siRNA sense strand
ggacagauaugggccuuag

SEQ ID NO: 583378 - RNA, 19 nt, Homo sapiens
  misc_RNA (1)...(19): siRNA sense strand
uaacgaccuuuguaaguga

SEQ ID NO: 583379 - RNA, 19 nt, Homo sapiens
  misc_RNA (1)...(19): siRNA sense strand
ucaagaugcuucuaaguca

SEQ ID NO: 583380 - RNA, 19 nt, Homo sapiens
  misc_RNA (1)...(19): siRNA sense strand
guaagaaguaucccaguuu

SEQ ID NO: 583381 - RNA, 19 nt, Homo sapiens
  misc_RNA (1)...(19): siRNA sense strand
ugaaggacaucgauaaagu

SEQ ID NO: 583382 - RNA, 19 nt, Homo sapiens
  misc_RNA (1)...(19): siRNA sense strand
caaaugauaccuuaaaugg

SEQ ID NO: 583383 - RNA, 19 nt, Homo sapiens
  misc_RNA (1)...(19): siRNA sense strand
caugacaucucucuccaaa

SEQ ID NO: 583384 - RNA, 19 nt, Homo sapiens
  misc_RNA (1)...(19): siRNA sense strand
gcgagaaaccauugucuuu

SEQ ID NO: 583385 - RNA, 19 nt, Homo sapiens
  misc_RNA (1)...(19): siRNA sense strand
caaccuacccugcaaauca

SEQ ID NO: 583386 - RNA, 19 nt, Homo sapiens
  misc_RNA (1)...(19): siRNA sense strand
gaucaaaaccugucaauug

SEQ ID NO: 583387 - RNA, 19 nt, Homo sapiens
  misc_RNA (1)...(19): siRNA sense strand
ggaugacuuuggagaguuu

SEQ ID NO: 583388 - RNA, 19 nt, Homo sapiens
  misc_RNA (1)...(19): siRNA sense strand
guaacgaccuuuguaagug

SEQ ID NO: 583389 - RNA, 19 nt, Homo sapiens
  misc_RNA (1)...(19): siRNA sense strand
gaagaugcacucucuguuc

SEQ ID NO: 583390 - RNA, 19 nt, Homo sapiens
  misc_RNA (1)...(19): siRNA sense strand
gcaaggaggacucugaaga

SEQ ID NO: 583391 - RNA, 19 nt, Homo sapiens
  misc_RNA (1)...(19): siRNA sense strand
gaauucagaucugcaggaa

SEQ ID NO: 583392 - RNA, 19 nt, Homo sapiens
  misc_RNA (1)...(19): siRNA sense strand
ggaggcggcuucauguuuc

SEQ ID NO: 583393 - RNA, 19 nt, Homo sapiens
  misc_RNA (1)...(19): siRNA sense strand
gcugacaaguccucugaaa

SEQ ID NO: 583394 - RNA, 19 nt, Homo sapiens
  misc_RNA (1)...(19): siRNA sense strand
ccaaggaccuauugcuaug

SEQ ID NO: 583395 - RNA, 19 nt, Homo sapiens
  misc_RNA (1)...(19): siRNA sense strand
guagauggauguguaagug

SEQ ID NO: 583396 - RNA, 19 nt, Homo sapiens
  misc_RNA (1)...(19): siRNA sense strand
gagccuuggugauaaagaa

SEQ ID NO: 583397 - RNA, 19 nt, Homo sapiens
  misc_RNA (1)...(19): siRNA sense strand
cagcagagaauaaaccuuu

SEQ ID NO: 583398 - RNA, 19 nt, Homo sapiens
  misc_RNA (1)...(19): siRNA sense strand
ggauuuacaaugagaguuu

SEQ ID NO: 583399 - RNA, 19 nt, Homo sapiens
  misc_RNA (1)...(19): siRNA sense strand
gagugugccucuugaaugu

SEQ ID NO: 583400 - RNA, 19 nt, Homo sapiens
  misc_RNA (1)...(19): siRNA sense strand
gcaaaugauaccuuaaaug

SEQ ID NO: 583401 - RNA, 19 nt, Homo sapiens
  misc_RNA (1)...(19): siRNA sense strand
guugaagaccugaaagaua

SEQ ID NO: 583402 - RNA, 19 nt, Homo sapiens
  misc_RNA (1)...(19): siRNA sense strand
ggaggacucugaagaugca

SEQ ID NO: 583403 - RNA, 19 nt, Homo sapiens
  misc_RNA (1)...(19): siRNA sense strand
gaaugccuccuuggauuua

SEQ ID NO: 583404 - RNA, 19 nt, Homo sapiens
  misc_RNA (1)...(19): siRNA sense strand
gaugaaaacucgcuggauu

SEQ ID NO: 583405 - RNA, 19 nt, Homo sapiens
  misc_RNA (1)...(19): siRNA sense strand
gggaggagaucuuaagcau

SEQ ID NO: 583406 - RNA, 19 nt, Homo sapiens
  misc_RNA (1)...(19): siRNA sense strand
ggugauaaauauagugcuu

SEQ ID NO: 583407 - RNA, 19 nt, Homo sapiens
  misc_RNA (1)...(19): siRNA sense strand
aaugaguccugaugcuuua

SEQ ID NO: 583408 - RNA, 19 nt, Homo sapiens
  misc_RNA (1)...(19): siRNA sense strand
uggaauagauacugccaaa

SEQ ID NO: 583409 - RNA, 19 nt, Homo sapiens
  misc_RNA (1)...(19): siRNA sense strand
gauaugggccuuagcuaau

SEQ ID NO: 583410 - RNA, 19 nt, Homo sapiens
  misc_RNA (1)...(19): siRNA sense strand
gaucaacugugucgaacca

SEQ ID NO: 583411 - RNA, 19 nt, Homo sapiens
  misc_RNA (1)...(19): siRNA sense strand
gcauaugaauggcagagau

SEQ ID NO: 583412 - RNA, 19 nt, Homo sapiens
  misc_RNA (1)...(19): siRNA sense strand
agaaagcuuugcagaauuc

SEQ ID NO: 583413 - RNA, 19 nt, Homo sapiens
  misc_RNA (1)...(19): siRNA sense strand
ggagagaagaguagagaug

SEQ ID NO: 583414 - RNA, 19 nt, Homo sapiens
  misc_RNA (1)...(19): siRNA sense strand
gagauccuggugauaaaua

SEQ ID NO: 583415 - RNA, 19 nt, Homo sapiens
  misc_RNA (1)...(19): siRNA sense strand
aagaugacuuccaggauuu

SEQ ID NO: 583416 - RNA, 19 nt, Homo sapiens
  misc_RNA (1)...(19): siRNA sense strand
gaauagauacugccaaacu

SEQ ID NO: 583417 - RNA, 19 nt, Homo sapiens
  misc_RNA (1)...(19): siRNA sense strand
ccaguuuaauggccaguaa

SEQ ID NO: 583418 - RNA, 19 nt, Homo sapiens
  misc_RNA (1)...(19): siRNA sense strand
gaaguaucccaguuuaaug

SEQ ID NO: 583419 - RNA, 19 nt, Homo sapiens
  misc_RNA (1)...(19): siRNA sense strand
cagcuccuauuccaacuuu

SEQ ID NO: 583420 - RNA, 19 nt, Homo sapiens
  misc_RNA (1)...(19): siRNA sense strand
gauaaaguauggaauaacc

SEQ ID NO: 583421 - RNA, 19 nt, Homo sapiens
  misc_RNA (1)...(19): siRNA sense strand
caggaugacuuugcagauu

SEQ ID NO: 583422 - RNA, 19 nt, Homo sapiens
  misc_RNA (1)...(19): siRNA sense strand
uuaaguggcuuuucuauga

SEQ ID NO: 583423 - RNA, 19 nt, Homo sapiens
  misc_RNA (1)...(19): siRNA sense strand
gagagaagaguagagauga

SEQ ID NO: 583424 - RNA, 19 nt, Homo sapiens
  misc_RNA (1)...(19): siRNA sense strand
cucaaggcauggaauauuu

SEQ ID NO: 583425 - RNA, 19 nt, Homo sapiens
  misc_RNA (1)...(19): siRNA sense strand
gggaggcggcuucauguuu

SEQ ID NO: 583426 - RNA, 19 nt, Homo sapiens
  misc_RNA (1)...(19): siRNA sense strand
ucccagcucuugccaguuu

SEQ ID NO: 583427 - RNA, 19 nt, Homo sapiens
  misc_RNA (1)...(19): siRNA sense strand
gagcacacuuacaagcuau

SEQ ID NO: 583428 - RNA, 19 nt, Homo sapiens
  misc_RNA (1)...(19): siRNA sense strand
gacaugaaauuggcugaug

SEQ ID NO: 583429 - RNA, 19 nt, Homo sapiens
  misc_RNA (1)...(19): siRNA sense strand
ugccuucaauggacaaaua

SEQ ID NO: 583430 - RNA, 19 nt, Homo sapiens
  misc_RNA (1)...(19): siRNA sense strand
acaaauaugaugcccuuaa

SEQ ID NO: 583431 - RNA, 19 nt, Homo sapiens
  misc_RNA (1)...(19): siRNA sense strand
ggagugugccucuugaaug

SEQ ID NO: 583432 - RNA, 19 nt, Homo sapiens
  misc_RNA (1)...(19): siRNA sense strand
gagcuugccuguggagugu

SEQ ID NO: 583433 - RNA, 19 nt, Homo sapiens
  misc_RNA (1)...(19): siRNA sense strand
uaaauggaaucaguaguag

SEQ ID NO: 583434 - RNA, 19 nt, Homo sapiens
  misc_RNA (1)...(19): siRNA sense strand
ggcaaaugauaccuuaaau

SEQ ID NO: 583435 - RNA, 19 nt, Homo sapiens
  misc_RNA (1)...(19): siRNA sense strand
ugagcacacuuacaagcua

SEQ ID NO: 583436 - RNA, 19 nt, Homo sapiens
  misc_RNA (1)...(19): siRNA sense strand
gggaaacucuuggacagau

SEQ ID NO: 583437 - RNA, 19 nt, Homo sapiens
  misc_RNA (1)...(19): siRNA sense strand
aaacaacaaacacaaguga

SEQ ID NO: 583438 - RNA, 19 nt, Homo sapiens
  misc_RNA (1)...(19): siRNA sense strand
ucagugauuuccaagaguu

SEQ ID NO: 583439 - RNA, 19 nt, Homo sapiens
  misc_RNA (1)...(19): siRNA sense strand
caaugaguccugaugcuuu

SEQ ID NO: 583440 - RNA, 19 nt, Homo sapiens
  misc_RNA (1)...(19): siRNA sense strand
gaaacaacaaacacaagug

SEQ ID NO: 583441 - RNA, 19 nt, Homo sapiens
  misc_RNA (1)...(19): siRNA sense strand
gcucaaggcauggaauauu

SEQ ID NO: 583442 - RNA, 19 nt, Homo sapiens
  misc_RNA (1)...(19): siRNA sense strand
ggagugcccugaaugucau

SEQ ID NO: 583443 - RNA, 19 nt, Homo sapiens
  misc_RNA (1)...(19): siRNA sense strand
agaaagagacuucauuugg

SEQ ID NO: 583444 - RNA, 19 nt, Homo sapiens
  misc_RNA (1)...(19): siRNA sense strand
ucagugaaguccuuagauc

SEQ ID NO: 583445 - RNA, 19 nt, Homo sapiens
  misc_RNA (1)...(19): siRNA sense strand
aaagccggaugacaaauau

SEQ ID NO: 583446 - RNA, 19 nt, Homo sapiens
  misc_RNA (1)...(19): siRNA sense strand
gaaccuaacacgaaaguuu

SEQ ID NO: 583447 - RNA, 19 nt, Homo sapiens
  misc_RNA (1)...(19): siRNA sense strand
uaaggaugcuugauuauga

SEQ ID NO: 583448 - RNA, 19 nt, Homo sapiens
  misc_RNA (1)...(19): siRNA sense strand
gcuaauaccuuggacuuug

SEQ ID NO: 583449 - RNA, 19 nt, Homo sapiens
  misc_RNA (1)...(19): siRNA sense strand
gaaaacagcugaugaaggu

SEQ ID NO: 583450 - RNA, 19 nt, Homo sapiens
  misc_RNA (1)...(19): siRNA sense strand
gaagguacaaauacaagua

SEQ ID NO: 583451 - RNA, 19 nt, Homo sapiens
  misc_RNA (1)...(19): siRNA sense strand
aaacucgaauucaaccuua

SEQ ID NO: 583452 - RNA, 19 nt, Homo sapiens
  misc_RNA (1)...(19): siRNA sense strand
gaauggagcuauggacguu

SEQ ID NO: 583453 - RNA, 19 nt, Homo sapiens
  misc_RNA (1)...(19): siRNA sense strand
gggaaugccuuaugaccuu

SEQ ID NO: 583454 - RNA, 19 nt, Homo sapiens
  misc_RNA (1)...(19): siRNA sense strand
gcacuuggaacuuaaagaa

SEQ ID NO: 583455 - RNA, 19 nt, Homo sapiens
  misc_RNA (1)...(19): siRNA sense strand
ggccaagggucuacaauuc

SEQ ID NO: 583456 - RNA, 19 nt, Homo sapiens
  misc_RNA (1)...(19): siRNA sense strand
gaaggacaucugacaauga

SEQ ID NO: 583457 - RNA, 19 nt, Homo sapiens
  misc_RNA (1)...(19): siRNA sense strand
gcaaucaggccuaccagaa

SEQ ID NO: 583458 - RNA, 19 nt, Homo sapiens
  misc_RNA (1)...(19): siRNA sense strand
gcaaggggcugauagagaa

SEQ ID NO: 583459 - RNA, 19 nt, Homo sapiens
  misc_RNA (1)...(19): siRNA sense strand
cuuaugaccuugccauuga

SEQ ID NO: 583460 - RNA, 19 nt, Homo sapiens
  misc_RNA (1)...(19): siRNA sense strand
ccaaugagguagaucagau

SEQ ID NO: 583461 - RNA, 19 nt, Homo sapiens
  misc_RNA (1)...(19): siRNA sense strand
uuaaugagguuuacuaugc

SEQ ID NO: 583462 - RNA, 19 nt, Homo sapiens
  misc_RNA (1)...(19): siRNA sense strand
gcaauuuccugcuccucuu

SEQ ID NO: 583463 - RNA, 19 nt, Homo sapiens
  misc_RNA (1)...(19): siRNA sense strand
gcagugcaaucaagauagu

SEQ ID NO: 583464 - RNA, 19 nt, Homo sapiens
  misc_RNA (1)...(19): siRNA sense strand
gacaggaguuugugugcaa

SEQ ID NO: 583465 - RNA, 19 nt, Homo sapiens
  misc_RNA (1)...(19): siRNA sense strand
gagcuauggacguuaauuu

SEQ ID NO: 583466 - RNA, 19 nt, Homo sapiens
  misc_RNA (1)...(19): siRNA sense strand
gcugaugaagguacaaaua

SEQ ID NO: 583467 - RNA, 19 nt, Homo sapiens
  misc_RNA (1)...(19): siRNA sense strand
gaaguucaaagaccucauu

SEQ ID NO: 583468 - RNA, 19 nt, Homo sapiens
  misc_RNA (1)...(19): siRNA sense strand
aaaaguggauggaucguua

SEQ ID NO: 583469 - RNA, 19 nt, Homo sapiens
  misc_RNA (1)...(19): siRNA sense strand
gauggcacuuggaacuuaa

SEQ ID NO: 583470 - RNA, 19 nt, Homo sapiens
  misc_RNA (1)...(19): siRNA sense strand
ggcagaggauauaccagua

SEQ ID NO: 583471 - RNA, 19 nt, Homo sapiens
  misc_RNA (1)...(19): siRNA sense strand
gaaucaagcacagauagaa

SEQ ID NO: 583472 - RNA, 19 nt, Homo sapiens
  misc_RNA (1)...(19): siRNA sense strand
gaauucaaccuuauuaugc

SEQ ID NO: 583473 - RNA, 19 nt, Homo sapiens
  misc_RNA (1)...(19): siRNA sense strand
guucaaagaccucauuuua

SEQ ID NO: 583474 - RNA, 19 nt, Homo sapiens
  misc_RNA (1)...(19): siRNA sense strand
cuacauagugcauuugaaa

SEQ ID NO: 583475 - RNA, 19 nt, Homo sapiens
  misc_RNA (1)...(19): siRNA sense strand
gaacuuaguaucauucacu

SEQ ID NO: 583476 - RNA, 19 nt, Homo sapiens
  misc_RNA (1)...(19): siRNA sense strand
gcacugaagcuccuacaca

SEQ ID NO: 583477 - RNA, 19 nt, Homo sapiens
  misc_RNA (1)...(19): siRNA sense strand
uaacauucuuggaguggaa

SEQ ID NO: 583478 - RNA, 19 nt, Homo sapiens
  misc_RNA (1)...(19): siRNA sense strand
aaacucauccuguucaaga

SEQ ID NO: 583479 - RNA, 19 nt, Homo sapiens
  misc_RNA (1)...(19): siRNA sense strand
gcuauggacguuaauuuga

SEQ ID NO: 583480 - RNA, 19 nt, Homo sapiens
  misc_RNA (1)...(19): siRNA sense strand
agauggcacuuggaacuua

SEQ ID NO: 583481 - RNA, 19 nt, Homo sapiens
  misc_RNA (1)...(19): siRNA sense strand
ugagguagaucagaugaau

SEQ ID NO: 583482 - RNA, 19 nt, Homo sapiens
  misc_RNA (1)...(19): siRNA sense strand
ugaaggacaucugacaaug

SEQ ID NO: 583483 - RNA, 19 nt, Homo sapiens
  misc_RNA (1)...(19): siRNA sense strand
gaacuuaaagaagaccaaa

SEQ ID NO: 583484 - RNA, 19 nt, Homo sapiens
  misc_RNA (1)...(19): siRNA sense strand
ccaggaacccguaaacuuc

SEQ ID NO: 583485 - RNA, 19 nt, Homo sapiens
  misc_RNA (1)...(19): siRNA sense strand
ucaaagaccucauuuuaag

SEQ ID NO: 583486 - RNA, 19 nt, Homo sapiens
  misc_RNA (1)...(19): siRNA sense strand
uuacaugacugaaggacau

SEQ ID NO: 583487 - RNA, 19 nt, Homo sapiens
  misc_RNA (1)...(19): siRNA sense strand
uggcaguucuugucaguug

SEQ ID NO: 583488 - RNA, 19 nt, Homo sapiens
  misc_RNA (1)...(19): siRNA sense strand
ccaagagacuggcauagcu

SEQ ID NO: 583489 - RNA, 19 nt, Homo sapiens
  misc_RNA (1)...(19): siRNA sense strand
cgaauucaaccuuauuaug

SEQ ID NO: 583490 - RNA, 19 nt, Homo sapiens
  misc_RNA (1)...(19): siRNA sense strand
uacggucgcugacuacuug

SEQ ID NO: 583491 - RNA, 19 nt, Homo sapiens
  misc_RNA (1)...(19): siRNA sense strand
caaacgcagugcaaucaag

SEQ ID NO: 583492 - RNA, 19 nt, Homo sapiens
  misc_RNA (1)...(19): siRNA sense strand
ggacauccaacauaccaau

SEQ ID NO: 583493 - RNA, 19 nt, Homo sapiens
  misc_RNA (1)...(19): siRNA sense strand
ccguaaacuucauaacauu

SEQ ID NO: 583494 - RNA, 19 nt, Homo sapiens
  misc_RNA (1)...(19): siRNA sense strand
gacagguuguaaaggcaua

SEQ ID NO: 583495 - RNA, 19 nt, Homo sapiens
  misc_RNA (1)...(19): siRNA sense strand
gcacauuacaugacugaag

SEQ ID NO: 583496 - RNA, 19 nt, Homo sapiens
  misc_RNA (1)...(19): siRNA sense strand
ccaccaccauggacaacaa

SEQ ID NO: 583497 - RNA, 19 nt, Homo sapiens
  misc_RNA (1)...(19): siRNA sense strand
gcagcacaguuucuucaag

SEQ ID NO: 583498 - RNA, 19 nt, Homo sapiens
  misc_RNA (1)...(19): siRNA sense strand
cauuugaaacgccacuuua

SEQ ID NO: 583499 - RNA, 19 nt, Homo sapiens
  misc_RNA (1)...(19): siRNA sense strand
gaugaagguacaaauacaa

SEQ ID NO: 583500 - RNA, 19 nt, Homo sapiens
  misc_RNA (1)...(19): siRNA sense strand
gcauuugaaacgccacuuu

SEQ ID NO: 583501 - RNA, 19 nt, Homo sapiens
  misc_RNA (1)...(19): siRNA sense strand
gaacccguaaacuucauaa

SEQ ID NO: 583502 - RNA, 19 nt, Homo sapiens
  misc_RNA (1)...(19): siRNA sense strand
gaaaguuugcgcaacagau

SEQ ID NO: 583503 - RNA, 19 nt, Homo sapiens
  misc_RNA (1)...(19): siRNA sense strand
ugaugaagguacaaauaca

SEQ ID NO: 583504 - RNA, 19 nt, Homo sapiens
  misc_RNA (1)...(19): siRNA sense strand
ggagagacuucagcaugca

SEQ ID NO: 583505 - RNA, 19 nt, Homo sapiens
  misc_RNA (1)...(19): siRNA sense strand
cacgaaaguuugcgcaaca

SEQ ID NO: 583506 - RNA, 19 nt, Homo sapiens
  misc_RNA (1)...(19): siRNA sense strand
caaguaauaguguaucuac

SEQ ID NO: 583507 - RNA, 19 nt, Homo sapiens
  misc_RNA (1)...(19): siRNA sense strand
acuuggaacuuaaagaaga

SEQ ID NO: 583508 - RNA, 19 nt, Homo sapiens
  misc_RNA (1)...(19): siRNA sense strand
gagguagaucagaugaaua

SEQ ID NO: 583509 - RNA, 19 nt, Homo sapiens
  misc_RNA (1)...(19): siRNA sense strand
agguagaucagaugaauaa

SEQ ID NO: 583510 - RNA, 19 nt, Homo sapiens
  misc_RNA (1)...(19): siRNA sense strand
caacgaauagcuccucuac

SEQ ID NO: 583511 - RNA, 19 nt, Homo sapiens
  misc_RNA (1)...(19): siRNA sense strand
uuaaagaagaccaaagaug

SEQ ID NO: 583512 - RNA, 19 nt, Homo sapiens
  misc_RNA (1)...(19): siRNA sense strand
gguauuccaccugcucaua

SEQ ID NO: 583513 - RNA, 19 nt, Homo sapiens
  misc_RNA (1)...(19): siRNA sense strand
cccguaaacuucauaacau

SEQ ID NO: 583514 - RNA, 19 nt, Homo sapiens
  misc_RNA (1)...(19): siRNA sense strand
ccaagggucuacaauucuc

SEQ ID NO: 583515 - RNA, 19 nt, Homo sapiens
  misc_RNA (1)...(19): siRNA sense strand
ugaaacgccacuuuauguu

SEQ ID NO: 583516 - RNA, 19 nt, Homo sapiens
  misc_RNA (1)...(19): siRNA sense strand
aaucaggccuaccagaauc

SEQ ID NO: 583517 - RNA, 19 nt, Homo sapiens
  misc_RNA (1)...(19): siRNA sense strand
cagauucagcaaccucuaa

SEQ ID NO: 583518 - RNA, 19 nt, Homo sapiens
  misc_RNA (1)...(19): siRNA sense strand
ccaagauucuauggagguu

SEQ ID NO: 583519 - RNA, 19 nt, Homo sapiens
  misc_RNA (1)...(19): siRNA sense strand
uaaugagguuuacuaugca

SEQ ID NO: 583520 - RNA, 19 nt, Homo sapiens
  misc_RNA (1)...(19): siRNA sense strand
ggacagaauggagcuaugg

SEQ ID NO: 583521 - RNA, 19 nt, Homo sapiens
  misc_RNA (1)...(19): siRNA sense strand
caaucaggccuaccagaau

SEQ ID NO: 583522 - RNA, 19 nt, Homo sapiens
  misc_RNA (1)...(19): siRNA sense strand
uguugaaacucauccuguu

SEQ ID NO: 583523 - RNA, 19 nt, Homo sapiens
  misc_RNA (1)...(19): siRNA sense strand
caagaaaacagcugaugaa

SEQ ID NO: 583524 - RNA, 19 nt, Homo sapiens
  misc_RNA (1)...(19): siRNA sense strand
gcauauuaaugagguuuac

SEQ ID NO: 583525 - RNA, 19 nt, Homo sapiens
  misc_RNA (1)...(19): siRNA sense strand
ggaacccguaaacuucaua

SEQ ID NO: 583526 - RNA, 19 nt, Homo sapiens
  misc_RNA (1)...(19): siRNA sense strand
gaguacaaaccaccaggaa

SEQ ID NO: 583527 - RNA, 19 nt, Homo sapiens
  misc_RNA (1)...(19): siRNA sense strand
aaagaagaccaaagaugga

SEQ ID NO: 583528 - RNA, 19 nt, Homo sapiens
  misc_RNA (1)...(19): siRNA sense strand
uuugagaaguugccagaug

SEQ ID NO: 583529 - RNA, 19 nt, Homo sapiens
  misc_RNA (1)...(19): siRNA sense strand
uauuccaccugcucauauu

SEQ ID NO: 583530 - RNA, 19 nt, Homo sapiens
  misc_RNA (1)...(19): siRNA sense strand
ugaaaugcacacuggagaa

SEQ ID NO: 583531 - RNA, 19 nt, Homo sapiens
  misc_RNA (1)...(19): siRNA sense strand
ucagcaaccucuaacuaac

SEQ ID NO: 583532 - RNA, 19 nt, Homo sapiens
  misc_RNA (1)...(19): siRNA sense strand
uaguggaaguucuggguau

SEQ ID NO: 583533 - RNA, 19 nt, Homo sapiens
  misc_RNA (1)...(19): siRNA sense strand
gaaaugcacacuggagaac

SEQ ID NO: 583534 - RNA, 19 nt, Homo sapiens
  misc_RNA (1)...(19): siRNA sense strand
cagaggugcuacugggaau

SEQ ID NO: 583535 - RNA, 19 nt, Homo sapiens
  misc_RNA (1)...(19): siRNA sense strand
cggaagguuuacaaugaug

SEQ ID NO: 583536 - RNA, 19 nt, Homo sapiens
  misc_RNA (1)...(19): siRNA sense strand
aaggacaucugacaaugag

SEQ ID NO: 583537 - RNA, 19 nt, Homo sapiens
  misc_RNA (1)...(19): siRNA sense strand
caugcaaaccuucaucugu

SEQ ID NO: 583538 - RNA, 19 nt, Homo sapiens
  misc_RNA (1)...(19): siRNA sense strand
guauuccaccugcucauau

SEQ ID NO: 583539 - RNA, 19 nt, Homo sapiens
  misc_RNA (1)...(19): siRNA sense strand
cuaauaccuuggacuuugg

SEQ ID NO: 583540 - RNA, 19 nt, Homo sapiens
  misc_RNA (1)...(19): siRNA sense strand
aaacgcagugcaaucaaga

SEQ ID NO: 583541 - RNA, 19 nt, Homo sapiens
  misc_RNA (1)...(19): siRNA sense strand
gccacuuuauguuucgaaa

SEQ ID NO: 583542 - RNA, 19 nt, Homo sapiens
  misc_RNA (1)...(19): siRNA sense strand
uugaaacgccacuuuaugu

SEQ ID NO: 583543 - RNA, 19 nt, Homo sapiens
  misc_RNA (1)...(19): siRNA sense strand
uacugggaaugccuuauga

SEQ ID NO: 583544 - RNA, 19 nt, Homo sapiens
  misc_RNA (1)...(19): siRNA sense strand
ggagcuauggacguuaauu

SEQ ID NO: 583545 - RNA, 19 nt, Homo sapiens
  misc_RNA (1)...(19): siRNA sense strand
cauccaacauaccaauuuu

SEQ ID NO: 583546 - RNA, 19 nt, Homo sapiens
  misc_RNA (1)...(19): siRNA sense strand
gaaccuaacacgaaaguuu

SEQ ID NO: 583547 - RNA, 19 nt, Homo sapiens
  misc_RNA (1)...(19): siRNA sense strand
uaaggaugcuugauuauga

SEQ ID NO: 583548 - RNA, 19 nt, Homo sapiens
  misc_RNA (1)...(19): siRNA sense strand
gaaaacagcugaugaaggu

SEQ ID NO: 583549 - RNA, 19 nt, Homo sapiens
  misc_RNA (1)...(19): siRNA sense strand
gaagguacaaauacaagua

SEQ ID NO: 583550 - RNA, 19 nt, Homo sapiens
  misc_RNA (1)...(19): siRNA sense strand
aaacucgaauucaaccuua

SEQ ID NO: 583551 - RNA, 19 nt, Homo sapiens
  misc_RNA (1)...(19): siRNA sense strand
gggaaugccuuaugaccuu

SEQ ID NO: 583552 - RNA, 19 nt, Homo sapiens
  misc_RNA (1)...(19): siRNA sense strand
gcacuuggaacuuaaagaa

SEQ ID NO: 583553 - RNA, 19 nt, Homo sapiens
  misc_RNA (1)...(19): siRNA sense strand
cuuaugaccuugccauuga

SEQ ID NO: 583554 - RNA, 19 nt, Homo sapiens
  misc_RNA (1)...(19): siRNA sense strand
ccaaugagguagaucagau

SEQ ID NO: 583555 - RNA, 19 nt, Homo sapiens
  misc_RNA (1)...(19): siRNA sense strand
uuaaugagguuuacuaugc

SEQ ID NO: 583556 - RNA, 19 nt, Homo sapiens
  misc_RNA (1)...(19): siRNA sense strand
gcagugcaaucaagauagu

SEQ ID NO: 583557 - RNA, 19 nt, Homo sapiens
  misc_RNA (1)...(19): siRNA sense strand
gcugaugaagguacaaaua

SEQ ID NO: 583558 - RNA, 19 nt, Homo sapiens
  misc_RNA (1)...(19): siRNA sense strand
gaaguucaaagaccucauu

SEQ ID NO: 583559 - RNA, 19 nt, Homo sapiens
  misc_RNA (1)...(19): siRNA sense strand
aaaaguggauggaucguua

SEQ ID NO: 583560 - RNA, 19 nt, Homo sapiens
  misc_RNA (1)...(19): siRNA sense strand
gauggcacuuggaacuuaa

SEQ ID NO: 583561 - RNA, 19 nt, Homo sapiens
  misc_RNA (1)...(19): siRNA sense strand
ggcagaggauauaccagua

SEQ ID NO: 583562 - RNA, 19 nt, Homo sapiens
  misc_RNA (1)...(19): siRNA sense strand
gaaucaagcacagauagaa

SEQ ID NO: 583563 - RNA, 19 nt, Homo sapiens
  misc_RNA (1)...(19): siRNA sense strand
gaauucaaccuuauuaugc

SEQ ID NO: 583564 - RNA, 19 nt, Homo sapiens
  misc_RNA (1)...(19): siRNA sense strand
guucaaagaccucauuuua

SEQ ID NO: 583565 - RNA, 19 nt, Homo sapiens
  misc_RNA (1)...(19): siRNA sense strand
cuacauagugcauuugaaa

SEQ ID NO: 583566 - RNA, 19 nt, Homo sapiens
  misc_RNA (1)...(19): siRNA sense strand
gaacuuaguaucauucacu

SEQ ID NO: 583567 - RNA, 19 nt, Homo sapiens
  misc_RNA (1)...(19): siRNA sense strand
uaacauucuuggaguggaa

SEQ ID NO: 583568 - RNA, 19 nt, Homo sapiens
  misc_RNA (1)...(19): siRNA sense strand
agauggcacuuggaacuua

SEQ ID NO: 583569 - RNA, 19 nt, Homo sapiens
  misc_RNA (1)...(19): siRNA sense strand
ugagguagaucagaugaau

SEQ ID NO: 583570 - RNA, 19 nt, Homo sapiens
  misc_RNA (1)...(19): siRNA sense strand
gaacuuaaagaagaccaaa

SEQ ID NO: 583571 - RNA, 19 nt, Homo sapiens
  misc_RNA (1)...(19): siRNA sense strand
ccaggaacccguaaacuuc

SEQ ID NO: 583572 - RNA, 19 nt, Homo sapiens
  misc_RNA (1)...(19): siRNA sense strand
ucaaagaccucauuuuaag

SEQ ID NO: 583573 - RNA, 19 nt, Homo sapiens
  misc_RNA (1)...(19): siRNA sense strand
uggcaguucuugucaguug

SEQ ID NO: 583574 - RNA, 19 nt, Homo sapiens
  misc_RNA (1)...(19): siRNA sense strand
cgaauucaaccuuauuaug

SEQ ID NO: 583575 - RNA, 19 nt, Homo sapiens
  misc_RNA (1)...(19): siRNA sense strand
uacggucgcugacuacuug

SEQ ID NO: 583576 - RNA, 19 nt, Homo sapiens
  misc_RNA (1)...(19): siRNA sense strand
caaacgcagugcaaucaag

SEQ ID NO: 583577 - RNA, 19 nt, Homo sapiens
  misc_RNA (1)...(19): siRNA sense strand
ccguaaacuucauaacauu

SEQ ID NO: 583578 - RNA, 19 nt, Homo sapiens
  misc_RNA (1)...(19): siRNA sense strand
gacagguuguaaaggcaua

SEQ ID NO: 583579 - RNA, 19 nt, Homo sapiens
  misc_RNA (1)...(19): siRNA sense strand
gcagcacaguuucuucaag

SEQ ID NO: 583580 - RNA, 19 nt, Homo sapiens
  misc_RNA (1)...(19): siRNA sense strand
cauuugaaacgccacuuua

SEQ ID NO: 583581 - RNA, 19 nt, Homo sapiens
  misc_RNA (1)...(19): siRNA sense strand
gaugaagguacaaauacaa

SEQ ID NO: 583582 - RNA, 19 nt, Homo sapiens
  misc_RNA (1)...(19): siRNA sense strand
gcauuugaaacgccacuuu

SEQ ID NO: 583583 - RNA, 19 nt, Homo sapiens
  misc_RNA (1)...(19): siRNA sense strand
gaacccguaaacuucauaa

SEQ ID NO: 583584 - RNA, 19 nt, Homo sapiens
  misc_RNA (1)...(19): siRNA sense strand
gaaaguuugcgcaacagau

SEQ ID NO: 583585 - RNA, 19 nt, Homo sapiens
  misc_RNA (1)...(19): siRNA sense strand
ggagagacuucagcaugca

SEQ ID NO: 583586 - RNA, 19 nt, Homo sapiens
  misc_RNA (1)...(19): siRNA sense strand
ugaugaagguacaaauaca

SEQ ID NO: 583587 - RNA, 19 nt, Homo sapiens
  misc_RNA (1)...(19): siRNA sense strand
cacgaaaguuugcgcaaca

SEQ ID NO: 583588 - RNA, 19 nt, Homo sapiens
  misc_RNA (1)...(19): siRNA sense strand
caaguaauaguguaucuac

SEQ ID NO: 583589 - RNA, 19 nt, Homo sapiens
  misc_RNA (1)...(19): siRNA sense strand
acuuggaacuuaaagaaga

SEQ ID NO: 583590 - RNA, 19 nt, Homo sapiens
  misc_RNA (1)...(19): siRNA sense strand
gagguagaucagaugaaua

SEQ ID NO: 583591 - RNA, 19 nt, Homo sapiens
  misc_RNA (1)...(19): siRNA sense strand
agguagaucagaugaauaa

SEQ ID NO: 583592 - RNA, 19 nt, Homo sapiens
  misc_RNA (1)...(19): siRNA sense strand
uuaaagaagaccaaagaug

SEQ ID NO: 583593 - RNA, 19 nt, Homo sapiens
  misc_RNA (1)...(19): siRNA sense strand
gguauuccaccugcucaua

SEQ ID NO: 583594 - RNA, 19 nt, Homo sapiens
  misc_RNA (1)...(19): siRNA sense strand
cccguaaacuucauaacau

SEQ ID NO: 583595 - RNA, 19 nt, Homo sapiens
  misc_RNA (1)...(19): siRNA sense strand
ugaaacgccacuuuauguu

SEQ ID NO: 583596 - RNA, 19 nt, Homo sapiens
  misc_RNA (1)...(19): siRNA sense strand
cagauucagcaaccucuaa

SEQ ID NO: 583597 - RNA, 19 nt, Homo sapiens
  misc_RNA (1)...(19): siRNA sense strand
uaaugagguuuacuaugca

SEQ ID NO: 583598 - RNA, 19 nt, Homo sapiens
  misc_RNA (1)...(19): siRNA sense strand
caagaaaacagcugaugaa

SEQ ID NO: 583599 - RNA, 19 nt, Homo sapiens
  misc_RNA (1)...(19): siRNA sense strand
ggaacccguaaacuucaua

SEQ ID NO: 583600 - RNA, 19 nt, Homo sapiens
  misc_RNA (1)...(19): siRNA sense strand
gaguacaaaccaccaggaa

SEQ ID NO: 583601 - RNA, 19 nt, Homo sapiens
  misc_RNA (1)...(19): siRNA sense strand
aaagaagaccaaagaugga

SEQ ID NO: 583602 - RNA, 19 nt, Homo sapiens
  misc_RNA (1)...(19): siRNA sense strand
gcauauuaaugagguuuac

SEQ ID NO: 583603 - RNA, 19 nt, Homo sapiens
  misc_RNA (1)...(19): siRNA sense strand
uuugagaaguugccagaug

SEQ ID NO: 583604 - RNA, 19 nt, Homo sapiens
  misc_RNA (1)...(19): siRNA sense strand
uauuccaccugcucauauu

SEQ ID NO: 583605 - RNA, 19 nt, Homo sapiens
  misc_RNA (1)...(19): siRNA sense strand
ugaaaugcacacuggagaa

SEQ ID NO: 583606 - RNA, 19 nt, Homo sapiens
  misc_RNA (1)...(19): siRNA sense strand
ucagcaaccucuaacuaac

SEQ ID NO: 583607 - RNA, 19 nt, Homo sapiens
  misc_RNA (1)...(19): siRNA sense strand
uaguggaaguucuggguau

SEQ ID NO: 583608 - RNA, 19 nt, Homo sapiens
  misc_RNA (1)...(19): siRNA sense strand
gaaaugcacacuggagaac

SEQ ID NO: 583609 - RNA, 19 nt, Homo sapiens
  misc_RNA (1)...(19): siRNA sense strand
cagaggugcuacugggaau

SEQ ID NO: 583610 - RNA, 19 nt, Homo sapiens
  misc_RNA (1)...(19): siRNA sense strand
caugcaaaccuucaucugu

SEQ ID NO: 583611 - RNA, 19 nt, Homo sapiens
  misc_RNA (1)...(19): siRNA sense strand
cggaagguuuacaaugaug

SEQ ID NO: 583612 - RNA, 19 nt, Homo sapiens
  misc_RNA (1)...(19): siRNA sense strand
guauuccaccugcucauau

SEQ ID NO: 583613 - RNA, 19 nt, Homo sapiens
  misc_RNA (1)...(19): siRNA sense strand
uugaaacgccacuuuaugu

SEQ ID NO: 583614 - RNA, 19 nt, Homo sapiens
  misc_RNA (1)...(19): siRNA sense strand
uacugggaaugccuuauga

SEQ ID NO: 583615 - RNA, 19 nt, Homo sapiens
  misc_RNA (1)...(19): siRNA sense strand
aaacgcagugcaaucaaga

SEQ ID NO: 583616 - RNA, 19 nt, Homo sapiens
  misc_RNA (1)...(19): siRNA sense strand
gccacuuuauguuucgaaa

SEQ ID NO: 583617 - RNA, 19 nt, Homo sapiens
  misc_RNA (1)...(19): siRNA sense strand
cuuugaaccuaacacgaaa

SEQ ID NO: 583618 - RNA, 19 nt, Homo sapiens
  misc_RNA (1)...(19): siRNA sense strand
ggcaccaccuccaguacau

SEQ ID NO: 583619 - RNA, 19 nt, Homo sapiens
  misc_RNA (1)...(19): siRNA sense strand
guucaguggugccaaugag

SEQ ID NO: 583620 - RNA, 19 nt, Homo sapiens
  misc_RNA (1)...(19): siRNA sense strand
auaguugacuuuggcaguu

SEQ ID NO: 583621 - RNA, 19 nt, Homo sapiens
  misc_RNA (1)...(19): siRNA sense strand
uccagaacuuaguaucauu

SEQ ID NO: 583622 - RNA, 19 nt, Homo sapiens
  misc_RNA (1)...(19): siRNA sense strand
aaaguuugcgcaacagaug

SEQ ID NO: 583623 - RNA, 19 nt, Homo sapiens
  misc_RNA (1)...(19): siRNA sense strand
ugaaucaagcacagauaga

SEQ ID NO: 583624 - RNA, 19 nt, Homo sapiens
  misc_RNA (1)...(19): siRNA sense strand
ccagauggcacuuggaacu

SEQ ID NO: 583625 - RNA, 19 nt, Homo sapiens
  misc_RNA (1)...(19): siRNA sense strand
gaccuugccauugauaugu

SEQ ID NO: 583626 - RNA, 19 nt, Homo sapiens
  misc_RNA (1)...(19): siRNA sense strand
ccagaacuuaguaucauuc

SEQ ID NO: 583627 - RNA, 19 nt, Homo sapiens
  misc_RNA (1)...(19): siRNA sense strand
cuacugggaaugccuuaug

SEQ ID NO: 583628 - RNA, 19 nt, Homo sapiens
  misc_RNA (1)...(19): siRNA sense strand
gaucaaaacauacaagcau

SEQ ID NO: 583629 - RNA, 19 nt, Homo sapiens
  misc_RNA (1)...(19): siRNA sense strand
caagcauauuaaugagguu

SEQ ID NO: 583630 - RNA, 19 nt, Homo sapiens
  misc_RNA (1)...(19): siRNA sense strand
gaagaccaaagauggaaaa

SEQ ID NO: 583631 - RNA, 19 nt, Homo sapiens
  misc_RNA (1)...(19): siRNA sense strand
gcgacuccagaacuuagua

SEQ ID NO: 583632 - RNA, 19 nt, Homo sapiens
  misc_RNA (1)...(19): siRNA sense strand
ccccaaaacucgaauucaa

SEQ ID NO: 583633 - RNA, 19 nt, Homo sapiens
  misc_RNA (1)...(19): siRNA sense strand
uuaaggaugcuugauuaug

SEQ ID NO: 583634 - RNA, 19 nt, Homo sapiens
  misc_RNA (1)...(19): siRNA sense strand
gaagcgaagacaccaacag

SEQ ID NO: 583635 - RNA, 19 nt, Homo sapiens
  misc_RNA (1)...(19): siRNA sense strand
caccugcucauauucuuga

SEQ ID NO: 583636 - RNA, 19 nt, Homo sapiens
  misc_RNA (1)...(19): siRNA sense strand
acgcagugcaaucaagaua

SEQ ID NO: 583637 - RNA, 19 nt, Homo sapiens
  misc_RNA (1)...(19): siRNA sense strand
ucuuugaaccuaacacgaa

SEQ ID NO: 583638 - RNA, 19 nt, Homo sapiens
  misc_RNA (1)...(19): siRNA sense strand
uucagcaaccucuaacuaa

SEQ ID NO: 583639 - RNA, 19 nt, Homo sapiens
  misc_RNA (1)...(19): siRNA sense strand
caggaacccguaaacuuca

SEQ ID NO: 583640 - RNA, 19 nt, Homo sapiens
  misc_RNA (1)...(19): siRNA sense strand
acuuaaagaagaccaaaga

SEQ ID NO: 583641 - RNA, 19 nt, Homo sapiens
  misc_RNA (1)...(19): siRNA sense strand
caaugagguagaucagaug

SEQ ID NO: 583642 - RNA, 19 nt, Homo sapiens
  misc_RNA (1)...(19): siRNA sense strand
ggaacuuaaagaagaccaa

SEQ ID NO: 583643 - RNA, 19 nt, Homo sapiens
  misc_RNA (1)...(19): siRNA sense strand
ccaaacgcagugcaaucaa

SEQ ID NO: 583644 - RNA, 19 nt, Homo sapiens
  misc_RNA (1)...(19): siRNA sense strand
gcaugcaaaccuucaucug

SEQ ID NO: 583645 - RNA, 19 nt, Homo sapiens
  misc_RNA (1)...(19): siRNA sense strand
ugaccuugccauugauaug

SEQ ID NO: 583646 - RNA, 19 nt, Homo sapiens
  misc_RNA (1)...(19): siRNA sense strand
gaaccuaacacgaaaguuu

SEQ ID NO: 583647 - RNA, 19 nt, Homo sapiens
  misc_RNA (1)...(19): siRNA sense strand
uaaggaugcuugauuauga

SEQ ID NO: 583648 - RNA, 19 nt, Homo sapiens
  misc_RNA (1)...(19): siRNA sense strand
gcuaauaccuuggacuuug

SEQ ID NO: 583649 - RNA, 19 nt, Homo sapiens
  misc_RNA (1)...(19): siRNA sense strand
gaaaacagcugaugaaggu

SEQ ID NO: 583650 - RNA, 19 nt, Homo sapiens
  misc_RNA (1)...(19): siRNA sense strand
gaagguacaaauacaagua

SEQ ID NO: 583651 - RNA, 19 nt, Homo sapiens
  misc_RNA (1)...(19): siRNA sense strand
aaacucgaauucaaccuua

SEQ ID NO: 583652 - RNA, 19 nt, Homo sapiens
  misc_RNA (1)...(19): siRNA sense strand
gaauggagcuauggacguu

SEQ ID NO: 583653 - RNA, 19 nt, Homo sapiens
  misc_RNA (1)...(19): siRNA sense strand
gggaaugccuuaugaccuu

SEQ ID NO: 583654 - RNA, 19 nt, Homo sapiens
  misc_RNA (1)...(19): siRNA sense strand
gcacuuggaacuuaaagaa

SEQ ID NO: 583655 - RNA, 19 nt, Homo sapiens
  misc_RNA (1)...(19): siRNA sense strand
ggccaagggucuacaauuc

SEQ ID NO: 583656 - RNA, 19 nt, Homo sapiens
  misc_RNA (1)...(19): siRNA sense strand
gaaggacaucugacaauga

SEQ ID NO: 583657 - RNA, 19 nt, Homo sapiens
  misc_RNA (1)...(19): siRNA sense strand
gcaaucaggccuaccagaa

SEQ ID NO: 583658 - RNA, 19 nt, Homo sapiens
  misc_RNA (1)...(19): siRNA sense strand
gcaaggggcugauagagaa

SEQ ID NO: 583659 - RNA, 19 nt, Homo sapiens
  misc_RNA (1)...(19): siRNA sense strand
cuuaugaccuugccauuga

SEQ ID NO: 583660 - RNA, 19 nt, Homo sapiens
  misc_RNA (1)...(19): siRNA sense strand
ccaaugagguagaucagau

SEQ ID NO: 583661 - RNA, 19 nt, Homo sapiens
  misc_RNA (1)...(19): siRNA sense strand
uuaaugagguuuacuaugc

SEQ ID NO: 583662 - RNA, 19 nt, Homo sapiens
  misc_RNA (1)...(19): siRNA sense strand
gcaauuuccugcuccucuu

SEQ ID NO: 583663 - RNA, 19 nt, Homo sapiens
  misc_RNA (1)...(19): siRNA sense strand
gcagugcaaucaagauagu

SEQ ID NO: 583664 - RNA, 19 nt, Homo sapiens
  misc_RNA (1)...(19): siRNA sense strand
gacaggaguuugugugcaa

SEQ ID NO: 583665 - RNA, 19 nt, Homo sapiens
  misc_RNA (1)...(19): siRNA sense strand
gagcuauggacguuaauuu

SEQ ID NO: 583666 - RNA, 19 nt, Homo sapiens
  misc_RNA (1)...(19): siRNA sense strand
gcugaugaagguacaaaua

SEQ ID NO: 583667 - RNA, 19 nt, Homo sapiens
  misc_RNA (1)...(19): siRNA sense strand
gaaguucaaagaccucauu

SEQ ID NO: 583668 - RNA, 19 nt, Homo sapiens
  misc_RNA (1)...(19): siRNA sense strand
aaaaguggauggaucguua

SEQ ID NO: 583669 - RNA, 19 nt, Homo sapiens
  misc_RNA (1)...(19): siRNA sense strand
gauggcacuuggaacuuaa

SEQ ID NO: 583670 - RNA, 19 nt, Homo sapiens
  misc_RNA (1)...(19): siRNA sense strand
ggcagaggauauaccagua

SEQ ID NO: 583671 - RNA, 19 nt, Homo sapiens
  misc_RNA (1)...(19): siRNA sense strand
gaaucaagcacagauagaa

SEQ ID NO: 583672 - RNA, 19 nt, Homo sapiens
  misc_RNA (1)...(19): siRNA sense strand
gaauucaaccuuauuaugc

SEQ ID NO: 583673 - RNA, 19 nt, Homo sapiens
  misc_RNA (1)...(19): siRNA sense strand
guucaaagaccucauuuua

SEQ ID NO: 583674 - RNA, 19 nt, Homo sapiens
  misc_RNA (1)...(19): siRNA sense strand
cuacauagugcauuugaaa

SEQ ID NO: 583675 - RNA, 19 nt, Homo sapiens
  misc_RNA (1)...(19): siRNA sense strand
gaacuuaguaucauucacu

SEQ ID NO: 583676 - RNA, 19 nt, Homo sapiens
  misc_RNA (1)...(19): siRNA sense strand
gcacugaagcuccuacaca

SEQ ID NO: 583677 - RNA, 19 nt, Homo sapiens
  misc_RNA (1)...(19): siRNA sense strand
uaacauucuuggaguggaa

SEQ ID NO: 583678 - RNA, 19 nt, Homo sapiens
  misc_RNA (1)...(19): siRNA sense strand
aaacucauccuguucaaga

SEQ ID NO: 583679 - RNA, 19 nt, Homo sapiens
  misc_RNA (1)...(19): siRNA sense strand
gcuauggacguuaauuuga

SEQ ID NO: 583680 - RNA, 19 nt, Homo sapiens
  misc_RNA (1)...(19): siRNA sense strand
agauggcacuuggaacuua

SEQ ID NO: 583681 - RNA, 19 nt, Homo sapiens
  misc_RNA (1)...(19): siRNA sense strand
ugagguagaucagaugaau

SEQ ID NO: 583682 - RNA, 19 nt, Homo sapiens
  misc_RNA (1)...(19): siRNA sense strand
ugaaggacaucugacaaug

SEQ ID NO: 583683 - RNA, 19 nt, Homo sapiens
  misc_RNA (1)...(19): siRNA sense strand
gaacuuaaagaagaccaaa

SEQ ID NO: 583684 - RNA, 19 nt, Homo sapiens
  misc_RNA (1)...(19): siRNA sense strand
ccaggaacccguaaacuuc

SEQ ID NO: 583685 - RNA, 19 nt, Homo sapiens
  misc_RNA (1)...(19): siRNA sense strand
ucaaagaccucauuuuaag

SEQ ID NO: 583686 - RNA, 19 nt, Homo sapiens
  misc_RNA (1)...(19): siRNA sense strand
uuacaugacugaaggacau

SEQ ID NO: 583687 - RNA, 19 nt, Homo sapiens
  misc_RNA (1)...(19): siRNA sense strand
uggcaguucuugucaguug

SEQ ID NO: 583688 - RNA, 19 nt, Homo sapiens
  misc_RNA (1)...(19): siRNA sense strand
ccaagagacuggcauagcu

SEQ ID NO: 583689 - RNA, 19 nt, Homo sapiens
  misc_RNA (1)...(19): siRNA sense strand
cgaauucaaccuuauuaug

SEQ ID NO: 583690 - RNA, 19 nt, Homo sapiens
  misc_RNA (1)...(19): siRNA sense strand
uacggucgcugacuacuug

SEQ ID NO: 583691 - RNA, 19 nt, Homo sapiens
  misc_RNA (1)...(19): siRNA sense strand
caaacgcagugcaaucaag

SEQ ID NO: 583692 - RNA, 19 nt, Homo sapiens
  misc_RNA (1)...(19): siRNA sense strand
ggacauccaacauaccaau

SEQ ID NO: 583693 - RNA, 19 nt, Homo sapiens
  misc_RNA (1)...(19): siRNA sense strand
ccguaaacuucauaacauu

SEQ ID NO: 583694 - RNA, 19 nt, Homo sapiens
  misc_RNA (1)...(19): siRNA sense strand
gacagguuguaaaggcaua

SEQ ID NO: 583695 - RNA, 19 nt, Homo sapiens
  misc_RNA (1)...(19): siRNA sense strand
gcacauuacaugacugaag

SEQ ID NO: 583696 - RNA, 19 nt, Homo sapiens
  misc_RNA (1)...(19): siRNA sense strand
ccaccaccauggacaacaa

SEQ ID NO: 583697 - RNA, 19 nt, Homo sapiens
  misc_RNA (1)...(19): siRNA sense strand
gcagcacaguuucuucaag

SEQ ID NO: 583698 - RNA, 19 nt, Homo sapiens
  misc_RNA (1)...(19): siRNA sense strand
cauuugaaacgccacuuua

SEQ ID NO: 583699 - RNA, 19 nt, Homo sapiens
  misc_RNA (1)...(19): siRNA sense strand
gaugaagguacaaauacaa

SEQ ID NO: 583700 - RNA, 19 nt, Homo sapiens
  misc_RNA (1)...(19): siRNA sense strand
gcauuugaaacgccacuuu

SEQ ID NO: 583701 - RNA, 19 nt, Homo sapiens
  misc_RNA (1)...(19): siRNA sense strand
gaacccguaaacuucauaa

SEQ ID NO: 583702 - RNA, 19 nt, Homo sapiens
  misc_RNA (1)...(19): siRNA sense strand
gaaaguuugcgcaacagau

SEQ ID NO: 583703 - RNA, 19 nt, Homo sapiens
  misc_RNA (1)...(19): siRNA sense strand
ugaugaagguacaaauaca

SEQ ID NO: 583704 - RNA, 19 nt, Homo sapiens
  misc_RNA (1)...(19): siRNA sense strand
ggagagacuucagcaugca

SEQ ID NO: 583705 - RNA, 19 nt, Homo sapiens
  misc_RNA (1)...(19): siRNA sense strand
cacgaaaguuugcgcaaca

SEQ ID NO: 583706 - RNA, 19 nt, Homo sapiens
  misc_RNA (1)...(19): siRNA sense strand
caaguaauaguguaucuac

SEQ ID NO: 583707 - RNA, 19 nt, Homo sapiens
  misc_RNA (1)...(19): siRNA sense strand
acuuggaacuuaaagaaga

SEQ ID NO: 583708 - RNA, 19 nt, Homo sapiens
  misc_RNA (1)...(19): siRNA sense strand
gagguagaucagaugaaua

SEQ ID NO: 583709 - RNA, 19 nt, Homo sapiens
  misc_RNA (1)...(19): siRNA sense strand
agguagaucagaugaauaa

SEQ ID NO: 583710 - RNA, 19 nt, Homo sapiens
  misc_RNA (1)...(19): siRNA sense strand
caacgaauagcuccucuac

SEQ ID NO: 583711 - RNA, 19 nt, Homo sapiens
  misc_RNA (1)...(19): siRNA sense strand
uuaaagaagaccaaagaug

SEQ ID NO: 583712 - RNA, 19 nt, Homo sapiens
  misc_RNA (1)...(19): siRNA sense strand
gguauuccaccugcucaua

SEQ ID NO: 583713 - RNA, 19 nt, Homo sapiens
  misc_RNA (1)...(19): siRNA sense strand
cccguaaacuucauaacau

SEQ ID NO: 583714 - RNA, 19 nt, Homo sapiens
  misc_RNA (1)...(19): siRNA sense strand
ccaagggucuacaauucuc

SEQ ID NO: 583715 - RNA, 19 nt, Homo sapiens
  misc_RNA (1)...(19): siRNA sense strand
ugaaacgccacuuuauguu

SEQ ID NO: 583716 - RNA, 19 nt, Homo sapiens
  misc_RNA (1)...(19): siRNA sense strand
aaucaggccuaccagaauc

SEQ ID NO: 583717 - RNA, 19 nt, Homo sapiens
  misc_RNA (1)...(19): siRNA sense strand
cagauucagcaaccucuaa

SEQ ID NO: 583718 - RNA, 19 nt, Homo sapiens
  misc_RNA (1)...(19): siRNA sense strand
ccaagauucuauggagguu

SEQ ID NO: 583719 - RNA, 19 nt, Homo sapiens
  misc_RNA (1)...(19): siRNA sense strand
uaaugagguuuacuaugca

SEQ ID NO: 583720 - RNA, 19 nt, Homo sapiens
  misc_RNA (1)...(19): siRNA sense strand
ggacagaauggagcuaugg

SEQ ID NO: 583721 - RNA, 19 nt, Homo sapiens
  misc_RNA (1)...(19): siRNA sense strand
caaucaggccuaccagaau

SEQ ID NO: 583722 - RNA, 19 nt, Homo sapiens
  misc_RNA (1)...(19): siRNA sense strand
uguugaaacucauccuguu

SEQ ID NO: 583723 - RNA, 19 nt, Homo sapiens
  misc_RNA (1)...(19): siRNA sense strand
caagaaaacagcugaugaa

SEQ ID NO: 583724 - RNA, 19 nt, Homo sapiens
  misc_RNA (1)...(19): siRNA sense strand
gcauauuaaugagguuuac

SEQ ID NO: 583725 - RNA, 19 nt, Homo sapiens
  misc_RNA (1)...(19): siRNA sense strand
ggaacccguaaacuucaua

SEQ ID NO: 583726 - RNA, 19 nt, Homo sapiens
  misc_RNA (1)...(19): siRNA sense strand
gaguacaaaccaccaggaa

SEQ ID NO: 583727 - RNA, 19 nt, Homo sapiens
  misc_RNA (1)...(19): siRNA sense strand
aaagaagaccaaagaugga

SEQ ID NO: 583728 - RNA, 19 nt, Homo sapiens
  misc_RNA (1)...(19): siRNA sense strand
uuugagaaguugccagaug

SEQ ID NO: 583729 - RNA, 19 nt, Homo sapiens
  misc_RNA (1)...(19): siRNA sense strand
uauuccaccugcucauauu

SEQ ID NO: 583730 - RNA, 19 nt, Homo sapiens
  misc_RNA (1)...(19): siRNA sense strand
ugaaaugcacacuggagaa

SEQ ID NO: 583731 - RNA, 19 nt, Homo sapiens
  misc_RNA (1)...(19): siRNA sense strand
ucagcaaccucuaacuaac

SEQ ID NO: 583732 - RNA, 19 nt, Homo sapiens
  misc_RNA (1)...(19): siRNA sense strand
uaguggaaguucuggguau

SEQ ID NO: 583733 - RNA, 19 nt, Homo sapiens
  misc_RNA (1)...(19): siRNA sense strand
gaaaugcacacuggagaac

SEQ ID NO: 583734 - RNA, 19 nt, Homo sapiens
  misc_RNA (1)...(19): siRNA sense strand
cagaggugcuacugggaau

SEQ ID NO: 583735 - RNA, 19 nt, Homo sapiens
  misc_RNA (1)...(19): siRNA sense strand
cggaagguuuacaaugaug

SEQ ID NO: 583736 - RNA, 19 nt, Homo sapiens
  misc_RNA (1)...(19): siRNA sense strand
aaggacaucugacaaugag

SEQ ID NO: 583737 - RNA, 19 nt, Homo sapiens
  misc_RNA (1)...(19): siRNA sense strand
caugcaaaccuucaucugu

SEQ ID NO: 583738 - RNA, 19 nt, Homo sapiens
  misc_RNA (1)...(19): siRNA sense strand
guauuccaccugcucauau

SEQ ID NO: 583739 - RNA, 19 nt, Homo sapiens
  misc_RNA (1)...(19): siRNA sense strand
cuaauaccuuggacuuugg

SEQ ID NO: 583740 - RNA, 19 nt, Homo sapiens
  misc_RNA (1)...(19): siRNA sense strand
aaacgcagugcaaucaaga

SEQ ID NO: 583741 - RNA, 19 nt, Homo sapiens
  misc_RNA (1)...(19): siRNA sense strand
gccacuuuauguuucgaaa

SEQ ID NO: 583742 - RNA, 19 nt, Homo sapiens
  misc_RNA (1)...(19): siRNA sense strand
uugaaacgccacuuuaugu

SEQ ID NO: 583743 - RNA, 19 nt, Homo sapiens
  misc_RNA (1)...(19): siRNA sense strand
uacugggaaugccuuauga

SEQ ID NO: 583744 - RNA, 19 nt, Homo sapiens
  misc_RNA (1)...(19): siRNA sense strand
ggagcuauggacguuaauu

SEQ ID NO: 583745 - RNA, 19 nt, Homo sapiens
  misc_RNA (1)...(19): siRNA sense strand
cauccaacauaccaauuuu

SEQ ID NO: 583746 - RNA, 19 nt, Homo sapiens
  misc_RNA (1)...(19): siRNA sense strand
gaaccuaacacgaaaguuu

SEQ ID NO: 583747 - RNA, 19 nt, Homo sapiens
  misc_RNA (1)...(19): siRNA sense strand
uaaggaugcuugauuauga

SEQ ID NO: 583748 - RNA, 19 nt, Homo sapiens
  misc_RNA (1)...(19): siRNA sense strand
gaaaacagcugaugaaggu

SEQ ID NO: 583749 - RNA, 19 nt, Homo sapiens
  misc_RNA (1)...(19): siRNA sense strand
gaagguacaaauacaagua

SEQ ID NO: 583750 - RNA, 19 nt, Homo sapiens
  misc_RNA (1)...(19): siRNA sense strand
aaacucgaauucaaccuua

SEQ ID NO: 583751 - RNA, 19 nt, Homo sapiens
  misc_RNA (1)...(19): siRNA sense strand
gggaaugccuuaugaccuu

SEQ ID NO: 583752 - RNA, 19 nt, Homo sapiens
  misc_RNA (1)...(19): siRNA sense strand
gcacuuggaacuuaaagaa

SEQ ID NO: 583753 - RNA, 19 nt, Homo sapiens
  misc_RNA (1)...(19): siRNA sense strand
cuuaugaccuugccauuga

SEQ ID NO: 583754 - RNA, 19 nt, Homo sapiens
  misc_RNA (1)...(19): siRNA sense strand
ccaaugagguagaucagau

SEQ ID NO: 583755 - RNA, 19 nt, Homo sapiens
  misc_RNA (1)...(19): siRNA sense strand
uuaaugagguuuacuaugc

SEQ ID NO: 583756 - RNA, 19 nt, Homo sapiens
  misc_RNA (1)...(19): siRNA sense strand
gcagugcaaucaagauagu

SEQ ID NO: 583757 - RNA, 19 nt, Homo sapiens
  misc_RNA (1)...(19): siRNA sense strand
gcugaugaagguacaaaua

SEQ ID NO: 583758 - RNA, 19 nt, Homo sapiens
  misc_RNA (1)...(19): siRNA sense strand
gaaguucaaagaccucauu

SEQ ID NO: 583759 - RNA, 19 nt, Homo sapiens
  misc_RNA (1)...(19): siRNA sense strand
aaaaguggauggaucguua

SEQ ID NO: 583760 - RNA, 19 nt, Homo sapiens
  misc_RNA (1)...(19): siRNA sense strand
gauggcacuuggaacuuaa

SEQ ID NO: 583761 - RNA, 19 nt, Homo sapiens
  misc_RNA (1)...(19): siRNA sense strand
ggcagaggauauaccagua

SEQ ID NO: 583762 - RNA, 19 nt, Homo sapiens
  misc_RNA (1)...(19): siRNA sense strand
gaaucaagcacagauagaa

SEQ ID NO: 583763 - RNA, 19 nt, Homo sapiens
  misc_RNA (1)...(19): siRNA sense strand
gaauucaaccuuauuaugc

SEQ ID NO: 583764 - RNA, 19 nt, Homo sapiens
  misc_RNA (1)...(19): siRNA sense strand
guucaaagaccucauuuua

SEQ ID NO: 583765 - RNA, 19 nt, Homo sapiens
  misc_RNA (1)...(19): siRNA sense strand
cuacauagugcauuugaaa

SEQ ID NO: 583766 - RNA, 19 nt, Homo sapiens
  misc_RNA (1)...(19): siRNA sense strand
gaacuuaguaucauucacu

SEQ ID NO: 583767 - RNA, 19 nt, Homo sapiens
  misc_RNA (1)...(19): siRNA sense strand
uaacauucuuggaguggaa

SEQ ID NO: 583768 - RNA, 19 nt, Homo sapiens
  misc_RNA (1)...(19): siRNA sense strand
agauggcacuuggaacuua

SEQ ID NO: 583769 - RNA, 19 nt, Homo sapiens
  misc_RNA (1)...(19): siRNA sense strand
ugagguagaucagaugaau

SEQ ID NO: 583770 - RNA, 19 nt, Homo sapiens
  misc_RNA (1)...(19): siRNA sense strand
gaacuuaaagaagaccaaa

SEQ ID NO: 583771 - RNA, 19 nt, Homo sapiens
  misc_RNA (1)...(19): siRNA sense strand
ccaggaacccguaaacuuc

SEQ ID NO: 583772 - RNA, 19 nt, Homo sapiens
  misc_RNA (1)...(19): siRNA sense strand
ucaaagaccucauuuuaag

SEQ ID NO: 583773 - RNA, 19 nt, Homo sapiens
  misc_RNA (1)...(19): siRNA sense strand
uggcaguucuugucaguug

SEQ ID NO: 583774 - RNA, 19 nt, Homo sapiens
  misc_RNA (1)...(19): siRNA sense strand
cgaauucaaccuuauuaug

SEQ ID NO: 583775 - RNA, 19 nt, Homo sapiens
  misc_RNA (1)...(19): siRNA sense strand
uacggucgcugacuacuug

SEQ ID NO: 583776 - RNA, 19 nt, Homo sapiens
  misc_RNA (1)...(19): siRNA sense strand
caaacgcagugcaaucaag

SEQ ID NO: 583777 - RNA, 19 nt, Homo sapiens
  misc_RNA (1)...(19): siRNA sense strand
ccguaaacuucauaacauu

SEQ ID NO: 583778 - RNA, 19 nt, Homo sapiens
  misc_RNA (1)...(19): siRNA sense strand
gacagguuguaaaggcaua

SEQ ID NO: 583779 - RNA, 19 nt, Homo sapiens
  misc_RNA (1)...(19): siRNA sense strand
gcagcacaguuucuucaag

SEQ ID NO: 583780 - RNA, 19 nt, Homo sapiens
  misc_RNA (1)...(19): siRNA sense strand
cauuugaaacgccacuuua

SEQ ID NO: 583781 - RNA, 19 nt, Homo sapiens
  misc_RNA (1)...(19): siRNA sense strand
gaugaagguacaaauacaa

SEQ ID NO: 583782 - RNA, 19 nt, Homo sapiens
  misc_RNA (1)...(19): siRNA sense strand
gcauuugaaacgccacuuu

SEQ ID NO: 583783 - RNA, 19 nt, Homo sapiens
  misc_RNA (1)...(19): siRNA sense strand
gaacccguaaacuucauaa

SEQ ID NO: 583784 - RNA, 19 nt, Homo sapiens
  misc_RNA (1)...(19): siRNA sense strand
gaaaguuugcgcaacagau

SEQ ID NO: 583785 - RNA, 19 nt, Homo sapiens
  misc_RNA (1)...(19): siRNA sense strand
ggagagacuucagcaugca

SEQ ID NO: 583786 - RNA, 19 nt, Homo sapiens
  misc_RNA (1)...(19): siRNA sense strand
ugaugaagguacaaauaca

SEQ ID NO: 583787 - RNA, 19 nt, Homo sapiens
  misc_RNA (1)...(19): siRNA sense strand
cacgaaaguuugcgcaaca

SEQ ID NO: 583788 - RNA, 19 nt, Homo sapiens
  misc_RNA (1)...(19): siRNA sense strand
caaguaauaguguaucuac

SEQ ID NO: 583789 - RNA, 19 nt, Homo sapiens
  misc_RNA (1)...(19): siRNA sense strand
acuuggaacuuaaagaaga

SEQ ID NO: 583790 - RNA, 19 nt, Homo sapiens
  misc_RNA (1)...(19): siRNA sense strand
gagguagaucagaugaaua

SEQ ID NO: 583791 - RNA, 19 nt, Homo sapiens
  misc_RNA (1)...(19): siRNA sense strand
agguagaucagaugaauaa

SEQ ID NO: 583792 - RNA, 19 nt, Homo sapiens
  misc_RNA (1)...(19): siRNA sense strand
uuaaagaagaccaaagaug

SEQ ID NO: 583793 - RNA, 19 nt, Homo sapiens
  misc_RNA (1)...(19): siRNA sense strand
gguauuccaccugcucaua

SEQ ID NO: 583794 - RNA, 19 nt, Homo sapiens
  misc_RNA (1)...(19): siRNA sense strand
cccguaaacuucauaacau

SEQ ID NO: 583795 - RNA, 19 nt, Homo sapiens
  misc_RNA (1)...(19): siRNA sense strand
ugaaacgccacuuuauguu

SEQ ID NO: 583796 - RNA, 19 nt, Homo sapiens
  misc_RNA (1)...(19): siRNA sense strand
cagauucagcaaccucuaa

SEQ ID NO: 583797 - RNA, 19 nt, Homo sapiens
  misc_RNA (1)...(19): siRNA sense strand
uaaugagguuuacuaugca

SEQ ID NO: 583798 - RNA, 19 nt, Homo sapiens
  misc_RNA (1)...(19): siRNA sense strand
caagaaaacagcugaugaa

SEQ ID NO: 583799 - RNA, 19 nt, Homo sapiens
  misc_RNA (1)...(19): siRNA sense strand
ggaacccguaaacuucaua

SEQ ID NO: 583800 - RNA, 19 nt, Homo sapiens
  misc_RNA (1)...(19): siRNA sense strand
gaguacaaaccaccaggaa

SEQ ID NO: 583801 - RNA, 19 nt, Homo sapiens
  misc_RNA (1)...(19): siRNA sense strand
aaagaagaccaaagaugga

SEQ ID NO: 583802 - RNA, 19 nt, Homo sapiens
  misc_RNA (1)...(19): siRNA sense strand
gcauauuaaugagguuuac

SEQ ID NO: 583803 - RNA, 19 nt, Homo sapiens
  misc_RNA (1)...(19): siRNA sense strand
uuugagaaguugccagaug

SEQ ID NO: 583804 - RNA, 19 nt, Homo sapiens
  misc_RNA (1)...(19): siRNA sense strand
uauuccaccugcucauauu

SEQ ID NO: 583805 - RNA, 19 nt, Homo sapiens
  misc_RNA (1)...(19): siRNA sense strand
ugaaaugcacacuggagaa

SEQ ID NO: 583806 - RNA, 19 nt, Homo sapiens
  misc_RNA (1)...(19): siRNA sense strand
ucagcaaccucuaacuaac

SEQ ID NO: 583807 - RNA, 19 nt, Homo sapiens
  misc_RNA (1)...(19): siRNA sense strand
uaguggaaguucuggguau

SEQ ID NO: 583808 - RNA, 19 nt, Homo sapiens
  misc_RNA (1)...(19): siRNA sense strand
gaaaugcacacuggagaac

SEQ ID NO: 583809 - RNA, 19 nt, Homo sapiens
  misc_RNA (1)...(19): siRNA sense strand
cagaggugcuacugggaau

SEQ ID NO: 583810 - RNA, 19 nt, Homo sapiens
  misc_RNA (1)...(19): siRNA sense strand
caugcaaaccuucaucugu

SEQ ID NO: 583811 - RNA, 19 nt, Homo sapiens
  misc_RNA (1)...(19): siRNA sense strand
cggaagguuuacaaugaug

SEQ ID NO: 583812 - RNA, 19 nt, Homo sapiens
  misc_RNA (1)...(19): siRNA sense strand
guauuccaccugcucauau

SEQ ID NO: 583813 - RNA, 19 nt, Homo sapiens
  misc_RNA (1)...(19): siRNA sense strand
uugaaacgccacuuuaugu

SEQ ID NO: 583814 - RNA, 19 nt, Homo sapiens
  misc_RNA (1)...(19): siRNA sense strand
uacugggaaugccuuauga

SEQ ID NO: 583815 - RNA, 19 nt, Homo sapiens
  misc_RNA (1)...(19): siRNA sense strand
aaacgcagugcaaucaaga

SEQ ID NO: 583816 - RNA, 19 nt, Homo sapiens
  misc_RNA (1)...(19): siRNA sense strand
gccacuuuauguuucgaaa

SEQ ID NO: 583817 - RNA, 19 nt, Homo sapiens
  misc_RNA (1)...(19): siRNA sense strand
cuuugaaccuaacacgaaa

SEQ ID NO: 583818 - RNA, 19 nt, Homo sapiens
  misc_RNA (1)...(19): siRNA sense strand
ggcaccaccuccaguacau

SEQ ID NO: 583819 - RNA, 19 nt, Homo sapiens
  misc_RNA (1)...(19): siRNA sense strand
guucaguggugccaaugag

SEQ ID NO: 583820 - RNA, 19 nt, Homo sapiens
  misc_RNA (1)...(19): siRNA sense strand
auaguugacuuuggcaguu

SEQ ID NO: 583821 - RNA, 19 nt, Homo sapiens
  misc_RNA (1)...(19): siRNA sense strand
uccagaacuuaguaucauu

SEQ ID NO: 583822 - RNA, 19 nt, Homo sapiens
  misc_RNA (1)...(19): siRNA sense strand
aaaguuugcgcaacagaug

SEQ ID NO: 583823 - RNA, 19 nt, Homo sapiens
  misc_RNA (1)...(19): siRNA sense strand
ugaaucaagcacagauaga

SEQ ID NO: 583824 - RNA, 19 nt, Homo sapiens
  misc_RNA (1)...(19): siRNA sense strand
ccagauggcacuuggaacu

SEQ ID NO: 583825 - RNA, 19 nt, Homo sapiens
  misc_RNA (1)...(19): siRNA sense strand
gaccuugccauugauaugu

SEQ ID NO: 583826 - RNA, 19 nt, Homo sapiens
  misc_RNA (1)...(19): siRNA sense strand
ccagaacuuaguaucauuc

SEQ ID NO: 583827 - RNA, 19 nt, Homo sapiens
  misc_RNA (1)...(19): siRNA sense strand
cuacugggaaugccuuaug

SEQ ID NO: 583828 - RNA, 19 nt, Homo sapiens
  misc_RNA (1)...(19): siRNA sense strand
gaucaaaacauacaagcau

SEQ ID NO: 583829 - RNA, 19 nt, Homo sapiens
  misc_RNA (1)...(19): siRNA sense strand
caagcauauuaaugagguu

SEQ ID NO: 583830 - RNA, 19 nt, Homo sapiens
  misc_RNA (1)...(19): siRNA sense strand
gaagaccaaagauggaaaa

SEQ ID NO: 583831 - RNA, 19 nt, Homo sapiens
  misc_RNA (1)...(19): siRNA sense strand
gcgacuccagaacuuagua

SEQ ID NO: 583832 - RNA, 19 nt, Homo sapiens
  misc_RNA (1)...(19): siRNA sense strand
ccccaaaacucgaauucaa

SEQ ID NO: 583833 - RNA, 19 nt, Homo sapiens
  misc_RNA (1)...(19): siRNA sense strand
uuaaggaugcuugauuaug

SEQ ID NO: 583834 - RNA, 19 nt, Homo sapiens
  misc_RNA (1)...(19): siRNA sense strand
gaagcgaagacaccaacag

SEQ ID NO: 583835 - RNA, 19 nt, Homo sapiens
  misc_RNA (1)...(19): siRNA sense strand
caccugcucauauucuuga

SEQ ID NO: 583836 - RNA, 19 nt, Homo sapiens
  misc_RNA (1)...(19): siRNA sense strand
acgcagugcaaucaagaua

SEQ ID NO: 583837 - RNA, 19 nt, Homo sapiens
  misc_RNA (1)...(19): siRNA sense strand
ucuuugaaccuaacacgaa

SEQ ID NO: 583838 - RNA, 19 nt, Homo sapiens
  misc_RNA (1)...(19): siRNA sense strand
uucagcaaccucuaacuaa

SEQ ID NO: 583839 - RNA, 19 nt, Homo sapiens
  misc_RNA (1)...(19): siRNA sense strand
caggaacccguaaacuuca

SEQ ID NO: 583840 - RNA, 19 nt, Homo sapiens
  misc_RNA (1)...(19): siRNA sense strand
acuuaaagaagaccaaaga

SEQ ID NO: 583841 - RNA, 19 nt, Homo sapiens
  misc_RNA (1)...(19): siRNA sense strand
caaugagguagaucagaug

SEQ ID NO: 583842 - RNA, 19 nt, Homo sapiens
  misc_RNA (1)...(19): siRNA sense strand
ggaacuuaaagaagaccaa

SEQ ID NO: 583843 - RNA, 19 nt, Homo sapiens
  misc_RNA (1)...(19): siRNA sense strand
ccaaacgcagugcaaucaa

SEQ ID NO: 583844 - RNA, 19 nt, Homo sapiens
  misc_RNA (1)...(19): siRNA sense strand
gcaugcaaaccuucaucug

SEQ ID NO: 583845 - RNA, 19 nt, Homo sapiens
  misc_RNA (1)...(19): siRNA sense strand
ugaccuugccauugauaug

SEQ ID NO: 583846 - RNA, 19 nt, Homo sapiens
  misc_RNA (1)...(19): siRNA sense strand
gaaccuaacacgaaaguuu

SEQ ID NO: 583847 - RNA, 19 nt, Homo sapiens
  misc_RNA (1)...(19): siRNA sense strand
uaaggaugcuugauuauga

SEQ ID NO: 583848 - RNA, 19 nt, Homo sapiens
  misc_RNA (1)...(19): siRNA sense strand
gaaaacagcugaugaaggu

SEQ ID NO: 583849 - RNA, 19 nt, Homo sapiens
  misc_RNA (1)...(19): siRNA sense strand
gaagguacaaauacaagua

SEQ ID NO: 583850 - RNA, 19 nt, Homo sapiens
  misc_RNA (1)...(19): siRNA sense strand
aaacucgaauucaaccuua

SEQ ID NO: 583851 - RNA, 19 nt, Homo sapiens
  misc_RNA (1)...(19): siRNA sense strand
gggaaugccuuaugaccuu

SEQ ID NO: 583852 - RNA, 19 nt, Homo sapiens
  misc_RNA (1)...(19): siRNA sense strand
gcacuuggaacuuaaagaa

SEQ ID NO: 583853 - RNA, 19 nt, Homo sapiens
  misc_RNA (1)...(19): siRNA sense strand
cuuaugaccuugccauuga

SEQ ID NO: 583854 - RNA, 19 nt, Homo sapiens
  misc_RNA (1)...(19): siRNA sense strand
ccaaugagguagaucagau

SEQ ID NO: 583855 - RNA, 19 nt, Homo sapiens
  misc_RNA (1)...(19): siRNA sense strand
uuaaugagguuuacuaugc

SEQ ID NO: 583856 - RNA, 19 nt, Homo sapiens
  misc_RNA (1)...(19): siRNA sense strand
gcaauuuccugcuccucuu

SEQ ID NO: 583857 - RNA, 19 nt, Homo sapiens
  misc_RNA (1)...(19): siRNA sense strand
gcagugcaaucaagauagu

SEQ ID NO: 583858 - RNA, 19 nt, Homo sapiens
  misc_RNA (1)...(19): siRNA sense strand
gcugaugaagguacaaaua

SEQ ID NO: 583859 - RNA, 19 nt, Homo sapiens
  misc_RNA (1)...(19): siRNA sense strand
gaaguucaaagaccucauu

SEQ ID NO: 583860 - RNA, 19 nt, Homo sapiens
  misc_RNA (1)...(19): siRNA sense strand
aaaaguggauggaucguua

SEQ ID NO: 583861 - RNA, 19 nt, Homo sapiens
  misc_RNA (1)...(19): siRNA sense strand
gauggcacuuggaacuuaa

SEQ ID NO: 583862 - RNA, 19 nt, Homo sapiens
  misc_RNA (1)...(19): siRNA sense strand
ggcagaggauauaccagua

SEQ ID NO: 583863 - RNA, 19 nt, Homo sapiens
  misc_RNA (1)...(19): siRNA sense strand
gaaucaagcacagauagaa

SEQ ID NO: 583864 - RNA, 19 nt, Homo sapiens
  misc_RNA (1)...(19): siRNA sense strand
gaauucaaccuuauuaugc

SEQ ID NO: 583865 - RNA, 19 nt, Homo sapiens
  misc_RNA (1)...(19): siRNA sense strand
guucaaagaccucauuuua

SEQ ID NO: 583866 - RNA, 19 nt, Homo sapiens
  misc_RNA (1)...(19): siRNA sense strand
cuacauagugcauuugaaa

SEQ ID NO: 583867 - RNA, 19 nt, Homo sapiens
  misc_RNA (1)...(19): siRNA sense strand
gaacuuaguaucauucacu

SEQ ID NO: 583868 - RNA, 19 nt, Homo sapiens
  misc_RNA (1)...(19): siRNA sense strand
uaacauucuuggaguggaa

SEQ ID NO: 583869 - RNA, 19 nt, Homo sapiens
  misc_RNA (1)...(19): siRNA sense strand
agauggcacuuggaacuua

SEQ ID NO: 583870 - RNA, 19 nt, Homo sapiens
  misc_RNA (1)...(19): siRNA sense strand
ugagguagaucagaugaau

SEQ ID NO: 583871 - RNA, 19 nt, Homo sapiens
  misc_RNA (1)...(19): siRNA sense strand
gaacuuaaagaagaccaaa

SEQ ID NO: 583872 - RNA, 19 nt, Homo sapiens
  misc_RNA (1)...(19): siRNA sense strand
ccaggaacccguaaacuuc

SEQ ID NO: 583873 - RNA, 19 nt, Homo sapiens
  misc_RNA (1)...(19): siRNA sense strand
ucaaagaccucauuuuaag

SEQ ID NO: 583874 - RNA, 19 nt, Homo sapiens
  misc_RNA (1)...(19): siRNA sense strand
uggcaguucuugucaguug

SEQ ID NO: 583875 - RNA, 19 nt, Homo sapiens
  misc_RNA (1)...(19): siRNA sense strand
cgaauucaaccuuauuaug

SEQ ID NO: 583876 - RNA, 19 nt, Homo sapiens
  misc_RNA (1)...(19): siRNA sense strand
uacggucgcugacuacuug

SEQ ID NO: 583877 - RNA, 19 nt, Homo sapiens
  misc_RNA (1)...(19): siRNA sense strand
caaacgcagugcaaucaag

SEQ ID NO: 583878 - RNA, 19 nt, Homo sapiens
  misc_RNA (1)...(19): siRNA sense strand
ccguaaacuucauaacauu

SEQ ID NO: 583879 - RNA, 19 nt, Homo sapiens
  misc_RNA (1)...(19): siRNA sense strand
gacagguuguaaaggcaua

SEQ ID NO: 583880 - RNA, 19 nt, Homo sapiens
  misc_RNA (1)...(19): siRNA sense strand
gcagcacaguuucuucaag

SEQ ID NO: 583881 - RNA, 19 nt, Homo sapiens
  misc_RNA (1)...(19): siRNA sense strand
cauuugaaacgccacuuua

SEQ ID NO: 583882 - RNA, 19 nt, Homo sapiens
  misc_RNA (1)...(19): siRNA sense strand
gaugaagguacaaauacaa

SEQ ID NO: 583883 - RNA, 19 nt, Homo sapiens
  misc_RNA (1)...(19): siRNA sense strand
gcauuugaaacgccacuuu

SEQ ID NO: 583884 - RNA, 19 nt, Homo sapiens
  misc_RNA (1)...(19): siRNA sense strand
gaacccguaaacuucauaa

SEQ ID NO: 583885 - RNA, 19 nt, Homo sapiens
  misc_RNA (1)...(19): siRNA sense strand
gaaaguuugcgcaacagau

SEQ ID NO: 583886 - RNA, 19 nt, Homo sapiens
  misc_RNA (1)...(19): siRNA sense strand
ggagagacuucagcaugca

SEQ ID NO: 583887 - RNA, 19 nt, Homo sapiens
  misc_RNA (1)...(19): siRNA sense strand
ugaugaagguacaaauaca

SEQ ID NO: 583888 - RNA, 19 nt, Homo sapiens
  misc_RNA (1)...(19): siRNA sense strand
cacgaaaguuugcgcaaca

SEQ ID NO: 583889 - RNA, 19 nt, Homo sapiens
  misc_RNA (1)...(19): siRNA sense strand
caaguaauaguguaucuac

SEQ ID NO: 583890 - RNA, 19 nt, Homo sapiens
  misc_RNA (1)...(19): siRNA sense strand
acuuggaacuuaaagaaga

SEQ ID NO: 583891 - RNA, 19 nt, Homo sapiens
  misc_RNA (1)...(19): siRNA sense strand
gagguagaucagaugaaua

SEQ ID NO: 583892 - RNA, 19 nt, Homo sapiens
  misc_RNA (1)...(19): siRNA sense strand
agguagaucagaugaauaa

SEQ ID NO: 583893 - RNA, 19 nt, Homo sapiens
  misc_RNA (1)...(19): siRNA sense strand
uuaaagaagaccaaagaug

SEQ ID NO: 583894 - RNA, 19 nt, Homo sapiens
  misc_RNA (1)...(19): siRNA sense strand
gguauuccaccugcucaua

SEQ ID NO: 583895 - RNA, 19 nt, Homo sapiens
  misc_RNA (1)...(19): siRNA sense strand
cccguaaacuucauaacau

SEQ ID NO: 583896 - RNA, 19 nt, Homo sapiens
  misc_RNA (1)...(19): siRNA sense strand
ugaaacgccacuuuauguu

SEQ ID NO: 583897 - RNA, 19 nt, Homo sapiens
  misc_RNA (1)...(19): siRNA sense strand
cagauucagcaaccucuaa

SEQ ID NO: 583898 - RNA, 19 nt, Homo sapiens
  misc_RNA (1)...(19): siRNA sense strand
uaaugagguuuacuaugca

SEQ ID NO: 583899 - RNA, 19 nt, Homo sapiens
  misc_RNA (1)...(19): siRNA sense strand
gcauauuaaugagguuuac

SEQ ID NO: 583900 - RNA, 19 nt, Homo sapiens
  misc_RNA (1)...(19): siRNA sense strand
caagaaaacagcugaugaa

SEQ ID NO: 583901 - RNA, 19 nt, Homo sapiens
  misc_RNA (1)...(19): siRNA sense strand
ggaacccguaaacuucaua

SEQ ID NO: 583902 - RNA, 19 nt, Homo sapiens
  misc_RNA (1)...(19): siRNA sense strand
gaguacaaaccaccaggaa

SEQ ID NO: 583903 - RNA, 19 nt, Homo sapiens
  misc_RNA (1)...(19): siRNA sense strand
aaagaagaccaaagaugga

SEQ ID NO: 583904 - RNA, 19 nt, Homo sapiens
  misc_RNA (1)...(19): siRNA sense strand
uuugagaaguugccagaug

SEQ ID NO: 583905 - RNA, 19 nt, Homo sapiens
  misc_RNA (1)...(19): siRNA sense strand
uauuccaccugcucauauu

SEQ ID NO: 583906 - RNA, 19 nt, Homo sapiens
  misc_RNA (1)...(19): siRNA sense strand
ugaaaugcacacuggagaa

SEQ ID NO: 583907 - RNA, 19 nt, Homo sapiens
  misc_RNA (1)...(19): siRNA sense strand
cagaggugcuacugggaau

SEQ ID NO: 583908 - RNA, 19 nt, Homo sapiens
  misc_RNA (1)...(19): siRNA sense strand
ucagcaaccucuaacuaac

SEQ ID NO: 583909 - RNA, 19 nt, Homo sapiens
  misc_RNA (1)...(19): siRNA sense strand
uaguggaaguucuggguau

SEQ ID NO: 583910 - RNA, 19 nt, Homo sapiens
  misc_RNA (1)...(19): siRNA sense strand
gaaaugcacacuggagaac

SEQ ID NO: 583911 - RNA, 19 nt, Homo sapiens
  misc_RNA (1)...(19): siRNA sense strand
guauuccaccugcucauau

SEQ ID NO: 583912 - RNA, 19 nt, Homo sapiens
  misc_RNA (1)...(19): siRNA sense strand
caugcaaaccuucaucugu

SEQ ID NO: 583913 - RNA, 19 nt, Homo sapiens
  misc_RNA (1)...(19): siRNA sense strand
cggaagguuuacaaugaug

SEQ ID NO: 583914 - RNA, 19 nt, Homo sapiens
  misc_RNA (1)...(19): siRNA sense strand
uugaaacgccacuuuaugu

SEQ ID NO: 583915 - RNA, 19 nt, Homo sapiens
  misc_RNA (1)...(19): siRNA sense strand
uacugggaaugccuuauga

SEQ ID NO: 583916 - RNA, 19 nt, Homo sapiens
  misc_RNA (1)...(19): siRNA sense strand
aaacgcagugcaaucaaga

SEQ ID NO: 583917 - RNA, 19 nt, Homo sapiens
  misc_RNA (1)...(19): siRNA sense strand
gccacuuuauguuucgaaa

SEQ ID NO: 583918 - RNA, 19 nt, Homo sapiens
  misc_RNA (1)...(19): siRNA sense strand
cuuugaaccuaacacgaaa

SEQ ID NO: 583919 - RNA, 19 nt, Homo sapiens
  misc_RNA (1)...(19): siRNA sense strand
ggcaccaccuccaguacau

SEQ ID NO: 583920 - RNA, 19 nt, Homo sapiens
  misc_RNA (1)...(19): siRNA sense strand
guucaguggugccaaugag

SEQ ID NO: 583921 - RNA, 19 nt, Homo sapiens
  misc_RNA (1)...(19): siRNA sense strand
auaguugacuuuggcaguu

SEQ ID NO: 583922 - RNA, 19 nt, Homo sapiens
  misc_RNA (1)...(19): siRNA sense strand
uccagaacuuaguaucauu

SEQ ID NO: 583923 - RNA, 19 nt, Homo sapiens
  misc_RNA (1)...(19): siRNA sense strand
aaaguuugcgcaacagaug

SEQ ID NO: 583924 - RNA, 19 nt, Homo sapiens
  misc_RNA (1)...(19): siRNA sense strand
ugaaucaagcacagauaga

SEQ ID NO: 583925 - RNA, 19 nt, Homo sapiens
  misc_RNA (1)...(19): siRNA sense strand
ccagauggcacuuggaacu

SEQ ID NO: 583926 - RNA, 19 nt, Homo sapiens
  misc_RNA (1)...(19): siRNA sense strand
gaccuugccauugauaugu

SEQ ID NO: 583927 - RNA, 19 nt, Homo sapiens
  misc_RNA (1)...(19): siRNA sense strand
ccagaacuuaguaucauuc

SEQ ID NO: 583928 - RNA, 19 nt, Homo sapiens
  misc_RNA (1)...(19): siRNA sense strand
cuacugggaaugccuuaug

SEQ ID NO: 583929 - RNA, 19 nt, Homo sapiens
  misc_RNA (1)...(19): siRNA sense strand
caagcauauuaaugagguu

SEQ ID NO: 583930 - RNA, 19 nt, Homo sapiens
  misc_RNA (1)...(19): siRNA sense strand
gaucaaaacauacaagcau

SEQ ID NO: 583931 - RNA, 19 nt, Homo sapiens
  misc_RNA (1)...(19): siRNA sense strand
gaagaccaaagauggaaaa

SEQ ID NO: 583932 - RNA, 19 nt, Homo sapiens
  misc_RNA (1)...(19): siRNA sense strand
gcgacuccagaacuuagua

SEQ ID NO: 583933 - RNA, 19 nt, Homo sapiens
  misc_RNA (1)...(19): siRNA sense strand
ccccaaaacucgaauucaa

SEQ ID NO: 583934 - RNA, 19 nt, Homo sapiens
  misc_RNA (1)...(19): siRNA sense strand
uuaaggaugcuugauuaug

SEQ ID NO: 583935 - RNA, 19 nt, Homo sapiens
  misc_RNA (1)...(19): siRNA sense strand
caccugcucauauucuuga

SEQ ID NO: 583936 - RNA, 19 nt, Homo sapiens
  misc_RNA (1)...(19): siRNA sense strand
gaagcgaagacaccaacag

SEQ ID NO: 583937 - RNA, 19 nt, Homo sapiens
  misc_RNA (1)...(19): siRNA sense strand
acgcagugcaaucaagaua

SEQ ID NO: 583938 - RNA, 19 nt, Homo sapiens
  misc_RNA (1)...(19): siRNA sense strand
ucuuugaaccuaacacgaa

SEQ ID NO: 583939 - RNA, 19 nt, Homo sapiens
  misc_RNA (1)...(19): siRNA sense strand
caggaacccguaaacuuca

SEQ ID NO: 583940 - RNA, 19 nt, Homo sapiens
  misc_RNA (1)...(19): siRNA sense strand
acuuaaagaagaccaaaga

SEQ ID NO: 583941 - RNA, 19 nt, Homo sapiens
  misc_RNA (1)...(19): siRNA sense strand
uucagcaaccucuaacuaa

SEQ ID NO: 583942 - RNA, 19 nt, Homo sapiens
  misc_RNA (1)...(19): siRNA sense strand
caaugagguagaucagaug

SEQ ID NO: 583943 - RNA, 19 nt, Homo sapiens
  misc_RNA (1)...(19): siRNA sense strand
ggaacuuaaagaagaccaa

SEQ ID NO: 583944 - RNA, 19 nt, Homo sapiens
  misc_RNA (1)...(19): siRNA sense strand
ugaccuugccauugauaug

SEQ ID NO: 583945 - RNA, 19 nt, Homo sapiens
  misc_RNA (1)...(19): siRNA sense strand
gcaugcaaaccuucaucug

SEQ ID NO: 583946 - RNA, 19 nt, Homo sapiens
  misc_RNA (1)...(19): siRNA sense strand
ggagagccguguucaauga

SEQ ID NO: 583947 - RNA, 19 nt, Homo sapiens
  misc_RNA (1)...(19): siRNA sense strand
gcccagagcugcuagaguu

SEQ ID NO: 583948 - RNA, 19 nt, Homo sapiens
  misc_RNA (1)...(19): siRNA sense strand
ccaagaagcccaagaaaca

SEQ ID NO: 583949 - RNA, 19 nt, Homo sapiens
  misc_RNA (1)...(19): siRNA sense strand
gggcgaggaugcugaggaa

SEQ ID NO: 583950 - RNA, 19 nt, Homo sapiens
  misc_RNA (1)...(19): siRNA sense strand
ggaaugaugaagaggcuuu

SEQ ID NO: 583951 - RNA, 19 nt, Homo sapiens
  misc_RNA (1)...(19): siRNA sense strand
gaggagagccguguucaau

SEQ ID NO: 583952 - RNA, 19 nt, Homo sapiens
  misc_RNA (1)...(19): siRNA sense strand
acagcgagauugaggaguu

SEQ ID NO: 583953 - RNA, 19 nt, Homo sapiens
  misc_RNA (1)...(19): siRNA sense strand
ccgaggaugucguccaguu

SEQ ID NO: 583954 - RNA, 19 nt, Homo sapiens
  misc_RNA (1)...(19): siRNA sense strand
cugcuagaguucuuaggua

SEQ ID NO: 583955 - RNA, 19 nt, Homo sapiens
  misc_RNA (1)...(19): siRNA sense strand
gacagggaaugaugaagag

SEQ ID NO: 583956 - RNA, 19 nt, Homo sapiens
  misc_RNA (1)...(19): siRNA sense strand
gcuccaagaagcccaagaa

SEQ ID NO: 583957 - RNA, 19 nt, Homo sapiens
  misc_RNA (1)...(19): siRNA sense strand
cagcgagauugaggaguuu

SEQ ID NO: 583958 - RNA, 19 nt, Homo sapiens
  misc_RNA (1)...(19): siRNA sense strand
agacagggaaugaugaaga

SEQ ID NO: 583959 - RNA, 19 nt, Homo sapiens
  misc_RNA (1)...(19): siRNA sense strand
gggcucaccagcagagauu

SEQ ID NO: 583960 - RNA, 19 nt, Homo sapiens
  misc_RNA (1)...(19): siRNA sense strand
cuccaaggaugccgaguug

SEQ ID NO: 583961 - RNA, 19 nt, Homo sapiens
  misc_RNA (1)...(19): siRNA sense strand
ggagaggagagccguguuc

SEQ ID NO: 583962 - RNA, 19 nt, Homo sapiens
  misc_RNA (1)...(19): siRNA sense strand
ccaggcgacuucagaaugc

SEQ ID NO: 583963 - RNA, 19 nt, Homo sapiens
  misc_RNA (1)...(19): siRNA sense strand
gcuggacccucugggcauu

SEQ ID NO: 583964 - RNA, 19 nt, Homo sapiens
  misc_RNA (1)...(19): siRNA sense strand
gcgaggaugcugaggaauc

SEQ ID NO: 583965 - RNA, 19 nt, Homo sapiens
  misc_RNA (1)...(19): siRNA sense strand
gagccguguucaaugagau

SEQ ID NO: 583966 - RNA, 19 nt, Homo sapiens
  misc_RNA (1)...(19): siRNA sense strand
gcaagaccaaguggcagaa

SEQ ID NO: 583967 - RNA, 19 nt, Homo sapiens
  misc_RNA (1)...(19): siRNA sense strand
cagagcugcuagaguucuu

SEQ ID NO: 583968 - RNA, 19 nt, Homo sapiens
  misc_RNA (1)...(19): siRNA sense strand
gagaggagagccguguuca

SEQ ID NO: 583969 - RNA, 19 nt, Homo sapiens
  misc_RNA (1)...(19): siRNA sense strand
ggaugucguccaguucuug

SEQ ID NO: 583970 - RNA, 19 nt, Homo sapiens
  misc_RNA (1)...(19): siRNA sense strand
caagaagcccaagaaacau

SEQ ID NO: 583971 - RNA, 19 nt, Homo sapiens
  misc_RNA (1)...(19): siRNA sense strand
aagaccaaguggcagaaga

SEQ ID NO: 583972 - RNA, 19 nt, Homo sapiens
  misc_RNA (1)...(19): siRNA sense strand
ucagacagggaaugaugaa

SEQ ID NO: 583973 - RNA, 19 nt, Homo sapiens
  misc_RNA (1)...(19): siRNA sense strand
gaggaugucguccaguucu

SEQ ID NO: 583974 - RNA, 19 nt, Homo sapiens
  misc_RNA (1)...(19): siRNA sense strand
ggagagccguguucaauga

SEQ ID NO: 583975 - RNA, 19 nt, Homo sapiens
  misc_RNA (1)...(19): siRNA sense strand
gcccagagcugcuagaguu

SEQ ID NO: 583976 - RNA, 19 nt, Homo sapiens
  misc_RNA (1)...(19): siRNA sense strand
ccaagaagcccaagaaaca

SEQ ID NO: 583977 - RNA, 19 nt, Homo sapiens
  misc_RNA (1)...(19): siRNA sense strand
gggcgaggaugcugaggaa

SEQ ID NO: 583978 - RNA, 19 nt, Homo sapiens
  misc_RNA (1)...(19): siRNA sense strand
ggaaugaugaagaggcuuu

SEQ ID NO: 583979 - RNA, 19 nt, Homo sapiens
  misc_RNA (1)...(19): siRNA sense strand
gaggagagccguguucaau

SEQ ID NO: 583980 - RNA, 19 nt, Homo sapiens
  misc_RNA (1)...(19): siRNA sense strand
acagcgagauugaggaguu

SEQ ID NO: 583981 - RNA, 19 nt, Homo sapiens
  misc_RNA (1)...(19): siRNA sense strand
ccgaggaugucguccaguu

SEQ ID NO: 583982 - RNA, 19 nt, Homo sapiens
  misc_RNA (1)...(19): siRNA sense strand
cugcuagaguucuuaggua

SEQ ID NO: 583983 - RNA, 19 nt, Homo sapiens
  misc_RNA (1)...(19): siRNA sense strand
gacagggaaugaugaagag

SEQ ID NO: 583984 - RNA, 19 nt, Homo sapiens
  misc_RNA (1)...(19): siRNA sense strand
gcuccaagaagcccaagaa

SEQ ID NO: 583985 - RNA, 19 nt, Homo sapiens
  misc_RNA (1)...(19): siRNA sense strand
cagcgagauugaggaguuu

SEQ ID NO: 583986 - RNA, 19 nt, Homo sapiens
  misc_RNA (1)...(19): siRNA sense strand
agacagggaaugaugaaga

SEQ ID NO: 583987 - RNA, 19 nt, Homo sapiens
  misc_RNA (1)...(19): siRNA sense strand
gggcucaccagcagagauu

SEQ ID NO: 583988 - RNA, 19 nt, Homo sapiens
  misc_RNA (1)...(19): siRNA sense strand
cuccaaggaugccgaguug

SEQ ID NO: 583989 - RNA, 19 nt, Homo sapiens
  misc_RNA (1)...(19): siRNA sense strand
ggagaggagagccguguuc

SEQ ID NO: 583990 - RNA, 19 nt, Homo sapiens
  misc_RNA (1)...(19): siRNA sense strand
ccaggcgacuucagaaugc

SEQ ID NO: 583991 - RNA, 19 nt, Homo sapiens
  misc_RNA (1)...(19): siRNA sense strand
gcuggacccucugggcauu

SEQ ID NO: 583992 - RNA, 19 nt, Homo sapiens
  misc_RNA (1)...(19): siRNA sense strand
gcgaggaugcugaggaauc

SEQ ID NO: 583993 - RNA, 19 nt, Homo sapiens
  misc_RNA (1)...(19): siRNA sense strand
gagccguguucaaugagau

SEQ ID NO: 583994 - RNA, 19 nt, Homo sapiens
  misc_RNA (1)...(19): siRNA sense strand
ggucacagcacccagaacu

SEQ ID NO: 583995 - RNA, 19 nt, Homo sapiens
  misc_RNA (1)...(19): siRNA sense strand
gcaagaccaaguggcagaa

SEQ ID NO: 583996 - RNA, 19 nt, Homo sapiens
  misc_RNA (1)...(19): siRNA sense strand
cagagcugcuagaguucuu

SEQ ID NO: 583997 - RNA, 19 nt, Homo sapiens
  misc_RNA (1)...(19): siRNA sense strand
gagaggagagccguguuca

SEQ ID NO: 583998 - RNA, 19 nt, Homo sapiens
  misc_RNA (1)...(19): siRNA sense strand
ggaugucguccaguucuug

SEQ ID NO: 583999 - RNA, 19 nt, Homo sapiens
  misc_RNA (1)...(19): siRNA sense strand
caagaagcccaagaaacau

SEQ ID NO: 584000 - RNA, 19 nt, Homo sapiens
  misc_RNA (1)...(19): siRNA sense strand
aagaccaaguggcagaaga

SEQ ID NO: 584001 - RNA, 19 nt, Homo sapiens
  misc_RNA (1)...(19): siRNA sense strand
ucagacagggaaugaugaa

SEQ ID NO: 584002 - RNA, 19 nt, Homo sapiens
  misc_RNA (1)...(19): siRNA sense strand
gaggaugucguccaguucu

SEQ ID NO: 584003 - RNA, 19 nt, Homo sapiens
  misc_RNA (1)...(19): siRNA sense strand
ggcagaagccugggucaca

SEQ ID NO: 584004 - RNA, 19 nt, Homo sapiens
  misc_RNA (1)...(19): siRNA sense strand
ggaguuaguucaccauauu

SEQ ID NO: 584005 - RNA, 19 nt, Homo sapiens
  misc_RNA (1)...(19): siRNA sense strand
caacaugggcuuccucuuu

SEQ ID NO: 584006 - RNA, 19 nt, Homo sapiens
  misc_RNA (1)...(19): siRNA sense strand
gaucaggucuccagaguag

SEQ ID NO: 584007 - RNA, 19 nt, Homo sapiens
  misc_RNA (1)...(19): siRNA sense strand
cagaguagauccugaaaug

SEQ ID NO: 584008 - RNA, 19 nt, Homo sapiens
  misc_RNA (1)...(19): siRNA sense strand
gaaaugaggauccguuuua

SEQ ID NO: 584009 - RNA, 19 nt, Homo sapiens
  misc_RNA (1)...(19): siRNA sense strand
gagggacucuucugcauau

SEQ ID NO: 584010 - RNA, 19 nt, Homo sapiens
  misc_RNA (1)...(19): siRNA sense strand
gaccuaugcugaugucaug

SEQ ID NO: 584011 - RNA, 19 nt, Homo sapiens
  misc_RNA (1)...(19): siRNA sense strand
gagaggagucggccuauug

SEQ ID NO: 584012 - RNA, 19 nt, Homo sapiens
  misc_RNA (1)...(19): siRNA sense strand
uggaggaacucaucacuau

SEQ ID NO: 584013 - RNA, 19 nt, Homo sapiens
  misc_RNA (1)...(19): siRNA sense strand
ggaaugauggaaaccuuaa

SEQ ID NO: 584014 - RNA, 19 nt, Homo sapiens
  misc_RNA (1)...(19): siRNA sense strand
ccaagaggcagaugugauu

SEQ ID NO: 584015 - RNA, 19 nt, Homo sapiens
  misc_RNA (1)...(19): siRNA sense strand
gagagaaaaugguagauau

SEQ ID NO: 584016 - RNA, 19 nt, Homo sapiens
  misc_RNA (1)...(19): siRNA sense strand
gcuacugcauuguuccuuu

SEQ ID NO: 584017 - RNA, 19 nt, Homo sapiens
  misc_RNA (1)...(19): siRNA sense strand
gauauucaagagaagcuua

SEQ ID NO: 584018 - RNA, 19 nt, Homo sapiens
  misc_RNA (1)...(19): siRNA sense strand
ggagaggagucggccuauu

SEQ ID NO: 584019 - RNA, 19 nt, Homo sapiens
  misc_RNA (1)...(19): siRNA sense strand
ggucagaauguuaauaguu

SEQ ID NO: 584020 - RNA, 19 nt, Homo sapiens
  misc_RNA (1)...(19): siRNA sense strand
gauagccugguccaucuua

SEQ ID NO: 584021 - RNA, 19 nt, Homo sapiens
  misc_RNA (1)...(19): siRNA sense strand
gcgaggcugugacaacaug

SEQ ID NO: 584022 - RNA, 19 nt, Homo sapiens
  misc_RNA (1)...(19): siRNA sense strand
gauggaggaugucaauaac

SEQ ID NO: 584023 - RNA, 19 nt, Homo sapiens
  misc_RNA (1)...(19): siRNA sense strand
cuuaaagccuugaagacaa

SEQ ID NO: 584024 - RNA, 19 nt, Homo sapiens
  misc_RNA (1)...(19): siRNA sense strand
aaggugaucuucccugaug

SEQ ID NO: 584025 - RNA, 19 nt, Homo sapiens
  misc_RNA (1)...(19): siRNA sense strand
ccuauugccuccauucuag

SEQ ID NO: 584026 - RNA, 19 nt, Homo sapiens
  misc_RNA (1)...(19): siRNA sense strand
gacgagaccuaugcugaug

SEQ ID NO: 584027 - RNA, 19 nt, Homo sapiens
  misc_RNA (1)...(19): siRNA sense strand
gcagcugauucaugagaga

SEQ ID NO: 584028 - RNA, 19 nt, Homo sapiens
  misc_RNA (1)...(19): siRNA sense strand
gaguuaguucaccauauua

SEQ ID NO: 584029 - RNA, 19 nt, Homo sapiens
  misc_RNA (1)...(19): siRNA sense strand
gggacuaugugcuggugaa

SEQ ID NO: 584030 - RNA, 19 nt, Homo sapiens
  misc_RNA (1)...(19): siRNA sense strand
ggacgagaccuaugcugau

SEQ ID NO: 584031 - RNA, 19 nt, Homo sapiens
  misc_RNA (1)...(19): siRNA sense strand
ggacucuucugcauauugc

SEQ ID NO: 584032 - RNA, 19 nt, Homo sapiens
  misc_RNA (1)...(19): siRNA sense strand
aacaugggcuuccucuuug

SEQ ID NO: 584033 - RNA, 19 nt, Homo sapiens
  misc_RNA (1)...(19): siRNA sense strand
caaucucagucguggcuuu

SEQ ID NO: 584034 - RNA, 19 nt, Homo sapiens
  misc_RNA (1)...(19): siRNA sense strand
gcuuuaccaccaacuauaa

SEQ ID NO: 584035 - RNA, 19 nt, Homo sapiens
  misc_RNA (1)...(19): siRNA sense strand
agauggaggaugucaauaa

SEQ ID NO: 584036 - RNA, 19 nt, Homo sapiens
  misc_RNA (1)...(19): siRNA sense strand
caacagagagaaaauggua

SEQ ID NO: 584037 - RNA, 19 nt, Homo sapiens
  misc_RNA (1)...(19): siRNA sense strand
gaggaacucaucacuaucu

SEQ ID NO: 584038 - RNA, 19 nt, Homo sapiens
  misc_RNA (1)...(19): siRNA sense strand
gaccaucuggaaccguuua

SEQ ID NO: 584039 - RNA, 19 nt, Homo sapiens
  misc_RNA (1)...(19): siRNA sense strand
caggaaugauggaaaccuu

SEQ ID NO: 584040 - RNA, 19 nt, Homo sapiens
  misc_RNA (1)...(19): siRNA sense strand
cgauuucauugcuggcuuu

SEQ ID NO: 584041 - RNA, 19 nt, Homo sapiens
  misc_RNA (1)...(19): siRNA sense strand
gaguagauccugaaaugag

SEQ ID NO: 584042 - RNA, 19 nt, Homo sapiens
  misc_RNA (1)...(19): siRNA sense strand
gcugccagaugaaugugaa

SEQ ID NO: 584043 - RNA, 19 nt, Homo sapiens
  misc_RNA (1)...(19): siRNA sense strand
augcagagauggaggaugu

SEQ ID NO: 584044 - RNA, 19 nt, Homo sapiens
  misc_RNA (1)...(19): siRNA sense strand
aagcuuauguggaguuagu

SEQ ID NO: 584045 - RNA, 19 nt, Homo sapiens
  misc_RNA (1)...(19): siRNA sense strand
gcaaggaggacuucguuuu

SEQ ID NO: 584046 - RNA, 19 nt, Homo sapiens
  misc_RNA (1)...(19): siRNA sense strand
gaugugauucuccuuguca

SEQ ID NO: 584047 - RNA, 19 nt, Homo sapiens
  misc_RNA (1)...(19): siRNA sense strand
agaagcuuauguggaguua

SEQ ID NO: 584048 - RNA, 19 nt, Homo sapiens
  misc_RNA (1)...(19): siRNA sense strand
gaggggauauucaagagaa

SEQ ID NO: 584049 - RNA, 19 nt, Homo sapiens
  misc_RNA (1)...(19): siRNA sense strand
cagaugugauucuccuugu

SEQ ID NO: 584050 - RNA, 19 nt, Homo sapiens
  misc_RNA (1)...(19): siRNA sense strand
gacaacauguguagcuacu

SEQ ID NO: 584051 - RNA, 19 nt, Homo sapiens
  misc_RNA (1)...(19): siRNA sense strand
ccaacgugcugcucucucu

SEQ ID NO: 584052 - RNA, 19 nt, Homo sapiens
  misc_RNA (1)...(19): siRNA sense strand
gugacaacauguguagcua

SEQ ID NO: 584053 - RNA, 19 nt, Homo sapiens
  misc_RNA (1)...(19): siRNA sense strand
guaaacgcucugccacuga

SEQ ID NO: 584054 - RNA, 19 nt, Homo sapiens
  misc_RNA (1)...(19): siRNA sense strand
gacagaagacacgggcaua

SEQ ID NO: 584055 - RNA, 19 nt, Homo sapiens
  misc_RNA (1)...(19): siRNA sense strand
ggaaguucaguacaacaug

SEQ ID NO: 584056 - RNA, 19 nt, Homo sapiens
  misc_RNA (1)...(19): siRNA sense strand
gagaagcuuauguggaguu

SEQ ID NO: 584057 - RNA, 19 nt, Homo sapiens
  misc_RNA (1)...(19): siRNA sense strand
gaagacacgggcauaucau

SEQ ID NO: 584058 - RNA, 19 nt, Homo sapiens
  misc_RNA (1)...(19): siRNA sense strand
ugagggacucuucugcaua

SEQ ID NO: 584059 - RNA, 19 nt, Homo sapiens
  misc_RNA (1)...(19): siRNA sense strand
gggcauaucauaggcugaa

SEQ ID NO: 584060 - RNA, 19 nt, Homo sapiens
  misc_RNA (1)...(19): siRNA sense strand
uagaggaagugaagaagcu

SEQ ID NO: 584061 - RNA, 19 nt, Homo sapiens
  misc_RNA (1)...(19): siRNA sense strand
aggaugaugucccggaaga

SEQ ID NO: 584062 - RNA, 19 nt, Homo sapiens
  misc_RNA (1)...(19): siRNA sense strand
ccucagcagcgauuucauu

SEQ ID NO: 584063 - RNA, 19 nt, Homo sapiens
  misc_RNA (1)...(19): siRNA sense strand
gaagcagccguguguugga

SEQ ID NO: 584064 - RNA, 19 nt, Homo sapiens
  misc_RNA (1)...(19): siRNA sense strand
uugcucaucuucuggauca

SEQ ID NO: 584065 - RNA, 19 nt, Homo sapiens
  misc_RNA (1)...(19): siRNA sense strand
gaggaagugaagaagcuuu

SEQ ID NO: 584066 - RNA, 19 nt, Homo sapiens
  misc_RNA (1)...(19): siRNA sense strand
cuacugcauuguuccuuuc

SEQ ID NO: 584067 - RNA, 19 nt, Homo sapiens
  misc_RNA (1)...(19): siRNA sense strand
acuaugugcuggugaagau

SEQ ID NO: 584068 - RNA, 19 nt, Homo sapiens
  misc_RNA (1)...(19): siRNA sense strand
agaagacacgggcauauca

SEQ ID NO: 584069 - RNA, 19 nt, Homo sapiens
  misc_RNA (1)...(19): siRNA sense strand
ggaucaggucuccagagua

SEQ ID NO: 584070 - RNA, 19 nt, Homo sapiens
  misc_RNA (1)...(19): siRNA sense strand
ucugaggauuggaauucua

SEQ ID NO: 584071 - RNA, 19 nt, Homo sapiens
  misc_RNA (1)...(19): siRNA sense strand
ccugguccaucuuacagaa

SEQ ID NO: 584072 - RNA, 19 nt, Homo sapiens
  misc_RNA (1)...(19): siRNA sense strand
ggaccaguaaccuccaaga

SEQ ID NO: 584073 - RNA, 19 nt, Homo sapiens
  misc_RNA (1)...(19): siRNA sense strand
ggcuuuaccaccaacuaua

SEQ ID NO: 584074 - RNA, 19 nt, Homo sapiens
  misc_RNA (1)...(19): siRNA sense strand
gugcagugccuaccaaucu

SEQ ID NO: 584075 - RNA, 19 nt, Homo sapiens
  misc_RNA (1)...(19): siRNA sense strand
aagaucaccucagccaguu

SEQ ID NO: 584076 - RNA, 19 nt, Homo sapiens
  misc_RNA (1)...(19): siRNA sense strand
gagauggaggaugucaaua

SEQ ID NO: 584077 - RNA, 19 nt, Homo sapiens
  misc_RNA (1)...(19): siRNA sense strand
guacccaguuggugcuagu

SEQ ID NO: 584078 - RNA, 19 nt, Homo sapiens
  misc_RNA (1)...(19): siRNA sense strand
cgagaccuaugcugauguc

SEQ ID NO: 584079 - RNA, 19 nt, Homo sapiens
  misc_RNA (1)...(19): siRNA sense strand
ggaagaucacguccagaca

SEQ ID NO: 584080 - RNA, 19 nt, Homo sapiens
  misc_RNA (1)...(19): siRNA sense strand
guggugagacggaggaaga

SEQ ID NO: 584081 - RNA, 19 nt, Homo sapiens
  misc_RNA (1)...(19): siRNA sense strand
gccagaugaaugugaauga

SEQ ID NO: 584082 - RNA, 19 nt, Homo sapiens
  misc_RNA (1)...(19): siRNA sense strand
uggaguuaguucaccauau

SEQ ID NO: 584083 - RNA, 19 nt, Homo sapiens
  misc_RNA (1)...(19): siRNA sense strand
gggacucuucugcauauug

SEQ ID NO: 584084 - RNA, 19 nt, Homo sapiens
  misc_RNA (1)...(19): siRNA sense strand
cuugucacaugcucuauca

SEQ ID NO: 584085 - RNA, 19 nt, Homo sapiens
  misc_RNA (1)...(19): siRNA sense strand
auguguagcuacugcauug

SEQ ID NO: 584086 - RNA, 19 nt, Homo sapiens
  misc_RNA (1)...(19): siRNA sense strand
gcagagauggaggauguca

SEQ ID NO: 584087 - RNA, 19 nt, Homo sapiens
  misc_RNA (1)...(19): siRNA sense strand
ggaacucaucacuaucuuc

SEQ ID NO: 584088 - RNA, 19 nt, Homo sapiens
  misc_RNA (1)...(19): siRNA sense strand
acagugcagugccuaccaa

SEQ ID NO: 584089 - RNA, 19 nt, Homo sapiens
  misc_RNA (1)...(19): siRNA sense strand
auucggagguccaguucaa

SEQ ID NO: 584090 - RNA, 19 nt, Homo sapiens
  misc_RNA (1)...(19): siRNA sense strand
cgucugccuuugugucaau

SEQ ID NO: 584091 - RNA, 19 nt, Homo sapiens
  misc_RNA (1)...(19): siRNA sense strand
aagacacgggcauaucaua

SEQ ID NO: 584092 - RNA, 19 nt, Homo sapiens
  misc_RNA (1)...(19): siRNA sense strand
ggauuuuccugaugagguu

SEQ ID NO: 584093 - RNA, 19 nt, Homo sapiens
  misc_RNA (1)...(19): siRNA sense strand
gccuauugccuccauucua

SEQ ID NO: 584094 - RNA, 19 nt, Homo sapiens
  misc_RNA (1)...(19): siRNA sense strand
gcugugacaacauguguag

SEQ ID NO: 584095 - RNA, 19 nt, Homo sapiens
  misc_RNA (1)...(19): siRNA sense strand
agagauggaggaugucaau

SEQ ID NO: 584096 - RNA, 19 nt, Homo sapiens
  misc_RNA (1)...(19): siRNA sense strand
gggaaguucaguacaacau

SEQ ID NO: 584097 - RNA, 19 nt, Homo sapiens
  misc_RNA (1)...(19): siRNA sense strand
acaauucggagguccaguu

SEQ ID NO: 584098 - RNA, 19 nt, Homo sapiens
  misc_RNA (1)...(19): siRNA sense strand
uccgggaaguucaguacaa

SEQ ID NO: 584099 - RNA, 19 nt, Homo sapiens
  misc_RNA (1)...(19): siRNA sense strand
uggaagggcucaguaaacg

SEQ ID NO: 584100 - RNA, 19 nt, Homo sapiens
  misc_RNA (1)...(19): siRNA sense strand
ugaugucccggaagaggua

SEQ ID NO: 584101 - RNA, 19 nt, Homo sapiens
  misc_RNA (1)...(19): siRNA sense strand
cauaucauaggcugaagga

SEQ ID NO: 584102 - RNA, 19 nt, Homo sapiens
  misc_RNA (1)...(19): siRNA sense strand
gccuacagcaugagacaga

SEQ ID NO: 584103 - RNA, 19 nt, Homo sapiens
  misc_RNA (1)...(19): siRNA sense strand
ugauucuccuugucacaug

SEQ ID NO: 584104 - RNA, 19 nt, Homo sapiens
  misc_RNA (1)...(19): siRNA sense strand
ggaguuaguucaccauauu

SEQ ID NO: 584105 - RNA, 19 nt, Homo sapiens
  misc_RNA (1)...(19): siRNA sense strand
caacaugggcuuccucuuu

SEQ ID NO: 584106 - RNA, 19 nt, Homo sapiens
  misc_RNA (1)...(19): siRNA sense strand
gaucaggucuccagaguag

SEQ ID NO: 584107 - RNA, 19 nt, Homo sapiens
  misc_RNA (1)...(19): siRNA sense strand
cagaguagauccugaaaug

SEQ ID NO: 584108 - RNA, 19 nt, Homo sapiens
  misc_RNA (1)...(19): siRNA sense strand
gaaaugaggauccguuuua

SEQ ID NO: 584109 - RNA, 19 nt, Homo sapiens
  misc_RNA (1)...(19): siRNA sense strand
gagggacucuucugcauau

SEQ ID NO: 584110 - RNA, 19 nt, Homo sapiens
  misc_RNA (1)...(19): siRNA sense strand
gaccuaugcugaugucaug

SEQ ID NO: 584111 - RNA, 19 nt, Homo sapiens
  misc_RNA (1)...(19): siRNA sense strand
gagaggagucggccuauug

SEQ ID NO: 584112 - RNA, 19 nt, Homo sapiens
  misc_RNA (1)...(19): siRNA sense strand
uggaggaacucaucacuau

SEQ ID NO: 584113 - RNA, 19 nt, Homo sapiens
  misc_RNA (1)...(19): siRNA sense strand
ggaaugauggaaaccuuaa

SEQ ID NO: 584114 - RNA, 19 nt, Homo sapiens
  misc_RNA (1)...(19): siRNA sense strand
ccaagaggcagaugugauu

SEQ ID NO: 584115 - RNA, 19 nt, Homo sapiens
  misc_RNA (1)...(19): siRNA sense strand
caugauggaugaacuucuu

SEQ ID NO: 584116 - RNA, 19 nt, Homo sapiens
  misc_RNA (1)...(19): siRNA sense strand
ggauggagcucggaaggau

SEQ ID NO: 584117 - RNA, 19 nt, Homo sapiens
  misc_RNA (1)...(19): siRNA sense strand
gcuacugcauuguuccuuu

SEQ ID NO: 584118 - RNA, 19 nt, Homo sapiens
  misc_RNA (1)...(19): siRNA sense strand
gagagaaaaugguagauau

SEQ ID NO: 584119 - RNA, 19 nt, Homo sapiens
  misc_RNA (1)...(19): siRNA sense strand
ccaccucccuaucucauga

SEQ ID NO: 584120 - RNA, 19 nt, Homo sapiens
  misc_RNA (1)...(19): siRNA sense strand
gauauucaagagaagcuua

SEQ ID NO: 584121 - RNA, 19 nt, Homo sapiens
  misc_RNA (1)...(19): siRNA sense strand
ggagaggagucggccuauu

SEQ ID NO: 584122 - RNA, 19 nt, Homo sapiens
  misc_RNA (1)...(19): siRNA sense strand
ggucagaauguuaauaguu

SEQ ID NO: 584123 - RNA, 19 nt, Homo sapiens
  misc_RNA (1)...(19): siRNA sense strand
gauagccugguccaucuua

SEQ ID NO: 584124 - RNA, 19 nt, Homo sapiens
  misc_RNA (1)...(19): siRNA sense strand
gcgaggcugugacaacaug

SEQ ID NO: 584125 - RNA, 19 nt, Homo sapiens
  misc_RNA (1)...(19): siRNA sense strand
gauggaggaugucaauaac

SEQ ID NO: 584126 - RNA, 19 nt, Homo sapiens
  misc_RNA (1)...(19): siRNA sense strand
cuuaaagccuugaagacaa

SEQ ID NO: 584127 - RNA, 19 nt, Homo sapiens
  misc_RNA (1)...(19): siRNA sense strand
aaggugaucuucccugaug

SEQ ID NO: 584128 - RNA, 19 nt, Homo sapiens
  misc_RNA (1)...(19): siRNA sense strand
ccuauugccuccauucuag

SEQ ID NO: 584129 - RNA, 19 nt, Homo sapiens
  misc_RNA (1)...(19): siRNA sense strand
gacgagaccuaugcugaug

SEQ ID NO: 584130 - RNA, 19 nt, Homo sapiens
  misc_RNA (1)...(19): siRNA sense strand
ggaagacccaccucccuau

SEQ ID NO: 584131 - RNA, 19 nt, Homo sapiens
  misc_RNA (1)...(19): siRNA sense strand
gcagcugauucaugagaga

SEQ ID NO: 584132 - RNA, 19 nt, Homo sapiens
  misc_RNA (1)...(19): siRNA sense strand
gaguuaguucaccauauua

SEQ ID NO: 584133 - RNA, 19 nt, Homo sapiens
  misc_RNA (1)...(19): siRNA sense strand
gggacuaugugcuggugaa

SEQ ID NO: 584134 - RNA, 19 nt, Homo sapiens
  misc_RNA (1)...(19): siRNA sense strand
ggacgagaccuaugcugau

SEQ ID NO: 584135 - RNA, 19 nt, Homo sapiens
  misc_RNA (1)...(19): siRNA sense strand
ggacucuucugcauauugc

SEQ ID NO: 584136 - RNA, 19 nt, Homo sapiens
  misc_RNA (1)...(19): siRNA sense strand
aacaugggcuuccucuuug

SEQ ID NO: 584137 - RNA, 19 nt, Homo sapiens
  misc_RNA (1)...(19): siRNA sense strand
caaucucagucguggcuuu

SEQ ID NO: 584138 - RNA, 19 nt, Homo sapiens
  misc_RNA (1)...(19): siRNA sense strand
gcuuuaccaccaacuauaa

SEQ ID NO: 584139 - RNA, 19 nt, Homo sapiens
  misc_RNA (1)...(19): siRNA sense strand
agauggaggaugucaauaa

SEQ ID NO: 584140 - RNA, 19 nt, Homo sapiens
  misc_RNA (1)...(19): siRNA sense strand
caacagagagaaaauggua

SEQ ID NO: 584141 - RNA, 19 nt, Homo sapiens
  misc_RNA (1)...(19): siRNA sense strand
gaggaacucaucacuaucu

SEQ ID NO: 584142 - RNA, 19 nt, Homo sapiens
  misc_RNA (1)...(19): siRNA sense strand
ggaccgacuuuucaacauu

SEQ ID NO: 584143 - RNA, 19 nt, Homo sapiens
  misc_RNA (1)...(19): siRNA sense strand
gaccaucuggaaccguuua

SEQ ID NO: 584144 - RNA, 19 nt, Homo sapiens
  misc_RNA (1)...(19): siRNA sense strand
caggaaugauggaaaccuu

SEQ ID NO: 584145 - RNA, 19 nt, Homo sapiens
  misc_RNA (1)...(19): siRNA sense strand
cgauuucauugcuggcuuu

SEQ ID NO: 584146 - RNA, 19 nt, Homo sapiens
  misc_RNA (1)...(19): siRNA sense strand
gaguagauccugaaaugag

SEQ ID NO: 584147 - RNA, 19 nt, Homo sapiens
  misc_RNA (1)...(19): siRNA sense strand
gcugccagaugaaugugaa

SEQ ID NO: 584148 - RNA, 19 nt, Homo sapiens
  misc_RNA (1)...(19): siRNA sense strand
augcagagauggaggaugu

SEQ ID NO: 584149 - RNA, 19 nt, Homo sapiens
  misc_RNA (1)...(19): siRNA sense strand
aagcuuauguggaguuagu

SEQ ID NO: 584150 - RNA, 19 nt, Homo sapiens
  misc_RNA (1)...(19): siRNA sense strand
gcaaggaggacuucguuuu

SEQ ID NO: 584151 - RNA, 19 nt, Homo sapiens
  misc_RNA (1)...(19): siRNA sense strand
gaugugauucuccuuguca

SEQ ID NO: 584152 - RNA, 19 nt, Homo sapiens
  misc_RNA (1)...(19): siRNA sense strand
agaagcuuauguggaguua

SEQ ID NO: 584153 - RNA, 19 nt, Homo sapiens
  misc_RNA (1)...(19): siRNA sense strand
gaggggauauucaagagaa

SEQ ID NO: 584154 - RNA, 19 nt, Homo sapiens
  misc_RNA (1)...(19): siRNA sense strand
cagaugugauucuccuugu

SEQ ID NO: 584155 - RNA, 19 nt, Homo sapiens
  misc_RNA (1)...(19): siRNA sense strand
gacaacauguguagcuacu

SEQ ID NO: 584156 - RNA, 19 nt, Homo sapiens
  misc_RNA (1)...(19): siRNA sense strand
ccaacgugcugcucucucu

SEQ ID NO: 584157 - RNA, 19 nt, Homo sapiens
  misc_RNA (1)...(19): siRNA sense strand
gugacaacauguguagcua

SEQ ID NO: 584158 - RNA, 19 nt, Homo sapiens
  misc_RNA (1)...(19): siRNA sense strand
guaaacgcucugccacuga

SEQ ID NO: 584159 - RNA, 19 nt, Homo sapiens
  misc_RNA (1)...(19): siRNA sense strand
gacagaagacacgggcaua

SEQ ID NO: 584160 - RNA, 19 nt, Homo sapiens
  misc_RNA (1)...(19): siRNA sense strand
ggaaguucaguacaacaug

SEQ ID NO: 584161 - RNA, 19 nt, Homo sapiens
  misc_RNA (1)...(19): siRNA sense strand
gagaagcuuauguggaguu

SEQ ID NO: 584162 - RNA, 19 nt, Homo sapiens
  misc_RNA (1)...(19): siRNA sense strand
gaagacacgggcauaucau

SEQ ID NO: 584163 - RNA, 19 nt, Homo sapiens
  misc_RNA (1)...(19): siRNA sense strand
ugagggacucuucugcaua

SEQ ID NO: 584164 - RNA, 19 nt, Homo sapiens
  misc_RNA (1)...(19): siRNA sense strand
gggcauaucauaggcugaa

SEQ ID NO: 584165 - RNA, 19 nt, Homo sapiens
  misc_RNA (1)...(19): siRNA sense strand
uagaggaagugaagaagcu

SEQ ID NO: 584166 - RNA, 19 nt, Homo sapiens
  misc_RNA (1)...(19): siRNA sense strand
aggaugaugucccggaaga

SEQ ID NO: 584167 - RNA, 19 nt, Homo sapiens
  misc_RNA (1)...(19): siRNA sense strand
ccucagcagcgauuucauu

SEQ ID NO: 584168 - RNA, 19 nt, Homo sapiens
  misc_RNA (1)...(19): siRNA sense strand
gaagcagccguguguugga

SEQ ID NO: 584169 - RNA, 19 nt, Homo sapiens
  misc_RNA (1)...(19): siRNA sense strand
uugcucaucuucuggauca

SEQ ID NO: 584170 - RNA, 19 nt, Homo sapiens
  misc_RNA (1)...(19): siRNA sense strand
gaggaagugaagaagcuuu

SEQ ID NO: 584171 - RNA, 19 nt, Homo sapiens
  misc_RNA (1)...(19): siRNA sense strand
cuacugcauuguuccuuuc

SEQ ID NO: 584172 - RNA, 19 nt, Homo sapiens
  misc_RNA (1)...(19): siRNA sense strand
acuaugugcuggugaagau

SEQ ID NO: 584173 - RNA, 19 nt, Homo sapiens
  misc_RNA (1)...(19): siRNA sense strand
agaagacacgggcauauca

SEQ ID NO: 584174 - RNA, 19 nt, Homo sapiens
  misc_RNA (1)...(19): siRNA sense strand
ggaucaggucuccagagua

SEQ ID NO: 584175 - RNA, 19 nt, Homo sapiens
  misc_RNA (1)...(19): siRNA sense strand
ucugaggauuggaauucua

SEQ ID NO: 584176 - RNA, 19 nt, Homo sapiens
  misc_RNA (1)...(19): siRNA sense strand
ccugguccaucuuacagaa

SEQ ID NO: 584177 - RNA, 19 nt, Homo sapiens
  misc_RNA (1)...(19): siRNA sense strand
ggaccaguaaccuccaaga

SEQ ID NO: 584178 - RNA, 19 nt, Homo sapiens
  misc_RNA (1)...(19): siRNA sense strand
ggcuuuaccaccaacuaua

SEQ ID NO: 584179 - RNA, 19 nt, Homo sapiens
  misc_RNA (1)...(19): siRNA sense strand
gaccgacuuuucaacauuu

SEQ ID NO: 584180 - RNA, 19 nt, Homo sapiens
  misc_RNA (1)...(19): siRNA sense strand
gaagacccaccucccuauc

SEQ ID NO: 584181 - RNA, 19 nt, Homo sapiens
  misc_RNA (1)...(19): siRNA sense strand
aagaucaccucagccaguu

SEQ ID NO: 584182 - RNA, 19 nt, Homo sapiens
  misc_RNA (1)...(19): siRNA sense strand
gagauggaggaugucaaua

SEQ ID NO: 584183 - RNA, 19 nt, Homo sapiens
  misc_RNA (1)...(19): siRNA sense strand
guacccaguuggugcuagu

SEQ ID NO: 584184 - RNA, 19 nt, Homo sapiens
  misc_RNA (1)...(19): siRNA sense strand
gugcagugccuaccaaucu

SEQ ID NO: 584185 - RNA, 19 nt, Homo sapiens
  misc_RNA (1)...(19): siRNA sense strand
gccagaugaaugugaauga

SEQ ID NO: 584186 - RNA, 19 nt, Homo sapiens
  misc_RNA (1)...(19): siRNA sense strand
ggaagaucacguccagaca

SEQ ID NO: 584187 - RNA, 19 nt, Homo sapiens
  misc_RNA (1)...(19): siRNA sense strand
guggugagacggaggaaga

SEQ ID NO: 584188 - RNA, 19 nt, Homo sapiens
  misc_RNA (1)...(19): siRNA sense strand
cgagaccuaugcugauguc

SEQ ID NO: 584189 - RNA, 19 nt, Homo sapiens
  misc_RNA (1)...(19): siRNA sense strand
uggaguuaguucaccauau

SEQ ID NO: 584190 - RNA, 19 nt, Homo sapiens
  misc_RNA (1)...(19): siRNA sense strand
gggacucuucugcauauug

SEQ ID NO: 584191 - RNA, 19 nt, Homo sapiens
  misc_RNA (1)...(19): siRNA sense strand
cuugucacaugcucuauca

SEQ ID NO: 584192 - RNA, 19 nt, Homo sapiens
  misc_RNA (1)...(19): siRNA sense strand
auguguagcuacugcauug

SEQ ID NO: 584193 - RNA, 19 nt, Homo sapiens
  misc_RNA (1)...(19): siRNA sense strand
gcagagauggaggauguca

SEQ ID NO: 584194 - RNA, 19 nt, Homo sapiens
  misc_RNA (1)...(19): siRNA sense strand
ggaacucaucacuaucuuc

SEQ ID NO: 584195 - RNA, 19 nt, Homo sapiens
  misc_RNA (1)...(19): siRNA sense strand
acagugcagugccuaccaa

SEQ ID NO: 584196 - RNA, 19 nt, Homo sapiens
  misc_RNA (1)...(19): siRNA sense strand
auucggagguccaguucaa

SEQ ID NO: 584197 - RNA, 19 nt, Homo sapiens
  misc_RNA (1)...(19): siRNA sense strand
cgucugccuuugugucaau

SEQ ID NO: 584198 - RNA, 19 nt, Homo sapiens
  misc_RNA (1)...(19): siRNA sense strand
aagacacgggcauaucaua

SEQ ID NO: 584199 - RNA, 19 nt, Homo sapiens
  misc_RNA (1)...(19): siRNA sense strand
ggauuuuccugaugagguu

SEQ ID NO: 584200 - RNA, 19 nt, Homo sapiens
  misc_RNA (1)...(19): siRNA sense strand
gccuauugccuccauucua

SEQ ID NO: 584201 - RNA, 19 nt, Homo sapiens
  misc_RNA (1)...(19): siRNA sense strand
acaauucggagguccaguu

SEQ ID NO: 584202 - RNA, 19 nt, Homo sapiens
  misc_RNA (1)...(19): siRNA sense strand
agagauggaggaugucaau

SEQ ID NO: 584203 - RNA, 19 nt, Homo sapiens
  misc_RNA (1)...(19): siRNA sense strand
gggaaguucaguacaacau

SEQ ID NO: 584204 - RNA, 19 nt, Homo sapiens
  misc_RNA (1)...(19): siRNA sense strand
guacagggcuccagaagua

SEQ ID NO: 584205 - RNA, 19 nt, Homo sapiens
  misc_RNA (1)...(19): siRNA sense strand
gcucaaccaugccaaugua

SEQ ID NO: 584206 - RNA, 19 nt, Homo sapiens
  misc_RNA (1)...(19): siRNA sense strand
aaacacggcuucuuucauc

SEQ ID NO: 584207 - RNA, 19 nt, Homo sapiens
  misc_RNA (1)...(19): siRNA sense strand
ucacaaacacggcuucuuu

SEQ ID NO: 584208 - RNA, 19 nt, Homo sapiens
  misc_RNA (1)...(19): siRNA sense strand
ccugaaggcuaucaacuuu

SEQ ID NO: 584209 - RNA, 19 nt, Homo sapiens
  misc_RNA (1)...(19): siRNA sense strand
gaaguacuccugaggucua

SEQ ID NO: 584210 - RNA, 19 nt, Homo sapiens
  misc_RNA (1)...(19): siRNA sense strand
ggaauaucauguaucagau

SEQ ID NO: 584211 - RNA, 19 nt, Homo sapiens
  misc_RNA (1)...(19): siRNA sense strand
gaccagaacuugugaaaau

SEQ ID NO: 584212 - RNA, 19 nt, Homo sapiens
  misc_RNA (1)...(19): siRNA sense strand
uacaaggacucgcauuuau

SEQ ID NO: 584213 - RNA, 19 nt, Homo sapiens
  misc_RNA (1)...(19): siRNA sense strand
ggacucgcauuuauucaca

SEQ ID NO: 584214 - RNA, 19 nt, Homo sapiens
  misc_RNA (1)...(19): siRNA sense strand
gggagcugaucgcuauuaa

SEQ ID NO: 584215 - RNA, 19 nt, Homo sapiens
  misc_RNA (1)...(19): siRNA sense strand
gaauagauacacaacaauc

SEQ ID NO: 584216 - RNA, 19 nt, Homo sapiens
  misc_RNA (1)...(19): siRNA sense strand
uuacaaggacucgcauuua

SEQ ID NO: 584217 - RNA, 19 nt, Homo sapiens
  misc_RNA (1)...(19): siRNA sense strand
caaggacucgcauuuauuc

SEQ ID NO: 584218 - RNA, 19 nt, Homo sapiens
  misc_RNA (1)...(19): siRNA sense strand
ccaauaacuuaaagaccuu

SEQ ID NO: 584219 - RNA, 19 nt, Homo sapiens
  misc_RNA (1)...(19): siRNA sense strand
gccaauguagucaaauuaa

SEQ ID NO: 584220 - RNA, 19 nt, Homo sapiens
  misc_RNA (1)...(19): siRNA sense strand
guguguacccaauaacuua

SEQ ID NO: 584221 - RNA, 19 nt, Homo sapiens
  misc_RNA (1)...(19): siRNA sense strand
aaaccuccauauacagauu

SEQ ID NO: 584222 - RNA, 19 nt, Homo sapiens
  misc_RNA (1)...(19): siRNA sense strand
cuucuuucaucgagacuua

SEQ ID NO: 584223 - RNA, 19 nt, Homo sapiens
  misc_RNA (1)...(19): siRNA sense strand
gagcugaucgcuauuaaaa

SEQ ID NO: 584224 - RNA, 19 nt, Homo sapiens
  misc_RNA (1)...(19): siRNA sense strand
gaucaaaaccuccauauac

SEQ ID NO: 584225 - RNA, 19 nt, Homo sapiens
  misc_RNA (1)...(19): siRNA sense strand
gcuauaaggaauaucaugu

SEQ ID NO: 584226 - RNA, 19 nt, Homo sapiens
  misc_RNA (1)...(19): siRNA sense strand
gggaaaaugaucaucuuua

SEQ ID NO: 584227 - RNA, 19 nt, Homo sapiens
  misc_RNA (1)...(19): siRNA sense strand
ccaugccaauguagucaaa

SEQ ID NO: 584228 - RNA, 19 nt, Homo sapiens
  misc_RNA (1)...(19): siRNA sense strand
aagaaacgaccaacagcua

SEQ ID NO: 584229 - RNA, 19 nt, Homo sapiens
  misc_RNA (1)...(19): siRNA sense strand
caucauggcagaaguuuac

SEQ ID NO: 584230 - RNA, 19 nt, Homo sapiens
  misc_RNA (1)...(19): siRNA sense strand
ugguuuggcccgagaaaua

SEQ ID NO: 584231 - RNA, 19 nt, Homo sapiens
  misc_RNA (1)...(19): siRNA sense strand
uucgggagguuaagucuuu

SEQ ID NO: 584232 - RNA, 19 nt, Homo sapiens
  misc_RNA (1)...(19): siRNA sense strand
aaucuuuaccagcucauua

SEQ ID NO: 584233 - RNA, 19 nt, Homo sapiens
  misc_RNA (1)...(19): siRNA sense strand
acaaggacucgcauuuauu

SEQ ID NO: 584234 - RNA, 19 nt, Homo sapiens
  misc_RNA (1)...(19): siRNA sense strand
aggaauaucauguaucaga

SEQ ID NO: 584235 - RNA, 19 nt, Homo sapiens
  misc_RNA (1)...(19): siRNA sense strand
gaaacgaccaacagcuagu

SEQ ID NO: 584236 - RNA, 19 nt, Homo sapiens
  misc_RNA (1)...(19): siRNA sense strand
uaaguuguuuccugagucu

SEQ ID NO: 584237 - RNA, 19 nt, Homo sapiens
  misc_RNA (1)...(19): siRNA sense strand
ggagcugaucgcuauuaaa

SEQ ID NO: 584238 - RNA, 19 nt, Homo sapiens
  misc_RNA (1)...(19): siRNA sense strand
ucgcauuuauucacaaaca

SEQ ID NO: 584239 - RNA, 19 nt, Homo sapiens
  misc_RNA (1)...(19): siRNA sense strand
caguccagcuccugagaga

SEQ ID NO: 584240 - RNA, 19 nt, Homo sapiens
  misc_RNA (1)...(19): siRNA sense strand
gaaguuaucagggaaaaug

SEQ ID NO: 584241 - RNA, 19 nt, Homo sapiens
  misc_RNA (1)...(19): siRNA sense strand
gaagcucaaccaugccaau

SEQ ID NO: 584242 - RNA, 19 nt, Homo sapiens
  misc_RNA (1)...(19): siRNA sense strand
gggaccagaacuugugaaa

SEQ ID NO: 584243 - RNA, 19 nt, Homo sapiens
  misc_RNA (1)...(19): siRNA sense strand
gcaucauggcagaaguuua

SEQ ID NO: 584244 - RNA, 19 nt, Homo sapiens
  misc_RNA (1)...(19): siRNA sense strand
gggaagaagcauugagucu

SEQ ID NO: 584245 - RNA, 19 nt, Homo sapiens
  misc_RNA (1)...(19): siRNA sense strand
caaacacggcuucuuucau

SEQ ID NO: 584246 - RNA, 19 nt, Homo sapiens
  misc_RNA (1)...(19): siRNA sense strand
aauaaguuguuuccugagu

SEQ ID NO: 584247 - RNA, 19 nt, Homo sapiens
  misc_RNA (1)...(19): siRNA sense strand
cugagaaccuccucugcau

SEQ ID NO: 584248 - RNA, 19 nt, Homo sapiens
  misc_RNA (1)...(19): siRNA sense strand
ugccaauguagucaaauua

SEQ ID NO: 584249 - RNA, 19 nt, Homo sapiens
  misc_RNA (1)...(19): siRNA sense strand
uaccagcucauuaaagaga

SEQ ID NO: 584250 - RNA, 19 nt, Homo sapiens
  misc_RNA (1)...(19): siRNA sense strand
caaccaugccaauguaguc

SEQ ID NO: 584251 - RNA, 19 nt, Homo sapiens
  misc_RNA (1)...(19): siRNA sense strand
ccugaggucuaccaacuac

SEQ ID NO: 584252 - RNA, 19 nt, Homo sapiens
  misc_RNA (1)...(19): siRNA sense strand
gaaaauugcagacuuuggu

SEQ ID NO: 584253 - RNA, 19 nt, Homo sapiens
  misc_RNA (1)...(19): siRNA sense strand
ugagucugcuauaaggaau

SEQ ID NO: 584254 - RNA, 19 nt, Homo sapiens
  misc_RNA (1)...(19): siRNA sense strand
augccaauguagucaaauu

SEQ ID NO: 584255 - RNA, 19 nt, Homo sapiens
  misc_RNA (1)...(19): siRNA sense strand
acaaacacggcuucuuuca

SEQ ID NO: 584256 - RNA, 19 nt, Homo sapiens
  misc_RNA (1)...(19): siRNA sense strand
ucgaguacaugaaggaaaa

SEQ ID NO: 584257 - RNA, 19 nt, Homo sapiens
  misc_RNA (1)...(19): siRNA sense strand
cccgagaaauacgaucaaa

SEQ ID NO: 584258 - RNA, 19 nt, Homo sapiens
  misc_RNA (1)...(19): siRNA sense strand
ugugaaaauugcagacuuu

SEQ ID NO: 584259 - RNA, 19 nt, Homo sapiens
  misc_RNA (1)...(19): siRNA sense strand
aaagaaguuaucagggaaa

SEQ ID NO: 584260 - RNA, 19 nt, Homo sapiens
  misc_RNA (1)...(19): siRNA sense strand
ccagcucauuaaagagaga

SEQ ID NO: 584261 - RNA, 19 nt, Homo sapiens
  misc_RNA (1)...(19): siRNA sense strand
ggaggaaugcaugaaccuu

SEQ ID NO: 584262 - RNA, 19 nt, Homo sapiens
  misc_RNA (1)...(19): siRNA sense strand
uuuccugagucugcuauaa

SEQ ID NO: 584263 - RNA, 19 nt, Homo sapiens
  misc_RNA (1)...(19): siRNA sense strand
gcaugggaccagaacuugu

SEQ ID NO: 584264 - RNA, 19 nt, Homo sapiens
  misc_RNA (1)...(19): siRNA sense strand
acucgcauuuauucacaaa

SEQ ID NO: 584265 - RNA, 19 nt, Homo sapiens
  misc_RNA (1)...(19): siRNA sense strand
cacaaacacggcuucuuuc

SEQ ID NO: 584266 - RNA, 19 nt, Homo sapiens
  misc_RNA (1)...(19): siRNA sense strand
ucccaaugcuagcagugaa

SEQ ID NO: 584267 - RNA, 19 nt, Homo sapiens
  misc_RNA (1)...(19): siRNA sense strand
aagacugacuggccugaag

SEQ ID NO: 584268 - RNA, 19 nt, Homo sapiens
  misc_RNA (1)...(19): siRNA sense strand
caaaaccuccauauacaga

SEQ ID NO: 584269 - RNA, 19 nt, Homo sapiens
  misc_RNA (1)...(19): siRNA sense strand
aaauugcagacuuugguuu

SEQ ID NO: 584270 - RNA, 19 nt, Homo sapiens
  misc_RNA (1)...(19): siRNA sense strand
caugggaccagaacuugug

SEQ ID NO: 584271 - RNA, 19 nt, Homo sapiens
  misc_RNA (1)...(19): siRNA sense strand
agaccuugauucccaaugc

SEQ ID NO: 584272 - RNA, 19 nt, Homo sapiens
  misc_RNA (1)...(19): siRNA sense strand
guacagggcuccagaagua

SEQ ID NO: 584273 - RNA, 19 nt, Homo sapiens
  misc_RNA (1)...(19): siRNA sense strand
gcucaaccaugccaaugua

SEQ ID NO: 584274 - RNA, 19 nt, Homo sapiens
  misc_RNA (1)...(19): siRNA sense strand
aaacacggcuucuuucauc

SEQ ID NO: 584275 - RNA, 19 nt, Homo sapiens
  misc_RNA (1)...(19): siRNA sense strand
ucacaaacacggcuucuuu

SEQ ID NO: 584276 - RNA, 19 nt, Homo sapiens
  misc_RNA (1)...(19): siRNA sense strand
ccugaaggcuaucaacuuu

SEQ ID NO: 584277 - RNA, 19 nt, Homo sapiens
  misc_RNA (1)...(19): siRNA sense strand
gaaguacuccugaggucua

SEQ ID NO: 584278 - RNA, 19 nt, Homo sapiens
  misc_RNA (1)...(19): siRNA sense strand
ggaauaucauguaucagau

SEQ ID NO: 584279 - RNA, 19 nt, Homo sapiens
  misc_RNA (1)...(19): siRNA sense strand
gaccagaacuugugaaaau

SEQ ID NO: 584280 - RNA, 19 nt, Homo sapiens
  misc_RNA (1)...(19): siRNA sense strand
uacaaggacucgcauuuau

SEQ ID NO: 584281 - RNA, 19 nt, Homo sapiens
  misc_RNA (1)...(19): siRNA sense strand
ggacucgcauuuauucaca

SEQ ID NO: 584282 - RNA, 19 nt, Homo sapiens
  misc_RNA (1)...(19): siRNA sense strand
gggagcugaucgcuauuaa

SEQ ID NO: 584283 - RNA, 19 nt, Homo sapiens
  misc_RNA (1)...(19): siRNA sense strand
gaauagauacacaacaauc

SEQ ID NO: 584284 - RNA, 19 nt, Homo sapiens
  misc_RNA (1)...(19): siRNA sense strand
uuacaaggacucgcauuua

SEQ ID NO: 584285 - RNA, 19 nt, Homo sapiens
  misc_RNA (1)...(19): siRNA sense strand
caaggacucgcauuuauuc

SEQ ID NO: 584286 - RNA, 19 nt, Homo sapiens
  misc_RNA (1)...(19): siRNA sense strand
ccaauaacuuaaagaccuu

SEQ ID NO: 584287 - RNA, 19 nt, Homo sapiens
  misc_RNA (1)...(19): siRNA sense strand
gccaauguagucaaauuaa

SEQ ID NO: 584288 - RNA, 19 nt, Homo sapiens
  misc_RNA (1)...(19): siRNA sense strand
guguguacccaauaacuua

SEQ ID NO: 584289 - RNA, 19 nt, Homo sapiens
  misc_RNA (1)...(19): siRNA sense strand
aaaccuccauauacagauu

SEQ ID NO: 584290 - RNA, 19 nt, Homo sapiens
  misc_RNA (1)...(19): siRNA sense strand
cuucuuucaucgagacuua

SEQ ID NO: 584291 - RNA, 19 nt, Homo sapiens
  misc_RNA (1)...(19): siRNA sense strand
gagcugaucgcuauuaaaa

SEQ ID NO: 584292 - RNA, 19 nt, Homo sapiens
  misc_RNA (1)...(19): siRNA sense strand
gaucaaaaccuccauauac

SEQ ID NO: 584293 - RNA, 19 nt, Homo sapiens
  misc_RNA (1)...(19): siRNA sense strand
gcuauaaggaauaucaugu

SEQ ID NO: 584294 - RNA, 19 nt, Homo sapiens
  misc_RNA (1)...(19): siRNA sense strand
gggaaaaugaucaucuuua

SEQ ID NO: 584295 - RNA, 19 nt, Homo sapiens
  misc_RNA (1)...(19): siRNA sense strand
ccaugccaauguagucaaa

SEQ ID NO: 584296 - RNA, 19 nt, Homo sapiens
  misc_RNA (1)...(19): siRNA sense strand
aagaaacgaccaacagcua

SEQ ID NO: 584297 - RNA, 19 nt, Homo sapiens
  misc_RNA (1)...(19): siRNA sense strand
caucauggcagaaguuuac

SEQ ID NO: 584298 - RNA, 19 nt, Homo sapiens
  misc_RNA (1)...(19): siRNA sense strand
ugguuuggcccgagaaaua

SEQ ID NO: 584299 - RNA, 19 nt, Homo sapiens
  misc_RNA (1)...(19): siRNA sense strand
uucgggagguuaagucuuu

SEQ ID NO: 584300 - RNA, 19 nt, Homo sapiens
  misc_RNA (1)...(19): siRNA sense strand
aaucuuuaccagcucauua

SEQ ID NO: 584301 - RNA, 19 nt, Homo sapiens
  misc_RNA (1)...(19): siRNA sense strand
acaaggacucgcauuuauu

SEQ ID NO: 584302 - RNA, 19 nt, Homo sapiens
  misc_RNA (1)...(19): siRNA sense strand
aggaauaucauguaucaga

SEQ ID NO: 584303 - RNA, 19 nt, Homo sapiens
  misc_RNA (1)...(19): siRNA sense strand
gaaacgaccaacagcuagu

SEQ ID NO: 584304 - RNA, 19 nt, Homo sapiens
  misc_RNA (1)...(19): siRNA sense strand
uaaguuguuuccugagucu

SEQ ID NO: 584305 - RNA, 19 nt, Homo sapiens
  misc_RNA (1)...(19): siRNA sense strand
ggagcugaucgcuauuaaa

SEQ ID NO: 584306 - RNA, 19 nt, Homo sapiens
  misc_RNA (1)...(19): siRNA sense strand
ucgcauuuauucacaaaca

SEQ ID NO: 584307 - RNA, 19 nt, Homo sapiens
  misc_RNA (1)...(19): siRNA sense strand
caguccagcuccugagaga

SEQ ID NO: 584308 - RNA, 19 nt, Homo sapiens
  misc_RNA (1)...(19): siRNA sense strand
gaaguuaucagggaaaaug

SEQ ID NO: 584309 - RNA, 19 nt, Homo sapiens
  misc_RNA (1)...(19): siRNA sense strand
gaagcucaaccaugccaau

SEQ ID NO: 584310 - RNA, 19 nt, Homo sapiens
  misc_RNA (1)...(19): siRNA sense strand
gggaccagaacuugugaaa

SEQ ID NO: 584311 - RNA, 19 nt, Homo sapiens
  misc_RNA (1)...(19): siRNA sense strand
gcaucauggcagaaguuua

SEQ ID NO: 584312 - RNA, 19 nt, Homo sapiens
  misc_RNA (1)...(19): siRNA sense strand
gggaagaagcauugagucu

SEQ ID NO: 584313 - RNA, 19 nt, Homo sapiens
  misc_RNA (1)...(19): siRNA sense strand
caaacacggcuucuuucau

SEQ ID NO: 584314 - RNA, 19 nt, Homo sapiens
  misc_RNA (1)...(19): siRNA sense strand
aauaaguuguuuccugagu

SEQ ID NO: 584315 - RNA, 19 nt, Homo sapiens
  misc_RNA (1)...(19): siRNA sense strand
cugagaaccuccucugcau

SEQ ID NO: 584316 - RNA, 19 nt, Homo sapiens
  misc_RNA (1)...(19): siRNA sense strand
ugccaauguagucaaauua

SEQ ID NO: 584317 - RNA, 19 nt, Homo sapiens
  misc_RNA (1)...(19): siRNA sense strand
uaccagcucauuaaagaga

SEQ ID NO: 584318 - RNA, 19 nt, Homo sapiens
  misc_RNA (1)...(19): siRNA sense strand
caaccaugccaauguaguc

SEQ ID NO: 584319 - RNA, 19 nt, Homo sapiens
  misc_RNA (1)...(19): siRNA sense strand
ccugaggucuaccaacuac

SEQ ID NO: 584320 - RNA, 19 nt, Homo sapiens
  misc_RNA (1)...(19): siRNA sense strand
gaaaauugcagacuuuggu

SEQ ID NO: 584321 - RNA, 19 nt, Homo sapiens
  misc_RNA (1)...(19): siRNA sense strand
ugagucugcuauaaggaau

SEQ ID NO: 584322 - RNA, 19 nt, Homo sapiens
  misc_RNA (1)...(19): siRNA sense strand
augccaauguagucaaauu

SEQ ID NO: 584323 - RNA, 19 nt, Homo sapiens
  misc_RNA (1)...(19): siRNA sense strand
acaaacacggcuucuuuca

SEQ ID NO: 584324 - RNA, 19 nt, Homo sapiens
  misc_RNA (1)...(19): siRNA sense strand
ucgaguacaugaaggaaaa

SEQ ID NO: 584325 - RNA, 19 nt, Homo sapiens
  misc_RNA (1)...(19): siRNA sense strand
cccgagaaauacgaucaaa

SEQ ID NO: 584326 - RNA, 19 nt, Homo sapiens
  misc_RNA (1)...(19): siRNA sense strand
ugugaaaauugcagacuuu

SEQ ID NO: 584327 - RNA, 19 nt, Homo sapiens
  misc_RNA (1)...(19): siRNA sense strand
aaagaaguuaucagggaaa

SEQ ID NO: 584328 - RNA, 19 nt, Homo sapiens
  misc_RNA (1)...(19): siRNA sense strand
ccagcucauuaaagagaga

SEQ ID NO: 584329 - RNA, 19 nt, Homo sapiens
  misc_RNA (1)...(19): siRNA sense strand
ggaggaaugcaugaaccuu

SEQ ID NO: 584330 - RNA, 19 nt, Homo sapiens
  misc_RNA (1)...(19): siRNA sense strand
uuuccugagucugcuauaa

SEQ ID NO: 584331 - RNA, 19 nt, Homo sapiens
  misc_RNA (1)...(19): siRNA sense strand
gcaugggaccagaacuugu

SEQ ID NO: 584332 - RNA, 19 nt, Homo sapiens
  misc_RNA (1)...(19): siRNA sense strand
acucgcauuuauucacaaa

SEQ ID NO: 584333 - RNA, 19 nt, Homo sapiens
  misc_RNA (1)...(19): siRNA sense strand
cacaaacacggcuucuuuc

SEQ ID NO: 584334 - RNA, 19 nt, Homo sapiens
  misc_RNA (1)...(19): siRNA sense strand
ucccaaugcuagcagugaa

SEQ ID NO: 584335 - RNA, 19 nt, Homo sapiens
  misc_RNA (1)...(19): siRNA sense strand
aagacugacuggccugaag

SEQ ID NO: 584336 - RNA, 19 nt, Homo sapiens
  misc_RNA (1)...(19): siRNA sense strand
caaaaccuccauauacaga

SEQ ID NO: 584337 - RNA, 19 nt, Homo sapiens
  misc_RNA (1)...(19): siRNA sense strand
aaauugcagacuuugguuu

SEQ ID NO: 584338 - RNA, 19 nt, Homo sapiens
  misc_RNA (1)...(19): siRNA sense strand
caugggaccagaacuugug

SEQ ID NO: 584339 - RNA, 19 nt, Homo sapiens
  misc_RNA (1)...(19): siRNA sense strand
agaccuugauucccaaugc

SEQ ID NO: 584340 - RNA, 19 nt, Homo sapiens
  misc_RNA (1)...(19): siRNA sense strand
guacagggcuccagaagua

SEQ ID NO: 584341 - RNA, 19 nt, Homo sapiens
  misc_RNA (1)...(19): siRNA sense strand
gcucaaccaugccaaugua

SEQ ID NO: 584342 - RNA, 19 nt, Homo sapiens
  misc_RNA (1)...(19): siRNA sense strand
aaacacggcuucuuucauc

SEQ ID NO: 584343 - RNA, 19 nt, Homo sapiens
  misc_RNA (1)...(19): siRNA sense strand
ucacaaacacggcuucuuu

SEQ ID NO: 584344 - RNA, 19 nt, Homo sapiens
  misc_RNA (1)...(19): siRNA sense strand
ccugaaggcuaucaacuuu

SEQ ID NO: 584345 - RNA, 19 nt, Homo sapiens
  misc_RNA (1)...(19): siRNA sense strand
gaaguacuccugaggucua

SEQ ID NO: 584346 - RNA, 19 nt, Homo sapiens
  misc_RNA (1)...(19): siRNA sense strand
ggaauaucauguaucagau

SEQ ID NO: 584347 - RNA, 19 nt, Homo sapiens
  misc_RNA (1)...(19): siRNA sense strand
gaccagaacuugugaaaau

SEQ ID NO: 584348 - RNA, 19 nt, Homo sapiens
  misc_RNA (1)...(19): siRNA sense strand
uacaaggacucgcauuuau

SEQ ID NO: 584349 - RNA, 19 nt, Homo sapiens
  misc_RNA (1)...(19): siRNA sense strand
ggacucgcauuuauucaca

SEQ ID NO: 584350 - RNA, 19 nt, Homo sapiens
  misc_RNA (1)...(19): siRNA sense strand
gggagcugaucgcuauuaa

SEQ ID NO: 584351 - RNA, 19 nt, Homo sapiens
  misc_RNA (1)...(19): siRNA sense strand
gaauagauacacaacaauc

SEQ ID NO: 584352 - RNA, 19 nt, Homo sapiens
  misc_RNA (1)...(19): siRNA sense strand
uuacaaggacucgcauuua

SEQ ID NO: 584353 - RNA, 19 nt, Homo sapiens
  misc_RNA (1)...(19): siRNA sense strand
caaggacucgcauuuauuc

SEQ ID NO: 584354 - RNA, 19 nt, Homo sapiens
  misc_RNA (1)...(19): siRNA sense strand
ccaauaacuuaaagaccuu

SEQ ID NO: 584355 - RNA, 19 nt, Homo sapiens
  misc_RNA (1)...(19): siRNA sense strand
gccaauguagucaaauuaa

SEQ ID NO: 584356 - RNA, 19 nt, Homo sapiens
  misc_RNA (1)...(19): siRNA sense strand
guguguacccaauaacuua

SEQ ID NO: 584357 - RNA, 19 nt, Homo sapiens
  misc_RNA (1)...(19): siRNA sense strand
aaaccuccauauacagauu

SEQ ID NO: 584358 - RNA, 19 nt, Homo sapiens
  misc_RNA (1)...(19): siRNA sense strand
cuucuuucaucgagacuua

SEQ ID NO: 584359 - RNA, 19 nt, Homo sapiens
  misc_RNA (1)...(19): siRNA sense strand
gagcugaucgcuauuaaaa

SEQ ID NO: 584360 - RNA, 19 nt, Homo sapiens
  misc_RNA (1)...(19): siRNA sense strand
gaucaaaaccuccauauac

SEQ ID NO: 584361 - RNA, 19 nt, Homo sapiens
  misc_RNA (1)...(19): siRNA sense strand
gcuauaaggaauaucaugu

SEQ ID NO: 584362 - RNA, 19 nt, Homo sapiens
  misc_RNA (1)...(19): siRNA sense strand
gggaaaaugaucaucuuua

SEQ ID NO: 584363 - RNA, 19 nt, Homo sapiens
  misc_RNA (1)...(19): siRNA sense strand
ccaugccaauguagucaaa

SEQ ID NO: 584364 - RNA, 19 nt, Homo sapiens
  misc_RNA (1)...(19): siRNA sense strand
aagaaacgaccaacagcua

SEQ ID NO: 584365 - RNA, 19 nt, Homo sapiens
  misc_RNA (1)...(19): siRNA sense strand
caucauggcagaaguuuac

SEQ ID NO: 584366 - RNA, 19 nt, Homo sapiens
  misc_RNA (1)...(19): siRNA sense strand
ugguuuggcccgagaaaua

SEQ ID NO: 584367 - RNA, 19 nt, Homo sapiens
  misc_RNA (1)...(19): siRNA sense strand
uucgggagguuaagucuuu

SEQ ID NO: 584368 - RNA, 19 nt, Homo sapiens
  misc_RNA (1)...(19): siRNA sense strand
aaucuuuaccagcucauua

SEQ ID NO: 584369 - RNA, 19 nt, Homo sapiens
  misc_RNA (1)...(19): siRNA sense strand
acaaggacucgcauuuauu

SEQ ID NO: 584370 - RNA, 19 nt, Homo sapiens
  misc_RNA (1)...(19): siRNA sense strand
aggaauaucauguaucaga

SEQ ID NO: 584371 - RNA, 19 nt, Homo sapiens
  misc_RNA (1)...(19): siRNA sense strand
gaaacgaccaacagcuagu

SEQ ID NO: 584372 - RNA, 19 nt, Homo sapiens
  misc_RNA (1)...(19): siRNA sense strand
uaaguuguuuccugagucu

SEQ ID NO: 584373 - RNA, 19 nt, Homo sapiens
  misc_RNA (1)...(19): siRNA sense strand
ggagcugaucgcuauuaaa

SEQ ID NO: 584374 - RNA, 19 nt, Homo sapiens
  misc_RNA (1)...(19): siRNA sense strand
ucgcauuuauucacaaaca

SEQ ID NO: 584375 - RNA, 19 nt, Homo sapiens
  misc_RNA (1)...(19): siRNA sense strand
caguccagcuccugagaga

SEQ ID NO: 584376 - RNA, 19 nt, Homo sapiens
  misc_RNA (1)...(19): siRNA sense strand
gaaguuaucagggaaaaug

SEQ ID NO: 584377 - RNA, 19 nt, Homo sapiens
  misc_RNA (1)...(19): siRNA sense strand
gaagcucaaccaugccaau

SEQ ID NO: 584378 - RNA, 19 nt, Homo sapiens
  misc_RNA (1)...(19): siRNA sense strand
gggaccagaacuugugaaa

SEQ ID NO: 584379 - RNA, 19 nt, Homo sapiens
  misc_RNA (1)...(19): siRNA sense strand
gcaucauggcagaaguuua

SEQ ID NO: 584380 - RNA, 19 nt, Homo sapiens
  misc_RNA (1)...(19): siRNA sense strand
gggaagaagcauugagucu

SEQ ID NO: 584381 - RNA, 19 nt, Homo sapiens
  misc_RNA (1)...(19): siRNA sense strand
caaacacggcuucuuucau

SEQ ID NO: 584382 - RNA, 19 nt, Homo sapiens
  misc_RNA (1)...(19): siRNA sense strand
aauaaguuguuuccugagu

SEQ ID NO: 584383 - RNA, 19 nt, Homo sapiens
  misc_RNA (1)...(19): siRNA sense strand
cugagaaccuccucugcau

SEQ ID NO: 584384 - RNA, 19 nt, Homo sapiens
  misc_RNA (1)...(19): siRNA sense strand
ugccaauguagucaaauua

SEQ ID NO: 584385 - RNA, 19 nt, Homo sapiens
  misc_RNA (1)...(19): siRNA sense strand
uaccagcucauuaaagaga

SEQ ID NO: 584386 - RNA, 19 nt, Homo sapiens
  misc_RNA (1)...(19): siRNA sense strand
caaccaugccaauguaguc

SEQ ID NO: 584387 - RNA, 19 nt, Homo sapiens
  misc_RNA (1)...(19): siRNA sense strand
ccugaggucuaccaacuac

SEQ ID NO: 584388 - RNA, 19 nt, Homo sapiens
  misc_RNA (1)...(19): siRNA sense strand
gaaaauugcagacuuuggu

SEQ ID NO: 584389 - RNA, 19 nt, Homo sapiens
  misc_RNA (1)...(19): siRNA sense strand
ugagucugcuauaaggaau

SEQ ID NO: 584390 - RNA, 19 nt, Homo sapiens
  misc_RNA (1)...(19): siRNA sense strand
augccaauguagucaaauu

SEQ ID NO: 584391 - RNA, 19 nt, Homo sapiens
  misc_RNA (1)...(19): siRNA sense strand
acaaacacggcuucuuuca

SEQ ID NO: 584392 - RNA, 19 nt, Homo sapiens
  misc_RNA (1)...(19): siRNA sense strand
ucgaguacaugaaggaaaa

SEQ ID NO: 584393 - RNA, 19 nt, Homo sapiens
  misc_RNA (1)...(19): siRNA sense strand
cccgagaaauacgaucaaa

SEQ ID NO: 584394 - RNA, 19 nt, Homo sapiens
  misc_RNA (1)...(19): siRNA sense strand
ugugaaaauugcagacuuu

SEQ ID NO: 584395 - RNA, 19 nt, Homo sapiens
  misc_RNA (1)...(19): siRNA sense strand
aaagaaguuaucagggaaa

SEQ ID NO: 584396 - RNA, 19 nt, Homo sapiens
  misc_RNA (1)...(19): siRNA sense strand
ccagcucauuaaagagaga

SEQ ID NO: 584397 - RNA, 19 nt, Homo sapiens
  misc_RNA (1)...(19): siRNA sense strand
ggaggaaugcaugaaccuu

SEQ ID NO: 584398 - RNA, 19 nt, Homo sapiens
  misc_RNA (1)...(19): siRNA sense strand
uuuccugagucugcuauaa

SEQ ID NO: 584399 - RNA, 19 nt, Homo sapiens
  misc_RNA (1)...(19): siRNA sense strand
gcaugggaccagaacuugu

SEQ ID NO: 584400 - RNA, 19 nt, Homo sapiens
  misc_RNA (1)...(19): siRNA sense strand
acucgcauuuauucacaaa

SEQ ID NO: 584401 - RNA, 19 nt, Homo sapiens
  misc_RNA (1)...(19): siRNA sense strand
cacaaacacggcuucuuuc

SEQ ID NO: 584402 - RNA, 19 nt, Homo sapiens
  misc_RNA (1)...(19): siRNA sense strand
ucccaaugcuagcagugaa

SEQ ID NO: 584403 - RNA, 19 nt, Homo sapiens
  misc_RNA (1)...(19): siRNA sense strand
aagacugacuggccugaag

SEQ ID NO: 584404 - RNA, 19 nt, Homo sapiens
  misc_RNA (1)...(19): siRNA sense strand
caaaaccuccauauacaga

SEQ ID NO: 584405 - RNA, 19 nt, Homo sapiens
  misc_RNA (1)...(19): siRNA sense strand
aaauugcagacuuugguuu

SEQ ID NO: 584406 - RNA, 19 nt, Homo sapiens
  misc_RNA (1)...(19): siRNA sense strand
caugggaccagaacuugug

SEQ ID NO: 584407 - RNA, 19 nt, Homo sapiens
  misc_RNA (1)...(19): siRNA sense strand
agaccuugauucccaaugc

SEQ ID NO: 584408 - RNA, 19 nt, Homo sapiens
  misc_RNA (1)...(19): siRNA sense strand
ggacaacuccugcaaagaa

SEQ ID NO: 584409 - RNA, 19 nt, Homo sapiens
  misc_RNA (1)...(19): siRNA sense strand
gcucaaugaucaggacuua

SEQ ID NO: 584410 - RNA, 19 nt, Homo sapiens
  misc_RNA (1)...(19): siRNA sense strand
agacaaauaucccauucaa

SEQ ID NO: 584411 - RNA, 19 nt, Homo sapiens
  misc_RNA (1)...(19): siRNA sense strand
ccacgaaauucagauauga

SEQ ID NO: 584412 - RNA, 19 nt, Homo sapiens
  misc_RNA (1)...(19): siRNA sense strand
acaaauaucccauucaaga

SEQ ID NO: 584413 - RNA, 19 nt, Homo sapiens
  misc_RNA (1)...(19): siRNA sense strand
gaacugcccacgaaauuca

SEQ ID NO: 584414 - RNA, 19 nt, Homo sapiens
  misc_RNA (1)...(19): siRNA sense strand
gauguccuaugacgaauug

SEQ ID NO: 584415 - RNA, 19 nt, Homo sapiens
  misc_RNA (1)...(19): siRNA sense strand
gacaacuccugcaaagaaa

SEQ ID NO: 584416 - RNA, 19 nt, Homo sapiens
  misc_RNA (1)...(19): siRNA sense strand
ggaacucccuaaagcugaa

SEQ ID NO: 584417 - RNA, 19 nt, Homo sapiens
  misc_RNA (1)...(19): siRNA sense strand
cacagacccuagcacuuua

SEQ ID NO: 584418 - RNA, 19 nt, Homo sapiens
  misc_RNA (1)...(19): siRNA sense strand
cccuaaagcugaagaaugu

SEQ ID NO: 584419 - RNA, 19 nt, Homo sapiens
  misc_RNA (1)...(19): siRNA sense strand
uaaaggaaccaguggaaga

SEQ ID NO: 584420 - RNA, 19 nt, Homo sapiens
  misc_RNA (1)...(19): siRNA sense strand
ccuagcacuuuauccuuua

SEQ ID NO: 584421 - RNA, 19 nt, Homo sapiens
  misc_RNA (1)...(19): siRNA sense strand
acacagacccuagcacuuu

SEQ ID NO: 584422 - RNA, 19 nt, Homo sapiens
  misc_RNA (1)...(19): siRNA sense strand
ucagacaaauaucccauuc

SEQ ID NO: 584423 - RNA, 19 nt, Homo sapiens
  misc_RNA (1)...(19): siRNA sense strand
gcugaagaaugugauacaa

SEQ ID NO: 584424 - RNA, 19 nt, Homo sapiens
  misc_RNA (1)...(19): siRNA sense strand
gguaaaggaaccaguggaa

SEQ ID NO: 584425 - RNA, 19 nt, Homo sapiens
  misc_RNA (1)...(19): siRNA sense strand
gugacuugcucaaugauca

SEQ ID NO: 584426 - RNA, 19 nt, Homo sapiens
  misc_RNA (1)...(19): siRNA sense strand
cccuagcacuuuauccuuu

SEQ ID NO: 584427 - RNA, 19 nt, Homo sapiens
  misc_RNA (1)...(19): siRNA sense strand
caaauaucccauucaagau

SEQ ID NO: 584428 - RNA, 19 nt, Homo sapiens
  misc_RNA (1)...(19): siRNA sense strand
auacggaacucccuaaagc

SEQ ID NO: 584429 - RNA, 19 nt, Homo sapiens
  misc_RNA (1)...(19): siRNA sense strand
gaagacacagacccuagca

SEQ ID NO: 584430 - RNA, 19 nt, Homo sapiens
  misc_RNA (1)...(19): siRNA sense strand
cccacgaaauucagauaug

SEQ ID NO: 584431 - RNA, 19 nt, Homo sapiens
  misc_RNA (1)...(19): siRNA sense strand
cuagcacuuuauccuuuaa

SEQ ID NO: 584432 - RNA, 19 nt, Homo sapiens
  misc_RNA (1)...(19): siRNA sense strand
gcaaagaaaacuguacuug

SEQ ID NO: 584433 - RNA, 19 nt, Homo sapiens
  misc_RNA (1)...(19): siRNA sense strand
cuaaagcugaagaauguga

SEQ ID NO: 584434 - RNA, 19 nt, Homo sapiens
  misc_RNA (1)...(19): siRNA sense strand
acuuugaacugcccacgaa

SEQ ID NO: 584435 - RNA, 19 nt, Homo sapiens
  misc_RNA (1)...(19): siRNA sense strand
gauacggaacucccuaaag

SEQ ID NO: 584436 - RNA, 19 nt, Homo sapiens
  misc_RNA (1)...(19): siRNA sense strand
ucaaugaucaggacuuacu

SEQ ID NO: 584437 - RNA, 19 nt, Homo sapiens
  misc_RNA (1)...(19): siRNA sense strand
guacuuguuccuccugcuu

SEQ ID NO: 584438 - RNA, 19 nt, Homo sapiens
  misc_RNA (1)...(19): siRNA sense strand
ggauguccuaugacgaauu

SEQ ID NO: 584439 - RNA, 19 nt, Homo sapiens
  misc_RNA (1)...(19): siRNA sense strand
uuccagagaucagcaagga

SEQ ID NO: 584440 - RNA, 19 nt, Homo sapiens
  misc_RNA (1)...(19): siRNA sense strand
caaagaaaacuguacuugu

SEQ ID NO: 584441 - RNA, 19 nt, Homo sapiens
  misc_RNA (1)...(19): siRNA sense strand
gacacagacccuagcacuu

SEQ ID NO: 584442 - RNA, 19 nt, Homo sapiens
  misc_RNA (1)...(19): siRNA sense strand
ggaaccaguggaagacaca

SEQ ID NO: 584443 - RNA, 19 nt, Homo sapiens
  misc_RNA (1)...(19): siRNA sense strand
caaugaucaggacuuacua

SEQ ID NO: 584444 - RNA, 19 nt, Homo sapiens
  misc_RNA (1)...(19): siRNA sense strand
aaagcugaagaaugugaua

SEQ ID NO: 584445 - RNA, 19 nt, Homo sapiens
  misc_RNA (1)...(19): siRNA sense strand
uugaacugcccacgaaauu

SEQ ID NO: 584446 - RNA, 19 nt, Homo sapiens
  misc_RNA (1)...(19): siRNA sense strand
ggacaacuccugcaaagaa

SEQ ID NO: 584447 - RNA, 19 nt, Homo sapiens
  misc_RNA (1)...(19): siRNA sense strand
gcucaaugaucaggacuua

SEQ ID NO: 584448 - RNA, 19 nt, Homo sapiens
  misc_RNA (1)...(19): siRNA sense strand
agacaaauaucccauucaa

SEQ ID NO: 584449 - RNA, 19 nt, Homo sapiens
  misc_RNA (1)...(19): siRNA sense strand
ccacgaaauucagauauga

SEQ ID NO: 584450 - RNA, 19 nt, Homo sapiens
  misc_RNA (1)...(19): siRNA sense strand
acaaauaucccauucaaga

SEQ ID NO: 584451 - RNA, 19 nt, Homo sapiens
  misc_RNA (1)...(19): siRNA sense strand
gaacugcccacgaaauuca

SEQ ID NO: 584452 - RNA, 19 nt, Homo sapiens
  misc_RNA (1)...(19): siRNA sense strand
gauguccuaugacgaauug

SEQ ID NO: 584453 - RNA, 19 nt, Homo sapiens
  misc_RNA (1)...(19): siRNA sense strand
gacaacuccugcaaagaaa

SEQ ID NO: 584454 - RNA, 19 nt, Homo sapiens
  misc_RNA (1)...(19): siRNA sense strand
ggaacucccuaaagcugaa

SEQ ID NO: 584455 - RNA, 19 nt, Homo sapiens
  misc_RNA (1)...(19): siRNA sense strand
cacagacccuagcacuuua

SEQ ID NO: 584456 - RNA, 19 nt, Homo sapiens
  misc_RNA (1)...(19): siRNA sense strand
cccuaaagcugaagaaugu

SEQ ID NO: 584457 - RNA, 19 nt, Homo sapiens
  misc_RNA (1)...(19): siRNA sense strand
uaaaggaaccaguggaaga

SEQ ID NO: 584458 - RNA, 19 nt, Homo sapiens
  misc_RNA (1)...(19): siRNA sense strand
ccuagcacuuuauccuuua

SEQ ID NO: 584459 - RNA, 19 nt, Homo sapiens
  misc_RNA (1)...(19): siRNA sense strand
acacagacccuagcacuuu

SEQ ID NO: 584460 - RNA, 19 nt, Homo sapiens
  misc_RNA (1)...(19): siRNA sense strand
ucagacaaauaucccauuc

SEQ ID NO: 584461 - RNA, 19 nt, Homo sapiens
  misc_RNA (1)...(19): siRNA sense strand
gcugaagaaugugauacaa

SEQ ID NO: 584462 - RNA, 19 nt, Homo sapiens
  misc_RNA (1)...(19): siRNA sense strand
gguaaaggaaccaguggaa

SEQ ID NO: 584463 - RNA, 19 nt, Homo sapiens
  misc_RNA (1)...(19): siRNA sense strand
gugacuugcucaaugauca

SEQ ID NO: 584464 - RNA, 19 nt, Homo sapiens
  misc_RNA (1)...(19): siRNA sense strand
cccuagcacuuuauccuuu

SEQ ID NO: 584465 - RNA, 19 nt, Homo sapiens
  misc_RNA (1)...(19): siRNA sense strand
caaauaucccauucaagau

SEQ ID NO: 584466 - RNA, 19 nt, Homo sapiens
  misc_RNA (1)...(19): siRNA sense strand
auacggaacucccuaaagc

SEQ ID NO: 584467 - RNA, 19 nt, Homo sapiens
  misc_RNA (1)...(19): siRNA sense strand
gaagacacagacccuagca

SEQ ID NO: 584468 - RNA, 19 nt, Homo sapiens
  misc_RNA (1)...(19): siRNA sense strand
cccacgaaauucagauaug

SEQ ID NO: 584469 - RNA, 19 nt, Homo sapiens
  misc_RNA (1)...(19): siRNA sense strand
cuagcacuuuauccuuuaa

SEQ ID NO: 584470 - RNA, 19 nt, Homo sapiens
  misc_RNA (1)...(19): siRNA sense strand
gcaaagaaaacuguacuug

SEQ ID NO: 584471 - RNA, 19 nt, Homo sapiens
  misc_RNA (1)...(19): siRNA sense strand
cuaaagcugaagaauguga

SEQ ID NO: 584472 - RNA, 19 nt, Homo sapiens
  misc_RNA (1)...(19): siRNA sense strand
acuuugaacugcccacgaa

SEQ ID NO: 584473 - RNA, 19 nt, Homo sapiens
  misc_RNA (1)...(19): siRNA sense strand
gauacggaacucccuaaag

SEQ ID NO: 584474 - RNA, 19 nt, Homo sapiens
  misc_RNA (1)...(19): siRNA sense strand
ucaaugaucaggacuuacu

SEQ ID NO: 584475 - RNA, 19 nt, Homo sapiens
  misc_RNA (1)...(19): siRNA sense strand
guacuuguuccuccugcuu

SEQ ID NO: 584476 - RNA, 19 nt, Homo sapiens
  misc_RNA (1)...(19): siRNA sense strand
ggauguccuaugacgaauu

SEQ ID NO: 584477 - RNA, 19 nt, Homo sapiens
  misc_RNA (1)...(19): siRNA sense strand
uuccagagaucagcaagga

SEQ ID NO: 584478 - RNA, 19 nt, Homo sapiens
  misc_RNA (1)...(19): siRNA sense strand
caaagaaaacuguacuugu

SEQ ID NO: 584479 - RNA, 19 nt, Homo sapiens
  misc_RNA (1)...(19): siRNA sense strand
gacacagacccuagcacuu

SEQ ID NO: 584480 - RNA, 19 nt, Homo sapiens
  misc_RNA (1)...(19): siRNA sense strand
ggaaccaguggaagacaca

SEQ ID NO: 584481 - RNA, 19 nt, Homo sapiens
  misc_RNA (1)...(19): siRNA sense strand
caaugaucaggacuuacua

SEQ ID NO: 584482 - RNA, 19 nt, Homo sapiens
  misc_RNA (1)...(19): siRNA sense strand
aaagcugaagaaugugaua

SEQ ID NO: 584483 - RNA, 19 nt, Homo sapiens
  misc_RNA (1)...(19): siRNA sense strand
uugaacugcccacgaaauu

SEQ ID NO: 584484 - RNA, 19 nt, Homo sapiens
  misc_RNA (1)...(19): siRNA sense strand
caaggaccaucaaacauuu

SEQ ID NO: 584485 - RNA, 19 nt, Homo sapiens
  misc_RNA (1)...(19): siRNA sense strand
gaauuugcuuugucuguuu

SEQ ID NO: 584486 - RNA, 19 nt, Homo sapiens
  misc_RNA (1)...(19): siRNA sense strand
caaaucaugugaccucuau

SEQ ID NO: 584487 - RNA, 19 nt, Homo sapiens
  misc_RNA (1)...(19): siRNA sense strand
gauauaaacagcagagauu

SEQ ID NO: 584488 - RNA, 19 nt, Homo sapiens
  misc_RNA (1)...(19): siRNA sense strand
ggaggaggaugaugaagau

SEQ ID NO: 584489 - RNA, 19 nt, Homo sapiens
  misc_RNA (1)...(19): siRNA sense strand
ucagauaugucuucuacaa

SEQ ID NO: 584490 - RNA, 19 nt, Homo sapiens
  misc_RNA (1)...(19): siRNA sense strand
acauagagaugcugaaguu

SEQ ID NO: 584491 - RNA, 19 nt, Homo sapiens
  misc_RNA (1)...(19): siRNA sense strand
gaagcaucauuuggaauuu

SEQ ID NO: 584492 - RNA, 19 nt, Homo sapiens
  misc_RNA (1)...(19): siRNA sense strand
ggucuuugcugauguggaa

SEQ ID NO: 584493 - RNA, 19 nt, Homo sapiens
  misc_RNA (1)...(19): siRNA sense strand
gcaauaccauacaugaauc

SEQ ID NO: 584494 - RNA, 19 nt, Homo sapiens
  misc_RNA (1)...(19): siRNA sense strand
caaguuguuucucccaauu

SEQ ID NO: 584495 - RNA, 19 nt, Homo sapiens
  misc_RNA (1)...(19): siRNA sense strand
gaccuuugaucccaagaaa

SEQ ID NO: 584496 - RNA, 19 nt, Homo sapiens
  misc_RNA (1)...(19): siRNA sense strand
gcuaugaacacuagagauu

SEQ ID NO: 584497 - RNA, 19 nt, Homo sapiens
  misc_RNA (1)...(19): siRNA sense strand
ccaaggaccaucaaacauu

SEQ ID NO: 584498 - RNA, 19 nt, Homo sapiens
  misc_RNA (1)...(19): siRNA sense strand
ucauaagccuggcgaaaug

SEQ ID NO: 584499 - RNA, 19 nt, Homo sapiens
  misc_RNA (1)...(19): siRNA sense strand
ggaggguccuucaguguuc

SEQ ID NO: 584500 - RNA, 19 nt, Homo sapiens
  misc_RNA (1)...(19): siRNA sense strand
aaaguggaaucaccaaaga

SEQ ID NO: 584501 - RNA, 19 nt, Homo sapiens
  misc_RNA (1)...(19): siRNA sense strand
caucaaaccauguucagaa

SEQ ID NO: 584502 - RNA, 19 nt, Homo sapiens
  misc_RNA (1)...(19): siRNA sense strand
ugaaucacaugaagcauca

SEQ ID NO: 584503 - RNA, 19 nt, Homo sapiens
  misc_RNA (1)...(19): siRNA sense strand
ggaggaggcagaaaugaga

SEQ ID NO: 584504 - RNA, 19 nt, Homo sapiens
  misc_RNA (1)...(19): siRNA sense strand
cagccaggaucaaguggua

SEQ ID NO: 584505 - RNA, 19 nt, Homo sapiens
  misc_RNA (1)...(19): siRNA sense strand
cagcuacagugucacauug

SEQ ID NO: 584506 - RNA, 19 nt, Homo sapiens
  misc_RNA (1)...(19): siRNA sense strand
gaaaguggaaucaccaaag

SEQ ID NO: 584507 - RNA, 19 nt, Homo sapiens
  misc_RNA (1)...(19): siRNA sense strand
gcacaaauacacccucaca

SEQ ID NO: 584508 - RNA, 19 nt, Homo sapiens
  misc_RNA (1)...(19): siRNA sense strand
gcuguggucccuucagaua

SEQ ID NO: 584509 - RNA, 19 nt, Homo sapiens
  misc_RNA (1)...(19): siRNA sense strand
ugguauggcuuccguuauu

SEQ ID NO: 584510 - RNA, 19 nt, Homo sapiens
  misc_RNA (1)...(19): siRNA sense strand
gggacucagugucuaguug

SEQ ID NO: 584511 - RNA, 19 nt, Homo sapiens
  misc_RNA (1)...(19): siRNA sense strand
ugaagcaucauuuggaauu

SEQ ID NO: 584512 - RNA, 19 nt, Homo sapiens
  misc_RNA (1)...(19): siRNA sense strand
cgacuuuccacuucagaua

SEQ ID NO: 584513 - RNA, 19 nt, Homo sapiens
  misc_RNA (1)...(19): siRNA sense strand
gagagaauccaaacaaagg

SEQ ID NO: 584514 - RNA, 19 nt, Homo sapiens
  misc_RNA (1)...(19): siRNA sense strand
gaagacggcuaugaacacu

SEQ ID NO: 584515 - RNA, 19 nt, Homo sapiens
  misc_RNA (1)...(19): siRNA sense strand
cagaucagguccucuuaca

SEQ ID NO: 584516 - RNA, 19 nt, Homo sapiens
  misc_RNA (1)...(19): siRNA sense strand
gguggagcauguacauaga

SEQ ID NO: 584517 - RNA, 19 nt, Homo sapiens
  misc_RNA (1)...(19): siRNA sense strand
gaaaggccacuuccgucaa

SEQ ID NO: 584518 - RNA, 19 nt, Homo sapiens
  misc_RNA (1)...(19): siRNA sense strand
gaucagguccucuuacaac

SEQ ID NO: 584519 - RNA, 19 nt, Homo sapiens
  misc_RNA (1)...(19): siRNA sense strand
aaaggcacauuucaaucuu

SEQ ID NO: 584520 - RNA, 19 nt, Homo sapiens
  misc_RNA (1)...(19): siRNA sense strand
aaaaugagcucaccacaag

SEQ ID NO: 584521 - RNA, 19 nt, Homo sapiens
  misc_RNA (1)...(19): siRNA sense strand
gagcauguacauagagaug

SEQ ID NO: 584522 - RNA, 19 nt, Homo sapiens
  misc_RNA (1)...(19): siRNA sense strand
gguauggcuuccguuauug

SEQ ID NO: 584523 - RNA, 19 nt, Homo sapiens
  misc_RNA (1)...(19): siRNA sense strand
uuuagaacgugccaugaaa

SEQ ID NO: 584524 - RNA, 19 nt, Homo sapiens
  misc_RNA (1)...(19): siRNA sense strand
gaggggcgaucgacagaua

SEQ ID NO: 584525 - RNA, 19 nt, Homo sapiens
  misc_RNA (1)...(19): siRNA sense strand
gcaaaucaugugaccucua

SEQ ID NO: 584526 - RNA, 19 nt, Homo sapiens
  misc_RNA (1)...(19): siRNA sense strand
gaagaaagaaaggccacuu

SEQ ID NO: 584527 - RNA, 19 nt, Homo sapiens
  misc_RNA (1)...(19): siRNA sense strand
gggaggaggaugaugaaga

SEQ ID NO: 584528 - RNA, 19 nt, Homo sapiens
  misc_RNA (1)...(19): siRNA sense strand
uuacagaucgucggucuuu

SEQ ID NO: 584529 - RNA, 19 nt, Homo sapiens
  misc_RNA (1)...(19): siRNA sense strand
aaagggaggaggaugauga

SEQ ID NO: 584530 - RNA, 19 nt, Homo sapiens
  misc_RNA (1)...(19): siRNA sense strand
caacucaucaaaccauguu

SEQ ID NO: 584531 - RNA, 19 nt, Homo sapiens
  misc_RNA (1)...(19): siRNA sense strand
gcucaaagucaagaagaaa

SEQ ID NO: 584532 - RNA, 19 nt, Homo sapiens
  misc_RNA (1)...(19): siRNA sense strand
aaacagaucagguccucuu

SEQ ID NO: 584533 - RNA, 19 nt, Homo sapiens
  misc_RNA (1)...(19): siRNA sense strand
cuucagauaugucuucuac

SEQ ID NO: 584534 - RNA, 19 nt, Homo sapiens
  misc_RNA (1)...(19): siRNA sense strand
aaaggccacuuccgucaau

SEQ ID NO: 584535 - RNA, 19 nt, Homo sapiens
  misc_RNA (1)...(19): siRNA sense strand
agacggcuaugaacacuag

SEQ ID NO: 584536 - RNA, 19 nt, Homo sapiens
  misc_RNA (1)...(19): siRNA sense strand
ucugugaauugucauuuga

SEQ ID NO: 584537 - RNA, 19 nt, Homo sapiens
  misc_RNA (1)...(19): siRNA sense strand
agacucacaccaccuuuaa

SEQ ID NO: 584538 - RNA, 19 nt, Homo sapiens
  misc_RNA (1)...(19): siRNA sense strand
cguguuacuuagcaacuuu

SEQ ID NO: 584539 - RNA, 19 nt, Homo sapiens
  misc_RNA (1)...(19): siRNA sense strand
agaguucuccugauucaaa

SEQ ID NO: 584540 - RNA, 19 nt, Homo sapiens
  misc_RNA (1)...(19): siRNA sense strand
aaggcacauuucaaucuua

SEQ ID NO: 584541 - RNA, 19 nt, Homo sapiens
  misc_RNA (1)...(19): siRNA sense strand
ccucagucuucuccuguaa

SEQ ID NO: 584542 - RNA, 19 nt, Homo sapiens
  misc_RNA (1)...(19): siRNA sense strand
caagugccggcuacaguuu

SEQ ID NO: 584543 - RNA, 19 nt, Homo sapiens
  misc_RNA (1)...(19): siRNA sense strand
aaacugcaauaccauacau

SEQ ID NO: 584544 - RNA, 19 nt, Homo sapiens
  misc_RNA (1)...(19): siRNA sense strand
agaauuugcuuugucuguu

SEQ ID NO: 584545 - RNA, 19 nt, Homo sapiens
  misc_RNA (1)...(19): siRNA sense strand
aaacagcagagauuccaaa

SEQ ID NO: 584546 - RNA, 19 nt, Homo sapiens
  misc_RNA (1)...(19): siRNA sense strand
gcccucugcugucuguaaa

SEQ ID NO: 584547 - RNA, 19 nt, Homo sapiens
  misc_RNA (1)...(19): siRNA sense strand
ccagagagagcaaaugagu

SEQ ID NO: 584548 - RNA, 19 nt, Homo sapiens
  misc_RNA (1)...(19): siRNA sense strand
aaucccaucguguuacuua

SEQ ID NO: 584549 - RNA, 19 nt, Homo sapiens
  misc_RNA (1)...(19): siRNA sense strand
gagaugggcagccggaaca

SEQ ID NO: 584550 - RNA, 19 nt, Homo sapiens
  misc_RNA (1)...(19): siRNA sense strand
uugagagaauccaaacaaa

SEQ ID NO: 584551 - RNA, 19 nt, Homo sapiens
  misc_RNA (1)...(19): siRNA sense strand
ggcucaaagucaagaagaa

SEQ ID NO: 584552 - RNA, 19 nt, Homo sapiens
  misc_RNA (1)...(19): siRNA sense strand
cuacagugucacauugaua

SEQ ID NO: 584553 - RNA, 19 nt, Homo sapiens
  misc_RNA (1)...(19): siRNA sense strand
gcuacagugucacauugau

SEQ ID NO: 584554 - RNA, 19 nt, Homo sapiens
  misc_RNA (1)...(19): siRNA sense strand
gaagacucacaccaccuuu

SEQ ID NO: 584555 - RNA, 19 nt, Homo sapiens
  misc_RNA (1)...(19): siRNA sense strand
ucaagucuagcaagucaaa

SEQ ID NO: 584556 - RNA, 19 nt, Homo sapiens
  misc_RNA (1)...(19): siRNA sense strand
ggccugaugcuaauggaaa

SEQ ID NO: 584557 - RNA, 19 nt, Homo sapiens
  misc_RNA (1)...(19): siRNA sense strand
uagcuguggucccuucaga

SEQ ID NO: 584558 - RNA, 19 nt, Homo sapiens
  misc_RNA (1)...(19): siRNA sense strand
uggaaucaccaaagaagaa

SEQ ID NO: 584559 - RNA, 19 nt, Homo sapiens
  misc_RNA (1)...(19): siRNA sense strand
ccaagugccggcuacaguu

SEQ ID NO: 584560 - RNA, 19 nt, Homo sapiens
  misc_RNA (1)...(19): siRNA sense strand
uuucaagucuagcaaguca

SEQ ID NO: 584561 - RNA, 19 nt, Homo sapiens
  misc_RNA (1)...(19): siRNA sense strand
ucuuacagauccagagaga

SEQ ID NO: 584562 - RNA, 19 nt, Homo sapiens
  misc_RNA (1)...(19): siRNA sense strand
acuuuccacuucagauaua

SEQ ID NO: 584563 - RNA, 19 nt, Homo sapiens
  misc_RNA (1)...(19): siRNA sense strand
aagcaucauuuggaauuug

SEQ ID NO: 584564 - RNA, 19 nt, Homo sapiens
  misc_RNA (1)...(19): siRNA sense strand
uguggucccuucagauaug

SEQ ID NO: 584565 - RNA, 19 nt, Homo sapiens
  misc_RNA (1)...(19): siRNA sense strand
cagcagagauuccaaaagg

SEQ ID NO: 584566 - RNA, 19 nt, Homo sapiens
  misc_RNA (1)...(19): siRNA sense strand
ucaaagucaagaagaaaga

SEQ ID NO: 584567 - RNA, 19 nt, Homo sapiens
  misc_RNA (1)...(19): siRNA sense strand
ggaaucaccaaagaagaau

SEQ ID NO: 584568 - RNA, 19 nt, Homo sapiens
  misc_RNA (1)...(19): siRNA sense strand
ggaggaaauagagcacaaa

SEQ ID NO: 584569 - RNA, 19 nt, Homo sapiens
  misc_RNA (1)...(19): siRNA sense strand
agaagaauuugagagaauc

SEQ ID NO: 584570 - RNA, 19 nt, Homo sapiens
  misc_RNA (1)...(19): siRNA sense strand
ugugccagguuugccauua

SEQ ID NO: 584571 - RNA, 19 nt, Homo sapiens
  misc_RNA (1)...(19): siRNA sense strand
caucauaagccuggcgaaa

SEQ ID NO: 584572 - RNA, 19 nt, Homo sapiens
  misc_RNA (1)...(19): siRNA sense strand
ucacaccaccuuuaaaugc

SEQ ID NO: 584573 - RNA, 19 nt, Homo sapiens
  misc_RNA (1)...(19): siRNA sense strand
ggguggagcauguacauag

SEQ ID NO: 584574 - RNA, 19 nt, Homo sapiens
  misc_RNA (1)...(19): siRNA sense strand
cagguccucuuacaacaca

SEQ ID NO: 584575 - RNA, 19 nt, Homo sapiens
  misc_RNA (1)...(19): siRNA sense strand
guuuaugaaucacaugaag

SEQ ID NO: 584576 - RNA, 19 nt, Homo sapiens
  misc_RNA (1)...(19): siRNA sense strand
acaauaagcacaaauacac

SEQ ID NO: 584577 - RNA, 19 nt, Homo sapiens
  misc_RNA (1)...(19): siRNA sense strand
caaagucaagaagaaagaa

SEQ ID NO: 584578 - RNA, 19 nt, Homo sapiens
  misc_RNA (1)...(19): siRNA sense strand
guacauagagaugcugaag

SEQ ID NO: 584579 - RNA, 19 nt, Homo sapiens
  misc_RNA (1)...(19): siRNA sense strand
gcacauuucaaucuuacag

SEQ ID NO: 584580 - RNA, 19 nt, Homo sapiens
  misc_RNA (1)...(19): siRNA sense strand
gaucugcaacucaucaaac

SEQ ID NO: 584581 - RNA, 19 nt, Homo sapiens
  misc_RNA (1)...(19): siRNA sense strand
gacguugaaggaggaaaua

SEQ ID NO: 584582 - RNA, 19 nt, Homo sapiens
  misc_RNA (1)...(19): siRNA sense strand
gaaucaccaaagaagaauu

SEQ ID NO: 584583 - RNA, 19 nt, Homo sapiens
  misc_RNA (1)...(19): siRNA sense strand
gagucuggccuggcaauga

SEQ ID NO: 584584 - RNA, 19 nt, Homo sapiens
  misc_RNA (1)...(19): siRNA sense strand
gccaaggacuuucaagaua

SEQ ID NO: 584585 - RNA, 19 nt, Homo sapiens
  misc_RNA (1)...(19): siRNA sense strand
gagccaagcuggagaaaca

SEQ ID NO: 584586 - RNA, 19 nt, Homo sapiens
  misc_RNA (1)...(19): siRNA sense strand
gagcagaaauucauuguac

SEQ ID NO: 584587 - RNA, 19 nt, Homo sapiens
  misc_RNA (1)...(19): siRNA sense strand
ccaaggacuuucaagauau

SEQ ID NO: 584588 - RNA, 19 nt, Homo sapiens
  misc_RNA (1)...(19): siRNA sense strand
gggcugaggcggagaagua

SEQ ID NO: 584589 - RNA, 19 nt, Homo sapiens
  misc_RNA (1)...(19): siRNA sense strand
gcccugcucuuccaucuga

SEQ ID NO: 584590 - RNA, 19 nt, Homo sapiens
  misc_RNA (1)...(19): siRNA sense strand
ucacucagccagauaauug

SEQ ID NO: 584591 - RNA, 19 nt, Homo sapiens
  misc_RNA (1)...(19): siRNA sense strand
gaaauucauuguacaacac

SEQ ID NO: 584592 - RNA, 19 nt, Homo sapiens
  misc_RNA (1)...(19): siRNA sense strand
ugacggagguccaggcaau

SEQ ID NO: 584593 - RNA, 19 nt, Homo sapiens
  misc_RNA (1)...(19): siRNA sense strand
gcagaaauucauuguacaa

SEQ ID NO: 584594 - RNA, 19 nt, Homo sapiens
  misc_RNA (1)...(19): siRNA sense strand
caagaucacaucccuagga

SEQ ID NO: 584595 - RNA, 19 nt, Homo sapiens
  misc_RNA (1)...(19): siRNA sense strand
caaggacuuucaagauauc

SEQ ID NO: 584596 - RNA, 19 nt, Homo sapiens
  misc_RNA (1)...(19): siRNA sense strand
agugauggcucuuggaaau

SEQ ID NO: 584597 - RNA, 19 nt, Homo sapiens
  misc_RNA (1)...(19): siRNA sense strand
uacaagaacugggcuguca

SEQ ID NO: 584598 - RNA, 19 nt, Homo sapiens
  misc_RNA (1)...(19): siRNA sense strand
gaagugaagacuguguuga

SEQ ID NO: 584599 - RNA, 19 nt, Homo sapiens
  misc_RNA (1)...(19): siRNA sense strand
cagcgugggugacaagauc

SEQ ID NO: 584600 - RNA, 19 nt, Homo sapiens
  misc_RNA (1)...(19): siRNA sense strand
ggagcagaaauucauugua

SEQ ID NO: 584601 - RNA, 19 nt, Homo sapiens
  misc_RNA (1)...(19): siRNA sense strand
ggaagugaagacuguguug

SEQ ID NO: 584602 - RNA, 19 nt, Homo sapiens
  misc_RNA (1)...(19): siRNA sense strand
gaccauccuuuccaucaag

SEQ ID NO: 584603 - RNA, 19 nt, Homo sapiens
  misc_RNA (1)...(19): siRNA sense strand
ggguggaagugaagacugu

SEQ ID NO: 584604 - RNA, 19 nt, Homo sapiens
  misc_RNA (1)...(19): siRNA sense strand
ggccaaggacuuucaagau

SEQ ID NO: 584605 - RNA, 19 nt, Homo sapiens
  misc_RNA (1)...(19): siRNA sense strand
gggaggagcagaaauucau

SEQ ID NO: 584606 - RNA, 19 nt, Homo sapiens
  misc_RNA (1)...(19): siRNA sense strand
ggaggagcagaaauucauu

SEQ ID NO: 584607 - RNA, 19 nt, Homo sapiens
  misc_RNA (1)...(19): siRNA sense strand
cgagcuggguggaagugaa

SEQ ID NO: 584608 - RNA, 19 nt, Homo sapiens
  misc_RNA (1)...(19): siRNA sense strand
ugaccauccuuuccaucaa

SEQ ID NO: 584609 - RNA, 19 nt, Homo sapiens
  misc_RNA (1)...(19): siRNA sense strand
gaggagcagaaauucauug

SEQ ID NO: 584610 - RNA, 19 nt, Homo sapiens
  misc_RNA (1)...(19): siRNA sense strand
gcacagacuauaggcacaa

SEQ ID NO: 584611 - RNA, 19 nt, Homo sapiens
  misc_RNA (1)...(19): siRNA sense strand
cagacuauaggcacaacua

SEQ ID NO: 584612 - RNA, 19 nt, Homo sapiens
  misc_RNA (1)...(19): siRNA sense strand
ccugaaagcagaucacgau

SEQ ID NO: 584613 - RNA, 19 nt, Homo sapiens
  misc_RNA (1)...(19): siRNA sense strand
guggauggcacagacuaua

SEQ ID NO: 584614 - RNA, 19 nt, Homo sapiens
  misc_RNA (1)...(19): siRNA sense strand
ccugggaggagcagaaauu

SEQ ID NO: 584615 - RNA, 19 nt, Homo sapiens
  misc_RNA (1)...(19): siRNA sense strand
agcaacggcucccaaagga

SEQ ID NO: 584616 - RNA, 19 nt, Homo sapiens
  misc_RNA (1)...(19): siRNA sense strand
cagcaacggcucccaaagg

SEQ ID NO: 584617 - RNA, 19 nt, Homo sapiens
  misc_RNA (1)...(19): siRNA sense strand
ugauggcucuuggaaaugg

SEQ ID NO: 584618 - RNA, 19 nt, Homo sapiens
  misc_RNA (1)...(19): siRNA sense strand
acuauaggcacaacuacaa

SEQ ID NO: 584619 - RNA, 19 nt, Homo sapiens
  misc_RNA (1)...(19): siRNA sense strand
aaaugaccauccuuuccau

SEQ ID NO: 584620 - RNA, 19 nt, Homo sapiens
  misc_RNA (1)...(19): siRNA sense strand
aagugaagacuguguugaa

SEQ ID NO: 584621 - RNA, 19 nt, Homo sapiens
  misc_RNA (1)...(19): siRNA sense strand
gccaaggacuuucaagaua

SEQ ID NO: 584622 - RNA, 19 nt, Homo sapiens
  misc_RNA (1)...(19): siRNA sense strand
gagccaagcuggagaaaca

SEQ ID NO: 584623 - RNA, 19 nt, Homo sapiens
  misc_RNA (1)...(19): siRNA sense strand
gagcagaaauucauuguac

SEQ ID NO: 584624 - RNA, 19 nt, Homo sapiens
  misc_RNA (1)...(19): siRNA sense strand
ccaaggacuuucaagauau

SEQ ID NO: 584625 - RNA, 19 nt, Homo sapiens
  misc_RNA (1)...(19): siRNA sense strand
gggcugaggcggagaagua

SEQ ID NO: 584626 - RNA, 19 nt, Homo sapiens
  misc_RNA (1)...(19): siRNA sense strand
gcccugcucuuccaucuga

SEQ ID NO: 584627 - RNA, 19 nt, Homo sapiens
  misc_RNA (1)...(19): siRNA sense strand
ucacucagccagauaauug

SEQ ID NO: 584628 - RNA, 19 nt, Homo sapiens
  misc_RNA (1)...(19): siRNA sense strand
gaaauucauuguacaacac

SEQ ID NO: 584629 - RNA, 19 nt, Homo sapiens
  misc_RNA (1)...(19): siRNA sense strand
ugacggagguccaggcaau

SEQ ID NO: 584630 - RNA, 19 nt, Homo sapiens
  misc_RNA (1)...(19): siRNA sense strand
gcagaaauucauuguacaa

SEQ ID NO: 584631 - RNA, 19 nt, Homo sapiens
  misc_RNA (1)...(19): siRNA sense strand
caagaucacaucccuagga

SEQ ID NO: 584632 - RNA, 19 nt, Homo sapiens
  misc_RNA (1)...(19): siRNA sense strand
caaggacuuucaagauauc

SEQ ID NO: 584633 - RNA, 19 nt, Homo sapiens
  misc_RNA (1)...(19): siRNA sense strand
agugauggcucuuggaaau

SEQ ID NO: 584634 - RNA, 19 nt, Homo sapiens
  misc_RNA (1)...(19): siRNA sense strand
uacaagaacugggcuguca

SEQ ID NO: 584635 - RNA, 19 nt, Homo sapiens
  misc_RNA (1)...(19): siRNA sense strand
gaagugaagacuguguuga

SEQ ID NO: 584636 - RNA, 19 nt, Homo sapiens
  misc_RNA (1)...(19): siRNA sense strand
cagcgugggugacaagauc

SEQ ID NO: 584637 - RNA, 19 nt, Homo sapiens
  misc_RNA (1)...(19): siRNA sense strand
ggagcagaaauucauugua

SEQ ID NO: 584638 - RNA, 19 nt, Homo sapiens
  misc_RNA (1)...(19): siRNA sense strand
ggaagugaagacuguguug

SEQ ID NO: 584639 - RNA, 19 nt, Homo sapiens
  misc_RNA (1)...(19): siRNA sense strand
gaccauccuuuccaucaag

SEQ ID NO: 584640 - RNA, 19 nt, Homo sapiens
  misc_RNA (1)...(19): siRNA sense strand
ggguggaagugaagacugu

SEQ ID NO: 584641 - RNA, 19 nt, Homo sapiens
  misc_RNA (1)...(19): siRNA sense strand
ggccaaggacuuucaagau

SEQ ID NO: 584642 - RNA, 19 nt, Homo sapiens
  misc_RNA (1)...(19): siRNA sense strand
gggaggagcagaaauucau

SEQ ID NO: 584643 - RNA, 19 nt, Homo sapiens
  misc_RNA (1)...(19): siRNA sense strand
ggaggagcagaaauucauu

SEQ ID NO: 584644 - RNA, 19 nt, Homo sapiens
  misc_RNA (1)...(19): siRNA sense strand
cgagcuggguggaagugaa

SEQ ID NO: 584645 - RNA, 19 nt, Homo sapiens
  misc_RNA (1)...(19): siRNA sense strand
ugaccauccuuuccaucaa

SEQ ID NO: 584646 - RNA, 19 nt, Homo sapiens
  misc_RNA (1)...(19): siRNA sense strand
gaggagcagaaauucauug

SEQ ID NO: 584647 - RNA, 19 nt, Homo sapiens
  misc_RNA (1)...(19): siRNA sense strand
gcacagacuauaggcacaa

SEQ ID NO: 584648 - RNA, 19 nt, Homo sapiens
  misc_RNA (1)...(19): siRNA sense strand
cagacuauaggcacaacua

SEQ ID NO: 584649 - RNA, 19 nt, Homo sapiens
  misc_RNA (1)...(19): siRNA sense strand
ccugaaagcagaucacgau

SEQ ID NO: 584650 - RNA, 19 nt, Homo sapiens
  misc_RNA (1)...(19): siRNA sense strand
guggauggcacagacuaua

SEQ ID NO: 584651 - RNA, 19 nt, Homo sapiens
  misc_RNA (1)...(19): siRNA sense strand
ccugggaggagcagaaauu

SEQ ID NO: 584652 - RNA, 19 nt, Homo sapiens
  misc_RNA (1)...(19): siRNA sense strand
agcaacggcucccaaagga

SEQ ID NO: 584653 - RNA, 19 nt, Homo sapiens
  misc_RNA (1)...(19): siRNA sense strand
cagcaacggcucccaaagg

SEQ ID NO: 584654 - RNA, 19 nt, Homo sapiens
  misc_RNA (1)...(19): siRNA sense strand
ugauggcucuuggaaaugg

SEQ ID NO: 584655 - RNA, 19 nt, Homo sapiens
  misc_RNA (1)...(19): siRNA sense strand
acuauaggcacaacuacaa

SEQ ID NO: 584656 - RNA, 19 nt, Homo sapiens
  misc_RNA (1)...(19): siRNA sense strand
aaaugaccauccuuuccau

SEQ ID NO: 584657 - RNA, 19 nt, Homo sapiens
  misc_RNA (1)...(19): siRNA sense strand
aagugaagacuguguugaa

SEQ ID NO: 584658 - RNA, 19 nt, Homo sapiens
  misc_RNA (1)...(19): siRNA sense strand
gccaaggacuuucaagaua

SEQ ID NO: 584659 - RNA, 19 nt, Homo sapiens
  misc_RNA (1)...(19): siRNA sense strand
gagccaagcuggagaaaca

SEQ ID NO: 584660 - RNA, 19 nt, Homo sapiens
  misc_RNA (1)...(19): siRNA sense strand
gagcagaaauucauuguac

SEQ ID NO: 584661 - RNA, 19 nt, Homo sapiens
  misc_RNA (1)...(19): siRNA sense strand
ccaaggacuuucaagauau

SEQ ID NO: 584662 - RNA, 19 nt, Homo sapiens
  misc_RNA (1)...(19): siRNA sense strand
gggcugaggcggagaagua

SEQ ID NO: 584663 - RNA, 19 nt, Homo sapiens
  misc_RNA (1)...(19): siRNA sense strand
gcccugcucuuccaucuga

SEQ ID NO: 584664 - RNA, 19 nt, Homo sapiens
  misc_RNA (1)...(19): siRNA sense strand
ucacucagccagauaauug

SEQ ID NO: 584665 - RNA, 19 nt, Homo sapiens
  misc_RNA (1)...(19): siRNA sense strand
gaaauucauuguacaacac

SEQ ID NO: 584666 - RNA, 19 nt, Homo sapiens
  misc_RNA (1)...(19): siRNA sense strand
ugacggagguccaggcaau

SEQ ID NO: 584667 - RNA, 19 nt, Homo sapiens
  misc_RNA (1)...(19): siRNA sense strand
gcagaaauucauuguacaa

SEQ ID NO: 584668 - RNA, 19 nt, Homo sapiens
  misc_RNA (1)...(19): siRNA sense strand
caagaucacaucccuagga

SEQ ID NO: 584669 - RNA, 19 nt, Homo sapiens
  misc_RNA (1)...(19): siRNA sense strand
caaggacuuucaagauauc

SEQ ID NO: 584670 - RNA, 19 nt, Homo sapiens
  misc_RNA (1)...(19): siRNA sense strand
agugauggcucuuggaaau

SEQ ID NO: 584671 - RNA, 19 nt, Homo sapiens
  misc_RNA (1)...(19): siRNA sense strand
uacaagaacugggcuguca

SEQ ID NO: 584672 - RNA, 19 nt, Homo sapiens
  misc_RNA (1)...(19): siRNA sense strand
gaagugaagacuguguuga

SEQ ID NO: 584673 - RNA, 19 nt, Homo sapiens
  misc_RNA (1)...(19): siRNA sense strand
cagcgugggugacaagauc

SEQ ID NO: 584674 - RNA, 19 nt, Homo sapiens
  misc_RNA (1)...(19): siRNA sense strand
ggagcagaaauucauugua

SEQ ID NO: 584675 - RNA, 19 nt, Homo sapiens
  misc_RNA (1)...(19): siRNA sense strand
ggaagugaagacuguguug

SEQ ID NO: 584676 - RNA, 19 nt, Homo sapiens
  misc_RNA (1)...(19): siRNA sense strand
gaccauccuuuccaucaag

SEQ ID NO: 584677 - RNA, 19 nt, Homo sapiens
  misc_RNA (1)...(19): siRNA sense strand
ggguggaagugaagacugu

SEQ ID NO: 584678 - RNA, 19 nt, Homo sapiens
  misc_RNA (1)...(19): siRNA sense strand
ggccaaggacuuucaagau

SEQ ID NO: 584679 - RNA, 19 nt, Homo sapiens
  misc_RNA (1)...(19): siRNA sense strand
gggaggagcagaaauucau

SEQ ID NO: 584680 - RNA, 19 nt, Homo sapiens
  misc_RNA (1)...(19): siRNA sense strand
ggaggagcagaaauucauu

SEQ ID NO: 584681 - RNA, 19 nt, Homo sapiens
  misc_RNA (1)...(19): siRNA sense strand
cgagcuggguggaagugaa

SEQ ID NO: 584682 - RNA, 19 nt, Homo sapiens
  misc_RNA (1)...(19): siRNA sense strand
ugaccauccuuuccaucaa

SEQ ID NO: 584683 - RNA, 19 nt, Homo sapiens
  misc_RNA (1)...(19): siRNA sense strand
gaggagcagaaauucauug

SEQ ID NO: 584684 - RNA, 19 nt, Homo sapiens
  misc_RNA (1)...(19): siRNA sense strand
gcacagacuauaggcacaa

SEQ ID NO: 584685 - RNA, 19 nt, Homo sapiens
  misc_RNA (1)...(19): siRNA sense strand
cagacuauaggcacaacua

SEQ ID NO: 584686 - RNA, 19 nt, Homo sapiens
  misc_RNA (1)...(19): siRNA sense strand
ccugaaagcagaucacgau

SEQ ID NO: 584687 - RNA, 19 nt, Homo sapiens
  misc_RNA (1)...(19): siRNA sense strand
guggauggcacagacuaua

SEQ ID NO: 584688 - RNA, 19 nt, Homo sapiens
  misc_RNA (1)...(19): siRNA sense strand
ccugggaggagcagaaauu

SEQ ID NO: 584689 - RNA, 19 nt, Homo sapiens
  misc_RNA (1)...(19): siRNA sense strand
agcaacggcucccaaagga

SEQ ID NO: 584690 - RNA, 19 nt, Homo sapiens
  misc_RNA (1)...(19): siRNA sense strand
cagcaacggcucccaaagg

SEQ ID NO: 584691 - RNA, 19 nt, Homo sapiens
  misc_RNA (1)...(19): siRNA sense strand
ugauggcucuuggaaaugg

SEQ ID NO: 584692 - RNA, 19 nt, Homo sapiens
  misc_RNA (1)...(19): siRNA sense strand
acuauaggcacaacuacaa

SEQ ID NO: 584693 - RNA, 19 nt, Homo sapiens
  misc_RNA (1)...(19): siRNA sense strand
aaaugaccauccuuuccau

SEQ ID NO: 584694 - RNA, 19 nt, Homo sapiens
  misc_RNA (1)...(19): siRNA sense strand
aagugaagacuguguugaa

SEQ ID NO: 584695 - RNA, 19 nt, Homo sapiens
  misc_RNA (1)...(19): siRNA sense strand
gccaaggacuuucaagaua

SEQ ID NO: 584696 - RNA, 19 nt, Homo sapiens
  misc_RNA (1)...(19): siRNA sense strand
gagccaagcuggagaaaca

SEQ ID NO: 584697 - RNA, 19 nt, Homo sapiens
  misc_RNA (1)...(19): siRNA sense strand
gagcagaaauucauuguac

SEQ ID NO: 584698 - RNA, 19 nt, Homo sapiens
  misc_RNA (1)...(19): siRNA sense strand
ccaaggacuuucaagauau

SEQ ID NO: 584699 - RNA, 19 nt, Homo sapiens
  misc_RNA (1)...(19): siRNA sense strand
gggcugaggcggagaagua

SEQ ID NO: 584700 - RNA, 19 nt, Homo sapiens
  misc_RNA (1)...(19): siRNA sense strand
gcccugcucuuccaucuga

SEQ ID NO: 584701 - RNA, 19 nt, Homo sapiens
  misc_RNA (1)...(19): siRNA sense strand
ucacucagccagauaauug

SEQ ID NO: 584702 - RNA, 19 nt, Homo sapiens
  misc_RNA (1)...(19): siRNA sense strand
gaaauucauuguacaacac

SEQ ID NO: 584703 - RNA, 19 nt, Homo sapiens
  misc_RNA (1)...(19): siRNA sense strand
ugacggagguccaggcaau

SEQ ID NO: 584704 - RNA, 19 nt, Homo sapiens
  misc_RNA (1)...(19): siRNA sense strand
gcagaaauucauuguacaa

SEQ ID NO: 584705 - RNA, 19 nt, Homo sapiens
  misc_RNA (1)...(19): siRNA sense strand
caagaucacaucccuagga

SEQ ID NO: 584706 - RNA, 19 nt, Homo sapiens
  misc_RNA (1)...(19): siRNA sense strand
caaggacuuucaagauauc

SEQ ID NO: 584707 - RNA, 19 nt, Homo sapiens
  misc_RNA (1)...(19): siRNA sense strand
agugauggcucuuggaaau

SEQ ID NO: 584708 - RNA, 19 nt, Homo sapiens
  misc_RNA (1)...(19): siRNA sense strand
uacaagaacugggcuguca

SEQ ID NO: 584709 - RNA, 19 nt, Homo sapiens
  misc_RNA (1)...(19): siRNA sense strand
gaagugaagacuguguuga

SEQ ID NO: 584710 - RNA, 19 nt, Homo sapiens
  misc_RNA (1)...(19): siRNA sense strand
cagcgugggugacaagauc

SEQ ID NO: 584711 - RNA, 19 nt, Homo sapiens
  misc_RNA (1)...(19): siRNA sense strand
ggagcagaaauucauugua

SEQ ID NO: 584712 - RNA, 19 nt, Homo sapiens
  misc_RNA (1)...(19): siRNA sense strand
ggaagugaagacuguguug

SEQ ID NO: 584713 - RNA, 19 nt, Homo sapiens
  misc_RNA (1)...(19): siRNA sense strand
gaccauccuuuccaucaag

SEQ ID NO: 584714 - RNA, 19 nt, Homo sapiens
  misc_RNA (1)...(19): siRNA sense strand
ggguggaagugaagacugu

SEQ ID NO: 584715 - RNA, 19 nt, Homo sapiens
  misc_RNA (1)...(19): siRNA sense strand
ggccaaggacuuucaagau

SEQ ID NO: 584716 - RNA, 19 nt, Homo sapiens
  misc_RNA (1)...(19): siRNA sense strand
gggaggagcagaaauucau

SEQ ID NO: 584717 - RNA, 19 nt, Homo sapiens
  misc_RNA (1)...(19): siRNA sense strand
ggaggagcagaaauucauu

SEQ ID NO: 584718 - RNA, 19 nt, Homo sapiens
  misc_RNA (1)...(19): siRNA sense strand
cgagcuggguggaagugaa

SEQ ID NO: 584719 - RNA, 19 nt, Homo sapiens
  misc_RNA (1)...(19): siRNA sense strand
ugaccauccuuuccaucaa

SEQ ID NO: 584720 - RNA, 19 nt, Homo sapiens
  misc_RNA (1)...(19): siRNA sense strand
gaggagcagaaauucauug

SEQ ID NO: 584721 - RNA, 19 nt, Homo sapiens
  misc_RNA (1)...(19): siRNA sense strand
gcacagacuauaggcacaa

SEQ ID NO: 584722 - RNA, 19 nt, Homo sapiens
  misc_RNA (1)...(19): siRNA sense strand
cagacuauaggcacaacua

SEQ ID NO: 584723 - RNA, 19 nt, Homo sapiens
  misc_RNA (1)...(19): siRNA sense strand
ccugaaagcagaucacgau

SEQ ID NO: 584724 - RNA, 19 nt, Homo sapiens
  misc_RNA (1)...(19): siRNA sense strand
guggauggcacagacuaua

SEQ ID NO: 584725 - RNA, 19 nt, Homo sapiens
  misc_RNA (1)...(19): siRNA sense strand
ccugggaggagcagaaauu

SEQ ID NO: 584726 - RNA, 19 nt, Homo sapiens
  misc_RNA (1)...(19): siRNA sense strand
agcaacggcucccaaagga

SEQ ID NO: 584727 - RNA, 19 nt, Homo sapiens
  misc_RNA (1)...(19): siRNA sense strand
cagcaacggcucccaaagg

SEQ ID NO: 584728 - RNA, 19 nt, Homo sapiens
  misc_RNA (1)...(19): siRNA sense strand
ugauggcucuuggaaaugg

SEQ ID NO: 584729 - RNA, 19 nt, Homo sapiens
  misc_RNA (1)...(19): siRNA sense strand
acuauaggcacaacuacaa

SEQ ID NO: 584730 - RNA, 19 nt, Homo sapiens
  misc_RNA (1)...(19): siRNA sense strand
aaaugaccauccuuuccau

SEQ ID NO: 584731 - RNA, 19 nt, Homo sapiens
  misc_RNA (1)...(19): siRNA sense strand
aagugaagacuguguugaa

SEQ ID NO: 584732 - RNA, 19 nt, Homo sapiens
  misc_RNA (1)...(19): siRNA sense strand
gaaacuugcuggauaugau

SEQ ID NO: 584733 - RNA, 19 nt, Homo sapiens
  misc_RNA (1)...(19): siRNA sense strand
cuuggaaacuugcuggaua

SEQ ID NO: 584734 - RNA, 19 nt, Homo sapiens
  misc_RNA (1)...(19): siRNA sense strand
gcacgaugguccuacacau

SEQ ID NO: 584735 - RNA, 19 nt, Homo sapiens
  misc_RNA (1)...(19): siRNA sense strand
ggaaacuugcuggauauga

SEQ ID NO: 584736 - RNA, 19 nt, Homo sapiens
  misc_RNA (1)...(19): siRNA sense strand
uuggaaacuugcuggauau

SEQ ID NO: 584737 - RNA, 19 nt, Homo sapiens
  misc_RNA (1)...(19): siRNA sense strand
cuacacauuccagacauuu

SEQ ID NO: 584738 - RNA, 19 nt, Homo sapiens
  misc_RNA (1)...(19): siRNA sense strand
ucaguuccauggccaagag

SEQ ID NO: 584739 - RNA, 19 nt, Homo sapiens
  misc_RNA (1)...(19): siRNA sense strand
ccuacacauuccagacauu

SEQ ID NO: 584740 - RNA, 19 nt, Homo sapiens
  misc_RNA (1)...(19): siRNA sense strand
cccgaaggcucuccaucga

SEQ ID NO: 584741 - RNA, 19 nt, Homo sapiens
  misc_RNA (1)...(19): siRNA sense strand
ccagcacgaugguccuaca

SEQ ID NO: 584742 - RNA, 19 nt, Homo sapiens
  misc_RNA (1)...(19): siRNA sense strand
cacgaugguccuacacauu

SEQ ID NO: 584743 - RNA, 19 nt, Homo sapiens
  misc_RNA (1)...(19): siRNA sense strand
aaacuugcuggauaugaug

SEQ ID NO: 584744 - RNA, 19 nt, Homo sapiens
  misc_RNA (1)...(19): siRNA sense strand
cgagcacccuucaguucca

SEQ ID NO: 584745 - RNA, 19 nt, Homo sapiens
  misc_RNA (1)...(19): siRNA sense strand
ucaguuccauggccaagag

SEQ ID NO: 584746 - RNA, 19 nt, Homo sapiens
  misc_RNA (1)...(19): siRNA sense strand
cccgaaggcucuccaucga

SEQ ID NO: 584747 - RNA, 19 nt, Homo sapiens
  misc_RNA (1)...(19): siRNA sense strand
cgagcacccuucaguucca

SEQ ID NO: 584748 - RNA, 19 nt, Homo sapiens
  misc_RNA (1)...(19): siRNA sense strand
ggaaguaaccaaacaagaa

SEQ ID NO: 584749 - RNA, 19 nt, Homo sapiens
  misc_RNA (1)...(19): siRNA sense strand
gaaacuugcuggauaugau

SEQ ID NO: 584750 - RNA, 19 nt, Homo sapiens
  misc_RNA (1)...(19): siRNA sense strand
aagaagaccucaugagaga

SEQ ID NO: 584751 - RNA, 19 nt, Homo sapiens
  misc_RNA (1)...(19): siRNA sense strand
cuuggaaacuugcuggaua

SEQ ID NO: 584752 - RNA, 19 nt, Homo sapiens
  misc_RNA (1)...(19): siRNA sense strand
gaaguaaccaaacaagaag

SEQ ID NO: 584753 - RNA, 19 nt, Homo sapiens
  misc_RNA (1)...(19): siRNA sense strand
gcacgaugguccuacacau

SEQ ID NO: 584754 - RNA, 19 nt, Homo sapiens
  misc_RNA (1)...(19): siRNA sense strand
caaacaagaagaccucaug

SEQ ID NO: 584755 - RNA, 19 nt, Homo sapiens
  misc_RNA (1)...(19): siRNA sense strand
acaagaagaccucaugaga

SEQ ID NO: 584756 - RNA, 19 nt, Homo sapiens
  misc_RNA (1)...(19): siRNA sense strand
gguguuggaugucaaugau

SEQ ID NO: 584757 - RNA, 19 nt, Homo sapiens
  misc_RNA (1)...(19): siRNA sense strand
ggaugucaaugaugauuuu

SEQ ID NO: 584758 - RNA, 19 nt, Homo sapiens
  misc_RNA (1)...(19): siRNA sense strand
ggaagccaguacagaucuu

SEQ ID NO: 584759 - RNA, 19 nt, Homo sapiens
  misc_RNA (1)...(19): siRNA sense strand
ggaaacuugcuggauauga

SEQ ID NO: 584760 - RNA, 19 nt, Homo sapiens
  misc_RNA (1)...(19): siRNA sense strand
uguuggaugucaaugauga

SEQ ID NO: 584761 - RNA, 19 nt, Homo sapiens
  misc_RNA (1)...(19): siRNA sense strand
ccaggaagccaguacagau

SEQ ID NO: 584762 - RNA, 19 nt, Homo sapiens
  misc_RNA (1)...(19): siRNA sense strand
aaacaagaagaccucauga

SEQ ID NO: 584763 - RNA, 19 nt, Homo sapiens
  misc_RNA (1)...(19): siRNA sense strand
gaagccaguacagaucuuu

SEQ ID NO: 584764 - RNA, 19 nt, Homo sapiens
  misc_RNA (1)...(19): siRNA sense strand
uuggaaacuugcuggauau

SEQ ID NO: 584765 - RNA, 19 nt, Homo sapiens
  misc_RNA (1)...(19): siRNA sense strand
cuggagcccuucccugaga

SEQ ID NO: 584766 - RNA, 19 nt, Homo sapiens
  misc_RNA (1)...(19): siRNA sense strand
cuacacauuccagacauuu

SEQ ID NO: 584767 - RNA, 19 nt, Homo sapiens
  misc_RNA (1)...(19): siRNA sense strand
ccuacacauuccagacauu

SEQ ID NO: 584768 - RNA, 19 nt, Homo sapiens
  misc_RNA (1)...(19): siRNA sense strand
cugaggaaguaaccaaaca

SEQ ID NO: 584769 - RNA, 19 nt, Homo sapiens
  misc_RNA (1)...(19): siRNA sense strand
ucaguuccauggccaagag

SEQ ID NO: 584770 - RNA, 19 nt, Homo sapiens
  misc_RNA (1)...(19): siRNA sense strand
cccgaaggcucuccaucga

SEQ ID NO: 584771 - RNA, 19 nt, Homo sapiens
  misc_RNA (1)...(19): siRNA sense strand
gaggaaguaaccaaacaag

SEQ ID NO: 584772 - RNA, 19 nt, Homo sapiens
  misc_RNA (1)...(19): siRNA sense strand
ccagcacgaugguccuaca

SEQ ID NO: 584773 - RNA, 19 nt, Homo sapiens
  misc_RNA (1)...(19): siRNA sense strand
gugcugguguuggauguca

SEQ ID NO: 584774 - RNA, 19 nt, Homo sapiens
  misc_RNA (1)...(19): siRNA sense strand
cacgaugguccuacacauu

SEQ ID NO: 584775 - RNA, 19 nt, Homo sapiens
  misc_RNA (1)...(19): siRNA sense strand
uugaggcucugaugaacau

SEQ ID NO: 584776 - RNA, 19 nt, Homo sapiens
  misc_RNA (1)...(19): siRNA sense strand
ccacuuugaggcucugaug

SEQ ID NO: 584777 - RNA, 19 nt, Homo sapiens
  misc_RNA (1)...(19): siRNA sense strand
cgagcacccuucaguucca

SEQ ID NO: 584778 - RNA, 19 nt, Homo sapiens
  misc_RNA (1)...(19): siRNA sense strand
aaacuugcuggauaugaug

SEQ ID NO: 584779 - RNA, 19 nt, Homo sapiens
  misc_RNA (1)...(19): siRNA sense strand
gcccuucccugagaaacuc

SEQ ID NO: 584780 - RNA, 19 nt, Homo sapiens
  misc_RNA (1)...(19): siRNA sense strand
gaaacuugcuggauaugau

SEQ ID NO: 584781 - RNA, 19 nt, Homo sapiens
  misc_RNA (1)...(19): siRNA sense strand
cuuggaaacuugcuggaua

SEQ ID NO: 584782 - RNA, 19 nt, Homo sapiens
  misc_RNA (1)...(19): siRNA sense strand
gcacgaugguccuacacau

SEQ ID NO: 584783 - RNA, 19 nt, Homo sapiens
  misc_RNA (1)...(19): siRNA sense strand
ggaaacuugcuggauauga

SEQ ID NO: 584784 - RNA, 19 nt, Homo sapiens
  misc_RNA (1)...(19): siRNA sense strand
uuggaaacuugcuggauau

SEQ ID NO: 584785 - RNA, 19 nt, Homo sapiens
  misc_RNA (1)...(19): siRNA sense strand
cuacacauuccagacauuu

SEQ ID NO: 584786 - RNA, 19 nt, Homo sapiens
  misc_RNA (1)...(19): siRNA sense strand
ucaguuccauggccaagag

SEQ ID NO: 584787 - RNA, 19 nt, Homo sapiens
  misc_RNA (1)...(19): siRNA sense strand
ccuacacauuccagacauu

SEQ ID NO: 584788 - RNA, 19 nt, Homo sapiens
  misc_RNA (1)...(19): siRNA sense strand
cccgaaggcucuccaucga

SEQ ID NO: 584789 - RNA, 19 nt, Homo sapiens
  misc_RNA (1)...(19): siRNA sense strand
ccagcacgaugguccuaca

SEQ ID NO: 584790 - RNA, 19 nt, Homo sapiens
  misc_RNA (1)...(19): siRNA sense strand
cacgaugguccuacacauu

SEQ ID NO: 584791 - RNA, 19 nt, Homo sapiens
  misc_RNA (1)...(19): siRNA sense strand
aaacuugcuggauaugaug

SEQ ID NO: 584792 - RNA, 19 nt, Homo sapiens
  misc_RNA (1)...(19): siRNA sense strand
cgagcacccuucaguucca

SEQ ID NO: 584793 - RNA, 19 nt, Homo sapiens
  misc_RNA (1)...(19): siRNA sense strand
ggaaguaaccaaacaagaa

SEQ ID NO: 584794 - RNA, 19 nt, Homo sapiens
  misc_RNA (1)...(19): siRNA sense strand
gaaacuugcuggauaugau

SEQ ID NO: 584795 - RNA, 19 nt, Homo sapiens
  misc_RNA (1)...(19): siRNA sense strand
aagaagaccucaugagaga

SEQ ID NO: 584796 - RNA, 19 nt, Homo sapiens
  misc_RNA (1)...(19): siRNA sense strand
cuuggaaacuugcuggaua

SEQ ID NO: 584797 - RNA, 19 nt, Homo sapiens
  misc_RNA (1)...(19): siRNA sense strand
gaaguaaccaaacaagaag

SEQ ID NO: 584798 - RNA, 19 nt, Homo sapiens
  misc_RNA (1)...(19): siRNA sense strand
gcacgaugguccuacacau

SEQ ID NO: 584799 - RNA, 19 nt, Homo sapiens
  misc_RNA (1)...(19): siRNA sense strand
caaacaagaagaccucaug

SEQ ID NO: 584800 - RNA, 19 nt, Homo sapiens
  misc_RNA (1)...(19): siRNA sense strand
acaagaagaccucaugaga

SEQ ID NO: 584801 - RNA, 19 nt, Homo sapiens
  misc_RNA (1)...(19): siRNA sense strand
gguguuggaugucaaugau

SEQ ID NO: 584802 - RNA, 19 nt, Homo sapiens
  misc_RNA (1)...(19): siRNA sense strand
ggaugucaaugaugauuuu

SEQ ID NO: 584803 - RNA, 19 nt, Homo sapiens
  misc_RNA (1)...(19): siRNA sense strand
ggaagccaguacagaucuu

SEQ ID NO: 584804 - RNA, 19 nt, Homo sapiens
  misc_RNA (1)...(19): siRNA sense strand
ggaaacuugcuggauauga

SEQ ID NO: 584805 - RNA, 19 nt, Homo sapiens
  misc_RNA (1)...(19): siRNA sense strand
uguuggaugucaaugauga

SEQ ID NO: 584806 - RNA, 19 nt, Homo sapiens
  misc_RNA (1)...(19): siRNA sense strand
ccaggaagccaguacagau

SEQ ID NO: 584807 - RNA, 19 nt, Homo sapiens
  misc_RNA (1)...(19): siRNA sense strand
aaacaagaagaccucauga

SEQ ID NO: 584808 - RNA, 19 nt, Homo sapiens
  misc_RNA (1)...(19): siRNA sense strand
gaagccaguacagaucuuu

SEQ ID NO: 584809 - RNA, 19 nt, Homo sapiens
  misc_RNA (1)...(19): siRNA sense strand
uuggaaacuugcuggauau

SEQ ID NO: 584810 - RNA, 19 nt, Homo sapiens
  misc_RNA (1)...(19): siRNA sense strand
cuggagcccuucccugaga

SEQ ID NO: 584811 - RNA, 19 nt, Homo sapiens
  misc_RNA (1)...(19): siRNA sense strand
cuacacauuccagacauuu

SEQ ID NO: 584812 - RNA, 19 nt, Homo sapiens
  misc_RNA (1)...(19): siRNA sense strand
ccuacacauuccagacauu

SEQ ID NO: 584813 - RNA, 19 nt, Homo sapiens
  misc_RNA (1)...(19): siRNA sense strand
cugaggaaguaaccaaaca

SEQ ID NO: 584814 - RNA, 19 nt, Homo sapiens
  misc_RNA (1)...(19): siRNA sense strand
ucaguuccauggccaagag

SEQ ID NO: 584815 - RNA, 19 nt, Homo sapiens
  misc_RNA (1)...(19): siRNA sense strand
cccgaaggcucuccaucga

SEQ ID NO: 584816 - RNA, 19 nt, Homo sapiens
  misc_RNA (1)...(19): siRNA sense strand
gaggaaguaaccaaacaag

SEQ ID NO: 584817 - RNA, 19 nt, Homo sapiens
  misc_RNA (1)...(19): siRNA sense strand
ccagcacgaugguccuaca

SEQ ID NO: 584818 - RNA, 19 nt, Homo sapiens
  misc_RNA (1)...(19): siRNA sense strand
gugcugguguuggauguca

SEQ ID NO: 584819 - RNA, 19 nt, Homo sapiens
  misc_RNA (1)...(19): siRNA sense strand
cacgaugguccuacacauu

SEQ ID NO: 584820 - RNA, 19 nt, Homo sapiens
  misc_RNA (1)...(19): siRNA sense strand
uugaggcucugaugaacau

SEQ ID NO: 584821 - RNA, 19 nt, Homo sapiens
  misc_RNA (1)...(19): siRNA sense strand
ccacuuugaggcucugaug

SEQ ID NO: 584822 - RNA, 19 nt, Homo sapiens
  misc_RNA (1)...(19): siRNA sense strand
cgagcacccuucaguucca

SEQ ID NO: 584823 - RNA, 19 nt, Homo sapiens
  misc_RNA (1)...(19): siRNA sense strand
aaacuugcuggauaugaug

SEQ ID NO: 584824 - RNA, 19 nt, Homo sapiens
  misc_RNA (1)...(19): siRNA sense strand
gcccuucccugagaaacuc

SEQ ID NO: 584825 - RNA, 19 nt, Homo sapiens
  misc_RNA (1)...(19): siRNA sense strand
gaaacuugcuggauaugau

SEQ ID NO: 584826 - RNA, 19 nt, Homo sapiens
  misc_RNA (1)...(19): siRNA sense strand
cuuggaaacuugcuggaua

SEQ ID NO: 584827 - RNA, 19 nt, Homo sapiens
  misc_RNA (1)...(19): siRNA sense strand
gcacgaugguccuacacau

SEQ ID NO: 584828 - RNA, 19 nt, Homo sapiens
  misc_RNA (1)...(19): siRNA sense strand
ggaaacuugcuggauauga

SEQ ID NO: 584829 - RNA, 19 nt, Homo sapiens
  misc_RNA (1)...(19): siRNA sense strand
uuggaaacuugcuggauau

SEQ ID NO: 584830 - RNA, 19 nt, Homo sapiens
  misc_RNA (1)...(19): siRNA sense strand
cuacacauuccagacauuu

SEQ ID NO: 584831 - RNA, 19 nt, Homo sapiens
  misc_RNA (1)...(19): siRNA sense strand
ucaguuccauggccaagag

SEQ ID NO: 584832 - RNA, 19 nt, Homo sapiens
  misc_RNA (1)...(19): siRNA sense strand
ccuacacauuccagacauu

SEQ ID NO: 584833 - RNA, 19 nt, Homo sapiens
  misc_RNA (1)...(19): siRNA sense strand
cccgaaggcucuccaucga

SEQ ID NO: 584834 - RNA, 19 nt, Homo sapiens
  misc_RNA (1)...(19): siRNA sense strand
ccagcacgaugguccuaca

SEQ ID NO: 584835 - RNA, 19 nt, Homo sapiens
  misc_RNA (1)...(19): siRNA sense strand
cacgaugguccuacacauu

SEQ ID NO: 584836 - RNA, 19 nt, Homo sapiens
  misc_RNA (1)...(19): siRNA sense strand
aaacuugcuggauaugaug

SEQ ID NO: 584837 - RNA, 19 nt, Homo sapiens
  misc_RNA (1)...(19): siRNA sense strand
cgagcacccuucaguucca

SEQ ID NO: 584838 - RNA, 19 nt, Homo sapiens
  misc_RNA (1)...(19): siRNA sense strand
ucaguuccauggccaagag

SEQ ID NO: 584839 - RNA, 19 nt, Homo sapiens
  misc_RNA (1)...(19): siRNA sense strand
cccgaaggcucuccaucga

SEQ ID NO: 584840 - RNA, 19 nt, Homo sapiens
  misc_RNA (1)...(19): siRNA sense strand
cgagcacccuucaguucca

SEQ ID NO: 584841 - RNA, 19 nt, Homo sapiens
  misc_RNA (1)...(19): siRNA sense strand
ggaaguaaccaaacaagaa

SEQ ID NO: 584842 - RNA, 19 nt, Homo sapiens
  misc_RNA (1)...(19): siRNA sense strand
gaaacuugcuggauaugau

SEQ ID NO: 584843 - RNA, 19 nt, Homo sapiens
  misc_RNA (1)...(19): siRNA sense strand
aagaagaccucaugagaga

SEQ ID NO: 584844 - RNA, 19 nt, Homo sapiens
  misc_RNA (1)...(19): siRNA sense strand
cuuggaaacuugcuggaua

SEQ ID NO: 584845 - RNA, 19 nt, Homo sapiens
  misc_RNA (1)...(19): siRNA sense strand
gaaguaaccaaacaagaag

SEQ ID NO: 584846 - RNA, 19 nt, Homo sapiens
  misc_RNA (1)...(19): siRNA sense strand
gcacgaugguccuacacau

SEQ ID NO: 584847 - RNA, 19 nt, Homo sapiens
  misc_RNA (1)...(19): siRNA sense strand
caaacaagaagaccucaug

SEQ ID NO: 584848 - RNA, 19 nt, Homo sapiens
  misc_RNA (1)...(19): siRNA sense strand
acaagaagaccucaugaga

SEQ ID NO: 584849 - RNA, 19 nt, Homo sapiens
  misc_RNA (1)...(19): siRNA sense strand
gguguuggaugucaaugau

SEQ ID NO: 584850 - RNA, 19 nt, Homo sapiens
  misc_RNA (1)...(19): siRNA sense strand
ggaugucaaugaugauuuu

SEQ ID NO: 584851 - RNA, 19 nt, Homo sapiens
  misc_RNA (1)...(19): siRNA sense strand
ggaagccaguacagaucuu

SEQ ID NO: 584852 - RNA, 19 nt, Homo sapiens
  misc_RNA (1)...(19): siRNA sense strand
ggaaacuugcuggauauga

SEQ ID NO: 584853 - RNA, 19 nt, Homo sapiens
  misc_RNA (1)...(19): siRNA sense strand
uguuggaugucaaugauga

SEQ ID NO: 584854 - RNA, 19 nt, Homo sapiens
  misc_RNA (1)...(19): siRNA sense strand
ccaggaagccaguacagau

SEQ ID NO: 584855 - RNA, 19 nt, Homo sapiens
  misc_RNA (1)...(19): siRNA sense strand
aaacaagaagaccucauga

SEQ ID NO: 584856 - RNA, 19 nt, Homo sapiens
  misc_RNA (1)...(19): siRNA sense strand
gaagccaguacagaucuuu

SEQ ID NO: 584857 - RNA, 19 nt, Homo sapiens
  misc_RNA (1)...(19): siRNA sense strand
uuggaaacuugcuggauau

SEQ ID NO: 584858 - RNA, 19 nt, Homo sapiens
  misc_RNA (1)...(19): siRNA sense strand
cuggagcccuucccugaga

SEQ ID NO: 584859 - RNA, 19 nt, Homo sapiens
  misc_RNA (1)...(19): siRNA sense strand
cuacacauuccagacauuu

SEQ ID NO: 584860 - RNA, 19 nt, Homo sapiens
  misc_RNA (1)...(19): siRNA sense strand
ccuacacauuccagacauu

SEQ ID NO: 584861 - RNA, 19 nt, Homo sapiens
  misc_RNA (1)...(19): siRNA sense strand
cugaggaaguaaccaaaca

SEQ ID NO: 584862 - RNA, 19 nt, Homo sapiens
  misc_RNA (1)...(19): siRNA sense strand
ucaguuccauggccaagag

SEQ ID NO: 584863 - RNA, 19 nt, Homo sapiens
  misc_RNA (1)...(19): siRNA sense strand
cccgaaggcucuccaucga

SEQ ID NO: 584864 - RNA, 19 nt, Homo sapiens
  misc_RNA (1)...(19): siRNA sense strand
gaggaaguaaccaaacaag

SEQ ID NO: 584865 - RNA, 19 nt, Homo sapiens
  misc_RNA (1)...(19): siRNA sense strand
ccagcacgaugguccuaca

SEQ ID NO: 584866 - RNA, 19 nt, Homo sapiens
  misc_RNA (1)...(19): siRNA sense strand
gugcugguguuggauguca

SEQ ID NO: 584867 - RNA, 19 nt, Homo sapiens
  misc_RNA (1)...(19): siRNA sense strand
cacgaugguccuacacauu

SEQ ID NO: 584868 - RNA, 19 nt, Homo sapiens
  misc_RNA (1)...(19): siRNA sense strand
uugaggcucugaugaacau

SEQ ID NO: 584869 - RNA, 19 nt, Homo sapiens
  misc_RNA (1)...(19): siRNA sense strand
ccacuuugaggcucugaug

SEQ ID NO: 584870 - RNA, 19 nt, Homo sapiens
  misc_RNA (1)...(19): siRNA sense strand
cgagcacccuucaguucca

SEQ ID NO: 584871 - RNA, 19 nt, Homo sapiens
  misc_RNA (1)...(19): siRNA sense strand
aaacuugcuggauaugaug

SEQ ID NO: 584872 - RNA, 19 nt, Homo sapiens
  misc_RNA (1)...(19): siRNA sense strand
gcccuucccugagaaacuc

SEQ ID NO: 584873 - RNA, 19 nt, Homo sapiens
  misc_RNA (1)...(19): siRNA sense strand
gaaacuugcuggauaugau

SEQ ID NO: 584874 - RNA, 19 nt, Homo sapiens
  misc_RNA (1)...(19): siRNA sense strand
cuuggaaacuugcuggaua

SEQ ID NO: 584875 - RNA, 19 nt, Homo sapiens
  misc_RNA (1)...(19): siRNA sense strand
gcacgaugguccuacacau

SEQ ID NO: 584876 - RNA, 19 nt, Homo sapiens
  misc_RNA (1)...(19): siRNA sense strand
ggaaacuugcuggauauga

SEQ ID NO: 584877 - RNA, 19 nt, Homo sapiens
  misc_RNA (1)...(19): siRNA sense strand
uuggaaacuugcuggauau

SEQ ID NO: 584878 - RNA, 19 nt, Homo sapiens
  misc_RNA (1)...(19): siRNA sense strand
cuacacauuccagacauuu

SEQ ID NO: 584879 - RNA, 19 nt, Homo sapiens
  misc_RNA (1)...(19): siRNA sense strand
ucaguuccauggccaagag

SEQ ID NO: 584880 - RNA, 19 nt, Homo sapiens
  misc_RNA (1)...(19): siRNA sense strand
ccuacacauuccagacauu

SEQ ID NO: 584881 - RNA, 19 nt, Homo sapiens
  misc_RNA (1)...(19): siRNA sense strand
cccgaaggcucuccaucga

SEQ ID NO: 584882 - RNA, 19 nt, Homo sapiens
  misc_RNA (1)...(19): siRNA sense strand
ccagcacgaugguccuaca

SEQ ID NO: 584883 - RNA, 19 nt, Homo sapiens
  misc_RNA (1)...(19): siRNA sense strand
cacgaugguccuacacauu

SEQ ID NO: 584884 - RNA, 19 nt, Homo sapiens
  misc_RNA (1)...(19): siRNA sense strand
aaacuugcuggauaugaug

SEQ ID NO: 584885 - RNA, 19 nt, Homo sapiens
  misc_RNA (1)...(19): siRNA sense strand
cgagcacccuucaguucca

SEQ ID NO: 584886 - RNA, 19 nt, Homo sapiens
  misc_RNA (1)...(19): siRNA sense strand
ggaaguaaccaaacaagaa

SEQ ID NO: 584887 - RNA, 19 nt, Homo sapiens
  misc_RNA (1)...(19): siRNA sense strand
gaaacuugcuggauaugau

SEQ ID NO: 584888 - RNA, 19 nt, Homo sapiens
  misc_RNA (1)...(19): siRNA sense strand
aagaagaccucaugagaga

SEQ ID NO: 584889 - RNA, 19 nt, Homo sapiens
  misc_RNA (1)...(19): siRNA sense strand
cuuggaaacuugcuggaua

SEQ ID NO: 584890 - RNA, 19 nt, Homo sapiens
  misc_RNA (1)...(19): siRNA sense strand
gaaguaaccaaacaagaag

SEQ ID NO: 584891 - RNA, 19 nt, Homo sapiens
  misc_RNA (1)...(19): siRNA sense strand
gcacgaugguccuacacau

SEQ ID NO: 584892 - RNA, 19 nt, Homo sapiens
  misc_RNA (1)...(19): siRNA sense strand
caaacaagaagaccucaug

SEQ ID NO: 584893 - RNA, 19 nt, Homo sapiens
  misc_RNA (1)...(19): siRNA sense strand
acaagaagaccucaugaga

SEQ ID NO: 584894 - RNA, 19 nt, Homo sapiens
  misc_RNA (1)...(19): siRNA sense strand
gguguuggaugucaaugau

SEQ ID NO: 584895 - RNA, 19 nt, Homo sapiens
  misc_RNA (1)...(19): siRNA sense strand
ggaugucaaugaugauuuu

SEQ ID NO: 584896 - RNA, 19 nt, Homo sapiens
  misc_RNA (1)...(19): siRNA sense strand
ggaagccaguacagaucuu

SEQ ID NO: 584897 - RNA, 19 nt, Homo sapiens
  misc_RNA (1)...(19): siRNA sense strand
ggaaacuugcuggauauga

SEQ ID NO: 584898 - RNA, 19 nt, Homo sapiens
  misc_RNA (1)...(19): siRNA sense strand
uguuggaugucaaugauga

SEQ ID NO: 584899 - RNA, 19 nt, Homo sapiens
  misc_RNA (1)...(19): siRNA sense strand
ccaggaagccaguacagau

SEQ ID NO: 584900 - RNA, 19 nt, Homo sapiens
  misc_RNA (1)...(19): siRNA sense strand
aaacaagaagaccucauga

SEQ ID NO: 584901 - RNA, 19 nt, Homo sapiens
  misc_RNA (1)...(19): siRNA sense strand
gaagccaguacagaucuuu

SEQ ID NO: 584902 - RNA, 19 nt, Homo sapiens
  misc_RNA (1)...(19): siRNA sense strand
uuggaaacuugcuggauau

SEQ ID NO: 584903 - RNA, 19 nt, Homo sapiens
  misc_RNA (1)...(19): siRNA sense strand
cuggagcccuucccugaga

SEQ ID NO: 584904 - RNA, 19 nt, Homo sapiens
  misc_RNA (1)...(19): siRNA sense strand
cuacacauuccagacauuu

SEQ ID NO: 584905 - RNA, 19 nt, Homo sapiens
  misc_RNA (1)...(19): siRNA sense strand
ccuacacauuccagacauu

SEQ ID NO: 584906 - RNA, 19 nt, Homo sapiens
  misc_RNA (1)...(19): siRNA sense strand
cugaggaaguaaccaaaca

SEQ ID NO: 584907 - RNA, 19 nt, Homo sapiens
  misc_RNA (1)...(19): siRNA sense strand
ucaguuccauggccaagag

SEQ ID NO: 584908 - RNA, 19 nt, Homo sapiens
  misc_RNA (1)...(19): siRNA sense strand
cccgaaggcucuccaucga

SEQ ID NO: 584909 - RNA, 19 nt, Homo sapiens
  misc_RNA (1)...(19): siRNA sense strand
gaggaaguaaccaaacaag

SEQ ID NO: 584910 - RNA, 19 nt, Homo sapiens
  misc_RNA (1)...(19): siRNA sense strand
ccagcacgaugguccuaca

SEQ ID NO: 584911 - RNA, 19 nt, Homo sapiens
  misc_RNA (1)...(19): siRNA sense strand
gugcugguguuggauguca

SEQ ID NO: 584912 - RNA, 19 nt, Homo sapiens
  misc_RNA (1)...(19): siRNA sense strand
cacgaugguccuacacauu

SEQ ID NO: 584913 - RNA, 19 nt, Homo sapiens
  misc_RNA (1)...(19): siRNA sense strand
uugaggcucugaugaacau

SEQ ID NO: 584914 - RNA, 19 nt, Homo sapiens
  misc_RNA (1)...(19): siRNA sense strand
ccacuuugaggcucugaug

SEQ ID NO: 584915 - RNA, 19 nt, Homo sapiens
  misc_RNA (1)...(19): siRNA sense strand
cgagcacccuucaguucca

SEQ ID NO: 584916 - RNA, 19 nt, Homo sapiens
  misc_RNA (1)...(19): siRNA sense strand
aaacuugcuggauaugaug

SEQ ID NO: 584917 - RNA, 19 nt, Homo sapiens
  misc_RNA (1)...(19): siRNA sense strand
gcccuucccugagaaacuc

SEQ ID NO: 584918 - RNA, 19 nt, Homo sapiens
  misc_RNA (1)...(19): siRNA sense strand
gaaacuugcuggauaugau

SEQ ID NO: 584919 - RNA, 19 nt, Homo sapiens
  misc_RNA (1)...(19): siRNA sense strand
cuuggaaacuugcuggaua

SEQ ID NO: 584920 - RNA, 19 nt, Homo sapiens
  misc_RNA (1)...(19): siRNA sense strand
gcacgaugguccuacacau

SEQ ID NO: 584921 - RNA, 19 nt, Homo sapiens
  misc_RNA (1)...(19): siRNA sense strand
ggaaacuugcuggauauga

SEQ ID NO: 584922 - RNA, 19 nt, Homo sapiens
  misc_RNA (1)...(19): siRNA sense strand
uuggaaacuugcuggauau

SEQ ID NO: 584923 - RNA, 19 nt, Homo sapiens
  misc_RNA (1)...(19): siRNA sense strand
cuacacauuccagacauuu

SEQ ID NO: 584924 - RNA, 19 nt, Homo sapiens
  misc_RNA (1)...(19): siRNA sense strand
ucaguuccauggccaagag

SEQ ID NO: 584925 - RNA, 19 nt, Homo sapiens
  misc_RNA (1)...(19): siRNA sense strand
ccuacacauuccagacauu

SEQ ID NO: 584926 - RNA, 19 nt, Homo sapiens
  misc_RNA (1)...(19): siRNA sense strand
cccgaaggcucuccaucga

SEQ ID NO: 584927 - RNA, 19 nt, Homo sapiens
  misc_RNA (1)...(19): siRNA sense strand
ccagcacgaugguccuaca

SEQ ID NO: 584928 - RNA, 19 nt, Homo sapiens
  misc_RNA (1)...(19): siRNA sense strand
cacgaugguccuacacauu

SEQ ID NO: 584929 - RNA, 19 nt, Homo sapiens
  misc_RNA (1)...(19): siRNA sense strand
aaacuugcuggauaugaug

SEQ ID NO: 584930 - RNA, 19 nt, Homo sapiens
  misc_RNA (1)...(19): siRNA sense strand
cgagcacccuucaguucca

SEQ ID NO: 584931 - RNA, 19 nt, Homo sapiens
  misc_RNA (1)...(19): siRNA sense strand
ucaguuccauggccaagag

SEQ ID NO: 584932 - RNA, 19 nt, Homo sapiens
  misc_RNA (1)...(19): siRNA sense strand
cccgaaggcucuccaucga

SEQ ID NO: 584933 - RNA, 19 nt, Homo sapiens
  misc_RNA (1)...(19): siRNA sense strand
cgagcacccuucaguucca

SEQ ID NO: 584934 - RNA, 19 nt, Homo sapiens
  misc_RNA (1)...(19): siRNA sense strand
ggaaguaaccaaacaagaa

SEQ ID NO: 584935 - RNA, 19 nt, Homo sapiens
  misc_RNA (1)...(19): siRNA sense strand
gaaacuugcuggauaugau

SEQ ID NO: 584936 - RNA, 19 nt, Homo sapiens
  misc_RNA (1)...(19): siRNA sense strand
aagaagaccucaugagaga

SEQ ID NO: 584937 - RNA, 19 nt, Homo sapiens
  misc_RNA (1)...(19): siRNA sense strand
cuuggaaacuugcuggaua

SEQ ID NO: 584938 - RNA, 19 nt, Homo sapiens
  misc_RNA (1)...(19): siRNA sense strand
gaaguaaccaaacaagaag

SEQ ID NO: 584939 - RNA, 19 nt, Homo sapiens
  misc_RNA (1)...(19): siRNA sense strand
gcacgaugguccuacacau

SEQ ID NO: 584940 - RNA, 19 nt, Homo sapiens
  misc_RNA (1)...(19): siRNA sense strand
caaacaagaagaccucaug

SEQ ID NO: 584941 - RNA, 19 nt, Homo sapiens
  misc_RNA (1)...(19): siRNA sense strand
acaagaagaccucaugaga

SEQ ID NO: 584942 - RNA, 19 nt, Homo sapiens
  misc_RNA (1)...(19): siRNA sense strand
gguguuggaugucaaugau

SEQ ID NO: 584943 - RNA, 19 nt, Homo sapiens
  misc_RNA (1)...(19): siRNA sense strand
ggaugucaaugaugauuuu

SEQ ID NO: 584944 - RNA, 19 nt, Homo sapiens
  misc_RNA (1)...(19): siRNA sense strand
ggaagccaguacagaucuu

SEQ ID NO: 584945 - RNA, 19 nt, Homo sapiens
  misc_RNA (1)...(19): siRNA sense strand
ggaaacuugcuggauauga

SEQ ID NO: 584946 - RNA, 19 nt, Homo sapiens
  misc_RNA (1)...(19): siRNA sense strand
uguuggaugucaaugauga

SEQ ID NO: 584947 - RNA, 19 nt, Homo sapiens
  misc_RNA (1)...(19): siRNA sense strand
ccaggaagccaguacagau

SEQ ID NO: 584948 - RNA, 19 nt, Homo sapiens
  misc_RNA (1)...(19): siRNA sense strand
aaacaagaagaccucauga

SEQ ID NO: 584949 - RNA, 19 nt, Homo sapiens
  misc_RNA (1)...(19): siRNA sense strand
gaagccaguacagaucuuu

SEQ ID NO: 584950 - RNA, 19 nt, Homo sapiens
  misc_RNA (1)...(19): siRNA sense strand
uuggaaacuugcuggauau

SEQ ID NO: 584951 - RNA, 19 nt, Homo sapiens
  misc_RNA (1)...(19): siRNA sense strand
cuggagcccuucccugaga

SEQ ID NO: 584952 - RNA, 19 nt, Homo sapiens
  misc_RNA (1)...(19): siRNA sense strand
cuacacauuccagacauuu

SEQ ID NO: 584953 - RNA, 19 nt, Homo sapiens
  misc_RNA (1)...(19): siRNA sense strand
ccuacacauuccagacauu

SEQ ID NO: 584954 - RNA, 19 nt, Homo sapiens
  misc_RNA (1)...(19): siRNA sense strand
cugaggaaguaaccaaaca

SEQ ID NO: 584955 - RNA, 19 nt, Homo sapiens
  misc_RNA (1)...(19): siRNA sense strand
ucaguuccauggccaagag

SEQ ID NO: 584956 - RNA, 19 nt, Homo sapiens
  misc_RNA (1)...(19): siRNA sense strand
cccgaaggcucuccaucga

SEQ ID NO: 584957 - RNA, 19 nt, Homo sapiens
  misc_RNA (1)...(19): siRNA sense strand
gaggaaguaaccaaacaag

SEQ ID NO: 584958 - RNA, 19 nt, Homo sapiens
  misc_RNA (1)...(19): siRNA sense strand
ccagcacgaugguccuaca

SEQ ID NO: 584959 - RNA, 19 nt, Homo sapiens
  misc_RNA (1)...(19): siRNA sense strand
gugcugguguuggauguca

SEQ ID NO: 584960 - RNA, 19 nt, Homo sapiens
  misc_RNA (1)...(19): siRNA sense strand
cacgaugguccuacacauu

SEQ ID NO: 584961 - RNA, 19 nt, Homo sapiens
  misc_RNA (1)...(19): siRNA sense strand
uugaggcucugaugaacau

SEQ ID NO: 584962 - RNA, 19 nt, Homo sapiens
  misc_RNA (1)...(19): siRNA sense strand
ccacuuugaggcucugaug

SEQ ID NO: 584963 - RNA, 19 nt, Homo sapiens
  misc_RNA (1)...(19): siRNA sense strand
cgagcacccuucaguucca

SEQ ID NO: 584964 - RNA, 19 nt, Homo sapiens
  misc_RNA (1)...(19): siRNA sense strand
aaacuugcuggauaugaug

SEQ ID NO: 584965 - RNA, 19 nt, Homo sapiens
  misc_RNA (1)...(19): siRNA sense strand
gcccuucccugagaaacuc

SEQ ID NO: 584966 - RNA, 19 nt, Homo sapiens
  misc_RNA (1)...(19): siRNA sense strand
gaaacuugcuggauaugau

SEQ ID NO: 584967 - RNA, 19 nt, Homo sapiens
  misc_RNA (1)...(19): siRNA sense strand
cuuggaaacuugcuggaua

SEQ ID NO: 584968 - RNA, 19 nt, Homo sapiens
  misc_RNA (1)...(19): siRNA sense strand
gcacgaugguccuacacau

SEQ ID NO: 584969 - RNA, 19 nt, Homo sapiens
  misc_RNA (1)...(19): siRNA sense strand
ggaaacuugcuggauauga

SEQ ID NO: 584970 - RNA, 19 nt, Homo sapiens
  misc_RNA (1)...(19): siRNA sense strand
uuggaaacuugcuggauau

SEQ ID NO: 584971 - RNA, 19 nt, Homo sapiens
  misc_RNA (1)...(19): siRNA sense strand
cuacacauuccagacauuu

SEQ ID NO: 584972 - RNA, 19 nt, Homo sapiens
  misc_RNA (1)...(19): siRNA sense strand
ucaguuccauggccaagag

SEQ ID NO: 584973 - RNA, 19 nt, Homo sapiens
  misc_RNA (1)...(19): siRNA sense strand
ccuacacauuccagacauu

SEQ ID NO: 584974 - RNA, 19 nt, Homo sapiens
  misc_RNA (1)...(19): siRNA sense strand
cccgaaggcucuccaucga

SEQ ID NO: 584975 - RNA, 19 nt, Homo sapiens
  misc_RNA (1)...(19): siRNA sense strand
ccagcacgaugguccuaca

SEQ ID NO: 584976 - RNA, 19 nt, Homo sapiens
  misc_RNA (1)...(19): siRNA sense strand
cacgaugguccuacacauu

SEQ ID NO: 584977 - RNA, 19 nt, Homo sapiens
  misc_RNA (1)...(19): siRNA sense strand
aaacuugcuggauaugaug

SEQ ID NO: 584978 - RNA, 19 nt, Homo sapiens
  misc_RNA (1)...(19): siRNA sense strand
cgagcacccuucaguucca

SEQ ID NO: 584979 - RNA, 19 nt, Homo sapiens
  misc_RNA (1)...(19): siRNA sense strand
ggaaguaaccaaacaagaa

SEQ ID NO: 584980 - RNA, 19 nt, Homo sapiens
  misc_RNA (1)...(19): siRNA sense strand
gaaacuugcuggauaugau

SEQ ID NO: 584981 - RNA, 19 nt, Homo sapiens
  misc_RNA (1)...(19): siRNA sense strand
aagaagaccucaugagaga

SEQ ID NO: 584982 - RNA, 19 nt, Homo sapiens
  misc_RNA (1)...(19): siRNA sense strand
cuuggaaacuugcuggaua

SEQ ID NO: 584983 - RNA, 19 nt, Homo sapiens
  misc_RNA (1)...(19): siRNA sense strand
gaaguaaccaaacaagaag

SEQ ID NO: 584984 - RNA, 19 nt, Homo sapiens
  misc_RNA (1)...(19): siRNA sense strand
gcacgaugguccuacacau

SEQ ID NO: 584985 - RNA, 19 nt, Homo sapiens
  misc_RNA (1)...(19): siRNA sense strand
caaacaagaagaccucaug

SEQ ID NO: 584986 - RNA, 19 nt, Homo sapiens
  misc_RNA (1)...(19): siRNA sense strand
acaagaagaccucaugaga

SEQ ID NO: 584987 - RNA, 19 nt, Homo sapiens
  misc_RNA (1)...(19): siRNA sense strand
gguguuggaugucaaugau

SEQ ID NO: 584988 - RNA, 19 nt, Homo sapiens
  misc_RNA (1)...(19): siRNA sense strand
ggaugucaaugaugauuuu

SEQ ID NO: 584989 - RNA, 19 nt, Homo sapiens
  misc_RNA (1)...(19): siRNA sense strand
ggaagccaguacagaucuu

SEQ ID NO: 584990 - RNA, 19 nt, Homo sapiens
  misc_RNA (1)...(19): siRNA sense strand
ggaaacuugcuggauauga

SEQ ID NO: 584991 - RNA, 19 nt, Homo sapiens
  misc_RNA (1)...(19): siRNA sense strand
uguuggaugucaaugauga

SEQ ID NO: 584992 - RNA, 19 nt, Homo sapiens
  misc_RNA (1)...(19): siRNA sense strand
ccaggaagccaguacagau

SEQ ID NO: 584993 - RNA, 19 nt, Homo sapiens
  misc_RNA (1)...(19): siRNA sense strand
aaacaagaagaccucauga

SEQ ID NO: 584994 - RNA, 19 nt, Homo sapiens
  misc_RNA (1)...(19): siRNA sense strand
gaagccaguacagaucuuu

SEQ ID NO: 584995 - RNA, 19 nt, Homo sapiens
  misc_RNA (1)...(19): siRNA sense strand
uuggaaacuugcuggauau

SEQ ID NO: 584996 - RNA, 19 nt, Homo sapiens
  misc_RNA (1)...(19): siRNA sense strand
cuggagcccuucccugaga

SEQ ID NO: 584997 - RNA, 19 nt, Homo sapiens
  misc_RNA (1)...(19): siRNA sense strand
cuacacauuccagacauuu

SEQ ID NO: 584998 - RNA, 19 nt, Homo sapiens
  misc_RNA (1)...(19): siRNA sense strand
ccuacacauuccagacauu

SEQ ID NO: 584999 - RNA, 19 nt, Homo sapiens
  misc_RNA (1)...(19): siRNA sense strand
cugaggaaguaaccaaaca

SEQ ID NO: 585000 - RNA, 19 nt, Homo sapiens
  misc_RNA (1)...(19): siRNA sense strand
ucaguuccauggccaagag

SEQ ID NO: 585001 - RNA, 19 nt, Homo sapiens
  misc_RNA (1)...(19): siRNA sense strand
cccgaaggcucuccaucga

SEQ ID NO: 585002 - RNA, 19 nt, Homo sapiens
  misc_RNA (1)...(19): siRNA sense strand
gaggaaguaaccaaacaag

SEQ ID NO: 585003 - RNA, 19 nt, Homo sapiens
  misc_RNA (1)...(19): siRNA sense strand
ccagcacgaugguccuaca

SEQ ID NO: 585004 - RNA, 19 nt, Homo sapiens
  misc_RNA (1)...(19): siRNA sense strand
gugcugguguuggauguca

SEQ ID NO: 585005 - RNA, 19 nt, Homo sapiens
  misc_RNA (1)...(19): siRNA sense strand
cacgaugguccuacacauu

SEQ ID NO: 585006 - RNA, 19 nt, Homo sapiens
  misc_RNA (1)...(19): siRNA sense strand
uugaggcucugaugaacau

SEQ ID NO: 585007 - RNA, 19 nt, Homo sapiens
  misc_RNA (1)...(19): siRNA sense strand
ccacuuugaggcucugaug

SEQ ID NO: 585008 - RNA, 19 nt, Homo sapiens
  misc_RNA (1)...(19): siRNA sense strand
cgagcacccuucaguucca

SEQ ID NO: 585009 - RNA, 19 nt, Homo sapiens
  misc_RNA (1)...(19): siRNA sense strand
aaacuugcuggauaugaug

SEQ ID NO: 585010 - RNA, 19 nt, Homo sapiens
  misc_RNA (1)...(19): siRNA sense strand
gcccuucccugagaaacuc

SEQ ID NO: 585011 - RNA, 19 nt, Homo sapiens
  misc_RNA (1)...(19): siRNA sense strand
gaaacuugcuggauaugau

SEQ ID NO: 585012 - RNA, 19 nt, Homo sapiens
  misc_RNA (1)...(19): siRNA sense strand
cuuggaaacuugcuggaua

SEQ ID NO: 585013 - RNA, 19 nt, Homo sapiens
  misc_RNA (1)...(19): siRNA sense strand
gcacgaugguccuacacau

SEQ ID NO: 585014 - RNA, 19 nt, Homo sapiens
  misc_RNA (1)...(19): siRNA sense strand
ggaaacuugcuggauauga

SEQ ID NO: 585015 - RNA, 19 nt, Homo sapiens
  misc_RNA (1)...(19): siRNA sense strand
uuggaaacuugcuggauau

SEQ ID NO: 585016 - RNA, 19 nt, Homo sapiens
  misc_RNA (1)...(19): siRNA sense strand
cuacacauuccagacauuu

SEQ ID NO: 585017 - RNA, 19 nt, Homo sapiens
  misc_RNA (1)...(19): siRNA sense strand
ucaguuccauggccaagag

SEQ ID NO: 585018 - RNA, 19 nt, Homo sapiens
  misc_RNA (1)...(19): siRNA sense strand
ccuacacauuccagacauu

SEQ ID NO: 585019 - RNA, 19 nt, Homo sapiens
  misc_RNA (1)...(19): siRNA sense strand
cccgaaggcucuccaucga

SEQ ID NO: 585020 - RNA, 19 nt, Homo sapiens
  misc_RNA (1)...(19): siRNA sense strand
ccagcacgaugguccuaca

SEQ ID NO: 585021 - RNA, 19 nt, Homo sapiens
  misc_RNA (1)...(19): siRNA sense strand
cacgaugguccuacacauu

SEQ ID NO: 585022 - RNA, 19 nt, Homo sapiens
  misc_RNA (1)...(19): siRNA sense strand
aaacuugcuggauaugaug

SEQ ID NO: 585023 - RNA, 19 nt, Homo sapiens
  misc_RNA (1)...(19): siRNA sense strand
cgagcacccuucaguucca

SEQ ID NO: 585024 - RNA, 19 nt, Homo sapiens
  misc_RNA (1)...(19): siRNA sense strand
ucaguuccauggccaagag

SEQ ID NO: 585025 - RNA, 19 nt, Homo sapiens
  misc_RNA (1)...(19): siRNA sense strand
cccgaaggcucuccaucga

SEQ ID NO: 585026 - RNA, 19 nt, Homo sapiens
  misc_RNA (1)...(19): siRNA sense strand
cgagcacccuucaguucca

SEQ ID NO: 585027 - RNA, 19 nt, Homo sapiens
  misc_RNA (1)...(19): siRNA sense strand
ggaaguaaccaaacaagaa

SEQ ID NO: 585028 - RNA, 19 nt, Homo sapiens
  misc_RNA (1)...(19): siRNA sense strand
gaaacuugcuggauaugau

SEQ ID NO: 585029 - RNA, 19 nt, Homo sapiens
  misc_RNA (1)...(19): siRNA sense strand
aagaagaccucaugagaga

SEQ ID NO: 585030 - RNA, 19 nt, Homo sapiens
  misc_RNA (1)...(19): siRNA sense strand
cuuggaaacuugcuggaua

SEQ ID NO: 585031 - RNA, 19 nt, Homo sapiens
  misc_RNA (1)...(19): siRNA sense strand
gaaguaaccaaacaagaag

SEQ ID NO: 585032 - RNA, 19 nt, Homo sapiens
  misc_RNA (1)...(19): siRNA sense strand
gcacgaugguccuacacau

SEQ ID NO: 585033 - RNA, 19 nt, Homo sapiens
  misc_RNA (1)...(19): siRNA sense strand
caaacaagaagaccucaug

SEQ ID NO: 585034 - RNA, 19 nt, Homo sapiens
  misc_RNA (1)...(19): siRNA sense strand
acaagaagaccucaugaga

SEQ ID NO: 585035 - RNA, 19 nt, Homo sapiens
  misc_RNA (1)...(19): siRNA sense strand
gguguuggaugucaaugau

SEQ ID NO: 585036 - RNA, 19 nt, Homo sapiens
  misc_RNA (1)...(19): siRNA sense strand
ggaugucaaugaugauuuu

SEQ ID NO: 585037 - RNA, 19 nt, Homo sapiens
  misc_RNA (1)...(19): siRNA sense strand
ggaagccaguacagaucuu

SEQ ID NO: 585038 - RNA, 19 nt, Homo sapiens
  misc_RNA (1)...(19): siRNA sense strand
ggaaacuugcuggauauga

SEQ ID NO: 585039 - RNA, 19 nt, Homo sapiens
  misc_RNA (1)...(19): siRNA sense strand
uguuggaugucaaugauga

SEQ ID NO: 585040 - RNA, 19 nt, Homo sapiens
  misc_RNA (1)...(19): siRNA sense strand
ccaggaagccaguacagau

SEQ ID NO: 585041 - RNA, 19 nt, Homo sapiens
  misc_RNA (1)...(19): siRNA sense strand
aaacaagaagaccucauga

SEQ ID NO: 585042 - RNA, 19 nt, Homo sapiens
  misc_RNA (1)...(19): siRNA sense strand
gaagccaguacagaucuuu

SEQ ID NO: 585043 - RNA, 19 nt, Homo sapiens
  misc_RNA (1)...(19): siRNA sense strand
uuggaaacuugcuggauau

SEQ ID NO: 585044 - RNA, 19 nt, Homo sapiens
  misc_RNA (1)...(19): siRNA sense strand
cuggagcccuucccugaga

SEQ ID NO: 585045 - RNA, 19 nt, Homo sapiens
  misc_RNA (1)...(19): siRNA sense strand
cuacacauuccagacauuu

SEQ ID NO: 585046 - RNA, 19 nt, Homo sapiens
  misc_RNA (1)...(19): siRNA sense strand
ccuacacauuccagacauu

SEQ ID NO: 585047 - RNA, 19 nt, Homo sapiens
  misc_RNA (1)...(19): siRNA sense strand
cugaggaaguaaccaaaca

SEQ ID NO: 585048 - RNA, 19 nt, Homo sapiens
  misc_RNA (1)...(19): siRNA sense strand
ucaguuccauggccaagag

SEQ ID NO: 585049 - RNA, 19 nt, Homo sapiens
  misc_RNA (1)...(19): siRNA sense strand
cccgaaggcucuccaucga

SEQ ID NO: 585050 - RNA, 19 nt, Homo sapiens
  misc_RNA (1)...(19): siRNA sense strand
gaggaaguaaccaaacaag

SEQ ID NO: 585051 - RNA, 19 nt, Homo sapiens
  misc_RNA (1)...(19): siRNA sense strand
ccagcacgaugguccuaca

SEQ ID NO: 585052 - RNA, 19 nt, Homo sapiens
  misc_RNA (1)...(19): siRNA sense strand
gugcugguguuggauguca

SEQ ID NO: 585053 - RNA, 19 nt, Homo sapiens
  misc_RNA (1)...(19): siRNA sense strand
cacgaugguccuacacauu

SEQ ID NO: 585054 - RNA, 19 nt, Homo sapiens
  misc_RNA (1)...(19): siRNA sense strand
uugaggcucugaugaacau

SEQ ID NO: 585055 - RNA, 19 nt, Homo sapiens
  misc_RNA (1)...(19): siRNA sense strand
ccacuuugaggcucugaug

SEQ ID NO: 585056 - RNA, 19 nt, Homo sapiens
  misc_RNA (1)...(19): siRNA sense strand
cgagcacccuucaguucca

SEQ ID NO: 585057 - RNA, 19 nt, Homo sapiens
  misc_RNA (1)...(19): siRNA sense strand
aaacuugcuggauaugaug

SEQ ID NO: 585058 - RNA, 19 nt, Homo sapiens
  misc_RNA (1)...(19): siRNA sense strand
gcccuucccugagaaacuc

SEQ ID NO: 585059 - RNA, 19 nt, Homo sapiens
  misc_RNA (1)...(19): siRNA sense strand
gaaacuugcuggauaugau

SEQ ID NO: 585060 - RNA, 19 nt, Homo sapiens
  misc_RNA (1)...(19): siRNA sense strand
cuuggaaacuugcuggaua

SEQ ID NO: 585061 - RNA, 19 nt, Homo sapiens
  misc_RNA (1)...(19): siRNA sense strand
gcacgaugguccuacacau

SEQ ID NO: 585062 - RNA, 19 nt, Homo sapiens
  misc_RNA (1)...(19): siRNA sense strand
ggaaacuugcuggauauga

SEQ ID NO: 585063 - RNA, 19 nt, Homo sapiens
  misc_RNA (1)...(19): siRNA sense strand
uuggaaacuugcuggauau

SEQ ID NO: 585064 - RNA, 19 nt, Homo sapiens
  misc_RNA (1)...(19): siRNA sense strand
cuacacauuccagacauuu

SEQ ID NO: 585065 - RNA, 19 nt, Homo sapiens
  misc_RNA (1)...(19): siRNA sense strand
ucaguuccauggccaagag

SEQ ID NO: 585066 - RNA, 19 nt, Homo sapiens
  misc_RNA (1)...(19): siRNA sense strand
ccuacacauuccagacauu

SEQ ID NO: 585067 - RNA, 19 nt, Homo sapiens
  misc_RNA (1)...(19): siRNA sense strand
cccgaaggcucuccaucga

SEQ ID NO: 585068 - RNA, 19 nt, Homo sapiens
  misc_RNA (1)...(19): siRNA sense strand
ccagcacgaugguccuaca

SEQ ID NO: 585069 - RNA, 19 nt, Homo sapiens
  misc_RNA (1)...(19): siRNA sense strand
cacgaugguccuacacauu

SEQ ID NO: 585070 - RNA, 19 nt, Homo sapiens
  misc_RNA (1)...(19): siRNA sense strand
aaacuugcuggauaugaug

SEQ ID NO: 585071 - RNA, 19 nt, Homo sapiens
  misc_RNA (1)...(19): siRNA sense strand
cgagcacccuucaguucca

SEQ ID NO: 585072 - RNA, 19 nt, Homo sapiens
  misc_RNA (1)...(19): siRNA sense strand
ggaaguaaccaaacaagaa

SEQ ID NO: 585073 - RNA, 19 nt, Homo sapiens
  misc_RNA (1)...(19): siRNA sense strand
gaaacuugcuggauaugau

SEQ ID NO: 585074 - RNA, 19 nt, Homo sapiens
  misc_RNA (1)...(19): siRNA sense strand
aagaagaccucaugagaga

SEQ ID NO: 585075 - RNA, 19 nt, Homo sapiens
  misc_RNA (1)...(19): siRNA sense strand
cuuggaaacuugcuggaua

SEQ ID NO: 585076 - RNA, 19 nt, Homo sapiens
  misc_RNA (1)...(19): siRNA sense strand
gaaguaaccaaacaagaag

SEQ ID NO: 585077 - RNA, 19 nt, Homo sapiens
  misc_RNA (1)...(19): siRNA sense strand
gcacgaugguccuacacau

SEQ ID NO: 585078 - RNA, 19 nt, Homo sapiens
  misc_RNA (1)...(19): siRNA sense strand
caaacaagaagaccucaug

SEQ ID NO: 585079 - RNA, 19 nt, Homo sapiens
  misc_RNA (1)...(19): siRNA sense strand
acaagaagaccucaugaga

SEQ ID NO: 585080 - RNA, 19 nt, Homo sapiens
  misc_RNA (1)...(19): siRNA sense strand
gguguuggaugucaaugau

SEQ ID NO: 585081 - RNA, 19 nt, Homo sapiens
  misc_RNA (1)...(19): siRNA sense strand
ggaugucaaugaugauuuu

SEQ ID NO: 585082 - RNA, 19 nt, Homo sapiens
  misc_RNA (1)...(19): siRNA sense strand
ggaagccaguacagaucuu

SEQ ID NO: 585083 - RNA, 19 nt, Homo sapiens
  misc_RNA (1)...(19): siRNA sense strand
ggaaacuugcuggauauga

SEQ ID NO: 585084 - RNA, 19 nt, Homo sapiens
  misc_RNA (1)...(19): siRNA sense strand
uguuggaugucaaugauga

SEQ ID NO: 585085 - RNA, 19 nt, Homo sapiens
  misc_RNA (1)...(19): siRNA sense strand
ccaggaagccaguacagau

SEQ ID NO: 585086 - RNA, 19 nt, Homo sapiens
  misc_RNA (1)...(19): siRNA sense strand
aaacaagaagaccucauga

SEQ ID NO: 585087 - RNA, 19 nt, Homo sapiens
  misc_RNA (1)...(19): siRNA sense strand
gaagccaguacagaucuuu

SEQ ID NO: 585088 - RNA, 19 nt, Homo sapiens
  misc_RNA (1)...(19): siRNA sense strand
uuggaaacuugcuggauau

SEQ ID NO: 585089 - RNA, 19 nt, Homo sapiens
  misc_RNA (1)...(19): siRNA sense strand
cuggagcccuucccugaga

SEQ ID NO: 585090 - RNA, 19 nt, Homo sapiens
  misc_RNA (1)...(19): siRNA sense strand
cuacacauuccagacauuu

SEQ ID NO: 585091 - RNA, 19 nt, Homo sapiens
  misc_RNA (1)...(19): siRNA sense strand
ccuacacauuccagacauu

SEQ ID NO: 585092 - RNA, 19 nt, Homo sapiens
  misc_RNA (1)...(19): siRNA sense strand
cugaggaaguaaccaaaca

SEQ ID NO: 585093 - RNA, 19 nt, Homo sapiens
  misc_RNA (1)...(19): siRNA sense strand
ucaguuccauggccaagag

SEQ ID NO: 585094 - RNA, 19 nt, Homo sapiens
  misc_RNA (1)...(19): siRNA sense strand
cccgaaggcucuccaucga

SEQ ID NO: 585095 - RNA, 19 nt, Homo sapiens
  misc_RNA (1)...(19): siRNA sense strand
gaggaaguaaccaaacaag

SEQ ID NO: 585096 - RNA, 19 nt, Homo sapiens
  misc_RNA (1)...(19): siRNA sense strand
ccagcacgaugguccuaca

SEQ ID NO: 585097 - RNA, 19 nt, Homo sapiens
  misc_RNA (1)...(19): siRNA sense strand
gugcugguguuggauguca

SEQ ID NO: 585098 - RNA, 19 nt, Homo sapiens
  misc_RNA (1)...(19): siRNA sense strand
cacgaugguccuacacauu

SEQ ID NO: 585099 - RNA, 19 nt, Homo sapiens
  misc_RNA (1)...(19): siRNA sense strand
uugaggcucugaugaacau

SEQ ID NO: 585100 - RNA, 19 nt, Homo sapiens
  misc_RNA (1)...(19): siRNA sense strand
ccacuuugaggcucugaug

SEQ ID NO: 585101 - RNA, 19 nt, Homo sapiens
  misc_RNA (1)...(19): siRNA sense strand
cgagcacccuucaguucca

SEQ ID NO: 585102 - RNA, 19 nt, Homo sapiens
  misc_RNA (1)...(19): siRNA sense strand
aaacuugcuggauaugaug

SEQ ID NO: 585103 - RNA, 19 nt, Homo sapiens
  misc_RNA (1)...(19): siRNA sense strand
gcccuucccugagaaacuc

SEQ ID NO: 585104 - RNA, 19 nt, Homo sapiens
  misc_RNA (1)...(19): siRNA sense strand
ggacaaggcugccaaggaa

SEQ ID NO: 585105 - RNA, 19 nt, Homo sapiens
  misc_RNA (1)...(19): siRNA sense strand
caaagaggauaaucucaaa

SEQ ID NO: 585106 - RNA, 19 nt, Homo sapiens
  misc_RNA (1)...(19): siRNA sense strand
gagcgagacuccuccagua

SEQ ID NO: 585107 - RNA, 19 nt, Homo sapiens
  misc_RNA (1)...(19): siRNA sense strand
gaaaggauggaaagaagua

SEQ ID NO: 585108 - RNA, 19 nt, Homo sapiens
  misc_RNA (1)...(19): siRNA sense strand
aaacggagcuucucaaguc

SEQ ID NO: 585109 - RNA, 19 nt, Homo sapiens
  misc_RNA (1)...(19): siRNA sense strand
uaaagccguuccaggauua

SEQ ID NO: 585110 - RNA, 19 nt, Homo sapiens
  misc_RNA (1)...(19): siRNA sense strand
ugacaaggacucagacuua

SEQ ID NO: 585111 - RNA, 19 nt, Homo sapiens
  misc_RNA (1)...(19): siRNA sense strand
ggaugaugauuccuccuua

SEQ ID NO: 585112 - RNA, 19 nt, Homo sapiens
  misc_RNA (1)...(19): siRNA sense strand
gagcgaggguucagaguau

SEQ ID NO: 585113 - RNA, 19 nt, Homo sapiens
  misc_RNA (1)...(19): siRNA sense strand
ucaugcaccugcuauguua

SEQ ID NO: 585114 - RNA, 19 nt, Homo sapiens
  misc_RNA (1)...(19): siRNA sense strand
gaaagcagucgucaucuga

SEQ ID NO: 585115 - RNA, 19 nt, Homo sapiens
  misc_RNA (1)...(19): siRNA sense strand
cacccuaucuggccaguua

SEQ ID NO: 585116 - RNA, 19 nt, Homo sapiens
  misc_RNA (1)...(19): siRNA sense strand
cgagaacacuccuuugguu

SEQ ID NO: 585117 - RNA, 19 nt, Homo sapiens
  misc_RNA (1)...(19): siRNA sense strand
acagaacgaucacagcaua

SEQ ID NO: 585118 - RNA, 19 nt, Homo sapiens
  misc_RNA (1)...(19): siRNA sense strand
gagguugacuacacugaaa

SEQ ID NO: 585119 - RNA, 19 nt, Homo sapiens
  misc_RNA (1)...(19): siRNA sense strand
ccaaauaucagaagucguu

SEQ ID NO: 585120 - RNA, 19 nt, Homo sapiens
  misc_RNA (1)...(19): siRNA sense strand
ggucgucccucuauucuca

SEQ ID NO: 585121 - RNA, 19 nt, Homo sapiens
  misc_RNA (1)...(19): siRNA sense strand
ugaaugcuguuccuuguga

SEQ ID NO: 585122 - RNA, 19 nt, Homo sapiens
  misc_RNA (1)...(19): siRNA sense strand
ucauagcucuggauucuug

SEQ ID NO: 585123 - RNA, 19 nt, Homo sapiens
  misc_RNA (1)...(19): siRNA sense strand
gggaaaggauggaaagaag

SEQ ID NO: 585124 - RNA, 19 nt, Homo sapiens
  misc_RNA (1)...(19): siRNA sense strand
gaacucagaccaagccaau

SEQ ID NO: 585125 - RNA, 19 nt, Homo sapiens
  misc_RNA (1)...(19): siRNA sense strand
gagccaaggauuugaguaa

SEQ ID NO: 585126 - RNA, 19 nt, Homo sapiens
  misc_RNA (1)...(19): siRNA sense strand
gggcugggccuauaaagaa

SEQ ID NO: 585127 - RNA, 19 nt, Homo sapiens
  misc_RNA (1)...(19): siRNA sense strand
gcccugcgcuggauaccua

SEQ ID NO: 585128 - RNA, 19 nt, Homo sapiens
  misc_RNA (1)...(19): siRNA sense strand
ggaaugaugccgccuuuca

SEQ ID NO: 585129 - RNA, 19 nt, Homo sapiens
  misc_RNA (1)...(19): siRNA sense strand
gaugauuccuccuuaugug

SEQ ID NO: 585130 - RNA, 19 nt, Homo sapiens
  misc_RNA (1)...(19): siRNA sense strand
ggacuauucguaugaaaga

SEQ ID NO: 585131 - RNA, 19 nt, Homo sapiens
  misc_RNA (1)...(19): siRNA sense strand
aggauaaucucaaagaguu

SEQ ID NO: 585132 - RNA, 19 nt, Homo sapiens
  misc_RNA (1)...(19): siRNA sense strand
gaugaugauuccuccuuau

SEQ ID NO: 585133 - RNA, 19 nt, Homo sapiens
  misc_RNA (1)...(19): siRNA sense strand
ccacuagccgaaagaguua

SEQ ID NO: 585134 - RNA, 19 nt, Homo sapiens
  misc_RNA (1)...(19): siRNA sense strand
gaaguggccaagauacaaa

SEQ ID NO: 585135 - RNA, 19 nt, Homo sapiens
  misc_RNA (1)...(19): siRNA sense strand
gaaccgcccacuccuaaga

SEQ ID NO: 585136 - RNA, 19 nt, Homo sapiens
  misc_RNA (1)...(19): siRNA sense strand
cuaaagccguuccaggauu

SEQ ID NO: 585137 - RNA, 19 nt, Homo sapiens
  misc_RNA (1)...(19): siRNA sense strand
gggcucagcagcaggauaa

SEQ ID NO: 585138 - RNA, 19 nt, Homo sapiens
  misc_RNA (1)...(19): siRNA sense strand
gcgaaccgcccacuccuaa

SEQ ID NO: 585139 - RNA, 19 nt, Homo sapiens
  misc_RNA (1)...(19): siRNA sense strand
ggagggacuauucguauga

SEQ ID NO: 585140 - RNA, 19 nt, Homo sapiens
  misc_RNA (1)...(19): siRNA sense strand
gguaggagacagcuugaaa

SEQ ID NO: 585141 - RNA, 19 nt, Homo sapiens
  misc_RNA (1)...(19): siRNA sense strand
ggagcgaggguucagagua

SEQ ID NO: 585142 - RNA, 19 nt, Homo sapiens
  misc_RNA (1)...(19): siRNA sense strand
aaccacaacugcccucaaa

SEQ ID NO: 585143 - RNA, 19 nt, Homo sapiens
  misc_RNA (1)...(19): siRNA sense strand
cacccucacugcacccuua

SEQ ID NO: 585144 - RNA, 19 nt, Homo sapiens
  misc_RNA (1)...(19): siRNA sense strand
ccucauagcucuggauucu

SEQ ID NO: 585145 - RNA, 19 nt, Homo sapiens
  misc_RNA (1)...(19): siRNA sense strand
gugaugaaguggccaagau

SEQ ID NO: 585146 - RNA, 19 nt, Homo sapiens
  misc_RNA (1)...(19): siRNA sense strand
caauggagguagcaaugug

SEQ ID NO: 585147 - RNA, 19 nt, Homo sapiens
  misc_RNA (1)...(19): siRNA sense strand
caaccuguuugauacguau

SEQ ID NO: 585148 - RNA, 19 nt, Homo sapiens
  misc_RNA (1)...(19): siRNA sense strand
gaugccgccuuucauguau

SEQ ID NO: 585149 - RNA, 19 nt, Homo sapiens
  misc_RNA (1)...(19): siRNA sense strand
cgaaagcagucgucaucug

SEQ ID NO: 585150 - RNA, 19 nt, Homo sapiens
  misc_RNA (1)...(19): siRNA sense strand
ccagagagccaaggauuug

SEQ ID NO: 585151 - RNA, 19 nt, Homo sapiens
  misc_RNA (1)...(19): siRNA sense strand
agacuuacgccuaguggua

SEQ ID NO: 585152 - RNA, 19 nt, Homo sapiens
  misc_RNA (1)...(19): siRNA sense strand
ucaaagaggauaaucucaa

SEQ ID NO: 585153 - RNA, 19 nt, Homo sapiens
  misc_RNA (1)...(19): siRNA sense strand
caagucuccugaucuguca

SEQ ID NO: 585154 - RNA, 19 nt, Homo sapiens
  misc_RNA (1)...(19): siRNA sense strand
gagcagucgucguggaauc

SEQ ID NO: 585155 - RNA, 19 nt, Homo sapiens
  misc_RNA (1)...(19): siRNA sense strand
gcagagagagucgcacaga

SEQ ID NO: 585156 - RNA, 19 nt, Homo sapiens
  misc_RNA (1)...(19): siRNA sense strand
gcaucccucuggccuaguu

SEQ ID NO: 585157 - RNA, 19 nt, Homo sapiens
  misc_RNA (1)...(19): siRNA sense strand
ggccaguuauccaggcuuu

SEQ ID NO: 585158 - RNA, 19 nt, Homo sapiens
  misc_RNA (1)...(19): siRNA sense strand
gggcaaguccuuagagauc

SEQ ID NO: 585159 - RNA, 19 nt, Homo sapiens
  misc_RNA (1)...(19): siRNA sense strand
gagcuaacagcaucaguca

SEQ ID NO: 585160 - RNA, 19 nt, Homo sapiens
  misc_RNA (1)...(19): siRNA sense strand
ggaacaggaugggcaagca

SEQ ID NO: 585161 - RNA, 19 nt, Homo sapiens
  misc_RNA (1)...(19): siRNA sense strand
cuacagagcuggggaaguu

SEQ ID NO: 585162 - RNA, 19 nt, Homo sapiens
  misc_RNA (1)...(19): siRNA sense strand
caggcagaguccagagaua

SEQ ID NO: 585163 - RNA, 19 nt, Homo sapiens
  misc_RNA (1)...(19): siRNA sense strand
gagggacuauucguaugaa

SEQ ID NO: 585164 - RNA, 19 nt, Homo sapiens
  misc_RNA (1)...(19): siRNA sense strand
gaacaggaugggcaagcaa

SEQ ID NO: 585165 - RNA, 19 nt, Homo sapiens
  misc_RNA (1)...(19): siRNA sense strand
ccugaaagccgagaacaaa

SEQ ID NO: 585166 - RNA, 19 nt, Homo sapiens
  misc_RNA (1)...(19): siRNA sense strand
guucagcgaugaggaagau

SEQ ID NO: 585167 - RNA, 19 nt, Homo sapiens
  misc_RNA (1)...(19): siRNA sense strand
gaaagcagagaaggagcua

SEQ ID NO: 585168 - RNA, 19 nt, Homo sapiens
  misc_RNA (1)...(19): siRNA sense strand
gccacuagccgaaagaguu

SEQ ID NO: 585169 - RNA, 19 nt, Homo sapiens
  misc_RNA (1)...(19): siRNA sense strand
ccagacccacucaagauaa

SEQ ID NO: 585170 - RNA, 19 nt, Homo sapiens
  misc_RNA (1)...(19): siRNA sense strand
guaaaguccugggcacaag

SEQ ID NO: 585171 - RNA, 19 nt, Homo sapiens
  misc_RNA (1)...(19): siRNA sense strand
ucacaucuggaaccguuua

SEQ ID NO: 585172 - RNA, 19 nt, Homo sapiens
  misc_RNA (1)...(19): siRNA sense strand
caacccugcuggcauccaa

SEQ ID NO: 585173 - RNA, 19 nt, Homo sapiens
  misc_RNA (1)...(19): siRNA sense strand
gccgggaauuccgcaguua

SEQ ID NO: 585174 - RNA, 19 nt, Homo sapiens
  misc_RNA (1)...(19): siRNA sense strand
gccagacccacucaagaua

SEQ ID NO: 585175 - RNA, 19 nt, Homo sapiens
  misc_RNA (1)...(19): siRNA sense strand
caccugcagucccuaaaga

SEQ ID NO: 585176 - RNA, 19 nt, Homo sapiens
  misc_RNA (1)...(19): siRNA sense strand
gaggauaaucucaaagagu

SEQ ID NO: 585177 - RNA, 19 nt, Homo sapiens
  misc_RNA (1)...(19): siRNA sense strand
gacaaggacucagacuuac

SEQ ID NO: 585178 - RNA, 19 nt, Homo sapiens
  misc_RNA (1)...(19): siRNA sense strand
ggaaugggagacugcauca

SEQ ID NO: 585179 - RNA, 19 nt, Homo sapiens
  misc_RNA (1)...(19): siRNA sense strand
gcaaugugggcauggaaga

SEQ ID NO: 585180 - RNA, 19 nt, Homo sapiens
  misc_RNA (1)...(19): siRNA sense strand
caaguucagcgaugaggaa

SEQ ID NO: 585181 - RNA, 19 nt, Homo sapiens
  misc_RNA (1)...(19): siRNA sense strand
gcgagacccaugagaguga

SEQ ID NO: 585182 - RNA, 19 nt, Homo sapiens
  misc_RNA (1)...(19): siRNA sense strand
gcgacucgaugaaaaguuu

SEQ ID NO: 585183 - RNA, 19 nt, Homo sapiens
  misc_RNA (1)...(19): siRNA sense strand
caacagcggccucaguucu

SEQ ID NO: 585184 - RNA, 19 nt, Homo sapiens
  misc_RNA (1)...(19): siRNA sense strand
gcgccuguauccugagguu

SEQ ID NO: 585185 - RNA, 19 nt, Homo sapiens
  misc_RNA (1)...(19): siRNA sense strand
ggaaaggauggaaagaagu

SEQ ID NO: 585186 - RNA, 19 nt, Homo sapiens
  misc_RNA (1)...(19): siRNA sense strand
guccuucucuggccucaau

SEQ ID NO: 585187 - RNA, 19 nt, Homo sapiens
  misc_RNA (1)...(19): siRNA sense strand
ccugaaugcuguuccuugu

SEQ ID NO: 585188 - RNA, 19 nt, Homo sapiens
  misc_RNA (1)...(19): siRNA sense strand
ugucaaaccagaacucaga

SEQ ID NO: 585189 - RNA, 19 nt, Homo sapiens
  misc_RNA (1)...(19): siRNA sense strand
ggaggcagcaauggaggua

SEQ ID NO: 585190 - RNA, 19 nt, Homo sapiens
  misc_RNA (1)...(19): siRNA sense strand
gaguggguccuaccucuug

SEQ ID NO: 585191 - RNA, 19 nt, Homo sapiens
  misc_RNA (1)...(19): siRNA sense strand
gcacauggagaugguggaa

SEQ ID NO: 585192 - RNA, 19 nt, Homo sapiens
  misc_RNA (1)...(19): siRNA sense strand
ccacaaugcaagcuacaga

SEQ ID NO: 585193 - RNA, 19 nt, Homo sapiens
  misc_RNA (1)...(19): siRNA sense strand
agaccaagccaaugaggaa

SEQ ID NO: 585194 - RNA, 19 nt, Homo sapiens
  misc_RNA (1)...(19): siRNA sense strand
gcugagggccacagggauu

SEQ ID NO: 585195 - RNA, 19 nt, Homo sapiens
  misc_RNA (1)...(19): siRNA sense strand
ucaguuggaucaggagaau

SEQ ID NO: 585196 - RNA, 19 nt, Homo sapiens
  misc_RNA (1)...(19): siRNA sense strand
caagccuacugucacgauu

SEQ ID NO: 585197 - RNA, 19 nt, Homo sapiens
  misc_RNA (1)...(19): siRNA sense strand
gaaccacaacugcccucaa

SEQ ID NO: 585198 - RNA, 19 nt, Homo sapiens
  misc_RNA (1)...(19): siRNA sense strand
gcuaacagcaucagucacu

SEQ ID NO: 585199 - RNA, 19 nt, Homo sapiens
  misc_RNA (1)...(19): siRNA sense strand
gccaaggauuugaguaaac

SEQ ID NO: 585200 - RNA, 19 nt, Homo sapiens
  misc_RNA (1)...(19): siRNA sense strand
gccagagagccaaggauuu

SEQ ID NO: 585201 - RNA, 19 nt, Homo sapiens
  misc_RNA (1)...(19): siRNA sense strand
caggauaaaccgccucguu

SEQ ID NO: 585202 - RNA, 19 nt, Homo sapiens
  misc_RNA (1)...(19): siRNA sense strand
guucagaguaugaggaaau

SEQ ID NO: 585203 - RNA, 19 nt, Homo sapiens
  misc_RNA (1)...(19): siRNA sense strand
ugaugaaguggccaagaua

SEQ ID NO: 585204 - RNA, 19 nt, Homo sapiens
  misc_RNA (1)...(19): siRNA sense strand
ggacaaggcugccaaggaa

SEQ ID NO: 585205 - RNA, 19 nt, Homo sapiens
  misc_RNA (1)...(19): siRNA sense strand
caaagaggauaaucucaaa

SEQ ID NO: 585206 - RNA, 19 nt, Homo sapiens
  misc_RNA (1)...(19): siRNA sense strand
gagcgagacuccuccagua

SEQ ID NO: 585207 - RNA, 19 nt, Homo sapiens
  misc_RNA (1)...(19): siRNA sense strand
gaaaggauggaaagaagua

SEQ ID NO: 585208 - RNA, 19 nt, Homo sapiens
  misc_RNA (1)...(19): siRNA sense strand
aaacggagcuucucaaguc

SEQ ID NO: 585209 - RNA, 19 nt, Homo sapiens
  misc_RNA (1)...(19): siRNA sense strand
uaaagccguuccaggauua

SEQ ID NO: 585210 - RNA, 19 nt, Homo sapiens
  misc_RNA (1)...(19): siRNA sense strand
ugacaaggacucagacuua

SEQ ID NO: 585211 - RNA, 19 nt, Homo sapiens
  misc_RNA (1)...(19): siRNA sense strand
ggaugaugauuccuccuua

SEQ ID NO: 585212 - RNA, 19 nt, Homo sapiens
  misc_RNA (1)...(19): siRNA sense strand
gagcgaggguucagaguau

SEQ ID NO: 585213 - RNA, 19 nt, Homo sapiens
  misc_RNA (1)...(19): siRNA sense strand
ucaugcaccugcuauguua

SEQ ID NO: 585214 - RNA, 19 nt, Homo sapiens
  misc_RNA (1)...(19): siRNA sense strand
gaaagcagucgucaucuga

SEQ ID NO: 585215 - RNA, 19 nt, Homo sapiens
  misc_RNA (1)...(19): siRNA sense strand
cacccuaucuggccaguua

SEQ ID NO: 585216 - RNA, 19 nt, Homo sapiens
  misc_RNA (1)...(19): siRNA sense strand
cgagaacacuccuuugguu

SEQ ID NO: 585217 - RNA, 19 nt, Homo sapiens
  misc_RNA (1)...(19): siRNA sense strand
acagaacgaucacagcaua

SEQ ID NO: 585218 - RNA, 19 nt, Homo sapiens
  misc_RNA (1)...(19): siRNA sense strand
gagguugacuacacugaaa

SEQ ID NO: 585219 - RNA, 19 nt, Homo sapiens
  misc_RNA (1)...(19): siRNA sense strand
ccaaauaucagaagucguu

SEQ ID NO: 585220 - RNA, 19 nt, Homo sapiens
  misc_RNA (1)...(19): siRNA sense strand
ggucgucccucuauucuca

SEQ ID NO: 585221 - RNA, 19 nt, Homo sapiens
  misc_RNA (1)...(19): siRNA sense strand
ugaaugcuguuccuuguga

SEQ ID NO: 585222 - RNA, 19 nt, Homo sapiens
  misc_RNA (1)...(19): siRNA sense strand
ucauagcucuggauucuug

SEQ ID NO: 585223 - RNA, 19 nt, Homo sapiens
  misc_RNA (1)...(19): siRNA sense strand
gggaaaggauggaaagaag

SEQ ID NO: 585224 - RNA, 19 nt, Homo sapiens
  misc_RNA (1)...(19): siRNA sense strand
gaacucagaccaagccaau

SEQ ID NO: 585225 - RNA, 19 nt, Homo sapiens
  misc_RNA (1)...(19): siRNA sense strand
gagccaaggauuugaguaa

SEQ ID NO: 585226 - RNA, 19 nt, Homo sapiens
  misc_RNA (1)...(19): siRNA sense strand
gggcugggccuauaaagaa

SEQ ID NO: 585227 - RNA, 19 nt, Homo sapiens
  misc_RNA (1)...(19): siRNA sense strand
gcccugcgcuggauaccua

SEQ ID NO: 585228 - RNA, 19 nt, Homo sapiens
  misc_RNA (1)...(19): siRNA sense strand
ggaaugaugccgccuuuca

SEQ ID NO: 585229 - RNA, 19 nt, Homo sapiens
  misc_RNA (1)...(19): siRNA sense strand
gaugauuccuccuuaugug

SEQ ID NO: 585230 - RNA, 19 nt, Homo sapiens
  misc_RNA (1)...(19): siRNA sense strand
ggacuauucguaugaaaga

SEQ ID NO: 585231 - RNA, 19 nt, Homo sapiens
  misc_RNA (1)...(19): siRNA sense strand
aggauaaucucaaagaguu

SEQ ID NO: 585232 - RNA, 19 nt, Homo sapiens
  misc_RNA (1)...(19): siRNA sense strand
gaugaugauuccuccuuau

SEQ ID NO: 585233 - RNA, 19 nt, Homo sapiens
  misc_RNA (1)...(19): siRNA sense strand
ccacuagccgaaagaguua

SEQ ID NO: 585234 - RNA, 19 nt, Homo sapiens
  misc_RNA (1)...(19): siRNA sense strand
gaaguggccaagauacaaa

SEQ ID NO: 585235 - RNA, 19 nt, Homo sapiens
  misc_RNA (1)...(19): siRNA sense strand
gaaccgcccacuccuaaga

SEQ ID NO: 585236 - RNA, 19 nt, Homo sapiens
  misc_RNA (1)...(19): siRNA sense strand
cuaaagccguuccaggauu

SEQ ID NO: 585237 - RNA, 19 nt, Homo sapiens
  misc_RNA (1)...(19): siRNA sense strand
gggcucagcagcaggauaa

SEQ ID NO: 585238 - RNA, 19 nt, Homo sapiens
  misc_RNA (1)...(19): siRNA sense strand
gcgaaccgcccacuccuaa

SEQ ID NO: 585239 - RNA, 19 nt, Homo sapiens
  misc_RNA (1)...(19): siRNA sense strand
ggagggacuauucguauga

SEQ ID NO: 585240 - RNA, 19 nt, Homo sapiens
  misc_RNA (1)...(19): siRNA sense strand
gguaggagacagcuugaaa

SEQ ID NO: 585241 - RNA, 19 nt, Homo sapiens
  misc_RNA (1)...(19): siRNA sense strand
ggagcgaggguucagagua

SEQ ID NO: 585242 - RNA, 19 nt, Homo sapiens
  misc_RNA (1)...(19): siRNA sense strand
aaccacaacugcccucaaa

SEQ ID NO: 585243 - RNA, 19 nt, Homo sapiens
  misc_RNA (1)...(19): siRNA sense strand
cacccucacugcacccuua

SEQ ID NO: 585244 - RNA, 19 nt, Homo sapiens
  misc_RNA (1)...(19): siRNA sense strand
ccucauagcucuggauucu

SEQ ID NO: 585245 - RNA, 19 nt, Homo sapiens
  misc_RNA (1)...(19): siRNA sense strand
gugaugaaguggccaagau

SEQ ID NO: 585246 - RNA, 19 nt, Homo sapiens
  misc_RNA (1)...(19): siRNA sense strand
caauggagguagcaaugug

SEQ ID NO: 585247 - RNA, 19 nt, Homo sapiens
  misc_RNA (1)...(19): siRNA sense strand
caaccuguuugauacguau

SEQ ID NO: 585248 - RNA, 19 nt, Homo sapiens
  misc_RNA (1)...(19): siRNA sense strand
gaugccgccuuucauguau

SEQ ID NO: 585249 - RNA, 19 nt, Homo sapiens
  misc_RNA (1)...(19): siRNA sense strand
cgaaagcagucgucaucug

SEQ ID NO: 585250 - RNA, 19 nt, Homo sapiens
  misc_RNA (1)...(19): siRNA sense strand
ccagagagccaaggauuug

SEQ ID NO: 585251 - RNA, 19 nt, Homo sapiens
  misc_RNA (1)...(19): siRNA sense strand
agacuuacgccuaguggua

SEQ ID NO: 585252 - RNA, 19 nt, Homo sapiens
  misc_RNA (1)...(19): siRNA sense strand
ucaaagaggauaaucucaa

SEQ ID NO: 585253 - RNA, 19 nt, Homo sapiens
  misc_RNA (1)...(19): siRNA sense strand
caagucuccugaucuguca

SEQ ID NO: 585254 - RNA, 19 nt, Homo sapiens
  misc_RNA (1)...(19): siRNA sense strand
gagcagucgucguggaauc

SEQ ID NO: 585255 - RNA, 19 nt, Homo sapiens
  misc_RNA (1)...(19): siRNA sense strand
gcagagagagucgcacaga

SEQ ID NO: 585256 - RNA, 19 nt, Homo sapiens
  misc_RNA (1)...(19): siRNA sense strand
gcaucccucuggccuaguu

SEQ ID NO: 585257 - RNA, 19 nt, Homo sapiens
  misc_RNA (1)...(19): siRNA sense strand
ggccaguuauccaggcuuu

SEQ ID NO: 585258 - RNA, 19 nt, Homo sapiens
  misc_RNA (1)...(19): siRNA sense strand
gggcaaguccuuagagauc

SEQ ID NO: 585259 - RNA, 19 nt, Homo sapiens
  misc_RNA (1)...(19): siRNA sense strand
gagcuaacagcaucaguca

SEQ ID NO: 585260 - RNA, 19 nt, Homo sapiens
  misc_RNA (1)...(19): siRNA sense strand
ggaacaggaugggcaagca

SEQ ID NO: 585261 - RNA, 19 nt, Homo sapiens
  misc_RNA (1)...(19): siRNA sense strand
cuacagagcuggggaaguu

SEQ ID NO: 585262 - RNA, 19 nt, Homo sapiens
  misc_RNA (1)...(19): siRNA sense strand
caggcagaguccagagaua

SEQ ID NO: 585263 - RNA, 19 nt, Homo sapiens
  misc_RNA (1)...(19): siRNA sense strand
gagggacuauucguaugaa

SEQ ID NO: 585264 - RNA, 19 nt, Homo sapiens
  misc_RNA (1)...(19): siRNA sense strand
gaacaggaugggcaagcaa

SEQ ID NO: 585265 - RNA, 19 nt, Homo sapiens
  misc_RNA (1)...(19): siRNA sense strand
ccugaaagccgagaacaaa

SEQ ID NO: 585266 - RNA, 19 nt, Homo sapiens
  misc_RNA (1)...(19): siRNA sense strand
guucagcgaugaggaagau

SEQ ID NO: 585267 - RNA, 19 nt, Homo sapiens
  misc_RNA (1)...(19): siRNA sense strand
gaaagcagagaaggagcua

SEQ ID NO: 585268 - RNA, 19 nt, Homo sapiens
  misc_RNA (1)...(19): siRNA sense strand
gccacuagccgaaagaguu

SEQ ID NO: 585269 - RNA, 19 nt, Homo sapiens
  misc_RNA (1)...(19): siRNA sense strand
ccagacccacucaagauaa

SEQ ID NO: 585270 - RNA, 19 nt, Homo sapiens
  misc_RNA (1)...(19): siRNA sense strand
guaaaguccugggcacaag

SEQ ID NO: 585271 - RNA, 19 nt, Homo sapiens
  misc_RNA (1)...(19): siRNA sense strand
ucacaucuggaaccguuua

SEQ ID NO: 585272 - RNA, 19 nt, Homo sapiens
  misc_RNA (1)...(19): siRNA sense strand
caacccugcuggcauccaa

SEQ ID NO: 585273 - RNA, 19 nt, Homo sapiens
  misc_RNA (1)...(19): siRNA sense strand
gccgggaauuccgcaguua

SEQ ID NO: 585274 - RNA, 19 nt, Homo sapiens
  misc_RNA (1)...(19): siRNA sense strand
gccagacccacucaagaua

SEQ ID NO: 585275 - RNA, 19 nt, Homo sapiens
  misc_RNA (1)...(19): siRNA sense strand
caccugcagucccuaaaga

SEQ ID NO: 585276 - RNA, 19 nt, Homo sapiens
  misc_RNA (1)...(19): siRNA sense strand
gaggauaaucucaaagagu

SEQ ID NO: 585277 - RNA, 19 nt, Homo sapiens
  misc_RNA (1)...(19): siRNA sense strand
gacaaggacucagacuuac

SEQ ID NO: 585278 - RNA, 19 nt, Homo sapiens
  misc_RNA (1)...(19): siRNA sense strand
ggaaugggagacugcauca

SEQ ID NO: 585279 - RNA, 19 nt, Homo sapiens
  misc_RNA (1)...(19): siRNA sense strand
gcaaugugggcauggaaga

SEQ ID NO: 585280 - RNA, 19 nt, Homo sapiens
  misc_RNA (1)...(19): siRNA sense strand
caaguucagcgaugaggaa

SEQ ID NO: 585281 - RNA, 19 nt, Homo sapiens
  misc_RNA (1)...(19): siRNA sense strand
gcgagacccaugagaguga

SEQ ID NO: 585282 - RNA, 19 nt, Homo sapiens
  misc_RNA (1)...(19): siRNA sense strand
gcgacucgaugaaaaguuu

SEQ ID NO: 585283 - RNA, 19 nt, Homo sapiens
  misc_RNA (1)...(19): siRNA sense strand
caacagcggccucaguucu

SEQ ID NO: 585284 - RNA, 19 nt, Homo sapiens
  misc_RNA (1)...(19): siRNA sense strand
gcgccuguauccugagguu

SEQ ID NO: 585285 - RNA, 19 nt, Homo sapiens
  misc_RNA (1)...(19): siRNA sense strand
ggaaaggauggaaagaagu

SEQ ID NO: 585286 - RNA, 19 nt, Homo sapiens
  misc_RNA (1)...(19): siRNA sense strand
guccuucucuggccucaau

SEQ ID NO: 585287 - RNA, 19 nt, Homo sapiens
  misc_RNA (1)...(19): siRNA sense strand
ccugaaugcuguuccuugu

SEQ ID NO: 585288 - RNA, 19 nt, Homo sapiens
  misc_RNA (1)...(19): siRNA sense strand
ugucaaaccagaacucaga

SEQ ID NO: 585289 - RNA, 19 nt, Homo sapiens
  misc_RNA (1)...(19): siRNA sense strand
ggaggcagcaauggaggua

SEQ ID NO: 585290 - RNA, 19 nt, Homo sapiens
  misc_RNA (1)...(19): siRNA sense strand
gaguggguccuaccucuug

SEQ ID NO: 585291 - RNA, 19 nt, Homo sapiens
  misc_RNA (1)...(19): siRNA sense strand
gcacauggagaugguggaa

SEQ ID NO: 585292 - RNA, 19 nt, Homo sapiens
  misc_RNA (1)...(19): siRNA sense strand
ccacaaugcaagcuacaga

SEQ ID NO: 585293 - RNA, 19 nt, Homo sapiens
  misc_RNA (1)...(19): siRNA sense strand
agaccaagccaaugaggaa

SEQ ID NO: 585294 - RNA, 19 nt, Homo sapiens
  misc_RNA (1)...(19): siRNA sense strand
gcugagggccacagggauu

SEQ ID NO: 585295 - RNA, 19 nt, Homo sapiens
  misc_RNA (1)...(19): siRNA sense strand
ucaguuggaucaggagaau

SEQ ID NO: 585296 - RNA, 19 nt, Homo sapiens
  misc_RNA (1)...(19): siRNA sense strand
caagccuacugucacgauu

SEQ ID NO: 585297 - RNA, 19 nt, Homo sapiens
  misc_RNA (1)...(19): siRNA sense strand
gaaccacaacugcccucaa

SEQ ID NO: 585298 - RNA, 19 nt, Homo sapiens
  misc_RNA (1)...(19): siRNA sense strand
gcuaacagcaucagucacu

SEQ ID NO: 585299 - RNA, 19 nt, Homo sapiens
  misc_RNA (1)...(19): siRNA sense strand
gccaaggauuugaguaaac

SEQ ID NO: 585300 - RNA, 19 nt, Homo sapiens
  misc_RNA (1)...(19): siRNA sense strand
gccagagagccaaggauuu

SEQ ID NO: 585301 - RNA, 19 nt, Homo sapiens
  misc_RNA (1)...(19): siRNA sense strand
caggauaaaccgccucguu

SEQ ID NO: 585302 - RNA, 19 nt, Homo sapiens
  misc_RNA (1)...(19): siRNA sense strand
guucagaguaugaggaaau

SEQ ID NO: 585303 - RNA, 19 nt, Homo sapiens
  misc_RNA (1)...(19): siRNA sense strand
ugaugaaguggccaagaua

SEQ ID NO: 585304 - RNA, 19 nt, Homo sapiens
  misc_RNA (1)...(19): siRNA sense strand
gcauuuggcuuugccuuuc

SEQ ID NO: 585305 - RNA, 19 nt, Homo sapiens
  misc_RNA (1)...(19): siRNA sense strand
ggcuuaaacucuuggcauu

SEQ ID NO: 585306 - RNA, 19 nt, Homo sapiens
  misc_RNA (1)...(19): siRNA sense strand
cuuaaacucuuggcauuug

SEQ ID NO: 585307 - RNA, 19 nt, Homo sapiens
  misc_RNA (1)...(19): siRNA sense strand
gcuuaaacucuuggcauuu

SEQ ID NO: 585308 - RNA, 19 nt, Homo sapiens
  misc_RNA (1)...(19): siRNA sense strand
acucuuggcauuuggcuuu

SEQ ID NO: 585309 - RNA, 19 nt, Homo sapiens
  misc_RNA (1)...(19): siRNA sense strand
gcauuuggcuuugccuuuc

SEQ ID NO: 585310 - RNA, 19 nt, Homo sapiens
  misc_RNA (1)...(19): siRNA sense strand
ggcuuaaacucuuggcauu

SEQ ID NO: 585311 - RNA, 19 nt, Homo sapiens
  misc_RNA (1)...(19): siRNA sense strand
cuuaaacucuuggcauuug

SEQ ID NO: 585312 - RNA, 19 nt, Homo sapiens
  misc_RNA (1)...(19): siRNA sense strand
gcuuaaacucuuggcauuu

SEQ ID NO: 585313 - RNA, 19 nt, Homo sapiens
  misc_RNA (1)...(19): siRNA sense strand
acucuuggcauuuggcuuu

SEQ ID NO: 585314 - RNA, 19 nt, Homo sapiens
  misc_RNA (1)...(19): siRNA sense strand
gcauuuggcuuugccuuuc

SEQ ID NO: 585315 - RNA, 19 nt, Homo sapiens
  misc_RNA (1)...(19): siRNA sense strand
ggcuuaaacucuuggcauu

SEQ ID NO: 585316 - RNA, 19 nt, Homo sapiens
  misc_RNA (1)...(19): siRNA sense strand
cuuaaacucuuggcauuug

SEQ ID NO: 585317 - RNA, 19 nt, Homo sapiens
  misc_RNA (1)...(19): siRNA sense strand
gcuuaaacucuuggcauuu

SEQ ID NO: 585318 - RNA, 19 nt, Homo sapiens
  misc_RNA (1)...(19): siRNA sense strand
acucuuggcauuuggcuuu

SEQ ID NO: 585319 - RNA, 19 nt, Homo sapiens
  misc_RNA (1)...(19): siRNA sense strand
gcauuuggcuuugccuuuc

SEQ ID NO: 585320 - RNA, 19 nt, Homo sapiens
  misc_RNA (1)...(19): siRNA sense strand
ggcuuaaacucuuggcauu

SEQ ID NO: 585321 - RNA, 19 nt, Homo sapiens
  misc_RNA (1)...(19): siRNA sense strand
cuuaaacucuuggcauuug

SEQ ID NO: 585322 - RNA, 19 nt, Homo sapiens
  misc_RNA (1)...(19): siRNA sense strand
gcuuaaacucuuggcauuu

SEQ ID NO: 585323 - RNA, 19 nt, Homo sapiens
  misc_RNA (1)...(19): siRNA sense strand
acucuuggcauuuggcuuu

SEQ ID NO: 585324 - RNA, 19 nt, Homo sapiens
  misc_RNA (1)...(19): siRNA sense strand
ggaaugaucucuccugguu

SEQ ID NO: 585325 - RNA, 19 nt, Homo sapiens
  misc_RNA (1)...(19): siRNA sense strand
caaaugaguuccacacuuc

SEQ ID NO: 585326 - RNA, 19 nt, Homo sapiens
  misc_RNA (1)...(19): siRNA sense strand
gagagcagcugucuaaguc

SEQ ID NO: 585327 - RNA, 19 nt, Homo sapiens
  misc_RNA (1)...(19): siRNA sense strand
gaacuuaacacuaacagau

SEQ ID NO: 585328 - RNA, 19 nt, Homo sapiens
  misc_RNA (1)...(19): siRNA sense strand
gguaauaacuuuggauaca

SEQ ID NO: 585329 - RNA, 19 nt, Homo sapiens
  misc_RNA (1)...(19): siRNA sense strand
ugacaacauugcagcauuu

SEQ ID NO: 585330 - RNA, 19 nt, Homo sapiens
  misc_RNA (1)...(19): siRNA sense strand
caacauugcagcauuuaaa

SEQ ID NO: 585331 - RNA, 19 nt, Homo sapiens
  misc_RNA (1)...(19): siRNA sense strand
aggaggaacuuaacacuaa

SEQ ID NO: 585332 - RNA, 19 nt, Homo sapiens
  misc_RNA (1)...(19): siRNA sense strand
gcacuucucucugcuggaa

SEQ ID NO: 585333 - RNA, 19 nt, Homo sapiens
  misc_RNA (1)...(19): siRNA sense strand
gcugguaucugcuacauca

SEQ ID NO: 585334 - RNA, 19 nt, Homo sapiens
  misc_RNA (1)...(19): siRNA sense strand
ugagaucaaucgaaacuug

SEQ ID NO: 585335 - RNA, 19 nt, Homo sapiens
  misc_RNA (1)...(19): siRNA sense strand
aaaagaggaugcagaguua

SEQ ID NO: 585336 - RNA, 19 nt, Homo sapiens
  misc_RNA (1)...(19): siRNA sense strand
gaaaugagcacagcaagag

SEQ ID NO: 585337 - RNA, 19 nt, Homo sapiens
  misc_RNA (1)...(19): siRNA sense strand
gagcagcugucuaagucaa

SEQ ID NO: 585338 - RNA, 19 nt, Homo sapiens
  misc_RNA (1)...(19): siRNA sense strand
acuaacagaucuucaauca

SEQ ID NO: 585339 - RNA, 19 nt, Homo sapiens
  misc_RNA (1)...(19): siRNA sense strand
gaaaccaguugaggaggaa

SEQ ID NO: 585340 - RNA, 19 nt, Homo sapiens
  misc_RNA (1)...(19): siRNA sense strand
ucgcugagaucaaucgaaa

SEQ ID NO: 585341 - RNA, 19 nt, Homo sapiens
  misc_RNA (1)...(19): siRNA sense strand
gaucuucaaucaccuaaaa

SEQ ID NO: 585342 - RNA, 19 nt, Homo sapiens
  misc_RNA (1)...(19): siRNA sense strand
ggaaaugagcacagcaaga

SEQ ID NO: 585343 - RNA, 19 nt, Homo sapiens
  misc_RNA (1)...(19): siRNA sense strand
gaucucuccugguuucaga

SEQ ID NO: 585344 - RNA, 19 nt, Homo sapiens
  misc_RNA (1)...(19): siRNA sense strand
cuacaucaccagcacauuu

SEQ ID NO: 585345 - RNA, 19 nt, Homo sapiens
  misc_RNA (1)...(19): siRNA sense strand
caacaggcgacaugacauu

SEQ ID NO: 585346 - RNA, 19 nt, Homo sapiens
  misc_RNA (1)...(19): siRNA sense strand
acaaaugaguuccacacuu

SEQ ID NO: 585347 - RNA, 19 nt, Homo sapiens
  misc_RNA (1)...(19): siRNA sense strand
gguccgaacuggcaaugau

SEQ ID NO: 585348 - RNA, 19 nt, Homo sapiens
  misc_RNA (1)...(19): siRNA sense strand
gaggaggaacuuaacacua

SEQ ID NO: 585349 - RNA, 19 nt, Homo sapiens
  misc_RNA (1)...(19): siRNA sense strand
gguagaaucccuagguuuc

SEQ ID NO: 585350 - RNA, 19 nt, Homo sapiens
  misc_RNA (1)...(19): siRNA sense strand
caauugaugcuuugacaga

SEQ ID NO: 585351 - RNA, 19 nt, Homo sapiens
  misc_RNA (1)...(19): siRNA sense strand
gaagugguggcugcuguaa

SEQ ID NO: 585352 - RNA, 19 nt, Homo sapiens
  misc_RNA (1)...(19): siRNA sense strand
aaugaucucuccugguuuc

SEQ ID NO: 585353 - RNA, 19 nt, Homo sapiens
  misc_RNA (1)...(19): siRNA sense strand
gcuguagccuugaagacau

SEQ ID NO: 585354 - RNA, 19 nt, Homo sapiens
  misc_RNA (1)...(19): siRNA sense strand
guucuugcuucaauugaug

SEQ ID NO: 585355 - RNA, 19 nt, Homo sapiens
  misc_RNA (1)...(19): siRNA sense strand
gacaacauugcagcauuua

SEQ ID NO: 585356 - RNA, 19 nt, Homo sapiens
  misc_RNA (1)...(19): siRNA sense strand
cgcgagagcagcugucuaa

SEQ ID NO: 585357 - RNA, 19 nt, Homo sapiens
  misc_RNA (1)...(19): siRNA sense strand
ggagaucagugccccuauu

SEQ ID NO: 585358 - RNA, 19 nt, Homo sapiens
  misc_RNA (1)...(19): siRNA sense strand
gaugcagaguuagcuguga

SEQ ID NO: 585359 - RNA, 19 nt, Homo sapiens
  misc_RNA (1)...(19): siRNA sense strand
caaaagaggaugcagaguu

SEQ ID NO: 585360 - RNA, 19 nt, Homo sapiens
  misc_RNA (1)...(19): siRNA sense strand
uugcuucaauugaugcuuu

SEQ ID NO: 585361 - RNA, 19 nt, Homo sapiens
  misc_RNA (1)...(19): siRNA sense strand
gacaugacauucgaaacca

SEQ ID NO: 585362 - RNA, 19 nt, Homo sapiens
  misc_RNA (1)...(19): siRNA sense strand
ccgaaggccuccgaugguu

SEQ ID NO: 585363 - RNA, 19 nt, Homo sapiens
  misc_RNA (1)...(19): siRNA sense strand
uaagucaacucgggauuuu

SEQ ID NO: 585364 - RNA, 19 nt, Homo sapiens
  misc_RNA (1)...(19): siRNA sense strand
uauugaagguggagcagau

SEQ ID NO: 585365 - RNA, 19 nt, Homo sapiens
  misc_RNA (1)...(19): siRNA sense strand
gagguucuugcuucaauug

SEQ ID NO: 585366 - RNA, 19 nt, Homo sapiens
  misc_RNA (1)...(19): siRNA sense strand
auaacucgauugcccauca

SEQ ID NO: 585367 - RNA, 19 nt, Homo sapiens
  misc_RNA (1)...(19): siRNA sense strand
gggaaaugcaauaccuuau

SEQ ID NO: 585368 - RNA, 19 nt, Homo sapiens
  misc_RNA (1)...(19): siRNA sense strand
aaagggaaaugcaauaccu

SEQ ID NO: 585369 - RNA, 19 nt, Homo sapiens
  misc_RNA (1)...(19): siRNA sense strand
ggaggaacuuaacacuaac

SEQ ID NO: 585370 - RNA, 19 nt, Homo sapiens
  misc_RNA (1)...(19): siRNA sense strand
uagaaucccuagguuucaa

SEQ ID NO: 585371 - RNA, 19 nt, Homo sapiens
  misc_RNA (1)...(19): siRNA sense strand
cagcugaacaaacaguuga

SEQ ID NO: 585372 - RNA, 19 nt, Homo sapiens
  misc_RNA (1)...(19): siRNA sense strand
ggguagaaucccuagguuu

SEQ ID NO: 585373 - RNA, 19 nt, Homo sapiens
  misc_RNA (1)...(19): siRNA sense strand
ugagguucuugcuucaauu

SEQ ID NO: 585374 - RNA, 19 nt, Homo sapiens
  misc_RNA (1)...(19): siRNA sense strand
guaauaacuuuggauacac

SEQ ID NO: 585375 - RNA, 19 nt, Homo sapiens
  misc_RNA (1)...(19): siRNA sense strand
gcagcugaacaaacaguug

SEQ ID NO: 585376 - RNA, 19 nt, Homo sapiens
  misc_RNA (1)...(19): siRNA sense strand
gaggcagcuugaugagguu

SEQ ID NO: 585377 - RNA, 19 nt, Homo sapiens
  misc_RNA (1)...(19): siRNA sense strand
gaaugaucucuccugguuu

SEQ ID NO: 585378 - RNA, 19 nt, Homo sapiens
  misc_RNA (1)...(19): siRNA sense strand
caccagaaccacaauccaa

SEQ ID NO: 585379 - RNA, 19 nt, Homo sapiens
  misc_RNA (1)...(19): siRNA sense strand
cacgcgggaugacaacauu

SEQ ID NO: 585380 - RNA, 19 nt, Homo sapiens
  misc_RNA (1)...(19): siRNA sense strand
agugguggcugcuguaaag

SEQ ID NO: 585381 - RNA, 19 nt, Homo sapiens
  misc_RNA (1)...(19): siRNA sense strand
agggaaaugcaauaccuua

SEQ ID NO: 585382 - RNA, 19 nt, Homo sapiens
  misc_RNA (1)...(19): siRNA sense strand
cgagagcagcugucuaagu

SEQ ID NO: 585383 - RNA, 19 nt, Homo sapiens
  misc_RNA (1)...(19): siRNA sense strand
gaagguggagcagaugaca

SEQ ID NO: 585384 - RNA, 19 nt, Homo sapiens
  misc_RNA (1)...(19): siRNA sense strand
gguucuugcuucaauugau

SEQ ID NO: 585385 - RNA, 19 nt, Homo sapiens
  misc_RNA (1)...(19): siRNA sense strand
gcagcuugaugagguucuu

SEQ ID NO: 585386 - RNA, 19 nt, Homo sapiens
  misc_RNA (1)...(19): siRNA sense strand
gugggaggcagcuugauga

SEQ ID NO: 585387 - RNA, 19 nt, Homo sapiens
  misc_RNA (1)...(19): siRNA sense strand
guccaggguaucauuguuu

SEQ ID NO: 585388 - RNA, 19 nt, Homo sapiens
  misc_RNA (1)...(19): siRNA sense strand
gcacauuugccagcuguag

SEQ ID NO: 585389 - RNA, 19 nt, Homo sapiens
  misc_RNA (1)...(19): siRNA sense strand
cuaagucaacucgggauuu

SEQ ID NO: 585390 - RNA, 19 nt, Homo sapiens
  misc_RNA (1)...(19): siRNA sense strand
guagaaucccuagguuuca

SEQ ID NO: 585391 - RNA, 19 nt, Homo sapiens
  misc_RNA (1)...(19): siRNA sense strand
uaucauuguuuccaaccau

SEQ ID NO: 585392 - RNA, 19 nt, Homo sapiens
  misc_RNA (1)...(19): siRNA sense strand
gauugcccaucauccugaa

SEQ ID NO: 585393 - RNA, 19 nt, Homo sapiens
  misc_RNA (1)...(19): siRNA sense strand
ggaacuuaacacuaacaga

SEQ ID NO: 585394 - RNA, 19 nt, Homo sapiens
  misc_RNA (1)...(19): siRNA sense strand
ggcaacaggcgacaugaca

SEQ ID NO: 585395 - RNA, 19 nt, Homo sapiens
  misc_RNA (1)...(19): siRNA sense strand
ugccuugucuggccugaug

SEQ ID NO: 585396 - RNA, 19 nt, Homo sapiens
  misc_RNA (1)...(19): siRNA sense strand
gcugagaucaaucgaaacu

SEQ ID NO: 585397 - RNA, 19 nt, Homo sapiens
  misc_RNA (1)...(19): siRNA sense strand
ccuuggagcuaagugcauu

SEQ ID NO: 585398 - RNA, 19 nt, Homo sapiens
  misc_RNA (1)...(19): siRNA sense strand
ugaugagguucuugcuuca

SEQ ID NO: 585399 - RNA, 19 nt, Homo sapiens
  misc_RNA (1)...(19): siRNA sense strand
ggugggaggcagcuugaug

SEQ ID NO: 585400 - RNA, 19 nt, Homo sapiens
  misc_RNA (1)...(19): siRNA sense strand
uuucagagcauaacucgau

SEQ ID NO: 585401 - RNA, 19 nt, Homo sapiens
  misc_RNA (1)...(19): siRNA sense strand
gacauucgaaaccaguuga

SEQ ID NO: 585402 - RNA, 19 nt, Homo sapiens
  misc_RNA (1)...(19): siRNA sense strand
ugacuccuaucagcacuuc

SEQ ID NO: 585403 - RNA, 19 nt, Homo sapiens
  misc_RNA (1)...(19): siRNA sense strand
auccagaccugcagcugaa

SEQ ID NO: 585404 - RNA, 19 nt, Homo sapiens
  misc_RNA (1)...(19): siRNA sense strand
cugcaagggugaacauggu

SEQ ID NO: 585405 - RNA, 19 nt, Homo sapiens
  misc_RNA (1)...(19): siRNA sense strand
gaucagugccccuauuugu

SEQ ID NO: 585406 - RNA, 19 nt, Homo sapiens
  misc_RNA (1)...(19): siRNA sense strand
gcaacaggcgacaugacau

SEQ ID NO: 585407 - RNA, 19 nt, Homo sapiens
  misc_RNA (1)...(19): siRNA sense strand
uaacucgauugcccaucau

SEQ ID NO: 585408 - RNA, 19 nt, Homo sapiens
  misc_RNA (1)...(19): siRNA sense strand
gucggucgcugagaucaau

SEQ ID NO: 585409 - RNA, 19 nt, Homo sapiens
  misc_RNA (1)...(19): siRNA sense strand
acacuuccauggcccuuac

SEQ ID NO: 585410 - RNA, 19 nt, Homo sapiens
  misc_RNA (1)...(19): siRNA sense strand
gagaucagugccccuauuu

SEQ ID NO: 585411 - RNA, 19 nt, Homo sapiens
  misc_RNA (1)...(19): siRNA sense strand
caggcgacaugacauucga

SEQ ID NO: 585412 - RNA, 19 nt, Homo sapiens
  misc_RNA (1)...(19): siRNA sense strand
uguccaggguaucauuguu

SEQ ID NO: 585413 - RNA, 19 nt, Homo sapiens
  misc_RNA (1)...(19): siRNA sense strand
ucucucugcuggaaugauc

SEQ ID NO: 585414 - RNA, 19 nt, Homo sapiens
  misc_RNA (1)...(19): siRNA sense strand
uacaucaccagcacauuug

SEQ ID NO: 585415 - RNA, 19 nt, Homo sapiens
  misc_RNA (1)...(19): siRNA sense strand
ggacaccagaaccacaauc

SEQ ID NO: 585416 - RNA, 19 nt, Homo sapiens
  misc_RNA (1)...(19): siRNA sense strand
gcagcugucuaagucaacu

SEQ ID NO: 585417 - RNA, 19 nt, Homo sapiens
  misc_RNA (1)...(19): siRNA sense strand
acacuaacagaucuucaau

SEQ ID NO: 585418 - RNA, 19 nt, Homo sapiens
  misc_RNA (1)...(19): siRNA sense strand
cgacaugacauucgaaacc

SEQ ID NO: 585419 - RNA, 19 nt, Homo sapiens
  misc_RNA (1)...(19): siRNA sense strand
gaugguuccaacucuaugu

SEQ ID NO: 585420 - RNA, 19 nt, Homo sapiens
  misc_RNA (1)...(19): siRNA sense strand
augacaacauugcagcauu

SEQ ID NO: 585421 - RNA, 19 nt, Homo sapiens
  misc_RNA (1)...(19): siRNA sense strand
gcacugcccuccacagaca

SEQ ID NO: 585422 - RNA, 19 nt, Homo sapiens
  misc_RNA (1)...(19): siRNA sense strand
ggacacugcuucagaaagg

SEQ ID NO: 585423 - RNA, 19 nt, Homo sapiens
  misc_RNA (1)...(19): siRNA sense strand
ggaagucgcugugcagaag

SEQ ID NO: 585424 - RNA, 19 nt, Homo sapiens
  misc_RNA (1)...(19): siRNA sense strand
ggacaccauugugcacuuu

SEQ ID NO: 585425 - RNA, 19 nt, Homo sapiens
  misc_RNA (1)...(19): siRNA sense strand
gaacauguacauugaaguc

SEQ ID NO: 585426 - RNA, 19 nt, Homo sapiens
  misc_RNA (1)...(19): siRNA sense strand
ccacgccucuggugcauga

SEQ ID NO: 585427 - RNA, 19 nt, Homo sapiens
  misc_RNA (1)...(19): siRNA sense strand
gaagcuacaugggaagugu

SEQ ID NO: 585428 - RNA, 19 nt, Homo sapiens
  misc_RNA (1)...(19): siRNA sense strand
cagaaagggagaagcguua

SEQ ID NO: 585429 - RNA, 19 nt, Homo sapiens
  misc_RNA (1)...(19): siRNA sense strand
ggccgaagcuuuacaucgu

SEQ ID NO: 585430 - RNA, 19 nt, Homo sapiens
  misc_RNA (1)...(19): siRNA sense strand
gggaacauguacauugaag

SEQ ID NO: 585431 - RNA, 19 nt, Homo sapiens
  misc_RNA (1)...(19): siRNA sense strand
aaaggaagaaagugacgua

SEQ ID NO: 585432 - RNA, 19 nt, Homo sapiens
  misc_RNA (1)...(19): siRNA sense strand
gagcaucacccgucugcau

SEQ ID NO: 585433 - RNA, 19 nt, Homo sapiens
  misc_RNA (1)...(19): siRNA sense strand
acgggaacauguacauuga

SEQ ID NO: 585434 - RNA, 19 nt, Homo sapiens
  misc_RNA (1)...(19): siRNA sense strand
uguggacacugcuucagaa

SEQ ID NO: 585435 - RNA, 19 nt, Homo sapiens
  misc_RNA (1)...(19): siRNA sense strand
ccggaacgccaaauacuug

SEQ ID NO: 585436 - RNA, 19 nt, Homo sapiens
  misc_RNA (1)...(19): siRNA sense strand
gggacaccauugugcacuu

SEQ ID NO: 585437 - RNA, 19 nt, Homo sapiens
  misc_RNA (1)...(19): siRNA sense strand
gggaguacgugcggguguu

SEQ ID NO: 585438 - RNA, 19 nt, Homo sapiens
  misc_RNA (1)...(19): siRNA sense strand
cauguacauugaagucugu

SEQ ID NO: 585439 - RNA, 19 nt, Homo sapiens
  misc_RNA (1)...(19): siRNA sense strand
gaaagggagaagcguuagu

SEQ ID NO: 585440 - RNA, 19 nt, Homo sapiens
  misc_RNA (1)...(19): siRNA sense strand
gugcggguguucgauguga

SEQ ID NO: 585441 - RNA, 19 nt, Homo sapiens
  misc_RNA (1)...(19): siRNA sense strand
gcaucacccgucugcauga

SEQ ID NO: 585442 - RNA, 19 nt, Homo sapiens
  misc_RNA (1)...(19): siRNA sense strand
ccugcgugcuggugaagaa

SEQ ID NO: 585443 - RNA, 19 nt, Homo sapiens
  misc_RNA (1)...(19): siRNA sense strand
gguccagccugaagguucu

SEQ ID NO: 585444 - RNA, 19 nt, Homo sapiens
  misc_RNA (1)...(19): siRNA sense strand
cacgggaacauguacauug

SEQ ID NO: 585445 - RNA, 19 nt, Homo sapiens
  misc_RNA (1)...(19): siRNA sense strand
gagcuccacgggaacaugu

SEQ ID NO: 585446 - RNA, 19 nt, Homo sapiens
  misc_RNA (1)...(19): siRNA sense strand
ugaagaaggcagccacagu

SEQ ID NO: 585447 - RNA, 19 nt, Homo sapiens
  misc_RNA (1)...(19): siRNA sense strand
cagcauguggugucucaga

SEQ ID NO: 585448 - RNA, 19 nt, Homo sapiens
  misc_RNA (1)...(19): siRNA sense strand
cuacaugggaagugugaug

SEQ ID NO: 585449 - RNA, 19 nt, Homo sapiens
  misc_RNA (1)...(19): siRNA sense strand
caaauacuuggucgucuac

SEQ ID NO: 585450 - RNA, 19 nt, Homo sapiens
  misc_RNA (1)...(19): siRNA sense strand
ccaacccucacccacauga

SEQ ID NO: 585451 - RNA, 19 nt, Homo sapiens
  misc_RNA (1)...(19): siRNA sense strand
aaagggagaagcguuagug

SEQ ID NO: 585452 - RNA, 19 nt, Homo sapiens
  misc_RNA (1)...(19): siRNA sense strand
gaaaugaagcugagaccaa

SEQ ID NO: 585453 - RNA, 19 nt, Homo sapiens
  misc_RNA (1)...(19): siRNA sense strand
gcggacagcuucaaagucu

SEQ ID NO: 585454 - RNA, 19 nt, Homo sapiens
  misc_RNA (1)...(19): siRNA sense strand
gaacuugaccgagggauuc

SEQ ID NO: 585455 - RNA, 19 nt, Homo sapiens
  misc_RNA (1)...(19): siRNA sense strand
gcugagaccaagaaacuuu

SEQ ID NO: 585456 - RNA, 19 nt, Homo sapiens
  misc_RNA (1)...(19): siRNA sense strand
caggagggaucacaucuca

SEQ ID NO: 585457 - RNA, 19 nt, Homo sapiens
  misc_RNA (1)...(19): siRNA sense strand
ggagcacaguggaccauca

SEQ ID NO: 585458 - RNA, 19 nt, Homo sapiens
  misc_RNA (1)...(19): siRNA sense strand
cagccaaggucaacuggau

SEQ ID NO: 585459 - RNA, 19 nt, Homo sapiens
  misc_RNA (1)...(19): siRNA sense strand
guacuaccgccuccacuug

SEQ ID NO: 585460 - RNA, 19 nt, Homo sapiens
  misc_RNA (1)...(19): siRNA sense strand
ccgcauggauggacagaca

SEQ ID NO: 585461 - RNA, 19 nt, Homo sapiens
  misc_RNA (1)...(19): siRNA sense strand
cccaacagcuugcucaucu

SEQ ID NO: 585462 - RNA, 19 nt, Homo sapiens
  misc_RNA (1)...(19): siRNA sense strand
gaacguguuuugcgacaug

SEQ ID NO: 585463 - RNA, 19 nt, Homo sapiens
  misc_RNA (1)...(19): siRNA sense strand
ggaggacuaugcccauggu

SEQ ID NO: 585464 - RNA, 19 nt, Homo sapiens
  misc_RNA (1)...(19): siRNA sense strand
agaauccuguggacaccua

SEQ ID NO: 585465 - RNA, 19 nt, Homo sapiens
  misc_RNA (1)...(19): siRNA sense strand
ccagcuccuuggccucuuu

SEQ ID NO: 585466 - RNA, 19 nt, Homo sapiens
  misc_RNA (1)...(19): siRNA sense strand
guacaggaacugccacuac

SEQ ID NO: 585467 - RNA, 19 nt, Homo sapiens
  misc_RNA (1)...(19): siRNA sense strand
ggacuaugcccaugguuuu

SEQ ID NO: 585468 - RNA, 19 nt, Homo sapiens
  misc_RNA (1)...(19): siRNA sense strand
ccacagcggcagugucuuc

SEQ ID NO: 585469 - RNA, 19 nt, Homo sapiens
  misc_RNA (1)...(19): siRNA sense strand
ggagggacugggaggacua

SEQ ID NO: 585470 - RNA, 19 nt, Homo sapiens
  misc_RNA (1)...(19): siRNA sense strand
gaucccaggcgcucgcuau

SEQ ID NO: 585471 - RNA, 19 nt, Homo sapiens
  misc_RNA (1)...(19): siRNA sense strand
ucggugcccuucacggaaa

SEQ ID NO: 585472 - RNA, 19 nt, Homo sapiens
  misc_RNA (1)...(19): siRNA sense strand
cuacagguuccuccucuau

SEQ ID NO: 585473 - RNA, 19 nt, Homo sapiens
  misc_RNA (1)...(19): siRNA sense strand
cagcggcagugucuucucu

SEQ ID NO: 585474 - RNA, 19 nt, Homo sapiens
  misc_RNA (1)...(19): siRNA sense strand
acagguuccuccucuaugg

SEQ ID NO: 585475 - RNA, 19 nt, Homo sapiens
  misc_RNA (1)...(19): siRNA sense strand
gggcggacagcuucaaagu

SEQ ID NO: 585476 - RNA, 19 nt, Homo sapiens
  misc_RNA (1)...(19): siRNA sense strand
gcauggauggacagacaga

SEQ ID NO: 585477 - RNA, 19 nt, Homo sapiens
  misc_RNA (1)...(19): siRNA sense strand
ccacuacgccaaccucaac

SEQ ID NO: 585478 - RNA, 19 nt, Homo sapiens
  misc_RNA (1)...(19): siRNA sense strand
ugacacaggcaggugacua

SEQ ID NO: 585479 - RNA, 19 nt, Homo sapiens
  misc_RNA (1)...(19): siRNA sense strand
ggauggacagacagacuuc

SEQ ID NO: 585480 - RNA, 19 nt, Homo sapiens
  misc_RNA (1)...(19): siRNA sense strand
aagcugagaccaagaaacu

SEQ ID NO: 585481 - RNA, 19 nt, Homo sapiens
  misc_RNA (1)...(19): siRNA sense strand
ccagcaccaucuuccucaa

SEQ ID NO: 585482 - RNA, 19 nt, Homo sapiens
  misc_RNA (1)...(19): siRNA sense strand
ccuacagguuccuccucua

SEQ ID NO: 585483 - RNA, 19 nt, Homo sapiens
  misc_RNA (1)...(19): siRNA sense strand
ugucuucucugcccgugau

SEQ ID NO: 585484 - RNA, 19 nt, Homo sapiens
  misc_RNA (1)...(19): siRNA sense strand
ccaacuacaccgccacagu

SEQ ID NO: 585485 - RNA, 19 nt, Homo sapiens
  misc_RNA (1)...(19): siRNA sense strand
ugacgugaccaccaguuca

SEQ ID NO: 585486 - RNA, 19 nt, Homo sapiens
  misc_RNA (1)...(19): siRNA sense strand
uuugcgacauggagacuga

SEQ ID NO: 585487 - RNA, 19 nt, Homo sapiens
  misc_RNA (1)...(19): siRNA sense strand
ugacggucccacacaguug

SEQ ID NO: 585488 - RNA, 19 nt, Homo sapiens
  misc_RNA (1)...(19): siRNA sense strand
gcuucaaagucuccuacca

SEQ ID NO: 585489 - RNA, 19 nt, Homo sapiens
  misc_RNA (1)...(19): siRNA sense strand
gaaaugaagcugagaccaa

SEQ ID NO: 585490 - RNA, 19 nt, Homo sapiens
  misc_RNA (1)...(19): siRNA sense strand
gcggacagcuucaaagucu

SEQ ID NO: 585491 - RNA, 19 nt, Homo sapiens
  misc_RNA (1)...(19): siRNA sense strand
gaacuugaccgagggauuc

SEQ ID NO: 585492 - RNA, 19 nt, Homo sapiens
  misc_RNA (1)...(19): siRNA sense strand
gcugagaccaagaaacuuu

SEQ ID NO: 585493 - RNA, 19 nt, Homo sapiens
  misc_RNA (1)...(19): siRNA sense strand
caggagggaucacaucuca

SEQ ID NO: 585494 - RNA, 19 nt, Homo sapiens
  misc_RNA (1)...(19): siRNA sense strand
ggagcacaguggaccauca

SEQ ID NO: 585495 - RNA, 19 nt, Homo sapiens
  misc_RNA (1)...(19): siRNA sense strand
cagccaaggucaacuggau

SEQ ID NO: 585496 - RNA, 19 nt, Homo sapiens
  misc_RNA (1)...(19): siRNA sense strand
guacuaccgccuccacuug

SEQ ID NO: 585497 - RNA, 19 nt, Homo sapiens
  misc_RNA (1)...(19): siRNA sense strand
ccgcauggauggacagaca

SEQ ID NO: 585498 - RNA, 19 nt, Homo sapiens
  misc_RNA (1)...(19): siRNA sense strand
cccaacagcuugcucaucu

SEQ ID NO: 585499 - RNA, 19 nt, Homo sapiens
  misc_RNA (1)...(19): siRNA sense strand
gaacguguuuugcgacaug

SEQ ID NO: 585500 - RNA, 19 nt, Homo sapiens
  misc_RNA (1)...(19): siRNA sense strand
ggaggacuaugcccauggu

SEQ ID NO: 585501 - RNA, 19 nt, Homo sapiens
  misc_RNA (1)...(19): siRNA sense strand
agaauccuguggacaccua

SEQ ID NO: 585502 - RNA, 19 nt, Homo sapiens
  misc_RNA (1)...(19): siRNA sense strand
ccagcuccuuggccucuuu

SEQ ID NO: 585503 - RNA, 19 nt, Homo sapiens
  misc_RNA (1)...(19): siRNA sense strand
guacaggaacugccacuac

SEQ ID NO: 585504 - RNA, 19 nt, Homo sapiens
  misc_RNA (1)...(19): siRNA sense strand
ggacuaugcccaugguuuu

SEQ ID NO: 585505 - RNA, 19 nt, Homo sapiens
  misc_RNA (1)...(19): siRNA sense strand
ccacagcggcagugucuuc

SEQ ID NO: 585506 - RNA, 19 nt, Homo sapiens
  misc_RNA (1)...(19): siRNA sense strand
ggagggacugggaggacua

SEQ ID NO: 585507 - RNA, 19 nt, Homo sapiens
  misc_RNA (1)...(19): siRNA sense strand
gaucccaggcgcucgcuau

SEQ ID NO: 585508 - RNA, 19 nt, Homo sapiens
  misc_RNA (1)...(19): siRNA sense strand
ucggugcccuucacggaaa

SEQ ID NO: 585509 - RNA, 19 nt, Homo sapiens
  misc_RNA (1)...(19): siRNA sense strand
cuacagguuccuccucuau

SEQ ID NO: 585510 - RNA, 19 nt, Homo sapiens
  misc_RNA (1)...(19): siRNA sense strand
cagcggcagugucuucucu

SEQ ID NO: 585511 - RNA, 19 nt, Homo sapiens
  misc_RNA (1)...(19): siRNA sense strand
acagguuccuccucuaugg

SEQ ID NO: 585512 - RNA, 19 nt, Homo sapiens
  misc_RNA (1)...(19): siRNA sense strand
gggcggacagcuucaaagu

SEQ ID NO: 585513 - RNA, 19 nt, Homo sapiens
  misc_RNA (1)...(19): siRNA sense strand
gcauggauggacagacaga

SEQ ID NO: 585514 - RNA, 19 nt, Homo sapiens
  misc_RNA (1)...(19): siRNA sense strand
ccacuacgccaaccucaac

SEQ ID NO: 585515 - RNA, 19 nt, Homo sapiens
  misc_RNA (1)...(19): siRNA sense strand
ugacacaggcaggugacua

SEQ ID NO: 585516 - RNA, 19 nt, Homo sapiens
  misc_RNA (1)...(19): siRNA sense strand
ggauggacagacagacuuc

SEQ ID NO: 585517 - RNA, 19 nt, Homo sapiens
  misc_RNA (1)...(19): siRNA sense strand
aagcugagaccaagaaacu

SEQ ID NO: 585518 - RNA, 19 nt, Homo sapiens
  misc_RNA (1)...(19): siRNA sense strand
ccagcaccaucuuccucaa

SEQ ID NO: 585519 - RNA, 19 nt, Homo sapiens
  misc_RNA (1)...(19): siRNA sense strand
ugucuucucugcccgugau

SEQ ID NO: 585520 - RNA, 19 nt, Homo sapiens
  misc_RNA (1)...(19): siRNA sense strand
ccuacagguuccuccucua

SEQ ID NO: 585521 - RNA, 19 nt, Homo sapiens
  misc_RNA (1)...(19): siRNA sense strand
ccaacuacaccgccacagu

SEQ ID NO: 585522 - RNA, 19 nt, Homo sapiens
  misc_RNA (1)...(19): siRNA sense strand
gcuucaaagucuccuacca

SEQ ID NO: 585523 - RNA, 19 nt, Homo sapiens
  misc_RNA (1)...(19): siRNA sense strand
ugacgugaccaccaguuca

SEQ ID NO: 585524 - RNA, 19 nt, Homo sapiens
  misc_RNA (1)...(19): siRNA sense strand
uuugcgacauggagacuga

SEQ ID NO: 585525 - RNA, 19 nt, Homo sapiens
  misc_RNA (1)...(19): siRNA sense strand
ugacggucccacacaguug

SEQ ID NO: 585526 - RNA, 19 nt, Homo sapiens
  misc_RNA (1)...(19): siRNA sense strand
gaaggcagcuaaucaguga

SEQ ID NO: 585527 - RNA, 19 nt, Homo sapiens
  misc_RNA (1)...(19): siRNA sense strand
ggaaagaguuuaauuguac

SEQ ID NO: 585528 - RNA, 19 nt, Homo sapiens
  misc_RNA (1)...(19): siRNA sense strand
ggagguggcuguacugaaa

SEQ ID NO: 585529 - RNA, 19 nt, Homo sapiens
  misc_RNA (1)...(19): siRNA sense strand
gaacucaacuggucuuucu

SEQ ID NO: 585530 - RNA, 19 nt, Homo sapiens
  misc_RNA (1)...(19): siRNA sense strand
ccaguggacuuuaguagua

SEQ ID NO: 585531 - RNA, 19 nt, Homo sapiens
  misc_RNA (1)...(19): siRNA sense strand
gaugaugaauguacucaaa

SEQ ID NO: 585532 - RNA, 19 nt, Homo sapiens
  misc_RNA (1)...(19): siRNA sense strand
gcuaaucagugaccacgua

SEQ ID NO: 585533 - RNA, 19 nt, Homo sapiens
  misc_RNA (1)...(19): siRNA sense strand
ucucaaagaugaugaaugu

SEQ ID NO: 585534 - RNA, 19 nt, Homo sapiens
  misc_RNA (1)...(19): siRNA sense strand
guacucagauccuccuuug

SEQ ID NO: 585535 - RNA, 19 nt, Homo sapiens
  misc_RNA (1)...(19): siRNA sense strand
ggucaaagaguuauagauu

SEQ ID NO: 585536 - RNA, 19 nt, Homo sapiens
  misc_RNA (1)...(19): siRNA sense strand
ugaagcaguuucucaauau

SEQ ID NO: 585537 - RNA, 19 nt, Homo sapiens
  misc_RNA (1)...(19): siRNA sense strand
caaguaaaccugccuguau

SEQ ID NO: 585538 - RNA, 19 nt, Homo sapiens
  misc_RNA (1)...(19): siRNA sense strand
ugaagcagcugcacaaugg

SEQ ID NO: 585539 - RNA, 19 nt, Homo sapiens
  misc_RNA (1)...(19): siRNA sense strand
gaaauucucacugacauga

SEQ ID NO: 585540 - RNA, 19 nt, Homo sapiens
  misc_RNA (1)...(19): siRNA sense strand
gcauauaucagacacaaga

SEQ ID NO: 585541 - RNA, 19 nt, Homo sapiens
  misc_RNA (1)...(19): siRNA sense strand
gaaaggaaacagagcaugu

SEQ ID NO: 585542 - RNA, 19 nt, Homo sapiens
  misc_RNA (1)...(19): siRNA sense strand
gcaguuaacacucaaggaa

SEQ ID NO: 585543 - RNA, 19 nt, Homo sapiens
  misc_RNA (1)...(19): siRNA sense strand
gugaaccacugacaacuga

SEQ ID NO: 585544 - RNA, 19 nt, Homo sapiens
  misc_RNA (1)...(19): siRNA sense strand
ucacugacaugaaguaugg

SEQ ID NO: 585545 - RNA, 19 nt, Homo sapiens
  misc_RNA (1)...(19): siRNA sense strand
aaacucauuuggcugcaua

SEQ ID NO: 585546 - RNA, 19 nt, Homo sapiens
  misc_RNA (1)...(19): siRNA sense strand
guucagagauuaggcuuga

SEQ ID NO: 585547 - RNA, 19 nt, Homo sapiens
  misc_RNA (1)...(19): siRNA sense strand
ggaccacacuuucugucuu

SEQ ID NO: 585548 - RNA, 19 nt, Homo sapiens
  misc_RNA (1)...(19): siRNA sense strand
gcagugcccuagaaucugu

SEQ ID NO: 585549 - RNA, 19 nt, Homo sapiens
  misc_RNA (1)...(19): siRNA sense strand
ugaauguacucaaacagaa

SEQ ID NO: 585550 - RNA, 19 nt, Homo sapiens
  misc_RNA (1)...(19): siRNA sense strand
gaccacacuuucugucuug

SEQ ID NO: 585551 - RNA, 19 nt, Homo sapiens
  misc_RNA (1)...(19): siRNA sense strand
ggcuguggauuauacaaua

SEQ ID NO: 585552 - RNA, 19 nt, Homo sapiens
  misc_RNA (1)...(19): siRNA sense strand
ggacaccuuuggucaguuc

SEQ ID NO: 585553 - RNA, 19 nt, Homo sapiens
  misc_RNA (1)...(19): siRNA sense strand
gaaagcauucucaaagaug

SEQ ID NO: 585554 - RNA, 19 nt, Homo sapiens
  misc_RNA (1)...(19): siRNA sense strand
gaagcaguuucucaauaug

SEQ ID NO: 585555 - RNA, 19 nt, Homo sapiens
  misc_RNA (1)...(19): siRNA sense strand
gucagaaguucaauuaaug

SEQ ID NO: 585556 - RNA, 19 nt, Homo sapiens
  misc_RNA (1)...(19): siRNA sense strand
gcugaaggccacaucauuu

SEQ ID NO: 585557 - RNA, 19 nt, Homo sapiens
  misc_RNA (1)...(19): siRNA sense strand
ggucacacaucccauuuua

SEQ ID NO: 585558 - RNA, 19 nt, Homo sapiens
  misc_RNA (1)...(19): siRNA sense strand
ccaccacugucauuagauu

SEQ ID NO: 585559 - RNA, 19 nt, Homo sapiens
  misc_RNA (1)...(19): siRNA sense strand
gaucuuguccugugccaaa

SEQ ID NO: 585560 - RNA, 19 nt, Homo sapiens
  misc_RNA (1)...(19): siRNA sense strand
aagcacacgucguccauuu

SEQ ID NO: 585561 - RNA, 19 nt, Homo sapiens
  misc_RNA (1)...(19): siRNA sense strand
ggcucaauauguccuaaua

SEQ ID NO: 585562 - RNA, 19 nt, Homo sapiens
  misc_RNA (1)...(19): siRNA sense strand
gugucaagcuucagugauu

SEQ ID NO: 585563 - RNA, 19 nt, Homo sapiens
  misc_RNA (1)...(19): siRNA sense strand
guagagacagccaauuuga

SEQ ID NO: 585564 - RNA, 19 nt, Homo sapiens
  misc_RNA (1)...(19): siRNA sense strand
cuucagugauuguggcuua

SEQ ID NO: 585565 - RNA, 19 nt, Homo sapiens
  misc_RNA (1)...(19): siRNA sense strand
aaagcugccuuccacauga

SEQ ID NO: 585566 - RNA, 19 nt, Homo sapiens
  misc_RNA (1)...(19): siRNA sense strand
gcuaagaagccaucauugu

SEQ ID NO: 585567 - RNA, 19 nt, Homo sapiens
  misc_RNA (1)...(19): siRNA sense strand
guugcuaacuggccagauu

SEQ ID NO: 585568 - RNA, 19 nt, Homo sapiens
  misc_RNA (1)...(19): siRNA sense strand
ggaaacagagcaugucagu

SEQ ID NO: 585569 - RNA, 19 nt, Homo sapiens
  misc_RNA (1)...(19): siRNA sense strand
aagaagccaucauugugua

SEQ ID NO: 585570 - RNA, 19 nt, Homo sapiens
  misc_RNA (1)...(19): siRNA sense strand
cacaauggcuuuggagguu

SEQ ID NO: 585571 - RNA, 19 nt, Homo sapiens
  misc_RNA (1)...(19): siRNA sense strand
ccucagcucugcucaguca

SEQ ID NO: 585572 - RNA, 19 nt, Homo sapiens
  misc_RNA (1)...(19): siRNA sense strand
gucaaagaguuauagauuc

SEQ ID NO: 585573 - RNA, 19 nt, Homo sapiens
  misc_RNA (1)...(19): siRNA sense strand
aaagcauucucaaagauga

SEQ ID NO: 585574 - RNA, 19 nt, Homo sapiens
  misc_RNA (1)...(19): siRNA sense strand
ucauuuggcugcauauauc

SEQ ID NO: 585575 - RNA, 19 nt, Homo sapiens
  misc_RNA (1)...(19): siRNA sense strand
aguuauagauuccacugua

SEQ ID NO: 585576 - RNA, 19 nt, Homo sapiens
  misc_RNA (1)...(19): siRNA sense strand
ccagcaaccugaccuugga

SEQ ID NO: 585577 - RNA, 19 nt, Homo sapiens
  misc_RNA (1)...(19): siRNA sense strand
gaacaugauggaggugaaa

SEQ ID NO: 585578 - RNA, 19 nt, Homo sapiens
  misc_RNA (1)...(19): siRNA sense strand
caacgacccagaaagcauu

SEQ ID NO: 585579 - RNA, 19 nt, Homo sapiens
  misc_RNA (1)...(19): siRNA sense strand
gcaugucagugcuuugauc

SEQ ID NO: 585580 - RNA, 19 nt, Homo sapiens
  misc_RNA (1)...(19): siRNA sense strand
agagacagccaauuugauu

SEQ ID NO: 585581 - RNA, 19 nt, Homo sapiens
  misc_RNA (1)...(19): siRNA sense strand
gcacacgucguccauuugu

SEQ ID NO: 585582 - RNA, 19 nt, Homo sapiens
  misc_RNA (1)...(19): siRNA sense strand
ccacugucauuagauuaaa

SEQ ID NO: 585583 - RNA, 19 nt, Homo sapiens
  misc_RNA (1)...(19): siRNA sense strand
guuauagauuccacuguau

SEQ ID NO: 585584 - RNA, 19 nt, Homo sapiens
  misc_RNA (1)...(19): siRNA sense strand
ccuguaugcucaccagaaa

SEQ ID NO: 585585 - RNA, 19 nt, Homo sapiens
  misc_RNA (1)...(19): siRNA sense strand
caaagaugaugaauguacu

SEQ ID NO: 585586 - RNA, 19 nt, Homo sapiens
  misc_RNA (1)...(19): siRNA sense strand
ggccagauuugcuuucaca

SEQ ID NO: 585587 - RNA, 19 nt, Homo sapiens
  misc_RNA (1)...(19): siRNA sense strand
uaagaagccaucauugugu

SEQ ID NO: 585588 - RNA, 19 nt, Homo sapiens
  misc_RNA (1)...(19): siRNA sense strand
gagacagccaauuugauuu

SEQ ID NO: 585589 - RNA, 19 nt, Homo sapiens
  misc_RNA (1)...(19): siRNA sense strand
gauccugacagccuccaua

SEQ ID NO: 585590 - RNA, 19 nt, Homo sapiens
  misc_RNA (1)...(19): siRNA sense strand
caugaaguauggacaccuu

SEQ ID NO: 585591 - RNA, 19 nt, Homo sapiens
  misc_RNA (1)...(19): siRNA sense strand
gaaccacugacaacugaga

SEQ ID NO: 585592 - RNA, 19 nt, Homo sapiens
  misc_RNA (1)...(19): siRNA sense strand
cuaagaagccaucauugug

SEQ ID NO: 585593 - RNA, 19 nt, Homo sapiens
  misc_RNA (1)...(19): siRNA sense strand
agaaucaugugucaagcuu

SEQ ID NO: 585594 - RNA, 19 nt, Homo sapiens
  misc_RNA (1)...(19): siRNA sense strand
cauacagaaucauguguca

SEQ ID NO: 585595 - RNA, 19 nt, Homo sapiens
  misc_RNA (1)...(19): siRNA sense strand
acaauggcuuuggagguua

SEQ ID NO: 585596 - RNA, 19 nt, Homo sapiens
  misc_RNA (1)...(19): siRNA sense strand
uuuggugcguaguauauua

SEQ ID NO: 585597 - RNA, 19 nt, Homo sapiens
  misc_RNA (1)...(19): siRNA sense strand
aaguaaaccugccuguaug

SEQ ID NO: 585598 - RNA, 19 nt, Homo sapiens
  misc_RNA (1)...(19): siRNA sense strand
caaagcugccuuccacaug

SEQ ID NO: 585599 - RNA, 19 nt, Homo sapiens
  misc_RNA (1)...(19): siRNA sense strand
guuguuggcucuuuagaac

SEQ ID NO: 585600 - RNA, 19 nt, Homo sapiens
  misc_RNA (1)...(19): siRNA sense strand
gcucugcucagucaccuuu

SEQ ID NO: 585601 - RNA, 19 nt, Homo sapiens
  misc_RNA (1)...(19): siRNA sense strand
ucaaagaguuauagauucc

SEQ ID NO: 585602 - RNA, 19 nt, Homo sapiens
  misc_RNA (1)...(19): siRNA sense strand
aaucaugugucaagcuuca

SEQ ID NO: 585603 - RNA, 19 nt, Homo sapiens
  misc_RNA (1)...(19): siRNA sense strand
gaccugugguugucgaauc

SEQ ID NO: 585604 - RNA, 19 nt, Homo sapiens
  misc_RNA (1)...(19): siRNA sense strand
ugaugaauguacucaaaca

SEQ ID NO: 585605 - RNA, 19 nt, Homo sapiens
  misc_RNA (1)...(19): siRNA sense strand
ucaaagaugaugaauguac

SEQ ID NO: 585606 - RNA, 19 nt, Homo sapiens
  misc_RNA (1)...(19): siRNA sense strand
ggaaccaugggcuuuguug

SEQ ID NO: 585607 - RNA, 19 nt, Homo sapiens
  misc_RNA (1)...(19): siRNA sense strand
ccuaauaguuauggaagug

SEQ ID NO: 585608 - RNA, 19 nt, Homo sapiens
  misc_RNA (1)...(19): siRNA sense strand
uaccugggauacucauuga

SEQ ID NO: 585609 - RNA, 19 nt, Homo sapiens
  misc_RNA (1)...(19): siRNA sense strand
gaaucccaguggacuuuag

SEQ ID NO: 585610 - RNA, 19 nt, Homo sapiens
  misc_RNA (1)...(19): siRNA sense strand
acucagauccuccuuuguu

SEQ ID NO: 585611 - RNA, 19 nt, Homo sapiens
  misc_RNA (1)...(19): siRNA sense strand
gcugcaaccugauugaaaa

SEQ ID NO: 585612 - RNA, 19 nt, Homo sapiens
  misc_RNA (1)...(19): siRNA sense strand
acucaacuggucuuucuua

SEQ ID NO: 585613 - RNA, 19 nt, Homo sapiens
  misc_RNA (1)...(19): siRNA sense strand
caguguggcuguggauuau

SEQ ID NO: 585614 - RNA, 19 nt, Homo sapiens
  misc_RNA (1)...(19): siRNA sense strand
uaacuggccagauuugcuu

SEQ ID NO: 585615 - RNA, 19 nt, Homo sapiens
  misc_RNA (1)...(19): siRNA sense strand
gcccuagaaucuguuguug

SEQ ID NO: 585616 - RNA, 19 nt, Homo sapiens
  misc_RNA (1)...(19): siRNA sense strand
agacagaauuggagugacu

SEQ ID NO: 585617 - RNA, 19 nt, Homo sapiens
  misc_RNA (1)...(19): siRNA sense strand
aagcuaagaagccaucauu

SEQ ID NO: 585618 - RNA, 19 nt, Homo sapiens
  misc_RNA (1)...(19): siRNA sense strand
caucaguuaucucaagucu

SEQ ID NO: 585619 - RNA, 19 nt, Homo sapiens
  misc_RNA (1)...(19): siRNA sense strand
ggagguuacguguguacaa

SEQ ID NO: 585620 - RNA, 19 nt, Homo sapiens
  misc_RNA (1)...(19): siRNA sense strand
gcuguggauuauacaauag

SEQ ID NO: 585621 - RNA, 19 nt, Homo sapiens
  misc_RNA (1)...(19): siRNA sense strand
gcagauucucccuguguug

SEQ ID NO: 585622 - RNA, 19 nt, Homo sapiens
  misc_RNA (1)...(19): siRNA sense strand
gacacaagacucacaacga

SEQ ID NO: 585623 - RNA, 19 nt, Homo sapiens
  misc_RNA (1)...(19): siRNA sense strand
aguuauacauccaucuuug

SEQ ID NO: 585624 - RNA, 19 nt, Homo sapiens
  misc_RNA (1)...(19): siRNA sense strand
gauucucccuguguugcua

SEQ ID NO: 585625 - RNA, 19 nt, Homo sapiens
  misc_RNA (1)...(19): siRNA sense strand
ucaaggaaccaugggcuuu

SEQ ID NO: 585626 - RNA, 19 nt, Homo sapiens
  misc_RNA (1)...(19): siRNA sense strand
gaaggcagcuaaucaguga

SEQ ID NO: 585627 - RNA, 19 nt, Homo sapiens
  misc_RNA (1)...(19): siRNA sense strand
ggaaagaguuuaauuguac

SEQ ID NO: 585628 - RNA, 19 nt, Homo sapiens
  misc_RNA (1)...(19): siRNA sense strand
ggagguggcuguacugaaa

SEQ ID NO: 585629 - RNA, 19 nt, Homo sapiens
  misc_RNA (1)...(19): siRNA sense strand
gaacucaacuggucuuucu

SEQ ID NO: 585630 - RNA, 19 nt, Homo sapiens
  misc_RNA (1)...(19): siRNA sense strand
ccaguggacuuuaguagua

SEQ ID NO: 585631 - RNA, 19 nt, Homo sapiens
  misc_RNA (1)...(19): siRNA sense strand
gaugaugaauguacucaaa

SEQ ID NO: 585632 - RNA, 19 nt, Homo sapiens
  misc_RNA (1)...(19): siRNA sense strand
gcuaaucagugaccacgua

SEQ ID NO: 585633 - RNA, 19 nt, Homo sapiens
  misc_RNA (1)...(19): siRNA sense strand
ucucaaagaugaugaaugu

SEQ ID NO: 585634 - RNA, 19 nt, Homo sapiens
  misc_RNA (1)...(19): siRNA sense strand
guacucagauccuccuuug

SEQ ID NO: 585635 - RNA, 19 nt, Homo sapiens
  misc_RNA (1)...(19): siRNA sense strand
ggucaaagaguuauagauu

SEQ ID NO: 585636 - RNA, 19 nt, Homo sapiens
  misc_RNA (1)...(19): siRNA sense strand
ugaagcaguuucucaauau

SEQ ID NO: 585637 - RNA, 19 nt, Homo sapiens
  misc_RNA (1)...(19): siRNA sense strand
caaguaaaccugccuguau

SEQ ID NO: 585638 - RNA, 19 nt, Homo sapiens
  misc_RNA (1)...(19): siRNA sense strand
ugaagcagcugcacaaugg

SEQ ID NO: 585639 - RNA, 19 nt, Homo sapiens
  misc_RNA (1)...(19): siRNA sense strand
gaaauucucacugacauga

SEQ ID NO: 585640 - RNA, 19 nt, Homo sapiens
  misc_RNA (1)...(19): siRNA sense strand
gcauauaucagacacaaga

SEQ ID NO: 585641 - RNA, 19 nt, Homo sapiens
  misc_RNA (1)...(19): siRNA sense strand
gaaaggaaacagagcaugu

SEQ ID NO: 585642 - RNA, 19 nt, Homo sapiens
  misc_RNA (1)...(19): siRNA sense strand
gcaguuaacacucaaggaa

SEQ ID NO: 585643 - RNA, 19 nt, Homo sapiens
  misc_RNA (1)...(19): siRNA sense strand
gugaaccacugacaacuga

SEQ ID NO: 585644 - RNA, 19 nt, Homo sapiens
  misc_RNA (1)...(19): siRNA sense strand
ucacugacaugaaguaugg

SEQ ID NO: 585645 - RNA, 19 nt, Homo sapiens
  misc_RNA (1)...(19): siRNA sense strand
aaacucauuuggcugcaua

SEQ ID NO: 585646 - RNA, 19 nt, Homo sapiens
  misc_RNA (1)...(19): siRNA sense strand
guucagagauuaggcuuga

SEQ ID NO: 585647 - RNA, 19 nt, Homo sapiens
  misc_RNA (1)...(19): siRNA sense strand
ggaccacacuuucugucuu

SEQ ID NO: 585648 - RNA, 19 nt, Homo sapiens
  misc_RNA (1)...(19): siRNA sense strand
gcagugcccuagaaucugu

SEQ ID NO: 585649 - RNA, 19 nt, Homo sapiens
  misc_RNA (1)...(19): siRNA sense strand
ugaauguacucaaacagaa

SEQ ID NO: 585650 - RNA, 19 nt, Homo sapiens
  misc_RNA (1)...(19): siRNA sense strand
gaccacacuuucugucuug

SEQ ID NO: 585651 - RNA, 19 nt, Homo sapiens
  misc_RNA (1)...(19): siRNA sense strand
ggcuguggauuauacaaua

SEQ ID NO: 585652 - RNA, 19 nt, Homo sapiens
  misc_RNA (1)...(19): siRNA sense strand
ggacaccuuuggucaguuc

SEQ ID NO: 585653 - RNA, 19 nt, Homo sapiens
  misc_RNA (1)...(19): siRNA sense strand
gaaagcauucucaaagaug

SEQ ID NO: 585654 - RNA, 19 nt, Homo sapiens
  misc_RNA (1)...(19): siRNA sense strand
gaagcaguuucucaauaug

SEQ ID NO: 585655 - RNA, 19 nt, Homo sapiens
  misc_RNA (1)...(19): siRNA sense strand
gucagaaguucaauuaaug

SEQ ID NO: 585656 - RNA, 19 nt, Homo sapiens
  misc_RNA (1)...(19): siRNA sense strand
gcugaaggccacaucauuu

SEQ ID NO: 585657 - RNA, 19 nt, Homo sapiens
  misc_RNA (1)...(19): siRNA sense strand
ggucacacaucccauuuua

SEQ ID NO: 585658 - RNA, 19 nt, Homo sapiens
  misc_RNA (1)...(19): siRNA sense strand
ccaccacugucauuagauu

SEQ ID NO: 585659 - RNA, 19 nt, Homo sapiens
  misc_RNA (1)...(19): siRNA sense strand
gaucuuguccugugccaaa

SEQ ID NO: 585660 - RNA, 19 nt, Homo sapiens
  misc_RNA (1)...(19): siRNA sense strand
aagcacacgucguccauuu

SEQ ID NO: 585661 - RNA, 19 nt, Homo sapiens
  misc_RNA (1)...(19): siRNA sense strand
ggcucaauauguccuaaua

SEQ ID NO: 585662 - RNA, 19 nt, Homo sapiens
  misc_RNA (1)...(19): siRNA sense strand
gugucaagcuucagugauu

SEQ ID NO: 585663 - RNA, 19 nt, Homo sapiens
  misc_RNA (1)...(19): siRNA sense strand
guagagacagccaauuuga

SEQ ID NO: 585664 - RNA, 19 nt, Homo sapiens
  misc_RNA (1)...(19): siRNA sense strand
cuucagugauuguggcuua

SEQ ID NO: 585665 - RNA, 19 nt, Homo sapiens
  misc_RNA (1)...(19): siRNA sense strand
aaagcugccuuccacauga

SEQ ID NO: 585666 - RNA, 19 nt, Homo sapiens
  misc_RNA (1)...(19): siRNA sense strand
gcuaagaagccaucauugu

SEQ ID NO: 585667 - RNA, 19 nt, Homo sapiens
  misc_RNA (1)...(19): siRNA sense strand
guugcuaacuggccagauu

SEQ ID NO: 585668 - RNA, 19 nt, Homo sapiens
  misc_RNA (1)...(19): siRNA sense strand
ggaaacagagcaugucagu

SEQ ID NO: 585669 - RNA, 19 nt, Homo sapiens
  misc_RNA (1)...(19): siRNA sense strand
aagaagccaucauugugua

SEQ ID NO: 585670 - RNA, 19 nt, Homo sapiens
  misc_RNA (1)...(19): siRNA sense strand
cacaauggcuuuggagguu

SEQ ID NO: 585671 - RNA, 19 nt, Homo sapiens
  misc_RNA (1)...(19): siRNA sense strand
ccucagcucugcucaguca

SEQ ID NO: 585672 - RNA, 19 nt, Homo sapiens
  misc_RNA (1)...(19): siRNA sense strand
gucaaagaguuauagauuc

SEQ ID NO: 585673 - RNA, 19 nt, Homo sapiens
  misc_RNA (1)...(19): siRNA sense strand
aaagcauucucaaagauga

SEQ ID NO: 585674 - RNA, 19 nt, Homo sapiens
  misc_RNA (1)...(19): siRNA sense strand
ucauuuggcugcauauauc

SEQ ID NO: 585675 - RNA, 19 nt, Homo sapiens
  misc_RNA (1)...(19): siRNA sense strand
aguuauagauuccacugua

SEQ ID NO: 585676 - RNA, 19 nt, Homo sapiens
  misc_RNA (1)...(19): siRNA sense strand
ccagcaaccugaccuugga

SEQ ID NO: 585677 - RNA, 19 nt, Homo sapiens
  misc_RNA (1)...(19): siRNA sense strand
gaacaugauggaggugaaa

SEQ ID NO: 585678 - RNA, 19 nt, Homo sapiens
  misc_RNA (1)...(19): siRNA sense strand
caacgacccagaaagcauu

SEQ ID NO: 585679 - RNA, 19 nt, Homo sapiens
  misc_RNA (1)...(19): siRNA sense strand
gcaugucagugcuuugauc

SEQ ID NO: 585680 - RNA, 19 nt, Homo sapiens
  misc_RNA (1)...(19): siRNA sense strand
agagacagccaauuugauu

SEQ ID NO: 585681 - RNA, 19 nt, Homo sapiens
  misc_RNA (1)...(19): siRNA sense strand
gcacacgucguccauuugu

SEQ ID NO: 585682 - RNA, 19 nt, Homo sapiens
  misc_RNA (1)...(19): siRNA sense strand
ccacugucauuagauuaaa

SEQ ID NO: 585683 - RNA, 19 nt, Homo sapiens
  misc_RNA (1)...(19): siRNA sense strand
guuauagauuccacuguau

SEQ ID NO: 585684 - RNA, 19 nt, Homo sapiens
  misc_RNA (1)...(19): siRNA sense strand
ccuguaugcucaccagaaa

SEQ ID NO: 585685 - RNA, 19 nt, Homo sapiens
  misc_RNA (1)...(19): siRNA sense strand
caaagaugaugaauguacu

SEQ ID NO: 585686 - RNA, 19 nt, Homo sapiens
  misc_RNA (1)...(19): siRNA sense strand
ggccagauuugcuuucaca

SEQ ID NO: 585687 - RNA, 19 nt, Homo sapiens
  misc_RNA (1)...(19): siRNA sense strand
uaagaagccaucauugugu

SEQ ID NO: 585688 - RNA, 19 nt, Homo sapiens
  misc_RNA (1)...(19): siRNA sense strand
gagacagccaauuugauuu

SEQ ID NO: 585689 - RNA, 19 nt, Homo sapiens
  misc_RNA (1)...(19): siRNA sense strand
gauccugacagccuccaua

SEQ ID NO: 585690 - RNA, 19 nt, Homo sapiens
  misc_RNA (1)...(19): siRNA sense strand
caugaaguauggacaccuu

SEQ ID NO: 585691 - RNA, 19 nt, Homo sapiens
  misc_RNA (1)...(19): siRNA sense strand
gaaccacugacaacugaga

SEQ ID NO: 585692 - RNA, 19 nt, Homo sapiens
  misc_RNA (1)...(19): siRNA sense strand
cuaagaagccaucauugug

SEQ ID NO: 585693 - RNA, 19 nt, Homo sapiens
  misc_RNA (1)...(19): siRNA sense strand
agaaucaugugucaagcuu

SEQ ID NO: 585694 - RNA, 19 nt, Homo sapiens
  misc_RNA (1)...(19): siRNA sense strand
cauacagaaucauguguca

SEQ ID NO: 585695 - RNA, 19 nt, Homo sapiens
  misc_RNA (1)...(19): siRNA sense strand
acaauggcuuuggagguua

SEQ ID NO: 585696 - RNA, 19 nt, Homo sapiens
  misc_RNA (1)...(19): siRNA sense strand
uuuggugcguaguauauua

SEQ ID NO: 585697 - RNA, 19 nt, Homo sapiens
  misc_RNA (1)...(19): siRNA sense strand
aaguaaaccugccuguaug

SEQ ID NO: 585698 - RNA, 19 nt, Homo sapiens
  misc_RNA (1)...(19): siRNA sense strand
caaagcugccuuccacaug

SEQ ID NO: 585699 - RNA, 19 nt, Homo sapiens
  misc_RNA (1)...(19): siRNA sense strand
guuguuggcucuuuagaac

SEQ ID NO: 585700 - RNA, 19 nt, Homo sapiens
  misc_RNA (1)...(19): siRNA sense strand
gcucugcucagucaccuuu

SEQ ID NO: 585701 - RNA, 19 nt, Homo sapiens
  misc_RNA (1)...(19): siRNA sense strand
ucaaagaguuauagauucc

SEQ ID NO: 585702 - RNA, 19 nt, Homo sapiens
  misc_RNA (1)...(19): siRNA sense strand
aaucaugugucaagcuuca

SEQ ID NO: 585703 - RNA, 19 nt, Homo sapiens
  misc_RNA (1)...(19): siRNA sense strand
gaccugugguugucgaauc

SEQ ID NO: 585704 - RNA, 19 nt, Homo sapiens
  misc_RNA (1)...(19): siRNA sense strand
ugaugaauguacucaaaca

SEQ ID NO: 585705 - RNA, 19 nt, Homo sapiens
  misc_RNA (1)...(19): siRNA sense strand
ucaaagaugaugaauguac

SEQ ID NO: 585706 - RNA, 19 nt, Homo sapiens
  misc_RNA (1)...(19): siRNA sense strand
ggaaccaugggcuuuguug

SEQ ID NO: 585707 - RNA, 19 nt, Homo sapiens
  misc_RNA (1)...(19): siRNA sense strand
ccuaauaguuauggaagug

SEQ ID NO: 585708 - RNA, 19 nt, Homo sapiens
  misc_RNA (1)...(19): siRNA sense strand
uaccugggauacucauuga

SEQ ID NO: 585709 - RNA, 19 nt, Homo sapiens
  misc_RNA (1)...(19): siRNA sense strand
gaaucccaguggacuuuag

SEQ ID NO: 585710 - RNA, 19 nt, Homo sapiens
  misc_RNA (1)...(19): siRNA sense strand
acucagauccuccuuuguu

SEQ ID NO: 585711 - RNA, 19 nt, Homo sapiens
  misc_RNA (1)...(19): siRNA sense strand
gcugcaaccugauugaaaa

SEQ ID NO: 585712 - RNA, 19 nt, Homo sapiens
  misc_RNA (1)...(19): siRNA sense strand
acucaacuggucuuucuua

SEQ ID NO: 585713 - RNA, 19 nt, Homo sapiens
  misc_RNA (1)...(19): siRNA sense strand
caguguggcuguggauuau

SEQ ID NO: 585714 - RNA, 19 nt, Homo sapiens
  misc_RNA (1)...(19): siRNA sense strand
uaacuggccagauuugcuu

SEQ ID NO: 585715 - RNA, 19 nt, Homo sapiens
  misc_RNA (1)...(19): siRNA sense strand
gcccuagaaucuguuguug

SEQ ID NO: 585716 - RNA, 19 nt, Homo sapiens
  misc_RNA (1)...(19): siRNA sense strand
agacagaauuggagugacu

SEQ ID NO: 585717 - RNA, 19 nt, Homo sapiens
  misc_RNA (1)...(19): siRNA sense strand
aagcuaagaagccaucauu

SEQ ID NO: 585718 - RNA, 19 nt, Homo sapiens
  misc_RNA (1)...(19): siRNA sense strand
caucaguuaucucaagucu

SEQ ID NO: 585719 - RNA, 19 nt, Homo sapiens
  misc_RNA (1)...(19): siRNA sense strand
ggagguuacguguguacaa

SEQ ID NO: 585720 - RNA, 19 nt, Homo sapiens
  misc_RNA (1)...(19): siRNA sense strand
gcuguggauuauacaauag

SEQ ID NO: 585721 - RNA, 19 nt, Homo sapiens
  misc_RNA (1)...(19): siRNA sense strand
gcagauucucccuguguug

SEQ ID NO: 585722 - RNA, 19 nt, Homo sapiens
  misc_RNA (1)...(19): siRNA sense strand
gacacaagacucacaacga

SEQ ID NO: 585723 - RNA, 19 nt, Homo sapiens
  misc_RNA (1)...(19): siRNA sense strand
aguuauacauccaucuuug

SEQ ID NO: 585724 - RNA, 19 nt, Homo sapiens
  misc_RNA (1)...(19): siRNA sense strand
gauucucccuguguugcua

SEQ ID NO: 585725 - RNA, 19 nt, Homo sapiens
  misc_RNA (1)...(19): siRNA sense strand
ucaaggaaccaugggcuuu

SEQ ID NO: 585726 - RNA, 19 nt, Homo sapiens
  misc_RNA (1)...(19): siRNA sense strand
gaaagaauaugaucaacuc

SEQ ID NO: 585727 - RNA, 19 nt, Homo sapiens
  misc_RNA (1)...(19): siRNA sense strand
gaaagaacacucugaacuu

SEQ ID NO: 585728 - RNA, 19 nt, Homo sapiens
  misc_RNA (1)...(19): siRNA sense strand
cagcagaccugaugccuau

SEQ ID NO: 585729 - RNA, 19 nt, Homo sapiens
  misc_RNA (1)...(19): siRNA sense strand
ugagagaaguaaggaaaua

SEQ ID NO: 585730 - RNA, 19 nt, Homo sapiens
  misc_RNA (1)...(19): siRNA sense strand
ccucagagauggcagaaga

SEQ ID NO: 585731 - RNA, 19 nt, Homo sapiens
  misc_RNA (1)...(19): siRNA sense strand
gaaaagccaugguaaagau

SEQ ID NO: 585732 - RNA, 19 nt, Homo sapiens
  misc_RNA (1)...(19): siRNA sense strand
aaaugaagaugcagucaga

SEQ ID NO: 585733 - RNA, 19 nt, Homo sapiens
  misc_RNA (1)...(19): siRNA sense strand
aaagaacacucugaacuuc

SEQ ID NO: 585734 - RNA, 19 nt, Homo sapiens
  misc_RNA (1)...(19): siRNA sense strand
agaaagaggcaacaagaaa

SEQ ID NO: 585735 - RNA, 19 nt, Homo sapiens
  misc_RNA (1)...(19): siRNA sense strand
caaacaaagguguacuuaa

SEQ ID NO: 585736 - RNA, 19 nt, Homo sapiens
  misc_RNA (1)...(19): siRNA sense strand
gaagaugcagucagagaga

SEQ ID NO: 585737 - RNA, 19 nt, Homo sapiens
  misc_RNA (1)...(19): siRNA sense strand
ugguaaagaugaagaaugu

SEQ ID NO: 585738 - RNA, 19 nt, Homo sapiens
  misc_RNA (1)...(19): siRNA sense strand
gaaauauuccucaguucau

SEQ ID NO: 585739 - RNA, 19 nt, Homo sapiens
  misc_RNA (1)...(19): siRNA sense strand
aaagaacguucaaacaaag

SEQ ID NO: 585740 - RNA, 19 nt, Homo sapiens
  misc_RNA (1)...(19): siRNA sense strand
uuaaucuucugccuacuuu

SEQ ID NO: 585741 - RNA, 19 nt, Homo sapiens
  misc_RNA (1)...(19): siRNA sense strand
ucaaacaaagguguacuua

SEQ ID NO: 585742 - RNA, 19 nt, Homo sapiens
  misc_RNA (1)...(19): siRNA sense strand
gcaguggcaaccuuucuuu

SEQ ID NO: 585743 - RNA, 19 nt, Homo sapiens
  misc_RNA (1)...(19): siRNA sense strand
guggcaaccuuucuuuaug

SEQ ID NO: 585744 - RNA, 19 nt, Homo sapiens
  misc_RNA (1)...(19): siRNA sense strand
gaucaacuccugaaagaac

SEQ ID NO: 585745 - RNA, 19 nt, Homo sapiens
  misc_RNA (1)...(19): siRNA sense strand
guaaagaugaagaaugugu

SEQ ID NO: 585746 - RNA, 19 nt, Homo sapiens
  misc_RNA (1)...(19): siRNA sense strand
gagaaguaaggaaauauuc

SEQ ID NO: 585747 - RNA, 19 nt, Homo sapiens
  misc_RNA (1)...(19): siRNA sense strand
caaaagaacguucaaacaa

SEQ ID NO: 585748 - RNA, 19 nt, Homo sapiens
  misc_RNA (1)...(19): siRNA sense strand
acacacagaugaaacuuuu

SEQ ID NO: 585749 - RNA, 19 nt, Homo sapiens
  misc_RNA (1)...(19): siRNA sense strand
gggguaaaauugcaacuuu

SEQ ID NO: 585750 - RNA, 19 nt, Homo sapiens
  misc_RNA (1)...(19): siRNA sense strand
gaaagaggcaacaagaaaa

SEQ ID NO: 585751 - RNA, 19 nt, Homo sapiens
  misc_RNA (1)...(19): siRNA sense strand
gaacacacacagaugaaac

SEQ ID NO: 585752 - RNA, 19 nt, Homo sapiens
  misc_RNA (1)...(19): siRNA sense strand
gcagaccugaugccuauga

SEQ ID NO: 585753 - RNA, 19 nt, Homo sapiens
  misc_RNA (1)...(19): siRNA sense strand
cuucagaugcccuuucuaa

SEQ ID NO: 585754 - RNA, 19 nt, Homo sapiens
  misc_RNA (1)...(19): siRNA sense strand
guguugagacgucugguua

SEQ ID NO: 585755 - RNA, 19 nt, Homo sapiens
  misc_RNA (1)...(19): siRNA sense strand
ucaggaucguuuagaaaga

SEQ ID NO: 585756 - RNA, 19 nt, Homo sapiens
  misc_RNA (1)...(19): siRNA sense strand
gaacuucaggaucguuuag

SEQ ID NO: 585757 - RNA, 19 nt, Homo sapiens
  misc_RNA (1)...(19): siRNA sense strand
gaagaccaggagaaacuga

SEQ ID NO: 585758 - RNA, 19 nt, Homo sapiens
  misc_RNA (1)...(19): siRNA sense strand
ugaagaauguguuuuggaa

SEQ ID NO: 585759 - RNA, 19 nt, Homo sapiens
  misc_RNA (1)...(19): siRNA sense strand
ugguuacgcuuauuacuca

SEQ ID NO: 585760 - RNA, 19 nt, Homo sapiens
  misc_RNA (1)...(19): siRNA sense strand
augaucaacuccugaaaga

SEQ ID NO: 585761 - RNA, 19 nt, Homo sapiens
  misc_RNA (1)...(19): siRNA sense strand
gagagaaguaaggaaauau

SEQ ID NO: 585762 - RNA, 19 nt, Homo sapiens
  misc_RNA (1)...(19): siRNA sense strand
uuagaaagaggcaacaaga

SEQ ID NO: 585763 - RNA, 19 nt, Homo sapiens
  misc_RNA (1)...(19): siRNA sense strand
gggcugcaguggcaaccuu

SEQ ID NO: 585764 - RNA, 19 nt, Homo sapiens
  misc_RNA (1)...(19): siRNA sense strand
ugaaagaacacucugaacu

SEQ ID NO: 585765 - RNA, 19 nt, Homo sapiens
  misc_RNA (1)...(19): siRNA sense strand
guucauaccauugagaaga

SEQ ID NO: 585766 - RNA, 19 nt, Homo sapiens
  misc_RNA (1)...(19): siRNA sense strand
uaugaacacacacagauga

SEQ ID NO: 585767 - RNA, 19 nt, Homo sapiens
  misc_RNA (1)...(19): siRNA sense strand
gaccugaugccuaugaaca

SEQ ID NO: 585768 - RNA, 19 nt, Homo sapiens
  misc_RNA (1)...(19): siRNA sense strand
gcaaaagaacguucaaaca

SEQ ID NO: 585769 - RNA, 19 nt, Homo sapiens
  misc_RNA (1)...(19): siRNA sense strand
cgucugguuacgcuuauua

SEQ ID NO: 585770 - RNA, 19 nt, Homo sapiens
  misc_RNA (1)...(19): siRNA sense strand
agacgucugguuacgcuua

SEQ ID NO: 585771 - RNA, 19 nt, Homo sapiens
  misc_RNA (1)...(19): siRNA sense strand
gaugugauggaaaugaaga

SEQ ID NO: 585772 - RNA, 19 nt, Homo sapiens
  misc_RNA (1)...(19): siRNA sense strand
uagaaagaggcaacaagaa

SEQ ID NO: 585773 - RNA, 19 nt, Homo sapiens
  misc_RNA (1)...(19): siRNA sense strand
aggcuuuccuuaccauuau

SEQ ID NO: 585774 - RNA, 19 nt, Homo sapiens
  misc_RNA (1)...(19): siRNA sense strand
ugauggaaaugaagaugca

SEQ ID NO: 585775 - RNA, 19 nt, Homo sapiens
  misc_RNA (1)...(19): siRNA sense strand
uuacucaacuggcaaaaga

SEQ ID NO: 585776 - RNA, 19 nt, Homo sapiens
  misc_RNA (1)...(19): siRNA sense strand
uagaagaccaggagaaacu

SEQ ID NO: 585777 - RNA, 19 nt, Homo sapiens
  misc_RNA (1)...(19): siRNA sense strand
ggaaaugaagaugcaguca

SEQ ID NO: 585778 - RNA, 19 nt, Homo sapiens
  misc_RNA (1)...(19): siRNA sense strand
aggagaaacugaaaacuga

SEQ ID NO: 585779 - RNA, 19 nt, Homo sapiens
  misc_RNA (1)...(19): siRNA sense strand
cagagauggcagaagauuu

SEQ ID NO: 585780 - RNA, 19 nt, Homo sapiens
  misc_RNA (1)...(19): siRNA sense strand
ucuagaugcugugagagaa

SEQ ID NO: 585781 - RNA, 19 nt, Homo sapiens
  misc_RNA (1)...(19): siRNA sense strand
caguggcaaccuuucuuua

SEQ ID NO: 585782 - RNA, 19 nt, Homo sapiens
  misc_RNA (1)...(19): siRNA sense strand
gacuucagaugcccuuucu

SEQ ID NO: 585783 - RNA, 19 nt, Homo sapiens
  misc_RNA (1)...(19): siRNA sense strand
ugugagagaaguaaggaaa

SEQ ID NO: 585784 - RNA, 19 nt, Homo sapiens
  misc_RNA (1)...(19): siRNA sense strand
uucaauacuuucuggauuc

SEQ ID NO: 585785 - RNA, 19 nt, Homo sapiens
  misc_RNA (1)...(19): siRNA sense strand
ccucaguucauaccauuga

SEQ ID NO: 585786 - RNA, 19 nt, Homo sapiens
  misc_RNA (1)...(19): siRNA sense strand
ucagagauggcagaagauu

SEQ ID NO: 585787 - RNA, 19 nt, Homo sapiens
  misc_RNA (1)...(19): siRNA sense strand
cgaaagaauaugaucaacu

SEQ ID NO: 585788 - RNA, 19 nt, Homo sapiens
  misc_RNA (1)...(19): siRNA sense strand
gacgucugguuacgcuuau

SEQ ID NO: 585789 - RNA, 19 nt, Homo sapiens
  misc_RNA (1)...(19): siRNA sense strand
ccugaaagaacacucugaa

SEQ ID NO: 585790 - RNA, 19 nt, Homo sapiens
  misc_RNA (1)...(19): siRNA sense strand
uuucuggauucucguuauu

SEQ ID NO: 585791 - RNA, 19 nt, Homo sapiens
  misc_RNA (1)...(19): siRNA sense strand
caggaucguuuagaaagag

SEQ ID NO: 585792 - RNA, 19 nt, Homo sapiens
  misc_RNA (1)...(19): siRNA sense strand
ccuaugaacacacacagau

SEQ ID NO: 585793 - RNA, 19 nt, Homo sapiens
  misc_RNA (1)...(19): siRNA sense strand
accauuaucauccuauuga

SEQ ID NO: 585794 - RNA, 19 nt, Homo sapiens
  misc_RNA (1)...(19): siRNA sense strand
cagaccugaugccuaugaa

SEQ ID NO: 585795 - RNA, 19 nt, Homo sapiens
  misc_RNA (1)...(19): siRNA sense strand
agagauggcagaagauuuu

SEQ ID NO: 585796 - RNA, 19 nt, Homo sapiens
  misc_RNA (1)...(19): siRNA sense strand
uggcaaccuuucuuuaugc

SEQ ID NO: 585797 - RNA, 19 nt, Homo sapiens
  misc_RNA (1)...(19): siRNA sense strand
ucaauacuuucuggauucu

SEQ ID NO: 585798 - RNA, 19 nt, Homo sapiens
  misc_RNA (1)...(19): siRNA sense strand
ggacucauuuuaaucuucu

SEQ ID NO: 585799 - RNA, 19 nt, Homo sapiens
  misc_RNA (1)...(19): siRNA sense strand
ugaacacacacagaugaaa

SEQ ID NO: 585800 - RNA, 19 nt, Homo sapiens
  misc_RNA (1)...(19): siRNA sense strand
aguagaagaccaggagaaa

SEQ ID NO: 585801 - RNA, 19 nt, Homo sapiens
  misc_RNA (1)...(19): siRNA sense strand
aaagccaugguaaagauga

SEQ ID NO: 585802 - RNA, 19 nt, Homo sapiens
  misc_RNA (1)...(19): siRNA sense strand
cuucaggaucguuuagaaa

SEQ ID NO: 585803 - RNA, 19 nt, Homo sapiens
  misc_RNA (1)...(19): siRNA sense strand
augaugugauggaaaugaa

SEQ ID NO: 585804 - RNA, 19 nt, Homo sapiens
  misc_RNA (1)...(19): siRNA sense strand
aaacugaauuaaggaagac

SEQ ID NO: 585805 - RNA, 19 nt, Homo sapiens
  misc_RNA (1)...(19): siRNA sense strand
acaaagagcuggaaaggua

SEQ ID NO: 585806 - RNA, 19 nt, Homo sapiens
  misc_RNA (1)...(19): siRNA sense strand
gaauauagcuaaccuugga

SEQ ID NO: 585807 - RNA, 19 nt, Homo sapiens
  misc_RNA (1)...(19): siRNA sense strand
gcugaagccugauaaauuu

SEQ ID NO: 585808 - RNA, 19 nt, Homo sapiens
  misc_RNA (1)...(19): siRNA sense strand
gaaauaggaugguuugaca

SEQ ID NO: 585809 - RNA, 19 nt, Homo sapiens
  misc_RNA (1)...(19): siRNA sense strand
acaaagaacuagcugcuua

SEQ ID NO: 585810 - RNA, 19 nt, Homo sapiens
  misc_RNA (1)...(19): siRNA sense strand
ccacaaauaugaaacaaga

SEQ ID NO: 585811 - RNA, 19 nt, Homo sapiens
  misc_RNA (1)...(19): siRNA sense strand
agagaugacugacaaauuu

SEQ ID NO: 585812 - RNA, 19 nt, Homo sapiens
  misc_RNA (1)...(19): siRNA sense strand
gacaugagcugguuugaug

SEQ ID NO: 585813 - RNA, 19 nt, Homo sapiens
  misc_RNA (1)...(19): siRNA sense strand
caacauacauccuuucauc

SEQ ID NO: 585814 - RNA, 19 nt, Homo sapiens
  misc_RNA (1)...(19): siRNA sense strand
gaacugguauuaucauauc

SEQ ID NO: 585815 - RNA, 19 nt, Homo sapiens
  misc_RNA (1)...(19): siRNA sense strand
ggaaaccgauggacuugaa

SEQ ID NO: 585816 - RNA, 19 nt, Homo sapiens
  misc_RNA (1)...(19): siRNA sense strand
cagcauaugugaucuuuga

SEQ ID NO: 585817 - RNA, 19 nt, Homo sapiens
  misc_RNA (1)...(19): siRNA sense strand
aaagaaagcugucaaagag

SEQ ID NO: 585818 - RNA, 19 nt, Homo sapiens
  misc_RNA (1)...(19): siRNA sense strand
ggaagcugcuggaaagauu

SEQ ID NO: 585819 - RNA, 19 nt, Homo sapiens
  misc_RNA (1)...(19): siRNA sense strand
ggccauagcucacggauca

SEQ ID NO: 585820 - RNA, 19 nt, Homo sapiens
  misc_RNA (1)...(19): siRNA sense strand
gguauugccuuccuguuaa

SEQ ID NO: 585821 - RNA, 19 nt, Homo sapiens
  misc_RNA (1)...(19): siRNA sense strand
gcaguuaacccuauugcua

SEQ ID NO: 585822 - RNA, 19 nt, Homo sapiens
  misc_RNA (1)...(19): siRNA sense strand
gaagagccuugauguggaa

SEQ ID NO: 585823 - RNA, 19 nt, Homo sapiens
  misc_RNA (1)...(19): siRNA sense strand
gauggaagcucacccuugu

SEQ ID NO: 585824 - RNA, 19 nt, Homo sapiens
  misc_RNA (1)...(19): siRNA sense strand
agccaaagcugccaacaua

SEQ ID NO: 585825 - RNA, 19 nt, Homo sapiens
  misc_RNA (1)...(19): siRNA sense strand
cagcagaagugcaacauau

SEQ ID NO: 585826 - RNA, 19 nt, Homo sapiens
  misc_RNA (1)...(19): siRNA sense strand
ggaaaugcaaugacaguuu

SEQ ID NO: 585827 - RNA, 19 nt, Homo sapiens
  misc_RNA (1)...(19): siRNA sense strand
gaagaaaugacuagauaug

SEQ ID NO: 585828 - RNA, 19 nt, Homo sapiens
  misc_RNA (1)...(19): siRNA sense strand
gaagaaaggccagacacua

SEQ ID NO: 585829 - RNA, 19 nt, Homo sapiens
  misc_RNA (1)...(19): siRNA sense strand
guucaaugauguucacuuu

SEQ ID NO: 585830 - RNA, 19 nt, Homo sapiens
  misc_RNA (1)...(19): siRNA sense strand
gcacuggccuucugguaug

SEQ ID NO: 585831 - RNA, 19 nt, Homo sapiens
  misc_RNA (1)...(19): siRNA sense strand
gauaguauuuggagagaug

SEQ ID NO: 585832 - RNA, 19 nt, Homo sapiens
  misc_RNA (1)...(19): siRNA sense strand
ggacaugccaguucauuug

SEQ ID NO: 585833 - RNA, 19 nt, Homo sapiens
  misc_RNA (1)...(19): siRNA sense strand
gaagccagauccagucaga

SEQ ID NO: 585834 - RNA, 19 nt, Homo sapiens
  misc_RNA (1)...(19): siRNA sense strand
gaaacaagagugggagaua

SEQ ID NO: 585835 - RNA, 19 nt, Homo sapiens
  misc_RNA (1)...(19): siRNA sense strand
caaagauacucucggcauu

SEQ ID NO: 585836 - RNA, 19 nt, Homo sapiens
  misc_RNA (1)...(19): siRNA sense strand
gagcuaacgucaagaucuu

SEQ ID NO: 585837 - RNA, 19 nt, Homo sapiens
  misc_RNA (1)...(19): siRNA sense strand
gcacaacgguccagcugau

SEQ ID NO: 585838 - RNA, 19 nt, Homo sapiens
  misc_RNA (1)...(19): siRNA sense strand
ccagaaugcagacuuaaua

SEQ ID NO: 585839 - RNA, 19 nt, Homo sapiens
  misc_RNA (1)...(19): siRNA sense strand
aaacaagagugggagauaa

SEQ ID NO: 585840 - RNA, 19 nt, Homo sapiens
  misc_RNA (1)...(19): siRNA sense strand
gaaaugcaaugacaguuuu

SEQ ID NO: 585841 - RNA, 19 nt, Homo sapiens
  misc_RNA (1)...(19): siRNA sense strand
gcacagaaaggcaucuauu

SEQ ID NO: 585842 - RNA, 19 nt, Homo sapiens
  misc_RNA (1)...(19): siRNA sense strand
uaaagaaagcugucaaaga

SEQ ID NO: 585843 - RNA, 19 nt, Homo sapiens
  misc_RNA (1)...(19): siRNA sense strand
cgacagaucaggaaaauua

SEQ ID NO: 585844 - RNA, 19 nt, Homo sapiens
  misc_RNA (1)...(19): siRNA sense strand
cauccagaaugcagacuua

SEQ ID NO: 585845 - RNA, 19 nt, Homo sapiens
  misc_RNA (1)...(19): siRNA sense strand
ccaaauggcuggaaaucuc

SEQ ID NO: 585846 - RNA, 19 nt, Homo sapiens
  misc_RNA (1)...(19): siRNA sense strand
gaaauguaaccauggauga

SEQ ID NO: 585847 - RNA, 19 nt, Homo sapiens
  misc_RNA (1)...(19): siRNA sense strand
ggccaacgccuaugaguuu

SEQ ID NO: 585848 - RNA, 19 nt, Homo sapiens
  misc_RNA (1)...(19): siRNA sense strand
ugacaagguuggaauguuc

SEQ ID NO: 585849 - RNA, 19 nt, Homo sapiens
  misc_RNA (1)...(19): siRNA sense strand
ggaauuuggaguucaauga

SEQ ID NO: 585850 - RNA, 19 nt, Homo sapiens
  misc_RNA (1)...(19): siRNA sense strand
ggaaagguaucagaaacau

SEQ ID NO: 585851 - RNA, 19 nt, Homo sapiens
  misc_RNA (1)...(19): siRNA sense strand
aagauacucucggcauuua

SEQ ID NO: 585852 - RNA, 19 nt, Homo sapiens
  misc_RNA (1)...(19): siRNA sense strand
gauccagucagaagaauuu

SEQ ID NO: 585853 - RNA, 19 nt, Homo sapiens
  misc_RNA (1)...(19): siRNA sense strand
uaaacuaucugagggaaau

SEQ ID NO: 585854 - RNA, 19 nt, Homo sapiens
  misc_RNA (1)...(19): siRNA sense strand
gcauaugugaucuuugaua

SEQ ID NO: 585855 - RNA, 19 nt, Homo sapiens
  misc_RNA (1)...(19): siRNA sense strand
gagagaugacugacaaauu

SEQ ID NO: 585856 - RNA, 19 nt, Homo sapiens
  misc_RNA (1)...(19): siRNA sense strand
gaaugcagacuuaauagug

SEQ ID NO: 585857 - RNA, 19 nt, Homo sapiens
  misc_RNA (1)...(19): siRNA sense strand
ccaagaagcccuggacaaa

SEQ ID NO: 585858 - RNA, 19 nt, Homo sapiens
  misc_RNA (1)...(19): siRNA sense strand
gauaaagaaagcugucaaa

SEQ ID NO: 585859 - RNA, 19 nt, Homo sapiens
  misc_RNA (1)...(19): siRNA sense strand
caaaaucagugaaggaauu

SEQ ID NO: 585860 - RNA, 19 nt, Homo sapiens
  misc_RNA (1)...(19): siRNA sense strand
ugacaccacugaacucaau

SEQ ID NO: 585861 - RNA, 19 nt, Homo sapiens
  misc_RNA (1)...(19): siRNA sense strand
gaagaagaaaugacuagau

SEQ ID NO: 585862 - RNA, 19 nt, Homo sapiens
  misc_RNA (1)...(19): siRNA sense strand
acagcgaacugaugaagaa

SEQ ID NO: 585863 - RNA, 19 nt, Homo sapiens
  misc_RNA (1)...(19): siRNA sense strand
ggguauugccuuccuguua

SEQ ID NO: 585864 - RNA, 19 nt, Homo sapiens
  misc_RNA (1)...(19): siRNA sense strand
gaacaaagagcuggaaagg

SEQ ID NO: 585865 - RNA, 19 nt, Homo sapiens
  misc_RNA (1)...(19): siRNA sense strand
aaacagaggauugcuauug

SEQ ID NO: 585866 - RNA, 19 nt, Homo sapiens
  misc_RNA (1)...(19): siRNA sense strand
gaugagggcacaauuaaca

SEQ ID NO: 585867 - RNA, 19 nt, Homo sapiens
  misc_RNA (1)...(19): siRNA sense strand
uaauagugguguuucagaa

SEQ ID NO: 585868 - RNA, 19 nt, Homo sapiens
  misc_RNA (1)...(19): siRNA sense strand
aaacaguacuggugcacuu

SEQ ID NO: 585869 - RNA, 19 nt, Homo sapiens
  misc_RNA (1)...(19): siRNA sense strand
ggaacaguaugugccauug

SEQ ID NO: 585870 - RNA, 19 nt, Homo sapiens
  misc_RNA (1)...(19): siRNA sense strand
gcaaaugugccaccagugu

SEQ ID NO: 585871 - RNA, 19 nt, Homo sapiens
  misc_RNA (1)...(19): siRNA sense strand
ggccgcaccugcauuguga

SEQ ID NO: 585872 - RNA, 19 nt, Homo sapiens
  misc_RNA (1)...(19): siRNA sense strand
uggauccacucuagucaua

SEQ ID NO: 585873 - RNA, 19 nt, Homo sapiens
  misc_RNA (1)...(19): siRNA sense strand
ugaaauuguuggcuggaaa

SEQ ID NO: 585874 - RNA, 19 nt, Homo sapiens
  misc_RNA (1)...(19): siRNA sense strand
agaacuagcugcuuaugca

SEQ ID NO: 585875 - RNA, 19 nt, Homo sapiens
  misc_RNA (1)...(19): siRNA sense strand
gaaggccgcaccugcauug

SEQ ID NO: 585876 - RNA, 19 nt, Homo sapiens
  misc_RNA (1)...(19): siRNA sense strand
gcagaagugcaacauauuc

SEQ ID NO: 585877 - RNA, 19 nt, Homo sapiens
  misc_RNA (1)...(19): siRNA sense strand
cagaauggcccuacuuugu

SEQ ID NO: 585878 - RNA, 19 nt, Homo sapiens
  misc_RNA (1)...(19): siRNA sense strand
ccaccaguguccuuucuga

SEQ ID NO: 585879 - RNA, 19 nt, Homo sapiens
  misc_RNA (1)...(19): siRNA sense strand
guuugaggauggaguaauu

SEQ ID NO: 585880 - RNA, 19 nt, Homo sapiens
  misc_RNA (1)...(19): siRNA sense strand
ugaagggccucaaccugaa

SEQ ID NO: 585881 - RNA, 19 nt, Homo sapiens
  misc_RNA (1)...(19): siRNA sense strand
ucaggacugugauagcuuu

SEQ ID NO: 585882 - RNA, 19 nt, Homo sapiens
  misc_RNA (1)...(19): siRNA sense strand
gaacucaauacgcggcuaa

SEQ ID NO: 585883 - RNA, 19 nt, Homo sapiens
  misc_RNA (1)...(19): siRNA sense strand
gaagucguguucaacuauc

SEQ ID NO: 585884 - RNA, 19 nt, Homo sapiens
  misc_RNA (1)...(19): siRNA sense strand
cuggaaagauugcaacaga

SEQ ID NO: 585885 - RNA, 19 nt, Homo sapiens
  misc_RNA (1)...(19): siRNA sense strand
ccgauggacuugaagcaaa

SEQ ID NO: 585886 - RNA, 19 nt, Homo sapiens
  misc_RNA (1)...(19): siRNA sense strand
gaaauuugacacccugguu

SEQ ID NO: 585887 - RNA, 19 nt, Homo sapiens
  misc_RNA (1)...(19): siRNA sense strand
guacaggcagcucuggaua

SEQ ID NO: 585888 - RNA, 19 nt, Homo sapiens
  misc_RNA (1)...(19): siRNA sense strand
gcgaacugaugaagaagga

SEQ ID NO: 585889 - RNA, 19 nt, Homo sapiens
  misc_RNA (1)...(19): siRNA sense strand
ugggaaagcuggcgagauc

SEQ ID NO: 585890 - RNA, 19 nt, Homo sapiens
  misc_RNA (1)...(19): siRNA sense strand
cuauuugacugcagcauug

SEQ ID NO: 585891 - RNA, 19 nt, Homo sapiens
  misc_RNA (1)...(19): siRNA sense strand
gauccacucuagucauauc

SEQ ID NO: 585892 - RNA, 19 nt, Homo sapiens
  misc_RNA (1)...(19): siRNA sense strand
gaagccugauaaauuugaa

SEQ ID NO: 585893 - RNA, 19 nt, Homo sapiens
  misc_RNA (1)...(19): siRNA sense strand
ucagagaucauagcgauuu

SEQ ID NO: 585894 - RNA, 19 nt, Homo sapiens
  misc_RNA (1)...(19): siRNA sense strand
ccacucuagucauaucaaa

SEQ ID NO: 585895 - RNA, 19 nt, Homo sapiens
  misc_RNA (1)...(19): siRNA sense strand
agaaaugacuagauaugca

SEQ ID NO: 585896 - RNA, 19 nt, Homo sapiens
  misc_RNA (1)...(19): siRNA sense strand
gaaaauauuaggacaguug

SEQ ID NO: 585897 - RNA, 19 nt, Homo sapiens
  misc_RNA (1)...(19): siRNA sense strand
uagcaguuguuccaauuau

SEQ ID NO: 585898 - RNA, 19 nt, Homo sapiens
  misc_RNA (1)...(19): siRNA sense strand
gcugcuaaauccaggcaaa

SEQ ID NO: 585899 - RNA, 19 nt, Homo sapiens
  misc_RNA (1)...(19): siRNA sense strand
cagguuggcuuuaauugca

SEQ ID NO: 585900 - RNA, 19 nt, Homo sapiens
  misc_RNA (1)...(19): siRNA sense strand
ccagaagacugcggucaau

SEQ ID NO: 585901 - RNA, 19 nt, Homo sapiens
  misc_RNA (1)...(19): siRNA sense strand
gcauauuacuacucaggau

SEQ ID NO: 585902 - RNA, 19 nt, Homo sapiens
  misc_RNA (1)...(19): siRNA sense strand
ggaaaugccaaaagagaua

SEQ ID NO: 585903 - RNA, 19 nt, Homo sapiens
  misc_RNA (1)...(19): siRNA sense strand
ccgagaauauugccuaugg

SEQ ID NO: 585904 - RNA, 19 nt, Homo sapiens
  misc_RNA (1)...(19): siRNA sense strand
caacagaggcaauagaaaa

SEQ ID NO: 585905 - RNA, 19 nt, Homo sapiens
  misc_RNA (1)...(19): siRNA sense strand
acaaagagcuggaaaggua

SEQ ID NO: 585906 - RNA, 19 nt, Homo sapiens
  misc_RNA (1)...(19): siRNA sense strand
gaauauagcuaaccuugga

SEQ ID NO: 585907 - RNA, 19 nt, Homo sapiens
  misc_RNA (1)...(19): siRNA sense strand
gcugaagccugauaaauuu

SEQ ID NO: 585908 - RNA, 19 nt, Homo sapiens
  misc_RNA (1)...(19): siRNA sense strand
gaaauaggaugguuugaca

SEQ ID NO: 585909 - RNA, 19 nt, Homo sapiens
  misc_RNA (1)...(19): siRNA sense strand
acaaagaacuagcugcuua

SEQ ID NO: 585910 - RNA, 19 nt, Homo sapiens
  misc_RNA (1)...(19): siRNA sense strand
ccacaaauaugaaacaaga

SEQ ID NO: 585911 - RNA, 19 nt, Homo sapiens
  misc_RNA (1)...(19): siRNA sense strand
agagaugacugacaaauuu

SEQ ID NO: 585912 - RNA, 19 nt, Homo sapiens
  misc_RNA (1)...(19): siRNA sense strand
gacaugagcugguuugaug

SEQ ID NO: 585913 - RNA, 19 nt, Homo sapiens
  misc_RNA (1)...(19): siRNA sense strand
caacauacauccuuucauc

SEQ ID NO: 585914 - RNA, 19 nt, Homo sapiens
  misc_RNA (1)...(19): siRNA sense strand
gaacugguauuaucauauc

SEQ ID NO: 585915 - RNA, 19 nt, Homo sapiens
  misc_RNA (1)...(19): siRNA sense strand
ggaaaccgauggacuugaa

SEQ ID NO: 585916 - RNA, 19 nt, Homo sapiens
  misc_RNA (1)...(19): siRNA sense strand
cagcauaugugaucuuuga

SEQ ID NO: 585917 - RNA, 19 nt, Homo sapiens
  misc_RNA (1)...(19): siRNA sense strand
aaagaaagcugucaaagag

SEQ ID NO: 585918 - RNA, 19 nt, Homo sapiens
  misc_RNA (1)...(19): siRNA sense strand
ggaagcugcuggaaagauu

SEQ ID NO: 585919 - RNA, 19 nt, Homo sapiens
  misc_RNA (1)...(19): siRNA sense strand
ggccauagcucacggauca

SEQ ID NO: 585920 - RNA, 19 nt, Homo sapiens
  misc_RNA (1)...(19): siRNA sense strand
gguauugccuuccuguuaa

SEQ ID NO: 585921 - RNA, 19 nt, Homo sapiens
  misc_RNA (1)...(19): siRNA sense strand
gcaguuaacccuauugcua

SEQ ID NO: 585922 - RNA, 19 nt, Homo sapiens
  misc_RNA (1)...(19): siRNA sense strand
gaagagccuugauguggaa

SEQ ID NO: 585923 - RNA, 19 nt, Homo sapiens
  misc_RNA (1)...(19): siRNA sense strand
gauggaagcucacccuugu

SEQ ID NO: 585924 - RNA, 19 nt, Homo sapiens
  misc_RNA (1)...(19): siRNA sense strand
agccaaagcugccaacaua

SEQ ID NO: 585925 - RNA, 19 nt, Homo sapiens
  misc_RNA (1)...(19): siRNA sense strand
cagcagaagugcaacauau

SEQ ID NO: 585926 - RNA, 19 nt, Homo sapiens
  misc_RNA (1)...(19): siRNA sense strand
ggaaaugcaaugacaguuu

SEQ ID NO: 585927 - RNA, 19 nt, Homo sapiens
  misc_RNA (1)...(19): siRNA sense strand
gaagaaaugacuagauaug

SEQ ID NO: 585928 - RNA, 19 nt, Homo sapiens
  misc_RNA (1)...(19): siRNA sense strand
gaagaaaggccagacacua

SEQ ID NO: 585929 - RNA, 19 nt, Homo sapiens
  misc_RNA (1)...(19): siRNA sense strand
guucaaugauguucacuuu

SEQ ID NO: 585930 - RNA, 19 nt, Homo sapiens
  misc_RNA (1)...(19): siRNA sense strand
gcacuggccuucugguaug

SEQ ID NO: 585931 - RNA, 19 nt, Homo sapiens
  misc_RNA (1)...(19): siRNA sense strand
gauaguauuuggagagaug

SEQ ID NO: 585932 - RNA, 19 nt, Homo sapiens
  misc_RNA (1)...(19): siRNA sense strand
ggacaugccaguucauuug

SEQ ID NO: 585933 - RNA, 19 nt, Homo sapiens
  misc_RNA (1)...(19): siRNA sense strand
gaagccagauccagucaga

SEQ ID NO: 585934 - RNA, 19 nt, Homo sapiens
  misc_RNA (1)...(19): siRNA sense strand
gaaacaagagugggagaua

SEQ ID NO: 585935 - RNA, 19 nt, Homo sapiens
  misc_RNA (1)...(19): siRNA sense strand
caaagauacucucggcauu

SEQ ID NO: 585936 - RNA, 19 nt, Homo sapiens
  misc_RNA (1)...(19): siRNA sense strand
gagcuaacgucaagaucuu

SEQ ID NO: 585937 - RNA, 19 nt, Homo sapiens
  misc_RNA (1)...(19): siRNA sense strand
gcacaacgguccagcugau

SEQ ID NO: 585938 - RNA, 19 nt, Homo sapiens
  misc_RNA (1)...(19): siRNA sense strand
ccagaaugcagacuuaaua

SEQ ID NO: 585939 - RNA, 19 nt, Homo sapiens
  misc_RNA (1)...(19): siRNA sense strand
aaacaagagugggagauaa

SEQ ID NO: 585940 - RNA, 19 nt, Homo sapiens
  misc_RNA (1)...(19): siRNA sense strand
gaaaugcaaugacaguuuu

SEQ ID NO: 585941 - RNA, 19 nt, Homo sapiens
  misc_RNA (1)...(19): siRNA sense strand
gcacagaaaggcaucuauu

SEQ ID NO: 585942 - RNA, 19 nt, Homo sapiens
  misc_RNA (1)...(19): siRNA sense strand
uaaagaaagcugucaaaga

SEQ ID NO: 585943 - RNA, 19 nt, Homo sapiens
  misc_RNA (1)...(19): siRNA sense strand
cgacagaucaggaaaauua

SEQ ID NO: 585944 - RNA, 19 nt, Homo sapiens
  misc_RNA (1)...(19): siRNA sense strand
cauccagaaugcagacuua

SEQ ID NO: 585945 - RNA, 19 nt, Homo sapiens
  misc_RNA (1)...(19): siRNA sense strand
ccaaauggcuggaaaucuc

SEQ ID NO: 585946 - RNA, 19 nt, Homo sapiens
  misc_RNA (1)...(19): siRNA sense strand
gaaauguaaccauggauga

SEQ ID NO: 585947 - RNA, 19 nt, Homo sapiens
  misc_RNA (1)...(19): siRNA sense strand
ggccaacgccuaugaguuu

SEQ ID NO: 585948 - RNA, 19 nt, Homo sapiens
  misc_RNA (1)...(19): siRNA sense strand
ugacaagguuggaauguuc

SEQ ID NO: 585949 - RNA, 19 nt, Homo sapiens
  misc_RNA (1)...(19): siRNA sense strand
ggaauuuggaguucaauga

SEQ ID NO: 585950 - RNA, 19 nt, Homo sapiens
  misc_RNA (1)...(19): siRNA sense strand
ggaaagguaucagaaacau

SEQ ID NO: 585951 - RNA, 19 nt, Homo sapiens
  misc_RNA (1)...(19): siRNA sense strand
aagauacucucggcauuua

SEQ ID NO: 585952 - RNA, 19 nt, Homo sapiens
  misc_RNA (1)...(19): siRNA sense strand
gauccagucagaagaauuu

SEQ ID NO: 585953 - RNA, 19 nt, Homo sapiens
  misc_RNA (1)...(19): siRNA sense strand
uaaacuaucugagggaaau

SEQ ID NO: 585954 - RNA, 19 nt, Homo sapiens
  misc_RNA (1)...(19): siRNA sense strand
gcauaugugaucuuugaua

SEQ ID NO: 585955 - RNA, 19 nt, Homo sapiens
  misc_RNA (1)...(19): siRNA sense strand
gagagaugacugacaaauu

SEQ ID NO: 585956 - RNA, 19 nt, Homo sapiens
  misc_RNA (1)...(19): siRNA sense strand
gaaugcagacuuaauagug

SEQ ID NO: 585957 - RNA, 19 nt, Homo sapiens
  misc_RNA (1)...(19): siRNA sense strand
ccaagaagcccuggacaaa

SEQ ID NO: 585958 - RNA, 19 nt, Homo sapiens
  misc_RNA (1)...(19): siRNA sense strand
gauaaagaaagcugucaaa

SEQ ID NO: 585959 - RNA, 19 nt, Homo sapiens
  misc_RNA (1)...(19): siRNA sense strand
caaaaucagugaaggaauu

SEQ ID NO: 585960 - RNA, 19 nt, Homo sapiens
  misc_RNA (1)...(19): siRNA sense strand
ugacaccacugaacucaau

SEQ ID NO: 585961 - RNA, 19 nt, Homo sapiens
  misc_RNA (1)...(19): siRNA sense strand
gaagaagaaaugacuagau

SEQ ID NO: 585962 - RNA, 19 nt, Homo sapiens
  misc_RNA (1)...(19): siRNA sense strand
acagcgaacugaugaagaa

SEQ ID NO: 585963 - RNA, 19 nt, Homo sapiens
  misc_RNA (1)...(19): siRNA sense strand
ggguauugccuuccuguua

SEQ ID NO: 585964 - RNA, 19 nt, Homo sapiens
  misc_RNA (1)...(19): siRNA sense strand
gaacaaagagcuggaaagg

SEQ ID NO: 585965 - RNA, 19 nt, Homo sapiens
  misc_RNA (1)...(19): siRNA sense strand
aaacagaggauugcuauug

SEQ ID NO: 585966 - RNA, 19 nt, Homo sapiens
  misc_RNA (1)...(19): siRNA sense strand
gaugagggcacaauuaaca

SEQ ID NO: 585967 - RNA, 19 nt, Homo sapiens
  misc_RNA (1)...(19): siRNA sense strand
uaauagugguguuucagaa

SEQ ID NO: 585968 - RNA, 19 nt, Homo sapiens
  misc_RNA (1)...(19): siRNA sense strand
aaacaguacuggugcacuu

SEQ ID NO: 585969 - RNA, 19 nt, Homo sapiens
  misc_RNA (1)...(19): siRNA sense strand
ggaacaguaugugccauug

SEQ ID NO: 585970 - RNA, 19 nt, Homo sapiens
  misc_RNA (1)...(19): siRNA sense strand
gcaaaugugccaccagugu

SEQ ID NO: 585971 - RNA, 19 nt, Homo sapiens
  misc_RNA (1)...(19): siRNA sense strand
ggccgcaccugcauuguga

SEQ ID NO: 585972 - RNA, 19 nt, Homo sapiens
  misc_RNA (1)...(19): siRNA sense strand
uggauccacucuagucaua

SEQ ID NO: 585973 - RNA, 19 nt, Homo sapiens
  misc_RNA (1)...(19): siRNA sense strand
ugaaauuguuggcuggaaa

SEQ ID NO: 585974 - RNA, 19 nt, Homo sapiens
  misc_RNA (1)...(19): siRNA sense strand
agaacuagcugcuuaugca

SEQ ID NO: 585975 - RNA, 19 nt, Homo sapiens
  misc_RNA (1)...(19): siRNA sense strand
gaaggccgcaccugcauug

SEQ ID NO: 585976 - RNA, 19 nt, Homo sapiens
  misc_RNA (1)...(19): siRNA sense strand
gcagaagugcaacauauuc

SEQ ID NO: 585977 - RNA, 19 nt, Homo sapiens
  misc_RNA (1)...(19): siRNA sense strand
cagaauggcccuacuuugu

SEQ ID NO: 585978 - RNA, 19 nt, Homo sapiens
  misc_RNA (1)...(19): siRNA sense strand
ccaccaguguccuuucuga

SEQ ID NO: 585979 - RNA, 19 nt, Homo sapiens
  misc_RNA (1)...(19): siRNA sense strand
guuugaggauggaguaauu

SEQ ID NO: 585980 - RNA, 19 nt, Homo sapiens
  misc_RNA (1)...(19): siRNA sense strand
ugaagggccucaaccugaa

SEQ ID NO: 585981 - RNA, 19 nt, Homo sapiens
  misc_RNA (1)...(19): siRNA sense strand
ucaggacugugauagcuuu

SEQ ID NO: 585982 - RNA, 19 nt, Homo sapiens
  misc_RNA (1)...(19): siRNA sense strand
gaacucaauacgcggcuaa

SEQ ID NO: 585983 - RNA, 19 nt, Homo sapiens
  misc_RNA (1)...(19): siRNA sense strand
gaagucguguucaacuauc

SEQ ID NO: 585984 - RNA, 19 nt, Homo sapiens
  misc_RNA (1)...(19): siRNA sense strand
cuggaaagauugcaacaga

SEQ ID NO: 585985 - RNA, 19 nt, Homo sapiens
  misc_RNA (1)...(19): siRNA sense strand
ccgauggacuugaagcaaa

SEQ ID NO: 585986 - RNA, 19 nt, Homo sapiens
  misc_RNA (1)...(19): siRNA sense strand
gaaauuugacacccugguu

SEQ ID NO: 585987 - RNA, 19 nt, Homo sapiens
  misc_RNA (1)...(19): siRNA sense strand
guacaggcagcucuggaua

SEQ ID NO: 585988 - RNA, 19 nt, Homo sapiens
  misc_RNA (1)...(19): siRNA sense strand
gcgaacugaugaagaagga

SEQ ID NO: 585989 - RNA, 19 nt, Homo sapiens
  misc_RNA (1)...(19): siRNA sense strand
ugggaaagcuggcgagauc

SEQ ID NO: 585990 - RNA, 19 nt, Homo sapiens
  misc_RNA (1)...(19): siRNA sense strand
cuauuugacugcagcauug

SEQ ID NO: 585991 - RNA, 19 nt, Homo sapiens
  misc_RNA (1)...(19): siRNA sense strand
gauccacucuagucauauc

SEQ ID NO: 585992 - RNA, 19 nt, Homo sapiens
  misc_RNA (1)...(19): siRNA sense strand
gaagccugauaaauuugaa

SEQ ID NO: 585993 - RNA, 19 nt, Homo sapiens
  misc_RNA (1)...(19): siRNA sense strand
ucagagaucauagcgauuu

SEQ ID NO: 585994 - RNA, 19 nt, Homo sapiens
  misc_RNA (1)...(19): siRNA sense strand
ccacucuagucauaucaaa

SEQ ID NO: 585995 - RNA, 19 nt, Homo sapiens
  misc_RNA (1)...(19): siRNA sense strand
agaaaugacuagauaugca

SEQ ID NO: 585996 - RNA, 19 nt, Homo sapiens
  misc_RNA (1)...(19): siRNA sense strand
gaaaauauuaggacaguug

SEQ ID NO: 585997 - RNA, 19 nt, Homo sapiens
  misc_RNA (1)...(19): siRNA sense strand
uagcaguuguuccaauuau

SEQ ID NO: 585998 - RNA, 19 nt, Homo sapiens
  misc_RNA (1)...(19): siRNA sense strand
gcugcuaaauccaggcaaa

SEQ ID NO: 585999 - RNA, 19 nt, Homo sapiens
  misc_RNA (1)...(19): siRNA sense strand
cagguuggcuuuaauugca

SEQ ID NO: 586000 - RNA, 19 nt, Homo sapiens
  misc_RNA (1)...(19): siRNA sense strand
ccagaagacugcggucaau

SEQ ID NO: 586001 - RNA, 19 nt, Homo sapiens
  misc_RNA (1)...(19): siRNA sense strand
gcauauuacuacucaggau

SEQ ID NO: 586002 - RNA, 19 nt, Homo sapiens
  misc_RNA (1)...(19): siRNA sense strand
ggaaaugccaaaagagaua

SEQ ID NO: 586003 - RNA, 19 nt, Homo sapiens
  misc_RNA (1)...(19): siRNA sense strand
ccgagaauauugccuaugg

SEQ ID NO: 586004 - RNA, 19 nt, Homo sapiens
  misc_RNA (1)...(19): siRNA sense strand
caacagaggcaauagaaaa

SEQ ID NO: 586005 - RNA, 19 nt, Homo sapiens
  misc_RNA (1)...(19): siRNA sense strand
acaaagagcuggaaaggua

SEQ ID NO: 586006 - RNA, 19 nt, Homo sapiens
  misc_RNA (1)...(19): siRNA sense strand
gaauauagcuaaccuugga

SEQ ID NO: 586007 - RNA, 19 nt, Homo sapiens
  misc_RNA (1)...(19): siRNA sense strand
gcugaagccugauaaauuu

SEQ ID NO: 586008 - RNA, 19 nt, Homo sapiens
  misc_RNA (1)...(19): siRNA sense strand
gaaauaggaugguuugaca

SEQ ID NO: 586009 - RNA, 19 nt, Homo sapiens
  misc_RNA (1)...(19): siRNA sense strand
acaaagaacuagcugcuua

SEQ ID NO: 586010 - RNA, 19 nt, Homo sapiens
  misc_RNA (1)...(19): siRNA sense strand
ccacaaauaugaaacaaga

SEQ ID NO: 586011 - RNA, 19 nt, Homo sapiens
  misc_RNA (1)...(19): siRNA sense strand
agagaugacugacaaauuu

SEQ ID NO: 586012 - RNA, 19 nt, Homo sapiens
  misc_RNA (1)...(19): siRNA sense strand
gacaugagcugguuugaug

SEQ ID NO: 586013 - RNA, 19 nt, Homo sapiens
  misc_RNA (1)...(19): siRNA sense strand
caacauacauccuuucauc

SEQ ID NO: 586014 - RNA, 19 nt, Homo sapiens
  misc_RNA (1)...(19): siRNA sense strand
gaacugguauuaucauauc

SEQ ID NO: 586015 - RNA, 19 nt, Homo sapiens
  misc_RNA (1)...(19): siRNA sense strand
ggaaaccgauggacuugaa

SEQ ID NO: 586016 - RNA, 19 nt, Homo sapiens
  misc_RNA (1)...(19): siRNA sense strand
cagcauaugugaucuuuga

SEQ ID NO: 586017 - RNA, 19 nt, Homo sapiens
  misc_RNA (1)...(19): siRNA sense strand
aaagaaagcugucaaagag

SEQ ID NO: 586018 - RNA, 19 nt, Homo sapiens
  misc_RNA (1)...(19): siRNA sense strand
ggaagcugcuggaaagauu

SEQ ID NO: 586019 - RNA, 19 nt, Homo sapiens
  misc_RNA (1)...(19): siRNA sense strand
ggccauagcucacggauca

SEQ ID NO: 586020 - RNA, 19 nt, Homo sapiens
  misc_RNA (1)...(19): siRNA sense strand
gguauugccuuccuguuaa

SEQ ID NO: 586021 - RNA, 19 nt, Homo sapiens
  misc_RNA (1)...(19): siRNA sense strand
gcaguuaacccuauugcua

SEQ ID NO: 586022 - RNA, 19 nt, Homo sapiens
  misc_RNA (1)...(19): siRNA sense strand
gaagagccuugauguggaa

SEQ ID NO: 586023 - RNA, 19 nt, Homo sapiens
  misc_RNA (1)...(19): siRNA sense strand
gauggaagcucacccuugu

SEQ ID NO: 586024 - RNA, 19 nt, Homo sapiens
  misc_RNA (1)...(19): siRNA sense strand
agccaaagcugccaacaua

SEQ ID NO: 586025 - RNA, 19 nt, Homo sapiens
  misc_RNA (1)...(19): siRNA sense strand
cagcagaagugcaacauau

SEQ ID NO: 586026 - RNA, 19 nt, Homo sapiens
  misc_RNA (1)...(19): siRNA sense strand
ggaaaugcaaugacaguuu

SEQ ID NO: 586027 - RNA, 19 nt, Homo sapiens
  misc_RNA (1)...(19): siRNA sense strand
gaagaaaugacuagauaug

SEQ ID NO: 586028 - RNA, 19 nt, Homo sapiens
  misc_RNA (1)...(19): siRNA sense strand
gaagaaaggccagacacua

SEQ ID NO: 586029 - RNA, 19 nt, Homo sapiens
  misc_RNA (1)...(19): siRNA sense strand
guucaaugauguucacuuu

SEQ ID NO: 586030 - RNA, 19 nt, Homo sapiens
  misc_RNA (1)...(19): siRNA sense strand
gcacuggccuucugguaug

SEQ ID NO: 586031 - RNA, 19 nt, Homo sapiens
  misc_RNA (1)...(19): siRNA sense strand
gauaguauuuggagagaug

SEQ ID NO: 586032 - RNA, 19 nt, Homo sapiens
  misc_RNA (1)...(19): siRNA sense strand
ggacaugccaguucauuug

SEQ ID NO: 586033 - RNA, 19 nt, Homo sapiens
  misc_RNA (1)...(19): siRNA sense strand
gaagccagauccagucaga

SEQ ID NO: 586034 - RNA, 19 nt, Homo sapiens
  misc_RNA (1)...(19): siRNA sense strand
gaaacaagagugggagaua

SEQ ID NO: 586035 - RNA, 19 nt, Homo sapiens
  misc_RNA (1)...(19): siRNA sense strand
caaagauacucucggcauu

SEQ ID NO: 586036 - RNA, 19 nt, Homo sapiens
  misc_RNA (1)...(19): siRNA sense strand
gagcuaacgucaagaucuu

SEQ ID NO: 586037 - RNA, 19 nt, Homo sapiens
  misc_RNA (1)...(19): siRNA sense strand
gcacaacgguccagcugau

SEQ ID NO: 586038 - RNA, 19 nt, Homo sapiens
  misc_RNA (1)...(19): siRNA sense strand
ccagaaugcagacuuaaua

SEQ ID NO: 586039 - RNA, 19 nt, Homo sapiens
  misc_RNA (1)...(19): siRNA sense strand
aaacaagagugggagauaa

SEQ ID NO: 586040 - RNA, 19 nt, Homo sapiens
  misc_RNA (1)...(19): siRNA sense strand
gaaaugcaaugacaguuuu

SEQ ID NO: 586041 - RNA, 19 nt, Homo sapiens
  misc_RNA (1)...(19): siRNA sense strand
gcacagaaaggcaucuauu

SEQ ID NO: 586042 - RNA, 19 nt, Homo sapiens
  misc_RNA (1)...(19): siRNA sense strand
uaaagaaagcugucaaaga

SEQ ID NO: 586043 - RNA, 19 nt, Homo sapiens
  misc_RNA (1)...(19): siRNA sense strand
cgacagaucaggaaaauua

SEQ ID NO: 586044 - RNA, 19 nt, Homo sapiens
  misc_RNA (1)...(19): siRNA sense strand
cauccagaaugcagacuua

SEQ ID NO: 586045 - RNA, 19 nt, Homo sapiens
  misc_RNA (1)...(19): siRNA sense strand
ccaaauggcuggaaaucuc

SEQ ID NO: 586046 - RNA, 19 nt, Homo sapiens
  misc_RNA (1)...(19): siRNA sense strand
gaaauguaaccauggauga

SEQ ID NO: 586047 - RNA, 19 nt, Homo sapiens
  misc_RNA (1)...(19): siRNA sense strand
ggccaacgccuaugaguuu

SEQ ID NO: 586048 - RNA, 19 nt, Homo sapiens
  misc_RNA (1)...(19): siRNA sense strand
ugacaagguuggaauguuc

SEQ ID NO: 586049 - RNA, 19 nt, Homo sapiens
  misc_RNA (1)...(19): siRNA sense strand
ggaauuuggaguucaauga

SEQ ID NO: 586050 - RNA, 19 nt, Homo sapiens
  misc_RNA (1)...(19): siRNA sense strand
ggaaagguaucagaaacau

SEQ ID NO: 586051 - RNA, 19 nt, Homo sapiens
  misc_RNA (1)...(19): siRNA sense strand
aagauacucucggcauuua

SEQ ID NO: 586052 - RNA, 19 nt, Homo sapiens
  misc_RNA (1)...(19): siRNA sense strand
gauccagucagaagaauuu

SEQ ID NO: 586053 - RNA, 19 nt, Homo sapiens
  misc_RNA (1)...(19): siRNA sense strand
uaaacuaucugagggaaau

SEQ ID NO: 586054 - RNA, 19 nt, Homo sapiens
  misc_RNA (1)...(19): siRNA sense strand
gcauaugugaucuuugaua

SEQ ID NO: 586055 - RNA, 19 nt, Homo sapiens
  misc_RNA (1)...(19): siRNA sense strand
gagagaugacugacaaauu

SEQ ID NO: 586056 - RNA, 19 nt, Homo sapiens
  misc_RNA (1)...(19): siRNA sense strand
gaaugcagacuuaauagug

SEQ ID NO: 586057 - RNA, 19 nt, Homo sapiens
  misc_RNA (1)...(19): siRNA sense strand
ccaagaagcccuggacaaa

SEQ ID NO: 586058 - RNA, 19 nt, Homo sapiens
  misc_RNA (1)...(19): siRNA sense strand
gauaaagaaagcugucaaa

SEQ ID NO: 586059 - RNA, 19 nt, Homo sapiens
  misc_RNA (1)...(19): siRNA sense strand
caaaaucagugaaggaauu

SEQ ID NO: 586060 - RNA, 19 nt, Homo sapiens
  misc_RNA (1)...(19): siRNA sense strand
ugacaccacugaacucaau

SEQ ID NO: 586061 - RNA, 19 nt, Homo sapiens
  misc_RNA (1)...(19): siRNA sense strand
gaagaagaaaugacuagau

SEQ ID NO: 586062 - RNA, 19 nt, Homo sapiens
  misc_RNA (1)...(19): siRNA sense strand
acagcgaacugaugaagaa

SEQ ID NO: 586063 - RNA, 19 nt, Homo sapiens
  misc_RNA (1)...(19): siRNA sense strand
ggguauugccuuccuguua

SEQ ID NO: 586064 - RNA, 19 nt, Homo sapiens
  misc_RNA (1)...(19): siRNA sense strand
gaacaaagagcuggaaagg

SEQ ID NO: 586065 - RNA, 19 nt, Homo sapiens
  misc_RNA (1)...(19): siRNA sense strand
aaacagaggauugcuauug

SEQ ID NO: 586066 - RNA, 19 nt, Homo sapiens
  misc_RNA (1)...(19): siRNA sense strand
gaugagggcacaauuaaca

SEQ ID NO: 586067 - RNA, 19 nt, Homo sapiens
  misc_RNA (1)...(19): siRNA sense strand
uaauagugguguuucagaa

SEQ ID NO: 586068 - RNA, 19 nt, Homo sapiens
  misc_RNA (1)...(19): siRNA sense strand
aaacaguacuggugcacuu

SEQ ID NO: 586069 - RNA, 19 nt, Homo sapiens
  misc_RNA (1)...(19): siRNA sense strand
ggaacaguaugugccauug

SEQ ID NO: 586070 - RNA, 19 nt, Homo sapiens
  misc_RNA (1)...(19): siRNA sense strand
gcaaaugugccaccagugu

SEQ ID NO: 586071 - RNA, 19 nt, Homo sapiens
  misc_RNA (1)...(19): siRNA sense strand
ggccgcaccugcauuguga

SEQ ID NO: 586072 - RNA, 19 nt, Homo sapiens
  misc_RNA (1)...(19): siRNA sense strand
uggauccacucuagucaua

SEQ ID NO: 586073 - RNA, 19 nt, Homo sapiens
  misc_RNA (1)...(19): siRNA sense strand
ugaaauuguuggcuggaaa

SEQ ID NO: 586074 - RNA, 19 nt, Homo sapiens
  misc_RNA (1)...(19): siRNA sense strand
agaacuagcugcuuaugca

SEQ ID NO: 586075 - RNA, 19 nt, Homo sapiens
  misc_RNA (1)...(19): siRNA sense strand
gaaggccgcaccugcauug

SEQ ID NO: 586076 - RNA, 19 nt, Homo sapiens
  misc_RNA (1)...(19): siRNA sense strand
gcagaagugcaacauauuc

SEQ ID NO: 586077 - RNA, 19 nt, Homo sapiens
  misc_RNA (1)...(19): siRNA sense strand
cagaauggcccuacuuugu

SEQ ID NO: 586078 - RNA, 19 nt, Homo sapiens
  misc_RNA (1)...(19): siRNA sense strand
ccaccaguguccuuucuga

SEQ ID NO: 586079 - RNA, 19 nt, Homo sapiens
  misc_RNA (1)...(19): siRNA sense strand
guuugaggauggaguaauu

SEQ ID NO: 586080 - RNA, 19 nt, Homo sapiens
  misc_RNA (1)...(19): siRNA sense strand
ugaagggccucaaccugaa

SEQ ID NO: 586081 - RNA, 19 nt, Homo sapiens
  misc_RNA (1)...(19): siRNA sense strand
ucaggacugugauagcuuu

SEQ ID NO: 586082 - RNA, 19 nt, Homo sapiens
  misc_RNA (1)...(19): siRNA sense strand
gaacucaauacgcggcuaa

SEQ ID NO: 586083 - RNA, 19 nt, Homo sapiens
  misc_RNA (1)...(19): siRNA sense strand
gaagucguguucaacuauc

SEQ ID NO: 586084 - RNA, 19 nt, Homo sapiens
  misc_RNA (1)...(19): siRNA sense strand
cuggaaagauugcaacaga

SEQ ID NO: 586085 - RNA, 19 nt, Homo sapiens
  misc_RNA (1)...(19): siRNA sense strand
ccgauggacuugaagcaaa

SEQ ID NO: 586086 - RNA, 19 nt, Homo sapiens
  misc_RNA (1)...(19): siRNA sense strand
gaaauuugacacccugguu

SEQ ID NO: 586087 - RNA, 19 nt, Homo sapiens
  misc_RNA (1)...(19): siRNA sense strand
guacaggcagcucuggaua

SEQ ID NO: 586088 - RNA, 19 nt, Homo sapiens
  misc_RNA (1)...(19): siRNA sense strand
gcgaacugaugaagaagga

SEQ ID NO: 586089 - RNA, 19 nt, Homo sapiens
  misc_RNA (1)...(19): siRNA sense strand
ugggaaagcuggcgagauc

SEQ ID NO: 586090 - RNA, 19 nt, Homo sapiens
  misc_RNA (1)...(19): siRNA sense strand
cuauuugacugcagcauug

SEQ ID NO: 586091 - RNA, 19 nt, Homo sapiens
  misc_RNA (1)...(19): siRNA sense strand
gauccacucuagucauauc

SEQ ID NO: 586092 - RNA, 19 nt, Homo sapiens
  misc_RNA (1)...(19): siRNA sense strand
gaagccugauaaauuugaa

SEQ ID NO: 586093 - RNA, 19 nt, Homo sapiens
  misc_RNA (1)...(19): siRNA sense strand
ucagagaucauagcgauuu

SEQ ID NO: 586094 - RNA, 19 nt, Homo sapiens
  misc_RNA (1)...(19): siRNA sense strand
ccacucuagucauaucaaa

SEQ ID NO: 586095 - RNA, 19 nt, Homo sapiens
  misc_RNA (1)...(19): siRNA sense strand
agaaaugacuagauaugca

SEQ ID NO: 586096 - RNA, 19 nt, Homo sapiens
  misc_RNA (1)...(19): siRNA sense strand
gaaaauauuaggacaguug

SEQ ID NO: 586097 - RNA, 19 nt, Homo sapiens
  misc_RNA (1)...(19): siRNA sense strand
uagcaguuguuccaauuau

SEQ ID NO: 586098 - RNA, 19 nt, Homo sapiens
  misc_RNA (1)...(19): siRNA sense strand
gcugcuaaauccaggcaaa

SEQ ID NO: 586099 - RNA, 19 nt, Homo sapiens
  misc_RNA (1)...(19): siRNA sense strand
cagguuggcuuuaauugca

SEQ ID NO: 586100 - RNA, 19 nt, Homo sapiens
  misc_RNA (1)...(19): siRNA sense strand
ccagaagacugcggucaau

SEQ ID NO: 586101 - RNA, 19 nt, Homo sapiens
  misc_RNA (1)...(19): siRNA sense strand
gcauauuacuacucaggau

SEQ ID NO: 586102 - RNA, 19 nt, Homo sapiens
  misc_RNA (1)...(19): siRNA sense strand
ggaaaugccaaaagagaua

SEQ ID NO: 586103 - RNA, 19 nt, Homo sapiens
  misc_RNA (1)...(19): siRNA sense strand
ccgagaauauugccuaugg

SEQ ID NO: 586104 - RNA, 19 nt, Homo sapiens
  misc_RNA (1)...(19): siRNA sense strand
caacagaggcaauagaaaa

SEQ ID NO: 586105 - RNA, 19 nt, Homo sapiens
  misc_RNA (1)...(19): siRNA sense strand
acaaagagcuggaaaggua

SEQ ID NO: 586106 - RNA, 19 nt, Homo sapiens
  misc_RNA (1)...(19): siRNA sense strand
gaauauagcuaaccuugga

SEQ ID NO: 586107 - RNA, 19 nt, Homo sapiens
  misc_RNA (1)...(19): siRNA sense strand
gcugaagccugauaaauuu

SEQ ID NO: 586108 - RNA, 19 nt, Homo sapiens
  misc_RNA (1)...(19): siRNA sense strand
gaaauaggaugguuugaca

SEQ ID NO: 586109 - RNA, 19 nt, Homo sapiens
  misc_RNA (1)...(19): siRNA sense strand
acaaagaacuagcugcuua

SEQ ID NO: 586110 - RNA, 19 nt, Homo sapiens
  misc_RNA (1)...(19): siRNA sense strand
ccacaaauaugaaacaaga

SEQ ID NO: 586111 - RNA, 19 nt, Homo sapiens
  misc_RNA (1)...(19): siRNA sense strand
agagaugacugacaaauuu

SEQ ID NO: 586112 - RNA, 19 nt, Homo sapiens
  misc_RNA (1)...(19): siRNA sense strand
gacaugagcugguuugaug

SEQ ID NO: 586113 - RNA, 19 nt, Homo sapiens
  misc_RNA (1)...(19): siRNA sense strand
caacauacauccuuucauc

SEQ ID NO: 586114 - RNA, 19 nt, Homo sapiens
  misc_RNA (1)...(19): siRNA sense strand
gaacugguauuaucauauc

SEQ ID NO: 586115 - RNA, 19 nt, Homo sapiens
  misc_RNA (1)...(19): siRNA sense strand
ggaaaccgauggacuugaa

SEQ ID NO: 586116 - RNA, 19 nt, Homo sapiens
  misc_RNA (1)...(19): siRNA sense strand
cagcauaugugaucuuuga

SEQ ID NO: 586117 - RNA, 19 nt, Homo sapiens
  misc_RNA (1)...(19): siRNA sense strand
aaagaaagcugucaaagag

SEQ ID NO: 586118 - RNA, 19 nt, Homo sapiens
  misc_RNA (1)...(19): siRNA sense strand
ggaagcugcuggaaagauu

SEQ ID NO: 586119 - RNA, 19 nt, Homo sapiens
  misc_RNA (1)...(19): siRNA sense strand
ggccauagcucacggauca

SEQ ID NO: 586120 - RNA, 19 nt, Homo sapiens
  misc_RNA (1)...(19): siRNA sense strand
gguauugccuuccuguuaa

SEQ ID NO: 586121 - RNA, 19 nt, Homo sapiens
  misc_RNA (1)...(19): siRNA sense strand
gcaguuaacccuauugcua

SEQ ID NO: 586122 - RNA, 19 nt, Homo sapiens
  misc_RNA (1)...(19): siRNA sense strand
gaagagccuugauguggaa

SEQ ID NO: 586123 - RNA, 19 nt, Homo sapiens
  misc_RNA (1)...(19): siRNA sense strand
gauggaagcucacccuugu

SEQ ID NO: 586124 - RNA, 19 nt, Homo sapiens
  misc_RNA (1)...(19): siRNA sense strand
agccaaagcugccaacaua

SEQ ID NO: 586125 - RNA, 19 nt, Homo sapiens
  misc_RNA (1)...(19): siRNA sense strand
cagcagaagugcaacauau

SEQ ID NO: 586126 - RNA, 19 nt, Homo sapiens
  misc_RNA (1)...(19): siRNA sense strand
ggaaaugcaaugacaguuu

SEQ ID NO: 586127 - RNA, 19 nt, Homo sapiens
  misc_RNA (1)...(19): siRNA sense strand
gaagaaaugacuagauaug

SEQ ID NO: 586128 - RNA, 19 nt, Homo sapiens
  misc_RNA (1)...(19): siRNA sense strand
gaagaaaggccagacacua

SEQ ID NO: 586129 - RNA, 19 nt, Homo sapiens
  misc_RNA (1)...(19): siRNA sense strand
guucaaugauguucacuuu

SEQ ID NO: 586130 - RNA, 19 nt, Homo sapiens
  misc_RNA (1)...(19): siRNA sense strand
gcacuggccuucugguaug

SEQ ID NO: 586131 - RNA, 19 nt, Homo sapiens
  misc_RNA (1)...(19): siRNA sense strand
gauaguauuuggagagaug

SEQ ID NO: 586132 - RNA, 19 nt, Homo sapiens
  misc_RNA (1)...(19): siRNA sense strand
ggacaugccaguucauuug

SEQ ID NO: 586133 - RNA, 19 nt, Homo sapiens
  misc_RNA (1)...(19): siRNA sense strand
gaagccagauccagucaga

SEQ ID NO: 586134 - RNA, 19 nt, Homo sapiens
  misc_RNA (1)...(19): siRNA sense strand
gaaacaagagugggagaua

SEQ ID NO: 586135 - RNA, 19 nt, Homo sapiens
  misc_RNA (1)...(19): siRNA sense strand
caaagauacucucggcauu

SEQ ID NO: 586136 - RNA, 19 nt, Homo sapiens
  misc_RNA (1)...(19): siRNA sense strand
gagcuaacgucaagaucuu

SEQ ID NO: 586137 - RNA, 19 nt, Homo sapiens
  misc_RNA (1)...(19): siRNA sense strand
gcacaacgguccagcugau

SEQ ID NO: 586138 - RNA, 19 nt, Homo sapiens
  misc_RNA (1)...(19): siRNA sense strand
ccagaaugcagacuuaaua

SEQ ID NO: 586139 - RNA, 19 nt, Homo sapiens
  misc_RNA (1)...(19): siRNA sense strand
aaacaagagugggagauaa

SEQ ID NO: 586140 - RNA, 19 nt, Homo sapiens
  misc_RNA (1)...(19): siRNA sense strand
gaaaugcaaugacaguuuu

SEQ ID NO: 586141 - RNA, 19 nt, Homo sapiens
  misc_RNA (1)...(19): siRNA sense strand
gcacagaaaggcaucuauu

SEQ ID NO: 586142 - RNA, 19 nt, Homo sapiens
  misc_RNA (1)...(19): siRNA sense strand
uaaagaaagcugucaaaga

SEQ ID NO: 586143 - RNA, 19 nt, Homo sapiens
  misc_RNA (1)...(19): siRNA sense strand
cgacagaucaggaaaauua

SEQ ID NO: 586144 - RNA, 19 nt, Homo sapiens
  misc_RNA (1)...(19): siRNA sense strand
cauccagaaugcagacuua

SEQ ID NO: 586145 - RNA, 19 nt, Homo sapiens
  misc_RNA (1)...(19): siRNA sense strand
ccaaauggcuggaaaucuc

SEQ ID NO: 586146 - RNA, 19 nt, Homo sapiens
  misc_RNA (1)...(19): siRNA sense strand
gaaauguaaccauggauga

SEQ ID NO: 586147 - RNA, 19 nt, Homo sapiens
  misc_RNA (1)...(19): siRNA sense strand
ggccaacgccuaugaguuu

SEQ ID NO: 586148 - RNA, 19 nt, Homo sapiens
  misc_RNA (1)...(19): siRNA sense strand
ugacaagguuggaauguuc

SEQ ID NO: 586149 - RNA, 19 nt, Homo sapiens
  misc_RNA (1)...(19): siRNA sense strand
ggaauuuggaguucaauga

SEQ ID NO: 586150 - RNA, 19 nt, Homo sapiens
  misc_RNA (1)...(19): siRNA sense strand
ggaaagguaucagaaacau

SEQ ID NO: 586151 - RNA, 19 nt, Homo sapiens
  misc_RNA (1)...(19): siRNA sense strand
aagauacucucggcauuua

SEQ ID NO: 586152 - RNA, 19 nt, Homo sapiens
  misc_RNA (1)...(19): siRNA sense strand
gauccagucagaagaauuu

SEQ ID NO: 586153 - RNA, 19 nt, Homo sapiens
  misc_RNA (1)...(19): siRNA sense strand
uaaacuaucugagggaaau

SEQ ID NO: 586154 - RNA, 19 nt, Homo sapiens
  misc_RNA (1)...(19): siRNA sense strand
gcauaugugaucuuugaua

SEQ ID NO: 586155 - RNA, 19 nt, Homo sapiens
  misc_RNA (1)...(19): siRNA sense strand
gagagaugacugacaaauu

SEQ ID NO: 586156 - RNA, 19 nt, Homo sapiens
  misc_RNA (1)...(19): siRNA sense strand
gaaugcagacuuaauagug

SEQ ID NO: 586157 - RNA, 19 nt, Homo sapiens
  misc_RNA (1)...(19): siRNA sense strand
ccaagaagcccuggacaaa

SEQ ID NO: 586158 - RNA, 19 nt, Homo sapiens
  misc_RNA (1)...(19): siRNA sense strand
gauaaagaaagcugucaaa

SEQ ID NO: 586159 - RNA, 19 nt, Homo sapiens
  misc_RNA (1)...(19): siRNA sense strand
caaaaucagugaaggaauu

SEQ ID NO: 586160 - RNA, 19 nt, Homo sapiens
  misc_RNA (1)...(19): siRNA sense strand
ugacaccacugaacucaau

SEQ ID NO: 586161 - RNA, 19 nt, Homo sapiens
  misc_RNA (1)...(19): siRNA sense strand
gaagaagaaaugacuagau

SEQ ID NO: 586162 - RNA, 19 nt, Homo sapiens
  misc_RNA (1)...(19): siRNA sense strand
acagcgaacugaugaagaa

SEQ ID NO: 586163 - RNA, 19 nt, Homo sapiens
  misc_RNA (1)...(19): siRNA sense strand
ggguauugccuuccuguua

SEQ ID NO: 586164 - RNA, 19 nt, Homo sapiens
  misc_RNA (1)...(19): siRNA sense strand
gaacaaagagcuggaaagg

SEQ ID NO: 586165 - RNA, 19 nt, Homo sapiens
  misc_RNA (1)...(19): siRNA sense strand
aaacagaggauugcuauug

SEQ ID NO: 586166 - RNA, 19 nt, Homo sapiens
  misc_RNA (1)...(19): siRNA sense strand
gaugagggcacaauuaaca

SEQ ID NO: 586167 - RNA, 19 nt, Homo sapiens
  misc_RNA (1)...(19): siRNA sense strand
uaauagugguguuucagaa

SEQ ID NO: 586168 - RNA, 19 nt, Homo sapiens
  misc_RNA (1)...(19): siRNA sense strand
aaacaguacuggugcacuu

SEQ ID NO: 586169 - RNA, 19 nt, Homo sapiens
  misc_RNA (1)...(19): siRNA sense strand
ggaacaguaugugccauug

SEQ ID NO: 586170 - RNA, 19 nt, Homo sapiens
  misc_RNA (1)...(19): siRNA sense strand
gcaaaugugccaccagugu

SEQ ID NO: 586171 - RNA, 19 nt, Homo sapiens
  misc_RNA (1)...(19): siRNA sense strand
ggccgcaccugcauuguga

SEQ ID NO: 586172 - RNA, 19 nt, Homo sapiens
  misc_RNA (1)...(19): siRNA sense strand
uggauccacucuagucaua

SEQ ID NO: 586173 - RNA, 19 nt, Homo sapiens
  misc_RNA (1)...(19): siRNA sense strand
ugaaauuguuggcuggaaa

SEQ ID NO: 586174 - RNA, 19 nt, Homo sapiens
  misc_RNA (1)...(19): siRNA sense strand
agaacuagcugcuuaugca

SEQ ID NO: 586175 - RNA, 19 nt, Homo sapiens
  misc_RNA (1)...(19): siRNA sense strand
gaaggccgcaccugcauug

SEQ ID NO: 586176 - RNA, 19 nt, Homo sapiens
  misc_RNA (1)...(19): siRNA sense strand
gcagaagugcaacauauuc

SEQ ID NO: 586177 - RNA, 19 nt, Homo sapiens
  misc_RNA (1)...(19): siRNA sense strand
cagaauggcccuacuuugu

SEQ ID NO: 586178 - RNA, 19 nt, Homo sapiens
  misc_RNA (1)...(19): siRNA sense strand
ccaccaguguccuuucuga

SEQ ID NO: 586179 - RNA, 19 nt, Homo sapiens
  misc_RNA (1)...(19): siRNA sense strand
guuugaggauggaguaauu

SEQ ID NO: 586180 - RNA, 19 nt, Homo sapiens
  misc_RNA (1)...(19): siRNA sense strand
ugaagggccucaaccugaa

SEQ ID NO: 586181 - RNA, 19 nt, Homo sapiens
  misc_RNA (1)...(19): siRNA sense strand
ucaggacugugauagcuuu

SEQ ID NO: 586182 - RNA, 19 nt, Homo sapiens
  misc_RNA (1)...(19): siRNA sense strand
gaacucaauacgcggcuaa

SEQ ID NO: 586183 - RNA, 19 nt, Homo sapiens
  misc_RNA (1)...(19): siRNA sense strand
gaagucguguucaacuauc

SEQ ID NO: 586184 - RNA, 19 nt, Homo sapiens
  misc_RNA (1)...(19): siRNA sense strand
cuggaaagauugcaacaga

SEQ ID NO: 586185 - RNA, 19 nt, Homo sapiens
  misc_RNA (1)...(19): siRNA sense strand
ccgauggacuugaagcaaa

SEQ ID NO: 586186 - RNA, 19 nt, Homo sapiens
  misc_RNA (1)...(19): siRNA sense strand
gaaauuugacacccugguu

SEQ ID NO: 586187 - RNA, 19 nt, Homo sapiens
  misc_RNA (1)...(19): siRNA sense strand
guacaggcagcucuggaua

SEQ ID NO: 586188 - RNA, 19 nt, Homo sapiens
  misc_RNA (1)...(19): siRNA sense strand
gcgaacugaugaagaagga

SEQ ID NO: 586189 - RNA, 19 nt, Homo sapiens
  misc_RNA (1)...(19): siRNA sense strand
ugggaaagcuggcgagauc

SEQ ID NO: 586190 - RNA, 19 nt, Homo sapiens
  misc_RNA (1)...(19): siRNA sense strand
cuauuugacugcagcauug

SEQ ID NO: 586191 - RNA, 19 nt, Homo sapiens
  misc_RNA (1)...(19): siRNA sense strand
gauccacucuagucauauc

SEQ ID NO: 586192 - RNA, 19 nt, Homo sapiens
  misc_RNA (1)...(19): siRNA sense strand
gaagccugauaaauuugaa

SEQ ID NO: 586193 - RNA, 19 nt, Homo sapiens
  misc_RNA (1)...(19): siRNA sense strand
ucagagaucauagcgauuu

SEQ ID NO: 586194 - RNA, 19 nt, Homo sapiens
  misc_RNA (1)...(19): siRNA sense strand
ccacucuagucauaucaaa

SEQ ID NO: 586195 - RNA, 19 nt, Homo sapiens
  misc_RNA (1)...(19): siRNA sense strand
agaaaugacuagauaugca

SEQ ID NO: 586196 - RNA, 19 nt, Homo sapiens
  misc_RNA (1)...(19): siRNA sense strand
gaaaauauuaggacaguug

SEQ ID NO: 586197 - RNA, 19 nt, Homo sapiens
  misc_RNA (1)...(19): siRNA sense strand
uagcaguuguuccaauuau

SEQ ID NO: 586198 - RNA, 19 nt, Homo sapiens
  misc_RNA (1)...(19): siRNA sense strand
gcugcuaaauccaggcaaa

SEQ ID NO: 586199 - RNA, 19 nt, Homo sapiens
  misc_RNA (1)...(19): siRNA sense strand
cagguuggcuuuaauugca

SEQ ID NO: 586200 - RNA, 19 nt, Homo sapiens
  misc_RNA (1)...(19): siRNA sense strand
ccagaagacugcggucaau

SEQ ID NO: 586201 - RNA, 19 nt, Homo sapiens
  misc_RNA (1)...(19): siRNA sense strand
gcauauuacuacucaggau

SEQ ID NO: 586202 - RNA, 19 nt, Homo sapiens
  misc_RNA (1)...(19): siRNA sense strand
ggaaaugccaaaagagaua

SEQ ID NO: 586203 - RNA, 19 nt, Homo sapiens
  misc_RNA (1)...(19): siRNA sense strand
ccgagaauauugccuaugg

SEQ ID NO: 586204 - RNA, 19 nt, Homo sapiens
  misc_RNA (1)...(19): siRNA sense strand
caacagaggcaauagaaaa

SEQ ID NO: 586205 - RNA, 19 nt, Homo sapiens
  misc_RNA (1)...(19): siRNA sense strand
acaaagagcuggaaaggua

SEQ ID NO: 586206 - RNA, 19 nt, Homo sapiens
  misc_RNA (1)...(19): siRNA sense strand
gaauauagcuaaccuugga

SEQ ID NO: 586207 - RNA, 19 nt, Homo sapiens
  misc_RNA (1)...(19): siRNA sense strand
gcugaagccugauaaauuu

SEQ ID NO: 586208 - RNA, 19 nt, Homo sapiens
  misc_RNA (1)...(19): siRNA sense strand
gaaauaggaugguuugaca

SEQ ID NO: 586209 - RNA, 19 nt, Homo sapiens
  misc_RNA (1)...(19): siRNA sense strand
acaaagaacuagcugcuua

SEQ ID NO: 586210 - RNA, 19 nt, Homo sapiens
  misc_RNA (1)...(19): siRNA sense strand
ccacaaauaugaaacaaga

SEQ ID NO: 586211 - RNA, 19 nt, Homo sapiens
  misc_RNA (1)...(19): siRNA sense strand
agagaugacugacaaauuu

SEQ ID NO: 586212 - RNA, 19 nt, Homo sapiens
  misc_RNA (1)...(19): siRNA sense strand
gacaugagcugguuugaug

SEQ ID NO: 586213 - RNA, 19 nt, Homo sapiens
  misc_RNA (1)...(19): siRNA sense strand
caacauacauccuuucauc

SEQ ID NO: 586214 - RNA, 19 nt, Homo sapiens
  misc_RNA (1)...(19): siRNA sense strand
gaacugguauuaucauauc

SEQ ID NO: 586215 - RNA, 19 nt, Homo sapiens
  misc_RNA (1)...(19): siRNA sense strand
ggaaaccgauggacuugaa

SEQ ID NO: 586216 - RNA, 19 nt, Homo sapiens
  misc_RNA (1)...(19): siRNA sense strand
cagcauaugugaucuuuga

SEQ ID NO: 586217 - RNA, 19 nt, Homo sapiens
  misc_RNA (1)...(19): siRNA sense strand
aaagaaagcugucaaagag

SEQ ID NO: 586218 - RNA, 19 nt, Homo sapiens
  misc_RNA (1)...(19): siRNA sense strand
ggaagcugcuggaaagauu

SEQ ID NO: 586219 - RNA, 19 nt, Homo sapiens
  misc_RNA (1)...(19): siRNA sense strand
ggccauagcucacggauca

SEQ ID NO: 586220 - RNA, 19 nt, Homo sapiens
  misc_RNA (1)...(19): siRNA sense strand
gguauugccuuccuguuaa

SEQ ID NO: 586221 - RNA, 19 nt, Homo sapiens
  misc_RNA (1)...(19): siRNA sense strand
gcaguuaacccuauugcua

SEQ ID NO: 586222 - RNA, 19 nt, Homo sapiens
  misc_RNA (1)...(19): siRNA sense strand
gaagagccuugauguggaa

SEQ ID NO: 586223 - RNA, 19 nt, Homo sapiens
  misc_RNA (1)...(19): siRNA sense strand
gauggaagcucacccuugu

SEQ ID NO: 586224 - RNA, 19 nt, Homo sapiens
  misc_RNA (1)...(19): siRNA sense strand
agccaaagcugccaacaua

SEQ ID NO: 586225 - RNA, 19 nt, Homo sapiens
  misc_RNA (1)...(19): siRNA sense strand
cagcagaagugcaacauau

SEQ ID NO: 586226 - RNA, 19 nt, Homo sapiens
  misc_RNA (1)...(19): siRNA sense strand
ggaaaugcaaugacaguuu

SEQ ID NO: 586227 - RNA, 19 nt, Homo sapiens
  misc_RNA (1)...(19): siRNA sense strand
gaagaaaugacuagauaug

SEQ ID NO: 586228 - RNA, 19 nt, Homo sapiens
  misc_RNA (1)...(19): siRNA sense strand
gaagaaaggccagacacua

SEQ ID NO: 586229 - RNA, 19 nt, Homo sapiens
  misc_RNA (1)...(19): siRNA sense strand
guucaaugauguucacuuu

SEQ ID NO: 586230 - RNA, 19 nt, Homo sapiens
  misc_RNA (1)...(19): siRNA sense strand
gcacuggccuucugguaug

SEQ ID NO: 586231 - RNA, 19 nt, Homo sapiens
  misc_RNA (1)...(19): siRNA sense strand
gauaguauuuggagagaug

SEQ ID NO: 586232 - RNA, 19 nt, Homo sapiens
  misc_RNA (1)...(19): siRNA sense strand
ggacaugccaguucauuug

SEQ ID NO: 586233 - RNA, 19 nt, Homo sapiens
  misc_RNA (1)...(19): siRNA sense strand
gaagccagauccagucaga

SEQ ID NO: 586234 - RNA, 19 nt, Homo sapiens
  misc_RNA (1)...(19): siRNA sense strand
gaaacaagagugggagaua

SEQ ID NO: 586235 - RNA, 19 nt, Homo sapiens
  misc_RNA (1)...(19): siRNA sense strand
caaagauacucucggcauu

SEQ ID NO: 586236 - RNA, 19 nt, Homo sapiens
  misc_RNA (1)...(19): siRNA sense strand
gagcuaacgucaagaucuu

SEQ ID NO: 586237 - RNA, 19 nt, Homo sapiens
  misc_RNA (1)...(19): siRNA sense strand
gcacaacgguccagcugau

SEQ ID NO: 586238 - RNA, 19 nt, Homo sapiens
  misc_RNA (1)...(19): siRNA sense strand
ccagaaugcagacuuaaua

SEQ ID NO: 586239 - RNA, 19 nt, Homo sapiens
  misc_RNA (1)...(19): siRNA sense strand
aaacaagagugggagauaa

SEQ ID NO: 586240 - RNA, 19 nt, Homo sapiens
  misc_RNA (1)...(19): siRNA sense strand
gaaaugcaaugacaguuuu

SEQ ID NO: 586241 - RNA, 19 nt, Homo sapiens
  misc_RNA (1)...(19): siRNA sense strand
gcacagaaaggcaucuauu

SEQ ID NO: 586242 - RNA, 19 nt, Homo sapiens
  misc_RNA (1)...(19): siRNA sense strand
uaaagaaagcugucaaaga

SEQ ID NO: 586243 - RNA, 19 nt, Homo sapiens
  misc_RNA (1)...(19): siRNA sense strand
cgacagaucaggaaaauua

SEQ ID NO: 586244 - RNA, 19 nt, Homo sapiens
  misc_RNA (1)...(19): siRNA sense strand
cauccagaaugcagacuua

SEQ ID NO: 586245 - RNA, 19 nt, Homo sapiens
  misc_RNA (1)...(19): siRNA sense strand
ccaaauggcuggaaaucuc

SEQ ID NO: 586246 - RNA, 19 nt, Homo sapiens
  misc_RNA (1)...(19): siRNA sense strand
gaaauguaaccauggauga

SEQ ID NO: 586247 - RNA, 19 nt, Homo sapiens
  misc_RNA (1)...(19): siRNA sense strand
ggccaacgccuaugaguuu

SEQ ID NO: 586248 - RNA, 19 nt, Homo sapiens
  misc_RNA (1)...(19): siRNA sense strand
ugacaagguuggaauguuc

SEQ ID NO: 586249 - RNA, 19 nt, Homo sapiens
  misc_RNA (1)...(19): siRNA sense strand
ggaauuuggaguucaauga

SEQ ID NO: 586250 - RNA, 19 nt, Homo sapiens
  misc_RNA (1)...(19): siRNA sense strand
ggaaagguaucagaaacau

SEQ ID NO: 586251 - RNA, 19 nt, Homo sapiens
  misc_RNA (1)...(19): siRNA sense strand
aagauacucucggcauuua

SEQ ID NO: 586252 - RNA, 19 nt, Homo sapiens
  misc_RNA (1)...(19): siRNA sense strand
gauccagucagaagaauuu

SEQ ID NO: 586253 - RNA, 19 nt, Homo sapiens
  misc_RNA (1)...(19): siRNA sense strand
uaaacuaucugagggaaau

SEQ ID NO: 586254 - RNA, 19 nt, Homo sapiens
  misc_RNA (1)...(19): siRNA sense strand
gcauaugugaucuuugaua

SEQ ID NO: 586255 - RNA, 19 nt, Homo sapiens
  misc_RNA (1)...(19): siRNA sense strand
gagagaugacugacaaauu

SEQ ID NO: 586256 - RNA, 19 nt, Homo sapiens
  misc_RNA (1)...(19): siRNA sense strand
gaaugcagacuuaauagug

SEQ ID NO: 586257 - RNA, 19 nt, Homo sapiens
  misc_RNA (1)...(19): siRNA sense strand
ccaagaagcccuggacaaa

SEQ ID NO: 586258 - RNA, 19 nt, Homo sapiens
  misc_RNA (1)...(19): siRNA sense strand
gauaaagaaagcugucaaa

SEQ ID NO: 586259 - RNA, 19 nt, Homo sapiens
  misc_RNA (1)...(19): siRNA sense strand
caaaaucagugaaggaauu

SEQ ID NO: 586260 - RNA, 19 nt, Homo sapiens
  misc_RNA (1)...(19): siRNA sense strand
ugacaccacugaacucaau

SEQ ID NO: 586261 - RNA, 19 nt, Homo sapiens
  misc_RNA (1)...(19): siRNA sense strand
gaagaagaaaugacuagau

SEQ ID NO: 586262 - RNA, 19 nt, Homo sapiens
  misc_RNA (1)...(19): siRNA sense strand
acagcgaacugaugaagaa

SEQ ID NO: 586263 - RNA, 19 nt, Homo sapiens
  misc_RNA (1)...(19): siRNA sense strand
ggguauugccuuccuguua

SEQ ID NO: 586264 - RNA, 19 nt, Homo sapiens
  misc_RNA (1)...(19): siRNA sense strand
gaacaaagagcuggaaagg

SEQ ID NO: 586265 - RNA, 19 nt, Homo sapiens
  misc_RNA (1)...(19): siRNA sense strand
aaacagaggauugcuauug

SEQ ID NO: 586266 - RNA, 19 nt, Homo sapiens
  misc_RNA (1)...(19): siRNA sense strand
gaugagggcacaauuaaca

SEQ ID NO: 586267 - RNA, 19 nt, Homo sapiens
  misc_RNA (1)...(19): siRNA sense strand
uaauagugguguuucagaa

SEQ ID NO: 586268 - RNA, 19 nt, Homo sapiens
  misc_RNA (1)...(19): siRNA sense strand
aaacaguacuggugcacuu

SEQ ID NO: 586269 - RNA, 19 nt, Homo sapiens
  misc_RNA (1)...(19): siRNA sense strand
ggaacaguaugugccauug

SEQ ID NO: 586270 - RNA, 19 nt, Homo sapiens
  misc_RNA (1)...(19): siRNA sense strand
gcaaaugugccaccagugu

SEQ ID NO: 586271 - RNA, 19 nt, Homo sapiens
  misc_RNA (1)...(19): siRNA sense strand
ggccgcaccugcauuguga

SEQ ID NO: 586272 - RNA, 19 nt, Homo sapiens
  misc_RNA (1)...(19): siRNA sense strand
uggauccacucuagucaua

SEQ ID NO: 586273 - RNA, 19 nt, Homo sapiens
  misc_RNA (1)...(19): siRNA sense strand
ugaaauuguuggcuggaaa

SEQ ID NO: 586274 - RNA, 19 nt, Homo sapiens
  misc_RNA (1)...(19): siRNA sense strand
agaacuagcugcuuaugca

SEQ ID NO: 586275 - RNA, 19 nt, Homo sapiens
  misc_RNA (1)...(19): siRNA sense strand
gaaggccgcaccugcauug

SEQ ID NO: 586276 - RNA, 19 nt, Homo sapiens
  misc_RNA (1)...(19): siRNA sense strand
gcagaagugcaacauauuc

SEQ ID NO: 586277 - RNA, 19 nt, Homo sapiens
  misc_RNA (1)...(19): siRNA sense strand
cagaauggcccuacuuugu

SEQ ID NO: 586278 - RNA, 19 nt, Homo sapiens
  misc_RNA (1)...(19): siRNA sense strand
ccaccaguguccuuucuga

SEQ ID NO: 586279 - RNA, 19 nt, Homo sapiens
  misc_RNA (1)...(19): siRNA sense strand
guuugaggauggaguaauu

SEQ ID NO: 586280 - RNA, 19 nt, Homo sapiens
  misc_RNA (1)...(19): siRNA sense strand
ugaagggccucaaccugaa

SEQ ID NO: 586281 - RNA, 19 nt, Homo sapiens
  misc_RNA (1)...(19): siRNA sense strand
ucaggacugugauagcuuu

SEQ ID NO: 586282 - RNA, 19 nt, Homo sapiens
  misc_RNA (1)...(19): siRNA sense strand
gaacucaauacgcggcuaa

SEQ ID NO: 586283 - RNA, 19 nt, Homo sapiens
  misc_RNA (1)...(19): siRNA sense strand
gaagucguguucaacuauc

SEQ ID NO: 586284 - RNA, 19 nt, Homo sapiens
  misc_RNA (1)...(19): siRNA sense strand
cuggaaagauugcaacaga

SEQ ID NO: 586285 - RNA, 19 nt, Homo sapiens
  misc_RNA (1)...(19): siRNA sense strand
ccgauggacuugaagcaaa

SEQ ID NO: 586286 - RNA, 19 nt, Homo sapiens
  misc_RNA (1)...(19): siRNA sense strand
gaaauuugacacccugguu

SEQ ID NO: 586287 - RNA, 19 nt, Homo sapiens
  misc_RNA (1)...(19): siRNA sense strand
guacaggcagcucuggaua

SEQ ID NO: 586288 - RNA, 19 nt, Homo sapiens
  misc_RNA (1)...(19): siRNA sense strand
gcgaacugaugaagaagga

SEQ ID NO: 586289 - RNA, 19 nt, Homo sapiens
  misc_RNA (1)...(19): siRNA sense strand
ugggaaagcuggcgagauc

SEQ ID NO: 586290 - RNA, 19 nt, Homo sapiens
  misc_RNA (1)...(19): siRNA sense strand
cuauuugacugcagcauug

SEQ ID NO: 586291 - RNA, 19 nt, Homo sapiens
  misc_RNA (1)...(19): siRNA sense strand
gauccacucuagucauauc

SEQ ID NO: 586292 - RNA, 19 nt, Homo sapiens
  misc_RNA (1)...(19): siRNA sense strand
gaagccugauaaauuugaa

SEQ ID NO: 586293 - RNA, 19 nt, Homo sapiens
  misc_RNA (1)...(19): siRNA sense strand
ucagagaucauagcgauuu

SEQ ID NO: 586294 - RNA, 19 nt, Homo sapiens
  misc_RNA (1)...(19): siRNA sense strand
ccacucuagucauaucaaa

SEQ ID NO: 586295 - RNA, 19 nt, Homo sapiens
  misc_RNA (1)...(19): siRNA sense strand
agaaaugacuagauaugca

SEQ ID NO: 586296 - RNA, 19 nt, Homo sapiens
  misc_RNA (1)...(19): siRNA sense strand
gaaaauauuaggacaguug

SEQ ID NO: 586297 - RNA, 19 nt, Homo sapiens
  misc_RNA (1)...(19): siRNA sense strand
uagcaguuguuccaauuau

SEQ ID NO: 586298 - RNA, 19 nt, Homo sapiens
  misc_RNA (1)...(19): siRNA sense strand
gcugcuaaauccaggcaaa

SEQ ID NO: 586299 - RNA, 19 nt, Homo sapiens
  misc_RNA (1)...(19): siRNA sense strand
cagguuggcuuuaauugca

SEQ ID NO: 586300 - RNA, 19 nt, Homo sapiens
  misc_RNA (1)...(19): siRNA sense strand
ccagaagacugcggucaau

SEQ ID NO: 586301 - RNA, 19 nt, Homo sapiens
  misc_RNA (1)...(19): siRNA sense strand
gcauauuacuacucaggau

SEQ ID NO: 586302 - RNA, 19 nt, Homo sapiens
  misc_RNA (1)...(19): siRNA sense strand
ggaaaugccaaaagagaua

SEQ ID NO: 586303 - RNA, 19 nt, Homo sapiens
  misc_RNA (1)...(19): siRNA sense strand
ccgagaauauugccuaugg

SEQ ID NO: 586304 - RNA, 19 nt, Homo sapiens
  misc_RNA (1)...(19): siRNA sense strand
caacagaggcaauagaaaa

SEQ ID NO: 586305 - RNA, 19 nt, Homo sapiens
  misc_RNA (1)...(19): siRNA sense strand
acaaagagcuggaaaggua

SEQ ID NO: 586306 - RNA, 19 nt, Homo sapiens
  misc_RNA (1)...(19): siRNA sense strand
gaauauagcuaaccuugga

SEQ ID NO: 586307 - RNA, 19 nt, Homo sapiens
  misc_RNA (1)...(19): siRNA sense strand
gcugaagccugauaaauuu

SEQ ID NO: 586308 - RNA, 19 nt, Homo sapiens
  misc_RNA (1)...(19): siRNA sense strand
gaaauaggaugguuugaca

SEQ ID NO: 586309 - RNA, 19 nt, Homo sapiens
  misc_RNA (1)...(19): siRNA sense strand
acaaagaacuagcugcuua

SEQ ID NO: 586310 - RNA, 19 nt, Homo sapiens
  misc_RNA (1)...(19): siRNA sense strand
ccacaaauaugaaacaaga

SEQ ID NO: 586311 - RNA, 19 nt, Homo sapiens
  misc_RNA (1)...(19): siRNA sense strand
agagaugacugacaaauuu

SEQ ID NO: 586312 - RNA, 19 nt, Homo sapiens
  misc_RNA (1)...(19): siRNA sense strand
gacaugagcugguuugaug

SEQ ID NO: 586313 - RNA, 19 nt, Homo sapiens
  misc_RNA (1)...(19): siRNA sense strand
caacauacauccuuucauc

SEQ ID NO: 586314 - RNA, 19 nt, Homo sapiens
  misc_RNA (1)...(19): siRNA sense strand
gaacugguauuaucauauc

SEQ ID NO: 586315 - RNA, 19 nt, Homo sapiens
  misc_RNA (1)...(19): siRNA sense strand
ggaaaccgauggacuugaa

SEQ ID NO: 586316 - RNA, 19 nt, Homo sapiens
  misc_RNA (1)...(19): siRNA sense strand
cagcauaugugaucuuuga

SEQ ID NO: 586317 - RNA, 19 nt, Homo sapiens
  misc_RNA (1)...(19): siRNA sense strand
aaagaaagcugucaaagag

SEQ ID NO: 586318 - RNA, 19 nt, Homo sapiens
  misc_RNA (1)...(19): siRNA sense strand
ggaagcugcuggaaagauu

SEQ ID NO: 586319 - RNA, 19 nt, Homo sapiens
  misc_RNA (1)...(19): siRNA sense strand
ggccauagcucacggauca

SEQ ID NO: 586320 - RNA, 19 nt, Homo sapiens
  misc_RNA (1)...(19): siRNA sense strand
gguauugccuuccuguuaa

SEQ ID NO: 586321 - RNA, 19 nt, Homo sapiens
  misc_RNA (1)...(19): siRNA sense strand
gcaguuaacccuauugcua

SEQ ID NO: 586322 - RNA, 19 nt, Homo sapiens
  misc_RNA (1)...(19): siRNA sense strand
gaagagccuugauguggaa

SEQ ID NO: 586323 - RNA, 19 nt, Homo sapiens
  misc_RNA (1)...(19): siRNA sense strand
gauggaagcucacccuugu

SEQ ID NO: 586324 - RNA, 19 nt, Homo sapiens
  misc_RNA (1)...(19): siRNA sense strand
agccaaagcugccaacaua

SEQ ID NO: 586325 - RNA, 19 nt, Homo sapiens
  misc_RNA (1)...(19): siRNA sense strand
cagcagaagugcaacauau

SEQ ID NO: 586326 - RNA, 19 nt, Homo sapiens
  misc_RNA (1)...(19): siRNA sense strand
ggaaaugcaaugacaguuu

SEQ ID NO: 586327 - RNA, 19 nt, Homo sapiens
  misc_RNA (1)...(19): siRNA sense strand
gaagaaaugacuagauaug

SEQ ID NO: 586328 - RNA, 19 nt, Homo sapiens
  misc_RNA (1)...(19): siRNA sense strand
gaagaaaggccagacacua

SEQ ID NO: 586329 - RNA, 19 nt, Homo sapiens
  misc_RNA (1)...(19): siRNA sense strand
guucaaugauguucacuuu

SEQ ID NO: 586330 - RNA, 19 nt, Homo sapiens
  misc_RNA (1)...(19): siRNA sense strand
gcacuggccuucugguaug

SEQ ID NO: 586331 - RNA, 19 nt, Homo sapiens
  misc_RNA (1)...(19): siRNA sense strand
gauaguauuuggagagaug

SEQ ID NO: 586332 - RNA, 19 nt, Homo sapiens
  misc_RNA (1)...(19): siRNA sense strand
ggacaugccaguucauuug

SEQ ID NO: 586333 - RNA, 19 nt, Homo sapiens
  misc_RNA (1)...(19): siRNA sense strand
gaagccagauccagucaga

SEQ ID NO: 586334 - RNA, 19 nt, Homo sapiens
  misc_RNA (1)...(19): siRNA sense strand
gaaacaagagugggagaua

SEQ ID NO: 586335 - RNA, 19 nt, Homo sapiens
  misc_RNA (1)...(19): siRNA sense strand
caaagauacucucggcauu

SEQ ID NO: 586336 - RNA, 19 nt, Homo sapiens
  misc_RNA (1)...(19): siRNA sense strand
gagcuaacgucaagaucuu

SEQ ID NO: 586337 - RNA, 19 nt, Homo sapiens
  misc_RNA (1)...(19): siRNA sense strand
gcacaacgguccagcugau

SEQ ID NO: 586338 - RNA, 19 nt, Homo sapiens
  misc_RNA (1)...(19): siRNA sense strand
ccagaaugcagacuuaaua

SEQ ID NO: 586339 - RNA, 19 nt, Homo sapiens
  misc_RNA (1)...(19): siRNA sense strand
aaacaagagugggagauaa

SEQ ID NO: 586340 - RNA, 19 nt, Homo sapiens
  misc_RNA (1)...(19): siRNA sense strand
gaaaugcaaugacaguuuu

SEQ ID NO: 586341 - RNA, 19 nt, Homo sapiens
  misc_RNA (1)...(19): siRNA sense strand
gcacagaaaggcaucuauu

SEQ ID NO: 586342 - RNA, 19 nt, Homo sapiens
  misc_RNA (1)...(19): siRNA sense strand
uaaagaaagcugucaaaga

SEQ ID NO: 586343 - RNA, 19 nt, Homo sapiens
  misc_RNA (1)...(19): siRNA sense strand
cgacagaucaggaaaauua

SEQ ID NO: 586344 - RNA, 19 nt, Homo sapiens
  misc_RNA (1)...(19): siRNA sense strand
cauccagaaugcagacuua

SEQ ID NO: 586345 - RNA, 19 nt, Homo sapiens
  misc_RNA (1)...(19): siRNA sense strand
ccaaauggcuggaaaucuc

SEQ ID NO: 586346 - RNA, 19 nt, Homo sapiens
  misc_RNA (1)...(19): siRNA sense strand
gaaauguaaccauggauga

SEQ ID NO: 586347 - RNA, 19 nt, Homo sapiens
  misc_RNA (1)...(19): siRNA sense strand
ggccaacgccuaugaguuu

SEQ ID NO: 586348 - RNA, 19 nt, Homo sapiens
  misc_RNA (1)...(19): siRNA sense strand
ugacaagguuggaauguuc

SEQ ID NO: 586349 - RNA, 19 nt, Homo sapiens
  misc_RNA (1)...(19): siRNA sense strand
ggaauuuggaguucaauga

SEQ ID NO: 586350 - RNA, 19 nt, Homo sapiens
  misc_RNA (1)...(19): siRNA sense strand
ggaaagguaucagaaacau

SEQ ID NO: 586351 - RNA, 19 nt, Homo sapiens
  misc_RNA (1)...(19): siRNA sense strand
aagauacucucggcauuua

SEQ ID NO: 586352 - RNA, 19 nt, Homo sapiens
  misc_RNA (1)...(19): siRNA sense strand
gauccagucagaagaauuu

SEQ ID NO: 586353 - RNA, 19 nt, Homo sapiens
  misc_RNA (1)...(19): siRNA sense strand
uaaacuaucugagggaaau

SEQ ID NO: 586354 - RNA, 19 nt, Homo sapiens
  misc_RNA (1)...(19): siRNA sense strand
gcauaugugaucuuugaua

SEQ ID NO: 586355 - RNA, 19 nt, Homo sapiens
  misc_RNA (1)...(19): siRNA sense strand
gagagaugacugacaaauu

SEQ ID NO: 586356 - RNA, 19 nt, Homo sapiens
  misc_RNA (1)...(19): siRNA sense strand
gaaugcagacuuaauagug

SEQ ID NO: 586357 - RNA, 19 nt, Homo sapiens
  misc_RNA (1)...(19): siRNA sense strand
ccaagaagcccuggacaaa

SEQ ID NO: 586358 - RNA, 19 nt, Homo sapiens
  misc_RNA (1)...(19): siRNA sense strand
gauaaagaaagcugucaaa

SEQ ID NO: 586359 - RNA, 19 nt, Homo sapiens
  misc_RNA (1)...(19): siRNA sense strand
caaaaucagugaaggaauu

SEQ ID NO: 586360 - RNA, 19 nt, Homo sapiens
  misc_RNA (1)...(19): siRNA sense strand
ugacaccacugaacucaau

SEQ ID NO: 586361 - RNA, 19 nt, Homo sapiens
  misc_RNA (1)...(19): siRNA sense strand
gaagaagaaaugacuagau

SEQ ID NO: 586362 - RNA, 19 nt, Homo sapiens
  misc_RNA (1)...(19): siRNA sense strand
acagcgaacugaugaagaa

SEQ ID NO: 586363 - RNA, 19 nt, Homo sapiens
  misc_RNA (1)...(19): siRNA sense strand
ggguauugccuuccuguua

SEQ ID NO: 586364 - RNA, 19 nt, Homo sapiens
  misc_RNA (1)...(19): siRNA sense strand
gaacaaagagcuggaaagg

SEQ ID NO: 586365 - RNA, 19 nt, Homo sapiens
  misc_RNA (1)...(19): siRNA sense strand
aaacagaggauugcuauug

SEQ ID NO: 586366 - RNA, 19 nt, Homo sapiens
  misc_RNA (1)...(19): siRNA sense strand
gaugagggcacaauuaaca

SEQ ID NO: 586367 - RNA, 19 nt, Homo sapiens
  misc_RNA (1)...(19): siRNA sense strand
uaauagugguguuucagaa

SEQ ID NO: 586368 - RNA, 19 nt, Homo sapiens
  misc_RNA (1)...(19): siRNA sense strand
aaacaguacuggugcacuu

SEQ ID NO: 586369 - RNA, 19 nt, Homo sapiens
  misc_RNA (1)...(19): siRNA sense strand
ggaacaguaugugccauug

SEQ ID NO: 586370 - RNA, 19 nt, Homo sapiens
  misc_RNA (1)...(19): siRNA sense strand
gcaaaugugccaccagugu

SEQ ID NO: 586371 - RNA, 19 nt, Homo sapiens
  misc_RNA (1)...(19): siRNA sense strand
ggccgcaccugcauuguga

SEQ ID NO: 586372 - RNA, 19 nt, Homo sapiens
  misc_RNA (1)...(19): siRNA sense strand
uggauccacucuagucaua

SEQ ID NO: 586373 - RNA, 19 nt, Homo sapiens
  misc_RNA (1)...(19): siRNA sense strand
ugaaauuguuggcuggaaa

SEQ ID NO: 586374 - RNA, 19 nt, Homo sapiens
  misc_RNA (1)...(19): siRNA sense strand
agaacuagcugcuuaugca

SEQ ID NO: 586375 - RNA, 19 nt, Homo sapiens
  misc_RNA (1)...(19): siRNA sense strand
gaaggccgcaccugcauug

SEQ ID NO: 586376 - RNA, 19 nt, Homo sapiens
  misc_RNA (1)...(19): siRNA sense strand
gcagaagugcaacauauuc

SEQ ID NO: 586377 - RNA, 19 nt, Homo sapiens
  misc_RNA (1)...(19): siRNA sense strand
cagaauggcccuacuuugu

SEQ ID NO: 586378 - RNA, 19 nt, Homo sapiens
  misc_RNA (1)...(19): siRNA sense strand
ccaccaguguccuuucuga

SEQ ID NO: 586379 - RNA, 19 nt, Homo sapiens
  misc_RNA (1)...(19): siRNA sense strand
guuugaggauggaguaauu

SEQ ID NO: 586380 - RNA, 19 nt, Homo sapiens
  misc_RNA (1)...(19): siRNA sense strand
ugaagggccucaaccugaa

SEQ ID NO: 586381 - RNA, 19 nt, Homo sapiens
  misc_RNA (1)...(19): siRNA sense strand
ucaggacugugauagcuuu

SEQ ID NO: 586382 - RNA, 19 nt, Homo sapiens
  misc_RNA (1)...(19): siRNA sense strand
gaacucaauacgcggcuaa

SEQ ID NO: 586383 - RNA, 19 nt, Homo sapiens
  misc_RNA (1)...(19): siRNA sense strand
gaagucguguucaacuauc

SEQ ID NO: 586384 - RNA, 19 nt, Homo sapiens
  misc_RNA (1)...(19): siRNA sense strand
cuggaaagauugcaacaga

SEQ ID NO: 586385 - RNA, 19 nt, Homo sapiens
  misc_RNA (1)...(19): siRNA sense strand
ccgauggacuugaagcaaa

SEQ ID NO: 586386 - RNA, 19 nt, Homo sapiens
  misc_RNA (1)...(19): siRNA sense strand
gaaauuugacacccugguu

SEQ ID NO: 586387 - RNA, 19 nt, Homo sapiens
  misc_RNA (1)...(19): siRNA sense strand
guacaggcagcucuggaua

SEQ ID NO: 586388 - RNA, 19 nt, Homo sapiens
  misc_RNA (1)...(19): siRNA sense strand
gcgaacugaugaagaagga

SEQ ID NO: 586389 - RNA, 19 nt, Homo sapiens
  misc_RNA (1)...(19): siRNA sense strand
ugggaaagcuggcgagauc

SEQ ID NO: 586390 - RNA, 19 nt, Homo sapiens
  misc_RNA (1)...(19): siRNA sense strand
cuauuugacugcagcauug

SEQ ID NO: 586391 - RNA, 19 nt, Homo sapiens
  misc_RNA (1)...(19): siRNA sense strand
gauccacucuagucauauc

SEQ ID NO: 586392 - RNA, 19 nt, Homo sapiens
  misc_RNA (1)...(19): siRNA sense strand
gaagccugauaaauuugaa

SEQ ID NO: 586393 - RNA, 19 nt, Homo sapiens
  misc_RNA (1)...(19): siRNA sense strand
ucagagaucauagcgauuu

SEQ ID NO: 586394 - RNA, 19 nt, Homo sapiens
  misc_RNA (1)...(19): siRNA sense strand
ccacucuagucauaucaaa

SEQ ID NO: 586395 - RNA, 19 nt, Homo sapiens
  misc_RNA (1)...(19): siRNA sense strand
agaaaugacuagauaugca

SEQ ID NO: 586396 - RNA, 19 nt, Homo sapiens
  misc_RNA (1)...(19): siRNA sense strand
gaaaauauuaggacaguug

SEQ ID NO: 586397 - RNA, 19 nt, Homo sapiens
  misc_RNA (1)...(19): siRNA sense strand
uagcaguuguuccaauuau

SEQ ID NO: 586398 - RNA, 19 nt, Homo sapiens
  misc_RNA (1)...(19): siRNA sense strand
gcugcuaaauccaggcaaa

SEQ ID NO: 586399 - RNA, 19 nt, Homo sapiens
  misc_RNA (1)...(19): siRNA sense strand
cagguuggcuuuaauugca

SEQ ID NO: 586400 - RNA, 19 nt, Homo sapiens
  misc_RNA (1)...(19): siRNA sense strand
ccagaagacugcggucaau

SEQ ID NO: 586401 - RNA, 19 nt, Homo sapiens
  misc_RNA (1)...(19): siRNA sense strand
gcauauuacuacucaggau

SEQ ID NO: 586402 - RNA, 19 nt, Homo sapiens
  misc_RNA (1)...(19): siRNA sense strand
ggaaaugccaaaagagaua

SEQ ID NO: 586403 - RNA, 19 nt, Homo sapiens
  misc_RNA (1)...(19): siRNA sense strand
ccgagaauauugccuaugg

SEQ ID NO: 586404 - RNA, 19 nt, Homo sapiens
  misc_RNA (1)...(19): siRNA sense strand
caacagaggcaauagaaaa

SEQ ID NO: 586405 - RNA, 19 nt, Homo sapiens
  misc_RNA (1)...(19): siRNA sense strand
gagaauauaucccuacugu

SEQ ID NO: 586406 - RNA, 19 nt, Homo sapiens
  misc_RNA (1)...(19): siRNA sense strand
gaaaaugccugcuguugua

SEQ ID NO: 586407 - RNA, 19 nt, Homo sapiens
  misc_RNA (1)...(19): siRNA sense strand
ggaacuaaacuugaucuua

SEQ ID NO: 586408 - RNA, 19 nt, Homo sapiens
  misc_RNA (1)...(19): siRNA sense strand
gaauauaucccuacugucu

SEQ ID NO: 586409 - RNA, 19 nt, Homo sapiens
  misc_RNA (1)...(19): siRNA sense strand
ugugaguccugcaucauuu

SEQ ID NO: 586410 - RNA, 19 nt, Homo sapiens
  misc_RNA (1)...(19): siRNA sense strand
auauaucccuacugucuuu

SEQ ID NO: 586411 - RNA, 19 nt, Homo sapiens
  misc_RNA (1)...(19): siRNA sense strand
ugacaauuauucugccaau

SEQ ID NO: 586412 - RNA, 19 nt, Homo sapiens
  misc_RNA (1)...(19): siRNA sense strand
gguaaaacuugccuacuga

SEQ ID NO: 586413 - RNA, 19 nt, Homo sapiens
  misc_RNA (1)...(19): siRNA sense strand
gauguguucuuaauuugcu

SEQ ID NO: 586414 - RNA, 19 nt, Homo sapiens
  misc_RNA (1)...(19): siRNA sense strand
gaucuuagggaugauaaag

SEQ ID NO: 586415 - RNA, 19 nt, Homo sapiens
  misc_RNA (1)...(19): siRNA sense strand
gacaauuauucugccaaug

SEQ ID NO: 586416 - RNA, 19 nt, Homo sapiens
  misc_RNA (1)...(19): siRNA sense strand
cggcaccacugucccaaca

SEQ ID NO: 586417 - RNA, 19 nt, Homo sapiens
  misc_RNA (1)...(19): siRNA sense strand
aguccugcaucauuugaaa

SEQ ID NO: 586418 - RNA, 19 nt, Homo sapiens
  misc_RNA (1)...(19): siRNA sense strand
acacagcgaggccucaaga

SEQ ID NO: 586419 - RNA, 19 nt, Homo sapiens
  misc_RNA (1)...(19): siRNA sense strand
aacuugaucuuagggauga

SEQ ID NO: 586420 - RNA, 19 nt, Homo sapiens
  misc_RNA (1)...(19): siRNA sense strand
agugggaacuaaacuugau

SEQ ID NO: 586421 - RNA, 19 nt, Homo sapiens
  misc_RNA (1)...(19): siRNA sense strand
gagaaaaugccugcuguug

SEQ ID NO: 586422 - RNA, 19 nt, Homo sapiens
  misc_RNA (1)...(19): siRNA sense strand
ggauacagcuggacaagaa

SEQ ID NO: 586423 - RNA, 19 nt, Homo sapiens
  misc_RNA (1)...(19): siRNA sense strand
gagaauauaucccuacugu

SEQ ID NO: 586424 - RNA, 19 nt, Homo sapiens
  misc_RNA (1)...(19): siRNA sense strand
gaaaaugccugcuguugua

SEQ ID NO: 586425 - RNA, 19 nt, Homo sapiens
  misc_RNA (1)...(19): siRNA sense strand
acaagaagauuaugacaga

SEQ ID NO: 586426 - RNA, 19 nt, Homo sapiens
  misc_RNA (1)...(19): siRNA sense strand
ggaacuaaacuugaucuua

SEQ ID NO: 586427 - RNA, 19 nt, Homo sapiens
  misc_RNA (1)...(19): siRNA sense strand
gaauauaucccuacugucu

SEQ ID NO: 586428 - RNA, 19 nt, Homo sapiens
  misc_RNA (1)...(19): siRNA sense strand
cagcuggacaagaagauua

SEQ ID NO: 586429 - RNA, 19 nt, Homo sapiens
  misc_RNA (1)...(19): siRNA sense strand
ugugaguccugcaucauuu

SEQ ID NO: 586430 - RNA, 19 nt, Homo sapiens
  misc_RNA (1)...(19): siRNA sense strand
auauaucccuacugucuuu

SEQ ID NO: 586431 - RNA, 19 nt, Homo sapiens
  misc_RNA (1)...(19): siRNA sense strand
ugacaauuauucugccaau

SEQ ID NO: 586432 - RNA, 19 nt, Homo sapiens
  misc_RNA (1)...(19): siRNA sense strand
gguaaaacuugccuacuga

SEQ ID NO: 586433 - RNA, 19 nt, Homo sapiens
  misc_RNA (1)...(19): siRNA sense strand
ggacaagaagauuaugaca

SEQ ID NO: 586434 - RNA, 19 nt, Homo sapiens
  misc_RNA (1)...(19): siRNA sense strand
gauguguucuuaauuugcu

SEQ ID NO: 586435 - RNA, 19 nt, Homo sapiens
  misc_RNA (1)...(19): siRNA sense strand
gaucuuagggaugauaaag

SEQ ID NO: 586436 - RNA, 19 nt, Homo sapiens
  misc_RNA (1)...(19): siRNA sense strand
gacaauuauucugccaaug

SEQ ID NO: 586437 - RNA, 19 nt, Homo sapiens
  misc_RNA (1)...(19): siRNA sense strand
cggcaccacugucccaaca

SEQ ID NO: 586438 - RNA, 19 nt, Homo sapiens
  misc_RNA (1)...(19): siRNA sense strand
caagaagauuaugacagau

SEQ ID NO: 586439 - RNA, 19 nt, Homo sapiens
  misc_RNA (1)...(19): siRNA sense strand
aguccugcaucauuugaaa

SEQ ID NO: 586440 - RNA, 19 nt, Homo sapiens
  misc_RNA (1)...(19): siRNA sense strand
acacagcgaggccucaaga

SEQ ID NO: 586441 - RNA, 19 nt, Homo sapiens
  misc_RNA (1)...(19): siRNA sense strand
aacuugaucuuagggauga

SEQ ID NO: 586442 - RNA, 19 nt, Homo sapiens
  misc_RNA (1)...(19): siRNA sense strand
agugggaacuaaacuugau

SEQ ID NO: 586443 - RNA, 19 nt, Homo sapiens
  misc_RNA (1)...(19): siRNA sense strand
gagaaaaugccugcuguug

SEQ ID NO: 586444 - RNA, 19 nt, Homo sapiens
  misc_RNA (1)...(19): siRNA sense strand
ggauacagcuggacaagaa

SEQ ID NO: 586445 - RNA, 19 nt, Homo sapiens
  misc_RNA (1)...(19): siRNA sense strand
gaaaaugccugcuguugua

SEQ ID NO: 586446 - RNA, 19 nt, Homo sapiens
  misc_RNA (1)...(19): siRNA sense strand
acaagaagauuaugacaga

SEQ ID NO: 586447 - RNA, 19 nt, Homo sapiens
  misc_RNA (1)...(19): siRNA sense strand
ggaacuaaacuugaucuua

SEQ ID NO: 586448 - RNA, 19 nt, Homo sapiens
  misc_RNA (1)...(19): siRNA sense strand
aaucugggcuuaugggaua

SEQ ID NO: 586449 - RNA, 19 nt, Homo sapiens
  misc_RNA (1)...(19): siRNA sense strand
ucgagaaacugaaggagaa

SEQ ID NO: 586450 - RNA, 19 nt, Homo sapiens
  misc_RNA (1)...(19): siRNA sense strand
ggagauuggugcuguaaaa

SEQ ID NO: 586451 - RNA, 19 nt, Homo sapiens
  misc_RNA (1)...(19): siRNA sense strand
ugaagaagaggaagagaaa

SEQ ID NO: 586452 - RNA, 19 nt, Homo sapiens
  misc_RNA (1)...(19): siRNA sense strand
uaaggagauuggugcugua

SEQ ID NO: 586453 - RNA, 19 nt, Homo sapiens
  misc_RNA (1)...(19): siRNA sense strand
cagcuggacaagaagauua

SEQ ID NO: 586454 - RNA, 19 nt, Homo sapiens
  misc_RNA (1)...(19): siRNA sense strand
ugugaguccugcaucauuu

SEQ ID NO: 586455 - RNA, 19 nt, Homo sapiens
  misc_RNA (1)...(19): siRNA sense strand
uaaagacacgaucgagaaa

SEQ ID NO: 586456 - RNA, 19 nt, Homo sapiens
  misc_RNA (1)...(19): siRNA sense strand
caagacaguguuugacgaa

SEQ ID NO: 586457 - RNA, 19 nt, Homo sapiens
  misc_RNA (1)...(19): siRNA sense strand
ggacaagaagauuaugaca

SEQ ID NO: 586458 - RNA, 19 nt, Homo sapiens
  misc_RNA (1)...(19): siRNA sense strand
auaaagacacgaucgagaa

SEQ ID NO: 586459 - RNA, 19 nt, Homo sapiens
  misc_RNA (1)...(19): siRNA sense strand
gcaccacugucccaacacu

SEQ ID NO: 586460 - RNA, 19 nt, Homo sapiens
  misc_RNA (1)...(19): siRNA sense strand
gugaagaagaggaagagaa

SEQ ID NO: 586461 - RNA, 19 nt, Homo sapiens
  misc_RNA (1)...(19): siRNA sense strand
caacacucccaucauccua

SEQ ID NO: 586462 - RNA, 19 nt, Homo sapiens
  misc_RNA (1)...(19): siRNA sense strand
gauguguucuuaauuugcu

SEQ ID NO: 586463 - RNA, 19 nt, Homo sapiens
  misc_RNA (1)...(19): siRNA sense strand
gaaaauguccgugcaaagu

SEQ ID NO: 586464 - RNA, 19 nt, Homo sapiens
  misc_RNA (1)...(19): siRNA sense strand
gacacgaucgagaaacuga

SEQ ID NO: 586465 - RNA, 19 nt, Homo sapiens
  misc_RNA (1)...(19): siRNA sense strand
gaucuuagggaugauaaag

SEQ ID NO: 586466 - RNA, 19 nt, Homo sapiens
  misc_RNA (1)...(19): siRNA sense strand
caagaagauuaugacagau

SEQ ID NO: 586467 - RNA, 19 nt, Homo sapiens
  misc_RNA (1)...(19): siRNA sense strand
ucccaacacucccaucauc

SEQ ID NO: 586468 - RNA, 19 nt, Homo sapiens
  misc_RNA (1)...(19): siRNA sense strand
cggcaccacugucccaaca

SEQ ID NO: 586469 - RNA, 19 nt, Homo sapiens
  misc_RNA (1)...(19): siRNA sense strand
aguccugcaucauuugaaa

SEQ ID NO: 586470 - RNA, 19 nt, Homo sapiens
  misc_RNA (1)...(19): siRNA sense strand
acacagcgaggccucaaga

SEQ ID NO: 586471 - RNA, 19 nt, Homo sapiens
  misc_RNA (1)...(19): siRNA sense strand
aacuugaucuuagggauga

SEQ ID NO: 586472 - RNA, 19 nt, Homo sapiens
  misc_RNA (1)...(19): siRNA sense strand
agugggaacuaaacuugau

SEQ ID NO: 586473 - RNA, 19 nt, Homo sapiens
  misc_RNA (1)...(19): siRNA sense strand
gagaaaaugccugcuguug

SEQ ID NO: 586474 - RNA, 19 nt, Homo sapiens
  misc_RNA (1)...(19): siRNA sense strand
gauuggugcuguaaaauac

SEQ ID NO: 586475 - RNA, 19 nt, Homo sapiens
  misc_RNA (1)...(19): siRNA sense strand
cggugaaucugggcuuaug

SEQ ID NO: 586476 - RNA, 19 nt, Homo sapiens
  misc_RNA (1)...(19): siRNA sense strand
agaaacugaaggagaagaa

SEQ ID NO: 586477 - RNA, 19 nt, Homo sapiens
  misc_RNA (1)...(19): siRNA sense strand
aagacacgaucgagaaacu

SEQ ID NO: 586478 - RNA, 19 nt, Homo sapiens
  misc_RNA (1)...(19): siRNA sense strand
gagaaacugaaggagaaga

SEQ ID NO: 586479 - RNA, 19 nt, Homo sapiens
  misc_RNA (1)...(19): siRNA sense strand
gaaacugaaggagaagaag

SEQ ID NO: 586480 - RNA, 19 nt, Homo sapiens
  misc_RNA (1)...(19): siRNA sense strand
gagaauauaucccuacugu

SEQ ID NO: 586481 - RNA, 19 nt, Homo sapiens
  misc_RNA (1)...(19): siRNA sense strand
gaaaaugccugcuguugua

SEQ ID NO: 586482 - RNA, 19 nt, Homo sapiens
  misc_RNA (1)...(19): siRNA sense strand
ggaacuaaacuugaucuua

SEQ ID NO: 586483 - RNA, 19 nt, Homo sapiens
  misc_RNA (1)...(19): siRNA sense strand
gaauauaucccuacugucu

SEQ ID NO: 586484 - RNA, 19 nt, Homo sapiens
  misc_RNA (1)...(19): siRNA sense strand
ugugaguccugcaucauuu

SEQ ID NO: 586485 - RNA, 19 nt, Homo sapiens
  misc_RNA (1)...(19): siRNA sense strand
auauaucccuacugucuuu

SEQ ID NO: 586486 - RNA, 19 nt, Homo sapiens
  misc_RNA (1)...(19): siRNA sense strand
ugacaauuauucugccaau

SEQ ID NO: 586487 - RNA, 19 nt, Homo sapiens
  misc_RNA (1)...(19): siRNA sense strand
gguaaaacuugccuacuga

SEQ ID NO: 586488 - RNA, 19 nt, Homo sapiens
  misc_RNA (1)...(19): siRNA sense strand
gauguguucuuaauuugcu

SEQ ID NO: 586489 - RNA, 19 nt, Homo sapiens
  misc_RNA (1)...(19): siRNA sense strand
gaucuuagggaugauaaag

SEQ ID NO: 586490 - RNA, 19 nt, Homo sapiens
  misc_RNA (1)...(19): siRNA sense strand
gacaauuauucugccaaug

SEQ ID NO: 586491 - RNA, 19 nt, Homo sapiens
  misc_RNA (1)...(19): siRNA sense strand
cggcaccacugucccaaca

SEQ ID NO: 586492 - RNA, 19 nt, Homo sapiens
  misc_RNA (1)...(19): siRNA sense strand
aguccugcaucauuugaaa

SEQ ID NO: 586493 - RNA, 19 nt, Homo sapiens
  misc_RNA (1)...(19): siRNA sense strand
acacagcgaggccucaaga

SEQ ID NO: 586494 - RNA, 19 nt, Homo sapiens
  misc_RNA (1)...(19): siRNA sense strand
aacuugaucuuagggauga

SEQ ID NO: 586495 - RNA, 19 nt, Homo sapiens
  misc_RNA (1)...(19): siRNA sense strand
agugggaacuaaacuugau

SEQ ID NO: 586496 - RNA, 19 nt, Homo sapiens
  misc_RNA (1)...(19): siRNA sense strand
gagaaaaugccugcuguug

SEQ ID NO: 586497 - RNA, 19 nt, Homo sapiens
  misc_RNA (1)...(19): siRNA sense strand
ggauacagcuggacaagaa

SEQ ID NO: 586498 - RNA, 19 nt, Homo sapiens
  misc_RNA (1)...(19): siRNA sense strand
gagaauauaucccuacugu

SEQ ID NO: 586499 - RNA, 19 nt, Homo sapiens
  misc_RNA (1)...(19): siRNA sense strand
gaaaaugccugcuguugua

SEQ ID NO: 586500 - RNA, 19 nt, Homo sapiens
  misc_RNA (1)...(19): siRNA sense strand
acaagaagauuaugacaga

SEQ ID NO: 586501 - RNA, 19 nt, Homo sapiens
  misc_RNA (1)...(19): siRNA sense strand
ggaacuaaacuugaucuua

SEQ ID NO: 586502 - RNA, 19 nt, Homo sapiens
  misc_RNA (1)...(19): siRNA sense strand
gaauauaucccuacugucu

SEQ ID NO: 586503 - RNA, 19 nt, Homo sapiens
  misc_RNA (1)...(19): siRNA sense strand
cagcuggacaagaagauua

SEQ ID NO: 586504 - RNA, 19 nt, Homo sapiens
  misc_RNA (1)...(19): siRNA sense strand
ugugaguccugcaucauuu

SEQ ID NO: 586505 - RNA, 19 nt, Homo sapiens
  misc_RNA (1)...(19): siRNA sense strand
auauaucccuacugucuuu

SEQ ID NO: 586506 - RNA, 19 nt, Homo sapiens
  misc_RNA (1)...(19): siRNA sense strand
ugacaauuauucugccaau

SEQ ID NO: 586507 - RNA, 19 nt, Homo sapiens
  misc_RNA (1)...(19): siRNA sense strand
gguaaaacuugccuacuga

SEQ ID NO: 586508 - RNA, 19 nt, Homo sapiens
  misc_RNA (1)...(19): siRNA sense strand
ggacaagaagauuaugaca

SEQ ID NO: 586509 - RNA, 19 nt, Homo sapiens
  misc_RNA (1)...(19): siRNA sense strand
gauguguucuuaauuugcu

SEQ ID NO: 586510 - RNA, 19 nt, Homo sapiens
  misc_RNA (1)...(19): siRNA sense strand
gaucuuagggaugauaaag

SEQ ID NO: 586511 - RNA, 19 nt, Homo sapiens
  misc_RNA (1)...(19): siRNA sense strand
gacaauuauucugccaaug

SEQ ID NO: 586512 - RNA, 19 nt, Homo sapiens
  misc_RNA (1)...(19): siRNA sense strand
cggcaccacugucccaaca

SEQ ID NO: 586513 - RNA, 19 nt, Homo sapiens
  misc_RNA (1)...(19): siRNA sense strand
caagaagauuaugacagau

SEQ ID NO: 586514 - RNA, 19 nt, Homo sapiens
  misc_RNA (1)...(19): siRNA sense strand
aguccugcaucauuugaaa

SEQ ID NO: 586515 - RNA, 19 nt, Homo sapiens
  misc_RNA (1)...(19): siRNA sense strand
acacagcgaggccucaaga

SEQ ID NO: 586516 - RNA, 19 nt, Homo sapiens
  misc_RNA (1)...(19): siRNA sense strand
aacuugaucuuagggauga

SEQ ID NO: 586517 - RNA, 19 nt, Homo sapiens
  misc_RNA (1)...(19): siRNA sense strand
agugggaacuaaacuugau

SEQ ID NO: 586518 - RNA, 19 nt, Homo sapiens
  misc_RNA (1)...(19): siRNA sense strand
gagaaaaugccugcuguug

SEQ ID NO: 586519 - RNA, 19 nt, Homo sapiens
  misc_RNA (1)...(19): siRNA sense strand
ggauacagcuggacaagaa

SEQ ID NO: 586520 - RNA, 19 nt, Homo sapiens
  misc_RNA (1)...(19): siRNA sense strand
gaaaaugccugcuguugua

SEQ ID NO: 586521 - RNA, 19 nt, Homo sapiens
  misc_RNA (1)...(19): siRNA sense strand
acaagaagauuaugacaga

SEQ ID NO: 586522 - RNA, 19 nt, Homo sapiens
  misc_RNA (1)...(19): siRNA sense strand
ggaacuaaacuugaucuua

SEQ ID NO: 586523 - RNA, 19 nt, Homo sapiens
  misc_RNA (1)...(19): siRNA sense strand
aaucugggcuuaugggaua

SEQ ID NO: 586524 - RNA, 19 nt, Homo sapiens
  misc_RNA (1)...(19): siRNA sense strand
ucgagaaacugaaggagaa

SEQ ID NO: 586525 - RNA, 19 nt, Homo sapiens
  misc_RNA (1)...(19): siRNA sense strand
ggagauuggugcuguaaaa

SEQ ID NO: 586526 - RNA, 19 nt, Homo sapiens
  misc_RNA (1)...(19): siRNA sense strand
ugaagaagaggaagagaaa

SEQ ID NO: 586527 - RNA, 19 nt, Homo sapiens
  misc_RNA (1)...(19): siRNA sense strand
uaaggagauuggugcugua

SEQ ID NO: 586528 - RNA, 19 nt, Homo sapiens
  misc_RNA (1)...(19): siRNA sense strand
cagcuggacaagaagauua

SEQ ID NO: 586529 - RNA, 19 nt, Homo sapiens
  misc_RNA (1)...(19): siRNA sense strand
ugugaguccugcaucauuu

SEQ ID NO: 586530 - RNA, 19 nt, Homo sapiens
  misc_RNA (1)...(19): siRNA sense strand
uaaagacacgaucgagaaa

SEQ ID NO: 586531 - RNA, 19 nt, Homo sapiens
  misc_RNA (1)...(19): siRNA sense strand
caagacaguguuugacgaa

SEQ ID NO: 586532 - RNA, 19 nt, Homo sapiens
  misc_RNA (1)...(19): siRNA sense strand
ggacaagaagauuaugaca

SEQ ID NO: 586533 - RNA, 19 nt, Homo sapiens
  misc_RNA (1)...(19): siRNA sense strand
auaaagacacgaucgagaa

SEQ ID NO: 586534 - RNA, 19 nt, Homo sapiens
  misc_RNA (1)...(19): siRNA sense strand
gcaccacugucccaacacu

SEQ ID NO: 586535 - RNA, 19 nt, Homo sapiens
  misc_RNA (1)...(19): siRNA sense strand
gugaagaagaggaagagaa

SEQ ID NO: 586536 - RNA, 19 nt, Homo sapiens
  misc_RNA (1)...(19): siRNA sense strand
caacacucccaucauccua

SEQ ID NO: 586537 - RNA, 19 nt, Homo sapiens
  misc_RNA (1)...(19): siRNA sense strand
gauguguucuuaauuugcu

SEQ ID NO: 586538 - RNA, 19 nt, Homo sapiens
  misc_RNA (1)...(19): siRNA sense strand
gaaaauguccgugcaaagu

SEQ ID NO: 586539 - RNA, 19 nt, Homo sapiens
  misc_RNA (1)...(19): siRNA sense strand
gacacgaucgagaaacuga

SEQ ID NO: 586540 - RNA, 19 nt, Homo sapiens
  misc_RNA (1)...(19): siRNA sense strand
gaucuuagggaugauaaag

SEQ ID NO: 586541 - RNA, 19 nt, Homo sapiens
  misc_RNA (1)...(19): siRNA sense strand
caagaagauuaugacagau

SEQ ID NO: 586542 - RNA, 19 nt, Homo sapiens
  misc_RNA (1)...(19): siRNA sense strand
ucccaacacucccaucauc

SEQ ID NO: 586543 - RNA, 19 nt, Homo sapiens
  misc_RNA (1)...(19): siRNA sense strand
cggcaccacugucccaaca

SEQ ID NO: 586544 - RNA, 19 nt, Homo sapiens
  misc_RNA (1)...(19): siRNA sense strand
aguccugcaucauuugaaa

SEQ ID NO: 586545 - RNA, 19 nt, Homo sapiens
  misc_RNA (1)...(19): siRNA sense strand
acacagcgaggccucaaga

SEQ ID NO: 586546 - RNA, 19 nt, Homo sapiens
  misc_RNA (1)...(19): siRNA sense strand
aacuugaucuuagggauga

SEQ ID NO: 586547 - RNA, 19 nt, Homo sapiens
  misc_RNA (1)...(19): siRNA sense strand
agugggaacuaaacuugau

SEQ ID NO: 586548 - RNA, 19 nt, Homo sapiens
  misc_RNA (1)...(19): siRNA sense strand
gagaaaaugccugcuguug

SEQ ID NO: 586549 - RNA, 19 nt, Homo sapiens
  misc_RNA (1)...(19): siRNA sense strand
gauuggugcuguaaaauac

SEQ ID NO: 586550 - RNA, 19 nt, Homo sapiens
  misc_RNA (1)...(19): siRNA sense strand
cggugaaucugggcuuaug

SEQ ID NO: 586551 - RNA, 19 nt, Homo sapiens
  misc_RNA (1)...(19): siRNA sense strand
agaaacugaaggagaagaa

SEQ ID NO: 586552 - RNA, 19 nt, Homo sapiens
  misc_RNA (1)...(19): siRNA sense strand
aagacacgaucgagaaacu

SEQ ID NO: 586553 - RNA, 19 nt, Homo sapiens
  misc_RNA (1)...(19): siRNA sense strand
gagaaacugaaggagaaga

SEQ ID NO: 586554 - RNA, 19 nt, Homo sapiens
  misc_RNA (1)...(19): siRNA sense strand
gaaacugaaggagaagaag

SEQ ID NO: 586555 - RNA, 19 nt, Homo sapiens
  misc_RNA (1)...(19): siRNA sense strand
ggaaggagcuggaguuuga

SEQ ID NO: 586556 - RNA, 19 nt, Homo sapiens
  misc_RNA (1)...(19): siRNA sense strand
gcaaagaggaucaaacaaa

SEQ ID NO: 586557 - RNA, 19 nt, Homo sapiens
  misc_RNA (1)...(19): siRNA sense strand
gcaccuguauuccuuguaa

SEQ ID NO: 586558 - RNA, 19 nt, Homo sapiens
  misc_RNA (1)...(19): siRNA sense strand
ggacuggccucucugaaga

SEQ ID NO: 586559 - RNA, 19 nt, Homo sapiens
  misc_RNA (1)...(19): siRNA sense strand
ugacaacacugauggcauu

SEQ ID NO: 586560 - RNA, 19 nt, Homo sapiens
  misc_RNA (1)...(19): siRNA sense strand
caagaugacuguggaaaga

SEQ ID NO: 586561 - RNA, 19 nt, Homo sapiens
  misc_RNA (1)...(19): siRNA sense strand
gaaaucagaucagcugcuu

SEQ ID NO: 586562 - RNA, 19 nt, Homo sapiens
  misc_RNA (1)...(19): siRNA sense strand
ggaaggcuguccaacgaaa

SEQ ID NO: 586563 - RNA, 19 nt, Homo sapiens
  misc_RNA (1)...(19): siRNA sense strand
gcacagagggcaaagaaug

SEQ ID NO: 586564 - RNA, 19 nt, Homo sapiens
  misc_RNA (1)...(19): siRNA sense strand
cagcagcucuuacagaaug

SEQ ID NO: 586565 - RNA, 19 nt, Homo sapiens
  misc_RNA (1)...(19): siRNA sense strand
ggagaacgcugugauaggu

SEQ ID NO: 586566 - RNA, 19 nt, Homo sapiens
  misc_RNA (1)...(19): siRNA sense strand
gaauauggaugcaguacag

SEQ ID NO: 586567 - RNA, 19 nt, Homo sapiens
  misc_RNA (1)...(19): siRNA sense strand
ggaagucugugauugcaau

SEQ ID NO: 586568 - RNA, 19 nt, Homo sapiens
  misc_RNA (1)...(19): siRNA sense strand
aaggagagcuggaaaggaa

SEQ ID NO: 586569 - RNA, 19 nt, Homo sapiens
  misc_RNA (1)...(19): siRNA sense strand
gaaguugagagcauccuua

SEQ ID NO: 586570 - RNA, 19 nt, Homo sapiens
  misc_RNA (1)...(19): siRNA sense strand
cgaaaugggucuccugcaa

SEQ ID NO: 586571 - RNA, 19 nt, Homo sapiens
  misc_RNA (1)...(19): siRNA sense strand
ggagggaagucugugauug

SEQ ID NO: 586572 - RNA, 19 nt, Homo sapiens
  misc_RNA (1)...(19): siRNA sense strand
gcacaagaagcacugagua

SEQ ID NO: 586573 - RNA, 19 nt, Homo sapiens
  misc_RNA (1)...(19): siRNA sense strand
uaagaucaccucuaccuuu

SEQ ID NO: 586574 - RNA, 19 nt, Homo sapiens
  misc_RNA (1)...(19): siRNA sense strand
gaaaugggucuccugcaaa

SEQ ID NO: 586575 - RNA, 19 nt, Homo sapiens
  misc_RNA (1)...(19): siRNA sense strand
gcagguguuugaaguguau

SEQ ID NO: 586576 - RNA, 19 nt, Homo sapiens
  misc_RNA (1)...(19): siRNA sense strand
uaaaugagcauccaagcaa

SEQ ID NO: 586577 - RNA, 19 nt, Homo sapiens
  misc_RNA (1)...(19): siRNA sense strand
caaagaggaucaaacaaaa

SEQ ID NO: 586578 - RNA, 19 nt, Homo sapiens
  misc_RNA (1)...(19): siRNA sense strand
cacaggagauuguuauuca

SEQ ID NO: 586579 - RNA, 19 nt, Homo sapiens
  misc_RNA (1)...(19): siRNA sense strand
gagcauccaagcaauaauu

SEQ ID NO: 586580 - RNA, 19 nt, Homo sapiens
  misc_RNA (1)...(19): siRNA sense strand
gaacuucacagacaaacug

SEQ ID NO: 586581 - RNA, 19 nt, Homo sapiens
  misc_RNA (1)...(19): siRNA sense strand
gcacagcagcucuuacaga

SEQ ID NO: 586582 - RNA, 19 nt, Homo sapiens
  misc_RNA (1)...(19): siRNA sense strand
caccaagacuuacacauuc

SEQ ID NO: 586583 - RNA, 19 nt, Homo sapiens
  misc_RNA (1)...(19): siRNA sense strand
ggaaucaacaggugagcua

SEQ ID NO: 586584 - RNA, 19 nt, Homo sapiens
  misc_RNA (1)...(19): siRNA sense strand
cagaauacaguguccauaa

SEQ ID NO: 586585 - RNA, 19 nt, Homo sapiens
  misc_RNA (1)...(19): siRNA sense strand
cacagcagcucuuacagaa

SEQ ID NO: 586586 - RNA, 19 nt, Homo sapiens
  misc_RNA (1)...(19): siRNA sense strand
gaauggaggcccugauuuc

SEQ ID NO: 586587 - RNA, 19 nt, Homo sapiens
  misc_RNA (1)...(19): siRNA sense strand
caacacagccggcaucuac

SEQ ID NO: 586588 - RNA, 19 nt, Homo sapiens
  misc_RNA (1)...(19): siRNA sense strand
ggguucagcugcucaguga

SEQ ID NO: 586589 - RNA, 19 nt, Homo sapiens
  misc_RNA (1)...(19): siRNA sense strand
ucaggaggccacaagauua

SEQ ID NO: 586590 - RNA, 19 nt, Homo sapiens
  misc_RNA (1)...(19): siRNA sense strand
gaauacaguguccauaaga

SEQ ID NO: 586591 - RNA, 19 nt, Homo sapiens
  misc_RNA (1)...(19): siRNA sense strand
cagacaaacugguaaugga

SEQ ID NO: 586592 - RNA, 19 nt, Homo sapiens
  misc_RNA (1)...(19): siRNA sense strand
ggagagagaaaucagauca

SEQ ID NO: 586593 - RNA, 19 nt, Homo sapiens
  misc_RNA (1)...(19): siRNA sense strand
gagaauggaggcccugauu

SEQ ID NO: 586594 - RNA, 19 nt, Homo sapiens
  misc_RNA (1)...(19): siRNA sense strand
ucaccaagacuuacacauu

SEQ ID NO: 586595 - RNA, 19 nt, Homo sapiens
  misc_RNA (1)...(19): siRNA sense strand
caagggaaacugaggacua

SEQ ID NO: 586596 - RNA, 19 nt, Homo sapiens
  misc_RNA (1)...(19): siRNA sense strand
gaagguuacugcggaaucu

SEQ ID NO: 586597 - RNA, 19 nt, Homo sapiens
  misc_RNA (1)...(19): siRNA sense strand
uaaccaggcauauggauga

SEQ ID NO: 586598 - RNA, 19 nt, Homo sapiens
  misc_RNA (1)...(19): siRNA sense strand
ggacggugcuguggugcaa

SEQ ID NO: 586599 - RNA, 19 nt, Homo sapiens
  misc_RNA (1)...(19): siRNA sense strand
cauccgagcuacauaugga

SEQ ID NO: 586600 - RNA, 19 nt, Homo sapiens
  misc_RNA (1)...(19): siRNA sense strand
ggucacagcgccaucaaga

SEQ ID NO: 586601 - RNA, 19 nt, Homo sapiens
  misc_RNA (1)...(19): siRNA sense strand
gcauauggaugaguucaag

SEQ ID NO: 586602 - RNA, 19 nt, Homo sapiens
  misc_RNA (1)...(19): siRNA sense strand
uggaggcccugauuucaaa

SEQ ID NO: 586603 - RNA, 19 nt, Homo sapiens
  misc_RNA (1)...(19): siRNA sense strand
ucagauggaucaguuuaug

SEQ ID NO: 586604 - RNA, 19 nt, Homo sapiens
  misc_RNA (1)...(19): siRNA sense strand
gugcaaagcaggcuacuuc

SEQ ID NO: 586605 - RNA, 19 nt, Homo sapiens
  misc_RNA (1)...(19): siRNA sense strand
caacugcaaugacaacacu

SEQ ID NO: 586606 - RNA, 19 nt, Homo sapiens
  misc_RNA (1)...(19): siRNA sense strand
gcaguacagauggugauua

SEQ ID NO: 586607 - RNA, 19 nt, Homo sapiens
  misc_RNA (1)...(19): siRNA sense strand
ccaggcauauggaugaguu

SEQ ID NO: 586608 - RNA, 19 nt, Homo sapiens
  misc_RNA (1)...(19): siRNA sense strand
gccacaagauuagcagaaa

SEQ ID NO: 586609 - RNA, 19 nt, Homo sapiens
  misc_RNA (1)...(19): siRNA sense strand
gaagugauggcaccugugu

SEQ ID NO: 586610 - RNA, 19 nt, Homo sapiens
  misc_RNA (1)...(19): siRNA sense strand
gaggagguggugugcaaua

SEQ ID NO: 586611 - RNA, 19 nt, Homo sapiens
  misc_RNA (1)...(19): siRNA sense strand
caguguauauguccuguug

SEQ ID NO: 586612 - RNA, 19 nt, Homo sapiens
  misc_RNA (1)...(19): siRNA sense strand
gaaagggaccgcuguuugc

SEQ ID NO: 586613 - RNA, 19 nt, Homo sapiens
  misc_RNA (1)...(19): siRNA sense strand
gacaaugugacccugauuu

SEQ ID NO: 586614 - RNA, 19 nt, Homo sapiens
  misc_RNA (1)...(19): siRNA sense strand
ugaggacuauuccaaacaa

SEQ ID NO: 586615 - RNA, 19 nt, Homo sapiens
  misc_RNA (1)...(19): siRNA sense strand
gagaaagggaccgcuguuu

SEQ ID NO: 586616 - RNA, 19 nt, Homo sapiens
  misc_RNA (1)...(19): siRNA sense strand
aagacacacucaacacauu

SEQ ID NO: 586617 - RNA, 19 nt, Homo sapiens
  misc_RNA (1)...(19): siRNA sense strand
gauggaguaguaccugaua

SEQ ID NO: 586618 - RNA, 19 nt, Homo sapiens
  misc_RNA (1)...(19): siRNA sense strand
ggguggugauggaguagua

SEQ ID NO: 586619 - RNA, 19 nt, Homo sapiens
  misc_RNA (1)...(19): siRNA sense strand
ucaggguggugauggagua

SEQ ID NO: 586620 - RNA, 19 nt, Homo sapiens
  misc_RNA (1)...(19): siRNA sense strand
aauuguaacuccaaagguu

SEQ ID NO: 586621 - RNA, 19 nt, Homo sapiens
  misc_RNA (1)...(19): siRNA sense strand
gcagaaagccacguugagu

SEQ ID NO: 586622 - RNA, 19 nt, Homo sapiens
  misc_RNA (1)...(19): siRNA sense strand
gagaugcccagauuucaga

SEQ ID NO: 586623 - RNA, 19 nt, Homo sapiens
  misc_RNA (1)...(19): siRNA sense strand
gaucaccucuaccuuucau

SEQ ID NO: 586624 - RNA, 19 nt, Homo sapiens
  misc_RNA (1)...(19): siRNA sense strand
gaagugcaagaauggcuuu

SEQ ID NO: 586625 - RNA, 19 nt, Homo sapiens
  misc_RNA (1)...(19): siRNA sense strand
ggaaguccaggcaguguau

SEQ ID NO: 586626 - RNA, 19 nt, Homo sapiens
  misc_RNA (1)...(19): siRNA sense strand
cagcugagccuggcagaaa

SEQ ID NO: 586627 - RNA, 19 nt, Homo sapiens
  misc_RNA (1)...(19): siRNA sense strand
ucgaucagguuacuauaau

SEQ ID NO: 586628 - RNA, 19 nt, Homo sapiens
  misc_RNA (1)...(19): siRNA sense strand
gaagaagcaaagaggauca

SEQ ID NO: 586629 - RNA, 19 nt, Homo sapiens
  misc_RNA (1)...(19): siRNA sense strand
agacacacucaacacauua

SEQ ID NO: 586630 - RNA, 19 nt, Homo sapiens
  misc_RNA (1)...(19): siRNA sense strand
gcagaauacaguguccaua

SEQ ID NO: 586631 - RNA, 19 nt, Homo sapiens
  misc_RNA (1)...(19): siRNA sense strand
caagaagcacugaguaugg

SEQ ID NO: 586632 - RNA, 19 nt, Homo sapiens
  misc_RNA (1)...(19): siRNA sense strand
aaacugaggacuauuccaa

SEQ ID NO: 586633 - RNA, 19 nt, Homo sapiens
  misc_RNA (1)...(19): siRNA sense strand
gagcaacugacaagggaaa

SEQ ID NO: 586634 - RNA, 19 nt, Homo sapiens
  misc_RNA (1)...(19): siRNA sense strand
uaacauggagcaacugaca

SEQ ID NO: 586635 - RNA, 19 nt, Homo sapiens
  misc_RNA (1)...(19): siRNA sense strand
cggaggagguggugugcaa

SEQ ID NO: 586636 - RNA, 19 nt, Homo sapiens
  misc_RNA (1)...(19): siRNA sense strand
caggugagcuaugggcaaa

SEQ ID NO: 586637 - RNA, 19 nt, Homo sapiens
  misc_RNA (1)...(19): siRNA sense strand
uagcucagcccaacgacua

SEQ ID NO: 586638 - RNA, 19 nt, Homo sapiens
  misc_RNA (1)...(19): siRNA sense strand
gcuauaaucaagugaagau

SEQ ID NO: 586639 - RNA, 19 nt, Homo sapiens
  misc_RNA (1)...(19): siRNA sense strand
aagaucaccucuaccuuuc

SEQ ID NO: 586640 - RNA, 19 nt, Homo sapiens
  misc_RNA (1)...(19): siRNA sense strand
ugaagaagccaugaagaga

SEQ ID NO: 586641 - RNA, 19 nt, Homo sapiens
  misc_RNA (1)...(19): siRNA sense strand
agauucagauggaucaguu

SEQ ID NO: 586642 - RNA, 19 nt, Homo sapiens
  misc_RNA (1)...(19): siRNA sense strand
caacccagcagacaagugu

SEQ ID NO: 586643 - RNA, 19 nt, Homo sapiens
  misc_RNA (1)...(19): siRNA sense strand
gagguggugugcaauaacu

SEQ ID NO: 586644 - RNA, 19 nt, Homo sapiens
  misc_RNA (1)...(19): siRNA sense strand
gacuuacacauucagguua

SEQ ID NO: 586645 - RNA, 19 nt, Homo sapiens
  misc_RNA (1)...(19): siRNA sense strand
cagcugaguuacuuugagu

SEQ ID NO: 586646 - RNA, 19 nt, Homo sapiens
  misc_RNA (1)...(19): siRNA sense strand
gcgcaaggcccugcaugaa

SEQ ID NO: 586647 - RNA, 19 nt, Homo sapiens
  misc_RNA (1)...(19): siRNA sense strand
gggaaacugaggacuauuc

SEQ ID NO: 586648 - RNA, 19 nt, Homo sapiens
  misc_RNA (1)...(19): siRNA sense strand
ccaguaacauggagcaacu

SEQ ID NO: 586649 - RNA, 19 nt, Homo sapiens
  misc_RNA (1)...(19): siRNA sense strand
ugagagaugcccagauuuc

SEQ ID NO: 586650 - RNA, 19 nt, Homo sapiens
  misc_RNA (1)...(19): siRNA sense strand
gaugagaauccugacauug

SEQ ID NO: 586651 - RNA, 19 nt, Homo sapiens
  misc_RNA (1)...(19): siRNA sense strand
ccacaagauuagcagaaag

SEQ ID NO: 586652 - RNA, 19 nt, Homo sapiens
  misc_RNA (1)...(19): siRNA sense strand
ggauuccgcugccucaacu

SEQ ID NO: 586653 - RNA, 19 nt, Homo sapiens
  misc_RNA (1)...(19): siRNA sense strand
aagggaaacugaggacuau

SEQ ID NO: 586654 - RNA, 19 nt, Homo sapiens
  misc_RNA (1)...(19): siRNA sense strand
agaaagggaccgcuguuug

SEQ ID NO: 586655 - RNA, 19 nt, Homo sapiens
  misc_RNA (1)...(19): siRNA sense strand
ggaaggagcuggaguuuga

SEQ ID NO: 586656 - RNA, 19 nt, Homo sapiens
  misc_RNA (1)...(19): siRNA sense strand
gcaaagaggaucaaacaaa

SEQ ID NO: 586657 - RNA, 19 nt, Homo sapiens
  misc_RNA (1)...(19): siRNA sense strand
gcaccuguauuccuuguaa

SEQ ID NO: 586658 - RNA, 19 nt, Homo sapiens
  misc_RNA (1)...(19): siRNA sense strand
ggacuggccucucugaaga

SEQ ID NO: 586659 - RNA, 19 nt, Homo sapiens
  misc_RNA (1)...(19): siRNA sense strand
ugacaacacugauggcauu

SEQ ID NO: 586660 - RNA, 19 nt, Homo sapiens
  misc_RNA (1)...(19): siRNA sense strand
caagaugacuguggaaaga

SEQ ID NO: 586661 - RNA, 19 nt, Homo sapiens
  misc_RNA (1)...(19): siRNA sense strand
gaaaucagaucagcugcuu

SEQ ID NO: 586662 - RNA, 19 nt, Homo sapiens
  misc_RNA (1)...(19): siRNA sense strand
ggaaggcuguccaacgaaa

SEQ ID NO: 586663 - RNA, 19 nt, Homo sapiens
  misc_RNA (1)...(19): siRNA sense strand
gcacagagggcaaagaaug

SEQ ID NO: 586664 - RNA, 19 nt, Homo sapiens
  misc_RNA (1)...(19): siRNA sense strand
cagcagcucuuacagaaug

SEQ ID NO: 586665 - RNA, 19 nt, Homo sapiens
  misc_RNA (1)...(19): siRNA sense strand
ggagaacgcugugauaggu

SEQ ID NO: 586666 - RNA, 19 nt, Homo sapiens
  misc_RNA (1)...(19): siRNA sense strand
gaauauggaugcaguacag

SEQ ID NO: 586667 - RNA, 19 nt, Homo sapiens
  misc_RNA (1)...(19): siRNA sense strand
ggaagucugugauugcaau

SEQ ID NO: 586668 - RNA, 19 nt, Homo sapiens
  misc_RNA (1)...(19): siRNA sense strand
aaggagagcuggaaaggaa

SEQ ID NO: 586669 - RNA, 19 nt, Homo sapiens
  misc_RNA (1)...(19): siRNA sense strand
gaaguugagagcauccuua

SEQ ID NO: 586670 - RNA, 19 nt, Homo sapiens
  misc_RNA (1)...(19): siRNA sense strand
cgaaaugggucuccugcaa

SEQ ID NO: 586671 - RNA, 19 nt, Homo sapiens
  misc_RNA (1)...(19): siRNA sense strand
ggagggaagucugugauug

SEQ ID NO: 586672 - RNA, 19 nt, Homo sapiens
  misc_RNA (1)...(19): siRNA sense strand
gcacaagaagcacugagua

SEQ ID NO: 586673 - RNA, 19 nt, Homo sapiens
  misc_RNA (1)...(19): siRNA sense strand
uaagaucaccucuaccuuu

SEQ ID NO: 586674 - RNA, 19 nt, Homo sapiens
  misc_RNA (1)...(19): siRNA sense strand
gaaaugggucuccugcaaa

SEQ ID NO: 586675 - RNA, 19 nt, Homo sapiens
  misc_RNA (1)...(19): siRNA sense strand
gcagguguuugaaguguau

SEQ ID NO: 586676 - RNA, 19 nt, Homo sapiens
  misc_RNA (1)...(19): siRNA sense strand
uaaaugagcauccaagcaa

SEQ ID NO: 586677 - RNA, 19 nt, Homo sapiens
  misc_RNA (1)...(19): siRNA sense strand
caaagaggaucaaacaaaa

SEQ ID NO: 586678 - RNA, 19 nt, Homo sapiens
  misc_RNA (1)...(19): siRNA sense strand
cacaggagauuguuauuca

SEQ ID NO: 586679 - RNA, 19 nt, Homo sapiens
  misc_RNA (1)...(19): siRNA sense strand
gagcauccaagcaauaauu

SEQ ID NO: 586680 - RNA, 19 nt, Homo sapiens
  misc_RNA (1)...(19): siRNA sense strand
gaacuucacagacaaacug

SEQ ID NO: 586681 - RNA, 19 nt, Homo sapiens
  misc_RNA (1)...(19): siRNA sense strand
gcacagcagcucuuacaga

SEQ ID NO: 586682 - RNA, 19 nt, Homo sapiens
  misc_RNA (1)...(19): siRNA sense strand
caccaagacuuacacauuc

SEQ ID NO: 586683 - RNA, 19 nt, Homo sapiens
  misc_RNA (1)...(19): siRNA sense strand
ggaaucaacaggugagcua

SEQ ID NO: 586684 - RNA, 19 nt, Homo sapiens
  misc_RNA (1)...(19): siRNA sense strand
cagaauacaguguccauaa

SEQ ID NO: 586685 - RNA, 19 nt, Homo sapiens
  misc_RNA (1)...(19): siRNA sense strand
cacagcagcucuuacagaa

SEQ ID NO: 586686 - RNA, 19 nt, Homo sapiens
  misc_RNA (1)...(19): siRNA sense strand
gaauggaggcccugauuuc

SEQ ID NO: 586687 - RNA, 19 nt, Homo sapiens
  misc_RNA (1)...(19): siRNA sense strand
caacacagccggcaucuac

SEQ ID NO: 586688 - RNA, 19 nt, Homo sapiens
  misc_RNA (1)...(19): siRNA sense strand
ggguucagcugcucaguga

SEQ ID NO: 586689 - RNA, 19 nt, Homo sapiens
  misc_RNA (1)...(19): siRNA sense strand
ucaggaggccacaagauua

SEQ ID NO: 586690 - RNA, 19 nt, Homo sapiens
  misc_RNA (1)...(19): siRNA sense strand
gaauacaguguccauaaga

SEQ ID NO: 586691 - RNA, 19 nt, Homo sapiens
  misc_RNA (1)...(19): siRNA sense strand
cagacaaacugguaaugga

SEQ ID NO: 586692 - RNA, 19 nt, Homo sapiens
  misc_RNA (1)...(19): siRNA sense strand
ggagagagaaaucagauca

SEQ ID NO: 586693 - RNA, 19 nt, Homo sapiens
  misc_RNA (1)...(19): siRNA sense strand
gagaauggaggcccugauu

SEQ ID NO: 586694 - RNA, 19 nt, Homo sapiens
  misc_RNA (1)...(19): siRNA sense strand
ucaccaagacuuacacauu

SEQ ID NO: 586695 - RNA, 19 nt, Homo sapiens
  misc_RNA (1)...(19): siRNA sense strand
caagggaaacugaggacua

SEQ ID NO: 586696 - RNA, 19 nt, Homo sapiens
  misc_RNA (1)...(19): siRNA sense strand
gaagguuacugcggaaucu

SEQ ID NO: 586697 - RNA, 19 nt, Homo sapiens
  misc_RNA (1)...(19): siRNA sense strand
uaaccaggcauauggauga

SEQ ID NO: 586698 - RNA, 19 nt, Homo sapiens
  misc_RNA (1)...(19): siRNA sense strand
ggacggugcuguggugcaa

SEQ ID NO: 586699 - RNA, 19 nt, Homo sapiens
  misc_RNA (1)...(19): siRNA sense strand
cauccgagcuacauaugga

SEQ ID NO: 586700 - RNA, 19 nt, Homo sapiens
  misc_RNA (1)...(19): siRNA sense strand
ggucacagcgccaucaaga

SEQ ID NO: 586701 - RNA, 19 nt, Homo sapiens
  misc_RNA (1)...(19): siRNA sense strand
gcauauggaugaguucaag

SEQ ID NO: 586702 - RNA, 19 nt, Homo sapiens
  misc_RNA (1)...(19): siRNA sense strand
uggaggcccugauuucaaa

SEQ ID NO: 586703 - RNA, 19 nt, Homo sapiens
  misc_RNA (1)...(19): siRNA sense strand
ucagauggaucaguuuaug

SEQ ID NO: 586704 - RNA, 19 nt, Homo sapiens
  misc_RNA (1)...(19): siRNA sense strand
gugcaaagcaggcuacuuc

SEQ ID NO: 586705 - RNA, 19 nt, Homo sapiens
  misc_RNA (1)...(19): siRNA sense strand
caacugcaaugacaacacu

SEQ ID NO: 586706 - RNA, 19 nt, Homo sapiens
  misc_RNA (1)...(19): siRNA sense strand
gcaguacagauggugauua

SEQ ID NO: 586707 - RNA, 19 nt, Homo sapiens
  misc_RNA (1)...(19): siRNA sense strand
ccaggcauauggaugaguu

SEQ ID NO: 586708 - RNA, 19 nt, Homo sapiens
  misc_RNA (1)...(19): siRNA sense strand
gccacaagauuagcagaaa

SEQ ID NO: 586709 - RNA, 19 nt, Homo sapiens
  misc_RNA (1)...(19): siRNA sense strand
gaagugauggcaccugugu

SEQ ID NO: 586710 - RNA, 19 nt, Homo sapiens
  misc_RNA (1)...(19): siRNA sense strand
gaggagguggugugcaaua

SEQ ID NO: 586711 - RNA, 19 nt, Homo sapiens
  misc_RNA (1)...(19): siRNA sense strand
caguguauauguccuguug

SEQ ID NO: 586712 - RNA, 19 nt, Homo sapiens
  misc_RNA (1)...(19): siRNA sense strand
gaaagggaccgcuguuugc

SEQ ID NO: 586713 - RNA, 19 nt, Homo sapiens
  misc_RNA (1)...(19): siRNA sense strand
gacaaugugacccugauuu

SEQ ID NO: 586714 - RNA, 19 nt, Homo sapiens
  misc_RNA (1)...(19): siRNA sense strand
ugaggacuauuccaaacaa

SEQ ID NO: 586715 - RNA, 19 nt, Homo sapiens
  misc_RNA (1)...(19): siRNA sense strand
gagaaagggaccgcuguuu

SEQ ID NO: 586716 - RNA, 19 nt, Homo sapiens
  misc_RNA (1)...(19): siRNA sense strand
aagacacacucaacacauu

SEQ ID NO: 586717 - RNA, 19 nt, Homo sapiens
  misc_RNA (1)...(19): siRNA sense strand
gauggaguaguaccugaua

SEQ ID NO: 586718 - RNA, 19 nt, Homo sapiens
  misc_RNA (1)...(19): siRNA sense strand
ggguggugauggaguagua

SEQ ID NO: 586719 - RNA, 19 nt, Homo sapiens
  misc_RNA (1)...(19): siRNA sense strand
ucaggguggugauggagua

SEQ ID NO: 586720 - RNA, 19 nt, Homo sapiens
  misc_RNA (1)...(19): siRNA sense strand
aauuguaacuccaaagguu

SEQ ID NO: 586721 - RNA, 19 nt, Homo sapiens
  misc_RNA (1)...(19): siRNA sense strand
gcagaaagccacguugagu

SEQ ID NO: 586722 - RNA, 19 nt, Homo sapiens
  misc_RNA (1)...(19): siRNA sense strand
gagaugcccagauuucaga

SEQ ID NO: 586723 - RNA, 19 nt, Homo sapiens
  misc_RNA (1)...(19): siRNA sense strand
gaucaccucuaccuuucau

SEQ ID NO: 586724 - RNA, 19 nt, Homo sapiens
  misc_RNA (1)...(19): siRNA sense strand
gaagugcaagaauggcuuu

SEQ ID NO: 586725 - RNA, 19 nt, Homo sapiens
  misc_RNA (1)...(19): siRNA sense strand
ggaaguccaggcaguguau

SEQ ID NO: 586726 - RNA, 19 nt, Homo sapiens
  misc_RNA (1)...(19): siRNA sense strand
cagcugagccuggcagaaa

SEQ ID NO: 586727 - RNA, 19 nt, Homo sapiens
  misc_RNA (1)...(19): siRNA sense strand
ucgaucagguuacuauaau

SEQ ID NO: 586728 - RNA, 19 nt, Homo sapiens
  misc_RNA (1)...(19): siRNA sense strand
gaagaagcaaagaggauca

SEQ ID NO: 586729 - RNA, 19 nt, Homo sapiens
  misc_RNA (1)...(19): siRNA sense strand
agacacacucaacacauua

SEQ ID NO: 586730 - RNA, 19 nt, Homo sapiens
  misc_RNA (1)...(19): siRNA sense strand
gcagaauacaguguccaua

SEQ ID NO: 586731 - RNA, 19 nt, Homo sapiens
  misc_RNA (1)...(19): siRNA sense strand
caagaagcacugaguaugg

SEQ ID NO: 586732 - RNA, 19 nt, Homo sapiens
  misc_RNA (1)...(19): siRNA sense strand
aaacugaggacuauuccaa

SEQ ID NO: 586733 - RNA, 19 nt, Homo sapiens
  misc_RNA (1)...(19): siRNA sense strand
gagcaacugacaagggaaa

SEQ ID NO: 586734 - RNA, 19 nt, Homo sapiens
  misc_RNA (1)...(19): siRNA sense strand
uaacauggagcaacugaca

SEQ ID NO: 586735 - RNA, 19 nt, Homo sapiens
  misc_RNA (1)...(19): siRNA sense strand
cggaggagguggugugcaa

SEQ ID NO: 586736 - RNA, 19 nt, Homo sapiens
  misc_RNA (1)...(19): siRNA sense strand
caggugagcuaugggcaaa

SEQ ID NO: 586737 - RNA, 19 nt, Homo sapiens
  misc_RNA (1)...(19): siRNA sense strand
uagcucagcccaacgacua

SEQ ID NO: 586738 - RNA, 19 nt, Homo sapiens
  misc_RNA (1)...(19): siRNA sense strand
gcuauaaucaagugaagau

SEQ ID NO: 586739 - RNA, 19 nt, Homo sapiens
  misc_RNA (1)...(19): siRNA sense strand
aagaucaccucuaccuuuc

SEQ ID NO: 586740 - RNA, 19 nt, Homo sapiens
  misc_RNA (1)...(19): siRNA sense strand
ugaagaagccaugaagaga

SEQ ID NO: 586741 - RNA, 19 nt, Homo sapiens
  misc_RNA (1)...(19): siRNA sense strand
agauucagauggaucaguu

SEQ ID NO: 586742 - RNA, 19 nt, Homo sapiens
  misc_RNA (1)...(19): siRNA sense strand
caacccagcagacaagugu

SEQ ID NO: 586743 - RNA, 19 nt, Homo sapiens
  misc_RNA (1)...(19): siRNA sense strand
gagguggugugcaauaacu

SEQ ID NO: 586744 - RNA, 19 nt, Homo sapiens
  misc_RNA (1)...(19): siRNA sense strand
gacuuacacauucagguua

SEQ ID NO: 586745 - RNA, 19 nt, Homo sapiens
  misc_RNA (1)...(19): siRNA sense strand
cagcugaguuacuuugagu

SEQ ID NO: 586746 - RNA, 19 nt, Homo sapiens
  misc_RNA (1)...(19): siRNA sense strand
gcgcaaggcccugcaugaa

SEQ ID NO: 586747 - RNA, 19 nt, Homo sapiens
  misc_RNA (1)...(19): siRNA sense strand
gggaaacugaggacuauuc

SEQ ID NO: 586748 - RNA, 19 nt, Homo sapiens
  misc_RNA (1)...(19): siRNA sense strand
ccaguaacauggagcaacu

SEQ ID NO: 586749 - RNA, 19 nt, Homo sapiens
  misc_RNA (1)...(19): siRNA sense strand
ugagagaugcccagauuuc

SEQ ID NO: 586750 - RNA, 19 nt, Homo sapiens
  misc_RNA (1)...(19): siRNA sense strand
gaugagaauccugacauug

SEQ ID NO: 586751 - RNA, 19 nt, Homo sapiens
  misc_RNA (1)...(19): siRNA sense strand
ccacaagauuagcagaaag

SEQ ID NO: 586752 - RNA, 19 nt, Homo sapiens
  misc_RNA (1)...(19): siRNA sense strand
ggauuccgcugccucaacu

SEQ ID NO: 586753 - RNA, 19 nt, Homo sapiens
  misc_RNA (1)...(19): siRNA sense strand
aagggaaacugaggacuau

SEQ ID NO: 586754 - RNA, 19 nt, Homo sapiens
  misc_RNA (1)...(19): siRNA sense strand
agaaagggaccgcuguuug

SEQ ID NO: 586755 - RNA, 19 nt, Homo sapiens
  misc_RNA (1)...(19): siRNA sense strand
gcacggaccucaaguacuc

SEQ ID NO: 586756 - RNA, 19 nt, Homo sapiens
  misc_RNA (1)...(19): siRNA sense strand
gcacggaucucgagaacag

SEQ ID NO: 586757 - RNA, 19 nt, Homo sapiens
  misc_RNA (1)...(19): siRNA sense strand
ggagaagcaucugaaagaa

SEQ ID NO: 586758 - RNA, 19 nt, Homo sapiens
  misc_RNA (1)...(19): siRNA sense strand
cauaagcccugcaagaaug

SEQ ID NO: 586759 - RNA, 19 nt, Homo sapiens
  misc_RNA (1)...(19): siRNA sense strand
cauagcaacugagguguaa

SEQ ID NO: 586760 - RNA, 19 nt, Homo sapiens
  misc_RNA (1)...(19): siRNA sense strand
ggacggcccuugcuuuaac

SEQ ID NO: 586761 - RNA, 19 nt, Homo sapiens
  misc_RNA (1)...(19): siRNA sense strand
ccacacagauucuccugau

SEQ ID NO: 586762 - RNA, 19 nt, Homo sapiens
  misc_RNA (1)...(19): siRNA sense strand
gugcaacccuggcuggaaa

SEQ ID NO: 586763 - RNA, 19 nt, Homo sapiens
  misc_RNA (1)...(19): siRNA sense strand
ccacagcgccgacaagaau

SEQ ID NO: 586764 - RNA, 19 nt, Homo sapiens
  misc_RNA (1)...(19): siRNA sense strand
cgacaagaauggcuucaag

SEQ ID NO: 586765 - RNA, 19 nt, Homo sapiens
  misc_RNA (1)...(19): siRNA sense strand
gagaagcaucugaaagaaa

SEQ ID NO: 586766 - RNA, 19 nt, Homo sapiens
  misc_RNA (1)...(19): siRNA sense strand
ucaagaacaccaacaagaa

SEQ ID NO: 586767 - RNA, 19 nt, Homo sapiens
  misc_RNA (1)...(19): siRNA sense strand
gcggacggcccuugcuuua

SEQ ID NO: 586768 - RNA, 19 nt, Homo sapiens
  misc_RNA (1)...(19): siRNA sense strand
gcacgcacccugccacaau

SEQ ID NO: 586769 - RNA, 19 nt, Homo sapiens
  misc_RNA (1)...(19): siRNA sense strand
ccaaguaccagucggugua

SEQ ID NO: 586770 - RNA, 19 nt, Homo sapiens
  misc_RNA (1)...(19): siRNA sense strand
ugaacaaccuggccaacug

SEQ ID NO: 586771 - RNA, 19 nt, Homo sapiens
  misc_RNA (1)...(19): siRNA sense strand
gaagcucuccacacagauu

SEQ ID NO: 586772 - RNA, 19 nt, Homo sapiens
  misc_RNA (1)...(19): siRNA sense strand
acccagcgguggacuauaa

SEQ ID NO: 586773 - RNA, 19 nt, Homo sapiens
  misc_RNA (1)...(19): siRNA sense strand
ggucauccuuguccucaug

SEQ ID NO: 586774 - RNA, 19 nt, Homo sapiens
  misc_RNA (1)...(19): siRNA sense strand
ggagccaccugcaccaaca

SEQ ID NO: 586775 - RNA, 19 nt, Homo sapiens
  misc_RNA (1)...(19): siRNA sense strand
ggcaccuucucucugauua

SEQ ID NO: 586776 - RNA, 19 nt, Homo sapiens
  misc_RNA (1)...(19): siRNA sense strand
cugaugaccucgcaacaga

SEQ ID NO: 586777 - RNA, 19 nt, Homo sapiens
  misc_RNA (1)...(19): siRNA sense strand
uauugaagcucuccacaca

SEQ ID NO: 586778 - RNA, 19 nt, Homo sapiens
  misc_RNA (1)...(19): siRNA sense strand
gcucuucacccuguucuaa

SEQ ID NO: 586779 - RNA, 19 nt, Homo sapiens
  misc_RNA (1)...(19): siRNA sense strand
caccuucucucugauuauu

SEQ ID NO: 586780 - RNA, 19 nt, Homo sapiens
  misc_RNA (1)...(19): siRNA sense strand
gugaugagcagcauggauu

SEQ ID NO: 586781 - RNA, 19 nt, Homo sapiens
  misc_RNA (1)...(19): siRNA sense strand
acacagauucuccugauga

SEQ ID NO: 586782 - RNA, 19 nt, Homo sapiens
  misc_RNA (1)...(19): siRNA sense strand
agacggagaccaugaacaa

SEQ ID NO: 586783 - RNA, 19 nt, Homo sapiens
  misc_RNA (1)...(19): siRNA sense strand
uggagaagcaucugaaaga

SEQ ID NO: 586784 - RNA, 19 nt, Homo sapiens
  misc_RNA (1)...(19): siRNA sense strand
gaugaccucgcaacagaaa

SEQ ID NO: 586785 - RNA, 19 nt, Homo sapiens
  misc_RNA (1)...(19): siRNA sense strand
ggcaaaaucugugaauuga

SEQ ID NO: 586786 - RNA, 19 nt, Homo sapiens
  misc_RNA (1)...(19): siRNA sense strand
caaaaucugugaauugagu

SEQ ID NO: 586787 - RNA, 19 nt, Homo sapiens
  misc_RNA (1)...(19): siRNA sense strand
ccgggcaccuucucucuga

SEQ ID NO: 586788 - RNA, 19 nt, Homo sapiens
  misc_RNA (1)...(19): siRNA sense strand
agaagcaucugaaagaaaa

SEQ ID NO: 586789 - RNA, 19 nt, Homo sapiens
  misc_RNA (1)...(19): siRNA sense strand
gggauggcgugaacgacuu

SEQ ID NO: 586790 - RNA, 19 nt, Homo sapiens
  misc_RNA (1)...(19): siRNA sense strand
uugaagcucuccacacaga

SEQ ID NO: 586791 - RNA, 19 nt, Homo sapiens
  misc_RNA (1)...(19): siRNA sense strand
caagaacaccaacaagaag

SEQ ID NO: 586792 - RNA, 19 nt, Homo sapiens
  misc_RNA (1)...(19): siRNA sense strand
gacucgggcuguucaacuu

SEQ ID NO: 586793 - RNA, 19 nt, Homo sapiens
  misc_RNA (1)...(19): siRNA sense strand
ccacgcagaucaagaacac

SEQ ID NO: 586794 - RNA, 19 nt, Homo sapiens
  misc_RNA (1)...(19): siRNA sense strand
ugacgaguguauccgcuau

SEQ ID NO: 586795 - RNA, 19 nt, Homo sapiens
  misc_RNA (1)...(19): siRNA sense strand
gggccacgcagaucaagaa

SEQ ID NO: 586796 - RNA, 19 nt, Homo sapiens
  misc_RNA (1)...(19): siRNA sense strand
ccuucucucugauuauuga

SEQ ID NO: 586797 - RNA, 19 nt, Homo sapiens
  misc_RNA (1)...(19): siRNA sense strand
ccauaagcccugcaagaau

SEQ ID NO: 586798 - RNA, 19 nt, Homo sapiens
  misc_RNA (1)...(19): siRNA sense strand
gaacuacugcacacaccau

SEQ ID NO: 586799 - RNA, 19 nt, Homo sapiens
  misc_RNA (1)...(19): siRNA sense strand
gaucaagaacaccaacaag

SEQ ID NO: 586800 - RNA, 19 nt, Homo sapiens
  misc_RNA (1)...(19): siRNA sense strand
caccauaagcccugcaaga

SEQ ID NO: 586801 - RNA, 19 nt, Homo sapiens
  misc_RNA (1)...(19): siRNA sense strand
ugcaggaguucgucaacaa

SEQ ID NO: 586802 - RNA, 19 nt, Homo sapiens
  misc_RNA (1)...(19): siRNA sense strand
gaccacagcgccgacaaga

SEQ ID NO: 586803 - RNA, 19 nt, Homo sapiens
  misc_RNA (1)...(19): siRNA sense strand
cagcauggauuuugugaca

SEQ ID NO: 586804 - RNA, 19 nt, Homo sapiens
  misc_RNA (1)...(19): siRNA sense strand
gggagacggagaccaugaa

SEQ ID NO: 586805 - RNA, 19 nt, Homo sapiens
  misc_RNA (1)...(19): siRNA sense strand
ggcugaggcugcagaagca

SEQ ID NO: 586806 - RNA, 19 nt, Homo sapiens
  misc_RNA (1)...(19): siRNA sense strand
ccaacaagaaggcggacuu

SEQ ID NO: 586807 - RNA, 19 nt, Homo sapiens
  misc_RNA (1)...(19): siRNA sense strand
ucauagcaacugaggugua

SEQ ID NO: 586808 - RNA, 19 nt, Homo sapiens
  misc_RNA (1)...(19): siRNA sense strand
gcaagcgugacaccaagug

SEQ ID NO: 586809 - RNA, 19 nt, Homo sapiens
  misc_RNA (1)...(19): siRNA sense strand
gcgaaugugcccgaagcua

SEQ ID NO: 586810 - RNA, 19 nt, Homo sapiens
  misc_RNA (1)...(19): siRNA sense strand
gggcaccuucucucugauu

SEQ ID NO: 586811 - RNA, 19 nt, Homo sapiens
  misc_RNA (1)...(19): siRNA sense strand
ggacucgggcuguucaacu

SEQ ID NO: 586812 - RNA, 19 nt, Homo sapiens
  misc_RNA (1)...(19): siRNA sense strand
gcgcacagcaagcgugaca

SEQ ID NO: 586813 - RNA, 19 nt, Homo sapiens
  misc_RNA (1)...(19): siRNA sense strand
gcaccuucucucugauuau

SEQ ID NO: 586814 - RNA, 19 nt, Homo sapiens
  misc_RNA (1)...(19): siRNA sense strand
agaagaaaauugacuacug

SEQ ID NO: 586815 - RNA, 19 nt, Homo sapiens
  misc_RNA (1)...(19): siRNA sense strand
ccagucgguguacgucaua

SEQ ID NO: 586816 - RNA, 19 nt, Homo sapiens
  misc_RNA (1)...(19): siRNA sense strand
gguggagaagcaucugaaa

SEQ ID NO: 586817 - RNA, 19 nt, Homo sapiens
  misc_RNA (1)...(19): siRNA sense strand
guucuaauggugccaagug

SEQ ID NO: 586818 - RNA, 19 nt, Homo sapiens
  misc_RNA (1)...(19): siRNA sense strand
ggaguucgucaacaagaag

SEQ ID NO: 586819 - RNA, 19 nt, Homo sapiens
  misc_RNA (1)...(19): siRNA sense strand
gggcgucgacuccuucagu

SEQ ID NO: 586820 - RNA, 19 nt, Homo sapiens
  misc_RNA (1)...(19): siRNA sense strand
ucuucacccuguucuaaug

SEQ ID NO: 586821 - RNA, 19 nt, Homo sapiens
  misc_RNA (1)...(19): siRNA sense strand
aggaguucgucaacaagaa

SEQ ID NO: 586822 - RNA, 19 nt, Homo sapiens
  misc_RNA (1)...(19): siRNA sense strand
cuaauggugccaagugugu

SEQ ID NO: 586823 - RNA, 19 nt, Homo sapiens
  misc_RNA (1)...(19): siRNA sense strand
gcaggaguucgucaacaag

SEQ ID NO: 586824 - RNA, 19 nt, Homo sapiens
  misc_RNA (1)...(19): siRNA sense strand
ccgguacugugacgagugu

SEQ ID NO: 586825 - RNA, 19 nt, Homo sapiens
  misc_RNA (1)...(19): siRNA sense strand
cgucauauccgaggagaag

SEQ ID NO: 586826 - RNA, 19 nt, Homo sapiens
  misc_RNA (1)...(19): siRNA sense strand
caaaagacaccaaguacca

SEQ ID NO: 586827 - RNA, 19 nt, Homo sapiens
  misc_RNA (1)...(19): siRNA sense strand
caacugccagcgugagaag

SEQ ID NO: 586828 - RNA, 19 nt, Homo sapiens
  misc_RNA (1)...(19): siRNA sense strand
ugaugagcagcauggauuu

SEQ ID NO: 586829 - RNA, 19 nt, Homo sapiens
  misc_RNA (1)...(19): siRNA sense strand
cacgcacccugccacaaug

SEQ ID NO: 586830 - RNA, 19 nt, Homo sapiens
  misc_RNA (1)...(19): siRNA sense strand
gaggcacugugacgacaac

SEQ ID NO: 586831 - RNA, 19 nt, Homo sapiens
  misc_RNA (1)...(19): siRNA sense strand
gcaaagauauugaugaaug

SEQ ID NO: 586832 - RNA, 19 nt, Homo sapiens
  misc_RNA (1)...(19): siRNA sense strand
gaugaaauguguuggaauu

SEQ ID NO: 586833 - RNA, 19 nt, Homo sapiens
  misc_RNA (1)...(19): siRNA sense strand
caagaucccuacauucuaa

SEQ ID NO: 586834 - RNA, 19 nt, Homo sapiens
  misc_RNA (1)...(19): siRNA sense strand
gauaugagcuaagcaguga

SEQ ID NO: 586835 - RNA, 19 nt, Homo sapiens
  misc_RNA (1)...(19): siRNA sense strand
agacagcaaugcaaagaua

SEQ ID NO: 586836 - RNA, 19 nt, Homo sapiens
  misc_RNA (1)...(19): siRNA sense strand
caagcuaccugugucaaua

SEQ ID NO: 586837 - RNA, 19 nt, Homo sapiens
  misc_RNA (1)...(19): siRNA sense strand
ccagagaaccgauguguuu

SEQ ID NO: 586838 - RNA, 19 nt, Homo sapiens
  misc_RNA (1)...(19): siRNA sense strand
gcucaacugugaagacauu

SEQ ID NO: 586839 - RNA, 19 nt, Homo sapiens
  misc_RNA (1)...(19): siRNA sense strand
caccaaagaugcgugaaua

SEQ ID NO: 586840 - RNA, 19 nt, Homo sapiens
  misc_RNA (1)...(19): siRNA sense strand
gggaaauucucauguaugu

SEQ ID NO: 586841 - RNA, 19 nt, Homo sapiens
  misc_RNA (1)...(19): siRNA sense strand
gaccaagugugcaucaauu

SEQ ID NO: 586842 - RNA, 19 nt, Homo sapiens
  misc_RNA (1)...(19): siRNA sense strand
gaaauguguuggaauuauc

SEQ ID NO: 586843 - RNA, 19 nt, Homo sapiens
  misc_RNA (1)...(19): siRNA sense strand
gaauacaccaggcucauuu

SEQ ID NO: 586844 - RNA, 19 nt, Homo sapiens
  misc_RNA (1)...(19): siRNA sense strand
ccaacaccaucaauacuuu

SEQ ID NO: 586845 - RNA, 19 nt, Homo sapiens
  misc_RNA (1)...(19): siRNA sense strand
cgacaaacaaguccuguaa

SEQ ID NO: 586846 - RNA, 19 nt, Homo sapiens
  misc_RNA (1)...(19): siRNA sense strand
caacgugugccaagacaua

SEQ ID NO: 586847 - RNA, 19 nt, Homo sapiens
  misc_RNA (1)...(19): siRNA sense strand
caaugaaccugggaaauuc

SEQ ID NO: 586848 - RNA, 19 nt, Homo sapiens
  misc_RNA (1)...(19): siRNA sense strand
aguagaacaugucaagaua

SEQ ID NO: 586849 - RNA, 19 nt, Homo sapiens
  misc_RNA (1)...(19): siRNA sense strand
caagcucuguguuaagauu

SEQ ID NO: 586850 - RNA, 19 nt, Homo sapiens
  misc_RNA (1)...(19): siRNA sense strand
caacauucuugguucauuc

SEQ ID NO: 586851 - RNA, 19 nt, Homo sapiens
  misc_RNA (1)...(19): siRNA sense strand
ccaagugugcaucaauuua

SEQ ID NO: 586852 - RNA, 19 nt, Homo sapiens
  misc_RNA (1)...(19): siRNA sense strand
gaaaacagcccagauuauu

SEQ ID NO: 586853 - RNA, 19 nt, Homo sapiens
  misc_RNA (1)...(19): siRNA sense strand
ucaaugaaccugggaaauu

SEQ ID NO: 586854 - RNA, 19 nt, Homo sapiens
  misc_RNA (1)...(19): siRNA sense strand
ccugggaaauucucaugua

SEQ ID NO: 586855 - RNA, 19 nt, Homo sapiens
  misc_RNA (1)...(19): siRNA sense strand
acaaacaaguccuguaagu

SEQ ID NO: 586856 - RNA, 19 nt, Homo sapiens
  misc_RNA (1)...(19): siRNA sense strand
ggugagaaguagaacaugu

SEQ ID NO: 586857 - RNA, 19 nt, Homo sapiens
  misc_RNA (1)...(19): siRNA sense strand
ggaaacacaaccagcagaa

SEQ ID NO: 586858 - RNA, 19 nt, Homo sapiens
  misc_RNA (1)...(19): siRNA sense strand
gcguagauauaaaugaaug

SEQ ID NO: 586859 - RNA, 19 nt, Homo sapiens
  misc_RNA (1)...(19): siRNA sense strand
ucagugcccuccuggauau

SEQ ID NO: 586860 - RNA, 19 nt, Homo sapiens
  misc_RNA (1)...(19): siRNA sense strand
ucagugcaaucaaggauau

SEQ ID NO: 586861 - RNA, 19 nt, Homo sapiens
  misc_RNA (1)...(19): siRNA sense strand
caauaucaaugugucaaug

SEQ ID NO: 586862 - RNA, 19 nt, Homo sapiens
  misc_RNA (1)...(19): siRNA sense strand
ggagcagugcguagacaua

SEQ ID NO: 586863 - RNA, 19 nt, Homo sapiens
  misc_RNA (1)...(19): siRNA sense strand
auacaggccacaacuauuu

SEQ ID NO: 586864 - RNA, 19 nt, Homo sapiens
  misc_RNA (1)...(19): siRNA sense strand
ugagugggauccugugaga

SEQ ID NO: 586865 - RNA, 19 nt, Homo sapiens
  misc_RNA (1)...(19): siRNA sense strand
gaacagccucagcaggaaa

SEQ ID NO: 586866 - RNA, 19 nt, Homo sapiens
  misc_RNA (1)...(19): siRNA sense strand
gcguagacauagaugaaug

SEQ ID NO: 586867 - RNA, 19 nt, Homo sapiens
  misc_RNA (1)...(19): siRNA sense strand
cugcguagauauaaaugaa

SEQ ID NO: 586868 - RNA, 19 nt, Homo sapiens
  misc_RNA (1)...(19): siRNA sense strand
caaccacuauggaggauac

SEQ ID NO: 586869 - RNA, 19 nt, Homo sapiens
  misc_RNA (1)...(19): siRNA sense strand
gauacaggccacaacuauu

SEQ ID NO: 586870 - RNA, 19 nt, Homo sapiens
  misc_RNA (1)...(19): siRNA sense strand
gcagcaggcuacgagcaaa

SEQ ID NO: 586871 - RNA, 19 nt, Homo sapiens
  misc_RNA (1)...(19): siRNA sense strand
aaacagcccagauuauugu

SEQ ID NO: 586872 - RNA, 19 nt, Homo sapiens
  misc_RNA (1)...(19): siRNA sense strand
guaccaucccuccauauug

SEQ ID NO: 586873 - RNA, 19 nt, Homo sapiens
  misc_RNA (1)...(19): siRNA sense strand
aaucaaggauaugagcuaa

SEQ ID NO: 586874 - RNA, 19 nt, Homo sapiens
  misc_RNA (1)...(19): siRNA sense strand
aacuauaccugcguagaua

SEQ ID NO: 586875 - RNA, 19 nt, Homo sapiens
  misc_RNA (1)...(19): siRNA sense strand
caacuauaccugcguagau

SEQ ID NO: 586876 - RNA, 19 nt, Homo sapiens
  misc_RNA (1)...(19): siRNA sense strand
gcagggacgcacaacugua

SEQ ID NO: 586877 - RNA, 19 nt, Homo sapiens
  misc_RNA (1)...(19): siRNA sense strand
cuacaacauucuugguuca

SEQ ID NO: 586878 - RNA, 19 nt, Homo sapiens
  misc_RNA (1)...(19): siRNA sense strand
cauggcggcuuccguuguu

SEQ ID NO: 586879 - RNA, 19 nt, Homo sapiens
  misc_RNA (1)...(19): siRNA sense strand
aauguaccaucccuccaua

SEQ ID NO: 586880 - RNA, 19 nt, Homo sapiens
  misc_RNA (1)...(19): siRNA sense strand
ugaaugugaugccagcaau

SEQ ID NO: 586881 - RNA, 19 nt, Homo sapiens
  misc_RNA (1)...(19): siRNA sense strand
caaguggugagaaguagaa

SEQ ID NO: 586882 - RNA, 19 nt, Homo sapiens
  misc_RNA (1)...(19): siRNA sense strand
ucaagaucccuacauucua

SEQ ID NO: 586883 - RNA, 19 nt, Homo sapiens
  misc_RNA (1)...(19): siRNA sense strand
gaauguaccaucccuccau

SEQ ID NO: 586884 - RNA, 19 nt, Homo sapiens
  misc_RNA (1)...(19): siRNA sense strand
caaucaaggauaugagcua

SEQ ID NO: 586885 - RNA, 19 nt, Homo sapiens
  misc_RNA (1)...(19): siRNA sense strand
guagaacaugucaagauau

SEQ ID NO: 586886 - RNA, 19 nt, Homo sapiens
  misc_RNA (1)...(19): siRNA sense strand
auagggaccuuccgcacaa

SEQ ID NO: 586887 - RNA, 19 nt, Homo sapiens
  misc_RNA (1)...(19): siRNA sense strand
gccaacaccaucaauacuu

SEQ ID NO: 586888 - RNA, 19 nt, Homo sapiens
  misc_RNA (1)...(19): siRNA sense strand
gucaauagucuacaaauac

SEQ ID NO: 586889 - RNA, 19 nt, Homo sapiens
  misc_RNA (1)...(19): siRNA sense strand
gugcguagacauagaugaa

SEQ ID NO: 586890 - RNA, 19 nt, Homo sapiens
  misc_RNA (1)...(19): siRNA sense strand
aaauggagaguucuaccua

SEQ ID NO: 586891 - RNA, 19 nt, Homo sapiens
  misc_RNA (1)...(19): siRNA sense strand
cccagacgcuuguaaaggu

SEQ ID NO: 586892 - RNA, 19 nt, Homo sapiens
  misc_RNA (1)...(19): siRNA sense strand
gauauaaaugagugugaga

SEQ ID NO: 586893 - RNA, 19 nt, Homo sapiens
  misc_RNA (1)...(19): siRNA sense strand
gaaguagaacaugucaaga

SEQ ID NO: 586894 - RNA, 19 nt, Homo sapiens
  misc_RNA (1)...(19): siRNA sense strand
cagcccagauuauugucaa

SEQ ID NO: 586895 - RNA, 19 nt, Homo sapiens
  misc_RNA (1)...(19): siRNA sense strand
ccaaagaugcgugaauaca

SEQ ID NO: 586896 - RNA, 19 nt, Homo sapiens
  misc_RNA (1)...(19): siRNA sense strand
ugaacagccucagcaggaa

SEQ ID NO: 586897 - RNA, 19 nt, Homo sapiens
  misc_RNA (1)...(19): siRNA sense strand
gcucgugaagucauuauca

SEQ ID NO: 586898 - RNA, 19 nt, Homo sapiens
  misc_RNA (1)...(19): siRNA sense strand
caaacaaguccuguaagug

SEQ ID NO: 586899 - RNA, 19 nt, Homo sapiens
  misc_RNA (1)...(19): siRNA sense strand
guaaagguggaaugaagug

SEQ ID NO: 586900 - RNA, 19 nt, Homo sapiens
  misc_RNA (1)...(19): siRNA sense strand
cuaccugugucaauaucaa

SEQ ID NO: 586901 - RNA, 19 nt, Homo sapiens
  misc_RNA (1)...(19): siRNA sense strand
acaccaggcucauuuuauu

SEQ ID NO: 586902 - RNA, 19 nt, Homo sapiens
  misc_RNA (1)...(19): siRNA sense strand
acaacauucuugguucauu

SEQ ID NO: 586903 - RNA, 19 nt, Homo sapiens
  misc_RNA (1)...(19): siRNA sense strand
ccgggaggaugaaaugugu

SEQ ID NO: 586904 - RNA, 19 nt, Homo sapiens
  misc_RNA (1)...(19): siRNA sense strand
gagcagaccaagugugcau

SEQ ID NO: 586905 - RNA, 19 nt, Homo sapiens
  misc_RNA (1)...(19): siRNA sense strand
caucaauacuuuucggauu

SEQ ID NO: 586906 - RNA, 19 nt, Homo sapiens
  misc_RNA (1)...(19): siRNA sense strand
gucaagaucccuacauucu

SEQ ID NO: 586907 - RNA, 19 nt, Homo sapiens
  misc_RNA (1)...(19): siRNA sense strand
gggaggaugaaauguguug

SEQ ID NO: 586908 - RNA, 19 nt, Homo sapiens
  misc_RNA (1)...(19): siRNA sense strand
gaaugaagugugucaacca

SEQ ID NO: 586909 - RNA, 19 nt, Homo sapiens
  misc_RNA (1)...(19): siRNA sense strand
gcaguccuggguuucaauu

SEQ ID NO: 586910 - RNA, 19 nt, Homo sapiens
  misc_RNA (1)...(19): siRNA sense strand
cauauugccaccaaagaug

SEQ ID NO: 586911 - RNA, 19 nt, Homo sapiens
  misc_RNA (1)...(19): siRNA sense strand
cgagcaaagugaacacaac

SEQ ID NO: 586912 - RNA, 19 nt, Homo sapiens
  misc_RNA (1)...(19): siRNA sense strand
ggaccaagagaacauaucg

SEQ ID NO: 586913 - RNA, 19 nt, Homo sapiens
  misc_RNA (1)...(19): siRNA sense strand
gaugaaugcagaaccucaa

SEQ ID NO: 586914 - RNA, 19 nt, Homo sapiens
  misc_RNA (1)...(19): siRNA sense strand
ucaaggauaugagcuaagc

SEQ ID NO: 586915 - RNA, 19 nt, Homo sapiens
  misc_RNA (1)...(19): siRNA sense strand
uaccaucccuccauauugc

SEQ ID NO: 586916 - RNA, 19 nt, Homo sapiens
  misc_RNA (1)...(19): siRNA sense strand
gcagugcguagacauagau

SEQ ID NO: 586917 - RNA, 19 nt, Homo sapiens
  misc_RNA (1)...(19): siRNA sense strand
caagugugcaucaauuuac

SEQ ID NO: 586918 - RNA, 19 nt, Homo sapiens
  misc_RNA (1)...(19): siRNA sense strand
gcagaccaagugugcauca

SEQ ID NO: 586919 - RNA, 19 nt, Homo sapiens
  misc_RNA (1)...(19): siRNA sense strand
gaggaugaaauguguugga

SEQ ID NO: 586920 - RNA, 19 nt, Homo sapiens
  misc_RNA (1)...(19): siRNA sense strand
agaaguagaacaugucaag

SEQ ID NO: 586921 - RNA, 19 nt, Homo sapiens
  misc_RNA (1)...(19): siRNA sense strand
gguuucaauuggcagcaaa

SEQ ID NO: 586922 - RNA, 19 nt, Homo sapiens
  misc_RNA (1)...(19): siRNA sense strand
gagcagugcguagacauag

SEQ ID NO: 586923 - RNA, 19 nt, Homo sapiens
  misc_RNA (1)...(19): siRNA sense strand
gcacugcagggacgcacaa

SEQ ID NO: 586924 - RNA, 19 nt, Homo sapiens
  misc_RNA (1)...(19): siRNA sense strand
gucauuaucaggaccaaga

SEQ ID NO: 586925 - RNA, 19 nt, Homo sapiens
  misc_RNA (1)...(19): siRNA sense strand
uacaggccacaacuauuua

SEQ ID NO: 586926 - RNA, 19 nt, Homo sapiens
  misc_RNA (1)...(19): siRNA sense strand
agauacaggccacaacuau

SEQ ID NO: 586927 - RNA, 19 nt, Homo sapiens
  misc_RNA (1)...(19): siRNA sense strand
cagauacaggccacaacua

SEQ ID NO: 586928 - RNA, 19 nt, Homo sapiens
  misc_RNA (1)...(19): siRNA sense strand
cugggaaauucucauguau

SEQ ID NO: 586929 - RNA, 19 nt, Homo sapiens
  misc_RNA (1)...(19): siRNA sense strand
gcagugcuacaacauucuu

SEQ ID NO: 586930 - RNA, 19 nt, Homo sapiens
  misc_RNA (1)...(19): siRNA sense strand
gucagugcccuccuggaua

SEQ ID NO: 586931 - RNA, 19 nt, Homo sapiens
  misc_RNA (1)...(19): siRNA sense strand
gcaaagauauugaugaaug

SEQ ID NO: 586932 - RNA, 19 nt, Homo sapiens
  misc_RNA (1)...(19): siRNA sense strand
gaugaaauguguuggaauu

SEQ ID NO: 586933 - RNA, 19 nt, Homo sapiens
  misc_RNA (1)...(19): siRNA sense strand
caagaucccuacauucuaa

SEQ ID NO: 586934 - RNA, 19 nt, Homo sapiens
  misc_RNA (1)...(19): siRNA sense strand
gauaugagcuaagcaguga

SEQ ID NO: 586935 - RNA, 19 nt, Homo sapiens
  misc_RNA (1)...(19): siRNA sense strand
agacagcaaugcaaagaua

SEQ ID NO: 586936 - RNA, 19 nt, Homo sapiens
  misc_RNA (1)...(19): siRNA sense strand
caagcuaccugugucaaua

SEQ ID NO: 586937 - RNA, 19 nt, Homo sapiens
  misc_RNA (1)...(19): siRNA sense strand
ccagagaaccgauguguuu

SEQ ID NO: 586938 - RNA, 19 nt, Homo sapiens
  misc_RNA (1)...(19): siRNA sense strand
gcucaacugugaagacauu

SEQ ID NO: 586939 - RNA, 19 nt, Homo sapiens
  misc_RNA (1)...(19): siRNA sense strand
caccaaagaugcgugaaua

SEQ ID NO: 586940 - RNA, 19 nt, Homo sapiens
  misc_RNA (1)...(19): siRNA sense strand
gggaaauucucauguaugu

SEQ ID NO: 586941 - RNA, 19 nt, Homo sapiens
  misc_RNA (1)...(19): siRNA sense strand
gaccaagugugcaucaauu

SEQ ID NO: 586942 - RNA, 19 nt, Homo sapiens
  misc_RNA (1)...(19): siRNA sense strand
gaaauguguuggaauuauc

SEQ ID NO: 586943 - RNA, 19 nt, Homo sapiens
  misc_RNA (1)...(19): siRNA sense strand
gaauacaccaggcucauuu

SEQ ID NO: 586944 - RNA, 19 nt, Homo sapiens
  misc_RNA (1)...(19): siRNA sense strand
ccaacaccaucaauacuuu

SEQ ID NO: 586945 - RNA, 19 nt, Homo sapiens
  misc_RNA (1)...(19): siRNA sense strand
cgacaaacaaguccuguaa

SEQ ID NO: 586946 - RNA, 19 nt, Homo sapiens
  misc_RNA (1)...(19): siRNA sense strand
caacgugugccaagacaua

SEQ ID NO: 586947 - RNA, 19 nt, Homo sapiens
  misc_RNA (1)...(19): siRNA sense strand
caaugaaccugggaaauuc

SEQ ID NO: 586948 - RNA, 19 nt, Homo sapiens
  misc_RNA (1)...(19): siRNA sense strand
aguagaacaugucaagaua

SEQ ID NO: 586949 - RNA, 19 nt, Homo sapiens
  misc_RNA (1)...(19): siRNA sense strand
caagcucuguguuaagauu

SEQ ID NO: 586950 - RNA, 19 nt, Homo sapiens
  misc_RNA (1)...(19): siRNA sense strand
caacauucuugguucauuc

SEQ ID NO: 586951 - RNA, 19 nt, Homo sapiens
  misc_RNA (1)...(19): siRNA sense strand
ccaagugugcaucaauuua

SEQ ID NO: 586952 - RNA, 19 nt, Homo sapiens
  misc_RNA (1)...(19): siRNA sense strand
gaaaacagcccagauuauu

SEQ ID NO: 586953 - RNA, 19 nt, Homo sapiens
  misc_RNA (1)...(19): siRNA sense strand
ucaaugaaccugggaaauu

SEQ ID NO: 586954 - RNA, 19 nt, Homo sapiens
  misc_RNA (1)...(19): siRNA sense strand
ccugggaaauucucaugua

SEQ ID NO: 586955 - RNA, 19 nt, Homo sapiens
  misc_RNA (1)...(19): siRNA sense strand
acaaacaaguccuguaagu

SEQ ID NO: 586956 - RNA, 19 nt, Homo sapiens
  misc_RNA (1)...(19): siRNA sense strand
ggugagaaguagaacaugu

SEQ ID NO: 586957 - RNA, 19 nt, Homo sapiens
  misc_RNA (1)...(19): siRNA sense strand
ggaaacacaaccagcagaa

SEQ ID NO: 586958 - RNA, 19 nt, Homo sapiens
  misc_RNA (1)...(19): siRNA sense strand
gcguagauauaaaugaaug

SEQ ID NO: 586959 - RNA, 19 nt, Homo sapiens
  misc_RNA (1)...(19): siRNA sense strand
ucagugcccuccuggauau

SEQ ID NO: 586960 - RNA, 19 nt, Homo sapiens
  misc_RNA (1)...(19): siRNA sense strand
ucagugcaaucaaggauau

SEQ ID NO: 586961 - RNA, 19 nt, Homo sapiens
  misc_RNA (1)...(19): siRNA sense strand
caauaucaaugugucaaug

SEQ ID NO: 586962 - RNA, 19 nt, Homo sapiens
  misc_RNA (1)...(19): siRNA sense strand
ggagcagugcguagacaua

SEQ ID NO: 586963 - RNA, 19 nt, Homo sapiens
  misc_RNA (1)...(19): siRNA sense strand
auacaggccacaacuauuu

SEQ ID NO: 586964 - RNA, 19 nt, Homo sapiens
  misc_RNA (1)...(19): siRNA sense strand
ugagugggauccugugaga

SEQ ID NO: 586965 - RNA, 19 nt, Homo sapiens
  misc_RNA (1)...(19): siRNA sense strand
gaacagccucagcaggaaa

SEQ ID NO: 586966 - RNA, 19 nt, Homo sapiens
  misc_RNA (1)...(19): siRNA sense strand
gcguagacauagaugaaug

SEQ ID NO: 586967 - RNA, 19 nt, Homo sapiens
  misc_RNA (1)...(19): siRNA sense strand
cugcguagauauaaaugaa

SEQ ID NO: 586968 - RNA, 19 nt, Homo sapiens
  misc_RNA (1)...(19): siRNA sense strand
caaccacuauggaggauac

SEQ ID NO: 586969 - RNA, 19 nt, Homo sapiens
  misc_RNA (1)...(19): siRNA sense strand
gauacaggccacaacuauu

SEQ ID NO: 586970 - RNA, 19 nt, Homo sapiens
  misc_RNA (1)...(19): siRNA sense strand
gcagcaggcuacgagcaaa

SEQ ID NO: 586971 - RNA, 19 nt, Homo sapiens
  misc_RNA (1)...(19): siRNA sense strand
aaacagcccagauuauugu

SEQ ID NO: 586972 - RNA, 19 nt, Homo sapiens
  misc_RNA (1)...(19): siRNA sense strand
guaccaucccuccauauug

SEQ ID NO: 586973 - RNA, 19 nt, Homo sapiens
  misc_RNA (1)...(19): siRNA sense strand
aaucaaggauaugagcuaa

SEQ ID NO: 586974 - RNA, 19 nt, Homo sapiens
  misc_RNA (1)...(19): siRNA sense strand
aacuauaccugcguagaua

SEQ ID NO: 586975 - RNA, 19 nt, Homo sapiens
  misc_RNA (1)...(19): siRNA sense strand
caacuauaccugcguagau

SEQ ID NO: 586976 - RNA, 19 nt, Homo sapiens
  misc_RNA (1)...(19): siRNA sense strand
gcagggacgcacaacugua

SEQ ID NO: 586977 - RNA, 19 nt, Homo sapiens
  misc_RNA (1)...(19): siRNA sense strand
cuacaacauucuugguuca

SEQ ID NO: 586978 - RNA, 19 nt, Homo sapiens
  misc_RNA (1)...(19): siRNA sense strand
cauggcggcuuccguuguu

SEQ ID NO: 586979 - RNA, 19 nt, Homo sapiens
  misc_RNA (1)...(19): siRNA sense strand
aauguaccaucccuccaua

SEQ ID NO: 586980 - RNA, 19 nt, Homo sapiens
  misc_RNA (1)...(19): siRNA sense strand
ugaaugugaugccagcaau

SEQ ID NO: 586981 - RNA, 19 nt, Homo sapiens
  misc_RNA (1)...(19): siRNA sense strand
caaguggugagaaguagaa

SEQ ID NO: 586982 - RNA, 19 nt, Homo sapiens
  misc_RNA (1)...(19): siRNA sense strand
ucaagaucccuacauucua

SEQ ID NO: 586983 - RNA, 19 nt, Homo sapiens
  misc_RNA (1)...(19): siRNA sense strand
gaauguaccaucccuccau

SEQ ID NO: 586984 - RNA, 19 nt, Homo sapiens
  misc_RNA (1)...(19): siRNA sense strand
caaucaaggauaugagcua

SEQ ID NO: 586985 - RNA, 19 nt, Homo sapiens
  misc_RNA (1)...(19): siRNA sense strand
guagaacaugucaagauau

SEQ ID NO: 586986 - RNA, 19 nt, Homo sapiens
  misc_RNA (1)...(19): siRNA sense strand
auagggaccuuccgcacaa

SEQ ID NO: 586987 - RNA, 19 nt, Homo sapiens
  misc_RNA (1)...(19): siRNA sense strand
gccaacaccaucaauacuu

SEQ ID NO: 586988 - RNA, 19 nt, Homo sapiens
  misc_RNA (1)...(19): siRNA sense strand
gucaauagucuacaaauac

SEQ ID NO: 586989 - RNA, 19 nt, Homo sapiens
  misc_RNA (1)...(19): siRNA sense strand
gugcguagacauagaugaa

SEQ ID NO: 586990 - RNA, 19 nt, Homo sapiens
  misc_RNA (1)...(19): siRNA sense strand
aaauggagaguucuaccua

SEQ ID NO: 586991 - RNA, 19 nt, Homo sapiens
  misc_RNA (1)...(19): siRNA sense strand
cccagacgcuuguaaaggu

SEQ ID NO: 586992 - RNA, 19 nt, Homo sapiens
  misc_RNA (1)...(19): siRNA sense strand
gauauaaaugagugugaga

SEQ ID NO: 586993 - RNA, 19 nt, Homo sapiens
  misc_RNA (1)...(19): siRNA sense strand
gaaguagaacaugucaaga

SEQ ID NO: 586994 - RNA, 19 nt, Homo sapiens
  misc_RNA (1)...(19): siRNA sense strand
cagcccagauuauugucaa

SEQ ID NO: 586995 - RNA, 19 nt, Homo sapiens
  misc_RNA (1)...(19): siRNA sense strand
ccaaagaugcgugaauaca

SEQ ID NO: 586996 - RNA, 19 nt, Homo sapiens
  misc_RNA (1)...(19): siRNA sense strand
ugaacagccucagcaggaa

SEQ ID NO: 586997 - RNA, 19 nt, Homo sapiens
  misc_RNA (1)...(19): siRNA sense strand
gcucgugaagucauuauca

SEQ ID NO: 586998 - RNA, 19 nt, Homo sapiens
  misc_RNA (1)...(19): siRNA sense strand
caaacaaguccuguaagug

SEQ ID NO: 586999 - RNA, 19 nt, Homo sapiens
  misc_RNA (1)...(19): siRNA sense strand
guaaagguggaaugaagug

SEQ ID NO: 587000 - RNA, 19 nt, Homo sapiens
  misc_RNA (1)...(19): siRNA sense strand
cuaccugugucaauaucaa

SEQ ID NO: 587001 - RNA, 19 nt, Homo sapiens
  misc_RNA (1)...(19): siRNA sense strand
acaccaggcucauuuuauu

SEQ ID NO: 587002 - RNA, 19 nt, Homo sapiens
  misc_RNA (1)...(19): siRNA sense strand
acaacauucuugguucauu

SEQ ID NO: 587003 - RNA, 19 nt, Homo sapiens
  misc_RNA (1)...(19): siRNA sense strand
ccgggaggaugaaaugugu

SEQ ID NO: 587004 - RNA, 19 nt, Homo sapiens
  misc_RNA (1)...(19): siRNA sense strand
gagcagaccaagugugcau

SEQ ID NO: 587005 - RNA, 19 nt, Homo sapiens
  misc_RNA (1)...(19): siRNA sense strand
caucaauacuuuucggauu

SEQ ID NO: 587006 - RNA, 19 nt, Homo sapiens
  misc_RNA (1)...(19): siRNA sense strand
gucaagaucccuacauucu

SEQ ID NO: 587007 - RNA, 19 nt, Homo sapiens
  misc_RNA (1)...(19): siRNA sense strand
gggaggaugaaauguguug

SEQ ID NO: 587008 - RNA, 19 nt, Homo sapiens
  misc_RNA (1)...(19): siRNA sense strand
gaaugaagugugucaacca

SEQ ID NO: 587009 - RNA, 19 nt, Homo sapiens
  misc_RNA (1)...(19): siRNA sense strand
gcaguccuggguuucaauu

SEQ ID NO: 587010 - RNA, 19 nt, Homo sapiens
  misc_RNA (1)...(19): siRNA sense strand
cauauugccaccaaagaug

SEQ ID NO: 587011 - RNA, 19 nt, Homo sapiens
  misc_RNA (1)...(19): siRNA sense strand
cgagcaaagugaacacaac

SEQ ID NO: 587012 - RNA, 19 nt, Homo sapiens
  misc_RNA (1)...(19): siRNA sense strand
ggaccaagagaacauaucg

SEQ ID NO: 587013 - RNA, 19 nt, Homo sapiens
  misc_RNA (1)...(19): siRNA sense strand
gaugaaugcagaaccucaa

SEQ ID NO: 587014 - RNA, 19 nt, Homo sapiens
  misc_RNA (1)...(19): siRNA sense strand
ucaaggauaugagcuaagc

SEQ ID NO: 587015 - RNA, 19 nt, Homo sapiens
  misc_RNA (1)...(19): siRNA sense strand
uaccaucccuccauauugc

SEQ ID NO: 587016 - RNA, 19 nt, Homo sapiens
  misc_RNA (1)...(19): siRNA sense strand
gcagugcguagacauagau

SEQ ID NO: 587017 - RNA, 19 nt, Homo sapiens
  misc_RNA (1)...(19): siRNA sense strand
caagugugcaucaauuuac

SEQ ID NO: 587018 - RNA, 19 nt, Homo sapiens
  misc_RNA (1)...(19): siRNA sense strand
gcagaccaagugugcauca

SEQ ID NO: 587019 - RNA, 19 nt, Homo sapiens
  misc_RNA (1)...(19): siRNA sense strand
gaggaugaaauguguugga

SEQ ID NO: 587020 - RNA, 19 nt, Homo sapiens
  misc_RNA (1)...(19): siRNA sense strand
agaaguagaacaugucaag

SEQ ID NO: 587021 - RNA, 19 nt, Homo sapiens
  misc_RNA (1)...(19): siRNA sense strand
gguuucaauuggcagcaaa

SEQ ID NO: 587022 - RNA, 19 nt, Homo sapiens
  misc_RNA (1)...(19): siRNA sense strand
gagcagugcguagacauag

SEQ ID NO: 587023 - RNA, 19 nt, Homo sapiens
  misc_RNA (1)...(19): siRNA sense strand
gcacugcagggacgcacaa

SEQ ID NO: 587024 - RNA, 19 nt, Homo sapiens
  misc_RNA (1)...(19): siRNA sense strand
gucauuaucaggaccaaga

SEQ ID NO: 587025 - RNA, 19 nt, Homo sapiens
  misc_RNA (1)...(19): siRNA sense strand
uacaggccacaacuauuua

SEQ ID NO: 587026 - RNA, 19 nt, Homo sapiens
  misc_RNA (1)...(19): siRNA sense strand
agauacaggccacaacuau

SEQ ID NO: 587027 - RNA, 19 nt, Homo sapiens
  misc_RNA (1)...(19): siRNA sense strand
cagauacaggccacaacua

SEQ ID NO: 587028 - RNA, 19 nt, Homo sapiens
  misc_RNA (1)...(19): siRNA sense strand
cugggaaauucucauguau

SEQ ID NO: 587029 - RNA, 19 nt, Homo sapiens
  misc_RNA (1)...(19): siRNA sense strand
gcagugcuacaacauucuu

SEQ ID NO: 587030 - RNA, 19 nt, Homo sapiens
  misc_RNA (1)...(19): siRNA sense strand
gucagugcccuccuggaua

SEQ ID NO: 587031 - RNA, 19 nt, Homo sapiens
  misc_RNA (1)...(19): siRNA sense strand
cuacagagauccugaagag

SEQ ID NO: 587032 - RNA, 19 nt, Homo sapiens
  misc_RNA (1)...(19): siRNA sense strand
ggucaugccugaucuguac

SEQ ID NO: 587033 - RNA, 19 nt, Homo sapiens
  misc_RNA (1)...(19): siRNA sense strand
gcaauucccuacugaagac

SEQ ID NO: 587034 - RNA, 19 nt, Homo sapiens
  misc_RNA (1)...(19): siRNA sense strand
cagagauccugaagagauu

SEQ ID NO: 587035 - RNA, 19 nt, Homo sapiens
  misc_RNA (1)...(19): siRNA sense strand
gcgcaugcguggcaccauu

SEQ ID NO: 587036 - RNA, 19 nt, Homo sapiens
  misc_RNA (1)...(19): siRNA sense strand
caacaagggagcucacuca

SEQ ID NO: 587037 - RNA, 19 nt, Homo sapiens
  misc_RNA (1)...(19): siRNA sense strand
gaugcuggcucgggaaguu

SEQ ID NO: 587038 - RNA, 19 nt, Homo sapiens
  misc_RNA (1)...(19): siRNA sense strand
ugccugaucuguacuucua

SEQ ID NO: 587039 - RNA, 19 nt, Homo sapiens
  misc_RNA (1)...(19): siRNA sense strand
ggaacaguacaucuauaaa

SEQ ID NO: 587040 - RNA, 19 nt, Homo sapiens
  misc_RNA (1)...(19): siRNA sense strand
gcuccugaguucacugcua

SEQ ID NO: 587041 - RNA, 19 nt, Homo sapiens
  misc_RNA (1)...(19): siRNA sense strand
ccagagggcugugcugaag

SEQ ID NO: 587042 - RNA, 19 nt, Homo sapiens
  misc_RNA (1)...(19): siRNA sense strand
agaaggcagugaccaagga

SEQ ID NO: 587043 - RNA, 19 nt, Homo sapiens
  misc_RNA (1)...(19): siRNA sense strand
uggaacaguacaucuauaa

SEQ ID NO: 587044 - RNA, 19 nt, Homo sapiens
  misc_RNA (1)...(19): siRNA sense strand
agagggcugugcugaaguu

SEQ ID NO: 587045 - RNA, 19 nt, Homo sapiens
  misc_RNA (1)...(19): siRNA sense strand
acagagauccugaagagau

SEQ ID NO: 587046 - RNA, 19 nt, Homo sapiens
  misc_RNA (1)...(19): siRNA sense strand
gggcugugcugaaguuugc

SEQ ID NO: 587047 - RNA, 19 nt, Homo sapiens
  misc_RNA (1)...(19): siRNA sense strand
cuugauguccugcaaauga

SEQ ID NO: 587048 - RNA, 19 nt, Homo sapiens
  misc_RNA (1)...(19): siRNA sense strand
gaaccuucacuaaccagau

SEQ ID NO: 587049 - RNA, 19 nt, Homo sapiens
  misc_RNA (1)...(19): siRNA sense strand
ugaccaaggaggaauuuca

SEQ ID NO: 587050 - RNA, 19 nt, Homo sapiens
  misc_RNA (1)...(19): siRNA sense strand
guuaaccuaccuaccauug

SEQ ID NO: 587051 - RNA, 19 nt, Homo sapiens
  misc_RNA (1)...(19): siRNA sense strand
gcagcucgugcaauuguug

SEQ ID NO: 587052 - RNA, 19 nt, Homo sapiens
  misc_RNA (1)...(19): siRNA sense strand
gcaaaugaaggaggaggau

SEQ ID NO: 587053 - RNA, 19 nt, Homo sapiens
  misc_RNA (1)...(19): siRNA sense strand
gauccugaagagauugaaa

SEQ ID NO: 587054 - RNA, 19 nt, Homo sapiens
  misc_RNA (1)...(19): siRNA sense strand
caagaggaccugggagaag

SEQ ID NO: 587055 - RNA, 19 nt, Homo sapiens
  misc_RNA (1)...(19): siRNA sense strand
uugauguccugcaaaugaa

SEQ ID NO: 587056 - RNA, 19 nt, Homo sapiens
  misc_RNA (1)...(19): siRNA sense strand
ugaaaacccugcugauguc

SEQ ID NO: 587057 - RNA, 19 nt, Homo sapiens
  misc_RNA (1)...(19): siRNA sense strand
cagcaauucccuacugaag

SEQ ID NO: 587058 - RNA, 19 nt, Homo sapiens
  misc_RNA (1)...(19): siRNA sense strand
aaaugaaggaggaggaugu

SEQ ID NO: 587059 - RNA, 19 nt, Homo sapiens
  misc_RNA (1)...(19): siRNA sense strand
uauguuaaccuaccuacca

SEQ ID NO: 587060 - RNA, 19 nt, Homo sapiens
  misc_RNA (1)...(19): siRNA sense strand
auggaacaguacaucuaua

SEQ ID NO: 587061 - RNA, 19 nt, Homo sapiens
  misc_RNA (1)...(19): siRNA sense strand
gagauccugaagagauuga

SEQ ID NO: 587062 - RNA, 19 nt, Homo sapiens
  misc_RNA (1)...(19): siRNA sense strand
gggaggucaugccugaucu

SEQ ID NO: 587063 - RNA, 19 nt, Homo sapiens
  misc_RNA (1)...(19): siRNA sense strand
ucaagaggaccugggagaa

SEQ ID NO: 587064 - RNA, 19 nt, Homo sapiens
  misc_RNA (1)...(19): siRNA sense strand
ccuggaaccuucacuaacc

SEQ ID NO: 587065 - RNA, 19 nt, Homo sapiens
  misc_RNA (1)...(19): siRNA sense strand
gccaucccaugcaacaaca

SEQ ID NO: 587066 - RNA, 19 nt, Homo sapiens
  misc_RNA (1)...(19): siRNA sense strand
aaccuucacuaaccagauc

SEQ ID NO: 587067 - RNA, 19 nt, Homo sapiens
  misc_RNA (1)...(19): siRNA sense strand
guccggagcccuugauguc

SEQ ID NO: 587068 - RNA, 19 nt, Homo sapiens
  misc_RNA (1)...(19): siRNA sense strand
gagaugagcacgcccuuua

SEQ ID NO: 587069 - RNA, 19 nt, Homo sapiens
  misc_RNA (1)...(19): siRNA sense strand
gcugaugauucacauguuu

SEQ ID NO: 587070 - RNA, 19 nt, Homo sapiens
  misc_RNA (1)...(19): siRNA sense strand
gccuguaucugccucauuu

SEQ ID NO: 587071 - RNA, 19 nt, Homo sapiens
  misc_RNA (1)...(19): siRNA sense strand
gaacuucgcacagccagaa

SEQ ID NO: 587072 - RNA, 19 nt, Homo sapiens
  misc_RNA (1)...(19): siRNA sense strand
gauggucgcuggcuuuguc

SEQ ID NO: 587073 - RNA, 19 nt, Homo sapiens
  misc_RNA (1)...(19): siRNA sense strand
guucuaaccuaccacaugu

SEQ ID NO: 587074 - RNA, 19 nt, Homo sapiens
  misc_RNA (1)...(19): siRNA sense strand
ucuccaagcuggccacuau

SEQ ID NO: 587075 - RNA, 19 nt, Homo sapiens
  misc_RNA (1)...(19): siRNA sense strand
uaagaagacucagcagcuu

SEQ ID NO: 587076 - RNA, 19 nt, Homo sapiens
  misc_RNA (1)...(19): siRNA sense strand
cauauuggacccauaagaa

SEQ ID NO: 587077 - RNA, 19 nt, Homo sapiens
  misc_RNA (1)...(19): siRNA sense strand
gcagaacuggugcugguuu

SEQ ID NO: 587078 - RNA, 19 nt, Homo sapiens
  misc_RNA (1)...(19): siRNA sense strand
gacagcaacgggauucuuu

SEQ ID NO: 587079 - RNA, 19 nt, Homo sapiens
  misc_RNA (1)...(19): siRNA sense strand
ucaauccgguggacuggaa

SEQ ID NO: 587080 - RNA, 19 nt, Homo sapiens
  misc_RNA (1)...(19): siRNA sense strand
ggccacgcgugcagucuuu

SEQ ID NO: 587081 - RNA, 19 nt, Homo sapiens
  misc_RNA (1)...(19): siRNA sense strand
ccggacauuugacuuguuu

SEQ ID NO: 587082 - RNA, 19 nt, Homo sapiens
  misc_RNA (1)...(19): siRNA sense strand
gccaccagcuguccucuuc

SEQ ID NO: 587083 - RNA, 19 nt, Homo sapiens
  misc_RNA (1)...(19): siRNA sense strand
gaaugccacuuaccguucu

SEQ ID NO: 587084 - RNA, 19 nt, Homo sapiens
  misc_RNA (1)...(19): siRNA sense strand
gguuauccaccaucucuuu

SEQ ID NO: 587085 - RNA, 19 nt, Homo sapiens
  misc_RNA (1)...(19): siRNA sense strand
gcuguccucuucccugaau

SEQ ID NO: 587086 - RNA, 19 nt, Homo sapiens
  misc_RNA (1)...(19): siRNA sense strand
guaucugccucauuugaca

SEQ ID NO: 587087 - RNA, 19 nt, Homo sapiens
  misc_RNA (1)...(19): siRNA sense strand
guucuuugguggccagaga

SEQ ID NO: 587088 - RNA, 19 nt, Homo sapiens
  misc_RNA (1)...(19): siRNA sense strand
gcuggccacuaucuagcua

SEQ ID NO: 587089 - RNA, 19 nt, Homo sapiens
  misc_RNA (1)...(19): siRNA sense strand
gcugauggucgcuggcuuu

SEQ ID NO: 587090 - RNA, 19 nt, Homo sapiens
  misc_RNA (1)...(19): siRNA sense strand
caccaucucuuugccuuuc

SEQ ID NO: 587091 - RNA, 19 nt, Homo sapiens
  misc_RNA (1)...(19): siRNA sense strand
gccaagagcaggccagaag

SEQ ID NO: 587092 - RNA, 19 nt, Homo sapiens
  misc_RNA (1)...(19): siRNA sense strand
ccacuuaccguucuuuggu

SEQ ID NO: 587093 - RNA, 19 nt, Homo sapiens
  misc_RNA (1)...(19): siRNA sense strand
accaguggcugaugauuca

SEQ ID NO: 587094 - RNA, 19 nt, Homo sapiens
  misc_RNA (1)...(19): siRNA sense strand
ggacauuugacuuguuucu

SEQ ID NO: 587095 - RNA, 19 nt, Homo sapiens
  misc_RNA (1)...(19): siRNA sense strand
ggacccauaagaagacuca

SEQ ID NO: 587096 - RNA, 19 nt, Homo sapiens
  misc_RNA (1)...(19): siRNA sense strand
cagaacuggugcugguuuc

SEQ ID NO: 587097 - RNA, 19 nt, Homo sapiens
  misc_RNA (1)...(19): siRNA sense strand
uuuccuggaugcucuuaaa

SEQ ID NO: 587098 - RNA, 19 nt, Homo sapiens
  misc_RNA (1)...(19): siRNA sense strand
caagcuggccacuaucuag

SEQ ID NO: 587099 - RNA, 19 nt, Homo sapiens
  misc_RNA (1)...(19): siRNA sense strand
ggagaugagcacgcccuuu

SEQ ID NO: 587100 - RNA, 19 nt, Homo sapiens
  misc_RNA (1)...(19): siRNA sense strand
guccaccuguccaacuuga

SEQ ID NO: 587101 - RNA, 19 nt, Homo sapiens
  misc_RNA (1)...(19): siRNA sense strand
gggcacaucagagagcauu

SEQ ID NO: 587102 - RNA, 19 nt, Homo sapiens
  misc_RNA (1)...(19): siRNA sense strand
caguccaccuguccaacuu

SEQ ID NO: 587103 - RNA, 19 nt, Homo sapiens
  misc_RNA (1)...(19): siRNA sense strand
ccauauuggacccauaaga

SEQ ID NO: 587104 - RNA, 19 nt, Homo sapiens
  misc_RNA (1)...(19): siRNA sense strand
ucgcuggcuuugucuucua

SEQ ID NO: 587105 - RNA, 19 nt, Homo sapiens
  misc_RNA (1)...(19): siRNA sense strand
uuugacuuguuucugguua

SEQ ID NO: 587106 - RNA, 19 nt, Homo sapiens
  misc_RNA (1)...(19): siRNA sense strand
cuacuugggcgucuuugug

SEQ ID NO: 587107 - RNA, 19 nt, Homo sapiens
  misc_RNA (1)...(19): siRNA sense strand
ugacuuguuucugguuauc

SEQ ID NO: 587108 - RNA, 19 nt, Homo sapiens
  misc_RNA (1)...(19): siRNA sense strand
ggcugaugauucacauguu

SEQ ID NO: 587109 - RNA, 19 nt, Homo sapiens
  misc_RNA (1)...(19): siRNA sense strand
ccaagcuggccacuaucua

SEQ ID NO: 587110 - RNA, 19 nt, Homo sapiens
  misc_RNA (1)...(19): siRNA sense strand
gcacagccagaagccaaga

SEQ ID NO: 587111 - RNA, 19 nt, Homo sapiens
  misc_RNA (1)...(19): siRNA sense strand
agacucagcagcuucucaa

SEQ ID NO: 587112 - RNA, 19 nt, Homo sapiens
  misc_RNA (1)...(19): siRNA sense strand
gcacaucagagagcauuuu

SEQ ID NO: 587113 - RNA, 19 nt, Homo sapiens
  misc_RNA (1)...(19): siRNA sense strand
caacgggauucuuuugcuu

SEQ ID NO: 587114 - RNA, 19 nt, Homo sapiens
  misc_RNA (1)...(19): siRNA sense strand
gcucugcuuacgcuaauca

SEQ ID NO: 587115 - RNA, 19 nt, Homo sapiens
  misc_RNA (1)...(19): siRNA sense strand
cgacagcaacgggauucuu

SEQ ID NO: 587116 - RNA, 19 nt, Homo sapiens
  misc_RNA (1)...(19): siRNA sense strand
uauuggacccauaagaaga

SEQ ID NO: 587117 - RNA, 19 nt, Homo sapiens
  misc_RNA (1)...(19): siRNA sense strand
cucaaccaguggcugauga

SEQ ID NO: 587118 - RNA, 19 nt, Homo sapiens
  misc_RNA (1)...(19): siRNA sense strand
ccgagucucuguuuuggaa

SEQ ID NO: 587119 - RNA, 19 nt, Homo sapiens
  misc_RNA (1)...(19): siRNA sense strand
gccacuaucuagcuaugac

SEQ ID NO: 587120 - RNA, 19 nt, Homo sapiens
  misc_RNA (1)...(19): siRNA sense strand
gcaguccaccuguccaacu

SEQ ID NO: 587121 - RNA, 19 nt, Homo sapiens
  misc_RNA (1)...(19): siRNA sense strand
gggauucuuuugcuuugaa

SEQ ID NO: 587122 - RNA, 19 nt, Homo sapiens
  misc_RNA (1)...(19): siRNA sense strand
gaggacggauacaauguuu

SEQ ID NO: 587123 - RNA, 19 nt, Homo sapiens
  misc_RNA (1)...(19): siRNA sense strand
ccaguccucuccugcaauu

SEQ ID NO: 587124 - RNA, 19 nt, Homo sapiens
  misc_RNA (1)...(19): siRNA sense strand
gggaguuauucaaaucuug

SEQ ID NO: 587125 - RNA, 19 nt, Homo sapiens
  misc_RNA (1)...(19): siRNA sense strand
ggacggauacaauguuuac

SEQ ID NO: 587126 - RNA, 19 nt, Homo sapiens
  misc_RNA (1)...(19): siRNA sense strand
uccgggagcugcuucuuga

SEQ ID NO: 587127 - RNA, 19 nt, Homo sapiens
  misc_RNA (1)...(19): siRNA sense strand
gccgggaguuauucaaauc

SEQ ID NO: 587128 - RNA, 19 nt, Homo sapiens
  misc_RNA (1)...(19): siRNA sense strand
auucaaaucuugggaguca

SEQ ID NO: 587129 - RNA, 19 nt, Homo sapiens
  misc_RNA (1)...(19): siRNA sense strand
agcgguaccucuacacaga

SEQ ID NO: 587130 - RNA, 19 nt, Homo sapiens
  misc_RNA (1)...(19): siRNA sense strand
aaagucuccugcagcugaa

SEQ ID NO: 587131 - RNA, 19 nt, Homo sapiens
  misc_RNA (1)...(19): siRNA sense strand
gaagccgggaguuauucaa

SEQ ID NO: 587132 - RNA, 19 nt, Homo sapiens
  misc_RNA (1)...(19): siRNA sense strand
cgggaguuauucaaaucuu

SEQ ID NO: 587133 - RNA, 19 nt, Homo sapiens
  misc_RNA (1)...(19): siRNA sense strand
ugaggacggauacaauguu

SEQ ID NO: 587134 - RNA, 19 nt, Homo sapiens
  misc_RNA (1)...(19): siRNA sense strand
gagucaagacauccagguu

SEQ ID NO: 587135 - RNA, 19 nt, Homo sapiens
  misc_RNA (1)...(19): siRNA sense strand
gaagcccaccuggagauca

SEQ ID NO: 587136 - RNA, 19 nt, Homo sapiens
  misc_RNA (1)...(19): siRNA sense strand
cggcagcgguaccucuaca

SEQ ID NO: 587137 - RNA, 19 nt, Homo sapiens
  misc_RNA (1)...(19): siRNA sense strand
cagaagcccaccuggagau

SEQ ID NO: 587138 - RNA, 19 nt, Homo sapiens
  misc_RNA (1)...(19): siRNA sense strand
gcagcgguaccucuacaca

SEQ ID NO: 587139 - RNA, 19 nt, Homo sapiens
  misc_RNA (1)...(19): siRNA sense strand
acucaggacuguggguuuc

SEQ ID NO: 587140 - RNA, 19 nt, Homo sapiens
  misc_RNA (1)...(19): siRNA sense strand
gccuugaagccgggaguua

SEQ ID NO: 587141 - RNA, 19 nt, Homo sapiens
  misc_RNA (1)...(19): siRNA sense strand
ggaagaaugugccaagugu

SEQ ID NO: 587142 - RNA, 19 nt, Homo sapiens
  misc_RNA (1)...(19): siRNA sense strand
gaacauguuuguggaagaa

SEQ ID NO: 587143 - RNA, 19 nt, Homo sapiens
  misc_RNA (1)...(19): siRNA sense strand
ggaacauguuuguggaaga

SEQ ID NO: 587144 - RNA, 19 nt, Homo sapiens
  misc_RNA (1)...(19): siRNA sense strand
gaagaaugugccaagugua

SEQ ID NO: 587145 - RNA, 19 nt, Homo sapiens
  misc_RNA (1)...(19): siRNA sense strand
gaaugugccaaguguaaga

SEQ ID NO: 587146 - RNA, 19 nt, Homo sapiens
  misc_RNA (1)...(19): siRNA sense strand
caaguucgacaccaccuuu

SEQ ID NO: 587147 - RNA, 19 nt, Homo sapiens
  misc_RNA (1)...(19): siRNA sense strand
aagaaugugccaaguguaa

SEQ ID NO: 587148 - RNA, 19 nt, Homo sapiens
  misc_RNA (1)...(19): siRNA sense strand
ccgcauccauggcuacguu

SEQ ID NO: 587149 - RNA, 19 nt, Homo sapiens
  misc_RNA (1)...(19): siRNA sense strand
ccaaguguaagacgcagua

SEQ ID NO: 587150 - RNA, 19 nt, Homo sapiens
  misc_RNA (1)...(19): siRNA sense strand
gcugagggacaccauccua

SEQ ID NO: 587151 - RNA, 19 nt, Homo sapiens
  misc_RNA (1)...(19): siRNA sense strand
gcaguacguccgagacaca

SEQ ID NO: 587152 - RNA, 19 nt, Homo sapiens
  misc_RNA (1)...(19): siRNA sense strand
gaaucucccacccggauca

SEQ ID NO: 587153 - RNA, 19 nt, Homo sapiens
  misc_RNA (1)...(19): siRNA sense strand
gagcuccacgggaacaugu

SEQ ID NO: 587154 - RNA, 19 nt, Homo sapiens
  misc_RNA (1)...(19): siRNA sense strand
gcuccacgggaacauguuu

SEQ ID NO: 587155 - RNA, 19 nt, Homo sapiens
  misc_RNA (1)...(19): siRNA sense strand
ugagggacaccauccuaga

SEQ ID NO: 587156 - RNA, 19 nt, Homo sapiens
  misc_RNA (1)...(19): siRNA sense strand
gcagagcuccacgggaaca

SEQ ID NO: 587157 - RNA, 19 nt, Homo sapiens
  misc_RNA (1)...(19): siRNA sense strand
ccaucacgcuggguacauc

SEQ ID NO: 587158 - RNA, 19 nt, Homo sapiens
  misc_RNA (1)...(19): siRNA sense strand
gagcgcagcuuccggauca

SEQ ID NO: 587159 - RNA, 19 nt, Homo sapiens
  misc_RNA (1)...(19): siRNA sense strand
caaccucacuaaugccaua

SEQ ID NO: 587160 - RNA, 19 nt, Homo sapiens
  misc_RNA (1)...(19): siRNA sense strand
gcacuggaggguuuaauuu

SEQ ID NO: 587161 - RNA, 19 nt, Homo sapiens
  misc_RNA (1)...(19): siRNA sense strand
gcagcaaccucacuaaugc

SEQ ID NO: 587162 - RNA, 19 nt, Homo sapiens
  misc_RNA (1)...(19): siRNA sense strand
ccuacaagcuggcugagaa

SEQ ID NO: 587163 - RNA, 19 nt, Homo sapiens
  misc_RNA (1)...(19): siRNA sense strand
gcaacaaccacaccugcua

SEQ ID NO: 587164 - RNA, 19 nt, Homo sapiens
  misc_RNA (1)...(19): siRNA sense strand
ggcuuugccuugaauuuaa

SEQ ID NO: 587165 - RNA, 19 nt, Homo sapiens
  misc_RNA (1)...(19): siRNA sense strand
gagcagagcgggaccaucu

SEQ ID NO: 587166 - RNA, 19 nt, Homo sapiens
  misc_RNA (1)...(19): siRNA sense strand
gcacgcugaucgagaaugg

SEQ ID NO: 587167 - RNA, 19 nt, Homo sapiens
  misc_RNA (1)...(19): siRNA sense strand
gcaaagacggcaacaacca

SEQ ID NO: 587168 - RNA, 19 nt, Homo sapiens
  misc_RNA (1)...(19): siRNA sense strand
uggagagccugaucaacaa

SEQ ID NO: 587169 - RNA, 19 nt, Homo sapiens
  misc_RNA (1)...(19): siRNA sense strand
caagcuggcugagaacauc

SEQ ID NO: 587170 - RNA, 19 nt, Homo sapiens
  misc_RNA (1)...(19): siRNA sense strand
ucuggaggcuucucauuca

SEQ ID NO: 587171 - RNA, 19 nt, Homo sapiens
  misc_RNA (1)...(19): siRNA sense strand
gcuuugccuugaauuuaaa

SEQ ID NO: 587172 - RNA, 19 nt, Homo sapiens
  misc_RNA (1)...(19): siRNA sense strand
cggcuuugccuugaauuua

SEQ ID NO: 587173 - RNA, 19 nt, Homo sapiens
  misc_RNA (1)...(19): siRNA sense strand
uggaggaguuggucaagga

SEQ ID NO: 587174 - RNA, 19 nt, Homo sapiens
  misc_RNA (1)...(19): siRNA sense strand
gcagcagcaaccucacuaa

SEQ ID NO: 587175 - RNA, 19 nt, Homo sapiens
  misc_RNA (1)...(19): siRNA sense strand
caacugcuccaaccucauc

SEQ ID NO: 587176 - RNA, 19 nt, Homo sapiens
  misc_RNA (1)...(19): siRNA sense strand
ccggaucaccuuugacuga

SEQ ID NO: 587177 - RNA, 19 nt, Homo sapiens
  misc_RNA (1)...(19): siRNA sense strand
cagcagcaccaccggcuuu

SEQ ID NO: 587178 - RNA, 19 nt, Homo sapiens
  misc_RNA (1)...(19): siRNA sense strand
uggaggaggugaccaaggu

SEQ ID NO: 587179 - RNA, 19 nt, Homo sapiens
  misc_RNA (1)...(19): siRNA sense strand
gauccucaaugcgcacaug

SEQ ID NO: 587180 - RNA, 19 nt, Homo sapiens
  misc_RNA (1)...(19): siRNA sense strand
ggaccaggagcucgacuuc

SEQ ID NO: 587181 - RNA, 19 nt, Homo sapiens
  misc_RNA (1)...(19): siRNA sense strand
ggaacuggauuuucuuugg

SEQ ID NO: 587182 - RNA, 19 nt, Homo sapiens
  misc_RNA (1)...(19): siRNA sense strand
gcacccaccggcuuugugu

SEQ ID NO: 587183 - RNA, 19 nt, Homo sapiens
  misc_RNA (1)...(19): siRNA sense strand
ggagagccugaucaacaaa

SEQ ID NO: 587184 - RNA, 19 nt, Homo sapiens
  misc_RNA (1)...(19): siRNA sense strand
caaauggagccuggagcua

SEQ ID NO: 587185 - RNA, 19 nt, Homo sapiens
  misc_RNA (1)...(19): siRNA sense strand
ccaccggcuuugccuugaa

SEQ ID NO: 587186 - RNA, 19 nt, Homo sapiens
  misc_RNA (1)...(19): siRNA sense strand
cagccucuuugcgucaaua

SEQ ID NO: 587187 - RNA, 19 nt, Homo sapiens
  misc_RNA (1)...(19): siRNA sense strand
gaucgagaauggagaaaag

SEQ ID NO: 587188 - RNA, 19 nt, Homo sapiens
  misc_RNA (1)...(19): siRNA sense strand
ccaccggccuguucucacu

SEQ ID NO: 587189 - RNA, 19 nt, Homo sapiens
  misc_RNA (1)...(19): siRNA sense strand
cccaggaucucaaggacau

SEQ ID NO: 587190 - RNA, 19 nt, Homo sapiens
  misc_RNA (1)...(19): siRNA sense strand
acuggacucucccucugua

SEQ ID NO: 587191 - RNA, 19 nt, Homo sapiens
  misc_RNA (1)...(19): siRNA sense strand
agacgacaggcuucacuuu

SEQ ID NO: 587192 - RNA, 19 nt, Homo sapiens
  misc_RNA (1)...(19): siRNA sense strand
acaggcggguucacguuug

SEQ ID NO: 587193 - RNA, 19 nt, Homo sapiens
  misc_RNA (1)...(19): siRNA sense strand
gcuuccggaucaccuuuga

SEQ ID NO: 587194 - RNA, 19 nt, Homo sapiens
  misc_RNA (1)...(19): siRNA sense strand
ugcaguggaucgaccagaa

SEQ ID NO: 587195 - RNA, 19 nt, Homo sapiens
  misc_RNA (1)...(19): siRNA sense strand
cuggagagccugaucaaca

SEQ ID NO: 587196 - RNA, 19 nt, Homo sapiens
  misc_RNA (1)...(19): siRNA sense strand
ggcacuggaggguuuaauu

SEQ ID NO: 587197 - RNA, 19 nt, Homo sapiens
  misc_RNA (1)...(19): siRNA sense strand
aauggagccuggagcuaga

SEQ ID NO: 587198 - RNA, 19 nt, Homo sapiens
  misc_RNA (1)...(19): siRNA sense strand
gcugaucgagaauggagaa

SEQ ID NO: 587199 - RNA, 19 nt, Homo sapiens
  misc_RNA (1)...(19): siRNA sense strand
ugagcccacuggaggaguu

SEQ ID NO: 587200 - RNA, 19 nt, Homo sapiens
  misc_RNA (1)...(19): siRNA sense strand
caucuggaggcuucucauu

SEQ ID NO: 587201 - RNA, 19 nt, Homo sapiens
  misc_RNA (1)...(19): siRNA sense strand
cagcagcaaccucacuaau

SEQ ID NO: 587202 - RNA, 19 nt, Homo sapiens
  misc_RNA (1)...(19): siRNA sense strand
gcagagcgggaccaucuac

SEQ ID NO: 587203 - RNA, 19 nt, Homo sapiens
  misc_RNA (1)...(19): siRNA sense strand
accaggagcucgacuucau

SEQ ID NO: 587204 - RNA, 19 nt, Homo sapiens
  misc_RNA (1)...(19): siRNA sense strand
ggaacagcgacucuugcuu

SEQ ID NO: 587205 - RNA, 19 nt, Homo sapiens
  misc_RNA (1)...(19): siRNA sense strand
ggcagcagcaaccucacua

SEQ ID NO: 587206 - RNA, 19 nt, Homo sapiens
  misc_RNA (1)...(19): siRNA sense strand
gcaccuccacaacaacauc

SEQ ID NO: 587207 - RNA, 19 nt, Homo sapiens
  misc_RNA (1)...(19): siRNA sense strand
ucugcaagauccucaaugc

SEQ ID NO: 587208 - RNA, 19 nt, Homo sapiens
  misc_RNA (1)...(19): siRNA sense strand
gagagccugaucaacaaau

SEQ ID NO: 587209 - RNA, 19 nt, Homo sapiens
  misc_RNA (1)...(19): siRNA sense strand
ccaccggcuuuguguuugg

SEQ ID NO: 587210 - RNA, 19 nt, Homo sapiens
  misc_RNA (1)...(19): siRNA sense strand
agagccugaucaacaaaug

SEQ ID NO: 587211 - RNA, 19 nt, Homo sapiens
  misc_RNA (1)...(19): siRNA sense strand
cuacaggcggguucacguu

SEQ ID NO: 587212 - RNA, 19 nt, Homo sapiens
  misc_RNA (1)...(19): siRNA sense strand
caccggcuuugccuugaau

SEQ ID NO: 587213 - RNA, 19 nt, Homo sapiens
  misc_RNA (1)...(19): siRNA sense strand
cagccaccaucaccaguac

SEQ ID NO: 587214 - RNA, 19 nt, Homo sapiens
  misc_RNA (1)...(19): siRNA sense strand
ccacagcaggugccacaca

SEQ ID NO: 587215 - RNA, 19 nt, Homo sapiens
  misc_RNA (1)...(19): siRNA sense strand
acccuccgguuucaacauu

SEQ ID NO: 587216 - RNA, 19 nt, Homo sapiens
  misc_RNA (1)...(19): siRNA sense strand
gagcgcagcuuccggauca

SEQ ID NO: 587217 - RNA, 19 nt, Homo sapiens
  misc_RNA (1)...(19): siRNA sense strand
caaccucacuaaugccaua

SEQ ID NO: 587218 - RNA, 19 nt, Homo sapiens
  misc_RNA (1)...(19): siRNA sense strand
gcacuggaggguuuaauuu

SEQ ID NO: 587219 - RNA, 19 nt, Homo sapiens
  misc_RNA (1)...(19): siRNA sense strand
gcagcaaccucacuaaugc

SEQ ID NO: 587220 - RNA, 19 nt, Homo sapiens
  misc_RNA (1)...(19): siRNA sense strand
ccuacaagcuggcugagaa

SEQ ID NO: 587221 - RNA, 19 nt, Homo sapiens
  misc_RNA (1)...(19): siRNA sense strand
gcaacaaccacaccugcua

SEQ ID NO: 587222 - RNA, 19 nt, Homo sapiens
  misc_RNA (1)...(19): siRNA sense strand
ggcuuugccuugaauuuaa

SEQ ID NO: 587223 - RNA, 19 nt, Homo sapiens
  misc_RNA (1)...(19): siRNA sense strand
gagcagagcgggaccaucu

SEQ ID NO: 587224 - RNA, 19 nt, Homo sapiens
  misc_RNA (1)...(19): siRNA sense strand
gcacgcugaucgagaaugg

SEQ ID NO: 587225 - RNA, 19 nt, Homo sapiens
  misc_RNA (1)...(19): siRNA sense strand
gcaaagacggcaacaacca

SEQ ID NO: 587226 - RNA, 19 nt, Homo sapiens
  misc_RNA (1)...(19): siRNA sense strand
uggagagccugaucaacaa

SEQ ID NO: 587227 - RNA, 19 nt, Homo sapiens
  misc_RNA (1)...(19): siRNA sense strand
caagcuggcugagaacauc

SEQ ID NO: 587228 - RNA, 19 nt, Homo sapiens
  misc_RNA (1)...(19): siRNA sense strand
ucuggaggcuucucauuca

SEQ ID NO: 587229 - RNA, 19 nt, Homo sapiens
  misc_RNA (1)...(19): siRNA sense strand
gcuuugccuugaauuuaaa

SEQ ID NO: 587230 - RNA, 19 nt, Homo sapiens
  misc_RNA (1)...(19): siRNA sense strand
cggcuuugccuugaauuua

SEQ ID NO: 587231 - RNA, 19 nt, Homo sapiens
  misc_RNA (1)...(19): siRNA sense strand
uggaggaguuggucaagga

SEQ ID NO: 587232 - RNA, 19 nt, Homo sapiens
  misc_RNA (1)...(19): siRNA sense strand
gcagcagcaaccucacuaa

SEQ ID NO: 587233 - RNA, 19 nt, Homo sapiens
  misc_RNA (1)...(19): siRNA sense strand
caacugcuccaaccucauc

SEQ ID NO: 587234 - RNA, 19 nt, Homo sapiens
  misc_RNA (1)...(19): siRNA sense strand
ccggaucaccuuugacuga

SEQ ID NO: 587235 - RNA, 19 nt, Homo sapiens
  misc_RNA (1)...(19): siRNA sense strand
cagcagcaccaccggcuuu

SEQ ID NO: 587236 - RNA, 19 nt, Homo sapiens
  misc_RNA (1)...(19): siRNA sense strand
uggaggaggugaccaaggu

SEQ ID NO: 587237 - RNA, 19 nt, Homo sapiens
  misc_RNA (1)...(19): siRNA sense strand
gauccucaaugcgcacaug

SEQ ID NO: 587238 - RNA, 19 nt, Homo sapiens
  misc_RNA (1)...(19): siRNA sense strand
ggaccaggagcucgacuuc

SEQ ID NO: 587239 - RNA, 19 nt, Homo sapiens
  misc_RNA (1)...(19): siRNA sense strand
ggaacuggauuuucuuugg

SEQ ID NO: 587240 - RNA, 19 nt, Homo sapiens
  misc_RNA (1)...(19): siRNA sense strand
gcacccaccggcuuugugu

SEQ ID NO: 587241 - RNA, 19 nt, Homo sapiens
  misc_RNA (1)...(19): siRNA sense strand
ggagagccugaucaacaaa

SEQ ID NO: 587242 - RNA, 19 nt, Homo sapiens
  misc_RNA (1)...(19): siRNA sense strand
caaauggagccuggagcua

SEQ ID NO: 587243 - RNA, 19 nt, Homo sapiens
  misc_RNA (1)...(19): siRNA sense strand
ccaccggcuuugccuugaa

SEQ ID NO: 587244 - RNA, 19 nt, Homo sapiens
  misc_RNA (1)...(19): siRNA sense strand
cagccucuuugcgucaaua

SEQ ID NO: 587245 - RNA, 19 nt, Homo sapiens
  misc_RNA (1)...(19): siRNA sense strand
gaucgagaauggagaaaag

SEQ ID NO: 587246 - RNA, 19 nt, Homo sapiens
  misc_RNA (1)...(19): siRNA sense strand
ccaccggccuguucucacu

SEQ ID NO: 587247 - RNA, 19 nt, Homo sapiens
  misc_RNA (1)...(19): siRNA sense strand
cccaggaucucaaggacau

SEQ ID NO: 587248 - RNA, 19 nt, Homo sapiens
  misc_RNA (1)...(19): siRNA sense strand
acuggacucucccucugua

SEQ ID NO: 587249 - RNA, 19 nt, Homo sapiens
  misc_RNA (1)...(19): siRNA sense strand
agacgacaggcuucacuuu

SEQ ID NO: 587250 - RNA, 19 nt, Homo sapiens
  misc_RNA (1)...(19): siRNA sense strand
acaggcggguucacguuug

SEQ ID NO: 587251 - RNA, 19 nt, Homo sapiens
  misc_RNA (1)...(19): siRNA sense strand
gcuuccggaucaccuuuga

SEQ ID NO: 587252 - RNA, 19 nt, Homo sapiens
  misc_RNA (1)...(19): siRNA sense strand
ugcaguggaucgaccagaa

SEQ ID NO: 587253 - RNA, 19 nt, Homo sapiens
  misc_RNA (1)...(19): siRNA sense strand
cuggagagccugaucaaca

SEQ ID NO: 587254 - RNA, 19 nt, Homo sapiens
  misc_RNA (1)...(19): siRNA sense strand
ggcacuggaggguuuaauu

SEQ ID NO: 587255 - RNA, 19 nt, Homo sapiens
  misc_RNA (1)...(19): siRNA sense strand
aauggagccuggagcuaga

SEQ ID NO: 587256 - RNA, 19 nt, Homo sapiens
  misc_RNA (1)...(19): siRNA sense strand
gcugaucgagaauggagaa

SEQ ID NO: 587257 - RNA, 19 nt, Homo sapiens
  misc_RNA (1)...(19): siRNA sense strand
ugagcccacuggaggaguu

SEQ ID NO: 587258 - RNA, 19 nt, Homo sapiens
  misc_RNA (1)...(19): siRNA sense strand
caucuggaggcuucucauu

SEQ ID NO: 587259 - RNA, 19 nt, Homo sapiens
  misc_RNA (1)...(19): siRNA sense strand
cagcagcaaccucacuaau

SEQ ID NO: 587260 - RNA, 19 nt, Homo sapiens
  misc_RNA (1)...(19): siRNA sense strand
gcagagcgggaccaucuac

SEQ ID NO: 587261 - RNA, 19 nt, Homo sapiens
  misc_RNA (1)...(19): siRNA sense strand
accaggagcucgacuucau

SEQ ID NO: 587262 - RNA, 19 nt, Homo sapiens
  misc_RNA (1)...(19): siRNA sense strand
ggaacagcgacucuugcuu

SEQ ID NO: 587263 - RNA, 19 nt, Homo sapiens
  misc_RNA (1)...(19): siRNA sense strand
ggcagcagcaaccucacua

SEQ ID NO: 587264 - RNA, 19 nt, Homo sapiens
  misc_RNA (1)...(19): siRNA sense strand
gcaccuccacaacaacauc

SEQ ID NO: 587265 - RNA, 19 nt, Homo sapiens
  misc_RNA (1)...(19): siRNA sense strand
ucugcaagauccucaaugc

SEQ ID NO: 587266 - RNA, 19 nt, Homo sapiens
  misc_RNA (1)...(19): siRNA sense strand
gagagccugaucaacaaau

SEQ ID NO: 587267 - RNA, 19 nt, Homo sapiens
  misc_RNA (1)...(19): siRNA sense strand
ccaccggcuuuguguuugg

SEQ ID NO: 587268 - RNA, 19 nt, Homo sapiens
  misc_RNA (1)...(19): siRNA sense strand
agagccugaucaacaaaug

SEQ ID NO: 587269 - RNA, 19 nt, Homo sapiens
  misc_RNA (1)...(19): siRNA sense strand
cuacaggcggguucacguu

SEQ ID NO: 587270 - RNA, 19 nt, Homo sapiens
  misc_RNA (1)...(19): siRNA sense strand
caccggcuuugccuugaau

SEQ ID NO: 587271 - RNA, 19 nt, Homo sapiens
  misc_RNA (1)...(19): siRNA sense strand
cagccaccaucaccaguac

SEQ ID NO: 587272 - RNA, 19 nt, Homo sapiens
  misc_RNA (1)...(19): siRNA sense strand
ccacagcaggugccacaca

SEQ ID NO: 587273 - RNA, 19 nt, Homo sapiens
  misc_RNA (1)...(19): siRNA sense strand
acccuccgguuucaacauu

SEQ ID NO: 587274 - RNA, 19 nt, Homo sapiens
  misc_RNA (1)...(19): siRNA sense strand
gagcgcagcuuccggauca

SEQ ID NO: 587275 - RNA, 19 nt, Homo sapiens
  misc_RNA (1)...(19): siRNA sense strand
caaccucacuaaugccaua

SEQ ID NO: 587276 - RNA, 19 nt, Homo sapiens
  misc_RNA (1)...(19): siRNA sense strand
gcacuggaggguuuaauuu

SEQ ID NO: 587277 - RNA, 19 nt, Homo sapiens
  misc_RNA (1)...(19): siRNA sense strand
gcagcaaccucacuaaugc

SEQ ID NO: 587278 - RNA, 19 nt, Homo sapiens
  misc_RNA (1)...(19): siRNA sense strand
ccuacaagcuggcugagaa

SEQ ID NO: 587279 - RNA, 19 nt, Homo sapiens
  misc_RNA (1)...(19): siRNA sense strand
gcaacaaccacaccugcua

SEQ ID NO: 587280 - RNA, 19 nt, Homo sapiens
  misc_RNA (1)...(19): siRNA sense strand
ggcuuugccuugaauuuaa

SEQ ID NO: 587281 - RNA, 19 nt, Homo sapiens
  misc_RNA (1)...(19): siRNA sense strand
gagcagagcgggaccaucu

SEQ ID NO: 587282 - RNA, 19 nt, Homo sapiens
  misc_RNA (1)...(19): siRNA sense strand
gcacgcugaucgagaaugg

SEQ ID NO: 587283 - RNA, 19 nt, Homo sapiens
  misc_RNA (1)...(19): siRNA sense strand
gcaaagacggcaacaacca

SEQ ID NO: 587284 - RNA, 19 nt, Homo sapiens
  misc_RNA (1)...(19): siRNA sense strand
uggagagccugaucaacaa

SEQ ID NO: 587285 - RNA, 19 nt, Homo sapiens
  misc_RNA (1)...(19): siRNA sense strand
caagcuggcugagaacauc

SEQ ID NO: 587286 - RNA, 19 nt, Homo sapiens
  misc_RNA (1)...(19): siRNA sense strand
ucuggaggcuucucauuca

SEQ ID NO: 587287 - RNA, 19 nt, Homo sapiens
  misc_RNA (1)...(19): siRNA sense strand
gcuuugccuugaauuuaaa

SEQ ID NO: 587288 - RNA, 19 nt, Homo sapiens
  misc_RNA (1)...(19): siRNA sense strand
cggcuuugccuugaauuua

SEQ ID NO: 587289 - RNA, 19 nt, Homo sapiens
  misc_RNA (1)...(19): siRNA sense strand
uggaggaguuggucaagga

SEQ ID NO: 587290 - RNA, 19 nt, Homo sapiens
  misc_RNA (1)...(19): siRNA sense strand
gcagcagcaaccucacuaa

SEQ ID NO: 587291 - RNA, 19 nt, Homo sapiens
  misc_RNA (1)...(19): siRNA sense strand
caacugcuccaaccucauc

SEQ ID NO: 587292 - RNA, 19 nt, Homo sapiens
  misc_RNA (1)...(19): siRNA sense strand
ccggaucaccuuugacuga

SEQ ID NO: 587293 - RNA, 19 nt, Homo sapiens
  misc_RNA (1)...(19): siRNA sense strand
cagcagcaccaccggcuuu

SEQ ID NO: 587294 - RNA, 19 nt, Homo sapiens
  misc_RNA (1)...(19): siRNA sense strand
uggaggaggugaccaaggu

SEQ ID NO: 587295 - RNA, 19 nt, Homo sapiens
  misc_RNA (1)...(19): siRNA sense strand
gauccucaaugcgcacaug

SEQ ID NO: 587296 - RNA, 19 nt, Homo sapiens
  misc_RNA (1)...(19): siRNA sense strand
ggaccaggagcucgacuuc

SEQ ID NO: 587297 - RNA, 19 nt, Homo sapiens
  misc_RNA (1)...(19): siRNA sense strand
ggaacuggauuuucuuugg

SEQ ID NO: 587298 - RNA, 19 nt, Homo sapiens
  misc_RNA (1)...(19): siRNA sense strand
gcacccaccggcuuugugu

SEQ ID NO: 587299 - RNA, 19 nt, Homo sapiens
  misc_RNA (1)...(19): siRNA sense strand
ggagagccugaucaacaaa

SEQ ID NO: 587300 - RNA, 19 nt, Homo sapiens
  misc_RNA (1)...(19): siRNA sense strand
caaauggagccuggagcua

SEQ ID NO: 587301 - RNA, 19 nt, Homo sapiens
  misc_RNA (1)...(19): siRNA sense strand
ccaccggcuuugccuugaa

SEQ ID NO: 587302 - RNA, 19 nt, Homo sapiens
  misc_RNA (1)...(19): siRNA sense strand
cagccucuuugcgucaaua

SEQ ID NO: 587303 - RNA, 19 nt, Homo sapiens
  misc_RNA (1)...(19): siRNA sense strand
gaucgagaauggagaaaag

SEQ ID NO: 587304 - RNA, 19 nt, Homo sapiens
  misc_RNA (1)...(19): siRNA sense strand
ccaccggccuguucucacu

SEQ ID NO: 587305 - RNA, 19 nt, Homo sapiens
  misc_RNA (1)...(19): siRNA sense strand
cccaggaucucaaggacau

SEQ ID NO: 587306 - RNA, 19 nt, Homo sapiens
  misc_RNA (1)...(19): siRNA sense strand
acuggacucucccucugua

SEQ ID NO: 587307 - RNA, 19 nt, Homo sapiens
  misc_RNA (1)...(19): siRNA sense strand
agacgacaggcuucacuuu

SEQ ID NO: 587308 - RNA, 19 nt, Homo sapiens
  misc_RNA (1)...(19): siRNA sense strand
acaggcggguucacguuug

SEQ ID NO: 587309 - RNA, 19 nt, Homo sapiens
  misc_RNA (1)...(19): siRNA sense strand
gcuuccggaucaccuuuga

SEQ ID NO: 587310 - RNA, 19 nt, Homo sapiens
  misc_RNA (1)...(19): siRNA sense strand
ugcaguggaucgaccagaa

SEQ ID NO: 587311 - RNA, 19 nt, Homo sapiens
  misc_RNA (1)...(19): siRNA sense strand
cuggagagccugaucaaca

SEQ ID NO: 587312 - RNA, 19 nt, Homo sapiens
  misc_RNA (1)...(19): siRNA sense strand
ggcacuggaggguuuaauu

SEQ ID NO: 587313 - RNA, 19 nt, Homo sapiens
  misc_RNA (1)...(19): siRNA sense strand
aauggagccuggagcuaga

SEQ ID NO: 587314 - RNA, 19 nt, Homo sapiens
  misc_RNA (1)...(19): siRNA sense strand
gcugaucgagaauggagaa

SEQ ID NO: 587315 - RNA, 19 nt, Homo sapiens
  misc_RNA (1)...(19): siRNA sense strand
ugagcccacuggaggaguu

SEQ ID NO: 587316 - RNA, 19 nt, Homo sapiens
  misc_RNA (1)...(19): siRNA sense strand
caucuggaggcuucucauu

SEQ ID NO: 587317 - RNA, 19 nt, Homo sapiens
  misc_RNA (1)...(19): siRNA sense strand
cagcagcaaccucacuaau

SEQ ID NO: 587318 - RNA, 19 nt, Homo sapiens
  misc_RNA (1)...(19): siRNA sense strand
gcagagcgggaccaucuac

SEQ ID NO: 587319 - RNA, 19 nt, Homo sapiens
  misc_RNA (1)...(19): siRNA sense strand
accaggagcucgacuucau

SEQ ID NO: 587320 - RNA, 19 nt, Homo sapiens
  misc_RNA (1)...(19): siRNA sense strand
ggaacagcgacucuugcuu

SEQ ID NO: 587321 - RNA, 19 nt, Homo sapiens
  misc_RNA (1)...(19): siRNA sense strand
ggcagcagcaaccucacua

SEQ ID NO: 587322 - RNA, 19 nt, Homo sapiens
  misc_RNA (1)...(19): siRNA sense strand
gcaccuccacaacaacauc

SEQ ID NO: 587323 - RNA, 19 nt, Homo sapiens
  misc_RNA (1)...(19): siRNA sense strand
ucugcaagauccucaaugc

SEQ ID NO: 587324 - RNA, 19 nt, Homo sapiens
  misc_RNA (1)...(19): siRNA sense strand
gagagccugaucaacaaau

SEQ ID NO: 587325 - RNA, 19 nt, Homo sapiens
  misc_RNA (1)...(19): siRNA sense strand
ccaccggcuuuguguuugg

SEQ ID NO: 587326 - RNA, 19 nt, Homo sapiens
  misc_RNA (1)...(19): siRNA sense strand
agagccugaucaacaaaug

SEQ ID NO: 587327 - RNA, 19 nt, Homo sapiens
  misc_RNA (1)...(19): siRNA sense strand
cuacaggcggguucacguu

SEQ ID NO: 587328 - RNA, 19 nt, Homo sapiens
  misc_RNA (1)...(19): siRNA sense strand
caccggcuuugccuugaau

SEQ ID NO: 587329 - RNA, 19 nt, Homo sapiens
  misc_RNA (1)...(19): siRNA sense strand
cagccaccaucaccaguac

SEQ ID NO: 587330 - RNA, 19 nt, Homo sapiens
  misc_RNA (1)...(19): siRNA sense strand
ccacagcaggugccacaca

SEQ ID NO: 587331 - RNA, 19 nt, Homo sapiens
  misc_RNA (1)...(19): siRNA sense strand
acccuccgguuucaacauu

SEQ ID NO: 587332 - RNA, 19 nt, Homo sapiens
  misc_RNA (1)...(19): siRNA sense strand
gagcgcagcuuccggauca

SEQ ID NO: 587333 - RNA, 19 nt, Homo sapiens
  misc_RNA (1)...(19): siRNA sense strand
caaccucacuaaugccaua

SEQ ID NO: 587334 - RNA, 19 nt, Homo sapiens
  misc_RNA (1)...(19): siRNA sense strand
gcacuggaggguuuaauuu

SEQ ID NO: 587335 - RNA, 19 nt, Homo sapiens
  misc_RNA (1)...(19): siRNA sense strand
gcagcaaccucacuaaugc

SEQ ID NO: 587336 - RNA, 19 nt, Homo sapiens
  misc_RNA (1)...(19): siRNA sense strand
ccuacaagcuggcugagaa

SEQ ID NO: 587337 - RNA, 19 nt, Homo sapiens
  misc_RNA (1)...(19): siRNA sense strand
gcaacaaccacaccugcua

SEQ ID NO: 587338 - RNA, 19 nt, Homo sapiens
  misc_RNA (1)...(19): siRNA sense strand
ggcuuugccuugaauuuaa

SEQ ID NO: 587339 - RNA, 19 nt, Homo sapiens
  misc_RNA (1)...(19): siRNA sense strand
gagcagagcgggaccaucu

SEQ ID NO: 587340 - RNA, 19 nt, Homo sapiens
  misc_RNA (1)...(19): siRNA sense strand
gcacgcugaucgagaaugg

SEQ ID NO: 587341 - RNA, 19 nt, Homo sapiens
  misc_RNA (1)...(19): siRNA sense strand
gcaaagacggcaacaacca

SEQ ID NO: 587342 - RNA, 19 nt, Homo sapiens
  misc_RNA (1)...(19): siRNA sense strand
uggagagccugaucaacaa

SEQ ID NO: 587343 - RNA, 19 nt, Homo sapiens
  misc_RNA (1)...(19): siRNA sense strand
caagcuggcugagaacauc

SEQ ID NO: 587344 - RNA, 19 nt, Homo sapiens
  misc_RNA (1)...(19): siRNA sense strand
ucuggaggcuucucauuca

SEQ ID NO: 587345 - RNA, 19 nt, Homo sapiens
  misc_RNA (1)...(19): siRNA sense strand
gcuuugccuugaauuuaaa

SEQ ID NO: 587346 - RNA, 19 nt, Homo sapiens
  misc_RNA (1)...(19): siRNA sense strand
cggcuuugccuugaauuua

SEQ ID NO: 587347 - RNA, 19 nt, Homo sapiens
  misc_RNA (1)...(19): siRNA sense strand
uggaggaguuggucaagga

SEQ ID NO: 587348 - RNA, 19 nt, Homo sapiens
  misc_RNA (1)...(19): siRNA sense strand
gcagcagcaaccucacuaa

SEQ ID NO: 587349 - RNA, 19 nt, Homo sapiens
  misc_RNA (1)...(19): siRNA sense strand
caacugcuccaaccucauc

SEQ ID NO: 587350 - RNA, 19 nt, Homo sapiens
  misc_RNA (1)...(19): siRNA sense strand
ccggaucaccuuugacuga

SEQ ID NO: 587351 - RNA, 19 nt, Homo sapiens
  misc_RNA (1)...(19): siRNA sense strand
cagcagcaccaccggcuuu

SEQ ID NO: 587352 - RNA, 19 nt, Homo sapiens
  misc_RNA (1)...(19): siRNA sense strand
uggaggaggugaccaaggu

SEQ ID NO: 587353 - RNA, 19 nt, Homo sapiens
  misc_RNA (1)...(19): siRNA sense strand
gauccucaaugcgcacaug

SEQ ID NO: 587354 - RNA, 19 nt, Homo sapiens
  misc_RNA (1)...(19): siRNA sense strand
ggaccaggagcucgacuuc

SEQ ID NO: 587355 - RNA, 19 nt, Homo sapiens
  misc_RNA (1)...(19): siRNA sense strand
ggaacuggauuuucuuugg

SEQ ID NO: 587356 - RNA, 19 nt, Homo sapiens
  misc_RNA (1)...(19): siRNA sense strand
gcacccaccggcuuugugu

SEQ ID NO: 587357 - RNA, 19 nt, Homo sapiens
  misc_RNA (1)...(19): siRNA sense strand
ggagagccugaucaacaaa

SEQ ID NO: 587358 - RNA, 19 nt, Homo sapiens
  misc_RNA (1)...(19): siRNA sense strand
caaauggagccuggagcua

SEQ ID NO: 587359 - RNA, 19 nt, Homo sapiens
  misc_RNA (1)...(19): siRNA sense strand
ccaccggcuuugccuugaa

SEQ ID NO: 587360 - RNA, 19 nt, Homo sapiens
  misc_RNA (1)...(19): siRNA sense strand
cagccucuuugcgucaaua

SEQ ID NO: 587361 - RNA, 19 nt, Homo sapiens
  misc_RNA (1)...(19): siRNA sense strand
gaucgagaauggagaaaag

SEQ ID NO: 587362 - RNA, 19 nt, Homo sapiens
  misc_RNA (1)...(19): siRNA sense strand
ccaccggccuguucucacu

SEQ ID NO: 587363 - RNA, 19 nt, Homo sapiens
  misc_RNA (1)...(19): siRNA sense strand
cccaggaucucaaggacau

SEQ ID NO: 587364 - RNA, 19 nt, Homo sapiens
  misc_RNA (1)...(19): siRNA sense strand
acuggacucucccucugua

SEQ ID NO: 587365 - RNA, 19 nt, Homo sapiens
  misc_RNA (1)...(19): siRNA sense strand
agacgacaggcuucacuuu

SEQ ID NO: 587366 - RNA, 19 nt, Homo sapiens
  misc_RNA (1)...(19): siRNA sense strand
acaggcggguucacguuug

SEQ ID NO: 587367 - RNA, 19 nt, Homo sapiens
  misc_RNA (1)...(19): siRNA sense strand
gcuuccggaucaccuuuga

SEQ ID NO: 587368 - RNA, 19 nt, Homo sapiens
  misc_RNA (1)...(19): siRNA sense strand
ugcaguggaucgaccagaa

SEQ ID NO: 587369 - RNA, 19 nt, Homo sapiens
  misc_RNA (1)...(19): siRNA sense strand
cuggagagccugaucaaca

SEQ ID NO: 587370 - RNA, 19 nt, Homo sapiens
  misc_RNA (1)...(19): siRNA sense strand
ggcacuggaggguuuaauu

SEQ ID NO: 587371 - RNA, 19 nt, Homo sapiens
  misc_RNA (1)...(19): siRNA sense strand
aauggagccuggagcuaga

SEQ ID NO: 587372 - RNA, 19 nt, Homo sapiens
  misc_RNA (1)...(19): siRNA sense strand
gcugaucgagaauggagaa

SEQ ID NO: 587373 - RNA, 19 nt, Homo sapiens
  misc_RNA (1)...(19): siRNA sense strand
ugagcccacuggaggaguu

SEQ ID NO: 587374 - RNA, 19 nt, Homo sapiens
  misc_RNA (1)...(19): siRNA sense strand
caucuggaggcuucucauu

SEQ ID NO: 587375 - RNA, 19 nt, Homo sapiens
  misc_RNA (1)...(19): siRNA sense strand
cagcagcaaccucacuaau

SEQ ID NO: 587376 - RNA, 19 nt, Homo sapiens
  misc_RNA (1)...(19): siRNA sense strand
gcagagcgggaccaucuac

SEQ ID NO: 587377 - RNA, 19 nt, Homo sapiens
  misc_RNA (1)...(19): siRNA sense strand
accaggagcucgacuucau

SEQ ID NO: 587378 - RNA, 19 nt, Homo sapiens
  misc_RNA (1)...(19): siRNA sense strand
ggaacagcgacucuugcuu

SEQ ID NO: 587379 - RNA, 19 nt, Homo sapiens
  misc_RNA (1)...(19): siRNA sense strand
ggcagcagcaaccucacua

SEQ ID NO: 587380 - RNA, 19 nt, Homo sapiens
  misc_RNA (1)...(19): siRNA sense strand
gcaccuccacaacaacauc

SEQ ID NO: 587381 - RNA, 19 nt, Homo sapiens
  misc_RNA (1)...(19): siRNA sense strand
ucugcaagauccucaaugc

SEQ ID NO: 587382 - RNA, 19 nt, Homo sapiens
  misc_RNA (1)...(19): siRNA sense strand
gagagccugaucaacaaau

SEQ ID NO: 587383 - RNA, 19 nt, Homo sapiens
  misc_RNA (1)...(19): siRNA sense strand
ccaccggcuuuguguuugg

SEQ ID NO: 587384 - RNA, 19 nt, Homo sapiens
  misc_RNA (1)...(19): siRNA sense strand
agagccugaucaacaaaug

SEQ ID NO: 587385 - RNA, 19 nt, Homo sapiens
  misc_RNA (1)...(19): siRNA sense strand
cuacaggcggguucacguu

SEQ ID NO: 587386 - RNA, 19 nt, Homo sapiens
  misc_RNA (1)...(19): siRNA sense strand
caccggcuuugccuugaau

SEQ ID NO: 587387 - RNA, 19 nt, Homo sapiens
  misc_RNA (1)...(19): siRNA sense strand
cagccaccaucaccaguac

SEQ ID NO: 587388 - RNA, 19 nt, Homo sapiens
  misc_RNA (1)...(19): siRNA sense strand
ccacagcaggugccacaca

SEQ ID NO: 587389 - RNA, 19 nt, Homo sapiens
  misc_RNA (1)...(19): siRNA sense strand
acccuccgguuucaacauu

SEQ ID NO: 587390 - RNA, 19 nt, Homo sapiens
  misc_RNA (1)...(19): siRNA sense strand
guacagaacuccacauaua

SEQ ID NO: 587391 - RNA, 19 nt, Homo sapiens
  misc_RNA (1)...(19): siRNA sense strand
gaagccaacuccuuugaaa

SEQ ID NO: 587392 - RNA, 19 nt, Homo sapiens
  misc_RNA (1)...(19): siRNA sense strand
ggacaaaccuucagaucgu

SEQ ID NO: 587393 - RNA, 19 nt, Homo sapiens
  misc_RNA (1)...(19): siRNA sense strand
caacauagcucaggaucug

SEQ ID NO: 587394 - RNA, 19 nt, Homo sapiens
  misc_RNA (1)...(19): siRNA sense strand
gaugggagccuagcuaaua

SEQ ID NO: 587395 - RNA, 19 nt, Homo sapiens
  misc_RNA (1)...(19): siRNA sense strand
ggcaacagcugaacagaug

SEQ ID NO: 587396 - RNA, 19 nt, Homo sapiens
  misc_RNA (1)...(19): siRNA sense strand
gaacuggcaucaaauacuc

SEQ ID NO: 587397 - RNA, 19 nt, Homo sapiens
  misc_RNA (1)...(19): siRNA sense strand
cagcagaugucacaggauu

SEQ ID NO: 587398 - RNA, 19 nt, Homo sapiens
  misc_RNA (1)...(19): siRNA sense strand
acacuggucuucccuacua

SEQ ID NO: 587399 - RNA, 19 nt, Homo sapiens
  misc_RNA (1)...(19): siRNA sense strand
ggaagggaauucagacaca

SEQ ID NO: 587400 - RNA, 19 nt, Homo sapiens
  misc_RNA (1)...(19): siRNA sense strand
uaagugagccuuugaauac

SEQ ID NO: 587401 - RNA, 19 nt, Homo sapiens
  misc_RNA (1)...(19): siRNA sense strand
uaauggagaugugaacaaa

SEQ ID NO: 587402 - RNA, 19 nt, Homo sapiens
  misc_RNA (1)...(19): siRNA sense strand
ccacuggucuaccugauau

SEQ ID NO: 587403 - RNA, 19 nt, Homo sapiens
  misc_RNA (1)...(19): siRNA sense strand
gcacaaccaguaccucgua

SEQ ID NO: 587404 - RNA, 19 nt, Homo sapiens
  misc_RNA (1)...(19): siRNA sense strand
gaucaucgcaggcaccaaa
